United States Patent Application Publication US 2008/0113351 A1 - sequence listing, part 15

SEQ ID NO: 353525 - DNA, 19 bp, Homo sapiens
  siRNA target sequence for SEC31L2 (NM_015490.3,548-566).
gggatctgaataacttgaa

SEQ ID NO: 353526 - DNA, 19 bp, Homo sapiens
  siRNA target sequence for SEC31L2 (NM_015490.3,633-651).
ccggcaagcccaacacatt

SEQ ID NO: 353527 - DNA, 19 bp, Homo sapiens
  siRNA target sequence for SEC31L2 (NM_015490.3,635-653).
ggcaagcccaacacattct

SEQ ID NO: 353528 - DNA, 19 bp, Homo sapiens
  siRNA target sequence for SEC31L2 (NM_015490.3,687-705).
gtgggatctcaggaagaat

SEQ ID NO: 353529 - DNA, 19 bp, Homo sapiens
  siRNA target sequence for SEC31L2 (NM_015490.3,689-707).
gggatctcaggaagaatga

SEQ ID NO: 353530 - DNA, 19 bp, Homo sapiens
  siRNA target sequence for SEC31L2 (NM_015490.3,759-777).
ggcctggcatcctgacata

SEQ ID NO: 353531 - DNA, 19 bp, Homo sapiens
  siRNA target sequence for SEC31L2 (NM_015490.3,980-998).
gtgaggtggtatataagct

SEQ ID NO: 353532 - DNA, 19 bp, Homo sapiens
  siRNA target sequence for SEC31L2 (NM_015490.3,1010-1028).
gcagctggtgctttgatgt

SEQ ID NO: 353533 - DNA, 19 bp, Homo sapiens
  siRNA target sequence for SEC31L2 (NM_015490.3,1078-1096).
ggctggatcagtttgtact

SEQ ID NO: 353534 - DNA, 19 bp, Homo sapiens
  siRNA target sequence for SEC31L2 (NM_015490.3,1116-1134).
ggaagtccagcatatgaga

SEQ ID NO: 353535 - DNA, 19 bp, Homo sapiens
  siRNA target sequence for SEC31L2 (NM_015490.3,1206-1224).
ggcacaagcaccactgata

SEQ ID NO: 353536 - DNA, 19 bp, Homo sapiens
  siRNA target sequence for SEC31L2 (NM_015490.3,1219-1237).
ctgatacctcccctgaaaa

SEQ ID NO: 353537 - DNA, 19 bp, Homo sapiens
  siRNA target sequence for SEC31L2 (NM_015490.3,1240-1258).
ccccccaaatggattagaa

SEQ ID NO: 353538 - DNA, 19 bp, Homo sapiens
  siRNA target sequence for SEC31L2 (NM_015490.3,1259-1277).
gaccaacaggtgtttcatt

SEQ ID NO: 353539 - DNA, 19 bp, Homo sapiens
  siRNA target sequence for SEC31L2 (NM_015490.3,1376-1394).
ccacagaatctgaattcct

SEQ ID NO: 353540 - DNA, 19 bp, Homo sapiens
  siRNA target sequence for SEC31L2 (NM_015490.3,1419-1437).
ggccttgggatcaggaaat

SEQ ID NO: 353541 - DNA, 19 bp, Homo sapiens
  siRNA target sequence for SEC31L2 (NM_015490.3,1422-1440).
cttgggatcaggaaatcta

SEQ ID NO: 353542 - DNA, 19 bp, Homo sapiens
  siRNA target sequence for SEC31L2 (NM_015490.3,1427-1445).
gatcaggaaatctactgaa

SEQ ID NO: 353543 - DNA, 19 bp, Homo sapiens
  siRNA target sequence for SEC31L2 (NM_015490.3,1458-1476).
caagagccagcaagcttta

SEQ ID NO: 353544 - DNA, 19 bp, Homo sapiens
  siRNA target sequence for SEC31L2 (NM_015490.3,1471-1489).
gctttactgcaaagtgaaa

SEQ ID NO: 353545 - DNA, 19 bp, Homo sapiens
  siRNA target sequence for SEC31L2 (NM_015490.3,1551-1569).
gcttttaggatacagtaaa

SEQ ID NO: 353546 - DNA, 19 bp, Homo sapiens
  siRNA target sequence for SEC31L2 (NM_015490.3,1588-1606).
gtggccacatggttgaaga

SEQ ID NO: 353547 - DNA, 19 bp, Homo sapiens
  siRNA target sequence for SEC31L2 (NM_015490.3,1766-1784).
gggagatccccatcacaaa

SEQ ID NO: 353548 - DNA, 19 bp, Homo sapiens
  siRNA target sequence for SEC31L2 (NM_015490.3,1767-1785).
ggagatccccatcacaaaa

SEQ ID NO: 353549 - DNA, 19 bp, Homo sapiens
  siRNA target sequence for SEC31L2 (NM_015490.3,1773-1791).
ccccatcacaaaagatatt

SEQ ID NO: 353550 - DNA, 19 bp, Homo sapiens
  siRNA target sequence for SEC31L2 (NM_015490.3,2009-2027).
gtacctgtagcctgaagaa

SEQ ID NO: 353551 - DNA, 19 bp, Homo sapiens
  siRNA target sequence for SEC31L2 (NM_015490.3,2146-2164).
gccagactctgttatgtgt

SEQ ID NO: 353552 - DNA, 19 bp, Homo sapiens
  siRNA target sequence for SEC31L2 (NM_015490.3,2427-2445).
gctaagagatcggcttttt

SEQ ID NO: 353553 - DNA, 19 bp, Homo sapiens
  siRNA target sequence for SEC31L2 (NM_015490.3,2513-2531).
gagctaccctccactctaa

SEQ ID NO: 353554 - DNA, 19 bp, Homo sapiens
  siRNA target sequence for SEC31L2 (NM_015490.3,2524-2542).
cactctaaagagacatcat

SEQ ID NO: 353555 - DNA, 19 bp, Homo sapiens
  siRNA target sequence for SEC31L2 (NM_015490.3,2742-2760).
ggtaaggcctgcttcatct

SEQ ID NO: 353556 - DNA, 19 bp, Homo sapiens
  siRNA target sequence for SEC31L2 (NM_015490.3,3144-3162).
gcccccagcaccaattact

SEQ ID NO: 353557 - DNA, 19 bp, Homo sapiens
  siRNA target sequence for SEC31L2 (NM_015490.3,3286-3304).
ccacctgagaagatggaaa

SEQ ID NO: 353558 - DNA, 19 bp, Homo sapiens
  siRNA target sequence for SEC31L2 (NM_015490.3,3420-3438).
ccagcgtctggagtatcta

SEQ ID NO: 353559 - DNA, 19 bp, Homo sapiens
  siRNA target sequence for SEC31L2 (NM_015490.3,3421-3439).
cagcgtctggagtatctat

SEQ ID NO: 353560 - DNA, 19 bp, Homo sapiens
  siRNA target sequence for SEC31L2 (NM_015490.3,3423-3441).
gcgtctggagtatctatat

SEQ ID NO: 353561 - DNA, 19 bp, Homo sapiens
  siRNA target sequence for SEC31L2 (NM_015490.3,3425-3443).
gtctggagtatctatatga

SEQ ID NO: 353562 - DNA, 19 bp, Homo sapiens
  siRNA target sequence for KIAA1518 (NM_015493.3,1213-1231).
gcggcagctcacagtacaa

SEQ ID NO: 353563 - DNA, 19 bp, Homo sapiens
  siRNA target sequence for KIAA1518 (NM_015493.3,1515-1533).
cggtccgcgtggatacagt

SEQ ID NO: 353564 - DNA, 19 bp, Homo sapiens
  siRNA target sequence for KIAA1518 (NM_015493.3,1728-1746).
ctaccagcaacgtccatat

SEQ ID NO: 353565 - DNA, 19 bp, Homo sapiens
  siRNA target sequence for KIAA1518 (NM_015493.3,1731-1749).
ccagcaacgtccatatggt

SEQ ID NO: 353566 - DNA, 19 bp, Homo sapiens
  siRNA target sequence for KIAA1518 (NM_015493.3,1741-1759).
ccatatggtgaagaagatt

SEQ ID NO: 353567 - DNA, 19 bp, Homo sapiens
  siRNA target sequence for KIAA1518 (NM_015493.3,1971-1989).
cggcaggcgtgcgatctat

SEQ ID NO: 353568 - DNA, 19 bp, Homo sapiens
  siRNA target sequence for KIAA1518 (NM_015493.3,1973-1991).
gcaggcgtgcgatctatca

SEQ ID NO: 353569 - DNA, 19 bp, Homo sapiens
  siRNA target sequence for KIAA1518 (NM_015493.3,2270-2288).
ggggcatcaggatcaaaca

SEQ ID NO: 353570 - DNA, 19 bp, Homo sapiens
  siRNA target sequence for KIAA1518 (NM_015493.3,2642-2660).
gctggctacagccctatta

SEQ ID NO: 353571 - DNA, 19 bp, Homo sapiens
  siRNA target sequence for KIAA1518 (NM_015493.3,2643-2661).
ctggctacagccctattat

SEQ ID NO: 353572 - DNA, 19 bp, Homo sapiens
  siRNA target sequence for KIAA1518 (NM_015493.3,2722-2740).
ccggcttggcaacatcaat

SEQ ID NO: 353573 - DNA, 19 bp, Homo sapiens
  siRNA target sequence for KIAA1518 (NM_015493.3,3043-3061).
ctcgtttgccccaatgtca

SEQ ID NO: 353574 - DNA, 19 bp, Homo sapiens
  siRNA target sequence for DKFZP564G2022 (NM_015497.2,96-114).
ccgtcaccactgtcgtttt

SEQ ID NO: 353575 - DNA, 19 bp, Homo sapiens
  siRNA target sequence for DKFZP564G2022 (NM_015497.2,97-115).
cgtcaccactgtcgttttt

SEQ ID NO: 353576 - DNA, 19 bp, Homo sapiens
  siRNA target sequence for DKFZP564G2022 (NM_015497.2,141-159).
gctgccgaccggtccaaat

SEQ ID NO: 353577 - DNA, 19 bp, Homo sapiens
  siRNA target sequence for DKFZP564G2022 (NM_015497.2,169-187).
cgataccgtcggggaaaaa

SEQ ID NO: 353578 - DNA, 19 bp, Homo sapiens
  siRNA target sequence for DKFZP564G2022 (NM_015497.2,170-188).
gataccgtcggggaaaaat

SEQ ID NO: 353579 - DNA, 19 bp, Homo sapiens
  siRNA target sequence for DKFZP564G2022 (NM_015497.2,223-241).
ccactatcttcctgaagtt

SEQ ID NO: 353580 - DNA, 19 bp, Homo sapiens
  siRNA target sequence for DKFZP564G2022 (NM_015497.2,258-276).
gacctgtctttgaatataa

SEQ ID NO: 353581 - DNA, 19 bp, Homo sapiens
  siRNA target sequence for DKFZP564G2022 (NM_015497.2,261-279).
ctgtctttgaatataacct

SEQ ID NO: 353582 - DNA, 19 bp, Homo sapiens
  siRNA target sequence for DKFZP564G2022 (NM_015497.2,285-303).
ctgaaaagcgctgattgtt

SEQ ID NO: 353583 - DNA, 19 bp, Homo sapiens
  siRNA target sequence for DKFZP564G2022 (NM_015497.2,292-310).
gcgctgattgttacaatga

SEQ ID NO: 353584 - DNA, 19 bp, Homo sapiens
  siRNA target sequence for DKFZP564G2022 (NM_015497.2,293-311).
cgctgattgttacaatgaa

SEQ ID NO: 353585 - DNA, 19 bp, Homo sapiens
  siRNA target sequence for DKFZP564G2022 (NM_015497.2,294-312).
gctgattgttacaatgaaa

SEQ ID NO: 353586 - DNA, 19 bp, Homo sapiens
  siRNA target sequence for DKFZP564G2022 (NM_015497.2,295-313).
ctgattgttacaatgaaat

SEQ ID NO: 353587 - DNA, 19 bp, Homo sapiens
  siRNA target sequence for DKFZP564G2022 (NM_015497.2,370-388).
gaggcttgtctgggaaata

SEQ ID NO: 353588 - DNA, 19 bp, Homo sapiens
  siRNA target sequence for DKFZP564G2022 (NM_015497.2,374-392).
cttgtctgggaaatatcaa

SEQ ID NO: 353589 - DNA, 19 bp, Homo sapiens
  siRNA target sequence for DKFZP564G2022 (NM_015497.2,461-479).
gcatcgactgcctctttta

SEQ ID NO: 353590 - DNA, 19 bp, Homo sapiens
  siRNA target sequence for DKFZP564G2022 (NM_015497.2,501-519).
gagaatggaacaaacctta

SEQ ID NO: 353591 - DNA, 19 bp, Homo sapiens
  siRNA target sequence for DKFZP564G2022 (NM_015497.2,507-525).
ggaacaaaccttaccttta

SEQ ID NO: 353592 - DNA, 19 bp, Homo sapiens
  siRNA target sequence for DKFZP564G2022 (NM_015497.2,538-556).
ccgcaatgcatgaaccatt

SEQ ID NO: 353593 - DNA, 19 bp, Homo sapiens
  siRNA target sequence for DKFZP564G2022 (NM_015497.2,546-564).
catgaaccattgcaaactt

SEQ ID NO: 353594 - DNA, 19 bp, Homo sapiens
  siRNA target sequence for DKFZP564G2022 (NM_015497.2,565-583).
ggcaagatgcaccatacat

SEQ ID NO: 353595 - DNA, 19 bp, Homo sapiens
  siRNA target sequence for DKFZP564G2022 (NM_015497.2,567-585).
caagatgcaccatacattt

SEQ ID NO: 353596 - DNA, 19 bp, Homo sapiens
  siRNA target sequence for DKFZP564G2022 (NM_015497.2,639-657).
ctgagtaatctttttacca

SEQ ID NO: 353597 - DNA, 19 bp, Homo sapiens
  siRNA target sequence for DKFZP564G2022 (NM_015497.2,669-687).
gtgaagggtccctatgaat

SEQ ID NO: 353598 - DNA, 19 bp, Homo sapiens
  siRNA target sequence for DKFZP564G2022 (NM_015497.2,689-707).
cctcacacttgaagactat

SEQ ID NO: 353599 - DNA, 19 bp, Homo sapiens
  siRNA target sequence for DKFZP564G2022 (NM_015497.2,702-720).
gactatcccttgatgattt

SEQ ID NO: 353600 - DNA, 19 bp, Homo sapiens
  siRNA target sequence for DKFZP564G2022 (NM_015497.2,708-726).
cccttgatgatttttttca

SEQ ID NO: 353601 - DNA, 19 bp, Homo sapiens
  siRNA target sequence for DKFZP564G2022 (NM_015497.2,790-808).
ggagagatctcctgagaat

SEQ ID NO: 353602 - DNA, 19 bp, Homo sapiens
  siRNA target sequence for DKFZP564G2022 (NM_015497.2,863-881).
ctatgcggaatttcagaat

SEQ ID NO: 353603 - DNA, 19 bp, Homo sapiens
  siRNA target sequence for DKFZP564G2022 (NM_015497.2,884-902).
ccgatacaaaggagaatct

SEQ ID NO: 353604 - DNA, 19 bp, Homo sapiens
  siRNA target sequence for DKFZP564G2022 (NM_015497.2,958-976).
ctcgaaccctggtcatcat

SEQ ID NO: 353605 - DNA, 19 bp, Homo sapiens
  siRNA target sequence for DKFZP564G2022 (NM_015497.2,1021-1039).
ctcttcataaggttgtagt

SEQ ID NO: 353606 - DNA, 19 bp, Homo sapiens
  siRNA target sequence for DKFZP564G2022 (NM_015497.2,1041-1059).
gcaggagccctctatcttt

SEQ ID NO: 353607 - DNA, 19 bp, Homo sapiens
  siRNA target sequence for DKFZP564G2022 (NM_015497.2,1042-1060).
caggagccctctatctttt

SEQ ID NO: 353608 - DNA, 19 bp, Homo sapiens
  siRNA target sequence for DKFZP564G2022 (NM_015497.2,1044-1062).
ggagccctctatcttttgt

SEQ ID NO: 353609 - DNA, 19 bp, Homo sapiens
  siRNA target sequence for DKFZP564G2022 (NM_015497.2,1045-1063).
gagccctctatcttttgtt

SEQ ID NO: 353610 - DNA, 19 bp, Homo sapiens
  siRNA target sequence for DKFZP564G2022 (NM_015497.2,1154-1172).
cttgtgctggtggatattt

SEQ ID NO: 353611 - DNA, 19 bp, Homo sapiens
  siRNA target sequence for DKFZP564G2022 (NM_015497.2,1157-1175).
gtgctggtggatatttatt

SEQ ID NO: 353612 - DNA, 19 bp, Homo sapiens
  siRNA target sequence for DKFZP564G2022 (NM_015497.2,1177-1195).
gcctgactcaaacaatgaa

SEQ ID NO: 353613 - DNA, 19 bp, Homo sapiens
  siRNA target sequence for DKFZP564G2022 (NM_015497.2,1210-1228).
ggaggaacattgtaaaact

SEQ ID NO: 353614 - DNA, 19 bp, Homo sapiens
  siRNA target sequence for DKFZP564G2022 (NM_015497.2,1265-1283).
ggcagtggcagcatccatt

SEQ ID NO: 353615 - DNA, 19 bp, Homo sapiens
  siRNA target sequence for DKFZP564G2022 (NM_015497.2,1269-1287).
gtggcagcatccattgtgt

SEQ ID NO: 353616 - DNA, 19 bp, Homo sapiens
  siRNA target sequence for DKFZP564G2022 (NM_015497.2,1271-1289).
ggcagcatccattgtgttt

SEQ ID NO: 353617 - DNA, 19 bp, Homo sapiens
  siRNA target sequence for DKFZP564G2022 (NM_015497.2,1272-1290).
gcagcatccattgtgttta

SEQ ID NO: 353618 - DNA, 19 bp, Homo sapiens
  siRNA target sequence for DKFZP566B183 (NM_015509.2,188-206).
ggtcgcctccgaatcactt

SEQ ID NO: 353619 - DNA, 19 bp, Homo sapiens
  siRNA target sequence for DKFZP566B183 (NM_015509.2,191-209).
cgcctccgaatcacttcaa

SEQ ID NO: 353620 - DNA, 19 bp, Homo sapiens
  siRNA target sequence for DKFZP566B183 (NM_015509.2,192-210).
gcctccgaatcacttcaaa

SEQ ID NO: 353621 - DNA, 19 bp, Homo sapiens
  siRNA target sequence for DKFZP566B183 (NM_015509.2,193-211).
cctccgaatcacttcaaaa

SEQ ID NO: 353622 - DNA, 19 bp, Homo sapiens
  siRNA target sequence for DKFZP566B183 (NM_015509.2,212-230).
gggaagactgcctatatca

SEQ ID NO: 353623 - DNA, 19 bp, Homo sapiens
  siRNA target sequence for DKFZP566B183 (NM_015509.2,213-231).
ggaagactgcctatatcaa

SEQ ID NO: 353624 - DNA, 19 bp, Homo sapiens
  siRNA target sequence for DKFZP566B183 (NM_015509.2,264-282).
ctcaggcaccagtagaaca

SEQ ID NO: 353625 - DNA, 19 bp, Homo sapiens
  siRNA target sequence for DKFZP566B183 (NM_015509.2,299-317).
gtggagacggtgacagatt

SEQ ID NO: 353626 - DNA, 19 bp, Homo sapiens
  siRNA target sequence for DKFZP566B183 (NM_015509.2,301-319).
ggagacggtgacagattct

SEQ ID NO: 353627 - DNA, 19 bp, Homo sapiens
  siRNA target sequence for DKFZP566B183 (NM_015509.2,302-320).
gagacggtgacagattcta

SEQ ID NO: 353628 - DNA, 19 bp, Homo sapiens
  siRNA target sequence for DKFZP566B183 (NM_015509.2,318-336).
ctagccgctactttgtaat

SEQ ID NO: 353629 - DNA, 19 bp, Homo sapiens
  siRNA target sequence for DKFZP566B183 (NM_015509.2,354-372).
ctgggcgcagtgctttcat

SEQ ID NO: 353630 - DNA, 19 bp, Homo sapiens
  siRNA target sequence for DKFZP566B183 (NM_015509.2,395-413).
ggagatgccttcgacttta

SEQ ID NO: 353631 - DNA, 19 bp, Homo sapiens
  siRNA target sequence for DKFZP566B183 (NM_015509.2,396-414).
gagatgccttcgactttaa

SEQ ID NO: 353632 - DNA, 19 bp, Homo sapiens
  siRNA target sequence for DKFZP566B183 (NM_015509.2,401-419).
gccttcgactttaatgtct

SEQ ID NO: 353633 - DNA, 19 bp, Homo sapiens
  siRNA target sequence for DKFZP566B183 (NM_015509.2,449-467).
caggaatctgagatttcca

SEQ ID NO: 353634 - DNA, 19 bp, Homo sapiens
  siRNA target sequence for DKFZP566B183 (NM_015509.2,460-478).
gatttccaaggaatctcaa

SEQ ID NO: 353635 - DNA, 19 bp, Homo sapiens
  siRNA target sequence for DKFZP566B183 (NM_015509.2,465-483).
ccaaggaatctcaagaaat

SEQ ID NO: 353636 - DNA, 19 bp, Homo sapiens
  siRNA target sequence for DKFZP566B183 (NM_015509.2,518-536).
gaaggacaaaccatcaagt

SEQ ID NO: 353637 - DNA, 19 bp, Homo sapiens
  siRNA target sequence for DKFZP566B183 (NM_015509.2,521-539).
ggacaaaccatcaagttgt

SEQ ID NO: 353638 - DNA, 19 bp, Homo sapiens
  siRNA target sequence for DKFZP566B183 (NM_015509.2,535-553).
gttgtgtatcgggaacatt

SEQ ID NO: 353639 - DNA, 19 bp, Homo sapiens
  siRNA target sequence for DKFZP566B183 (NM_015509.2,538-556).
gtgtatcgggaacattaca

SEQ ID NO: 353640 - DNA, 19 bp, Homo sapiens
  siRNA target sequence for DKFZP566B183 (NM_015509.2,692-710).
ccacccattccgaaatcta

SEQ ID NO: 353641 - DNA, 19 bp, Homo sapiens
  siRNA target sequence for DKFZP566B183 (NM_015509.2,693-711).
cacccattccgaaatctaa

SEQ ID NO: 353642 - DNA, 19 bp, Homo sapiens
  siRNA target sequence for DKFZP566B183 (NM_015509.2,697-715).
cattccgaaatctaaccat

SEQ ID NO: 353643 - DNA, 19 bp, Homo sapiens
  siRNA target sequence for DKFZP566B183 (NM_015509.2,720-738).
gcagtgatgcagatatcct

SEQ ID NO: 353644 - DNA, 19 bp, Homo sapiens
  siRNA target sequence for DKFZP566B183 (NM_015509.2,723-741).
gtgatgcagatatcctttt

SEQ ID NO: 353645 - DNA, 19 bp, Homo sapiens
  siRNA target sequence for DKFZP566B183 (NM_015509.2,728-746).
gcagatatccttttagatt

SEQ ID NO: 353646 - DNA, 19 bp, Homo sapiens
  siRNA target sequence for DKFZP566B183 (NM_015509.2,788-806).
gtttctgtaagcaatgact

SEQ ID NO: 353647 - DNA, 19 bp, Homo sapiens
  siRNA target sequence for C20orf4 (NM_015511.2,395-413).
cagagtttgggattgacta

SEQ ID NO: 353648 - DNA, 19 bp, Homo sapiens
  siRNA target sequence for C20orf4 (NM_015511.2,521-539).
gccctcgtatgggtttctt

SEQ ID NO: 353649 - DNA, 19 bp, Homo sapiens
  siRNA target sequence for C20orf4 (NM_015511.2,526-544).
cgtatgggtttcttcctta

SEQ ID NO: 353650 - DNA, 19 bp, Homo sapiens
  siRNA target sequence for C20orf4 (NM_015511.2,683-701).
catatgccaccctgaagaa

SEQ ID NO: 353651 - DNA, 19 bp, Homo sapiens
  siRNA target sequence for C20orf4 (NM_015511.2,822-840).
ccgcgtggggcagaatcta

SEQ ID NO: 353652 - DNA, 19 bp, Homo sapiens
  siRNA target sequence for E2IG4 (NM_015516.1,128-146).
ctgactcgggtggattgta

SEQ ID NO: 353653 - DNA, 19 bp, Homo sapiens
  siRNA target sequence for E2IG4 (NM_015516.1,410-428).
ctgagcgacgtgaacctta

SEQ ID NO: 353654 - DNA, 19 bp, Homo sapiens
  siRNA target sequence for E2IG4 (NM_015516.1,798-816).
cgggcaaccccaagcttaa

SEQ ID NO: 353655 - DNA, 19 bp, Homo sapiens
  siRNA target sequence for E2IG4 (NM_015516.1,800-818).
ggcaaccccaagcttaact

SEQ ID NO: 353656 - DNA, 19 bp, Homo sapiens
  siRNA target sequence for E2IG4 (NM_015516.1,821-839).
gcaggagctgaggtgtttt

SEQ ID NO: 353657 - DNA, 19 bp, Homo sapiens
  siRNA target sequence for MIZF (NM_015517.3,192-210).
gccgcctcctgggaaagtt

SEQ ID NO: 353658 - DNA, 19 bp, Homo sapiens
  siRNA target sequence for MIZF (NM_015517.3,272-290).
ccatggaaaagttctttga

SEQ ID NO: 353659 - DNA, 19 bp, Homo sapiens
  siRNA target sequence for MIZF (NM_015517.3,545-563).
ggaacgtcatccctgatat

SEQ ID NO: 353660 - DNA, 19 bp, Homo sapiens
  siRNA target sequence for MIZF (NM_015517.3,646-664).
cacagtctgtgctgtgaat

SEQ ID NO: 353661 - DNA, 19 bp, Homo sapiens
  siRNA target sequence for MIZF (NM_015517.3,764-782).
gccatacccaggagaaagt

SEQ ID NO: 353662 - DNA, 19 bp, Homo sapiens
  siRNA target sequence for MIZF (NM_015517.3,816-834).
caacaataccaagttctta

SEQ ID NO: 353663 - DNA, 19 bp, Homo sapiens
  siRNA target sequence for MIZF (NM_015517.3,930-948).
catgcgcaaccatgtgaat

SEQ ID NO: 353664 - DNA, 19 bp, Homo sapiens
  siRNA target sequence for MIZF (NM_015517.3,934-952).
cgcaaccatgtgaatcact

SEQ ID NO: 353665 - DNA, 19 bp, Homo sapiens
  siRNA target sequence for MIZF (NM_015517.3,935-953).
gcaaccatgtgaatcacta

SEQ ID NO: 353666 - DNA, 19 bp, Homo sapiens
  siRNA target sequence for MIZF (NM_015517.3,1062-1080).
cagctgcaagaatcttatt

SEQ ID NO: 353667 - DNA, 19 bp, Homo sapiens
  siRNA target sequence for MIZF (NM_015517.3,1064-1082).
gctgcaagaatcttattga

SEQ ID NO: 353668 - DNA, 19 bp, Homo sapiens
  siRNA target sequence for MIZF (NM_015517.3,1159-1177).
cgatccctctgctctatca

SEQ ID NO: 353669 - DNA, 19 bp, Homo sapiens
  siRNA target sequence for MIZF (NM_015517.3,1160-1178).
gatccctctgctctatcaa

SEQ ID NO: 353670 - DNA, 19 bp, Homo sapiens
  siRNA target sequence for MIZF (NM_015517.3,1179-1197).
gtcccattaccgcaaagta

SEQ ID NO: 353671 - DNA, 19 bp, Homo sapiens
  siRNA target sequence for MIZF (NM_015517.3,1181-1199).
cccattaccgcaaagtaca

SEQ ID NO: 353672 - DNA, 19 bp, Homo sapiens
  siRNA target sequence for MIZF (NM_015517.3,1182-1200).
ccattaccgcaaagtacat

SEQ ID NO: 353673 - DNA, 19 bp, Homo sapiens
  siRNA target sequence for MIZF (NM_015517.3,1209-1227).
ctctgagccaaggtacaaa

SEQ ID NO: 353674 - DNA, 19 bp, Homo sapiens
  siRNA target sequence for MIZF (NM_015517.3,1328-1346).
ggtacaaggaacatgaaga

SEQ ID NO: 353675 - DNA, 19 bp, Homo sapiens
  siRNA target sequence for MIZF (NM_015517.3,1329-1347).
gtacaaggaacatgaagat

SEQ ID NO: 353676 - DNA, 19 bp, Homo sapiens
  siRNA target sequence for MIZF (NM_015517.3,1455-1473).
cagcctgcagggcattatt

SEQ ID NO: 353677 - DNA, 19 bp, Homo sapiens
  siRNA target sequence for MIZF (NM_015517.3,1457-1475).
gcctgcagggcattattct

SEQ ID NO: 353678 - DNA, 19 bp, Homo sapiens
  siRNA target sequence for MIZF (NM_015517.3,1464-1482).
gggcattattctagaaaca

SEQ ID NO: 353679 - DNA, 19 bp, Homo sapiens
  siRNA target sequence for MIZF (NM_015517.3,1491-1509).
ggagccaggacgtaaggaa

SEQ ID NO: 353680 - DNA, 19 bp, Homo sapiens
  siRNA target sequence for MIZF (NM_015517.3,1686-1704).
gggcatcatggaaaagctt

SEQ ID NO: 353681 - DNA, 19 bp, Homo sapiens
  siRNA target sequence for D2LIC (NM_015522.2,201-219).
cttcattggcagtaaaaat

SEQ ID NO: 353682 - DNA, 19 bp, Homo sapiens
  siRNA target sequence for D2LIC (NM_015522.2,221-239).
ggggaaagactactattat

SEQ ID NO: 353683 - DNA, 19 bp, Homo sapiens
  siRNA target sequence for D2LIC (NM_015522.2,224-242).
gaaagactactattattct

SEQ ID NO: 353684 - DNA, 19 bp, Homo sapiens
  siRNA target sequence for D2LIC (NM_015522.2,268-286).
ccaaaaccaaccttagctt

SEQ ID NO: 353685 - DNA, 19 bp, Homo sapiens
  siRNA target sequence for D2LIC (NM_015522.2,269-287).
caaaaccaaccttagcttt

SEQ ID NO: 353686 - DNA, 19 bp, Homo sapiens
  siRNA target sequence for D2LIC (NM_015522.2,274-292).
ccaaccttagctttggaat

SEQ ID NO: 353687 - DNA, 19 bp, Homo sapiens
  siRNA target sequence for D2LIC (NM_015522.2,275-293).
caaccttagctttggaata

SEQ ID NO: 353688 - DNA, 19 bp, Homo sapiens
  siRNA target sequence for D2LIC (NM_015522.2,358-376).
ggtggaggaacctctttat

SEQ ID NO: 353689 - DNA, 19 bp, Homo sapiens
  siRNA target sequence for D2LIC (NM_015522.2,406-424).
gacaccttacggacgtttt

SEQ ID NO: 353690 - DNA, 19 bp, Homo sapiens
  siRNA target sequence for D2LIC (NM_015522.2,408-426).
caccttacggacgttttct

SEQ ID NO: 353691 - DNA, 19 bp, Homo sapiens
  siRNA target sequence for D2LIC (NM_015522.2,410-428).
ccttacggacgttttctct

SEQ ID NO: 353692 - DNA, 19 bp, Homo sapiens
  siRNA target sequence for D2LIC (NM_015522.2,411-429).
cttacggacgttttctctt

SEQ ID NO: 353693 - DNA, 19 bp, Homo sapiens
  siRNA target sequence for D2LIC (NM_015522.2,416-434).
ggacgttttctcttgttct

SEQ ID NO: 353694 - DNA, 19 bp, Homo sapiens
  siRNA target sequence for D2LIC (NM_015522.2,465-483).
ctggcccaccatggaaaat

SEQ ID NO: 353695 - DNA, 19 bp, Homo sapiens
  siRNA target sequence for D2LIC (NM_015522.2,469-487).
cccaccatggaaaatctct

SEQ ID NO: 353696 - DNA, 19 bp, Homo sapiens
  siRNA target sequence for D2LIC (NM_015522.2,470-488).
ccaccatggaaaatctctt

SEQ ID NO: 353697 - DNA, 19 bp, Homo sapiens
  siRNA target sequence for D2LIC (NM_015522.2,494-512).
ccacaaaaagccatgtaga

SEQ ID NO: 353698 - DNA, 19 bp, Homo sapiens
  siRNA target sequence for D2LIC (NM_015522.2,608-626).
gttgctgtttgggattatt

SEQ ID NO: 353699 - DNA, 19 bp, Homo sapiens
  siRNA target sequence for D2LIC (NM_015522.2,611-629).
gctgtttgggattattact

SEQ ID NO: 353700 - DNA, 19 bp, Homo sapiens
  siRNA target sequence for D2LIC (NM_015522.2,631-649).
gaatccttagtcccattta

SEQ ID NO: 353701 - DNA, 19 bp, Homo sapiens
  siRNA target sequence for D2LIC (NM_015522.2,635-653).
ccttagtcccatttatagt

SEQ ID NO: 353702 - DNA, 19 bp, Homo sapiens
  siRNA target sequence for D2LIC (NM_015522.2,636-654).
cttagtcccatttatagtt

SEQ ID NO: 353703 - DNA, 19 bp, Homo sapiens
  siRNA target sequence for D2LIC (NM_015522.2,652-670).
gttaatgataacatcacaa

SEQ ID NO: 353704 - DNA, 19 bp, Homo sapiens
  siRNA target sequence for D2LIC (NM_015522.2,666-684).
cacaaacaacttctttaga

SEQ ID NO: 353705 - DNA, 19 bp, Homo sapiens
  siRNA target sequence for CLIPR-59 (NM_015526.1,478-496).
ccaagtccagcacaagata

SEQ ID NO: 353706 - DNA, 19 bp, Homo sapiens
  siRNA target sequence for CLIPR-59 (NM_015526.1,497-515).
gacgtcatcggcaatgaga

SEQ ID NO: 353707 - DNA, 19 bp, Homo sapiens
  siRNA target sequence for CLIPR-59 (NM_015526.1,780-798).
ccacgtgcagtgacttcaa

SEQ ID NO: 353708 - DNA, 19 bp, Homo sapiens
  siRNA target sequence for CLIPR-59 (NM_015526.1,878-896).
cctgcgctgaggaatcgaa

SEQ ID NO: 353709 - DNA, 19 bp, Homo sapiens
  siRNA target sequence for CLIPR-59 (NM_015526.1,879-897).
ctgcgctgaggaatcgaaa

SEQ ID NO: 353710 - DNA, 19 bp, Homo sapiens
  siRNA target sequence for CLIPR-59 (NM_015526.1,1030-1048).
ggtcacgctacccaactat

SEQ ID NO: 353711 - DNA, 19 bp, Homo sapiens
  siRNA target sequence for CLIPR-59 (NM_015526.1,1035-1053).
cgctacccaactatgacaa

SEQ ID NO: 353712 - DNA, 19 bp, Homo sapiens
  siRNA target sequence for CLIPR-59 (NM_015526.1,1058-1076).
ccaggcaatctcatgctta

SEQ ID NO: 353713 - DNA, 19 bp, Homo sapiens
  siRNA target sequence for CLIPR-59 (NM_015526.1,1229-1247).
ggcgttcggtacttcatct

SEQ ID NO: 353714 - DNA, 19 bp, Homo sapiens
  siRNA target sequence for CLIPR-59 (NM_015526.1,1595-1613).
ggtgtccggtacttcactt

SEQ ID NO: 353715 - DNA, 19 bp, Homo sapiens
  siRNA target sequence for CLIPR-59 (NM_015526.1,1638-1656).
caccagcatcccgtattca

SEQ ID NO: 353716 - DNA, 19 bp, Homo sapiens
  siRNA target sequence for CLIPR-59 (NM_015526.1,1692-1710).
gcgttggagccaaaaaagt

SEQ ID NO: 353717 - DNA, 19 bp, Homo sapiens
  siRNA target sequence for CLIPR-59 (NM_015526.1,1701-1719).
ccaaaaaagtgcatcaagt

SEQ ID NO: 353718 - DNA, 19 bp, Homo sapiens
  siRNA target sequence for CLIPR-59 (NM_015526.1,1775-1793).
gcatcagagaactccattt

SEQ ID NO: 353719 - DNA, 19 bp, Homo sapiens
  siRNA target sequence for DNAPTP6 (NM_015535.1,163-181).
ggctgaactcaatactcat

SEQ ID NO: 353720 - DNA, 19 bp, Homo sapiens
  siRNA target sequence for DNAPTP6 (NM_015535.1,199-217).
gatctatgcagttagatca

SEQ ID NO: 353721 - DNA, 19 bp, Homo sapiens
  siRNA target sequence for DNAPTP6 (NM_015535.1,221-239).
gttcccaacaaaagcaata

SEQ ID NO: 353722 - DNA, 19 bp, Homo sapiens
  siRNA target sequence for DNAPTP6 (NM_015535.1,254-272).
gtgctccaacagtttgatt

SEQ ID NO: 353723 - DNA, 19 bp, Homo sapiens
  siRNA target sequence for DNAPTP6 (NM_015535.1,391-409).
gcatcaaggcaacaaagat

SEQ ID NO: 353724 - DNA, 19 bp, Homo sapiens
  siRNA target sequence for DNAPTP6 (NM_015535.1,451-469).
gccgcagccaccacagatt

SEQ ID NO: 353725 - DNA, 19 bp, Homo sapiens
  siRNA target sequence for DNAPTP6 (NM_015535.1,502-520).
cagctcgtccacagattct

SEQ ID NO: 353726 - DNA, 19 bp, Homo sapiens
  siRNA target sequence for DNAPTP6 (NM_015535.1,511-529).
cacagattctgctaacgaa

SEQ ID NO: 353727 - DNA, 19 bp, Homo sapiens
  siRNA target sequence for DNAPTP6 (NM_015535.1,538-556).
ccttatccctcgtgagaaa

SEQ ID NO: 353728 - DNA, 19 bp, Homo sapiens
  siRNA target sequence for DNAPTP6 (NM_015535.1,545-563).
cctcgtgagaaaaagatct

SEQ ID NO: 353729 - DNA, 19 bp, Homo sapiens
  siRNA target sequence for DNAPTP6 (NM_015535.1,641-659).
gatgggaaccccaaaccta

SEQ ID NO: 353730 - DNA, 19 bp, Homo sapiens
  siRNA target sequence for DNAPTP6 (NM_015535.1,645-663).
ggaaccccaaacctataca

SEQ ID NO: 353731 - DNA, 19 bp, Homo sapiens
  siRNA target sequence for DNAPTP6 (NM_015535.1,646-664).
gaaccccaaacctatacat

SEQ ID NO: 353732 - DNA, 19 bp, Homo sapiens
  siRNA target sequence for DNAPTP6 (NM_015535.1,699-717).
cagctgagcagccttgtaa

SEQ ID NO: 353733 - DNA, 19 bp, Homo sapiens
  siRNA target sequence for DNAPTP6 (NM_015535.1,724-742).
caagcctaaggcaaaaaca

SEQ ID NO: 353734 - DNA, 19 bp, Homo sapiens
  siRNA target sequence for DNAPTP6 (NM_015535.1,762-780).
cccctgcagctcatcttga

SEQ ID NO: 353735 - DNA, 19 bp, Homo sapiens
  siRNA target sequence for DNAPTP6 (NM_015535.1,814-832).
cccaaatattgagaaatca

SEQ ID NO: 353736 - DNA, 19 bp, Homo sapiens
  siRNA target sequence for DNAPTP6 (NM_015535.1,848-866).
cgctgcaccgtttctctaa

SEQ ID NO: 353737 - DNA, 19 bp, Homo sapiens
  siRNA target sequence for DNAPTP6 (NM_015535.1,855-873).
ccgtttctctaactagata

SEQ ID NO: 353738 - DNA, 19 bp, Homo sapiens
  siRNA target sequence for DNAPTP6 (NM_015535.1,856-874).
cgtttctctaactagatat

SEQ ID NO: 353739 - DNA, 19 bp, Homo sapiens
  siRNA target sequence for DNAPTP6 (NM_015535.1,867-885).
ctagatatcgcgtcatgat

SEQ ID NO: 353740 - DNA, 19 bp, Homo sapiens
  siRNA target sequence for DNAPTP6 (NM_015535.1,870-888).
gatatcgcgtcatgattaa

SEQ ID NO: 353741 - DNA, 19 bp, Homo sapiens
  siRNA target sequence for DNAPTP6 (NM_015535.1,899-917).
gatagttccgtgaagaaga

SEQ ID NO: 353742 - DNA, 19 bp, Homo sapiens
  siRNA target sequence for DNAPTP6 (NM_015535.1,943-961).
caactgcatcattgacaaa

SEQ ID NO: 353743 - DNA, 19 bp, Homo sapiens
  siRNA target sequence for DNAPTP6 (NM_015535.1,978-996).
cagaaatggataaagttaa

SEQ ID NO: 353744 - DNA, 19 bp, Homo sapiens
  siRNA target sequence for DNAPTP6 (NM_015535.1,1095-1113).
ccgaactcagggcagaaat

SEQ ID NO: 353745 - DNA, 19 bp, Homo sapiens
  siRNA target sequence for DNAPTP6 (NM_015535.1,1096-1114).
cgaactcagggcagaaatt

SEQ ID NO: 353746 - DNA, 19 bp, Homo sapiens
  siRNA target sequence for DNAPTP6 (NM_015535.1,1109-1127).
gaaattaagcactttgtca

SEQ ID NO: 353747 - DNA, 19 bp, Homo sapiens
  siRNA target sequence for DNAPTP6 (NM_015535.1,1210-1228).
ctgcggagaaattacacat

SEQ ID NO: 353748 - DNA, 19 bp, Homo sapiens
  siRNA target sequence for DNAPTP6 (NM_015535.1,1465-1483).
gagatttaatccacagtat

SEQ ID NO: 353749 - DNA, 19 bp, Homo sapiens
  siRNA target sequence for DNAPTP6 (NM_015535.1,1609-1627).
caaaggcggtgccaaaaat

SEQ ID NO: 353750 - DNA, 19 bp, Homo sapiens
  siRNA target sequence for DNAPTP6 (NM_015535.1,1737-1755).
gtgtcggtagggtttcaca

SEQ ID NO: 353751 - DNA, 19 bp, Homo sapiens
  siRNA target sequence for DNAPTP6 (NM_015535.1,1767-1785).
gccccacgagaatagaagt

SEQ ID NO: 353752 - DNA, 19 bp, Homo sapiens
  siRNA target sequence for DNAPTP6 (NM_015535.1,1768-1786).
ccccacgagaatagaagtt

SEQ ID NO: 353753 - DNA, 19 bp, Homo sapiens
  siRNA target sequence for DNAPTP6 (NM_015535.1,1769-1787).
cccacgagaatagaagttt

SEQ ID NO: 353754 - DNA, 19 bp, Homo sapiens
  siRNA target sequence for NELF (NM_015537.2,131-149).
gacgacatccctattcgta

SEQ ID NO: 353755 - DNA, 19 bp, Homo sapiens
  siRNA target sequence for NELF (NM_015537.2,154-172).
gttccccaaggaaaatctt

SEQ ID NO: 353756 - DNA, 19 bp, Homo sapiens
  siRNA target sequence for NELF (NM_015537.2,182-200).
cagacagcaaccacaacta

SEQ ID NO: 353757 - DNA, 19 bp, Homo sapiens
  siRNA target sequence for NELF (NM_015537.2,239-257).
cggaaacgggagaatgatt

SEQ ID NO: 353758 - DNA, 19 bp, Homo sapiens
  siRNA target sequence for NELF (NM_015537.2,373-391).
cgaccccacccccatgaaa

SEQ ID NO: 353759 - DNA, 19 bp, Homo sapiens
  siRNA target sequence for NELF (NM_015537.2,533-551).
ccaaaggtcatgctcattt

SEQ ID NO: 353760 - DNA, 19 bp, Homo sapiens
  siRNA target sequence for NELF (NM_015537.2,572-590).
gagtacatccccactatca

SEQ ID NO: 353761 - DNA, 19 bp, Homo sapiens
  siRNA target sequence for DKFZP727M111 (NM_015540.2,448-466).
gattattgaacgagataca

SEQ ID NO: 353762 - DNA, 19 bp, Homo sapiens
  siRNA target sequence for DKFZP727M111 (NM_015540.2,554-572).
gcaacatctggtaagagaa

SEQ ID NO: 353763 - DNA, 19 bp, Homo sapiens
  siRNA target sequence for DKFZP727M111 (NM_015540.2,795-813).
cccagactatccatgaaga

SEQ ID NO: 353764 - DNA, 19 bp, Homo sapiens
  siRNA target sequence for DKFZP727M111 (NM_015540.2,891-909).
ccagcttggttgctttctt

SEQ ID NO: 353765 - DNA, 19 bp, Homo sapiens
  siRNA target sequence for DKFZP727M111 (NM_015540.2,972-990).
gaggaccctctgctaatgt

SEQ ID NO: 353766 - DNA, 19 bp, Homo sapiens
  siRNA target sequence for DKFZP727M111 (NM_015540.2,974-992).
ggaccctctgctaatgtca

SEQ ID NO: 353767 - DNA, 19 bp, Homo sapiens
  siRNA target sequence for DKFZP727M111 (NM_015540.2,1080-1098).
ccgtgacccctcagaaaga

SEQ ID NO: 353768 - DNA, 19 bp, Homo sapiens
  siRNA target sequence for DKFZP727M111 (NM_015540.2,1426-1444).
cttaagcctccttttggat

SEQ ID NO: 353769 - DNA, 19 bp, Homo sapiens
  siRNA target sequence for DKFZP727M111 (NM_015540.2,1716-1734).
cccgacatgatgtcatcaa

SEQ ID NO: 353770 - DNA, 19 bp, Homo sapiens
  siRNA target sequence for DKFZP727M111 (NM_015540.2,1884-1902).
ctcggctgatagagactat

SEQ ID NO: 353771 - DNA, 19 bp, Homo sapiens
  siRNA target sequence for DKFZP727M111 (NM_015540.2,1899-1917).
ctatagttcgagagttctt

SEQ ID NO: 353772 - DNA, 19 bp, Homo sapiens
  siRNA target sequence for DKFZP727M111 (NM_015540.2,1946-1964).
gggcctacccctagtctat

SEQ ID NO: 353773 - DNA, 19 bp, Homo sapiens
  siRNA target sequence for DKFZP727M111 (NM_015540.2,1947-1965).
ggcctacccctagtctata

SEQ ID NO: 353774 - DNA, 19 bp, Homo sapiens
  siRNA target sequence for DKFZP727M111 (NM_015540.2,1950-1968).
ctacccctagtctatacaa

SEQ ID NO: 353775 - DNA, 19 bp, Homo sapiens
  siRNA target sequence for DKFZP727M111 (NM_015540.2,1953-1971).
cccctagtctatacaaagt

SEQ ID NO: 353776 - DNA, 19 bp, Homo sapiens
  siRNA target sequence for DKFZP727M111 (NM_015540.2,1954-1972).
ccctagtctatacaaagta

SEQ ID NO: 353777 - DNA, 19 bp, Homo sapiens
  siRNA target sequence for DKFZP727M111 (NM_015540.2,2065-2083).
ccgcctgtgccgcatcata

SEQ ID NO: 353778 - DNA, 19 bp, Homo sapiens
  siRNA target sequence for DKFZP727M111 (NM_015540.2,2177-2195).
ggccagggcggttaccttt

SEQ ID NO: 353779 - DNA, 19 bp, Homo sapiens
  siRNA target sequence for DKFZP727M111 (NM_015540.2,2337-2355).
gtacccctgctgaaaccat

SEQ ID NO: 353780 - DNA, 19 bp, Homo sapiens
  siRNA target sequence for DKFZP727M111 (NM_015540.2,2432-2450).
cttgttgagccgtgtctaa

SEQ ID NO: 353781 - DNA, 19 bp, Homo sapiens
  siRNA target sequence for DKFZP727M111 (NM_015540.2,2447-2465).
ctaaggcagaccttgaagt

SEQ ID NO: 353782 - DNA, 19 bp, Homo sapiens
  siRNA target sequence for DKFZP727M111 (NM_015540.2,2508-2526).
ccgttgcctgcctgttgtt

SEQ ID NO: 353783 - DNA, 19 bp, Homo sapiens
  siRNA target sequence for DKFZP727M111 (NM_015540.2,2862-2880).
gccagctggctgccatatt

SEQ ID NO: 353784 - DNA, 19 bp, Homo sapiens
  siRNA target sequence for DKFZP727M111 (NM_015540.2,3051-3069).
ctgccctctatcatggtat

SEQ ID NO: 353785 - DNA, 19 bp, Homo sapiens
  siRNA target sequence for DKFZP727M111 (NM_015540.2,3521-3539).
ctgcagtgggtgctagttt

SEQ ID NO: 353786 - DNA, 19 bp, Homo sapiens
  siRNA target sequence for DKFZP727M111 (NM_015540.2,3926-3944).
gtgtccctggagtgttaca

SEQ ID NO: 353787 - DNA, 19 bp, Homo sapiens
  siRNA target sequence for DKFZP727M111 (NM_015540.2,3928-3946).
gtccctggagtgttacaca

SEQ ID NO: 353788 - DNA, 19 bp, Homo sapiens
  siRNA target sequence for DKFZP727M111 (NM_015540.2,4166-4184).
cagcacctcctgcactata

SEQ ID NO: 353789 - DNA, 19 bp, Homo sapiens
  siRNA target sequence for DKFZP727M111 (NM_015540.2,4171-4189).
cctcctgcactataagctt

SEQ ID NO: 353790 - DNA, 19 bp, Homo sapiens
  siRNA target sequence for DKFZP727M111 (NM_015540.2,4210-4228).
gggctttgagctctattct

SEQ ID NO: 353791 - DNA, 19 bp, Homo sapiens
  siRNA target sequence for DKFZP727M111 (NM_015540.2,4212-4230).
gctttgagctctattctca

SEQ ID NO: 353792 - DNA, 19 bp, Homo sapiens
  siRNA target sequence for LRIG1 (NM_015541.1,725-743).
ggacgcggagcctaaacct

SEQ ID NO: 353793 - DNA, 19 bp, Homo sapiens
  siRNA target sequence for LRIG1 (NM_015541.1,731-749).
ggagcctaaacctgagtta

SEQ ID NO: 353794 - DNA, 19 bp, Homo sapiens
  siRNA target sequence for LRIG1 (NM_015541.1,734-752).
gcctaaacctgagttacaa

SEQ ID NO: 353795 - DNA, 19 bp, Homo sapiens
  siRNA target sequence for LRIG1 (NM_015541.1,794-812).
cgaacctacaggaagtgta

SEQ ID NO: 353796 - DNA, 19 bp, Homo sapiens
  siRNA target sequence for LRIG1 (NM_015541.1,802-820).
caggaagtgtacctcaata

SEQ ID NO: 353797 - DNA, 19 bp, Homo sapiens
  siRNA target sequence for LRIG1 (NM_015541.1,804-822).
ggaagtgtacctcaataat

SEQ ID NO: 353798 - DNA, 19 bp, Homo sapiens
  siRNA target sequence for LRIG1 (NM_015541.1,846-864).
cctgggcgctgcttcatca

SEQ ID NO: 353799 - DNA, 19 bp, Homo sapiens
  siRNA target sequence for LRIG1 (NM_015541.1,849-867).
gggcgctgcttcatcacat

SEQ ID NO: 353800 - DNA, 19 bp, Homo sapiens
  siRNA target sequence for LRIG1 (NM_015541.1,919-937).
cagctgaaggcctaccttt

SEQ ID NO: 353801 - DNA, 19 bp, Homo sapiens
  siRNA target sequence for LRIG1 (NM_015541.1,933-951).
cctttccttagaagtgtta

SEQ ID NO: 353802 - DNA, 19 bp, Homo sapiens
  siRNA target sequence for LRIG1 (NM_015541.1,938-956).
ccttagaagtgttagatct

SEQ ID NO: 353803 - DNA, 19 bp, Homo sapiens
  siRNA target sequence for LRIG1 (NM_015541.1,997-1015).
ccacacggaccgcctataa

SEQ ID NO: 353804 - DNA, 19 bp, Homo sapiens
  siRNA target sequence for LRIG1 (NM_015541.1,998-1016).
cacacggaccgcctataaa

SEQ ID NO: 353805 - DNA, 19 bp, Homo sapiens
  siRNA target sequence for LRIG1 (NM_015541.1,1079-1097).
cacggtcgctgctaactct

SEQ ID NO: 353806 - DNA, 19 bp, Homo sapiens
  siRNA target sequence for LRIG1 (NM_015541.1,1094-1112).
ctcttcgcctgagcaaaaa

SEQ ID NO: 353807 - DNA, 19 bp, Homo sapiens
  siRNA target sequence for LRIG1 (NM_015541.1,1096-1114).
cttcgcctgagcaaaaaca

SEQ ID NO: 353808 - DNA, 19 bp, Homo sapiens
  siRNA target sequence for LRIG1 (NM_015541.1,1603-1621).
ctggaccataacgagattt

SEQ ID NO: 353809 - DNA, 19 bp, Homo sapiens
  siRNA target sequence for LRIG1 (NM_015541.1,1614-1632).
cgagatttcgggcacaata

SEQ ID NO: 353810 - DNA, 19 bp, Homo sapiens
  siRNA target sequence for LRIG1 (NM_015541.1,1682-1700).
ctctgtttggaaacaagat

SEQ ID NO: 353811 - DNA, 19 bp, Homo sapiens
  siRNA target sequence for LRIG1 (NM_015541.1,1701-1719).
caagtctgtggctaagaga

SEQ ID NO: 353812 - DNA, 19 bp, Homo sapiens
  siRNA target sequence for LRIG1 (NM_015541.1,1976-1994).
gtttcgtgtgcgatgactt

SEQ ID NO: 353813 - DNA, 19 bp, Homo sapiens
  siRNA target sequence for LRIG1 (NM_015541.1,2046-2064).
caaggacatccggtttaca

SEQ ID NO: 353814 - DNA, 19 bp, Homo sapiens
  siRNA target sequence for LRIG1 (NM_015541.1,2168-2186).
cgcaggacggggaagtgat

SEQ ID NO: 353815 - DNA, 19 bp, Homo sapiens
  siRNA target sequence for LRIG1 (NM_015541.1,2263-2281).
cactttggctccacctatt

SEQ ID NO: 353816 - DNA, 19 bp, Homo sapiens
  siRNA target sequence for LRIG1 (NM_015541.1,2265-2283).
ctttggctccacctattca

SEQ ID NO: 353817 - DNA, 19 bp, Homo sapiens
  siRNA target sequence for LRIG1 (NM_015541.1,2269-2287).
ggctccacctattcacata

SEQ ID NO: 353818 - DNA, 19 bp, Homo sapiens
  siRNA target sequence for LRIG1 (NM_015541.1,2270-2288).
gctccacctattcacataa

SEQ ID NO: 353819 - DNA, 19 bp, Homo sapiens
  siRNA target sequence for LRIG1 (NM_015541.1,2330-2348).
cgccccacgacataaccat

SEQ ID NO: 353820 - DNA, 19 bp, Homo sapiens
  siRNA target sequence for LRIG1 (NM_015541.1,2473-2491).
ccggatgacgacgtgtttt

SEQ ID NO: 353821 - DNA, 19 bp, Homo sapiens
  siRNA target sequence for LRIG1 (NM_015541.1,2474-2492).
cggatgacgacgtgttttt

SEQ ID NO: 353822 - DNA, 19 bp, Homo sapiens
  siRNA target sequence for LRIG1 (NM_015541.1,2479-2497).
gacgacgtgtttttcatca

SEQ ID NO: 353823 - DNA, 19 bp, Homo sapiens
  siRNA target sequence for LRIG1 (NM_015541.1,2496-2514).
cactgatgtgaaaatagat

SEQ ID NO: 353824 - DNA, 19 bp, Homo sapiens
  siRNA target sequence for LRIG1 (NM_015541.1,2512-2530).
gatgacgcaggggtttaca

SEQ ID NO: 353825 - DNA, 19 bp, Homo sapiens
  siRNA target sequence for LRIG1 (NM_015541.1,2547-2565).
ctcagccggttctatttca

SEQ ID NO: 353826 - DNA, 19 bp, Homo sapiens
  siRNA target sequence for LRIG1 (NM_015541.1,2553-2571).
cggttctatttcagctaat

SEQ ID NO: 353827 - DNA, 19 bp, Homo sapiens
  siRNA target sequence for LRIG1 (NM_015541.1,2645-2663).
cagtggccctccaatgcaa

SEQ ID NO: 353828 - DNA, 19 bp, Homo sapiens
  siRNA target sequence for LRIG1 (NM_015541.1,2998-3016).
gtcaccaacacagatgaaa

SEQ ID NO: 353829 - DNA, 19 bp, Homo sapiens
  siRNA target sequence for LRIG1 (NM_015541.1,3018-3036).
cgtcgtgccaccagatgtt

SEQ ID NO: 353830 - DNA, 19 bp, Homo sapiens
  siRNA target sequence for LRIG1 (NM_015541.1,3115-3133).
gccaatgggcacattgaga

SEQ ID NO: 353831 - DNA, 19 bp, Homo sapiens
  siRNA target sequence for LRIG1 (NM_015541.1,3217-3235).
gctgggtctgcgtatcaca

SEQ ID NO: 353832 - DNA, 19 bp, Homo sapiens
  siRNA target sequence for LRIG1 (NM_015541.1,3218-3236).
ctgggtctgcgtatcacaa

SEQ ID NO: 353833 - DNA, 19 bp, Homo sapiens
  siRNA target sequence for LRIG1 (NM_015541.1,3221-3239).
ggtctgcgtatcacaaaga

SEQ ID NO: 353834 - DNA, 19 bp, Homo sapiens
  siRNA target sequence for LRIG1 (NM_015541.1,3272-3290).
cacctgggccacataagat

SEQ ID NO: 353835 - DNA, 19 bp, Homo sapiens
  siRNA target sequence for LRIG1 (NM_015541.1,3511-3529).
cccagtaaccacgatagaa

SEQ ID NO: 353836 - DNA, 19 bp, Homo sapiens
  siRNA target sequence for LRIG1 (NM_015541.1,3512-3530).
ccagtaaccacgatagaat

SEQ ID NO: 353837 - DNA, 19 bp, Homo sapiens
  siRNA target sequence for LRIG1 (NM_015541.1,3579-3597).
ggattcttcctggacttta

SEQ ID NO: 353838 - DNA, 19 bp, Homo sapiens
  siRNA target sequence for LRIG1 (NM_015541.1,3628-3646).
ctacagcctgcatcttcat

SEQ ID NO: 353839 - DNA, 19 bp, Homo sapiens
  siRNA target sequence for LRIG1 (NM_015541.1,3633-3651).
gcctgcatcttcattaact

SEQ ID NO: 353840 - DNA, 19 bp, Homo sapiens
  siRNA target sequence for LRIG1 (NM_015541.1,3676-3694).
gcccagtacttgcttgttt

SEQ ID NO: 353841 - DNA, 19 bp, Homo sapiens
  siRNA target sequence for LRIG1 (NM_015541.1,3681-3699).
gtacttgcttgtttccaat

SEQ ID NO: 353842 - DNA, 19 bp, Homo sapiens
  siRNA target sequence for LRIG1 (NM_015541.1,3700-3718).
ggccacctccccaaagcat

SEQ ID NO: 353843 - DNA, 19 bp, Homo sapiens
  siRNA target sequence for DKFZP564K1964 (NM_015544.1,318-336).
ctgcagcgctatgattcta

SEQ ID NO: 353844 - DNA, 19 bp, Homo sapiens
  siRNA target sequence for DKFZP564K1964 (NM_015544.1,396-414).
ctggacgatgtcgttatca

SEQ ID NO: 353845 - DNA, 19 bp, Homo sapiens
  siRNA target sequence for DKFZP564K1964 (NM_015544.1,866-884).
gcaggagcagtctgcaatt

SEQ ID NO: 353846 - DNA, 19 bp, Homo sapiens
  siRNA target sequence for KIAA0632 (NM_015545.2,298-316).
gccaggagcgtcaggaaaa

SEQ ID NO: 353847 - DNA, 19 bp, Homo sapiens
  siRNA target sequence for KIAA0632 (NM_015545.2,399-417).
gggaccctctctgacaaat

SEQ ID NO: 353848 - DNA, 19 bp, Homo sapiens
  siRNA target sequence for KIAA0632 (NM_015545.2,400-418).
ggaccctctctgacaaata

SEQ ID NO: 353849 - DNA, 19 bp, Homo sapiens
  siRNA target sequence for KIAA0632 (NM_015545.2,445-463).
ccgcagcccagttccataa

SEQ ID NO: 353850 - DNA, 19 bp, Homo sapiens
  siRNA target sequence for KIAA0632 (NM_015545.2,497-515).
ggaaccggagcccaaatta

SEQ ID NO: 353851 - DNA, 19 bp, Homo sapiens
  siRNA target sequence for KIAA0632 (NM_015545.2,498-516).
gaaccggagcccaaattat

SEQ ID NO: 353852 - DNA, 19 bp, Homo sapiens
  siRNA target sequence for KIAA0632 (NM_015545.2,535-553).
ccccgtactggtacttctt

SEQ ID NO: 353853 - DNA, 19 bp, Homo sapiens
  siRNA target sequence for KIAA0632 (NM_015545.2,642-660).
cccatggagagcaactaca

SEQ ID NO: 353854 - DNA, 19 bp, Homo sapiens
  siRNA target sequence for KIAA0632 (NM_015545.2,760-778).
cctacacggccctgttcaa

SEQ ID NO: 353855 - DNA, 19 bp, Homo sapiens
  siRNA target sequence for KIAA0632 (NM_015545.2,922-940).
ggatgtgcctcgatgtgtt

SEQ ID NO: 353856 - DNA, 19 bp, Homo sapiens
  siRNA target sequence for KIAA0632 (NM_015545.2,930-948).
ctcgatgtgttcaaggaaa

SEQ ID NO: 353857 - DNA, 19 bp, Homo sapiens
  siRNA target sequence for KIAA0632 (NM_015545.2,1682-1700).
ggccgacctgacattcttt

SEQ ID NO: 353858 - DNA, 19 bp, Homo sapiens
  siRNA target sequence for KIAA0632 (NM_015545.2,1683-1701).
gccgacctgacattcttta

SEQ ID NO: 353859 - DNA, 19 bp, Homo sapiens
  siRNA target sequence for KIAA0632 (NM_015545.2,1684-1702).
ccgacctgacattctttaa

SEQ ID NO: 353860 - DNA, 19 bp, Homo sapiens
  siRNA target sequence for KIAA0632 (NM_015545.2,1884-1902).
cccaacactcacatctaca

SEQ ID NO: 353861 - DNA, 19 bp, Homo sapiens
  siRNA target sequence for KIAA0632 (NM_015545.2,1921-1939).
ccatcaggaagctgaacta

SEQ ID NO: 353862 - DNA, 19 bp, Homo sapiens
  siRNA target sequence for KIAA0632 (NM_015545.2,1932-1950).
ctgaactacacctatctca

SEQ ID NO: 353863 - DNA, 19 bp, Homo sapiens
  siRNA target sequence for KIAA0632 (NM_015545.2,2049-2067).
cggtaccaagggaagaaca

SEQ ID NO: 353864 - DNA, 19 bp, Homo sapiens
  siRNA target sequence for KIAA0632 (NM_015545.2,2088-2106).
ggcttccgagcctattaca

SEQ ID NO: 353865 - DNA, 19 bp, Homo sapiens
  siRNA target sequence for KIAA0632 (NM_015545.2,2089-2107).
gcttccgagcctattacaa

SEQ ID NO: 353866 - DNA, 19 bp, Homo sapiens
  siRNA target sequence for KIAA0632 (NM_015545.2,2143-2161).
cgcacccctggcagaagtt

SEQ ID NO: 353867 - DNA, 19 bp, Homo sapiens
  siRNA target sequence for PIP3-E (NM_015553.1,215-233).
gaggaaaactcaaggtttt

SEQ ID NO: 353868 - DNA, 19 bp, Homo sapiens
  siRNA target sequence for PIP3-E (NM_015553.1,248-266).
gaggaggatatcgtgtaaa

SEQ ID NO: 353869 - DNA, 19 bp, Homo sapiens
  siRNA target sequence for PIP3-E (NM_015553.1,250-268).
ggaggatatcgtgtaaaga

SEQ ID NO: 353870 - DNA, 19 bp, Homo sapiens
  siRNA target sequence for PIP3-E (NM_015553.1,251-269).
gaggatatcgtgtaaagat

SEQ ID NO: 353871 - DNA, 19 bp, Homo sapiens
  siRNA target sequence for PIP3-E (NM_015553.1,286-304).
gccaagggtggctgtataa

SEQ ID NO: 353872 - DNA, 19 bp, Homo sapiens
  siRNA target sequence for PIP3-E (NM_015553.1,292-310).
ggtggctgtataagaaaaa

SEQ ID NO: 353873 - DNA, 19 bp, Homo sapiens
  siRNA target sequence for PIP3-E (NM_015553.1,326-344).
cctaagcaacaaatggaaa

SEQ ID NO: 353874 - DNA, 19 bp, Homo sapiens
  siRNA target sequence for PIP3-E (NM_015553.1,327-345).
ctaagcaacaaatggaaaa

SEQ ID NO: 353875 - DNA, 19 bp, Homo sapiens
  siRNA target sequence for PIP3-E (NM_015553.1,377-395).
gtactggtatagcaatcaa

SEQ ID NO: 353876 - DNA, 19 bp, Homo sapiens
  siRNA target sequence for PIP3-E (NM_015553.1,534-552).
gaaatgaacgtgtggttaa

SEQ ID NO: 353877 - DNA, 19 bp, Homo sapiens
  siRNA target sequence for PIP3-E (NM_015553.1,576-594).
catcaggaatccactacaa

SEQ ID NO: 353878 - DNA, 19 bp, Homo sapiens
  siRNA target sequence for PIP3-E (NM_015553.1,586-604).
ccactacaaaggatgaaga

SEQ ID NO: 353879 - DNA, 19 bp, Homo sapiens
  siRNA target sequence for PIP3-E (NM_015553.1,587-605).
cactacaaaggatgaagaa

SEQ ID NO: 353880 - DNA, 19 bp, Homo sapiens
  siRNA target sequence for PIP3-E (NM_015553.1,723-741).
ctgagtggaacgtcgtatt

SEQ ID NO: 353881 - DNA, 19 bp, Homo sapiens
  siRNA target sequence for PIP3-E (NM_015553.1,725-743).
gagtggaacgtcgtattct

SEQ ID NO: 353882 - DNA, 19 bp, Homo sapiens
  siRNA target sequence for PIP3-E (NM_015553.1,727-745).
gtggaacgtcgtattcttt

SEQ ID NO: 353883 - DNA, 19 bp, Homo sapiens
  siRNA target sequence for PIP3-E (NM_015553.1,819-837).
cctgacacagttaacagtt

SEQ ID NO: 353884 - DNA, 19 bp, Homo sapiens
  siRNA target sequence for PIP3-E (NM_015553.1,820-838).
ctgacacagttaacagttt

SEQ ID NO: 353885 - DNA, 19 bp, Homo sapiens
  siRNA target sequence for PIP3-E (NM_015553.1,822-840).
gacacagttaacagtttgt

SEQ ID NO: 353886 - DNA, 19 bp, Homo sapiens
  siRNA target sequence for PIP3-E (NM_015553.1,852-870).
gatgagggacaaccaataa

SEQ ID NO: 353887 - DNA, 19 bp, Homo sapiens
  siRNA target sequence for PIP3-E (NM_015553.1,855-873).
gagggacaaccaataacgt

SEQ ID NO: 353888 - DNA, 19 bp, Homo sapiens
  siRNA target sequence for PIP3-E (NM_015553.1,857-875).
gggacaaccaataacgttt

SEQ ID NO: 353889 - DNA, 19 bp, Homo sapiens
  siRNA target sequence for PIP3-E (NM_015553.1,871-889).
cgtttgctgtgcaagttca

SEQ ID NO: 353890 - DNA, 19 bp, Homo sapiens
  siRNA target sequence for PIP3-E (NM_015553.1,872-890).
gtttgctgtgcaagttcat

SEQ ID NO: 353891 - DNA, 19 bp, Homo sapiens
  siRNA target sequence for PIP3-E (NM_015553.1,968-986).
ctctttatctagtgatgat

SEQ ID NO: 353892 - DNA, 19 bp, Homo sapiens
  siRNA target sequence for PIP3-E (NM_015553.1,979-997).
gtgatgatacttcttcatt

SEQ ID NO: 353893 - DNA, 19 bp, Homo sapiens
  siRNA target sequence for PIP3-E (NM_015553.1,994-1012).
cattgagtagcaatcatga

SEQ ID NO: 353894 - DNA, 19 bp, Homo sapiens
  siRNA target sequence for PIP3-E (NM_015553.1,1146-1164).
cgacgaccttcgactaaaa

SEQ ID NO: 353895 - DNA, 19 bp, Homo sapiens
  siRNA target sequence for PIP3-E (NM_015553.1,1147-1165).
gacgaccttcgactaaaaa

SEQ ID NO: 353896 - DNA, 19 bp, Homo sapiens
  siRNA target sequence for PIP3-E (NM_015553.1,1181-1199).
ctttgttaagcggtgtaaa

SEQ ID NO: 353897 - DNA, 19 bp, Homo sapiens
  siRNA target sequence for PIP3-E (NM_015553.1,1195-1213).
gtaaaaatccatctataaa

SEQ ID NO: 353898 - DNA, 19 bp, Homo sapiens
  siRNA target sequence for PIP3-E (NM_015553.1,1224-1242).
cacaaaatccgaacattga

SEQ ID NO: 353899 - DNA, 19 bp, Homo sapiens
  siRNA target sequence for PIP3-E (NM_015553.1,1266-1284).
catgatctggccatgatta

SEQ ID NO: 353900 - DNA, 19 bp, Homo sapiens
  siRNA target sequence for PIP3-E (NM_015553.1,1308-1326).
ctgacagccaggaaataca

SEQ ID NO: 353901 - DNA, 19 bp, Homo sapiens
  siRNA target sequence for PIP3-E (NM_015553.1,1329-1347).
gagtggaaagtcatgaaca

SEQ ID NO: 353902 - DNA, 19 bp, Homo sapiens
  siRNA target sequence for PIP3-E (NM_015553.1,1416-1434).
ccccaggaactcaagaaat

SEQ ID NO: 353903 - DNA, 19 bp, Homo sapiens
  siRNA target sequence for ZNF294 (NM_015565.1,110-128).
gaacaagcagcgaactaaa

SEQ ID NO: 353904 - DNA, 19 bp, Homo sapiens
  siRNA target sequence for ZNF294 (NM_015565.1,130-148).
ggaacctgaggccttcaaa

SEQ ID NO: 353905 - DNA, 19 bp, Homo sapiens
  siRNA target sequence for ZNF294 (NM_015565.1,134-152).
cctgaggccttcaaacagt

SEQ ID NO: 353906 - DNA, 19 bp, Homo sapiens
  siRNA target sequence for ZNF294 (NM_015565.1,224-242).
gagtgacctaggctatgtt

SEQ ID NO: 353907 - DNA, 19 bp, Homo sapiens
  siRNA target sequence for ZNF294 (NM_015565.1,469-487).
ccacacaacaagcttttga

SEQ ID NO: 353908 - DNA, 19 bp, Homo sapiens
  siRNA target sequence for ZNF294 (NM_015565.1,513-531).
cagttggctccctacttaa

SEQ ID NO: 353909 - DNA, 19 bp, Homo sapiens
  siRNA target sequence for ZNF294 (NM_015565.1,515-533).
gttggctccctacttaaaa

SEQ ID NO: 353910 - DNA, 19 bp, Homo sapiens
  siRNA target sequence for ZNF294 (NM_015565.1,519-537).
gctccctacttaaaaagtt

SEQ ID NO: 353911 - DNA, 19 bp, Homo sapiens
  siRNA target sequence for ZNF294 (NM_015565.1,552-570).
ctaatggctcagtgtgata

SEQ ID NO: 353912 - DNA, 19 bp, Homo sapiens
  siRNA target sequence for ZNF294 (NM_015565.1,633-651).
caacctgaagccatagcat

SEQ ID NO: 353913 - DNA, 19 bp, Homo sapiens
  siRNA target sequence for ZNF294 (NM_015565.1,644-662).
catagcattttgtaaggat

SEQ ID NO: 353914 - DNA, 19 bp, Homo sapiens
  siRNA target sequence for ZNF294 (NM_015565.1,673-691).
gtgtgctgcaggatcatct

SEQ ID NO: 353915 - DNA, 19 bp, Homo sapiens
  siRNA target sequence for ZNF294 (NM_015565.1,677-695).
gctgcaggatcatcttata

SEQ ID NO: 353916 - DNA, 19 bp, Homo sapiens
  siRNA target sequence for ZNF294 (NM_015565.1,680-698).
gcaggatcatcttataaaa

SEQ ID NO: 353917 - DNA, 19 bp, Homo sapiens
  siRNA target sequence for ZNF294 (NM_015565.1,761-779).
ctaccgggttgtaacttgt

SEQ ID NO: 353918 - DNA, 19 bp, Homo sapiens
  siRNA target sequence for ZNF294 (NM_015565.1,767-785).
ggttgtaacttgttcctta

SEQ ID NO: 353919 - DNA, 19 bp, Homo sapiens
  siRNA target sequence for ZNF294 (NM_015565.1,808-826).
gccttttacctgataatga

SEQ ID NO: 353920 - DNA, 19 bp, Homo sapiens
  siRNA target sequence for ZNF294 (NM_015565.1,843-861).
gagaaatttaagtctcttt

SEQ ID NO: 353921 - DNA, 19 bp, Homo sapiens
  siRNA target sequence for ZNF294 (NM_015565.1,845-863).
gaaatttaagtctctttta

SEQ ID NO: 353922 - DNA, 19 bp, Homo sapiens
  siRNA target sequence for ZNF294 (NM_015565.1,869-887).
gaataagttttggaagtat

SEQ ID NO: 353923 - DNA, 19 bp, Homo sapiens
  siRNA target sequence for ZNF294 (NM_015565.1,912-930).
cgctcagcttattttgagt

SEQ ID NO: 353924 - DNA, 19 bp, Homo sapiens
  siRNA target sequence for ZNF294 (NM_015565.1,918-936).
gcttattttgagttagtct

SEQ ID NO: 353925 - DNA, 19 bp, Homo sapiens
  siRNA target sequence for ZNF294 (NM_015565.1,983-1001).
caaagtgagcccatcagtt

SEQ ID NO: 353926 - DNA, 19 bp, Homo sapiens
  siRNA target sequence for ZNF294 (NM_015565.1,1049-1067).
ggaagctgtactctataca

SEQ ID NO: 353927 - DNA, 19 bp, Homo sapiens
  siRNA target sequence for ZNF294 (NM_015565.1,1053-1071).
gctgtactctatacactta

SEQ ID NO: 353928 - DNA, 19 bp, Homo sapiens
  siRNA target sequence for ZNF294 (NM_015565.1,1056-1074).
gtactctatacacttacaa

SEQ ID NO: 353929 - DNA, 19 bp, Homo sapiens
  siRNA target sequence for ZNF294 (NM_015565.1,1059-1077).
ctctatacacttacaacta

SEQ ID NO: 353930 - DNA, 19 bp, Homo sapiens
  siRNA target sequence for ZNF294 (NM_015565.1,1157-1175).
gggtctagctactgtcata

SEQ ID NO: 353931 - DNA, 19 bp, Homo sapiens
  siRNA target sequence for ZNF294 (NM_015565.1,1158-1176).
ggtctagctactgtcatat

SEQ ID NO: 353932 - DNA, 19 bp, Homo sapiens
  siRNA target sequence for ZNF294 (NM_015565.1,1159-1177).
gtctagctactgtcatata

SEQ ID NO: 353933 - DNA, 19 bp, Homo sapiens
  siRNA target sequence for ZNF294 (NM_015565.1,1164-1182).
gctactgtcatatatcctt

SEQ ID NO: 353934 - DNA, 19 bp, Homo sapiens
  siRNA target sequence for ZNF294 (NM_015565.1,1165-1183).
ctactgtcatatatcctta

SEQ ID NO: 353935 - DNA, 19 bp, Homo sapiens
  siRNA target sequence for ZNF294 (NM_015565.1,1216-1234).
ccatcacaaatccaaagtt

SEQ ID NO: 353936 - DNA, 19 bp, Homo sapiens
  siRNA target sequence for ZNF294 (NM_015565.1,1275-1293).
ctgtcaacagagagaacta

SEQ ID NO: 353937 - DNA, 19 bp, Homo sapiens
  siRNA target sequence for ZNF294 (NM_015565.1,1308-1326).
gagtcctcggcagtaatat

SEQ ID NO: 353938 - DNA, 19 bp, Homo sapiens
  siRNA target sequence for ZNF294 (NM_015565.1,1310-1328).
gtcctcggcagtaatatct

SEQ ID NO: 353939 - DNA, 19 bp, Homo sapiens
  siRNA target sequence for ZNF294 (NM_015565.1,1338-1356).
gaatgcttacgttttataa

SEQ ID NO: 353940 - DNA, 19 bp, Homo sapiens
  siRNA target sequence for ZNF294 (NM_015565.1,1342-1360).
gcttacgttttataatgca

SEQ ID NO: 353941 - DNA, 19 bp, Homo sapiens
  siRNA target sequence for ZNF294 (NM_015565.1,1451-1469).
gcaacatgggcagctattt

SEQ ID NO: 353942 - DNA, 19 bp, Homo sapiens
  siRNA target sequence for ZNF294 (NM_015565.1,1452-1470).
caacatgggcagctattta

SEQ ID NO: 353943 - DNA, 19 bp, Homo sapiens
  siRNA target sequence for ZNF294 (NM_015565.1,1458-1476).
gggcagctatttaaccatt

SEQ ID NO: 353944 - DNA, 19 bp, Homo sapiens
  siRNA target sequence for ZNF294 (NM_015565.1,1472-1490).
ccatttagcagaaactcta

SEQ ID NO: 353945 - DNA, 19 bp, Homo sapiens
  siRNA target sequence for ZNF294 (NM_015565.1,1547-1565).
ggagaacgtactgatacat

SEQ ID NO: 353946 - DNA, 19 bp, Homo sapiens
  siRNA target sequence for ZNF294 (NM_015565.1,1589-1607).
ctgtgttgcgaaaatcagt

SEQ ID NO: 353947 - DNA, 19 bp, Homo sapiens
  siRNA target sequence for ZNF294 (NM_015565.1,1628-1646).
gtccgttttgggtgtatct

SEQ ID NO: 353948 - DNA, 19 bp, Homo sapiens
  siRNA target sequence for ZNF294 (NM_015565.1,1630-1648).
ccgttttgggtgtatctaa

SEQ ID NO: 353949 - DNA, 19 bp, Homo sapiens
  siRNA target sequence for ZNF294 (NM_015565.1,1637-1655).
gggtgtatctaacctatta

SEQ ID NO: 353950 - DNA, 19 bp, Homo sapiens
  siRNA target sequence for ZNF294 (NM_015565.1,1639-1657).
gtgtatctaacctattaca

SEQ ID NO: 353951 - DNA, 19 bp, Homo sapiens
  siRNA target sequence for ZNF294 (NM_015565.1,1671-1689).
ccgaagagctcattgaagt

SEQ ID NO: 353952 - DNA, 19 bp, Homo sapiens
  siRNA target sequence for ZNF294 (NM_015565.1,1678-1696).
gctcattgaagtcaagtaa

SEQ ID NO: 353953 - DNA, 19 bp, Homo sapiens
  siRNA target sequence for ZNF294 (NM_015565.1,1681-1699).
cattgaagtcaagtaaaaa

SEQ ID NO: 353954 - DNA, 19 bp, Homo sapiens
  siRNA target sequence for ZNF294 (NM_015565.1,1848-1866).
cctctaaggaaaaaacctt

SEQ ID NO: 353955 - DNA, 19 bp, Homo sapiens
  siRNA target sequence for ZNF294 (NM_015565.1,1849-1867).
ctctaaggaaaaaaccttt

SEQ ID NO: 353956 - DNA, 19 bp, Homo sapiens
  siRNA target sequence for ZNF294 (NM_015565.1,1863-1881).
cctttggaagacttagtct

SEQ ID NO: 353957 - DNA, 19 bp, Homo sapiens
  siRNA target sequence for ZNF294 (NM_015565.1,1880-1898).
ctgtaaactcgcagatata

SEQ ID NO: 353958 - DNA, 19 bp, Homo sapiens
  siRNA target sequence for ZNF294 (NM_015565.1,1889-1907).
cgcagatataagtattaat

SEQ ID NO: 353959 - DNA, 19 bp, Homo sapiens
  siRNA target sequence for ZNF294 (NM_015565.1,1927-1945).
cagagcaacatctaaggtt

SEQ ID NO: 353960 - DNA, 19 bp, Homo sapiens
  siRNA target sequence for ZNF294 (NM_015565.1,1972-1990).
cttcaagccgagtatttaa

SEQ ID NO: 353961 - DNA, 19 bp, Homo sapiens
  siRNA target sequence for ZNF294 (NM_015565.1,1975-1993).
caagccgagtatttaaaat

SEQ ID NO: 353962 - DNA, 19 bp, Homo sapiens
  siRNA target sequence for ZNF294 (NM_015565.1,1978-1996).
gccgagtatttaaaatgct

SEQ ID NO: 353963 - DNA, 19 bp, Homo sapiens
  siRNA target sequence for ZNF294 (NM_015565.1,2067-2085).
cctgcggtgcagtttttat

SEQ ID NO: 353964 - DNA, 19 bp, Homo sapiens
  siRNA target sequence for ZNF294 (NM_015565.1,2165-2183).
ccggtgctgtgacaatgat

SEQ ID NO: 353965 - DNA, 19 bp, Homo sapiens
  siRNA target sequence for ZNF294 (NM_015565.1,2166-2184).
cggtgctgtgacaatgata

SEQ ID NO: 353966 - DNA, 19 bp, Homo sapiens
  siRNA target sequence for ZNF294 (NM_015565.1,2167-2185).
ggtgctgtgacaatgatat

SEQ ID NO: 353967 - DNA, 19 bp, Homo sapiens
  siRNA target sequence for ZNF294 (NM_015565.1,2233-2251).
ggaattctcttcttaagat

SEQ ID NO: 353968 - DNA, 19 bp, Homo sapiens
  siRNA target sequence for ZNF294 (NM_015565.1,2261-2279).
ggcatgtcctagttcagat

SEQ ID NO: 353969 - DNA, 19 bp, Homo sapiens
  siRNA target sequence for ZNF294 (NM_015565.1,2266-2284).
gtcctagttcagataaaca

SEQ ID NO: 353970 - DNA, 19 bp, Homo sapiens
  siRNA target sequence for ZNF294 (NM_015565.1,2303-2321).
gctcaaaggcgatatcctt

SEQ ID NO: 353971 - DNA, 19 bp, Homo sapiens
  siRNA target sequence for ZNF294 (NM_015565.1,2312-2330).
cgatatccttggtgagaaa

SEQ ID NO: 353972 - DNA, 19 bp, Homo sapiens
  siRNA target sequence for ZNF294 (NM_015565.1,2333-2351).
ggtcaacttggcagattgt

SEQ ID NO: 353973 - DNA, 19 bp, Homo sapiens
  siRNA target sequence for ZNF294 (NM_015565.1,2369-2387).
ggaatccagggtatcttca

SEQ ID NO: 353974 - DNA, 19 bp, Homo sapiens
  siRNA target sequence for ZNF294 (NM_015565.1,2375-2393).
cagggtatcttcagaatct

SEQ ID NO: 353975 - DNA, 19 bp, Homo sapiens
  siRNA target sequence for ZNF294 (NM_015565.1,2459-2477).
gattggagacgtatatgtt

SEQ ID NO: 353976 - DNA, 19 bp, Homo sapiens
  siRNA target sequence for ZNF294 (NM_015565.1,2463-2481).
ggagacgtatatgttgaaa

SEQ ID NO: 353977 - DNA, 19 bp, Homo sapiens
  siRNA target sequence for ZNF294 (NM_015565.1,2598-2616).
gcgaaaggatgcttgctaa

SEQ ID NO: 353978 - DNA, 19 bp, Homo sapiens
  siRNA target sequence for ZNF294 (NM_015565.1,2599-2617).
cgaaaggatgcttgctaat

SEQ ID NO: 353979 - DNA, 19 bp, Homo sapiens
  siRNA target sequence for ZNF294 (NM_015565.1,2609-2627).
cttgctaatgccatcatct

SEQ ID NO: 353980 - DNA, 19 bp, Homo sapiens
  siRNA target sequence for ZNF294 (NM_015565.1,2682-2700).
catttgccagattttctta

SEQ ID NO: 353981 - DNA, 19 bp, Homo sapiens
  siRNA target sequence for ZNF294 (NM_015565.1,2722-2740).
ggctctctggtgtaaattt

SEQ ID NO: 353982 - DNA, 19 bp, Homo sapiens
  siRNA target sequence for ZNF294 (NM_015565.1,2728-2746).
ctggtgtaaatttattggt

SEQ ID NO: 353983 - DNA, 19 bp, Homo sapiens
  siRNA target sequence for ZNF294 (NM_015565.1,2748-2766).
catcaaactgacagttcat

SEQ ID NO: 353984 - DNA, 19 bp, Homo sapiens
  siRNA target sequence for ZNF294 (NM_015565.1,2772-2790).
gagagtaccttcctacatt

SEQ ID NO: 353985 - DNA, 19 bp, Homo sapiens
  siRNA target sequence for ZNF294 (NM_015565.1,2889-2907).
cttctagagagtgaagatt

SEQ ID NO: 353986 - DNA, 19 bp, Homo sapiens
  siRNA target sequence for ZNF294 (NM_015565.1,3015-3033).
ggaagattgagtttgaatt

SEQ ID NO: 353987 - DNA, 19 bp, Homo sapiens
  siRNA target sequence for ZNF294 (NM_015565.1,3016-3034).
gaagattgagtttgaatta

SEQ ID NO: 353988 - DNA, 19 bp, Homo sapiens
  siRNA target sequence for ZNF294 (NM_015565.1,3103-3121).
cattattgagcaaaatggt

SEQ ID NO: 353989 - DNA, 19 bp, Homo sapiens
  siRNA target sequence for ZNF294 (NM_015565.1,3113-3131).
caaaatggtcttaattgca

SEQ ID NO: 353990 - DNA, 19 bp, Homo sapiens
  siRNA target sequence for ZNF294 (NM_015565.1,3203-3221).
gtggtgtgaagaattagat

SEQ ID NO: 353991 - DNA, 19 bp, Homo sapiens
  siRNA target sequence for ZNF294 (NM_015565.1,3291-3309).
cgtgtacttggtaatacgt

SEQ ID NO: 353992 - DNA, 19 bp, Homo sapiens
  siRNA target sequence for ZNF294 (NM_015565.1,3312-3330).
ggccttttgcagctgttat

SEQ ID NO: 353993 - DNA, 19 bp, Homo sapiens
  siRNA target sequence for ZNF294 (NM_015565.1,3352-3370).
gcacactgtggtctcttat

SEQ ID NO: 353994 - DNA, 19 bp, Homo sapiens
  siRNA target sequence for ZNF294 (NM_015565.1,3353-3371).
cacactgtggtctcttatt

SEQ ID NO: 353995 - DNA, 19 bp, Homo sapiens
  siRNA target sequence for ZNF294 (NM_015565.1,3355-3373).
cactgtggtctcttattat

SEQ ID NO: 353996 - DNA, 19 bp, Homo sapiens
  siRNA target sequence for ZNF294 (NM_015565.1,3361-3379).
ggtctcttattattgctaa

SEQ ID NO: 353997 - DNA, 19 bp, Homo sapiens
  siRNA target sequence for ZNF294 (NM_015565.1,3386-3404).
cctttcccgaagcatttca

SEQ ID NO: 353998 - DNA, 19 bp, Homo sapiens
  siRNA target sequence for ZNF294 (NM_015565.1,3392-3410).
ccgaagcatttcatctgat

SEQ ID NO: 353999 - DNA, 19 bp, Homo sapiens
  siRNA target sequence for ZNF294 (NM_015565.1,3451-3469).
cactaactgaaggcaattt

SEQ ID NO: 354000 - DNA, 19 bp, Homo sapiens
  siRNA target sequence for ZNF294 (NM_015565.1,3480-3498).
caaagtctatgtccatttt

SEQ ID NO: 354001 - DNA, 19 bp, Homo sapiens
  siRNA target sequence for ZNF294 (NM_015565.1,3486-3504).
ctatgtccatttttgtcaa

SEQ ID NO: 354002 - DNA, 19 bp, Homo sapiens
  siRNA target sequence for ZNF294 (NM_015565.1,3551-3569).
gggctggactaagaaagat

SEQ ID NO: 354003 - DNA, 19 bp, Homo sapiens
  siRNA target sequence for ZNF294 (NM_015565.1,3575-3593).
cagcactaatggaggtttt

SEQ ID NO: 354004 - DNA, 19 bp, Homo sapiens
  siRNA target sequence for ZNF294 (NM_015565.1,3578-3596).
cactaatggaggttttgga

SEQ ID NO: 354005 - DNA, 19 bp, Homo sapiens
  siRNA target sequence for ZNF294 (NM_015565.1,3674-3692).
cataatatcctggaagaaa

SEQ ID NO: 354006 - DNA, 19 bp, Homo sapiens
  siRNA target sequence for ZNF294 (NM_015565.1,3750-3768).
ctgggtgtaaatatagaaa

SEQ ID NO: 354007 - DNA, 19 bp, Homo sapiens
  siRNA target sequence for ZNF294 (NM_015565.1,3765-3783).
gaaataatccggtttcttt

SEQ ID NO: 354008 - DNA, 19 bp, Homo sapiens
  siRNA target sequence for ZNF294 (NM_015565.1,3773-3791).
ccggtttctttccctattt

SEQ ID NO: 354009 - DNA, 19 bp, Homo sapiens
  siRNA target sequence for ZNF294 (NM_015565.1,3823-3841).
gtgagtgggacttcatcat

SEQ ID NO: 354010 - DNA, 19 bp, Homo sapiens
  siRNA target sequence for ZNF294 (NM_015565.1,3825-3843).
gagtgggacttcatcatgt

SEQ ID NO: 354011 - DNA, 19 bp, Homo sapiens
  siRNA target sequence for ZNF294 (NM_015565.1,3874-3892).
gtgagaatcaggcattgta

SEQ ID NO: 354012 - DNA, 19 bp, Homo sapiens
  siRNA target sequence for ZNF294 (NM_015565.1,3967-3985).
ccacaactctggataccat

SEQ ID NO: 354013 - DNA, 19 bp, Homo sapiens
  siRNA target sequence for ZNF294 (NM_015565.1,3968-3986).
cacaactctggataccatt

SEQ ID NO: 354014 - DNA, 19 bp, Homo sapiens
  siRNA target sequence for ZNF294 (NM_015565.1,3999-4017).
gtaaatctaatcagtgaat

SEQ ID NO: 354015 - DNA, 19 bp, Homo sapiens
  siRNA target sequence for ZNF294 (NM_015565.1,4038-4056).
ggcatccacagtttgcttt

SEQ ID NO: 354016 - DNA, 19 bp, Homo sapiens
  siRNA target sequence for ZNF294 (NM_015565.1,4044-4062).
cacagtttgcttttaccta

SEQ ID NO: 354017 - DNA, 19 bp, Homo sapiens
  siRNA target sequence for ZNF294 (NM_015565.1,4059-4077).
cctattttggtgactgtta

SEQ ID NO: 354018 - DNA, 19 bp, Homo sapiens
  siRNA target sequence for ZNF294 (NM_015565.1,4125-4143).
ctgaaacccatgtgtgaaa

SEQ ID NO: 354019 - DNA, 19 bp, Homo sapiens
  siRNA target sequence for ZNF294 (NM_015565.1,4131-4149).
cccatgtgtgaaacattaa

SEQ ID NO: 354020 - DNA, 19 bp, Homo sapiens
  siRNA target sequence for ZNF294 (NM_015565.1,4138-4156).
gtgaaacattaacgtatat

SEQ ID NO: 354021 - DNA, 19 bp, Homo sapiens
  siRNA target sequence for ZNF294 (NM_015565.1,4169-4187).
gctattgagtcacaaactt

SEQ ID NO: 354022 - DNA, 19 bp, Homo sapiens
  siRNA target sequence for ZNF294 (NM_015565.1,4195-4213).
gattagttgctgaccaaaa

SEQ ID NO: 354023 - DNA, 19 bp, Homo sapiens
  siRNA target sequence for ZNF294 (NM_015565.1,4203-4221).
gctgaccaaaaaacaaact

SEQ ID NO: 354024 - DNA, 19 bp, Homo sapiens
  siRNA target sequence for ZNF294 (NM_015565.1,4204-4222).
ctgaccaaaaaacaaactt

SEQ ID NO: 354025 - DNA, 19 bp, Homo sapiens
  siRNA target sequence for ZNF294 (NM_015565.1,4276-4294).
gagctaggcctgtgcaaat

SEQ ID NO: 354026 - DNA, 19 bp, Homo sapiens
  siRNA target sequence for ZNF294 (NM_015565.1,4299-4317).
gtttatcatatgctataca

SEQ ID NO: 354027 - DNA, 19 bp, Homo sapiens
  siRNA target sequence for ZNF294 (NM_015565.1,4325-4343).
gcctgaattaccacagtat

SEQ ID NO: 354028 - DNA, 19 bp, Homo sapiens
  siRNA target sequence for ZNF294 (NM_015565.1,4340-4358).
gtatgatcaggataatcta

SEQ ID NO: 354029 - DNA, 19 bp, Homo sapiens
  siRNA target sequence for ZNF294 (NM_015565.1,4412-4430).
gatgtctcttcttagcatt

SEQ ID NO: 354030 - DNA, 19 bp, Homo sapiens
  siRNA target sequence for ZNF294 (NM_015565.1,4470-4488).
gttggacagatagttacta

SEQ ID NO: 354031 - DNA, 19 bp, Homo sapiens
  siRNA target sequence for ZNF294 (NM_015565.1,4473-4491).
ggacagatagttactatta

SEQ ID NO: 354032 - DNA, 19 bp, Homo sapiens
  siRNA target sequence for ZNF294 (NM_015565.1,4474-4492).
gacagatagttactattaa

SEQ ID NO: 354033 - DNA, 19 bp, Homo sapiens
  siRNA target sequence for ZNF294 (NM_015565.1,4540-4558).
ggaaattaatactaacttt

SEQ ID NO: 354034 - DNA, 19 bp, Homo sapiens
  siRNA target sequence for ZNF294 (NM_015565.1,4586-4604).
ggctttgtattccatgtat

SEQ ID NO: 354035 - DNA, 19 bp, Homo sapiens
  siRNA target sequence for ZNF294 (NM_015565.1,4686-4704).
gcagttgaggtcccaaata

SEQ ID NO: 354036 - DNA, 19 bp, Homo sapiens
  siRNA target sequence for ZNF294 (NM_015565.1,4711-4729).
ctaaaacattctttactga

SEQ ID NO: 354037 - DNA, 19 bp, Homo sapiens
  siRNA target sequence for ZNF294 (NM_015565.1,4730-4748).
ggagctccagctgagtatt

SEQ ID NO: 354038 - DNA, 19 bp, Homo sapiens
  siRNA target sequence for ZNF294 (NM_015565.1,4731-4749).
gagctccagctgagtatta

SEQ ID NO: 354039 - DNA, 19 bp, Homo sapiens
  siRNA target sequence for ZNF294 (NM_015565.1,4733-4751).
gctccagctgagtattaga

SEQ ID NO: 354040 - DNA, 19 bp, Homo sapiens
  siRNA target sequence for ZNF294 (NM_015565.1,4787-4805).
ggcttgttcagtctatcat

SEQ ID NO: 354041 - DNA, 19 bp, Homo sapiens
  siRNA target sequence for ZNF294 (NM_015565.1,4788-4806).
gcttgttcagtctatcata

SEQ ID NO: 354042 - DNA, 19 bp, Homo sapiens
  siRNA target sequence for ZNF294 (NM_015565.1,4789-4807).
cttgttcagtctatcatat

SEQ ID NO: 354043 - DNA, 19 bp, Homo sapiens
  siRNA target sequence for ZNF294 (NM_015565.1,4818-4836).
gacttgcctgccatggtta

SEQ ID NO: 354044 - DNA, 19 bp, Homo sapiens
  siRNA target sequence for ZNF294 (NM_015565.1,4857-4875).
gagaagcgtgttttcaata

SEQ ID NO: 354045 - DNA, 19 bp, Homo sapiens
  siRNA target sequence for ZNF294 (NM_015565.1,4941-4959).
caaacaagtacacaactat

SEQ ID NO: 354046 - DNA, 19 bp, Homo sapiens
  siRNA target sequence for ZNF294 (NM_015565.1,4987-5005).
ctactactcgagaggtaat

SEQ ID NO: 354047 - DNA, 19 bp, Homo sapiens
  siRNA target sequence for ZNF294 (NM_015565.1,4996-5014).
gagaggtaatggctactta

SEQ ID NO: 354048 - DNA, 19 bp, Homo sapiens
  siRNA target sequence for ZNF294 (NM_015565.1,5000-5018).
ggtaatggctacttatact

SEQ ID NO: 354049 - DNA, 19 bp, Homo sapiens
  siRNA target sequence for ZNF294 (NM_015565.1,5001-5019).
gtaatggctacttatacta

SEQ ID NO: 354050 - DNA, 19 bp, Homo sapiens
  siRNA target sequence for ZNF294 (NM_015565.1,5068-5086).
cactgggttcaataatagt

SEQ ID NO: 354051 - DNA, 19 bp, Homo sapiens
  siRNA target sequence for ZNF294 (NM_015565.1,5201-5219).
gaaaaataacgtagacaaa

SEQ ID NO: 354052 - DNA, 19 bp, Homo sapiens
  siRNA target sequence for ZNF294 (NM_015565.1,5259-5277).
gtcattcacggtttcaact

SEQ ID NO: 354053 - DNA, 19 bp, Homo sapiens
  siRNA target sequence for ZNF294 (NM_015565.1,5261-5279).
cattcacggtttcaactat

SEQ ID NO: 354054 - DNA, 19 bp, Homo sapiens
  siRNA target sequence for ZNF294 (NM_015565.1,5333-5351).
cttgtacaaatggtttaca

SEQ ID NO: 354055 - DNA, 19 bp, Homo sapiens
  siRNA target sequence for ZNF294 (NM_015565.1,5376-5394).
ctgtgtcgtgagacgtttt

SEQ ID NO: 354056 - DNA, 19 bp, Homo sapiens
  siRNA target sequence for SLITRK5 (NM_015567.1,295-313).
ctagcgtttgctgtaacat

SEQ ID NO: 354057 - DNA, 19 bp, Homo sapiens
  siRNA target sequence for SLITRK5 (NM_015567.1,329-347).
gtgcagaaaccatcgatta

SEQ ID NO: 354058 - DNA, 19 bp, Homo sapiens
  siRNA target sequence for SLITRK5 (NM_015567.1,452-470).
ctccccgtttcccaatcta

SEQ ID NO: 354059 - DNA, 19 bp, Homo sapiens
  siRNA target sequence for SLITRK5 (NM_015567.1,464-482).
caatctaccacctcttgtt

SEQ ID NO: 354060 - DNA, 19 bp, Homo sapiens
  siRNA target sequence for SLITRK5 (NM_015567.1,492-510).
ccttttgaaccgtctctat

SEQ ID NO: 354061 - DNA, 19 bp, Homo sapiens
  siRNA target sequence for SLITRK5 (NM_015567.1,549-567).
gcatctaggtagcaatgtt

SEQ ID NO: 354062 - DNA, 19 bp, Homo sapiens
  siRNA target sequence for SLITRK5 (NM_015567.1,550-568).
catctaggtagcaatgtta

SEQ ID NO: 354063 - DNA, 19 bp, Homo sapiens
  siRNA target sequence for SLITRK5 (NM_015567.1,606-624).
gggtttgaggagattgcat

SEQ ID NO: 354064 - DNA, 19 bp, Homo sapiens
  siRNA target sequence for SLITRK5 (NM_015567.1,642-660).
ggaacttctgcgagatgat

SEQ ID NO: 354065 - DNA, 19 bp, Homo sapiens
  siRNA target sequence for SLITRK5 (NM_015567.1,643-661).
gaacttctgcgagatgata

SEQ ID NO: 354066 - DNA, 19 bp, Homo sapiens
  siRNA target sequence for SLITRK5 (NM_015567.1,691-709).
ctacaggtcgattacaact

SEQ ID NO: 354067 - DNA, 19 bp, Homo sapiens
  siRNA target sequence for SLITRK5 (NM_015567.1,694-712).
caggtcgattacaactaca

SEQ ID NO: 354068 - DNA, 19 bp, Homo sapiens
  siRNA target sequence for SLITRK5 (NM_015567.1,697-715).
gtcgattacaactacatca

SEQ ID NO: 354069 - DNA, 19 bp, Homo sapiens
  siRNA target sequence for SLITRK5 (NM_015567.1,788-806).
ccagtttacccaacaatct

SEQ ID NO: 354070 - DNA, 19 bp, Homo sapiens
  siRNA target sequence for SLITRK5 (NM_015567.1,877-895).
ctcttgcagcacatggata

SEQ ID NO: 354071 - DNA, 19 bp, Homo sapiens
  siRNA target sequence for SLITRK5 (NM_015567.1,879-897).
cttgcagcacatggataaa

SEQ ID NO: 354072 - DNA, 19 bp, Homo sapiens
  siRNA target sequence for SLITRK5 (NM_015567.1,882-900).
gcagcacatggataaagtt

SEQ ID NO: 354073 - DNA, 19 bp, Homo sapiens
  siRNA target sequence for SLITRK5 (NM_015567.1,1051-1069).
gtatccaagcaggaacttt

SEQ ID NO: 354074 - DNA, 19 bp, Homo sapiens
  siRNA target sequence for SLITRK5 (NM_015567.1,1073-1091).
caaggagacttatttctga

SEQ ID NO: 354075 - DNA, 19 bp, Homo sapiens
  siRNA target sequence for SLITRK5 (NM_015567.1,1119-1137).
gagcaccacggggtattta

SEQ ID NO: 354076 - DNA, 19 bp, Homo sapiens
  siRNA target sequence for SLITRK5 (NM_015567.1,1121-1139).
gcaccacggggtatttaca

SEQ ID NO: 354077 - DNA, 19 bp, Homo sapiens
  siRNA target sequence for SLITRK5 (NM_015567.1,1375-1393).
gatctgggcctcaacgtaa

SEQ ID NO: 354078 - DNA, 19 bp, Homo sapiens
  siRNA target sequence for SLITRK5 (NM_015567.1,1378-1396).
ctgggcctcaacgtaaact

SEQ ID NO: 354079 - DNA, 19 bp, Homo sapiens
  siRNA target sequence for SLITRK5 (NM_015567.1,1431-1449).
gcagcccaagccctacaat

SEQ ID NO: 354080 - DNA, 19 bp, Homo sapiens
  siRNA target sequence for SLITRK5 (NM_015567.1,1440-1458).
gccctacaatcccaagaaa

SEQ ID NO: 354081 - DNA, 19 bp, Homo sapiens
  siRNA target sequence for SLITRK5 (NM_015567.1,1633-1651).
ctgagcccggagttattct

SEQ ID NO: 354082 - DNA, 19 bp, Homo sapiens
  siRNA target sequence for SLITRK5 (NM_015567.1,1635-1653).
gagcccggagttattctat

SEQ ID NO: 354083 - DNA, 19 bp, Homo sapiens
  siRNA target sequence for SLITRK5 (NM_015567.1,1693-1711).
ctcatccgcgagattcagt

SEQ ID NO: 354084 - DNA, 19 bp, Homo sapiens
  siRNA target sequence for SLITRK5 (NM_015567.1,1733-1751).
caaacctccagctgctatt

SEQ ID NO: 354085 - DNA, 19 bp, Homo sapiens
  siRNA target sequence for SLITRK5 (NM_015567.1,1805-1823).
ccctcctcaggctaaacct

SEQ ID NO: 354086 - DNA, 19 bp, Homo sapiens
  siRNA target sequence for SLITRK5 (NM_015567.1,1903-1921).
gacaatccttgggattgta

SEQ ID NO: 354087 - DNA, 19 bp, Homo sapiens
  siRNA target sequence for SLITRK5 (NM_015567.1,2021-2039).
ccgacatgcgctccattaa

SEQ ID NO: 354088 - DNA, 19 bp, Homo sapiens
  siRNA target sequence for SLITRK5 (NM_015567.1,2023-2041).
gacatgcgctccattaagt

SEQ ID NO: 354089 - DNA, 19 bp, Homo sapiens
  siRNA target sequence for SLITRK5 (NM_015567.1,2047-2065).
ctgctgtgccctgactatt

SEQ ID NO: 354090 - DNA, 19 bp, Homo sapiens
  siRNA target sequence for SLITRK5 (NM_015567.1,2049-2067).
gctgtgccctgactattca

SEQ ID NO: 354091 - DNA, 19 bp, Homo sapiens
  siRNA target sequence for SLITRK5 (NM_015567.1,2052-2070).
gtgccctgactattcagat

SEQ ID NO: 354092 - DNA, 19 bp, Homo sapiens
  siRNA target sequence for SLITRK5 (NM_015567.1,2055-2073).
ccctgactattcagatgta

SEQ ID NO: 354093 - DNA, 19 bp, Homo sapiens
  siRNA target sequence for SLITRK5 (NM_015567.1,2057-2075).
ctgactattcagatgtagt

SEQ ID NO: 354094 - DNA, 19 bp, Homo sapiens
  siRNA target sequence for SLITRK5 (NM_015567.1,2134-2152).
cctgcggtccggttgaata

SEQ ID NO: 354095 - DNA, 19 bp, Homo sapiens
  siRNA target sequence for SLITRK5 (NM_015567.1,2137-2155).
gcggtccggttgaatagca

SEQ ID NO: 354096 - DNA, 19 bp, Homo sapiens
  siRNA target sequence for SLITRK5 (NM_015567.1,2200-2218).
gtgcccttgtctgtgttaa

SEQ ID NO: 354097 - DNA, 19 bp, Homo sapiens
  siRNA target sequence for SLITRK5 (NM_015567.1,2333-2351).
ccgacgtgagctcctttaa

SEQ ID NO: 354098 - DNA, 19 bp, Homo sapiens
  siRNA target sequence for SLITRK5 (NM_015567.1,2455-2473).
ggccacgtgtatgaataca

SEQ ID NO: 354099 - DNA, 19 bp, Homo sapiens
  siRNA target sequence for SLITRK5 (NM_015567.1,2456-2474).
gccacgtgtatgaatacat

SEQ ID NO: 354100 - DNA, 19 bp, Homo sapiens
  siRNA target sequence for SLITRK5 (NM_015567.1,2767-2785).
gacgccgaccgcttttaca

SEQ ID NO: 354101 - DNA, 19 bp, Homo sapiens
  siRNA target sequence for SLITRK5 (NM_015567.1,2832-2850).
caatagcctcccggaatat

SEQ ID NO: 354102 - DNA, 19 bp, Homo sapiens
  siRNA target sequence for SLITRK5 (NM_015567.1,2976-2994).
cccgagtgctgtctttgta

SEQ ID NO: 354103 - DNA, 19 bp, Homo sapiens
  siRNA target sequence for SLITRK5 (NM_015567.1,2995-3013).
gaacccaaccggaacgaat

SEQ ID NO: 354104 - DNA, 19 bp, Homo sapiens
  siRNA target sequence for SLITRK5 (NM_015567.1,2999-3017).
ccaaccggaacgaatatct

SEQ ID NO: 354105 - DNA, 19 bp, Homo sapiens
  siRNA target sequence for TNRC15 (NM_015575.1,207-225).
gtccagtggtgggagtatt

SEQ ID NO: 354106 - DNA, 19 bp, Homo sapiens
  siRNA target sequence for TNRC15 (NM_015575.1,248-266).
cattgccgaagtataaatt

SEQ ID NO: 354107 - DNA, 19 bp, Homo sapiens
  siRNA target sequence for TNRC15 (NM_015575.1,252-270).
gccgaagtataaattagca

SEQ ID NO: 354108 - DNA, 19 bp, Homo sapiens
  siRNA target sequence for TNRC15 (NM_015575.1,258-276).
gtataaattagcagattat

SEQ ID NO: 354109 - DNA, 19 bp, Homo sapiens
  siRNA target sequence for TNRC15 (NM_015575.1,277-295).
cgttacggcagagaagaaa

SEQ ID NO: 354110 - DNA, 19 bp, Homo sapiens
  siRNA target sequence for TNRC15 (NM_015575.1,282-300).
cggcagagaagaaatgtta

SEQ ID NO: 354111 - DNA, 19 bp, Homo sapiens
  siRNA target sequence for TNRC15 (NM_015575.1,297-315).
gttagcacttttccttaaa

SEQ ID NO: 354112 - DNA, 19 bp, Homo sapiens
  siRNA target sequence for TNRC15 (NM_015575.1,392-410).
ctctggtaccctttacaga

SEQ ID NO: 354113 - DNA, 19 bp, Homo sapiens
  siRNA target sequence for TNRC15 (NM_015575.1,502-520).
cctagaggtcgaagttctt

SEQ ID NO: 354114 - DNA, 19 bp, Homo sapiens
  siRNA target sequence for TNRC15 (NM_015575.1,553-571).
ggtttctaccaaagaagtt

SEQ ID NO: 354115 - DNA, 19 bp, Homo sapiens
  siRNA target sequence for TNRC15 (NM_015575.1,566-584).
gaagttttgatgaagtaga

SEQ ID NO: 354116 - DNA, 19 bp, Homo sapiens
  siRNA target sequence for TNRC15 (NM_015575.1,644-662).
ggggtgacagacgttttga

SEQ ID NO: 354117 - DNA, 19 bp, Homo sapiens
  siRNA target sequence for TNRC15 (NM_015575.1,645-663).
gggtgacagacgttttgaa

SEQ ID NO: 354118 - DNA, 19 bp, Homo sapiens
  siRNA target sequence for TNRC15 (NM_015575.1,646-664).
ggtgacagacgttttgaaa

SEQ ID NO: 354119 - DNA, 19 bp, Homo sapiens
  siRNA target sequence for TNRC15 (NM_015575.1,651-669).
cagacgttttgaaaaacca

SEQ ID NO: 354120 - DNA, 19 bp, Homo sapiens
  siRNA target sequence for TNRC15 (NM_015575.1,702-720).
ggaaggtggaccaacatca

SEQ ID NO: 354121 - DNA, 19 bp, Homo sapiens
  siRNA target sequence for TNRC15 (NM_015575.1,736-754).
gaatttatacgctcagaaa

SEQ ID NO: 354122 - DNA, 19 bp, Homo sapiens
  siRNA target sequence for TNRC15 (NM_015575.1,745-763).
cgctcagaaagtgaaaatt

SEQ ID NO: 354123 - DNA, 19 bp, Homo sapiens
  siRNA target sequence for TNRC15 (NM_015575.1,904-922).
cgacgtcggaggtttgagt

SEQ ID NO: 354124 - DNA, 19 bp, Homo sapiens
  siRNA target sequence for TNRC15 (NM_015575.1,905-923).
gacgtcggaggtttgagtt

SEQ ID NO: 354125 - DNA, 19 bp, Homo sapiens
  siRNA target sequence for TNRC15 (NM_015575.1,1061-1079).
ctggagcattcctttctct

SEQ ID NO: 354126 - DNA, 19 bp, Homo sapiens
  siRNA target sequence for TNRC15 (NM_015575.1,1064-1082).
gagcattcctttctctaaa

SEQ ID NO: 354127 - DNA, 19 bp, Homo sapiens
  siRNA target sequence for TNRC15 (NM_015575.1,1163-1181).
ctgagggtagccataatga

SEQ ID NO: 354128 - DNA, 19 bp, Homo sapiens
  siRNA target sequence for TNRC15 (NM_015575.1,1192-1210).
gaacccgataagacaaata

SEQ ID NO: 354129 - DNA, 19 bp, Homo sapiens
  siRNA target sequence for TNRC15 (NM_015575.1,1381-1399).
gaggagactcggatggaaa

SEQ ID NO: 354130 - DNA, 19 bp, Homo sapiens
  siRNA target sequence for TNRC15 (NM_015575.1,1386-1404).
gactcggatggaaaatagt

SEQ ID NO: 354131 - DNA, 19 bp, Homo sapiens
  siRNA target sequence for TNRC15 (NM_015575.1,1388-1406).
ctcggatggaaaatagtct

SEQ ID NO: 354132 - DNA, 19 bp, Homo sapiens
  siRNA target sequence for TNRC15 (NM_015575.1,1424-1442).
gcagaggggatgaaatggt

SEQ ID NO: 354133 - DNA, 19 bp, Homo sapiens
  siRNA target sequence for TNRC15 (NM_015575.1,1425-1443).
cagaggggatgaaatggtt

SEQ ID NO: 354134 - DNA, 19 bp, Homo sapiens
  siRNA target sequence for TNRC15 (NM_015575.1,1464-1482).
gtcgcagattccttcagat

SEQ ID NO: 354135 - DNA, 19 bp, Homo sapiens
  siRNA target sequence for TNRC15 (NM_015575.1,1467-1485).
gcagattccttcagataca

SEQ ID NO: 354136 - DNA, 19 bp, Homo sapiens
  siRNA target sequence for TNRC15 (NM_015575.1,1570-1588).
cctggtatgggcagtgttt

SEQ ID NO: 354137 - DNA, 19 bp, Homo sapiens
  siRNA target sequence for TNRC15 (NM_015575.1,1659-1677).
ccaagacagtgcactagat

SEQ ID NO: 354138 - DNA, 19 bp, Homo sapiens
  siRNA target sequence for TNRC15 (NM_015575.1,1665-1683).
cagtgcactagatgatgaa

SEQ ID NO: 354139 - DNA, 19 bp, Homo sapiens
  siRNA target sequence for TNRC15 (NM_015575.1,1670-1688).
cactagatgatgaaagatt

SEQ ID NO: 354140 - DNA, 19 bp, Homo sapiens
  siRNA target sequence for TNRC15 (NM_015575.1,1721-1739).
gagtgtcgattccattgat

SEQ ID NO: 354141 - DNA, 19 bp, Homo sapiens
  siRNA target sequence for TNRC15 (NM_015575.1,1747-1765).
gcaatgcagaagtggtatt

SEQ ID NO: 354142 - DNA, 19 bp, Homo sapiens
  siRNA target sequence for TNRC15 (NM_015575.1,1748-1766).
caatgcagaagtggtatta

SEQ ID NO: 354143 - DNA, 19 bp, Homo sapiens
  siRNA target sequence for TNRC15 (NM_015575.1,1833-1851).
gggctattttactatgtct

SEQ ID NO: 354144 - DNA, 19 bp, Homo sapiens
  siRNA target sequence for TNRC15 (NM_015575.1,1834-1852).
ggctattttactatgtctt

SEQ ID NO: 354145 - DNA, 19 bp, Homo sapiens
  siRNA target sequence for TNRC15 (NM_015575.1,1860-1878).
gaagagagcgtgtgatgaa

SEQ ID NO: 354146 - DNA, 19 bp, Homo sapiens
  siRNA target sequence for TNRC15 (NM_015575.1,1865-1883).
gagcgtgtgatgaaagctt

SEQ ID NO: 354147 - DNA, 19 bp, Homo sapiens
  siRNA target sequence for TNRC15 (NM_015575.1,1885-1903).
caacctcttggcgatatca

SEQ ID NO: 354148 - DNA, 19 bp, Homo sapiens
  siRNA target sequence for TNRC15 (NM_015575.1,1888-1906).
cctcttggcgatatcatga

SEQ ID NO: 354149 - DNA, 19 bp, Homo sapiens
  siRNA target sequence for TNRC15 (NM_015575.1,1889-1907).
ctcttggcgatatcatgaa

SEQ ID NO: 354150 - DNA, 19 bp, Homo sapiens
  siRNA target sequence for TNRC15 (NM_015575.1,2034-2052).
ccagcagtttttaatacaa

SEQ ID NO: 354151 - DNA, 19 bp, Homo sapiens
  siRNA target sequence for TNRC15 (NM_015575.1,2137-2155).
cagtttcagaccttgaaga

SEQ ID NO: 354152 - DNA, 19 bp, Homo sapiens
  siRNA target sequence for TNRC15 (NM_015575.1,2346-2364).
ggccaaagctgcaaagcta

SEQ ID NO: 354153 - DNA, 19 bp, Homo sapiens
  siRNA target sequence for TNRC15 (NM_015575.1,2544-2562).
gcgggagcaagaaattgca

SEQ ID NO: 354154 - DNA, 19 bp, Homo sapiens
  siRNA target sequence for TNRC15 (NM_015575.1,2651-2669).
ggcggaagcaggaagaatt

SEQ ID NO: 354155 - DNA, 19 bp, Homo sapiens
  siRNA target sequence for TNRC15 (NM_015575.1,2821-2839).
cagcggcagaaggagttaa

SEQ ID NO: 354156 - DNA, 19 bp, Homo sapiens
  siRNA target sequence for TNRC15 (NM_015575.1,2940-2958).
gggccagcagtccaataca

SEQ ID NO: 354157 - DNA, 19 bp, Homo sapiens
  siRNA target sequence for TNRC15 (NM_015575.1,2941-2959).
ggccagcagtccaatacaa

SEQ ID NO: 354158 - DNA, 19 bp, Homo sapiens
  siRNA target sequence for TNRC15 (NM_015575.1,2943-2961).
ccagcagtccaatacaaca

SEQ ID NO: 354159 - DNA, 19 bp, Homo sapiens
  siRNA target sequence for TNRC15 (NM_015575.1,2981-2999).
cgctgtcgttggctgaaat

SEQ ID NO: 354160 - DNA, 19 bp, Homo sapiens
  siRNA target sequence for TNRC15 (NM_015575.1,3136-3154).
ccttcaggtaccacgaaat

SEQ ID NO: 354161 - DNA, 19 bp, Homo sapiens
  siRNA target sequence for TNRC15 (NM_015575.1,3286-3304).
gtttggggctctataaata

SEQ ID NO: 354162 - DNA, 19 bp, Homo sapiens
  siRNA target sequence for TNRC15 (NM_015575.1,3329-3347).
ctgacctagtcagtagtat

SEQ ID NO: 354163 - DNA, 19 bp, Homo sapiens
  siRNA target sequence for TNRC15 (NM_015575.1,3350-3368).
ggagtaatgctgacactaa

SEQ ID NO: 354164 - DNA, 19 bp, Homo sapiens
  siRNA target sequence for TNRC15 (NM_015575.1,3409-3427).
gtgggacctaggaattcaa

SEQ ID NO: 354165 - DNA, 19 bp, Homo sapiens
  siRNA target sequence for TNRC15 (NM_015575.1,3411-3429).
gggacctaggaattcaaca

SEQ ID NO: 354166 - DNA, 19 bp, Homo sapiens
  siRNA target sequence for TNRC15 (NM_015575.1,3412-3430).
ggacctaggaattcaacaa

SEQ ID NO: 354167 - DNA, 19 bp, Homo sapiens
  siRNA target sequence for TNRC15 (NM_015575.1,3447-3465).
cgccagtctcagtaaatct

SEQ ID NO: 354168 - DNA, 19 bp, Homo sapiens
  siRNA target sequence for TNRC15 (NM_015575.1,3472-3490).
gtgtctaaccggcagaata

SEQ ID NO: 354169 - DNA, 19 bp, Homo sapiens
  siRNA target sequence for TNRC15 (NM_015575.1,3476-3494).
ctaaccggcagaataagaa

SEQ ID NO: 354170 - DNA, 19 bp, Homo sapiens
  siRNA target sequence for TNRC15 (NM_015575.1,3576-3594).
gatgcttcatgcccttaat

SEQ ID NO: 354171 - DNA, 19 bp, Homo sapiens
  siRNA target sequence for TNRC15 (NM_015575.1,3586-3604).
gcccttaatacggcaaata

SEQ ID NO: 354172 - DNA, 19 bp, Homo sapiens
  siRNA target sequence for TNRC15 (NM_015575.1,3587-3605).
cccttaatacggcaaataa

SEQ ID NO: 354173 - DNA, 19 bp, Homo sapiens
  siRNA target sequence for TNRC15 (NM_015575.1,3589-3607).
cttaatacggcaaataact

SEQ ID NO: 354174 - DNA, 19 bp, Homo sapiens
  siRNA target sequence for TNRC15 (NM_015575.1,3652-3670).
ccttatgaggtccatgatt

SEQ ID NO: 354175 - DNA, 19 bp, Homo sapiens
  siRNA target sequence for TNRC15 (NM_015575.1,3653-3671).
cttatgaggtccatgatta

SEQ ID NO: 354176 - DNA, 19 bp, Homo sapiens
  siRNA target sequence for TNRC15 (NM_015575.1,3658-3676).
gaggtccatgattatatca

SEQ ID NO: 354177 - DNA, 19 bp, Homo sapiens
  siRNA target sequence for TNRC15 (NM_015575.1,3679-3697).
gcctatttaggagatactt

SEQ ID NO: 354178 - DNA, 19 bp, Homo sapiens
  siRNA target sequence for TNRC15 (NM_015575.1,3681-3699).
ctatttaggagatacttct

SEQ ID NO: 354179 - DNA, 19 bp, Homo sapiens
  siRNA target sequence for TNRC15 (NM_015575.1,3861-3879).
cagtacactccattcagta

SEQ ID NO: 354180 - DNA, 19 bp, Homo sapiens
  siRNA target sequence for TNRC15 (NM_015575.1,3863-3881).
gtacactccattcagtatt

SEQ ID NO: 354181 - DNA, 19 bp, Homo sapiens
  siRNA target sequence for TNRC15 (NM_015575.1,3896-3914).
gcaacaaccaacaatccaa

SEQ ID NO: 354182 - DNA, 19 bp, Homo sapiens
  siRNA target sequence for TNRC15 (NM_015575.1,3963-3981).
ccgagcagatcccagttta

SEQ ID NO: 354183 - DNA, 19 bp, Homo sapiens
  siRNA target sequence for TNRC15 (NM_015575.1,3964-3982).
cgagcagatcccagtttat

SEQ ID NO: 354184 - DNA, 19 bp, Homo sapiens
  siRNA target sequence for TNRC15 (NM_015575.1,3970-3988).
gatcccagtttattaggat

SEQ ID NO: 354185 - DNA, 19 bp, Homo sapiens
  siRNA target sequence for TNRC15 (NM_015575.1,4004-4022).
catcggagcgactcaacat

SEQ ID NO: 354186 - DNA, 19 bp, Homo sapiens
  siRNA target sequence for CAST (NM_015576.1,337-355).
gggccaccgaagaacaagt

SEQ ID NO: 354187 - DNA, 19 bp, Homo sapiens
  siRNA target sequence for CAST (NM_015576.1,338-356).
ggccaccgaagaacaagta

SEQ ID NO: 354188 - DNA, 19 bp, Homo sapiens
  siRNA target sequence for CAST (NM_015576.1,340-358).
ccaccgaagaacaagtagt

SEQ ID NO: 354189 - DNA, 19 bp, Homo sapiens
  siRNA target sequence for CAST (NM_015576.1,410-428).
ctcaatgcagcctatgcta

SEQ ID NO: 354190 - DNA, 19 bp, Homo sapiens
  siRNA target sequence for CAST (NM_015576.1,429-447).
cgtctggacccatgtatct

SEQ ID NO: 354191 - DNA, 19 bp, Homo sapiens
  siRNA target sequence for CAST (NM_015576.1,458-476).
gaaggggtggcttcaacaa

SEQ ID NO: 354192 - DNA, 19 bp, Homo sapiens
  siRNA target sequence for CAST (NM_015576.1,510-528).
ctacaaatcgagctgtata

SEQ ID NO: 354193 - DNA, 19 bp, Homo sapiens
  siRNA target sequence for CAST (NM_015576.1,553-571).
gagtagtcccaatattgct

SEQ ID NO: 354194 - DNA, 19 bp, Homo sapiens
  siRNA target sequence for CAST (NM_015576.1,587-605).
cacacagatgtcctttcat

SEQ ID NO: 354195 - DNA, 19 bp, Homo sapiens
  siRNA target sequence for CAST (NM_015576.1,680-698).
gtaagagacagcacaatgt

SEQ ID NO: 354196 - DNA, 19 bp, Homo sapiens
  siRNA target sequence for CAST (NM_015576.1,790-808).
catgaacagtattaagact

SEQ ID NO: 354197 - DNA, 19 bp, Homo sapiens
  siRNA target sequence for CAST (NM_015576.1,1157-1175).
cgagatgagtcaattaaaa

SEQ ID NO: 354198 - DNA, 19 bp, Homo sapiens
  siRNA target sequence for CAST (NM_015576.1,1158-1176).
gagatgagtcaattaaaaa

SEQ ID NO: 354199 - DNA, 19 bp, Homo sapiens
  siRNA target sequence for CAST (NM_015576.1,1279-1297).
cttggaagtgattttagat

SEQ ID NO: 354200 - DNA, 19 bp, Homo sapiens
  siRNA target sequence for CAST (NM_015576.1,1385-1403).
cagactgtcatcgaaatga

SEQ ID NO: 354201 - DNA, 19 bp, Homo sapiens
  siRNA target sequence for CAST (NM_015576.1,1396-1414).
cgaaatgaaggacacaaaa

SEQ ID NO: 354202 - DNA, 19 bp, Homo sapiens
  siRNA target sequence for CAST (NM_015576.1,1419-1437).
cttcattggaacgaaacat

SEQ ID NO: 354203 - DNA, 19 bp, Homo sapiens
  siRNA target sequence for CAST (NM_015576.1,1500-1518).
gcgaagaagagatcaaaca

SEQ ID NO: 354204 - DNA, 19 bp, Homo sapiens
  siRNA target sequence for CAST (NM_015576.1,1531-1549).
caaaagtcactccaagttt

SEQ ID NO: 354205 - DNA, 19 bp, Homo sapiens
  siRNA target sequence for CAST (NM_015576.1,1536-1554).
gtcactccaagtttatgaa

SEQ ID NO: 354206 - DNA, 19 bp, Homo sapiens
  siRNA target sequence for CAST (NM_015576.1,1570-1588).
gctgaagcaggaactttca

SEQ ID NO: 354207 - DNA, 19 bp, Homo sapiens
  siRNA target sequence for CAST (NM_015576.1,1571-1589).
ctgaagcaggaactttcaa

SEQ ID NO: 354208 - DNA, 19 bp, Homo sapiens
  siRNA target sequence for CAST (NM_015576.1,1600-1618).
ggaacttcttgccttacaa

SEQ ID NO: 354209 - DNA, 19 bp, Homo sapiens
  siRNA target sequence for CAST (NM_015576.1,1673-1691).
gtgctcaaagagtcactta

SEQ ID NO: 354210 - DNA, 19 bp, Homo sapiens
  siRNA target sequence for CAST (NM_015576.1,1729-1747).
ggtagatgcgctgagatta

SEQ ID NO: 354211 - DNA, 19 bp, Homo sapiens
  siRNA target sequence for CAST (NM_015576.1,1743-1761).
gattacgactggaagaaaa

SEQ ID NO: 354212 - DNA, 19 bp, Homo sapiens
  siRNA target sequence for CAST (NM_015576.1,1818-1836).
ggacactggccggtgaaat

SEQ ID NO: 354213 - DNA, 19 bp, Homo sapiens
  siRNA target sequence for CAST (NM_015576.1,1819-1837).
gacactggccggtgaaatt

SEQ ID NO: 354214 - DNA, 19 bp, Homo sapiens
  siRNA target sequence for CAST (NM_015576.1,1916-1934).
caacttagggataaagaca

SEQ ID NO: 354215 - DNA, 19 bp, Homo sapiens
  siRNA target sequence for CAST (NM_015576.1,1972-1990).
gcagacggattccagtaat

SEQ ID NO: 354216 - DNA, 19 bp, Homo sapiens
  siRNA target sequence for CAST (NM_015576.1,1973-1991).
cagacggattccagtaata

SEQ ID NO: 354217 - DNA, 19 bp, Homo sapiens
  siRNA target sequence for CAST (NM_015576.1,1975-1993).
gacggattccagtaataca

SEQ ID NO: 354218 - DNA, 19 bp, Homo sapiens
  siRNA target sequence for CAST (NM_015576.1,1977-1995).
cggattccagtaatacaga

SEQ ID NO: 354219 - DNA, 19 bp, Homo sapiens
  siRNA target sequence for CAST (NM_015576.1,2102-2120).
gaatccttccgaaaagaga

SEQ ID NO: 354220 - DNA, 19 bp, Homo sapiens
  siRNA target sequence for CAST (NM_015576.1,2194-2212).
caaagaacatgcatcttca

SEQ ID NO: 354221 - DNA, 19 bp, Homo sapiens
  siRNA target sequence for CAST (NM_015576.1,2293-2311).
caaattggaagcacagtta

SEQ ID NO: 354222 - DNA, 19 bp, Homo sapiens
  siRNA target sequence for CAST (NM_015576.1,2381-2399).
gataaagaggcgtcttact

SEQ ID NO: 354223 - DNA, 19 bp, Homo sapiens
  siRNA target sequence for CAST (NM_015576.1,2523-2541).
ggcatatgaaagatcagaa

SEQ ID NO: 354224 - DNA, 19 bp, Homo sapiens
  siRNA target sequence for CAST (NM_015576.1,2524-2542).
gcatatgaaagatcagaat

SEQ ID NO: 354225 - DNA, 19 bp, Homo sapiens
  siRNA target sequence for CAST (NM_015576.1,2637-2655).
ctgacaactcacagcattt

SEQ ID NO: 354226 - DNA, 19 bp, Homo sapiens
  siRNA target sequence for CAST (NM_015576.1,2768-2786).
gccaacctccggattgaga

SEQ ID NO: 354227 - DNA, 19 bp, Homo sapiens
  siRNA target sequence for CAST (NM_015576.1,2834-2852).
cttgcagccatcagtgaaa

SEQ ID NO: 354228 - DNA, 19 bp, Homo sapiens
  siRNA target sequence for CAST (NM_015576.1,2932-2950).
ggaaaaagaccgactagta

SEQ ID NO: 354229 - DNA, 19 bp, Homo sapiens
  siRNA target sequence for CAST (NM_015576.1,2939-2957).
gaccgactagtacatcaat

SEQ ID NO: 354230 - DNA, 19 bp, Homo sapiens
  siRNA target sequence for CAST (NM_015576.1,2941-2959).
ccgactagtacatcaatta

SEQ ID NO: 354231 - DNA, 19 bp, Homo sapiens
  siRNA target sequence for CAST (NM_015576.1,2942-2960).
cgactagtacatcaattaa

SEQ ID NO: 354232 - DNA, 19 bp, Homo sapiens
  siRNA target sequence for CAST (NM_015576.1,2986-3004).
gttgatggcagacaactat

SEQ ID NO: 354233 - DNA, 19 bp, Homo sapiens
  siRNA target sequence for CAST (NM_015576.1,2989-3007).
gatggcagacaactatgat

SEQ ID NO: 354234 - DNA, 19 bp, Homo sapiens
  siRNA target sequence for CAST (NM_015576.1,3059-3077).
cctgggaggtcgcaacatt

SEQ ID NO: 354235 - DNA, 19 bp, Homo sapiens
  siRNA target sequence for CAST (NM_015576.1,3063-3081).
ggaggtcgcaacattccaa

SEQ ID NO: 354236 - DNA, 19 bp, Homo sapiens
  siRNA target sequence for CAST (NM_015576.1,3064-3082).
gaggtcgcaacattccaat

SEQ ID NO: 354237 - DNA, 19 bp, Homo sapiens
  siRNA target sequence for RAI14 (NM_015577.1,267-285).
gggcaagaccgctttccat

SEQ ID NO: 354238 - DNA, 19 bp, Homo sapiens
  siRNA target sequence for RAI14 (NM_015577.1,366-384).
cggacacagcgccttacat

SEQ ID NO: 354239 - DNA, 19 bp, Homo sapiens
  siRNA target sequence for RAI14 (NM_015577.1,368-386).
gacacagcgccttacatct

SEQ ID NO: 354240 - DNA, 19 bp, Homo sapiens
  siRNA target sequence for RAI14 (NM_015577.1,466-484).
gggaaaacagctttacatt

SEQ ID NO: 354241 - DNA, 19 bp, Homo sapiens
  siRNA target sequence for RAI14 (NM_015577.1,468-486).
gaaaacagctttacattat

SEQ ID NO: 354242 - DNA, 19 bp, Homo sapiens
  siRNA target sequence for RAI14 (NM_015577.1,539-557).
gccccataaacctcaaaga

SEQ ID NO: 354243 - DNA, 19 bp, Homo sapiens
  siRNA target sequence for RAI14 (NM_015577.1,540-558).
ccccataaacctcaaagat

SEQ ID NO: 354244 - DNA, 19 bp, Homo sapiens
  siRNA target sequence for RAI14 (NM_015577.1,541-559).
cccataaacctcaaagatt

SEQ ID NO: 354245 - DNA, 19 bp, Homo sapiens
  siRNA target sequence for RAI14 (NM_015577.1,542-560).
ccataaacctcaaagattt

SEQ ID NO: 354246 - DNA, 19 bp, Homo sapiens
  siRNA target sequence for RAI14 (NM_015577.1,603-621).
cagtgagatctgtcacttt

SEQ ID NO: 354247 - DNA, 19 bp, Homo sapiens
  siRNA target sequence for RAI14 (NM_015577.1,708-726).
cgctgtggaagccttaatt

SEQ ID NO: 354248 - DNA, 19 bp, Homo sapiens
  siRNA target sequence for RAI14 (NM_015577.1,709-727).
gctgtggaagccttaatta

SEQ ID NO: 354249 - DNA, 19 bp, Homo sapiens
  siRNA target sequence for RAI14 (NM_015577.1,737-755).
cagacctaaaccttgtaga

SEQ ID NO: 354250 - DNA, 19 bp, Homo sapiens
  siRNA target sequence for RAI14 (NM_015577.1,739-757).
gacctaaaccttgtagatt

SEQ ID NO: 354251 - DNA, 19 bp, Homo sapiens
  siRNA target sequence for RAI14 (NM_015577.1,741-759).
cctaaaccttgtagattct

SEQ ID NO: 354252 - DNA, 19 bp, Homo sapiens
  siRNA target sequence for RAI14 (NM_015577.1,764-782).
gatacaatgccttacatta

SEQ ID NO: 354253 - DNA, 19 bp, Homo sapiens
  siRNA target sequence for RAI14 (NM_015577.1,1011-1029).
gggaaaggaatcggtattt

SEQ ID NO: 354254 - DNA, 19 bp, Homo sapiens
  siRNA target sequence for RAI14 (NM_015577.1,1100-1118).
ctacaggtgctgatagctt

SEQ ID NO: 354255 - DNA, 19 bp, Homo sapiens
  siRNA target sequence for RAI14 (NM_015577.1,1103-1121).
caggtgctgatagcttatt

SEQ ID NO: 354256 - DNA, 19 bp, Homo sapiens
  siRNA target sequence for RAI14 (NM_015577.1,1106-1124).
gtgctgatagcttattgga

SEQ ID NO: 354257 - DNA, 19 bp, Homo sapiens
  siRNA target sequence for RAI14 (NM_015577.1,1108-1126).
gctgatagcttattggata

SEQ ID NO: 354258 - DNA, 19 bp, Homo sapiens
  siRNA target sequence for RAI14 (NM_015577.1,1116-1134).
cttattggatataagttct

SEQ ID NO: 354259 - DNA, 19 bp, Homo sapiens
  siRNA target sequence for RAI14 (NM_015577.1,1158-1176).
ctctctattgcaagcaaaa

SEQ ID NO: 354260 - DNA, 19 bp, Homo sapiens
  siRNA target sequence for RAI14 (NM_015577.1,1244-1262).
cggaagcagacctaagctt

SEQ ID NO: 354261 - DNA, 19 bp, Homo sapiens
  siRNA target sequence for RAI14 (NM_015577.1,1249-1267).
gcagacctaagctttgact

SEQ ID NO: 354262 - DNA, 19 bp, Homo sapiens
  siRNA target sequence for RAI14 (NM_015577.1,1346-1364).
ctccatctgtcttaataca

SEQ ID NO: 354263 - DNA, 19 bp, Homo sapiens
  siRNA target sequence for RAI14 (NM_015577.1,1356-1374).
cttaatacattctttaggt

SEQ ID NO: 354264 - DNA, 19 bp, Homo sapiens
  siRNA target sequence for RAI14 (NM_015577.1,1502-1520).
cagaactggtatgcttaaa

SEQ ID NO: 354265 - DNA, 19 bp, Homo sapiens
  siRNA target sequence for RAI14 (NM_015577.1,1504-1522).
gaactggtatgcttaaaca

SEQ ID NO: 354266 - DNA, 19 bp, Homo sapiens
  siRNA target sequence for RAI14 (NM_015577.1,1646-1664).
cacctgaaagcatggataa

SEQ ID NO: 354267 - DNA, 19 bp, Homo sapiens
  siRNA target sequence for RAI14 (NM_015577.1,1834-1852).
gagtacgaggaaatgaaaa

SEQ ID NO: 354268 - DNA, 19 bp, Homo sapiens
  siRNA target sequence for RAI14 (NM_015577.1,1865-1883).
ctgttattgagaatatgaa

SEQ ID NO: 354269 - DNA, 19 bp, Homo sapiens
  siRNA target sequence for RAI14 (NM_015577.1,2018-2036).
ggatgatagatgaactcaa

SEQ ID NO: 354270 - DNA, 19 bp, Homo sapiens
  siRNA target sequence for RAI14 (NM_015577.1,2052-2070).
gctgtcacagctgtacaaa

SEQ ID NO: 354271 - DNA, 19 bp, Homo sapiens
  siRNA target sequence for RAI14 (NM_015577.1,2124-2142).
cacagctgaatatatccat

SEQ ID NO: 354272 - DNA, 19 bp, Homo sapiens
  siRNA target sequence for RAI14 (NM_015577.1,2178-2196).
cgtgtccagggctaaagca

SEQ ID NO: 354273 - DNA, 19 bp, Homo sapiens
  siRNA target sequence for RAI14 (NM_015577.1,2231-2249).
caaaagtgttgaatgagtt

SEQ ID NO: 354274 - DNA, 19 bp, Homo sapiens
  siRNA target sequence for RAI14 (NM_015577.1,2297-2315).
ctatcacagaacatttgca

SEQ ID NO: 354275 - DNA, 19 bp, Homo sapiens
  siRNA target sequence for RAI14 (NM_015577.1,2332-2350).
cggactgcagcaaaagaga

SEQ ID NO: 354276 - DNA, 19 bp, Homo sapiens
  siRNA target sequence for RAI14 (NM_015577.1,2412-2430).
gctggagaaacaactctta

SEQ ID NO: 354277 - DNA, 19 bp, Homo sapiens
  siRNA target sequence for RAI14 (NM_015577.1,2441-2459).
ctgctatgactgatgcaat

SEQ ID NO: 354278 - DNA, 19 bp, Homo sapiens
  siRNA target sequence for RAI14 (NM_015577.1,2460-2478).
ggtacctcggtcttcctat

SEQ ID NO: 354279 - DNA, 19 bp, Homo sapiens
  siRNA target sequence for RAI14 (NM_015577.1,2464-2482).
cctcggtcttcctatgaaa

SEQ ID NO: 354280 - DNA, 19 bp, Homo sapiens
  siRNA target sequence for RAI14 (NM_015577.1,2465-2483).
ctcggtcttcctatgaaaa

SEQ ID NO: 354281 - DNA, 19 bp, Homo sapiens
  siRNA target sequence for RAI14 (NM_015577.1,2468-2486).
ggtcttcctatgaaaaact

SEQ ID NO: 354282 - DNA, 19 bp, Homo sapiens
  siRNA target sequence for RAI14 (NM_015577.1,2569-2587).
gaggttgtccagattagaa

SEQ ID NO: 354283 - DNA, 19 bp, Homo sapiens
  siRNA target sequence for RAI14 (NM_015577.1,2628-2646).
gactctcttgaaatccaaa

SEQ ID NO: 354284 - DNA, 19 bp, Homo sapiens
  siRNA target sequence for RAI14 (NM_015577.1,2720-2738).
ctgagagctcttcaaaact

SEQ ID NO: 354285 - DNA, 19 bp, Homo sapiens
  siRNA target sequence for RAI14 (NM_015577.1,2904-2922).
gctggcggaatgcaagaaa

SEQ ID NO: 354286 - DNA, 19 bp, Homo sapiens
  siRNA target sequence for RAI14 (NM_015577.1,2907-2925).
ggcggaatgcaagaaacaa

SEQ ID NO: 354287 - DNA, 19 bp, Homo sapiens
  siRNA target sequence for RAI14 (NM_015577.1,2909-2927).
cggaatgcaagaaacaaca

SEQ ID NO: 354288 - DNA, 19 bp, Homo sapiens
  siRNA target sequence for RAI14 (NM_015577.1,2923-2941).
caacaccaggaggtcatat

SEQ ID NO: 354289 - DNA, 19 bp, Homo sapiens
  siRNA target sequence for RAI14 (NM_015577.1,2928-2946).
ccaggaggtcatatcagtt

SEQ ID NO: 354290 - DNA, 19 bp, Homo sapiens
  siRNA target sequence for RAI14 (NM_015577.1,2932-2950).
gaggtcatatcagtttaca

SEQ ID NO: 354291 - DNA, 19 bp, Homo sapiens
  siRNA target sequence for RAI14 (NM_015577.1,2934-2952).
ggtcatatcagtttacaga

SEQ ID NO: 354292 - DNA, 19 bp, Homo sapiens
  siRNA target sequence for RAI14 (NM_015577.1,2935-2953).
gtcatatcagtttacagaa

SEQ ID NO: 354293 - DNA, 19 bp, Homo sapiens
  siRNA target sequence for RAI14 (NM_015577.1,3004-3022).
gtactgaagcaaatcctta

SEQ ID NO: 354294 - DNA, 19 bp, Homo sapiens
  siRNA target sequence for DKFZP434D1335 (NM_015578.1,182-200).
cgtagcccttgccaaagtt

SEQ ID NO: 354295 - DNA, 19 bp, Homo sapiens
  siRNA target sequence for DKFZP434D1335 (NM_015578.1,227-245).
gacagatcgtccaatacca

SEQ ID NO: 354296 - DNA, 19 bp, Homo sapiens
  siRNA target sequence for DKFZP434D1335 (NM_015578.1,247-265).
ctcgagatgaagtctttga

SEQ ID NO: 354297 - DNA, 19 bp, Homo sapiens
  siRNA target sequence for DKFZP434D1335 (NM_015578.1,290-308).
cattaaagaccttactgtt

SEQ ID NO: 354298 - DNA, 19 bp, Homo sapiens
  siRNA target sequence for DKFZP434D1335 (NM_015578.1,340-358).
ctcaagacccagctattgt

SEQ ID NO: 354299 - DNA, 19 bp, Homo sapiens
  siRNA target sequence for DKFZP434D1335 (NM_015578.1,369-387).
ctaggctcatcgacttctt

SEQ ID NO: 354300 - DNA, 19 bp, Homo sapiens
  siRNA target sequence for DKFZP434D1335 (NM_015578.1,372-390).
ggctcatcgacttcttcat

SEQ ID NO: 354301 - DNA, 19 bp, Homo sapiens
  siRNA target sequence for DKFZP434D1335 (NM_015578.1,392-410).
ccagtccatgggttcttat

SEQ ID NO: 354302 - DNA, 19 bp, Homo sapiens
  siRNA target sequence for DKFZP434D1335 (NM_015578.1,420-438).
ggcaggatgcccacataca

SEQ ID NO: 354303 - DNA, 19 bp, Homo sapiens
  siRNA target sequence for DKFZP434D1335 (NM_015578.1,446-464).
cagtccgagttccttagtt

SEQ ID NO: 354304 - DNA, 19 bp, Homo sapiens
  siRNA target sequence for DKFZP434D1335 (NM_015578.1,570-588).
gcctttacacaggatacaa

SEQ ID NO: 354305 - DNA, 19 bp, Homo sapiens
  siRNA target sequence for DKFZP434D1335 (NM_015578.1,572-590).
ctttacacaggatacaaga

SEQ ID NO: 354306 - DNA, 19 bp, Homo sapiens
  siRNA target sequence for DKFZP434D1335 (NM_015578.1,619-637).
gctcaagccctcagttaga

SEQ ID NO: 354307 - DNA, 19 bp, Homo sapiens
  siRNA target sequence for DKFZP434D1335 (NM_015578.1,632-650).
gttagaccctttgagaaaa

SEQ ID NO: 354308 - DNA, 19 bp, Homo sapiens
  siRNA target sequence for DKFZP434D1335 (NM_015578.1,792-810).
gctgaagtacacaaagttt

SEQ ID NO: 354309 - DNA, 19 bp, Homo sapiens
  siRNA target sequence for DKFZP434D1335 (NM_015578.1,931-949).
ggcgagatgggccaatgaa

SEQ ID NO: 354310 - DNA, 19 bp, Homo sapiens
  siRNA target sequence for DKFZP434D1335 (NM_015578.1,932-950).
gcgagatgggccaatgaaa

SEQ ID NO: 354311 - DNA, 19 bp, Homo sapiens
  siRNA target sequence for DKFZP434D1335 (NM_015578.1,933-951).
cgagatgggccaatgaaat

SEQ ID NO: 354312 - DNA, 19 bp, Homo sapiens
  siRNA target sequence for DKFZP434D1335 (NM_015578.1,1089-1107).
ggagactcaggagttgata

SEQ ID NO: 354313 - DNA, 19 bp, Homo sapiens
  siRNA target sequence for DKFZP434D1335 (NM_015578.1,1140-1158).
gatccacttggacctaatt

SEQ ID NO: 354314 - DNA, 19 bp, Homo sapiens
  siRNA target sequence for DKFZP434D1335 (NM_015578.1,1143-1161).
ccacttggacctaattgct

SEQ ID NO: 354315 - DNA, 19 bp, Homo sapiens
  siRNA target sequence for DKFZP434D1335 (NM_015578.1,1144-1162).
cacttggacctaattgcta

SEQ ID NO: 354316 - DNA, 19 bp, Homo sapiens
  siRNA target sequence for DKFZP434D1335 (NM_015578.1,1146-1164).
cttggacctaattgctatt

SEQ ID NO: 354317 - DNA, 19 bp, Homo sapiens
  siRNA target sequence for DKFZP434D1335 (NM_015578.1,1150-1168).
gacctaattgctattatga

SEQ ID NO: 354318 - DNA, 19 bp, Homo sapiens
  siRNA target sequence for DKFZP434D1335 (NM_015578.1,1152-1170).
cctaattgctattatgaca

SEQ ID NO: 354319 - DNA, 19 bp, Homo sapiens
  siRNA target sequence for DKFZP434D1335 (NM_015578.1,1153-1171).
ctaattgctattatgacaa

SEQ ID NO: 354320 - DNA, 19 bp, Homo sapiens
  siRNA target sequence for DKFZP434D1335 (NM_015578.1,1428-1446).
gcggattttgaatatagga

SEQ ID NO: 354321 - DNA, 19 bp, Homo sapiens
  siRNA target sequence for DKFZP434D1335 (NM_015578.1,1429-1447).
cggattttgaatataggaa

SEQ ID NO: 354322 - DNA, 19 bp, Homo sapiens
  siRNA target sequence for DKFZP586M0622 (NM_015583.1,1480-1498).
ccaggtaggttggaatgtt

SEQ ID NO: 354323 - DNA, 19 bp, Homo sapiens
  siRNA target sequence for DKFZP586M0622 (NM_015583.1,1501-1519).
gtgatgttctgtagtcata

SEQ ID NO: 354324 - DNA, 19 bp, Homo sapiens
  siRNA target sequence for DKFZP586M0622 (NM_015583.1,1506-1524).
gttctgtagtcatatcaga

SEQ ID NO: 354325 - DNA, 19 bp, Homo sapiens
  siRNA target sequence for DKFZP586M0622 (NM_015583.1,1514-1532).
gtcatatcagacagtgtta

SEQ ID NO: 354326 - DNA, 19 bp, Homo sapiens
  siRNA target sequence for DKFZP586M0622 (NM_015583.1,1565-1583).
cagtggagggaggttttca

SEQ ID NO: 354327 - DNA, 19 bp, Homo sapiens
  siRNA target sequence for PDIP38 (NM_015584.2,261-279).
cgaccagagggcaaagtgt

SEQ ID NO: 354328 - DNA, 19 bp, Homo sapiens
  siRNA target sequence for PDIP38 (NM_015584.2,262-280).
gaccagagggcaaagtgtt

SEQ ID NO: 354329 - DNA, 19 bp, Homo sapiens
  siRNA target sequence for PDIP38 (NM_015584.2,386-404).
ctggcaggccagactgtat

SEQ ID NO: 354330 - DNA, 19 bp, Homo sapiens
  siRNA target sequence for PDIP38 (NM_015584.2,388-406).
ggcaggccagactgtatga

SEQ ID NO: 354331 - DNA, 19 bp, Homo sapiens
  siRNA target sequence for PDIP38 (NM_015584.2,467-485).
ggaggtgaaaggcaaaact

SEQ ID NO: 354332 - DNA, 19 bp, Homo sapiens
  siRNA target sequence for PDIP38 (NM_015584.2,494-512).
ctatcaggtgctgattgat

SEQ ID NO: 354333 - DNA, 19 bp, Homo sapiens
  siRNA target sequence for PDIP38 (NM_015584.2,516-534).
cgtgactgcccacatatat

SEQ ID NO: 354334 - DNA, 19 bp, Homo sapiens
  siRNA target sequence for PDIP38 (NM_015584.2,560-578).
gaccttcttggctaaccat

SEQ ID NO: 354335 - DNA, 19 bp, Homo sapiens
  siRNA target sequence for PDIP38 (NM_015584.2,606-624).
ccaggcttggactatgtca

SEQ ID NO: 354336 - DNA, 19 bp, Homo sapiens
  siRNA target sequence for PDIP38 (NM_015584.2,779-797).
ggagctctccgatgttcat

SEQ ID NO: 354337 - DNA, 19 bp, Homo sapiens
  siRNA target sequence for PDIP38 (NM_015584.2,789-807).
gatgttcatcgggaaacaa

SEQ ID NO: 354338 - DNA, 19 bp, Homo sapiens
  siRNA target sequence for PDIP38 (NM_015584.2,799-817).
gggaaacaactgagaacat

SEQ ID NO: 354339 - DNA, 19 bp, Homo sapiens
  siRNA target sequence for PDIP38 (NM_015584.2,1029-1047).
cagcctgcgttccagtata

SEQ ID NO: 354340 - DNA, 19 bp, Homo sapiens
  siRNA target sequence for PDIP38 (NM_015584.2,1032-1050).
cctgcgttccagtatagca

SEQ ID NO: 354341 - DNA, 19 bp, Homo sapiens
  siRNA target sequence for PDIP38 (NM_015584.2,1088-1106).
gggcacgttccgctttgaa

SEQ ID NO: 354342 - DNA, 19 bp, Homo sapiens
  siRNA target sequence for PDIP38 (NM_015584.2,1091-1109).
cacgttccgctttgaaaga

SEQ ID NO: 354343 - DNA, 19 bp, Homo sapiens
  siRNA target sequence for SAMD4 (NM_015589.2,384-402).
cgcgtcatggggaaagtgt

SEQ ID NO: 354344 - DNA, 19 bp, Homo sapiens
  siRNA target sequence for SAMD4 (NM_015589.2,421-439).
ccagacctgatgaggaaaa

SEQ ID NO: 354345 - DNA, 19 bp, Homo sapiens
  siRNA target sequence for SAMD4 (NM_015589.2,448-466).
cctatttacagctcataga

SEQ ID NO: 354346 - DNA, 19 bp, Homo sapiens
  siRNA target sequence for SAMD4 (NM_015589.2,459-477).
ctcatagacaagtgtctaa

SEQ ID NO: 354347 - DNA, 19 bp, Homo sapiens
  siRNA target sequence for SAMD4 (NM_015589.2,559-577).
ctcggaaaacccttctaga

SEQ ID NO: 354348 - DNA, 19 bp, Homo sapiens
  siRNA target sequence for SAMD4 (NM_015589.2,607-625).
gaggctttgggcaatccaa

SEQ ID NO: 354349 - DNA, 19 bp, Homo sapiens
  siRNA target sequence for SAMD4 (NM_015589.2,774-792).
gctacccccaccatcatga

SEQ ID NO: 354350 - DNA, 19 bp, Homo sapiens
  siRNA target sequence for SAMD4 (NM_015589.2,949-967).
gtggactgtgtttaacaga

SEQ ID NO: 354351 - DNA, 19 bp, Homo sapiens
  siRNA target sequence for SAMD4 (NM_015589.2,1060-1078).
ccgaacctgacatcaacaa

SEQ ID NO: 354352 - DNA, 19 bp, Homo sapiens
  siRNA target sequence for SAMD4 (NM_015589.2,1062-1080).
gaacctgacatcaacaaca

SEQ ID NO: 354353 - DNA, 19 bp, Homo sapiens
  siRNA target sequence for DKFZP434O047 (NM_015594.1,2879-2897).
gggaatcagtgtctcatta

SEQ ID NO: 354354 - DNA, 19 bp, Homo sapiens
  siRNA target sequence for DKFZP434O047 (NM_015594.1,2926-2944).
ggagatgtggcaggataat

SEQ ID NO: 354355 - DNA, 19 bp, Homo sapiens
  siRNA target sequence for DKFZP434O047 (NM_015594.1,2927-2945).
gagatgtggcaggataata

SEQ ID NO: 354356 - DNA, 19 bp, Homo sapiens
  siRNA target sequence for DKFZP434D146 (NM_015595.2,174-192).
gcgagagcgaggtggattt

SEQ ID NO: 354357 - DNA, 19 bp, Homo sapiens
  siRNA target sequence for DKFZP434D146 (NM_015595.2,175-193).
cgagagcgaggtggatttt

SEQ ID NO: 354358 - DNA, 19 bp, Homo sapiens
  siRNA target sequence for DKFZP434D146 (NM_015595.2,176-194).
gagagcgaggtggattttt

SEQ ID NO: 354359 - DNA, 19 bp, Homo sapiens
  siRNA target sequence for DKFZP434D146 (NM_015595.2,178-196).
gagcgaggtggatttttct

SEQ ID NO: 354360 - DNA, 19 bp, Homo sapiens
  siRNA target sequence for DKFZP434D146 (NM_015595.2,289-307).
gagccccaacgggttacta

SEQ ID NO: 354361 - DNA, 19 bp, Homo sapiens
  siRNA target sequence for DKFZP434D146 (NM_015595.2,291-309).
gccccaacgggttactaat

SEQ ID NO: 354362 - DNA, 19 bp, Homo sapiens
  siRNA target sequence for DKFZP434D146 (NM_015595.2,292-310).
ccccaacgggttactaatt

SEQ ID NO: 354363 - DNA, 19 bp, Homo sapiens
  siRNA target sequence for DKFZP434D146 (NM_015595.2,293-311).
cccaacgggttactaatta

SEQ ID NO: 354364 - DNA, 19 bp, Homo sapiens
  siRNA target sequence for DKFZP434D146 (NM_015595.2,383-401).
gacagcaggacggtacata

SEQ ID NO: 354365 - DNA, 19 bp, Homo sapiens
  siRNA target sequence for DKFZP434D146 (NM_015595.2,696-714).
gccttgccgctaataacga

SEQ ID NO: 354366 - DNA, 19 bp, Homo sapiens
  siRNA target sequence for DKFZP434D146 (NM_015595.2,792-810).
gttcttcggaacaaaaact

SEQ ID NO: 354367 - DNA, 19 bp, Homo sapiens
  siRNA target sequence for DKFZP434D146 (NM_015595.2,842-860).
gagctcctcgagaatcctt

SEQ ID NO: 354368 - DNA, 19 bp, Homo sapiens
  siRNA target sequence for DKFZP434D146 (NM_015595.2,925-943).
gagtctggcctcggaaatt

SEQ ID NO: 354369 - DNA, 19 bp, Homo sapiens
  siRNA target sequence for DKFZP434D146 (NM_015595.2,927-945).
gtctggcctcggaaattaa

SEQ ID NO: 354370 - DNA, 19 bp, Homo sapiens
  siRNA target sequence for DKFZP434D146 (NM_015595.2,936-954).
cggaaattaaaataagtaa

SEQ ID NO: 354371 - DNA, 19 bp, Homo sapiens
  siRNA target sequence for DKFZP434D146 (NM_015595.2,1424-1442).
caactctctgcggtgaaaa

SEQ ID NO: 354372 - DNA, 19 bp, Homo sapiens
  siRNA target sequence for DKFZP434D146 (NM_015595.2,1492-1510).
ggctatctttgaagtcata

SEQ ID NO: 354373 - DNA, 19 bp, Homo sapiens
  siRNA target sequence for DKFZP434D146 (NM_015595.2,1493-1511).
gctatctttgaagtcatat

SEQ ID NO: 354374 - DNA, 19 bp, Homo sapiens
  siRNA target sequence for DKFZP434D146 (NM_015595.2,1505-1523).
gtcatatcctctgaacatt

SEQ ID NO: 354375 - DNA, 19 bp, Homo sapiens
  siRNA target sequence for DKFZP434D146 (NM_015595.2,1507-1525).
catatcctctgaacattca

SEQ ID NO: 354376 - DNA, 19 bp, Homo sapiens
  siRNA target sequence for DKFZP434D146 (NM_015595.2,1513-1531).
ctctgaacattcatattta

SEQ ID NO: 354377 - DNA, 19 bp, Homo sapiens
  siRNA target sequence for DKFZP434D146 (NM_015595.2,1534-1552).
cagcttggagatcttgata

SEQ ID NO: 354378 - DNA, 19 bp, Homo sapiens
  siRNA target sequence for DKFZP434D146 (NM_015595.2,1543-1561).
gatcttgatacgaatgttt

SEQ ID NO: 354379 - DNA, 19 bp, Homo sapiens
  siRNA target sequence for DKFZP434D146 (NM_015595.2,1577-1595).
ctgagtgatacaatgacta

SEQ ID NO: 354380 - DNA, 19 bp, Homo sapiens
  siRNA target sequence for DKFZP434D146 (NM_015595.2,1599-1617).
ccgagaggcaccatctttt

SEQ ID NO: 354381 - DNA, 19 bp, Homo sapiens
  siRNA target sequence for DKFZP434D146 (NM_015595.2,1638-1656).
gtgaggcaagcaaaaagtt

SEQ ID NO: 354382 - DNA, 19 bp, Homo sapiens
  siRNA target sequence for DKFZP434D146 (NM_015595.2,1643-1661).
gcaagcaaaaagttcttta

SEQ ID NO: 354383 - DNA, 19 bp, Homo sapiens
  siRNA target sequence for DKFZP434D146 (NM_015595.2,1693-1711).
cttcatagatgacataagt

SEQ ID NO: 354384 - DNA, 19 bp, Homo sapiens
  siRNA target sequence for DKFZP434D146 (NM_015595.2,1777-1795).
ctaccaacaacgaacacta

SEQ ID NO: 354385 - DNA, 19 bp, Homo sapiens
  siRNA target sequence for DKFZP434D146 (NM_015595.2,1788-1806).
gaacactacaaaaattgtt

SEQ ID NO: 354386 - DNA, 19 bp, Homo sapiens
  siRNA target sequence for DKFZP434D146 (NM_015595.2,1832-1850).
gtattgtcaaggattgagt

SEQ ID NO: 354387 - DNA, 19 bp, Homo sapiens
  siRNA target sequence for DKFZP434D146 (NM_015595.2,1870-1888).
cttacccatgatctctttt

SEQ ID NO: 354388 - DNA, 19 bp, Homo sapiens
  siRNA target sequence for DKFZP434D146 (NM_015595.2,1922-1940).
cccctgctgatggatacta

SEQ ID NO: 354389 - DNA, 19 bp, Homo sapiens
  siRNA target sequence for DKFZP434D146 (NM_015595.2,1923-1941).
ccctgctgatggatactat

SEQ ID NO: 354390 - DNA, 19 bp, Homo sapiens
  siRNA target sequence for DKFZP434D146 (NM_015595.2,1960-1978).
ggactctccgaagtatgaa

SEQ ID NO: 354391 - DNA, 19 bp, Homo sapiens
  siRNA target sequence for DKFZP434D146 (NM_015595.2,1992-2010).
ccttgaaggaagttagcaa

SEQ ID NO: 354392 - DNA, 19 bp, Homo sapiens
  siRNA target sequence for DKFZP434D146 (NM_015595.2,2011-2029).
gttggttcgactatgcaat

SEQ ID NO: 354393 - DNA, 19 bp, Homo sapiens
  siRNA target sequence for DKFZP434D146 (NM_015595.2,2057-2075).
gagatgatgtacacaatta

SEQ ID NO: 354394 - DNA, 19 bp, Homo sapiens
  siRNA target sequence for DKFZP434D146 (NM_015595.2,2077-2095).
ctcccagctggaatttaaa

SEQ ID NO: 354395 - DNA, 19 bp, Homo sapiens
  siRNA target sequence for DKFZP434D146 (NM_015595.2,2121-2139).
cttcccggtggttggtaaa

SEQ ID NO: 354396 - DNA, 19 bp, Homo sapiens
  siRNA target sequence for DKFZP434D146 (NM_015595.2,2125-2143).
ccggtggttggtaaaaaga

SEQ ID NO: 354397 - DNA, 19 bp, Homo sapiens
  siRNA target sequence for DKFZP434D146 (NM_015595.2,2265-2283).
gttacaacgtcaatgatta

SEQ ID NO: 354398 - DNA, 19 bp, Homo sapiens
  siRNA target sequence for DKFZP434D146 (NM_015595.2,2272-2290).
cgtcaatgattattcctta

SEQ ID NO: 354399 - DNA, 19 bp, Homo sapiens
  siRNA target sequence for DKFZP434D146 (NM_015595.2,2273-2291).
gtcaatgattattccttaa

SEQ ID NO: 354400 - DNA, 19 bp, Homo sapiens
  siRNA target sequence for DKFZP434D146 (NM_015595.2,2286-2304).
ccttaagagatcagctatt

SEQ ID NO: 354401 - DNA, 19 bp, Homo sapiens
  siRNA target sequence for DKFZP434D146 (NM_015595.2,2299-2317).
gctattggtggaatcttgt

SEQ ID NO: 354402 - DNA, 19 bp, Homo sapiens
  siRNA target sequence for DKFZP434D146 (NM_015595.2,2305-2323).
ggtggaatcttgtgacaat

SEQ ID NO: 354403 - DNA, 19 bp, Homo sapiens
  siRNA target sequence for DKFZP434D146 (NM_015595.2,2318-2336).
gacaatgaagagcttaatt

SEQ ID NO: 354404 - DNA, 19 bp, Homo sapiens
  siRNA target sequence for DKFZP434D146 (NM_015595.2,2320-2338).
caatgaagagcttaattct

SEQ ID NO: 354405 - DNA, 19 bp, Homo sapiens
  siRNA target sequence for DKFZP434D146 (NM_015595.2,2418-2436).
gtaaccacgcgaatgagaa

SEQ ID NO: 354406 - DNA, 19 bp, Homo sapiens
  siRNA target sequence for DKFZP434D146 (NM_015595.2,2471-2489).
gagcgagcccgctggataa

SEQ ID NO: 354407 - DNA, 19 bp, Homo sapiens
  siRNA target sequence for DKFZP434D146 (NM_015595.2,2473-2491).
gcgagcccgctggataact

SEQ ID NO: 354408 - DNA, 19 bp, Homo sapiens
  siRNA target sequence for DKFZP434D146 (NM_015595.2,2539-2557).
gacccaggtggaaatcgtt

SEQ ID NO: 354409 - DNA, 19 bp, Homo sapiens
  siRNA target sequence for DKFZP434D146 (NM_015595.2,2549-2567).
gaaatcgttaggtcattta

SEQ ID NO: 354410 - DNA, 19 bp, Homo sapiens
  siRNA target sequence for DKFZP434D146 (NM_015595.2,2571-2589).
ctaagcagccagatgaact

SEQ ID NO: 354411 - DNA, 19 bp, Homo sapiens
  siRNA target sequence for DKFZP434D146 (NM_015595.2,2604-2622).
ctgacgtcgtcctcatcta

SEQ ID NO: 354412 - DNA, 19 bp, Homo sapiens
  siRNA target sequence for DKFZP434D146 (NM_015595.2,2608-2626).
cgtcgtcctcatctatcaa

SEQ ID NO: 354413 - DNA, 19 bp, Homo sapiens
  siRNA target sequence for DKFZP434D146 (NM_015595.2,2678-2696).
ggctggtttcctatggaat

SEQ ID NO: 354414 - DNA, 19 bp, Homo sapiens
  siRNA target sequence for DKFZP434D146 (NM_015595.2,2712-2730).
catgtcaagctacaattga

SEQ ID NO: 354415 - DNA, 19 bp, Homo sapiens
  siRNA target sequence for DKFZP434D146 (NM_015595.2,2715-2733).
gtcaagctacaattgataa

SEQ ID NO: 354416 - DNA, 19 bp, Homo sapiens
  siRNA target sequence for LAP1B (NM_015602.2,339-357).
gatgcgcctgcgtacagaa

SEQ ID NO: 354417 - DNA, 19 bp, Homo sapiens
  siRNA target sequence for LAP1B (NM_015602.2,452-470).
gtccccggtgggaaaacga

SEQ ID NO: 354418 - DNA, 19 bp, Homo sapiens
  siRNA target sequence for LAP1B (NM_015602.2,565-583).
cccaggaaaccgaggaaat

SEQ ID NO: 354419 - DNA, 19 bp, Homo sapiens
  siRNA target sequence for LAP1B (NM_015602.2,639-657).
cagccgtctcctgttatga

SEQ ID NO: 354420 - DNA, 19 bp, Homo sapiens
  siRNA target sequence for LAP1B (NM_015602.2,715-733).
ctgatttaagccaaacgat

SEQ ID NO: 354421 - DNA, 19 bp, Homo sapiens
  siRNA target sequence for LAP1B (NM_015602.2,745-763).
ctgtcaggagcatacaaga

SEQ ID NO: 354422 - DNA, 19 bp, Homo sapiens
  siRNA target sequence for LAP1B (NM_015602.2,771-789).
gtgagtgaagatcttgtaa

SEQ ID NO: 354423 - DNA, 19 bp, Homo sapiens
  siRNA target sequence for LAP1B (NM_015602.2,798-816).
cgtcgaccccctctaagat

SEQ ID NO: 354424 - DNA, 19 bp, Homo sapiens
  siRNA target sequence for LAP1B (NM_015602.2,799-817).
gtcgaccccctctaagata

SEQ ID NO: 354425 - DNA, 19 bp, Homo sapiens
  siRNA target sequence for LAP1B (NM_015602.2,840-858).
gtccaacagaaggtcaatt

SEQ ID NO: 354426 - DNA, 19 bp, Homo sapiens
  siRNA target sequence for LAP1B (NM_015602.2,905-923).
cagcagtgtcactactgtt

SEQ ID NO: 354427 - DNA, 19 bp, Homo sapiens
  siRNA target sequence for LAP1B (NM_015602.2,907-925).
gcagtgtcactactgttaa

SEQ ID NO: 354428 - DNA, 19 bp, Homo sapiens
  siRNA target sequence for LAP1B (NM_015602.2,957-975).
gataaaaccaccagatcat

SEQ ID NO: 354429 - DNA, 19 bp, Homo sapiens
  siRNA target sequence for LAP1B (NM_015602.2,970-988).
gatcatctagtcaatatat

SEQ ID NO: 354430 - DNA, 19 bp, Homo sapiens
  siRNA target sequence for LAP1B (NM_015602.2,973-991).
catctagtcaatatataga

SEQ ID NO: 354431 - DNA, 19 bp, Homo sapiens
  siRNA target sequence for LAP1B (NM_015602.2,1001-1019).
gcagtcatcacaaagtcaa

SEQ ID NO: 354432 - DNA, 19 bp, Homo sapiens
  siRNA target sequence for LAP1B (NM_015602.2,1006-1024).
catcacaaagtcaaaactt

SEQ ID NO: 354433 - DNA, 19 bp, Homo sapiens
  siRNA target sequence for LAP1B (NM_015602.2,1052-1070).
gctaagctcaggatatcaa

SEQ ID NO: 354434 - DNA, 19 bp, Homo sapiens
  siRNA target sequence for LAP1B (NM_015602.2,1053-1071).
ctaagctcaggatatcaaa

SEQ ID NO: 354435 - DNA, 19 bp, Homo sapiens
  siRNA target sequence for LAP1B (NM_015602.2,1090-1108).
ccccacaaactgcaagaat

SEQ ID NO: 354436 - DNA, 19 bp, Homo sapiens
  siRNA target sequence for LAP1B (NM_015602.2,1187-1205).
gactggacaaccccaaaat

SEQ ID NO: 354437 - DNA, 19 bp, Homo sapiens
  siRNA target sequence for LAP1B (NM_015602.2,1200-1218).
caaaatgcatcttttgtca

SEQ ID NO: 354438 - DNA, 19 bp, Homo sapiens
  siRNA target sequence for LAP1B (NM_015602.2,1232-1250).
gtggctacttcctctgata

SEQ ID NO: 354439 - DNA, 19 bp, Homo sapiens
  siRNA target sequence for LAP1B (NM_015602.2,1261-1279).
cctctgggagtttttggtt

SEQ ID NO: 354440 - DNA, 19 bp, Homo sapiens
  siRNA target sequence for LAP1B (NM_015602.2,1268-1286).
gagtttttggttctttagt

SEQ ID NO: 354441 - DNA, 19 bp, Homo sapiens
  siRNA target sequence for LAP1B (NM_015602.2,1329-1347).
cagatgaatcaacttaaga

SEQ ID NO: 354442 - DNA, 19 bp, Homo sapiens
  siRNA target sequence for LAP1B (NM_015602.2,1545-1563).
cggattgatgggacagata

SEQ ID NO: 354443 - DNA, 19 bp, Homo sapiens
  siRNA target sequence for LAP1B (NM_015602.2,1551-1569).
gatgggacagataaagcta

SEQ ID NO: 354444 - DNA, 19 bp, Homo sapiens
  siRNA target sequence for LAP1B (NM_015602.2,1579-1597).
gtgatactgtcaaactaga

SEQ ID NO: 354445 - DNA, 19 bp, Homo sapiens
  siRNA target sequence for LAP1B (NM_015602.2,1613-1631).
gagcaatggatttaagaat

SEQ ID NO: 354446 - DNA, 19 bp, Homo sapiens
  siRNA target sequence for LAP1B (NM_015602.2,1647-1665).
gtggtacaccgctttgagt

SEQ ID NO: 354447 - DNA, 19 bp, Homo sapiens
  siRNA target sequence for LAP1B (NM_015602.2,1671-1689).
cccgcaggctctactttga

SEQ ID NO: 354448 - DNA, 19 bp, Homo sapiens
  siRNA target sequence for LAP1B (NM_015602.2,1672-1690).
ccgcaggctctactttgat

SEQ ID NO: 354449 - DNA, 19 bp, Homo sapiens
  siRNA target sequence for LAP1B (NM_015602.2,1780-1798).
caagtctaggcctaaagga

SEQ ID NO: 354450 - DNA, 19 bp, Homo sapiens
  siRNA target sequence for LAP1B (NM_015602.2,1835-1853).
gttcaccaattctaacaca

SEQ ID NO: 354451 - DNA, 19 bp, Homo sapiens
  siRNA target sequence for LAP1B (NM_015602.2,1895-1913).
cctctggagccgtatttct

SEQ ID NO: 354452 - DNA, 19 bp, Homo sapiens
  siRNA target sequence for LAP1B (NM_015602.2,1901-1919).
gagccgtatttctcactta

SEQ ID NO: 354453 - DNA, 19 bp, Homo sapiens
  siRNA target sequence for DKFZP586M1019 (NM_015603.1,150-168).
gcagccacactcgatttga

SEQ ID NO: 354454 - DNA, 19 bp, Homo sapiens
  siRNA target sequence for DKFZP586M1019 (NM_015603.1,151-169).
cagccacactcgatttgaa

SEQ ID NO: 354455 - DNA, 19 bp, Homo sapiens
  siRNA target sequence for DKFZP586M1019 (NM_015603.1,153-171).
gccacactcgatttgaaat

SEQ ID NO: 354456 - DNA, 19 bp, Homo sapiens
  siRNA target sequence for DKFZP586M1019 (NM_015603.1,155-173).
cacactcgatttgaaatca

SEQ ID NO: 354457 - DNA, 19 bp, Homo sapiens
  siRNA target sequence for DKFZP586M1019 (NM_015603.1,157-175).
cactcgatttgaaatcaaa

SEQ ID NO: 354458 - DNA, 19 bp, Homo sapiens
  siRNA target sequence for DKFZP586M1019 (NM_015603.1,214-232).
ctcttcggcggaagaatga

SEQ ID NO: 354459 - DNA, 19 bp, Homo sapiens
  siRNA target sequence for DKFZP586M1019 (NM_015603.1,271-289).
gtaagaaagctgaacttga

SEQ ID NO: 354460 - DNA, 19 bp, Homo sapiens
  siRNA target sequence for DKFZP586M1019 (NM_015603.1,1081-1099).
catcccaccgctatgatga

SEQ ID NO: 354461 - DNA, 19 bp, Homo sapiens
  siRNA target sequence for DKFZP586M1019 (NM_015603.1,1225-1243).
cctacagtgaccatgatga

SEQ ID NO: 354462 - DNA, 19 bp, Homo sapiens
  siRNA target sequence for DKFZP586M1019 (NM_015603.1,1244-1262).
ccgctgggagacaaaagaa

SEQ ID NO: 354463 - DNA, 19 bp, Homo sapiens
  siRNA target sequence for DKFZP547E1010 (NM_015607.2,329-347).
cgccgaaagttgtgctaaa

SEQ ID NO: 354464 - DNA, 19 bp, Homo sapiens
  siRNA target sequence for DKFZP547E1010 (NM_015607.2,330-348).
gccgaaagttgtgctaaaa

SEQ ID NO: 354465 - DNA, 19 bp, Homo sapiens
  siRNA target sequence for DKFZP547E1010 (NM_015607.2,331-349).
ccgaaagttgtgctaaaaa

SEQ ID NO: 354466 - DNA, 19 bp, Homo sapiens
  siRNA target sequence for DKFZP547E1010 (NM_015607.2,353-371).
ccaccaagatgtctctaaa

SEQ ID NO: 354467 - DNA, 19 bp, Homo sapiens
  siRNA target sequence for DKFZP547E1010 (NM_015607.2,367-385).
ctaaatgagcgctttacta

SEQ ID NO: 354468 - DNA, 19 bp, Homo sapiens
  siRNA target sequence for DKFZP547E1010 (NM_015607.2,403-421).
cagccgacgccagtgaata

SEQ ID NO: 354469 - DNA, 19 bp, Homo sapiens
  siRNA target sequence for DKFZP547E1010 (NM_015607.2,405-423).
gccgacgccagtgaatatt

SEQ ID NO: 354470 - DNA, 19 bp, Homo sapiens
  siRNA target sequence for DKFZP547E1010 (NM_015607.2,428-446).
cttcgatgcagcaacaaca

SEQ ID NO: 354471 - DNA, 19 bp, Homo sapiens
  siRNA target sequence for DKFZP547E1010 (NM_015607.2,478-496).
gcccagcagatggagaata

SEQ ID NO: 354472 - DNA, 19 bp, Homo sapiens
  siRNA target sequence for DKFZP547E1010 (NM_015607.2,507-525).
ccaggcagcattaaaactt

SEQ ID NO: 354473 - DNA, 19 bp, Homo sapiens
  siRNA target sequence for DKFZP547E1010 (NM_015607.2,508-526).
caggcagcattaaaactta

SEQ ID NO: 354474 - DNA, 19 bp, Homo sapiens
  siRNA target sequence for DKFZP547E1010 (NM_015607.2,540-558).
gcagcgcctgggtaagagt

SEQ ID NO: 354475 - DNA, 19 bp, Homo sapiens
  siRNA target sequence for DKFZP547E1010 (NM_015607.2,544-562).
cgcctgggtaagagtaaca

SEQ ID NO: 354476 - DNA, 19 bp, Homo sapiens
  siRNA target sequence for DKFZP547E1010 (NM_015607.2,545-563).
gcctgggtaagagtaacat

SEQ ID NO: 354477 - DNA, 19 bp, Homo sapiens
  siRNA target sequence for DKFZP547E1010 (NM_015607.2,617-635).
gacgaggcctacccataat

SEQ ID NO: 354478 - DNA, 19 bp, Homo sapiens
  siRNA target sequence for DKFZP547E1010 (NM_015607.2,620-638).
gaggcctacccataatcca

SEQ ID NO: 354479 - DNA, 19 bp, Homo sapiens
  siRNA target sequence for DKFZP547E1010 (NM_015607.2,751-769).
ccccgaatgggcttaagaa

SEQ ID NO: 354480 - DNA, 19 bp, Homo sapiens
  siRNA target sequence for DKFZP547E1010 (NM_015607.2,753-771).
ccgaatgggcttaagaaga

SEQ ID NO: 354481 - DNA, 19 bp, Homo sapiens
  siRNA target sequence for DKFZP547E1010 (NM_015607.2,926-944).
cccttgctcgccctgtatt

SEQ ID NO: 354482 - DNA, 19 bp, Homo sapiens
  siRNA target sequence for DKFZP547E1010 (NM_015607.2,928-946).
cttgctcgccctgtattga

SEQ ID NO: 354483 - DNA, 19 bp, Homo sapiens
  siRNA target sequence for DKFZP547E1010 (NM_015607.2,963-981).
caaccaattggatgcatat

SEQ ID NO: 354484 - DNA, 19 bp, Homo sapiens
  siRNA target sequence for DKFZP547E1010 (NM_015607.2,973-991).
gatgcatatatgtcgaaaa

SEQ ID NO: 354485 - DNA, 19 bp, Homo sapiens
  siRNA target sequence for DKFZP547E1010 (NM_015607.2,1035-1053).
gacagatcccgaaaccaat

SEQ ID NO: 354486 - DNA, 19 bp, Homo sapiens
  siRNA target sequence for DKFZP547E1010 (NM_015607.2,1039-1057).
gatcccgaaaccaatgatt

SEQ ID NO: 354487 - DNA, 19 bp, Homo sapiens
  siRNA target sequence for EDRF1 (NM_015608.2,396-414).
gcacagggatcagctttat

SEQ ID NO: 354488 - DNA, 19 bp, Homo sapiens
  siRNA target sequence for EDRF1 (NM_015608.2,397-415).
cacagggatcagctttatt

SEQ ID NO: 354489 - DNA, 19 bp, Homo sapiens
  siRNA target sequence for EDRF1 (NM_015608.2,441-459).
cgagctgtggtgaaatact

SEQ ID NO: 354490 - DNA, 19 bp, Homo sapiens
  siRNA target sequence for EDRF1 (NM_015608.2,444-462).
gctgtggtgaaatactctt

SEQ ID NO: 354491 - DNA, 19 bp, Homo sapiens
  siRNA target sequence for EDRF1 (NM_015608.2,467-485).
ccctcctcgaacagcattt

SEQ ID NO: 354492 - DNA, 19 bp, Homo sapiens
  siRNA target sequence for EDRF1 (NM_015608.2,481-499).
catttgcacgccttgaaga

SEQ ID NO: 354493 - DNA, 19 bp, Homo sapiens
  siRNA target sequence for EDRF1 (NM_015608.2,486-504).
gcacgccttgaagagaaaa

SEQ ID NO: 354494 - DNA, 19 bp, Homo sapiens
  siRNA target sequence for EDRF1 (NM_015608.2,557-575).
gccagcaggaactaccatt

SEQ ID NO: 354495 - DNA, 19 bp, Homo sapiens
  siRNA target sequence for EDRF1 (NM_015608.2,615-633).
ggcatggcatatgacttta

SEQ ID NO: 354496 - DNA, 19 bp, Homo sapiens
  siRNA target sequence for EDRF1 (NM_015608.2,616-634).
gcatggcatatgactttat

SEQ ID NO: 354497 - DNA, 19 bp, Homo sapiens
  siRNA target sequence for EDRF1 (NM_015608.2,729-747).
gcagtacaccgcataggaa

SEQ ID NO: 354498 - DNA, 19 bp, Homo sapiens
  siRNA target sequence for EDRF1 (NM_015608.2,745-763).
gaaggactctcttactaga

SEQ ID NO: 354499 - DNA, 19 bp, Homo sapiens
  siRNA target sequence for EDRF1 (NM_015608.2,748-766).
ggactctcttactagatga

SEQ ID NO: 354500 - DNA, 19 bp, Homo sapiens
  siRNA target sequence for EDRF1 (NM_015608.2,820-838).
ggttgaaagagttttatca

SEQ ID NO: 354501 - DNA, 19 bp, Homo sapiens
  siRNA target sequence for EDRF1 (NM_015608.2,821-839).
gttgaaagagttttatcaa

SEQ ID NO: 354502 - DNA, 19 bp, Homo sapiens
  siRNA target sequence for EDRF1 (NM_015608.2,889-907).
ggtatcaaaaggcaattct

SEQ ID NO: 354503 - DNA, 19 bp, Homo sapiens
  siRNA target sequence for EDRF1 (NM_015608.2,899-917).
ggcaattctttccaagttt

SEQ ID NO: 354504 - DNA, 19 bp, Homo sapiens
  siRNA target sequence for EDRF1 (NM_015608.2,988-1006).
ccagttcagatcagacaaa

SEQ ID NO: 354505 - DNA, 19 bp, Homo sapiens
  siRNA target sequence for EDRF1 (NM_015608.2,989-1007).
cagttcagatcagacaaat

SEQ ID NO: 354506 - DNA, 19 bp, Homo sapiens
  siRNA target sequence for EDRF1 (NM_015608.2,1027-1045).
ggcctgctcccttcgaaat

SEQ ID NO: 354507 - DNA, 19 bp, Homo sapiens
  siRNA target sequence for EDRF1 (NM_015608.2,1116-1134).
ctatggacatttgaagata

SEQ ID NO: 354508 - DNA, 19 bp, Homo sapiens
  siRNA target sequence for EDRF1 (NM_015608.2,1150-1168).
gctccaacatgcccatatt

SEQ ID NO: 354509 - DNA, 19 bp, Homo sapiens
  siRNA target sequence for EDRF1 (NM_015608.2,1154-1172).
caacatgcccatatttgga

SEQ ID NO: 354510 - DNA, 19 bp, Homo sapiens
  siRNA target sequence for EDRF1 (NM_015608.2,1230-1248).
gtgctaactggaattgact

SEQ ID NO: 354511 - DNA, 19 bp, Homo sapiens
  siRNA target sequence for EDRF1 (NM_015608.2,1232-1250).
gctaactggaattgactat

SEQ ID NO: 354512 - DNA, 19 bp, Homo sapiens
  siRNA target sequence for EDRF1 (NM_015608.2,1237-1255).
ctggaattgactattggtt

SEQ ID NO: 354513 - DNA, 19 bp, Homo sapiens
  siRNA target sequence for EDRF1 (NM_015608.2,1279-1297).
cagagcttgtgatgtgttt

SEQ ID NO: 354514 - DNA, 19 bp, Homo sapiens
  siRNA target sequence for EDRF1 (NM_015608.2,1350-1368).
cccaatttggaaaattcta

SEQ ID NO: 354515 - DNA, 19 bp, Homo sapiens
  siRNA target sequence for EDRF1 (NM_015608.2,1351-1369).
ccaatttggaaaattctaa

SEQ ID NO: 354516 - DNA, 19 bp, Homo sapiens
  siRNA target sequence for EDRF1 (NM_015608.2,1446-1464).
catacctattggctcttta

SEQ ID NO: 354517 - DNA, 19 bp, Homo sapiens
  siRNA target sequence for EDRF1 (NM_015608.2,1451-1469).
ctattggctctttaaagca

SEQ ID NO: 354518 - DNA, 19 bp, Homo sapiens
  siRNA target sequence for EDRF1 (NM_015608.2,1468-1486).
caagtggcagcgatatagt

SEQ ID NO: 354519 - DNA, 19 bp, Homo sapiens
  siRNA target sequence for EDRF1 (NM_015608.2,1555-1573).
cggtagccattctcttgta

SEQ ID NO: 354520 - DNA, 19 bp, Homo sapiens
  siRNA target sequence for EDRF1 (NM_015608.2,1578-1596).
gttgcttgcaacatgatga

SEQ ID NO: 354521 - DNA, 19 bp, Homo sapiens
  siRNA target sequence for EDRF1 (NM_015608.2,1581-1599).
gcttgcaacatgatgatga

SEQ ID NO: 354522 - DNA, 19 bp, Homo sapiens
  siRNA target sequence for EDRF1 (NM_015608.2,1675-1693).
gtaggcatcctcaaattat

SEQ ID NO: 354523 - DNA, 19 bp, Homo sapiens
  siRNA target sequence for EDRF1 (NM_015608.2,1712-1730).
gctttcagaactttttcaa

SEQ ID NO: 354524 - DNA, 19 bp, Homo sapiens
  siRNA target sequence for EDRF1 (NM_015608.2,1814-1832).
gatgcccgacagtgatgaa

SEQ ID NO: 354525 - DNA, 19 bp, Homo sapiens
  siRNA target sequence for EDRF1 (NM_015608.2,1817-1835).
gcccgacagtgatgaaaat

SEQ ID NO: 354526 - DNA, 19 bp, Homo sapiens
  siRNA target sequence for EDRF1 (NM_015608.2,1830-1848).
gaaaatggatcctatagca

SEQ ID NO: 354527 - DNA, 19 bp, Homo sapiens
  siRNA target sequence for EDRF1 (NM_015608.2,1850-1868).
cagctctgatccatcagat

SEQ ID NO: 354528 - DNA, 19 bp, Homo sapiens
  siRNA target sequence for EDRF1 (NM_015608.2,1878-1896).
gcagtagctataatcaagt

SEQ ID NO: 354529 - DNA, 19 bp, Homo sapiens
  siRNA target sequence for EDRF1 (NM_015608.2,1892-1910).
caagtctgttggagaacta

SEQ ID NO: 354530 - DNA, 19 bp, Homo sapiens
  siRNA target sequence for EDRF1 (NM_015608.2,1895-1913).
gtctgttggagaactatca

SEQ ID NO: 354531 - DNA, 19 bp, Homo sapiens
  siRNA target sequence for EDRF1 (NM_015608.2,1993-2011).
gtagacttgtgcttagcta

SEQ ID NO: 354532 - DNA, 19 bp, Homo sapiens
  siRNA target sequence for EDRF1 (NM_015608.2,2034-2052).
gtcgatagcagcatcaaaa

SEQ ID NO: 354533 - DNA, 19 bp, Homo sapiens
  siRNA target sequence for EDRF1 (NM_015608.2,2083-2101).
gcactccaatcccgttaaa

SEQ ID NO: 354534 - DNA, 19 bp, Homo sapiens
  siRNA target sequence for EDRF1 (NM_015608.2,2084-2102).
cactccaatcccgttaaaa

SEQ ID NO: 354535 - DNA, 19 bp, Homo sapiens
  siRNA target sequence for EDRF1 (NM_015608.2,2086-2104).
ctccaatcccgttaaaata

SEQ ID NO: 354536 - DNA, 19 bp, Homo sapiens
  siRNA target sequence for EDRF1 (NM_015608.2,2095-2113).
cgttaaaatatgaagatga

SEQ ID NO: 354537 - DNA, 19 bp, Homo sapiens
  siRNA target sequence for EDRF1 (NM_015608.2,2180-2198).
ccttcagaagggcaattat

SEQ ID NO: 354538 - DNA, 19 bp, Homo sapiens
  siRNA target sequence for EDRF1 (NM_015608.2,2181-2199).
cttcagaagggcaattatt

SEQ ID NO: 354539 - DNA, 19 bp, Homo sapiens
  siRNA target sequence for EDRF1 (NM_015608.2,2190-2208).
ggcaattattccagtcaat

SEQ ID NO: 354540 - DNA, 19 bp, Homo sapiens
  siRNA target sequence for EDRF1 (NM_015608.2,2200-2218).
ccagtcaatctggaatgat

SEQ ID NO: 354541 - DNA, 19 bp, Homo sapiens
  siRNA target sequence for EDRF1 (NM_015608.2,2220-2238).
cctggctcttggcaacata

SEQ ID NO: 354542 - DNA, 19 bp, Homo sapiens
  siRNA target sequence for EDRF1 (NM_015608.2,2221-2239).
ctggctcttggcaacataa

SEQ ID NO: 354543 - DNA, 19 bp, Homo sapiens
  siRNA target sequence for EDRF1 (NM_015608.2,2224-2242).
gctcttggcaacataaaat

SEQ ID NO: 354544 - DNA, 19 bp, Homo sapiens
  siRNA target sequence for EDRF1 (NM_015608.2,2230-2248).
ggcaacataaaatgaaact

SEQ ID NO: 354545 - DNA, 19 bp, Homo sapiens
  siRNA target sequence for EDRF1 (NM_015608.2,2253-2271).
ctgattctcaagtcatcaa

SEQ ID NO: 354546 - DNA, 19 bp, Homo sapiens
  siRNA target sequence for EDRF1 (NM_015608.2,2264-2282).
gtcatcaaaggcctattat

SEQ ID NO: 354547 - DNA, 19 bp, Homo sapiens
  siRNA target sequence for EDRF1 (NM_015608.2,2298-2316).
gccatgagtcttcagaaat

SEQ ID NO: 354548 - DNA, 19 bp, Homo sapiens
  siRNA target sequence for EDRF1 (NM_015608.2,2320-2338).
gaagagcattacgatacat

SEQ ID NO: 354549 - DNA, 19 bp, Homo sapiens
  siRNA target sequence for EDRF1 (NM_015608.2,2325-2343).
gcattacgatacattaaat

SEQ ID NO: 354550 - DNA, 19 bp, Homo sapiens
  siRNA target sequence for EDRF1 (NM_015608.2,2331-2349).
cgatacattaaattagctt

SEQ ID NO: 354551 - DNA, 19 bp, Homo sapiens
  siRNA target sequence for EDRF1 (NM_015608.2,2336-2354).
cattaaattagctttgcaa

SEQ ID NO: 354552 - DNA, 19 bp, Homo sapiens
  siRNA target sequence for EDRF1 (NM_015608.2,2346-2364).
gctttgcaaagccatgata

SEQ ID NO: 354553 - DNA, 19 bp, Homo sapiens
  siRNA target sequence for EDRF1 (NM_015608.2,2351-2369).
gcaaagccatgatacttat

SEQ ID NO: 354554 - DNA, 19 bp, Homo sapiens
  siRNA target sequence for EDRF1 (NM_015608.2,2374-2392).
gcctctgcaccaatatgct

SEQ ID NO: 354555 - DNA, 19 bp, Homo sapiens
  siRNA target sequence for EDRF1 (NM_015608.2,2395-2413).
ccgaagtgctgttgtttct

SEQ ID NO: 354556 - DNA, 19 bp, Homo sapiens
  siRNA target sequence for EDRF1 (NM_015608.2,2428-2446).
cactttgtggtgatatcca

SEQ ID NO: 354557 - DNA, 19 bp, Homo sapiens
  siRNA target sequence for EDRF1 (NM_015608.2,2453-2471).
gctggcccagaatgcaaat

SEQ ID NO: 354558 - DNA, 19 bp, Homo sapiens
  siRNA target sequence for EDRF1 (NM_015608.2,2454-2472).
ctggcccagaatgcaaata

SEQ ID NO: 354559 - DNA, 19 bp, Homo sapiens
  siRNA target sequence for EDRF1 (NM_015608.2,2456-2474).
ggcccagaatgcaaataat

SEQ ID NO: 354560 - DNA, 19 bp, Homo sapiens
  siRNA target sequence for EDRF1 (NM_015608.2,2476-2494).
gagcagcacaccttgaaga

SEQ ID NO: 354561 - DNA, 19 bp, Homo sapiens
  siRNA target sequence for EDRF1 (NM_015608.2,2479-2497).
cagcacaccttgaagagtt

SEQ ID NO: 354562 - DNA, 19 bp, Homo sapiens
  siRNA target sequence for EDRF1 (NM_015608.2,2493-2511).
gagtttcattaccaaacaa

SEQ ID NO: 354563 - DNA, 19 bp, Homo sapiens
  siRNA target sequence for EDRF1 (NM_015608.2,2607-2625).
ctctctgttagttgtaaat

SEQ ID NO: 354564 - DNA, 19 bp, Homo sapiens
  siRNA target sequence for EDRF1 (NM_015608.2,2727-2745).
gaaattggtgtgttttaca

SEQ ID NO: 354565 - DNA, 19 bp, Homo sapiens
  siRNA target sequence for EDRF1 (NM_015608.2,2805-2823).
gagcaacagttgtggaaaa

SEQ ID NO: 354566 - DNA, 19 bp, Homo sapiens
  siRNA target sequence for EDRF1 (NM_015608.2,2889-2907).
gcccttttattatgtaaca

SEQ ID NO: 354567 - DNA, 19 bp, Homo sapiens
  siRNA target sequence for EDRF1 (NM_015608.2,2958-2976).
gaactgaaacgtgaatttt

SEQ ID NO: 354568 - DNA, 19 bp, Homo sapiens
  siRNA target sequence for EDRF1 (NM_015608.2,3006-3024).
gctattgattactatttga

SEQ ID NO: 354569 - DNA, 19 bp, Homo sapiens
  siRNA target sequence for EDRF1 (NM_015608.2,3007-3025).
ctattgattactatttgaa

SEQ ID NO: 354570 - DNA, 19 bp, Homo sapiens
  siRNA target sequence for EDRF1 (NM_015608.2,3087-3105).
gaattgtccactacttact

SEQ ID NO: 354571 - DNA, 19 bp, Homo sapiens
  siRNA target sequence for EDRF1 (NM_015608.2,3092-3110).
gtccactacttactttact

SEQ ID NO: 354572 - DNA, 19 bp, Homo sapiens
  siRNA target sequence for EDRF1 (NM_015608.2,3104-3122).
ctttactatggcaactcta

SEQ ID NO: 354573 - DNA, 19 bp, Homo sapiens
  siRNA target sequence for EDRF1 (NM_015608.2,3114-3132).
gcaactctacagcaagatt

SEQ ID NO: 354574 - DNA, 19 bp, Homo sapiens
  siRNA target sequence for EDRF1 (NM_015608.2,3115-3133).
caactctacagcaagatta

SEQ ID NO: 354575 - DNA, 19 bp, Homo sapiens
  siRNA target sequence for EDRF1 (NM_015608.2,3129-3147).
gattatgctccgttatcta

SEQ ID NO: 354576 - DNA, 19 bp, Homo sapiens
  siRNA target sequence for EDRF1 (NM_015608.2,3344-3362).
ccgggtgctggcagatctt

SEQ ID NO: 354577 - DNA, 19 bp, Homo sapiens
  siRNA target sequence for EDRF1 (NM_015608.2,3351-3369).
ctggcagatcttcattaca

SEQ ID NO: 354578 - DNA, 19 bp, Homo sapiens
  siRNA target sequence for EDRF1 (NM_015608.2,3410-3428).
ctgcgaactgcttagagta

SEQ ID NO: 354579 - DNA, 19 bp, Homo sapiens
  siRNA target sequence for EDRF1 (NM_015608.2,3467-3485).
cagtcagaatagcaatgtt

SEQ ID NO: 354580 - DNA, 19 bp, Homo sapiens
  siRNA target sequence for EDRF1 (NM_015608.2,3479-3497).
caatgttggaaagttgaaa

SEQ ID NO: 354581 - DNA, 19 bp, Homo sapiens
  siRNA target sequence for EDRF1 (NM_015608.2,3486-3504).
ggaaagttgaaaacactat

SEQ ID NO: 354582 - DNA, 19 bp, Homo sapiens
  siRNA target sequence for EDRF1 (NM_015608.2,3505-3523).
ctggggctcttgatataat

SEQ ID NO: 354583 - DNA, 19 bp, Homo sapiens
  siRNA target sequence for EDRF1 (NM_015608.2,3508-3526).
gggctcttgatataatggt

SEQ ID NO: 354584 - DNA, 19 bp, Homo sapiens
  siRNA target sequence for EDRF1 (NM_015608.2,3628-3646).
gtctcaatcgagaagaagt

SEQ ID NO: 354585 - DNA, 19 bp, Homo sapiens
  siRNA target sequence for EDRF1 (NM_015608.2,3708-3726).
ctgctatcttcaactaaaa

SEQ ID NO: 354586 - DNA, 19 bp, Homo sapiens
  siRNA target sequence for EDRF1 (NM_015608.2,3736-3754).
gcaataacatcgaagatga

SEQ ID NO: 354587 - DNA, 19 bp, Homo sapiens
  siRNA target sequence for DKFZp566C0424 (NM_015609.1,80-98).
gcgggcaggaaatccaaat

SEQ ID NO: 354588 - DNA, 19 bp, Homo sapiens
  siRNA target sequence for DKFZp566C0424 (NM_015609.1,105-123).
ccaaagtgcccattgtgat

SEQ ID NO: 354589 - DNA, 19 bp, Homo sapiens
  siRNA target sequence for DKFZp566C0424 (NM_015609.1,367-385).
cagcaggcagcccaataat

SEQ ID NO: 354590 - DNA, 19 bp, Homo sapiens
  siRNA target sequence for DKFZP434J154 (NM_015610.1,348-366).
ccctagctgttggtagtaa

SEQ ID NO: 354591 - DNA, 19 bp, Homo sapiens
  siRNA target sequence for DKFZP434J154 (NM_015610.1,350-368).
ctagctgttggtagtaagt

SEQ ID NO: 354592 - DNA, 19 bp, Homo sapiens
  siRNA target sequence for DKFZP434J154 (NM_015610.1,359-377).
ggtagtaagtccggttata

SEQ ID NO: 354593 - DNA, 19 bp, Homo sapiens
  siRNA target sequence for DKFZP434J154 (NM_015610.1,360-378).
gtagtaagtccggttataa

SEQ ID NO: 354594 - DNA, 19 bp, Homo sapiens
  siRNA target sequence for DKFZP434J154 (NM_015610.1,407-425).
ctggaacagatctatgaat

SEQ ID NO: 354595 - DNA, 19 bp, Homo sapiens
  siRNA target sequence for DKFZP434J154 (NM_015610.1,426-444).
gcaccgatacggaagatgt

SEQ ID NO: 354596 - DNA, 19 bp, Homo sapiens
  siRNA target sequence for DKFZP434J154 (NM_015610.1,698-716).
ctgtgtgcgctgtcaatca

SEQ ID NO: 354597 - DNA, 19 bp, Homo sapiens
  siRNA target sequence for DKFZP434J154 (NM_015610.1,702-720).
gtgcgctgtcaatcaacaa

SEQ ID NO: 354598 - DNA, 19 bp, Homo sapiens
  siRNA target sequence for DKFZP434J154 (NM_015610.1,764-782).
gaggtgcaggtcttcgata

SEQ ID NO: 354599 - DNA, 19 bp, Homo sapiens
  siRNA target sequence for DKFZP434J154 (NM_015610.1,772-790).
ggtcttcgataccattaat

SEQ ID NO: 354600 - DNA, 19 bp, Homo sapiens
  siRNA target sequence for DKFZP434J154 (NM_015610.1,773-791).
gtcttcgataccattaatt

SEQ ID NO: 354601 - DNA, 19 bp, Homo sapiens
  siRNA target sequence for DKFZP434J154 (NM_015610.1,778-796).
cgataccattaatttgaga

SEQ ID NO: 354602 - DNA, 19 bp, Homo sapiens
  siRNA target sequence for DKFZP434J154 (NM_015610.1,793-811).
gagagctgcaaacatgatt

SEQ ID NO: 354603 - DNA, 19 bp, Homo sapiens
  siRNA target sequence for DKFZP434J154 (NM_015610.1,850-868).
cgcaagtggaactaaactt

SEQ ID NO: 354604 - DNA, 19 bp, Homo sapiens
  siRNA target sequence for DKFZP434J154 (NM_015610.1,881-899).
gagaaggggaccgtgatta

SEQ ID NO: 354605 - DNA, 19 bp, Homo sapiens
  siRNA target sequence for DKFZP434J154 (NM_015610.1,889-907).
gaccgtgattagggtattt

SEQ ID NO: 354606 - DNA, 19 bp, Homo sapiens
  siRNA target sequence for DKFZP434J154 (NM_015610.1,893-911).
gtgattagggtattttcca

SEQ ID NO: 354607 - DNA, 19 bp, Homo sapiens
  siRNA target sequence for DKFZP434J154 (NM_015610.1,895-913).
gattagggtattttccatt

SEQ ID NO: 354608 - DNA, 19 bp, Homo sapiens
  siRNA target sequence for DKFZP434J154 (NM_015610.1,914-932).
ccagaaggacaaaaactct

SEQ ID NO: 354609 - DNA, 19 bp, Homo sapiens
  siRNA target sequence for DKFZP434J154 (NM_015610.1,1023-1041).
ctgagaccgtgcacatctt

SEQ ID NO: 354610 - DNA, 19 bp, Homo sapiens
  siRNA target sequence for DKFZP434J154 (NM_015610.1,1027-1045).
gaccgtgcacatcttcaaa

SEQ ID NO: 354611 - DNA, 19 bp, Homo sapiens
  siRNA target sequence for DKFZP434J154 (NM_015610.1,1194-1212).
cattctgcggccacaaaaa

SEQ ID NO: 354612 - DNA, 19 bp, Homo sapiens
  siRNA target sequence for DKFZP434J154 (NM_015610.1,1218-1236).
gctcgctagccacaattca

SEQ ID NO: 354613 - DNA, 19 bp, Homo sapiens
  siRNA target sequence for DKFZP434J154 (NM_015610.1,1221-1239).
cgctagccacaattcagaa

SEQ ID NO: 354614 - DNA, 19 bp, Homo sapiens
  siRNA target sequence for DKFZP434J154 (NM_015610.1,1268-1286).
gacgggtacctgtacatgt

SEQ ID NO: 354615 - DNA, 19 bp, Homo sapiens
  siRNA target sequence for DKFZP434J154 (NM_015610.1,1272-1290).
ggtacctgtacatgtacaa

SEQ ID NO: 354616 - DNA, 19 bp, Homo sapiens
  siRNA target sequence for DKFZP434J154 (NM_015610.1,1425-1443).
ctgcaggaaaaggtactta

SEQ ID NO: 354617 - DNA, 19 bp, Homo sapiens
  siRNA target sequence for DKFZP434C171 (NM_015621.1,761-779).
ctcccactgaggtctcttt

SEQ ID NO: 354618 - DNA, 19 bp, Homo sapiens
  siRNA target sequence for DKFZP434C171 (NM_015621.1,1113-1131).
ggccatttgacataaagga

SEQ ID NO: 354619 - DNA, 19 bp, Homo sapiens
  siRNA target sequence for C7orf28A (NM_015622.4,607-625).
gacggagggtccaacttct

SEQ ID NO: 354620 - DNA, 19 bp, Homo sapiens
  siRNA target sequence for C7orf28A (NM_015622.4,611-629).
gagggtccaacttctgaaa

SEQ ID NO: 354621 - DNA, 19 bp, Homo sapiens
  siRNA target sequence for C7orf28A (NM_015622.4,1473-1491).
cgggactcctatgttattt

SEQ ID NO: 354622 - DNA, 19 bp, Homo sapiens
  siRNA target sequence for C7orf28A (NM_015622.4,1474-1492).
gggactcctatgttatttt

SEQ ID NO: 354623 - DNA, 19 bp, Homo sapiens
  siRNA target sequence for ARH (NM_015627.1,298-316).
gtgtcgccacggggaatta

SEQ ID NO: 354624 - DNA, 19 bp, Homo sapiens
  siRNA target sequence for ARH (NM_015627.1,302-320).
cgccacggggaattatcct

SEQ ID NO: 354625 - DNA, 19 bp, Homo sapiens
  siRNA target sequence for ARH (NM_015627.1,397-415).
cacgacaaggtgtttgcat

SEQ ID NO: 354626 - DNA, 19 bp, Homo sapiens
  siRNA target sequence for PRPF31 (NM_015629.2,511-529).
gccaagctatgggatagta

SEQ ID NO: 354627 - DNA, 19 bp, Homo sapiens
  siRNA target sequence for PRPF31 (NM_015629.2,517-535).
ctatgggatagtaagatgt

SEQ ID NO: 354628 - DNA, 19 bp, Homo sapiens
  siRNA target sequence for PRPF31 (NM_015629.2,581-599).
ccaaagcttcagaagtgat

SEQ ID NO: 354629 - DNA, 19 bp, Homo sapiens
  siRNA target sequence for PRPF31 (NM_015629.2,652-670).
ctgaccgtggagatcgaaa

SEQ ID NO: 354630 - DNA, 19 bp, Homo sapiens
  siRNA target sequence for PRPF31 (NM_015629.2,656-674).
ccgtggagatcgaaaacga

SEQ ID NO: 354631 - DNA, 19 bp, Homo sapiens
  siRNA target sequence for PRPF31 (NM_015629.2,676-694).
ctgaacatcatccataagt

SEQ ID NO: 354632 - DNA, 19 bp, Homo sapiens
  siRNA target sequence for PRPF31 (NM_015629.2,700-718).
cgggataagtactcaaaga

SEQ ID NO: 354633 - DNA, 19 bp, Homo sapiens
  siRNA target sequence for PRPF31 (NM_015629.2,746-764).
ccaatgcactggattacat

SEQ ID NO: 354634 - DNA, 19 bp, Homo sapiens
  siRNA target sequence for PRPF31 (NM_015629.2,1262-1280).
cagcccgtgtggacagttt

SEQ ID NO: 354635 - DNA, 19 bp, Homo sapiens
  siRNA target sequence for PRPF31 (NM_015629.2,1580-1598).
ggcagacacaggtaaacga

SEQ ID NO: 354636 - DNA, 19 bp, Homo sapiens
  siRNA target sequence for PRPF31 (NM_015629.2,1644-1662).
gaagcagagcgtcgtatat

SEQ ID NO: 354637 - DNA, 19 bp, Homo sapiens
  siRNA target sequence for DKFZP566F2124 (NM_015630.2,179-197).
catttacagcgagcaattt

SEQ ID NO: 354638 - DNA, 19 bp, Homo sapiens
  siRNA target sequence for DKFZP566F2124 (NM_015630.2,201-219).
cacagcaagtgtttagaga

SEQ ID NO: 354639 - DNA, 19 bp, Homo sapiens
  siRNA target sequence for DKFZP566F2124 (NM_015630.2,255-273).
cagagagcaacgtcaacta

SEQ ID NO: 354640 - DNA, 19 bp, Homo sapiens
  siRNA target sequence for DKFZP566F2124 (NM_015630.2,261-279).
gcaacgtcaactattacaa

SEQ ID NO: 354641 - DNA, 19 bp, Homo sapiens
  siRNA target sequence for DKFZP566F2124 (NM_015630.2,346-364).
caacgagcaaccagattat

SEQ ID NO: 354642 - DNA, 19 bp, Homo sapiens
  siRNA target sequence for DKFZP566F2124 (NM_015630.2,385-403).
gactttattaaatagactt

SEQ ID NO: 354643 - DNA, 19 bp, Homo sapiens
  siRNA target sequence for DKFZP566F2124 (NM_015630.2,478-496).
gcttgtaacacttcaagaa

SEQ ID NO: 354644 - DNA, 19 bp, Homo sapiens
  siRNA target sequence for DKFZP566F2124 (NM_015630.2,498-516).
caaaactgctgctaaacga

SEQ ID NO: 354645 - DNA, 19 bp, Homo sapiens
  siRNA target sequence for DKFZP566F2124 (NM_015630.2,547-565).
ctactgggtgagaaaacgt

SEQ ID NO: 354646 - DNA, 19 bp, Homo sapiens
  siRNA target sequence for DKFZP566F2124 (NM_015630.2,585-603).
ccctcattcctcagataaa

SEQ ID NO: 354647 - DNA, 19 bp, Homo sapiens
  siRNA target sequence for DKFZP566F2124 (NM_015630.2,627-645).
ccaacaatgacccttatgt

SEQ ID NO: 354648 - DNA, 19 bp, Homo sapiens
  siRNA target sequence for DKFZP566F2124 (NM_015630.2,644-662).
gttgcctttcggagaagaa

SEQ ID NO: 354649 - DNA, 19 bp, Homo sapiens
  siRNA target sequence for DKFZP566F2124 (NM_015630.2,674-692).
caaactcgaaagaatcgta

SEQ ID NO: 354650 - DNA, 19 bp, Homo sapiens
  siRNA target sequence for DKFZP566F2124 (NM_015630.2,678-696).
ctcgaaagaatcgtaagaa

SEQ ID NO: 354651 - DNA, 19 bp, Homo sapiens
  siRNA target sequence for DKFZP566F2124 (NM_015630.2,685-703).
gaatcgtaagaatgatgaa

SEQ ID NO: 354652 - DNA, 19 bp, Homo sapiens
  siRNA target sequence for DKFZP566F2124 (NM_015630.2,704-722).
gcctcttatgaaaagatgt

SEQ ID NO: 354653 - DNA, 19 bp, Homo sapiens
  siRNA target sequence for DKFZP566F2124 (NM_015630.2,724-742).
gaaactgagacgagaattt

SEQ ID NO: 354654 - DNA, 19 bp, Homo sapiens
  siRNA target sequence for DKFZP566F2124 (NM_015630.2,728-746).
ctgagacgagaatttagta

SEQ ID NO: 354655 - DNA, 19 bp, Homo sapiens
  siRNA target sequence for DKFZP566F2124 (NM_015630.2,744-762).
gtagagccataacaatttt

SEQ ID NO: 354656 - DNA, 19 bp, Homo sapiens
  siRNA target sequence for DKFZP566F2124 (NM_015630.2,750-768).
ccataacaattttggaaat

SEQ ID NO: 354657 - DNA, 19 bp, Homo sapiens
  siRNA target sequence for DKFZP566F2124 (NM_015630.2,805-823).
gcacttaaccttagaagtt

SEQ ID NO: 354658 - DNA, 19 bp, Homo sapiens
  siRNA target sequence for DKFZP566F2124 (NM_015630.2,850-868).
ctatggtggtgaaatcctt

SEQ ID NO: 354659 - DNA, 19 bp, Homo sapiens
  siRNA target sequence for DKFZP566F2124 (NM_015630.2,885-903).
gtagatcagaaaaagagtt

SEQ ID NO: 354660 - DNA, 19 bp, Homo sapiens
  siRNA target sequence for DKFZP566F2124 (NM_015630.2,888-906).
gatcagaaaaagagttata

SEQ ID NO: 354661 - DNA, 19 bp, Homo sapiens
  siRNA target sequence for DKFZP566F2124 (NM_015630.2,910-928).
cactccagcaactcttcat

SEQ ID NO: 354662 - DNA, 19 bp, Homo sapiens
  siRNA target sequence for DKFZP566F2124 (NM_015630.2,941-959).
cacaaagttcaagaatgta

SEQ ID NO: 354663 - DNA, 19 bp, Homo sapiens
  siRNA target sequence for DKFZP566F2124 (NM_015630.2,1002-1020).
ctgatgtggttcgtcaaaa

SEQ ID NO: 354664 - DNA, 19 bp, Homo sapiens
  siRNA target sequence for DKFZP566F2124 (NM_015630.2,1004-1022).
gatgtggttcgtcaaaaga

SEQ ID NO: 354665 - DNA, 19 bp, Homo sapiens
  siRNA target sequence for DKFZP566F2124 (NM_015630.2,1090-1108).
gcctgtgatcaataagagt

SEQ ID NO: 354666 - DNA, 19 bp, Homo sapiens
  siRNA target sequence for DKFZP566F2124 (NM_015630.2,1096-1114).
gatcaataagagtgacatt

SEQ ID NO: 354667 - DNA, 19 bp, Homo sapiens
  siRNA target sequence for DKFZP566F2124 (NM_015630.2,1105-1123).
gagtgacattaagcaatat

SEQ ID NO: 354668 - DNA, 19 bp, Homo sapiens
  siRNA target sequence for DKFZP566F2124 (NM_015630.2,1159-1177).
ggtattgtccccagtatca

SEQ ID NO: 354669 - DNA, 19 bp, Homo sapiens
  siRNA target sequence for DKFZP566F2124 (NM_015630.2,1227-1245).
gggcaggatgccagtatta

SEQ ID NO: 354670 - DNA, 19 bp, Homo sapiens
  siRNA target sequence for DKFZP566F2124 (NM_015630.2,1259-1277).
gaccaagctaaccattcat

SEQ ID NO: 354671 - DNA, 19 bp, Homo sapiens
  siRNA target sequence for DKFZP566F2124 (NM_015630.2,1261-1279).
ccaagctaaccattcatgt

SEQ ID NO: 354672 - DNA, 19 bp, Homo sapiens
  siRNA target sequence for DKFZP566F2124 (NM_015630.2,1265-1283).
gctaaccattcatgtgaaa

SEQ ID NO: 354673 - DNA, 19 bp, Homo sapiens
  siRNA target sequence for DKFZP566F2124 (NM_015630.2,1287-1305).
cagaattggcagatttgga

SEQ ID NO: 354674 - DNA, 19 bp, Homo sapiens
  siRNA target sequence for DKFZP566F2124 (NM_015630.2,1321-1339).
gcattgccttacaacactt

SEQ ID NO: 354675 - DNA, 19 bp, Homo sapiens
  siRNA target sequence for DKFZP566F2124 (NM_015630.2,1322-1340).
cattgccttacaacactta

SEQ ID NO: 354676 - DNA, 19 bp, Homo sapiens
  siRNA target sequence for DKFZP566F2124 (NM_015630.2,1326-1344).
gccttacaacacttacagt

SEQ ID NO: 354677 - DNA, 19 bp, Homo sapiens
  siRNA target sequence for DKFZP566F2124 (NM_015630.2,1337-1355).
cttacagtcccaagaagat

SEQ ID NO: 354678 - DNA, 19 bp, Homo sapiens
  siRNA target sequence for DKFZP566F2124 (NM_015630.2,1397-1415).
gtcataatggaccgaatat

SEQ ID NO: 354679 - DNA, 19 bp, Homo sapiens
  siRNA target sequence for DKFZP566F2124 (NM_015630.2,1408-1426).
ccgaatatccacagaacat

SEQ ID NO: 354680 - DNA, 19 bp, Homo sapiens
  siRNA target sequence for DKFZP566F2124 (NM_015630.2,1479-1497).
cttcccaaactatagactt

SEQ ID NO: 354681 - DNA, 19 bp, Homo sapiens
  siRNA target sequence for DKFZP566F2124 (NM_015630.2,1518-1536).
ccaatgcttccagtaaaca

SEQ ID NO: 354682 - DNA, 19 bp, Homo sapiens
  siRNA target sequence for DKFZP566F2124 (NM_015630.2,1519-1537).
caatgcttccagtaaacat

SEQ ID NO: 354683 - DNA, 19 bp, Homo sapiens
  siRNA target sequence for DKFZP566F2124 (NM_015630.2,1548-1566).
gactgtctctttctgaaat

SEQ ID NO: 354684 - DNA, 19 bp, Homo sapiens
  siRNA target sequence for DKFZP566F2124 (NM_015630.2,1608-1626).
caaggctactaaatttaca

SEQ ID NO: 354685 - DNA, 19 bp, Homo sapiens
  siRNA target sequence for DKFZP566F2124 (NM_015630.2,1694-1712).
gcagcatctgtagctttat

SEQ ID NO: 354686 - DNA, 19 bp, Homo sapiens
  siRNA target sequence for DKFZP566F2124 (NM_015630.2,1695-1713).
cagcatctgtagctttatt

SEQ ID NO: 354687 - DNA, 19 bp, Homo sapiens
  siRNA target sequence for DKFZP566F2124 (NM_015630.2,1723-1741).
caagaatggcatatcagta

SEQ ID NO: 354688 - DNA, 19 bp, Homo sapiens
  siRNA target sequence for DKFZP566F2124 (NM_015630.2,1726-1744).
gaatggcatatcagtaaca

SEQ ID NO: 354689 - DNA, 19 bp, Homo sapiens
  siRNA target sequence for DKFZP566F2124 (NM_015630.2,1784-1802).
cagttagttcagatgcaaa

SEQ ID NO: 354690 - DNA, 19 bp, Homo sapiens
  siRNA target sequence for DKFZP566F2124 (NM_015630.2,1851-1869).
cgcaacagacacatccaaa

SEQ ID NO: 354691 - DNA, 19 bp, Homo sapiens
  siRNA target sequence for DKFZP566F2124 (NM_015630.2,1852-1870).
gcaacagacacatccaaaa

SEQ ID NO: 354692 - DNA, 19 bp, Homo sapiens
  siRNA target sequence for DKFZP566F2124 (NM_015630.2,1885-1903).
cacctctgactgtatgtct

SEQ ID NO: 354693 - DNA, 19 bp, Homo sapiens
  siRNA target sequence for DKFZP566F2124 (NM_015630.2,1887-1905).
cctctgactgtatgtctaa

SEQ ID NO: 354694 - DNA, 19 bp, Homo sapiens
  siRNA target sequence for DKFZP566F2124 (NM_015630.2,1888-1906).
ctctgactgtatgtctaaa

SEQ ID NO: 354695 - DNA, 19 bp, Homo sapiens
  siRNA target sequence for DKFZP566F2124 (NM_015630.2,1894-1912).
ctgtatgtctaaaacactt

SEQ ID NO: 354696 - DNA, 19 bp, Homo sapiens
  siRNA target sequence for DKFZP566F2124 (NM_015630.2,1998-2016).
ctggccacaacaacataaa

SEQ ID NO: 354697 - DNA, 19 bp, Homo sapiens
  siRNA target sequence for DKFZP566F2124 (NM_015630.2,2059-2077).
caccaatatggctttatca

SEQ ID NO: 354698 - DNA, 19 bp, Homo sapiens
  siRNA target sequence for DKFZP566F2124 (NM_015630.2,2117-2135).
gttggccacaccactacaa

SEQ ID NO: 354699 - DNA, 19 bp, Homo sapiens
  siRNA target sequence for DKFZP566F2124 (NM_015630.2,2173-2191).
gacacttcccatgaacaat

SEQ ID NO: 354700 - DNA, 19 bp, Homo sapiens
  siRNA target sequence for DKFZP566F2124 (NM_015630.2,2238-2256).
ctccagtcaatgtgcatat

SEQ ID NO: 354701 - DNA, 19 bp, Homo sapiens
  siRNA target sequence for DKFZP566F2124 (NM_015630.2,2240-2258).
ccagtcaatgtgcatatca

SEQ ID NO: 354702 - DNA, 19 bp, Homo sapiens
  siRNA target sequence for DKFZP566F2124 (NM_015630.2,2241-2259).
cagtcaatgtgcatatcaa

SEQ ID NO: 354703 - DNA, 19 bp, Homo sapiens
  siRNA target sequence for DKFZP566F2124 (NM_015630.2,2243-2261).
gtcaatgtgcatatcaata

SEQ ID NO: 354704 - DNA, 19 bp, Homo sapiens
  siRNA target sequence for DKFZP566F2124 (NM_015630.2,2277-2295).
catcgccaacagccttaaa

SEQ ID NO: 354705 - DNA, 19 bp, Homo sapiens
  siRNA target sequence for DKFZP566F2124 (NM_015630.2,2280-2298).
cgccaacagccttaaaact

SEQ ID NO: 354706 - DNA, 19 bp, Homo sapiens
  siRNA target sequence for DKFZP566F2124 (NM_015630.2,2321-2339).
gacagagtgccaaaggtta

SEQ ID NO: 354707 - DNA, 19 bp, Homo sapiens
  siRNA target sequence for DKFZP566F2124 (NM_015630.2,2351-2369).
gccatcagcagcatagcaa

SEQ ID NO: 354708 - DNA, 19 bp, Homo sapiens
  siRNA target sequence for DKFZP566F2124 (NM_015630.2,2385-2403).
cagaaagattgggcttaaa

SEQ ID NO: 354709 - DNA, 19 bp, Homo sapiens
  siRNA target sequence for DKFZP566F2124 (NM_015630.2,2412-2430).
cagagacaacagtagctat

SEQ ID NO: 354710 - DNA, 19 bp, Homo sapiens
  siRNA target sequence for DKFZP564D116 (NM_015631.1,793-811).
ggaggcgaatcattcactt

SEQ ID NO: 354711 - DNA, 19 bp, Homo sapiens
  siRNA target sequence for DKFZP564D116 (NM_015631.1,798-816).
cgaatcattcacttcaaca

SEQ ID NO: 354712 - DNA, 19 bp, Homo sapiens
  siRNA target sequence for DKFZP564D116 (NM_015631.1,799-817).
gaatcattcacttcaacat

SEQ ID NO: 354713 - DNA, 19 bp, Homo sapiens
  siRNA target sequence for DKFZP564D116 (NM_015631.1,850-868).
gctggggaccccattctta

SEQ ID NO: 354714 - DNA, 19 bp, Homo sapiens
  siRNA target sequence for DKFZP564D116 (NM_015631.1,853-871).
ggggaccccattcttactt

SEQ ID NO: 354715 - DNA, 19 bp, Homo sapiens
  siRNA target sequence for DKFZP564D116 (NM_015631.1,854-872).
gggaccccattcttactta

SEQ ID NO: 354716 - DNA, 19 bp, Homo sapiens
  siRNA target sequence for DKFZP564D116 (NM_015631.1,856-874).
gaccccattcttacttact

SEQ ID NO: 354717 - DNA, 19 bp, Homo sapiens
  siRNA target sequence for DKFZP564D116 (NM_015631.1,876-894).
ccccaagtggtctgtaata

SEQ ID NO: 354718 - DNA, 19 bp, Homo sapiens
  siRNA target sequence for DKFZP564D116 (NM_015631.1,948-966).
caatcctgcaggtttccta

SEQ ID NO: 354719 - DNA, 19 bp, Homo sapiens
  siRNA target sequence for DKFZP564D116 (NM_015631.1,967-985).
gagagtaaaagtacaactt

SEQ ID NO: 354720 - DNA, 19 bp, Homo sapiens
  siRNA target sequence for DKFZP564D116 (NM_015631.1,980-998).
caacttgcactcgtttttt

SEQ ID NO: 354721 - DNA, 19 bp, Homo sapiens
  siRNA target sequence for DKFZP564D116 (NM_015631.1,1036-1054).
ctcaatgctgcctcttact

SEQ ID NO: 354722 - DNA, 19 bp, Homo sapiens
  siRNA target sequence for DKFZP564D116 (NM_015631.1,1038-1056).
caatgctgcctcttactat

SEQ ID NO: 354723 - DNA, 19 bp, Homo sapiens
  siRNA target sequence for DKFZP564D116 (NM_015631.1,1042-1060).
gctgcctcttactataact

SEQ ID NO: 354724 - DNA, 19 bp, Homo sapiens
  siRNA target sequence for DKFZP564D116 (NM_015631.1,1043-1061).
ctgcctcttactataactt

SEQ ID NO: 354725 - DNA, 19 bp, Homo sapiens
  siRNA target sequence for DKFZP564D116 (NM_015631.1,1280-1298).
gtgggaatcctggctatat

SEQ ID NO: 354726 - DNA, 19 bp, Homo sapiens
  siRNA target sequence for DKFZP564D116 (NM_015631.1,1283-1301).
ggaatcctggctatatagt

SEQ ID NO: 354727 - DNA, 19 bp, Homo sapiens
  siRNA target sequence for DKFZP564D116 (NM_015631.1,1284-1302).
gaatcctggctatatagtt

SEQ ID NO: 354728 - DNA, 19 bp, Homo sapiens
  siRNA target sequence for DKFZP564D116 (NM_015631.1,1317-1335).
ggctctgactgatgatata

SEQ ID NO: 354729 - DNA, 19 bp, Homo sapiens
  siRNA target sequence for DKFZP564D116 (NM_015631.1,1318-1336).
gctctgactgatgatataa

SEQ ID NO: 354730 - DNA, 19 bp, Homo sapiens
  siRNA target sequence for DKFZP564D116 (NM_015631.1,1321-1339).
ctgactgatgatataagtt

SEQ ID NO: 354731 - DNA, 19 bp, Homo sapiens
  siRNA target sequence for DKFZP564D116 (NM_015631.1,1468-1486).
cagcaggagatttatcaga

SEQ ID NO: 354732 - DNA, 19 bp, Homo sapiens
  siRNA target sequence for DKFZP564D116 (NM_015631.1,1476-1494).
gatttatcagactcttcat

SEQ ID NO: 354733 - DNA, 19 bp, Homo sapiens
  siRNA target sequence for DKFZP564D116 (NM_015631.1,1581-1599).
ctgcagcatttcagctata

SEQ ID NO: 354734 - DNA, 19 bp, Homo sapiens
  siRNA target sequence for DKFZP564D116 (NM_015631.1,1644-1662).
ggtattgtgggcatatgta

SEQ ID NO: 354735 - DNA, 19 bp, Homo sapiens
  siRNA target sequence for DKFZP564D116 (NM_015631.1,1674-1692).
caacccgcaagctcatgta

SEQ ID NO: 354736 - DNA, 19 bp, Homo sapiens
  siRNA target sequence for DKFZP564D116 (NM_015631.1,1677-1695).
cccgcaagctcatgtatca

SEQ ID NO: 354737 - DNA, 19 bp, Homo sapiens
  siRNA target sequence for DKFZP564D116 (NM_015631.1,1694-1712).
caggagttcgattcctata

SEQ ID NO: 354738 - DNA, 19 bp, Homo sapiens
  siRNA target sequence for DKFZP564D116 (NM_015631.1,1697-1715).
gagttcgattcctatacca

SEQ ID NO: 354739 - DNA, 19 bp, Homo sapiens
  siRNA target sequence for DKFZP564D116 (NM_015631.1,1729-1747).
caggattctcagcaagtta

SEQ ID NO: 354740 - DNA, 19 bp, Homo sapiens
  siRNA target sequence for DKFZP564D116 (NM_015631.1,1731-1749).
ggattctcagcaagttaca

SEQ ID NO: 354741 - DNA, 19 bp, Homo sapiens
  siRNA target sequence for DKFZP564D116 (NM_015631.1,1740-1758).
gcaagttacagaagtatct

SEQ ID NO: 354742 - DNA, 19 bp, Homo sapiens
  siRNA target sequence for DKFZP564D116 (NM_015631.1,1744-1762).
gttacagaagtatctttga

SEQ ID NO: 354743 - DNA, 19 bp, Homo sapiens
  siRNA target sequence for DKFZP564D116 (NM_015631.1,1811-1829).
ggggccaacccaaaatgga

SEQ ID NO: 354744 - DNA, 19 bp, Homo sapiens
  siRNA target sequence for DKFZP564O1863 (NM_015633.1,522-540).
gccacggtccacgttagtt

SEQ ID NO: 354745 - DNA, 19 bp, Homo sapiens
  siRNA target sequence for DKFZP564O1863 (NM_015633.1,523-541).
ccacggtccacgttagtta

SEQ ID NO: 354746 - DNA, 19 bp, Homo sapiens
  siRNA target sequence for DKFZP564O1863 (NM_015633.1,524-542).
cacggtccacgttagttat

SEQ ID NO: 354747 - DNA, 19 bp, Homo sapiens
  siRNA target sequence for DKFZP564O1863 (NM_015633.1,622-640).
cagtcggccttggaactta

SEQ ID NO: 354748 - DNA, 19 bp, Homo sapiens
  siRNA target sequence for DKFZP564O1863 (NM_015633.1,626-644).
cggccttggaacttataat

SEQ ID NO: 354749 - DNA, 19 bp, Homo sapiens
  siRNA target sequence for DKFZP564O1863 (NM_015633.1,647-665).
gcaagtaccgagaacaaat

SEQ ID NO: 354750 - DNA, 19 bp, Homo sapiens
  siRNA target sequence for DKFZP564O1863 (NM_015633.1,651-669).
gtaccgagaacaaatgttt

SEQ ID NO: 354751 - DNA, 19 bp, Homo sapiens
  siRNA target sequence for DKFZP564O1863 (NM_015633.1,654-672).
ccgagaacaaatgtttaga

SEQ ID NO: 354752 - DNA, 19 bp, Homo sapiens
  siRNA target sequence for DKFZP564O1863 (NM_015633.1,655-673).
cgagaacaaatgtttagat

SEQ ID NO: 354753 - DNA, 19 bp, Homo sapiens
  siRNA target sequence for DKFZP564O1863 (NM_015633.1,656-674).
gagaacaaatgtttagatt

SEQ ID NO: 354754 - DNA, 19 bp, Homo sapiens
  siRNA target sequence for DKFZP564O1863 (NM_015633.1,681-699).
ggctagcaaaaaagatgat

SEQ ID NO: 354755 - DNA, 19 bp, Homo sapiens
  siRNA target sequence for DKFZP564O1863 (NM_015633.1,694-712).
gatgatccgggtataataa

SEQ ID NO: 354756 - DNA, 19 bp, Homo sapiens
  siRNA target sequence for DKFZP564O1863 (NM_015633.1,697-715).
gatccgggtataataatga

SEQ ID NO: 354757 - DNA, 19 bp, Homo sapiens
  siRNA target sequence for DKFZP564O1863 (NM_015633.1,700-718).
ccgggtataataatgaagt

SEQ ID NO: 354758 - DNA, 19 bp, Homo sapiens
  siRNA target sequence for DKFZP564O1863 (NM_015633.1,701-719).
cgggtataataatgaagtt

SEQ ID NO: 354759 - DNA, 19 bp, Homo sapiens
  siRNA target sequence for DKFZP564O1863 (NM_015633.1,727-745).
cagcactccaagattgaca

SEQ ID NO: 354760 - DNA, 19 bp, Homo sapiens
  siRNA target sequence for DKFZP564O1863 (NM_015633.1,755-773).
gtaacaagtccgaaggatt

SEQ ID NO: 354761 - DNA, 19 bp, Homo sapiens
  siRNA target sequence for DKFZP564O1863 (NM_015633.1,868-886).
gttgaccagataactgaaa

SEQ ID NO: 354762 - DNA, 19 bp, Homo sapiens
  siRNA target sequence for DKFZP564O1863 (NM_015633.1,997-1015).
caaataactcgagaatcat

SEQ ID NO: 354763 - DNA, 19 bp, Homo sapiens
  siRNA target sequence for DKFZP564O1863 (NM_015633.1,1033-1051).
gatgatgcgtcggaaagta

SEQ ID NO: 354764 - DNA, 19 bp, Homo sapiens
  siRNA target sequence for DKFZP564O1863 (NM_015633.1,1039-1057).
gcgtcggaaagtacttctt

SEQ ID NO: 354765 - DNA, 19 bp, Homo sapiens
  siRNA target sequence for DKFZP564O1863 (NM_015633.1,1040-1058).
cgtcggaaagtacttcttt

SEQ ID NO: 354766 - DNA, 19 bp, Homo sapiens
  siRNA target sequence for DKFZP564O1863 (NM_015633.1,1044-1062).
ggaaagtacttctttgtca

SEQ ID NO: 354767 - DNA, 19 bp, Homo sapiens
  siRNA target sequence for DKFZP564O1863 (NM_015633.1,1069-1087).
gtgaccaacagtgatttga

SEQ ID NO: 354768 - DNA, 19 bp, Homo sapiens
  siRNA target sequence for DKFZP564O1863 (NM_015633.1,1071-1089).
gaccaacagtgatttgagt

SEQ ID NO: 354769 - DNA, 19 bp, Homo sapiens
  siRNA target sequence for KIAA1279 (NM_015634.1,28-46).
gcagaggtctgcgagaaat

SEQ ID NO: 354770 - DNA, 19 bp, Homo sapiens
  siRNA target sequence for KIAA1279 (NM_015634.1,29-47).
cagaggtctgcgagaaatt

SEQ ID NO: 354771 - DNA, 19 bp, Homo sapiens
  siRNA target sequence for KIAA1279 (NM_015634.1,68-86).
cgcgggtggaactgcataa

SEQ ID NO: 354772 - DNA, 19 bp, Homo sapiens
  siRNA target sequence for KIAA1279 (NM_015634.1,72-90).
ggtggaactgcataaaaat

SEQ ID NO: 354773 - DNA, 19 bp, Homo sapiens
  siRNA target sequence for KIAA1279 (NM_015634.1,103-121).
ccatacaagtccaaataca

SEQ ID NO: 354774 - DNA, 19 bp, Homo sapiens
  siRNA target sequence for KIAA1279 (NM_015634.1,445-463).
ggtatcttgtggtctgaaa

SEQ ID NO: 354775 - DNA, 19 bp, Homo sapiens
  siRNA target sequence for KIAA1279 (NM_015634.1,498-516).
gtcatcagaagcactatat

SEQ ID NO: 354776 - DNA, 19 bp, Homo sapiens
  siRNA target sequence for KIAA1279 (NM_015634.1,500-518).
catcagaagcactatataa

SEQ ID NO: 354777 - DNA, 19 bp, Homo sapiens
  siRNA target sequence for KIAA1279 (NM_015634.1,505-523).
gaagcactatataatcagt

SEQ ID NO: 354778 - DNA, 19 bp, Homo sapiens
  siRNA target sequence for KIAA1279 (NM_015634.1,511-529).
ctatataatcagtatatga

SEQ ID NO: 354779 - DNA, 19 bp, Homo sapiens
  siRNA target sequence for KIAA1279 (NM_015634.1,625-643).
gtttatactcataacctat

SEQ ID NO: 354780 - DNA, 19 bp, Homo sapiens
  siRNA target sequence for KIAA1279 (NM_015634.1,632-650).
ctcataacctatattacct

SEQ ID NO: 354781 - DNA, 19 bp, Homo sapiens
  siRNA target sequence for KIAA1279 (NM_015634.1,691-709).
gctcactattgccatagta

SEQ ID NO: 354782 - DNA, 19 bp, Homo sapiens
  siRNA target sequence for KIAA1279 (NM_015634.1,696-714).
ctattgccatagtacacta

SEQ ID NO: 354783 - DNA, 19 bp, Homo sapiens
  siRNA target sequence for KIAA1279 (NM_015634.1,732-750).
caatgcctaccatcctata

SEQ ID NO: 354784 - DNA, 19 bp, Homo sapiens
  siRNA target sequence for KIAA1279 (NM_015634.1,746-764).
ctatagagtgggctatcaa

SEQ ID NO: 354785 - DNA, 19 bp, Homo sapiens
  siRNA target sequence for KIAA1279 (NM_015634.1,769-787).
gctaccttgtcacagtttt

SEQ ID NO: 354786 - DNA, 19 bp, Homo sapiens
  siRNA target sequence for KIAA1279 (NM_015634.1,773-791).
ccttgtcacagttttacat

SEQ ID NO: 354787 - DNA, 19 bp, Homo sapiens
  siRNA target sequence for KIAA1279 (NM_015634.1,777-795).
gtcacagttttacatcaat

SEQ ID NO: 354788 - DNA, 19 bp, Homo sapiens
  siRNA target sequence for KIAA1279 (NM_015634.1,783-801).
gttttacatcaataagcta

SEQ ID NO: 354789 - DNA, 19 bp, Homo sapiens
  siRNA target sequence for KIAA1279 (NM_015634.1,789-807).
catcaataagctatgcttt

SEQ ID NO: 354790 - DNA, 19 bp, Homo sapiens
  siRNA target sequence for KIAA1279 (NM_015634.1,813-831).
ggccaggcactgtttatca

SEQ ID NO: 354791 - DNA, 19 bp, Homo sapiens
  siRNA target sequence for KIAA1279 (NM_015634.1,822-840).
ctgtttatcagctgctaat

SEQ ID NO: 354792 - DNA, 19 bp, Homo sapiens
  siRNA target sequence for KIAA1279 (NM_015634.1,906-924).
gccagagctttatcatcaa

SEQ ID NO: 354793 - DNA, 19 bp, Homo sapiens
  siRNA target sequence for KIAA1279 (NM_015634.1,907-925).
ccagagctttatcatcaaa

SEQ ID NO: 354794 - DNA, 19 bp, Homo sapiens
  siRNA target sequence for KIAA1279 (NM_015634.1,940-958).
gcaaggtgctggatcaaat

SEQ ID NO: 354795 - DNA, 19 bp, Homo sapiens
  siRNA target sequence for KIAA1279 (NM_015634.1,941-959).
caaggtgctggatcaaata

SEQ ID NO: 354796 - DNA, 19 bp, Homo sapiens
  siRNA target sequence for KIAA1279 (NM_015634.1,945-963).
gtgctggatcaaatactgt

SEQ ID NO: 354797 - DNA, 19 bp, Homo sapiens
  siRNA target sequence for KIAA1279 (NM_015634.1,1005-1023).
cataggagagcttgatctt

SEQ ID NO: 354798 - DNA, 19 bp, Homo sapiens
  siRNA target sequence for KIAA1279 (NM_015634.1,1009-1027).
ggagagcttgatcttgata

SEQ ID NO: 354799 - DNA, 19 bp, Homo sapiens
  siRNA target sequence for KIAA1279 (NM_015634.1,1010-1028).
gagagcttgatcttgataa

SEQ ID NO: 354800 - DNA, 19 bp, Homo sapiens
  siRNA target sequence for KIAA1279 (NM_015634.1,1032-1050).
gtctgaacttagagcttta

SEQ ID NO: 354801 - DNA, 19 bp, Homo sapiens
  siRNA target sequence for KIAA1279 (NM_015634.1,1036-1054).
gaacttagagctttaagga

SEQ ID NO: 354802 - DNA, 19 bp, Homo sapiens
  siRNA target sequence for KIAA1279 (NM_015634.1,1144-1162).
gagaaagtgagctacttga

SEQ ID NO: 354803 - DNA, 19 bp, Homo sapiens
  siRNA target sequence for KIAA1279 (NM_015634.1,1154-1172).
gctacttgagacctttaga

SEQ ID NO: 354804 - DNA, 19 bp, Homo sapiens
  siRNA target sequence for KIAA1279 (NM_015634.1,1205-1223).
gtcagcactatgtctttga

SEQ ID NO: 354805 - DNA, 19 bp, Homo sapiens
  siRNA target sequence for KIAA1279 (NM_015634.1,1240-1258).
cagattgatggttatgtca

SEQ ID NO: 354806 - DNA, 19 bp, Homo sapiens
  siRNA target sequence for KIAA1279 (NM_015634.1,1259-1277).
ctgaccatattgaagttgt

SEQ ID NO: 354807 - DNA, 19 bp, Homo sapiens
  siRNA target sequence for KIAA1279 (NM_015634.1,1282-1300).
gaccacagtgctctgttta

SEQ ID NO: 354808 - DNA, 19 bp, Homo sapiens
  siRNA target sequence for KIAA1279 (NM_015634.1,1334-1352).
gacggtgcaagatgcataa

SEQ ID NO: 354809 - DNA, 19 bp, Homo sapiens
  siRNA target sequence for KIAA1279 (NM_015634.1,1344-1362).
gatgcataaacgcagaata

SEQ ID NO: 354810 - DNA, 19 bp, Homo sapiens
  siRNA target sequence for KIAA1279 (NM_015634.1,1368-1386).
gctagagcccctaactgta

SEQ ID NO: 354811 - DNA, 19 bp, Homo sapiens
  siRNA target sequence for KIAA1279 (NM_015634.1,1387-1405).
gacctgaatccacagtatt

SEQ ID NO: 354812 - DNA, 19 bp, Homo sapiens
  siRNA target sequence for KIAA1279 (NM_015634.1,1389-1407).
cctgaatccacagtattat

SEQ ID NO: 354813 - DNA, 19 bp, Homo sapiens
  siRNA target sequence for KIAA1279 (NM_015634.1,1441-1459).
gcacatgcttactatgata

SEQ ID NO: 354814 - DNA, 19 bp, Homo sapiens
  siRNA target sequence for KIAA1279 (NM_015634.1,1444-1462).
catgcttactatgatatga

SEQ ID NO: 354815 - DNA, 19 bp, Homo sapiens
  siRNA target sequence for KIAA1279 (NM_015634.1,1491-1509).
gctaagggatcctgattca

SEQ ID NO: 354816 - DNA, 19 bp, Homo sapiens
  siRNA target sequence for KIAA1279 (NM_015634.1,1581-1599).
gagagacccaaataaagta

SEQ ID NO: 354817 - DNA, 19 bp, Homo sapiens
  siRNA target sequence for KIAA1279 (NM_015634.1,1630-1648).
cgccctgccatgttagcta

SEQ ID NO: 354818 - DNA, 19 bp, Homo sapiens
  siRNA target sequence for TES (NM_015641.2,231-249).
gatttggagccccttgttt

SEQ ID NO: 354819 - DNA, 19 bp, Homo sapiens
  siRNA target sequence for TES (NM_015641.2,321-339).
gccaagaagagcatgatgt

SEQ ID NO: 354820 - DNA, 19 bp, Homo sapiens
  siRNA target sequence for TES (NM_015641.2,391-409).
caagtataccactctgatt

SEQ ID NO: 354821 - DNA, 19 bp, Homo sapiens
  siRNA target sequence for TES (NM_015641.2,436-454).
catgtataaacgcaatgtt

SEQ ID NO: 354822 - DNA, 19 bp, Homo sapiens
  siRNA target sequence for TES (NM_015641.2,446-464).
cgcaatgttatgatattga

SEQ ID NO: 354823 - DNA, 19 bp, Homo sapiens
  siRNA target sequence for TES (NM_015641.2,491-509).
gtctccatcaatacagtta

SEQ ID NO: 354824 - DNA, 19 bp, Homo sapiens
  siRNA target sequence for TES (NM_015641.2,495-513).
ccatcaatacagttaccta

SEQ ID NO: 354825 - DNA, 19 bp, Homo sapiens
  siRNA target sequence for TES (NM_015641.2,496-514).
catcaatacagttacctat

SEQ ID NO: 354826 - DNA, 19 bp, Homo sapiens
  siRNA target sequence for TES (NM_015641.2,522-540).
ctcctcctgtccagaatca

SEQ ID NO: 354827 - DNA, 19 bp, Homo sapiens
  siRNA target sequence for TES (NM_015641.2,543-561).
cattggccaggcagtacat

SEQ ID NO: 354828 - DNA, 19 bp, Homo sapiens
  siRNA target sequence for TES (NM_015641.2,744-762).
gagtaggagatgtcaaact

SEQ ID NO: 354829 - DNA, 19 bp, Homo sapiens
  siRNA target sequence for TES (NM_015641.2,779-797).
gcccaaggccccaaacaaa

SEQ ID NO: 354830 - DNA, 19 bp, Homo sapiens
  siRNA target sequence for TES (NM_015641.2,785-803).
ggccccaaacaaatgaaca

SEQ ID NO: 354831 - DNA, 19 bp, Homo sapiens
  siRNA target sequence for TES (NM_015641.2,865-883).
gcacaaaagaactcaatat

SEQ ID NO: 354832 - DNA, 19 bp, Homo sapiens
  siRNA target sequence for TES (NM_015641.2,894-912).
gctgcaaactgagtatgaa

SEQ ID NO: 354833 - DNA, 19 bp, Homo sapiens
  siRNA target sequence for TES (NM_015641.2,895-913).
ctgcaaactgagtatgaaa

SEQ ID NO: 354834 - DNA, 19 bp, Homo sapiens
  siRNA target sequence for TES (NM_015641.2,937-955).
cgaaagggctggctatgat

SEQ ID NO: 354835 - DNA, 19 bp, Homo sapiens
  siRNA target sequence for TES (NM_015641.2,938-956).
gaaagggctggctatgata

SEQ ID NO: 354836 - DNA, 19 bp, Homo sapiens
  siRNA target sequence for TES (NM_015641.2,942-960).
gggctggctatgataaact

SEQ ID NO: 354837 - DNA, 19 bp, Homo sapiens
  siRNA target sequence for TES (NM_015641.2,944-962).
gctggctatgataaactgt

SEQ ID NO: 354838 - DNA, 19 bp, Homo sapiens
  siRNA target sequence for TES (NM_015641.2,1001-1019).
ctcctggttgacatgattt

SEQ ID NO: 354839 - DNA, 19 bp, Homo sapiens
  siRNA target sequence for TES (NM_015641.2,1003-1021).
cctggttgacatgatttat

SEQ ID NO: 354840 - DNA, 19 bp, Homo sapiens
  siRNA target sequence for TES (NM_015641.2,1088-1106).
ggctgtgacgagctgatat

SEQ ID NO: 354841 - DNA, 19 bp, Homo sapiens
  siRNA target sequence for TES (NM_015641.2,1089-1107).
gctgtgacgagctgatatt

SEQ ID NO: 354842 - DNA, 19 bp, Homo sapiens
  siRNA target sequence for TES (NM_015641.2,1100-1118).
ctgatattcagcaatgagt

SEQ ID NO: 354843 - DNA, 19 bp, Homo sapiens
  siRNA target sequence for TES (NM_015641.2,1102-1120).
gatattcagcaatgagtat

SEQ ID NO: 354844 - DNA, 19 bp, Homo sapiens
  siRNA target sequence for TES (NM_015641.2,1295-1313).
gtgcagcgggtgacctata

SEQ ID NO: 354845 - DNA, 19 bp, Homo sapiens
  siRNA target sequence for TES (NM_015641.2,1298-1316).
cagcgggtgacctataaca

SEQ ID NO: 354846 - DNA, 19 bp, Homo sapiens
  siRNA target sequence for TES (NM_015641.2,1300-1318).
gcgggtgacctataacaat

SEQ ID NO: 354847 - DNA, 19 bp, Homo sapiens
  siRNA target sequence for TES (NM_015641.2,1301-1319).
cgggtgacctataacaatt

SEQ ID NO: 354848 - DNA, 19 bp, Homo sapiens
  siRNA target sequence for TES (NM_015641.2,1302-1320).
gggtgacctataacaattt

SEQ ID NO: 354849 - DNA, 19 bp, Homo sapiens
  siRNA target sequence for TES (NM_015641.2,1416-1434).
gttcagtggaatgtaagaa

SEQ ID NO: 354850 - DNA, 19 bp, Homo sapiens
  siRNA target sequence for DKFZP434B103 (NM_015644.1,1052-1070).
ccgtggtaccccagataga

SEQ ID NO: 354851 - DNA, 19 bp, Homo sapiens
  siRNA target sequence for DKFZP434B103 (NM_015644.1,1054-1072).
gtggtaccccagatagaca

SEQ ID NO: 354852 - DNA, 19 bp, Homo sapiens
  siRNA target sequence for DKFZP434B103 (NM_015644.1,1075-1093).
gaaggggatcgcaacatct

SEQ ID NO: 354853 - DNA, 19 bp, Homo sapiens
  siRNA target sequence for DKFZP434B103 (NM_015644.1,1441-1459).
cttccgccagacaacatgt

SEQ ID NO: 354854 - DNA, 19 bp, Homo sapiens
  siRNA target sequence for DKFZP434B103 (NM_015644.1,1736-1754).
ccctgcgcgtggtcattga

SEQ ID NO: 354855 - DNA, 19 bp, Homo sapiens
  siRNA target sequence for DKFZP434B103 (NM_015644.1,1784-1802).
gagcctttgagctcatcta

SEQ ID NO: 354856 - DNA, 19 bp, Homo sapiens
  siRNA target sequence for DKFZP434B103 (NM_015644.1,1786-1804).
gcctttgagctcatctata

SEQ ID NO: 354857 - DNA, 19 bp, Homo sapiens
  siRNA target sequence for DKFZP434B103 (NM_015644.1,1787-1805).
cctttgagctcatctataa

SEQ ID NO: 354858 - DNA, 19 bp, Homo sapiens
  siRNA target sequence for C1QTNF5 (NM_015645.1,609-627).
gccgtcaccggcaagttca

SEQ ID NO: 354859 - DNA, 19 bp, Homo sapiens
  siRNA target sequence for C1QTNF5 (NM_015645.1,680-698).
ggccagcctgcagtttgat

SEQ ID NO: 354860 - DNA, 19 bp, Homo sapiens
  siRNA target sequence for IRF2BP1 (NM_015649.1,442-460).
gtcgcggctgcgtgaactt

SEQ ID NO: 354861 - DNA, 19 bp, Homo sapiens
  siRNA target sequence for IRF2BP1 (NM_015649.1,1183-1201).
gtggttccggcaatgtgta

SEQ ID NO: 354862 - DNA, 19 bp, Homo sapiens
  siRNA target sequence for IRF2BP1 (NM_015649.1,1216-1234).
cagtggctcgccagatgtt

SEQ ID NO: 354863 - DNA, 19 bp, Homo sapiens
  siRNA target sequence for IRF2BP1 (NM_015649.1,1270-1288).
cttcttcgggcttcaagta

SEQ ID NO: 354864 - DNA, 19 bp, Homo sapiens
  siRNA target sequence for IRF2BP1 (NM_015649.1,1279-1297).
gcttcaagtacctcgaata

SEQ ID NO: 354865 - DNA, 19 bp, Homo sapiens
  siRNA target sequence for IRF2BP1 (NM_015649.1,1280-1298).
cttcaagtacctcgaatat

SEQ ID NO: 354866 - DNA, 19 bp, Homo sapiens
  siRNA target sequence for IRF2BP1 (NM_015649.1,1283-1301).
caagtacctcgaatatgaa

SEQ ID NO: 354867 - DNA, 19 bp, Homo sapiens
  siRNA target sequence for IRF2BP1 (NM_015649.1,1903-1921).
cggtgcccggacacaagtt

SEQ ID NO: 354868 - DNA, 19 bp, Homo sapiens
  siRNA target sequence for IRF2BP1 (NM_015649.1,1905-1923).
gtgcccggacacaagttct

SEQ ID NO: 354869 - DNA, 19 bp, Homo sapiens
  siRNA target sequence for C10orf12 (NM_015652.2,110-128).
gcagagttcagctttagta

SEQ ID NO: 354870 - DNA, 19 bp, Homo sapiens
  siRNA target sequence for C10orf12 (NM_015652.2,113-131).
gagttcagctttagtagaa

SEQ ID NO: 354871 - DNA, 19 bp, Homo sapiens
  siRNA target sequence for C10orf12 (NM_015652.2,118-136).
cagctttagtagaaagtct

SEQ ID NO: 354872 - DNA, 19 bp, Homo sapiens
  siRNA target sequence for C10orf12 (NM_015652.2,120-138).
gctttagtagaaagtctaa

SEQ ID NO: 354873 - DNA, 19 bp, Homo sapiens
  siRNA target sequence for C10orf12 (NM_015652.2,133-151).
gtctaattacagtaaaaat

SEQ ID NO: 354874 - DNA, 19 bp, Homo sapiens
  siRNA target sequence for C10orf12 (NM_015652.2,170-188).
ggaaggcaatacctgtatt

SEQ ID NO: 354875 - DNA, 19 bp, Homo sapiens
  siRNA target sequence for C10orf12 (NM_015652.2,240-258).
gggtttatggggaactcat

SEQ ID NO: 354876 - DNA, 19 bp, Homo sapiens
  siRNA target sequence for C10orf12 (NM_015652.2,301-319).
cacctttgcgccaggattt

SEQ ID NO: 354877 - DNA, 19 bp, Homo sapiens
  siRNA target sequence for C10orf12 (NM_015652.2,304-322).
ctttgcgccaggatttaga

SEQ ID NO: 354878 - DNA, 19 bp, Homo sapiens
  siRNA target sequence for C10orf12 (NM_015652.2,409-427).
gtgataagggccagtttga

SEQ ID NO: 354879 - DNA, 19 bp, Homo sapiens
  siRNA target sequence for C10orf12 (NM_015652.2,674-692).
gagtactcgaggatacttt

SEQ ID NO: 354880 - DNA, 19 bp, Homo sapiens
  siRNA target sequence for C10orf12 (NM_015652.2,676-694).
gtactcgaggatacttttt

SEQ ID NO: 354881 - DNA, 19 bp, Homo sapiens
  siRNA target sequence for C10orf12 (NM_015652.2,679-697).
ctcgaggatactttttcaa

SEQ ID NO: 354882 - DNA, 19 bp, Homo sapiens
  siRNA target sequence for C10orf12 (NM_015652.2,726-744).
cgtacactggccagaaatt

SEQ ID NO: 354883 - DNA, 19 bp, Homo sapiens
  siRNA target sequence for C10orf12 (NM_015652.2,823-841).
cagcccctagacatacagt

SEQ ID NO: 354884 - DNA, 19 bp, Homo sapiens
  siRNA target sequence for C10orf12 (NM_015652.2,829-847).
ctagacatacagtagatgt

SEQ ID NO: 354885 - DNA, 19 bp, Homo sapiens
  siRNA target sequence for C10orf12 (NM_015652.2,876-894).
gaacctagcaaggaaatca

SEQ ID NO: 354886 - DNA, 19 bp, Homo sapiens
  siRNA target sequence for C10orf12 (NM_015652.2,954-972).
gtttgccccacaaagatta

SEQ ID NO: 354887 - DNA, 19 bp, Homo sapiens
  siRNA target sequence for C10orf12 (NM_015652.2,1480-1498).
gtggtataggaaaattaga

SEQ ID NO: 354888 - DNA, 19 bp, Homo sapiens
  siRNA target sequence for C10orf12 (NM_015652.2,1501-1519).
gagaggacggtgatgtaaa

SEQ ID NO: 354889 - DNA, 19 bp, Homo sapiens
  siRNA target sequence for C10orf12 (NM_015652.2,1561-1579).
cactcgaagagaatttgga

SEQ ID NO: 354890 - DNA, 19 bp, Homo sapiens
  siRNA target sequence for C10orf12 (NM_015652.2,1656-1674).
gctgacagatgcctaagaa

SEQ ID NO: 354891 - DNA, 19 bp, Homo sapiens
  siRNA target sequence for C10orf12 (NM_015652.2,1729-1747).
ctagtgcaaaacgttcaaa

SEQ ID NO: 354892 - DNA, 19 bp, Homo sapiens
  siRNA target sequence for C10orf12 (NM_015652.2,1941-1959).
gagttacgaggagagattt

SEQ ID NO: 354893 - DNA, 19 bp, Homo sapiens
  siRNA target sequence for C10orf12 (NM_015652.2,2009-2027).
gagattggaaatctatgtt

SEQ ID NO: 354894 - DNA, 19 bp, Homo sapiens
  siRNA target sequence for C10orf12 (NM_015652.2,2011-2029).
gattggaaatctatgttca

SEQ ID NO: 354895 - DNA, 19 bp, Homo sapiens
  siRNA target sequence for C10orf12 (NM_015652.2,2061-2079).
ccctcagaaagtattgctt

SEQ ID NO: 354896 - DNA, 19 bp, Homo sapiens
  siRNA target sequence for C10orf12 (NM_015652.2,2065-2083).
cagaaagtattgcttgtaa

SEQ ID NO: 354897 - DNA, 19 bp, Homo sapiens
  siRNA target sequence for C10orf12 (NM_015652.2,2154-2172).
gaggtagacaacgaaaaca

SEQ ID NO: 354898 - DNA, 19 bp, Homo sapiens
  siRNA target sequence for C10orf12 (NM_015652.2,2244-2262).
gctgctagggcaccaaaat

SEQ ID NO: 354899 - DNA, 19 bp, Homo sapiens
  siRNA target sequence for C10orf12 (NM_015652.2,2293-2311).
caacctacaacctaagaca

SEQ ID NO: 354900 - DNA, 19 bp, Homo sapiens
  siRNA target sequence for C10orf12 (NM_015652.2,2303-2321).
cctaagacacgctcattct

SEQ ID NO: 354901 - DNA, 19 bp, Homo sapiens
  siRNA target sequence for C10orf12 (NM_015652.2,2381-2399).
cataatgccaaaggaaaat

SEQ ID NO: 354902 - DNA, 19 bp, Homo sapiens
  siRNA target sequence for C10orf12 (NM_015652.2,2643-2661).
cggaaatgtaggagttcat

SEQ ID NO: 354903 - DNA, 19 bp, Homo sapiens
  siRNA target sequence for C10orf12 (NM_015652.2,2683-2701).
ctgttcagatgctctttat

SEQ ID NO: 354904 - DNA, 19 bp, Homo sapiens
  siRNA target sequence for C10orf12 (NM_015652.2,2694-2712).
ctctttatgacaaacttta

SEQ ID NO: 354905 - DNA, 19 bp, Homo sapiens
  siRNA target sequence for C10orf12 (NM_015652.2,2735-2753).
gttcttagagacaactgaa

SEQ ID NO: 354906 - DNA, 19 bp, Homo sapiens
  siRNA target sequence for C10orf12 (NM_015652.2,2755-2773).
cccggtctctagtcattgt

SEQ ID NO: 354907 - DNA, 19 bp, Homo sapiens
  siRNA target sequence for C10orf12 (NM_015652.2,2757-2775).
cggtctctagtcattgtga

SEQ ID NO: 354908 - DNA, 19 bp, Homo sapiens
  siRNA target sequence for C10orf12 (NM_015652.2,2758-2776).
ggtctctagtcattgtgaa

SEQ ID NO: 354909 - DNA, 19 bp, Homo sapiens
  siRNA target sequence for C10orf12 (NM_015652.2,2837-2855).
cgctccttccagcctatat

SEQ ID NO: 354910 - DNA, 19 bp, Homo sapiens
  siRNA target sequence for C10orf12 (NM_015652.2,2868-2886).
caggctgagcgcttgaaaa

SEQ ID NO: 354911 - DNA, 19 bp, Homo sapiens
  siRNA target sequence for C10orf12 (NM_015652.2,2908-2926).
gagctacccctgctaagaa

SEQ ID NO: 354912 - DNA, 19 bp, Homo sapiens
  siRNA target sequence for C10orf12 (NM_015652.2,2910-2928).
gctacccctgctaagaata

SEQ ID NO: 354913 - DNA, 19 bp, Homo sapiens
  siRNA target sequence for C10orf12 (NM_015652.2,2911-2929).
ctacccctgctaagaataa

SEQ ID NO: 354914 - DNA, 19 bp, Homo sapiens
  siRNA target sequence for C10orf12 (NM_015652.2,3044-3062).
caaggaagatagaaacagt

SEQ ID NO: 354915 - DNA, 19 bp, Homo sapiens
  siRNA target sequence for C10orf12 (NM_015652.2,3090-3108).
gccagtacccggattctta

SEQ ID NO: 354916 - DNA, 19 bp, Homo sapiens
  siRNA target sequence for C10orf12 (NM_015652.2,3092-3110).
cagtacccggattcttaga

SEQ ID NO: 354917 - DNA, 19 bp, Homo sapiens
  siRNA target sequence for C10orf12 (NM_015652.2,3094-3112).
gtacccggattcttagaaa

SEQ ID NO: 354918 - DNA, 19 bp, Homo sapiens
  siRNA target sequence for C10orf12 (NM_015652.2,3097-3115).
cccggattcttagaaaata

SEQ ID NO: 354919 - DNA, 19 bp, Homo sapiens
  siRNA target sequence for C10orf12 (NM_015652.2,3137-3155).
cagagcccagcaacgttta

SEQ ID NO: 354920 - DNA, 19 bp, Homo sapiens
  siRNA target sequence for C10orf12 (NM_015652.2,3211-3229).
gtcgtaagagcgtatgcat

SEQ ID NO: 354921 - DNA, 19 bp, Homo sapiens
  siRNA target sequence for C10orf12 (NM_015652.2,3363-3381).
cagagtaaacgcaagagaa

SEQ ID NO: 354922 - DNA, 19 bp, Homo sapiens
  siRNA target sequence for C10orf12 (NM_015652.2,3631-3649).
ctattgcctcggaaacact

SEQ ID NO: 354923 - DNA, 19 bp, Homo sapiens
  siRNA target sequence for C10orf12 (NM_015652.2,3652-3670).
cgaaacctgcaaaacagaa

SEQ ID NO: 354924 - DNA, 19 bp, Homo sapiens
  siRNA target sequence for C10orf12 (NM_015652.2,3740-3758).
ggccagaccctcaacgaaa

SEQ ID NO: 354925 - DNA, 19 bp, Homo sapiens
  siRNA target sequence for C10orf12 (NM_015652.2,3741-3759).
gccagaccctcaacgaaaa

SEQ ID NO: 354926 - DNA, 19 bp, Homo sapiens
  siRNA target sequence for DKFZP566F0546 (NM_015653.1,445-463).
gtagggctatcaatgactt

SEQ ID NO: 354927 - DNA, 19 bp, Homo sapiens
  siRNA target sequence for DKFZP566F0546 (NM_015653.1,490-508).
ctcgccgtgaatttgatct

SEQ ID NO: 354928 - DNA, 19 bp, Homo sapiens
  siRNA target sequence for DKFZP566F0546 (NM_015653.1,515-533).
ccccctagcccttaagaaa

SEQ ID NO: 354929 - DNA, 19 bp, Homo sapiens
  siRNA target sequence for DKFZP566F0546 (NM_015653.1,548-566).
gcagtcagataatgatgtt

SEQ ID NO: 354930 - DNA, 19 bp, Homo sapiens
  siRNA target sequence for DKFZP566F0546 (NM_015653.1,561-579).
gatgttcggaatacgatat

SEQ ID NO: 354931 - DNA, 19 bp, Homo sapiens
  siRNA target sequence for DKFZP566F0546 (NM_015653.1,686-704).
gaacgcccgtgctgaacaa

SEQ ID NO: 354932 - DNA, 19 bp, Homo sapiens
  siRNA target sequence for DKFZP566F0546 (NM_015653.1,689-707).
cgcccgtgctgaacaaaaa

SEQ ID NO: 354933 - DNA, 19 bp, Homo sapiens
  siRNA target sequence for DKFZP566F0546 (NM_015653.1,690-708).
gcccgtgctgaacaaaaat

SEQ ID NO: 354934 - DNA, 19 bp, Homo sapiens
  siRNA target sequence for DKFZP566F0546 (NM_015653.1,839-857).
cgagtcagtggaaaggaaa

SEQ ID NO: 354935 - DNA, 19 bp, Homo sapiens
  siRNA target sequence for DKFZP566F0546 (NM_015653.1,1126-1144).
gcgccaccctgctgtttga

SEQ ID NO: 354936 - DNA, 19 bp, Homo sapiens
  siRNA target sequence for DKFZP566F0546 (NM_015653.1,1260-1278).
caacccacgggagactatt

SEQ ID NO: 354937 - DNA, 19 bp, Homo sapiens
  siRNA target sequence for DKFZP566F0546 (NM_015653.1,1263-1281).
cccacgggagactatttca

SEQ ID NO: 354938 - DNA, 19 bp, Homo sapiens
  siRNA target sequence for DKFZP566F0546 (NM_015653.1,1265-1283).
cacgggagactatttcaca

SEQ ID NO: 354939 - DNA, 19 bp, Homo sapiens
  siRNA target sequence for DKFZP566F0546 (NM_015653.1,1269-1287).
ggagactatttcacacaat

SEQ ID NO: 354940 - DNA, 19 bp, Homo sapiens
  siRNA target sequence for HIMAP2 (NM_015660.1,245-263).
ggttcccagaccttgacta

SEQ ID NO: 354941 - DNA, 19 bp, Homo sapiens
  siRNA target sequence for HIMAP2 (NM_015660.1,246-264).
gttcccagaccttgactaa

SEQ ID NO: 354942 - DNA, 19 bp, Homo sapiens
  siRNA target sequence for HIMAP2 (NM_015660.1,250-268).
ccagaccttgactaagact

SEQ ID NO: 354943 - DNA, 19 bp, Homo sapiens
  siRNA target sequence for HIMAP2 (NM_015660.1,251-269).
cagaccttgactaagactt

SEQ ID NO: 354944 - DNA, 19 bp, Homo sapiens
  siRNA target sequence for HIMAP2 (NM_015660.1,498-516).
ccatgggacacacaattgt

SEQ ID NO: 354945 - DNA, 19 bp, Homo sapiens
  siRNA target sequence for HIMAP2 (NM_015660.1,506-524).
cacacaattgtcctcttta

SEQ ID NO: 354946 - DNA, 19 bp, Homo sapiens
  siRNA target sequence for HIMAP2 (NM_015660.1,546-564).
gtggctccctgatggatta

SEQ ID NO: 354947 - DNA, 19 bp, Homo sapiens
  siRNA target sequence for HIMAP2 (NM_015660.1,568-586).
gcacgactcagataacaaa

SEQ ID NO: 354948 - DNA, 19 bp, Homo sapiens
  siRNA target sequence for HIMAP2 (NM_015660.1,618-636).
ggcgaatctgtgcctttaa

SEQ ID NO: 354949 - DNA, 19 bp, Homo sapiens
  siRNA target sequence for HIMAP2 (NM_015660.1,619-637).
gcgaatctgtgcctttaat

SEQ ID NO: 354950 - DNA, 19 bp, Homo sapiens
  siRNA target sequence for HIMAP2 (NM_015660.1,620-638).
cgaatctgtgcctttaata

SEQ ID NO: 354951 - DNA, 19 bp, Homo sapiens
  siRNA target sequence for HIMAP2 (NM_015660.1,690-708).
gtattgaggatctgttgat

SEQ ID NO: 354952 - DNA, 19 bp, Homo sapiens
  siRNA target sequence for HIMAP2 (NM_015660.1,738-756).
ggttgtacagcctaataca

SEQ ID NO: 354953 - DNA, 19 bp, Homo sapiens
  siRNA target sequence for HIMAP2 (NM_015660.1,792-810).
gagtaaaggaattcaaaca

SEQ ID NO: 354954 - DNA, 19 bp, Homo sapiens
  siRNA target sequence for HIMAP2 (NM_015660.1,870-888).
gcctaaaaggagccttaat

SEQ ID NO: 354955 - DNA, 19 bp, Homo sapiens
  siRNA target sequence for HIMAP2 (NM_015660.1,959-977).
ctgcacagcatgtgcaatt

SEQ ID NO: 354956 - DNA, 19 bp, Homo sapiens
  siRNA target sequence for HIMAP2 (NM_015660.1,964-982).
cagcatgtgcaatttgttt

SEQ ID NO: 354957 - DNA, 19 bp, Homo sapiens
  siRNA target sequence for HIMAP2 (NM_015660.1,1018-1036).
cagtttgctgtttattata

SEQ ID NO: 354958 - DNA, 19 bp, Homo sapiens
  siRNA target sequence for HIMAP2 (NM_015660.1,1082-1100).
cgcaagactcctaggttat

SEQ ID NO: 354959 - DNA, 19 bp, Homo sapiens
  siRNA target sequence for DKFZP434J046 (NM_015671.2,585-603).
ccccagcagaaggaatcat

SEQ ID NO: 354960 - DNA, 19 bp, Homo sapiens
  siRNA target sequence for DKFZP434J046 (NM_015671.2,887-905).
cgcaggtcccacagaagat

SEQ ID NO: 354961 - DNA, 19 bp, Homo sapiens
  siRNA target sequence for DKFZP434J046 (NM_015671.2,978-996).
ctccgccaccactttgaga

SEQ ID NO: 354962 - DNA, 19 bp, Homo sapiens
  siRNA target sequence for DKFZP434J046 (NM_015671.2,1047-1065).
gctgaagaccacttcttca

SEQ ID NO: 354963 - DNA, 19 bp, Homo sapiens
  siRNA target sequence for DKFZP434J046 (NM_015671.2,1454-1472).
ctcccgtgccaggatatca

SEQ ID NO: 354964 - DNA, 19 bp, Homo sapiens
  siRNA target sequence for SH3YL1 (NM_015677.1,604-622).
ccgtgctgtagaagctttt

SEQ ID NO: 354965 - DNA, 19 bp, Homo sapiens
  siRNA target sequence for SH3YL1 (NM_015677.1,754-772).
ctttgcaggcgtgtcttta

SEQ ID NO: 354966 - DNA, 19 bp, Homo sapiens
  siRNA target sequence for SH3YL1 (NM_015677.1,827-845).
gatatccgagcttatgaca

SEQ ID NO: 354967 - DNA, 19 bp, Homo sapiens
  siRNA target sequence for SH3YL1 (NM_015677.1,832-850).
ccgagcttatgacatttta

SEQ ID NO: 354968 - DNA, 19 bp, Homo sapiens
  siRNA target sequence for SH3YL1 (NM_015677.1,833-851).
cgagcttatgacattttat

SEQ ID NO: 354969 - DNA, 19 bp, Homo sapiens
  siRNA target sequence for SH3YL1 (NM_015677.1,870-888).
ctgctcaagccgaagatct

SEQ ID NO: 354970 - DNA, 19 bp, Homo sapiens
  siRNA target sequence for SH3YL1 (NM_015677.1,873-891).
ctcaagccgaagatcttta

SEQ ID NO: 354971 - DNA, 19 bp, Homo sapiens
  siRNA target sequence for SH3YL1 (NM_015677.1,880-898).
cgaagatctttatgaaatt

SEQ ID NO: 354972 - DNA, 19 bp, Homo sapiens
  siRNA target sequence for SH3YL1 (NM_015677.1,932-950).
ggacaacgaatcaatgcaa

SEQ ID NO: 354973 - DNA, 19 bp, Homo sapiens
  siRNA target sequence for SH3YL1 (NM_015677.1,970-988).
gaggaagtcttctgctaaa

SEQ ID NO: 354974 - DNA, 19 bp, Homo sapiens
  siRNA target sequence for SH3YL1 (NM_015677.1,1043-1061).
ctgaactctggctctcaaa

SEQ ID NO: 354975 - DNA, 19 bp, Homo sapiens
  siRNA target sequence for SH3YL1 (NM_015677.1,1109-1127).
gagagagttggcaatttga

SEQ ID NO: 354976 - DNA, 19 bp, Homo sapiens
  siRNA target sequence for SH3YL1 (NM_015677.1,1113-1131).
gagttggcaatttgaatca

SEQ ID NO: 354977 - DNA, 19 bp, Homo sapiens
  siRNA target sequence for SH3YL1 (NM_015677.1,1142-1160).
gtgacagcgctgtattcat

SEQ ID NO: 354978 - DNA, 19 bp, Homo sapiens
  siRNA target sequence for SH3YL1 (NM_015677.1,1144-1162).
gacagcgctgtattcattt

SEQ ID NO: 354979 - DNA, 19 bp, Homo sapiens
  siRNA target sequence for SH3YL1 (NM_015677.1,1200-1218).
gagacagaatcacagttat

SEQ ID NO: 354980 - DNA, 19 bp, Homo sapiens
  siRNA target sequence for SH3YL1 (NM_015677.1,1214-1232).
gttatatcaaaaacagatt

SEQ ID NO: 354981 - DNA, 19 bp, Homo sapiens
  siRNA target sequence for CGI-57 (NM_015680.3,302-320).
cagcccggtggcagacatt

SEQ ID NO: 354982 - DNA, 19 bp, Homo sapiens
  siRNA target sequence for CGI-57 (NM_015680.3,360-378).
cgccgactccagaagaaat

SEQ ID NO: 354983 - DNA, 19 bp, Homo sapiens
  siRNA target sequence for CGI-57 (NM_015680.3,428-446).
gctggctctggtgtacatt

SEQ ID NO: 354984 - DNA, 19 bp, Homo sapiens
  siRNA target sequence for CGI-57 (NM_015680.3,431-449).
ggctctggtgtacattgaa

SEQ ID NO: 354985 - DNA, 19 bp, Homo sapiens
  siRNA target sequence for CGI-57 (NM_015680.3,527-545).
cagtaagtacctctatgat

SEQ ID NO: 354986 - DNA, 19 bp, Homo sapiens
  siRNA target sequence for CGI-57 (NM_015680.3,599-617).
ggccgtgcccactctcaat

SEQ ID NO: 354987 - DNA, 19 bp, Homo sapiens
  siRNA target sequence for CGI-57 (NM_015680.3,878-896).
ggcatcggtggccgtaata

SEQ ID NO: 354988 - DNA, 19 bp, Homo sapiens
  siRNA target sequence for CGI-57 (NM_015680.3,880-898).
catcggtggccgtaataca

SEQ ID NO: 354989 - DNA, 19 bp, Homo sapiens
  siRNA target sequence for CGI-57 (NM_015680.3,883-901).
cggtggccgtaatacatca

SEQ ID NO: 354990 - DNA, 19 bp, Homo sapiens
  siRNA target sequence for CGI-57 (NM_015680.3,889-907).
ccgtaatacatcagtcttt

SEQ ID NO: 354991 - DNA, 19 bp, Homo sapiens
  siRNA target sequence for CGI-57 (NM_015680.3,1123-1141).
ctcccactcttcttcataa

SEQ ID NO: 354992 - DNA, 19 bp, Homo sapiens
  siRNA target sequence for CGI-57 (NM_015680.3,1125-1143).
cccactcttcttcataact

SEQ ID NO: 354993 - DNA, 19 bp, Homo sapiens
  siRNA target sequence for EPPB9 (NM_015681.2,169-187).
cgagtcctagcgtctttct

SEQ ID NO: 354994 - DNA, 19 bp, Homo sapiens
  siRNA target sequence for EPPB9 (NM_015681.2,170-188).
gagtcctagcgtctttcta

SEQ ID NO: 354995 - DNA, 19 bp, Homo sapiens
  siRNA target sequence for EPPB9 (NM_015681.2,172-190).
gtcctagcgtctttctact

SEQ ID NO: 354996 - DNA, 19 bp, Homo sapiens
  siRNA target sequence for EPPB9 (NM_015681.2,215-233).
cgcccagtttccagagtat

SEQ ID NO: 354997 - DNA, 19 bp, Homo sapiens
  siRNA target sequence for EPPB9 (NM_015681.2,237-255).
gacctctactgcaagtact

SEQ ID NO: 354998 - DNA, 19 bp, Homo sapiens
  siRNA target sequence for EPPB9 (NM_015681.2,355-373).
ggaacttccccattgatgt

SEQ ID NO: 354999 - DNA, 19 bp, Homo sapiens
  siRNA target sequence for EPPB9 (NM_015681.2,363-381).
cccattgatgtcaccttta

SEQ ID NO: 355000 - DNA, 19 bp, Homo sapiens
  siRNA target sequence for EPPB9 (NM_015681.2,508-526).
ggaccatccccatgtttgt

SEQ ID NO: 355001 - DNA, 19 bp, Homo sapiens
  siRNA target sequence for EPPB9 (NM_015681.2,527-545).
cccagaatctacgtctaaa

SEQ ID NO: 355002 - DNA, 19 bp, Homo sapiens
  siRNA target sequence for EPPB9 (NM_015681.2,529-547).
cagaatctacgtctaaact

SEQ ID NO: 355003 - DNA, 19 bp, Homo sapiens
  siRNA target sequence for EPPB9 (NM_015681.2,642-660).
cgttctcagggctttgtca

SEQ ID NO: 355004 - DNA, 19 bp, Homo sapiens
  siRNA target sequence for EPPB9 (NM_015681.2,710-728).
cactgggccttctgataca

SEQ ID NO: 355005 - DNA, 19 bp, Homo sapiens
  siRNA target sequence for FILIP1 (NM_015687.1,37-55).
gcatctgatgggcatatct

SEQ ID NO: 355006 - DNA, 19 bp, Homo sapiens
  siRNA target sequence for FILIP1 (NM_015687.1,78-96).
cggcaatgctggtgaaaaa

SEQ ID NO: 355007 - DNA, 19 bp, Homo sapiens
  siRNA target sequence for FILIP1 (NM_015687.1,137-155).
ggaaggaggatgatgtcat

SEQ ID NO: 355008 - DNA, 19 bp, Homo sapiens
  siRNA target sequence for FILIP1 (NM_015687.1,167-185).
ctgtcaaacgacacctaaa

SEQ ID NO: 355009 - DNA, 19 bp, Homo sapiens
  siRNA target sequence for FILIP1 (NM_015687.1,169-187).
gtcaaacgacacctaaaaa

SEQ ID NO: 355010 - DNA, 19 bp, Homo sapiens
  siRNA target sequence for FILIP1 (NM_015687.1,193-211).
ggagaatgtgaacgaaaaa

SEQ ID NO: 355011 - DNA, 19 bp, Homo sapiens
  siRNA target sequence for FILIP1 (NM_015687.1,200-218).
gtgaacgaaaaactaagaa

SEQ ID NO: 355012 - DNA, 19 bp, Homo sapiens
  siRNA target sequence for FILIP1 (NM_015687.1,246-264).
catccaactactcagtata

SEQ ID NO: 355013 - DNA, 19 bp, Homo sapiens
  siRNA target sequence for FILIP1 (NM_015687.1,276-294).
gttgcaggccagagaagat

SEQ ID NO: 355014 - DNA, 19 bp, Homo sapiens
  siRNA target sequence for FILIP1 (NM_015687.1,387-405).
gcaccgagatgccattctt

SEQ ID NO: 355015 - DNA, 19 bp, Homo sapiens
  siRNA target sequence for FILIP1 (NM_015687.1,403-421).
cttgcccaggagaaatcca

SEQ ID NO: 355016 - DNA, 19 bp, Homo sapiens
  siRNA target sequence for FILIP1 (NM_015687.1,419-437).
ccataggagaagatgtcta

SEQ ID NO: 355017 - DNA, 19 bp, Homo sapiens
  siRNA target sequence for FILIP1 (NM_015687.1,420-438).
cataggagaagatgtctat

SEQ ID NO: 355018 - DNA, 19 bp, Homo sapiens
  siRNA target sequence for FILIP1 (NM_015687.1,435-453).
ctatgagaaaccgatttca

SEQ ID NO: 355019 - DNA, 19 bp, Homo sapiens
  siRNA target sequence for FILIP1 (NM_015687.1,539-557).
gcaccgtatacgagttaga

SEQ ID NO: 355020 - DNA, 19 bp, Homo sapiens
  siRNA target sequence for FILIP1 (NM_015687.1,542-560).
ccgtatacgagttagagaa

SEQ ID NO: 355021 - DNA, 19 bp, Homo sapiens
  siRNA target sequence for FILIP1 (NM_015687.1,624-642).
ggagcgggagaggttaaaa

SEQ ID NO: 355022 - DNA, 19 bp, Homo sapiens
  siRNA target sequence for FILIP1 (NM_015687.1,625-643).
gagcgggagaggttaaaaa

SEQ ID NO: 355023 - DNA, 19 bp, Homo sapiens
  siRNA target sequence for FILIP1 (NM_015687.1,701-719).
gactcaataaactaagaga

SEQ ID NO: 355024 - DNA, 19 bp, Homo sapiens
  siRNA target sequence for FILIP1 (NM_015687.1,712-730).
ctaagagatgagcttgtta

SEQ ID NO: 355025 - DNA, 19 bp, Homo sapiens
  siRNA target sequence for FILIP1 (NM_015687.1,721-739).
gagcttgttaaactcaaat

SEQ ID NO: 355026 - DNA, 19 bp, Homo sapiens
  siRNA target sequence for FILIP1 (NM_015687.1,767-785).
gacaaatgcacattgaaca

SEQ ID NO: 355027 - DNA, 19 bp, Homo sapiens
  siRNA target sequence for FILIP1 (NM_015687.1,856-874).
gccattacttccaaatcca

SEQ ID NO: 355028 - DNA, 19 bp, Homo sapiens
  siRNA target sequence for FILIP1 (NM_015687.1,919-937).
cacaaggcttcgaggtttt

SEQ ID NO: 355029 - DNA, 19 bp, Homo sapiens
  siRNA target sequence for FILIP1 (NM_015687.1,921-939).
caaggcttcgaggttttct

SEQ ID NO: 355030 - DNA, 19 bp, Homo sapiens
  siRNA target sequence for FILIP1 (NM_015687.1,960-978).
cgctaaactggctaatcaa

SEQ ID NO: 355031 - DNA, 19 bp, Homo sapiens
  siRNA target sequence for FILIP1 (NM_015687.1,962-980).
ctaaactggctaatcaaga

SEQ ID NO: 355032 - DNA, 19 bp, Homo sapiens
  siRNA target sequence for FILIP1 (NM_015687.1,1012-1030).
gttggcttaacccaaagaa

SEQ ID NO: 355033 - DNA, 19 bp, Homo sapiens
  siRNA target sequence for FILIP1 (NM_015687.1,1156-1174).
cgaaagcgtgtgcttgaaa

SEQ ID NO: 355034 - DNA, 19 bp, Homo sapiens
  siRNA target sequence for FILIP1 (NM_015687.1,1157-1175).
gaaagcgtgtgcttgaaat

SEQ ID NO: 355035 - DNA, 19 bp, Homo sapiens
  siRNA target sequence for FILIP1 (NM_015687.1,1161-1179).
gcgtgtgcttgaaatggaa

SEQ ID NO: 355036 - DNA, 19 bp, Homo sapiens
  siRNA target sequence for FILIP1 (NM_015687.1,1348-1366).
gagtgcacccagctacatt

SEQ ID NO: 355037 - DNA, 19 bp, Homo sapiens
  siRNA target sequence for FILIP1 (NM_015687.1,1394-1412).
ccaaagacctgctaaatga

SEQ ID NO: 355038 - DNA, 19 bp, Homo sapiens
  siRNA target sequence for FILIP1 (NM_015687.1,1422-1440).
ggtcaagagtcgagttaaa

SEQ ID NO: 355039 - DNA, 19 bp, Homo sapiens
  siRNA target sequence for FILIP1 (NM_015687.1,1430-1448).
gtcgagttaaagaattgga

SEQ ID NO: 355040 - DNA, 19 bp, Homo sapiens
  siRNA target sequence for FILIP1 (NM_015687.1,1432-1450).
cgagttaaagaattggaat

SEQ ID NO: 355041 - DNA, 19 bp, Homo sapiens
  siRNA target sequence for FILIP1 (NM_015687.1,1520-1538).
ccgtgatgctggttgatga

SEQ ID NO: 355042 - DNA, 19 bp, Homo sapiens
  siRNA target sequence for FILIP1 (NM_015687.1,1527-1545).
gctggttgatgaaaggaaa

SEQ ID NO: 355043 - DNA, 19 bp, Homo sapiens
  siRNA target sequence for FILIP1 (NM_015687.1,1528-1546).
ctggttgatgaaaggaaaa

SEQ ID NO: 355044 - DNA, 19 bp, Homo sapiens
  siRNA target sequence for FILIP1 (NM_015687.1,1693-1711).
gaaaaagtatacaacttga

SEQ ID NO: 355045 - DNA, 19 bp, Homo sapiens
  siRNA target sequence for FILIP1 (NM_015687.1,1776-1794).
ctgcagtgttgacttacta

SEQ ID NO: 355046 - DNA, 19 bp, Homo sapiens
  siRNA target sequence for FILIP1 (NM_015687.1,1778-1796).
gcagtgttgacttactaaa

SEQ ID NO: 355047 - DNA, 19 bp, Homo sapiens
  siRNA target sequence for FILIP1 (NM_015687.1,1781-1799).
gtgttgacttactaaagaa

SEQ ID NO: 355048 - DNA, 19 bp, Homo sapiens
  siRNA target sequence for FILIP1 (NM_015687.1,1871-1889).
cctgcccggaagataataa

SEQ ID NO: 355049 - DNA, 19 bp, Homo sapiens
  siRNA target sequence for FILIP1 (NM_015687.1,1896-1914).
ggaactaacacttgaaatt

SEQ ID NO: 355050 - DNA, 19 bp, Homo sapiens
  siRNA target sequence for FILIP1 (NM_015687.1,1900-1918).
ctaacacttgaaattgaga

SEQ ID NO: 355051 - DNA, 19 bp, Homo sapiens
  siRNA target sequence for FILIP1 (NM_015687.1,1951-1969).
gtcgaaggggatttgatga

SEQ ID NO: 355052 - DNA, 19 bp, Homo sapiens
  siRNA target sequence for FILIP1 (NM_015687.1,2061-2079).
gcaccaaattgccaagaat

SEQ ID NO: 355053 - DNA, 19 bp, Homo sapiens
  siRNA target sequence for FILIP1 (NM_015687.1,2117-2135).
ctgaactgagacacagatt

SEQ ID NO: 355054 - DNA, 19 bp, Homo sapiens
  siRNA target sequence for FILIP1 (NM_015687.1,2149-2167).
gctaaaagtcgagacttaa

SEQ ID NO: 355055 - DNA, 19 bp, Homo sapiens
  siRNA target sequence for FILIP1 (NM_015687.1,2150-2168).
ctaaaagtcgagacttaaa

SEQ ID NO: 355056 - DNA, 19 bp, Homo sapiens
  siRNA target sequence for FILIP1 (NM_015687.1,2163-2181).
cttaaaagccgaagtacaa

SEQ ID NO: 355057 - DNA, 19 bp, Homo sapiens
  siRNA target sequence for FILIP1 (NM_015687.1,2176-2194).
gtacaagctcttaaagaga

SEQ ID NO: 355058 - DNA, 19 bp, Homo sapiens
  siRNA target sequence for FILIP1 (NM_015687.1,2191-2209).
gagaagattcacgaattaa

SEQ ID NO: 355059 - DNA, 19 bp, Homo sapiens
  siRNA target sequence for FILIP1 (NM_015687.1,2238-2256).
ccaggtagattattctgta

SEQ ID NO: 355060 - DNA, 19 bp, Homo sapiens
  siRNA target sequence for FILIP1 (NM_015687.1,2252-2270).
ctgtacttcaacaaagatt

SEQ ID NO: 355061 - DNA, 19 bp, Homo sapiens
  siRNA target sequence for FILIP1 (NM_015687.1,2458-2476).
gaaacgccagctgtattca

SEQ ID NO: 355062 - DNA, 19 bp, Homo sapiens
  siRNA target sequence for FILIP1 (NM_015687.1,2470-2488).
gtattcatacggaaatcct

SEQ ID NO: 355063 - DNA, 19 bp, Homo sapiens
  siRNA target sequence for FILIP1 (NM_015687.1,2521-2539).
cggcaggtgggattgaaga

SEQ ID NO: 355064 - DNA, 19 bp, Homo sapiens
  siRNA target sequence for FILIP1 (NM_015687.1,2538-2556).
gaaacccgtggaaagatct

SEQ ID NO: 355065 - DNA, 19 bp, Homo sapiens
  siRNA target sequence for FILIP1 (NM_015687.1,2544-2562).
cgtggaaagatcttctgtt

SEQ ID NO: 355066 - DNA, 19 bp, Homo sapiens
  siRNA target sequence for FILIP1 (NM_015687.1,2547-2565).
ggaaagatcttctgttcta

SEQ ID NO: 355067 - DNA, 19 bp, Homo sapiens
  siRNA target sequence for FILIP1 (NM_015687.1,2592-2610).
gctcactatgagaaagtct

SEQ ID NO: 355068 - DNA, 19 bp, Homo sapiens
  siRNA target sequence for FILIP1 (NM_015687.1,2773-2791).
gcgactttggagataacaa

SEQ ID NO: 355069 - DNA, 19 bp, Homo sapiens
  siRNA target sequence for FILIP1 (NM_015687.1,2792-2810).
gcccgacatctgaagaatt

SEQ ID NO: 355070 - DNA, 19 bp, Homo sapiens
  siRNA target sequence for FILIP1 (NM_015687.1,2793-2811).
cccgacatctgaagaattt

SEQ ID NO: 355071 - DNA, 19 bp, Homo sapiens
  siRNA target sequence for FILIP1 (NM_015687.1,2823-2841).
cactgtcattcctacctta

SEQ ID NO: 355072 - DNA, 19 bp, Homo sapiens
  siRNA target sequence for FILIP1 (NM_015687.1,2940-2958).
gtccccagtcacaattact

SEQ ID NO: 355073 - DNA, 19 bp, Homo sapiens
  siRNA target sequence for FILIP1 (NM_015687.1,2945-2963).
cagtcacaattactacatt

SEQ ID NO: 355074 - DNA, 19 bp, Homo sapiens
  siRNA target sequence for FILIP1 (NM_015687.1,3011-3029).
ggcccacatcccctattca

SEQ ID NO: 355075 - DNA, 19 bp, Homo sapiens
  siRNA target sequence for FILIP1 (NM_015687.1,3015-3033).
cacatcccctattcagata

SEQ ID NO: 355076 - DNA, 19 bp, Homo sapiens
  siRNA target sequence for FILIP1 (NM_015687.1,3077-3095).
ctcccgaatcccaggaaat

SEQ ID NO: 355077 - DNA, 19 bp, Homo sapiens
  siRNA target sequence for FILIP1 (NM_015687.1,3104-3122).
gacggacaatcctcaaagt

SEQ ID NO: 355078 - DNA, 19 bp, Homo sapiens
  siRNA target sequence for FILIP1 (NM_015687.1,3146-3164).
caactccagtacggaaata

SEQ ID NO: 355079 - DNA, 19 bp, Homo sapiens
  siRNA target sequence for FILIP1 (NM_015687.1,3151-3169).
ccagtacggaaatacaact

SEQ ID NO: 355080 - DNA, 19 bp, Homo sapiens
  siRNA target sequence for FILIP1 (NM_015687.1,3259-3277).
ggagtcagtccagttatta

SEQ ID NO: 355081 - DNA, 19 bp, Homo sapiens
  siRNA target sequence for FILIP1 (NM_015687.1,3278-3296).
ctgtccgaccagtaaacgt

SEQ ID NO: 355082 - DNA, 19 bp, Homo sapiens
  siRNA target sequence for FILIP1 (NM_015687.1,3477-3495).
cacccgcattcctatgtca

SEQ ID NO: 355083 - DNA, 19 bp, Homo sapiens
  siRNA target sequence for FILIP1 (NM_015687.1,3566-3584).
gagctgagactcagtctat

SEQ ID NO: 355084 - DNA, 19 bp, Homo sapiens
  siRNA target sequence for FILIP1 (NM_015687.1,3568-3586).
gctgagactcagtctatga

SEQ ID NO: 355085 - DNA, 19 bp, Homo sapiens
  siRNA target sequence for KIAA1280 (NM_015691.2,384-402).
ggaccacataaataaactt

SEQ ID NO: 355086 - DNA, 19 bp, Homo sapiens
  siRNA target sequence for KIAA1280 (NM_015691.2,408-426).
gattgaggatccaagagaa

SEQ ID NO: 355087 - DNA, 19 bp, Homo sapiens
  siRNA target sequence for KIAA1280 (NM_015691.2,439-457).
gagcaagagcgcatgttga

SEQ ID NO: 355088 - DNA, 19 bp, Homo sapiens
  siRNA target sequence for KIAA1280 (NM_015691.2,445-463).
gagcgcatgttgaaggaat

SEQ ID NO: 355089 - DNA, 19 bp, Homo sapiens
  siRNA target sequence for KIAA1280 (NM_015691.2,447-465).
gcgcatgttgaaggaatat

SEQ ID NO: 355090 - DNA, 19 bp, Homo sapiens
  siRNA target sequence for KIAA1280 (NM_015691.2,448-466).
cgcatgttgaaggaatatt

SEQ ID NO: 355091 - DNA, 19 bp, Homo sapiens
  siRNA target sequence for KIAA1280 (NM_015691.2,485-503).
ctctcaatgccaagaaaga

SEQ ID NO: 355092 - DNA, 19 bp, Homo sapiens
  siRNA target sequence for KIAA1280 (NM_015691.2,591-609).
gtacgccagctcattctct

SEQ ID NO: 355093 - DNA, 19 bp, Homo sapiens
  siRNA target sequence for KIAA1280 (NM_015691.2,630-648).
gtatgacccacaccaaatt

SEQ ID NO: 355094 - DNA, 19 bp, Homo sapiens
  siRNA target sequence for KIAA1280 (NM_015691.2,636-654).
cccacaccaaattaaagca

SEQ ID NO: 355095 - DNA, 19 bp, Homo sapiens
  siRNA target sequence for KIAA1280 (NM_015691.2,672-690).
ggataggctttccagatta

SEQ ID NO: 355096 - DNA, 19 bp, Homo sapiens
  siRNA target sequence for KIAA1280 (NM_015691.2,673-691).
gataggctttccagattaa

SEQ ID NO: 355097 - DNA, 19 bp, Homo sapiens
  siRNA target sequence for KIAA1280 (NM_015691.2,678-696).
gctttccagattaaaacga

SEQ ID NO: 355098 - DNA, 19 bp, Homo sapiens
  siRNA target sequence for KIAA1280 (NM_015691.2,714-732).
gcaggaactgcagtacaaa

SEQ ID NO: 355099 - DNA, 19 bp, Homo sapiens
  siRNA target sequence for KIAA1280 (NM_015691.2,717-735).
ggaactgcagtacaaagaa

SEQ ID NO: 355100 - DNA, 19 bp, Homo sapiens
  siRNA target sequence for KIAA1280 (NM_015691.2,757-775).
gagattgatcggaagatgt

SEQ ID NO: 355101 - DNA, 19 bp, Homo sapiens
  siRNA target sequence for KIAA1280 (NM_015691.2,763-781).
gatcggaagatgtcaagta

SEQ ID NO: 355102 - DNA, 19 bp, Homo sapiens
  siRNA target sequence for KIAA1280 (NM_015691.2,805-823).
gaggcgcaggctatcatga

SEQ ID NO: 355103 - DNA, 19 bp, Homo sapiens
  siRNA target sequence for KIAA1280 (NM_015691.2,896-914).
ccaagctgaccgatagctt

SEQ ID NO: 355104 - DNA, 19 bp, Homo sapiens
  siRNA target sequence for KIAA1280 (NM_015691.2,901-919).
ctgaccgatagcttcaaga

SEQ ID NO: 355105 - DNA, 19 bp, Homo sapiens
  siRNA target sequence for KIAA1280 (NM_015691.2,1012-1030).
ggctcccagactgatatca

SEQ ID NO: 355106 - DNA, 19 bp, Homo sapiens
  siRNA target sequence for KIAA1280 (NM_015691.2,1013-1031).
gctcccagactgatatcat

SEQ ID NO: 355107 - DNA, 19 bp, Homo sapiens
  siRNA target sequence for KIAA1280 (NM_015691.2,1029-1047).
catcggggagtttgtcttt

SEQ ID NO: 355108 - DNA, 19 bp, Homo sapiens
  siRNA target sequence for KIAA1280 (NM_015691.2,1032-1050).
cggggagtttgtctttgat

SEQ ID NO: 355109 - DNA, 19 bp, Homo sapiens
  siRNA target sequence for KIAA1280 (NM_015691.2,1066-1084).
gtagaccgagtcagactta

SEQ ID NO: 355110 - DNA, 19 bp, Homo sapiens
  siRNA target sequence for KIAA1280 (NM_015691.2,1069-1087).
gaccgagtcagacttaatt

SEQ ID NO: 355111 - DNA, 19 bp, Homo sapiens
  siRNA target sequence for KIAA1280 (NM_015691.2,1077-1095).
cagacttaattggcaatat

SEQ ID NO: 355112 - DNA, 19 bp, Homo sapiens
  siRNA target sequence for KIAA1280 (NM_015691.2,1079-1097).
gacttaattggcaatatga

SEQ ID NO: 355113 - DNA, 19 bp, Homo sapiens
  siRNA target sequence for KIAA1280 (NM_015691.2,1402-1420).
gaagccacccgcttaacat

SEQ ID NO: 355114 - DNA, 19 bp, Homo sapiens
  siRNA target sequence for KIAA1280 (NM_015691.2,1895-1913).
ctatgggggacgaagactt

SEQ ID NO: 355115 - DNA, 19 bp, Homo sapiens
  siRNA target sequence for KIAA1280 (NM_015691.2,2070-2088).
cgcatgtctgtcggattat

SEQ ID NO: 355116 - DNA, 19 bp, Homo sapiens
  siRNA target sequence for KIAA1280 (NM_015691.2,2071-2089).
gcatgtctgtcggattatt

SEQ ID NO: 355117 - DNA, 19 bp, Homo sapiens
  siRNA target sequence for KIAA1280 (NM_015691.2,2099-2117).
gcgacagtggggtgtttga

SEQ ID NO: 355118 - DNA, 19 bp, Homo sapiens
  siRNA target sequence for KIAA1280 (NM_015691.2,2100-2118).
cgacagtggggtgtttgaa

SEQ ID NO: 355119 - DNA, 19 bp, Homo sapiens
  siRNA target sequence for KIAA1280 (NM_015691.2,2327-2345).
cgggcacgcccaacactta

SEQ ID NO: 355120 - DNA, 19 bp, Homo sapiens
  siRNA target sequence for KIAA1280 (NM_015691.2,2329-2347).
ggcacgcccaacacttact

SEQ ID NO: 355121 - DNA, 19 bp, Homo sapiens
  siRNA target sequence for KIAA1280 (NM_015691.2,2368-2386).
caagtgccgctggtgttta

SEQ ID NO: 355122 - DNA, 19 bp, Homo sapiens
  siRNA target sequence for KIAA1280 (NM_015691.2,2941-2959).
ccttacagccccgagaaat

SEQ ID NO: 355123 - DNA, 19 bp, Homo sapiens
  siRNA target sequence for KIAA1280 (NM_015691.2,2942-2960).
cttacagccccgagaaatt

SEQ ID NO: 355124 - DNA, 19 bp, Homo sapiens
  siRNA target sequence for KIAA1280 (NM_015691.2,2964-2982).
gccctcgcctcttaaggtt

SEQ ID NO: 355125 - DNA, 19 bp, Homo sapiens
  siRNA target sequence for KIAA1280 (NM_015691.2,2993-3011).
ccaacacggaagatctctt

SEQ ID NO: 355126 - DNA, 19 bp, Homo sapiens
  siRNA target sequence for KIAA1280 (NM_015691.2,3094-3112).
gtccgttcccagacattct

SEQ ID NO: 355127 - DNA, 19 bp, Homo sapiens
  siRNA target sequence for KIAA1280 (NM_015691.2,3121-3139).
gcacgaagccagtatgttt

SEQ ID NO: 355128 - DNA, 19 bp, Homo sapiens
  siRNA target sequence for KIAA1280 (NM_015691.2,3136-3154).
gtttgcagactttatcgta

SEQ ID NO: 355129 - DNA, 19 bp, Homo sapiens
  siRNA target sequence for KIAA1280 (NM_015691.2,3189-3207).
cccctttgtccgaaatact

SEQ ID NO: 355130 - DNA, 19 bp, Homo sapiens
  siRNA target sequence for KIAA1280 (NM_015691.2,3190-3208).
ccctttgtccgaaatactt

SEQ ID NO: 355131 - DNA, 19 bp, Homo sapiens
  siRNA target sequence for KIAA1280 (NM_015691.2,3191-3209).
cctttgtccgaaatacttt

SEQ ID NO: 355132 - DNA, 19 bp, Homo sapiens
  siRNA target sequence for KIAA1280 (NM_015691.2,3215-3233).
gacgaacccttcgctataa

SEQ ID NO: 355133 - DNA, 19 bp, Homo sapiens
  siRNA target sequence for KIAA1280 (NM_015691.2,3218-3236).
gaacccttcgctataagca

SEQ ID NO: 355134 - DNA, 19 bp, Homo sapiens
  siRNA target sequence for KIAA1280 (NM_015691.2,3470-3488).
gacagaccaaacttgacta

SEQ ID NO: 355135 - DNA, 19 bp, Homo sapiens
  siRNA target sequence for KIAA1280 (NM_015691.2,3585-3603).
gacctttagggagaagata

SEQ ID NO: 355136 - DNA, 19 bp, Homo sapiens
  siRNA target sequence for HIRIP5 (NM_015700.1,382-400).
gctaggcagttatttagga

SEQ ID NO: 355137 - DNA, 19 bp, Homo sapiens
  siRNA target sequence for HIRIP5 (NM_015700.1,383-401).
ctaggcagttatttaggat

SEQ ID NO: 355138 - DNA, 19 bp, Homo sapiens
  siRNA target sequence for HIRIP5 (NM_015700.1,387-405).
gcagttatttaggattgaa

SEQ ID NO: 355139 - DNA, 19 bp, Homo sapiens
  siRNA target sequence for HIRIP5 (NM_015700.1,399-417).
gattgaaggagtaaaaagt

SEQ ID NO: 355140 - DNA, 19 bp, Homo sapiens
  siRNA target sequence for HIRIP5 (NM_015700.1,454-472).
gaaaatgaagaattagact

SEQ ID NO: 355141 - DNA, 19 bp, Homo sapiens
  siRNA target sequence for HIRIP5 (NM_015700.1,460-478).
gaagaattagactggaatt

SEQ ID NO: 355142 - DNA, 19 bp, Homo sapiens
  siRNA target sequence for HIRIP5 (NM_015700.1,527-545).
gcttacccctggttactga

SEQ ID NO: 355143 - DNA, 19 bp, Homo sapiens
  siRNA target sequence for HIRIP5 (NM_015700.1,592-610).
gtggcaatgattaaggaat

SEQ ID NO: 355144 - DNA, 19 bp, Homo sapiens
  siRNA target sequence for HIRIP5 (NM_015700.1,595-613).
gcaatgattaaggaattgt

SEQ ID NO: 355145 - DNA, 19 bp, Homo sapiens
  siRNA target sequence for HIRIP5 (NM_015700.1,596-614).
caatgattaaggaattgtt

SEQ ID NO: 355146 - DNA, 19 bp, Homo sapiens
  siRNA target sequence for HIRIP5 (NM_015700.1,606-624).
ggaattgttagatactaga

SEQ ID NO: 355147 - DNA, 19 bp, Homo sapiens
  siRNA target sequence for HIRIP5 (NM_015700.1,607-625).
gaattgttagatactagaa

SEQ ID NO: 355148 - DNA, 19 bp, Homo sapiens
  siRNA target sequence for HIRIP5 (NM_015700.1,649-667).
ggaggggatgtaatctaca

SEQ ID NO: 355149 - DNA, 19 bp, Homo sapiens
  siRNA target sequence for HIRIP5 (NM_015700.1,696-714).
gaaactccagggttcttgt

SEQ ID NO: 355150 - DNA, 19 bp, Homo sapiens
  siRNA target sequence for HIRIP5 (NM_015700.1,723-741).
ccctagttcaatcattact

SEQ ID NO: 355151 - DNA, 19 bp, Homo sapiens
  siRNA target sequence for HIRIP5 (NM_015700.1,725-743).
ctagttcaatcattactct

SEQ ID NO: 355152 - DNA, 19 bp, Homo sapiens
  siRNA target sequence for HIRIP5 (NM_015700.1,794-812).
gcgtagaacaggttatgga

SEQ ID NO: 355153 - DNA, 19 bp, Homo sapiens
  siRNA target sequence for HIRIP5 (NM_015700.1,795-813).
cgtagaacaggttatggat

SEQ ID NO: 355154 - DNA, 19 bp, Homo sapiens
  siRNA target sequence for HIRIP5 (NM_015700.1,804-822).
ggttatggatgatgaatca

SEQ ID NO: 355155 - DNA, 19 bp, Homo sapiens
  siRNA target sequence for XTP3TPB (NM_015701.2,293-311).
gcccacaactggagtttta

SEQ ID NO: 355156 - DNA, 19 bp, Homo sapiens
  siRNA target sequence for XTP3TPB (NM_015701.2,321-339).
gataattatgtcatcatga

SEQ ID NO: 355157 - DNA, 19 bp, Homo sapiens
  siRNA target sequence for XTP3TPB (NM_015701.2,335-353).
catgacaactgcacataaa

SEQ ID NO: 355158 - DNA, 19 bp, Homo sapiens
  siRNA target sequence for XTP3TPB (NM_015701.2,424-442).
ctaatccaagagagctttt

SEQ ID NO: 355159 - DNA, 19 bp, Homo sapiens
  siRNA target sequence for XTP3TPB (NM_015701.2,438-456).
cttttggagccactattta

SEQ ID NO: 355160 - DNA, 19 bp, Homo sapiens
  siRNA target sequence for XTP3TPB (NM_015701.2,466-484).
gttgttcctacagaattga

SEQ ID NO: 355161 - DNA, 19 bp, Homo sapiens
  siRNA target sequence for XTP3TPB (NM_015701.2,473-491).
ctacagaattgagtcttat

SEQ ID NO: 355162 - DNA, 19 bp, Homo sapiens
  siRNA target sequence for XTP3TPB (NM_015701.2,485-503).
gtcttattggacttacgaa

SEQ ID NO: 355163 - DNA, 19 bp, Homo sapiens
  siRNA target sequence for XTP3TPB (NM_015701.2,493-511).
ggacttacgaagtatgtca

SEQ ID NO: 355164 - DNA, 19 bp, Homo sapiens
  siRNA target sequence for XTP3TPB (NM_015701.2,500-518).
cgaagtatgtcatggaaaa

SEQ ID NO: 355165 - DNA, 19 bp, Homo sapiens
  siRNA target sequence for XTP3TPB (NM_015701.2,679-697).
gtcagatgacaccatacta

SEQ ID NO: 355166 - DNA, 19 bp, Homo sapiens
  siRNA target sequence for XTP3TPB (NM_015701.2,717-735).
ggtacaccttgtagtttga

SEQ ID NO: 355167 - DNA, 19 bp, Homo sapiens
  siRNA target sequence for XTP3TPB (NM_015701.2,723-741).
ccttgtagtttgaaacaga

SEQ ID NO: 355168 - DNA, 19 bp, Homo sapiens
  siRNA target sequence for XTP3TPB (NM_015701.2,760-778).
ctgtgatgtacatatgtca

SEQ ID NO: 355169 - DNA, 19 bp, Homo sapiens
  siRNA target sequence for XTP3TPB (NM_015701.2,807-825).
gtagctgaagttacaactt

SEQ ID NO: 355170 - DNA, 19 bp, Homo sapiens
  siRNA target sequence for XTP3TPB (NM_015701.2,813-831).
gaagttacaacttgtgaat

SEQ ID NO: 355171 - DNA, 19 bp, Homo sapiens
  siRNA target sequence for XTP3TPB (NM_015701.2,865-883).
gtcatcctaaatataggtt

SEQ ID NO: 355172 - DNA, 19 bp, Homo sapiens
  siRNA target sequence for XTP3TPB (NM_015701.2,889-907).
catctcctgtgaatgacat

SEQ ID NO: 355173 - DNA, 19 bp, Homo sapiens
  siRNA target sequence for XTP3TPB (NM_015701.2,981-999).
ctaagggtgccttttagga

SEQ ID NO: 355174 - DNA, 19 bp, Homo sapiens
  siRNA target sequence for XTP3TPB (NM_015701.2,1052-1070).
ccacaagtcgattgctatt

SEQ ID NO: 355175 - DNA, 19 bp, Homo sapiens
  siRNA target sequence for XTP3TPB (NM_015701.2,1092-1110).
gttgggacaacccacatat

SEQ ID NO: 355176 - DNA, 19 bp, Homo sapiens
  siRNA target sequence for XTP3TPB (NM_015701.2,1096-1114).
ggacaacccacatatccaa

SEQ ID NO: 355177 - DNA, 19 bp, Homo sapiens
  siRNA target sequence for XTP3TPB (NM_015701.2,1097-1115).
gacaacccacatatccaaa

SEQ ID NO: 355178 - DNA, 19 bp, Homo sapiens
  siRNA target sequence for XTP3TPB (NM_015701.2,1099-1117).
caacccacatatccaaatt

SEQ ID NO: 355179 - DNA, 19 bp, Homo sapiens
  siRNA target sequence for XTP3TPB (NM_015701.2,1173-1191).
ggtgtcggttggtggaaat

SEQ ID NO: 355180 - DNA, 19 bp, Homo sapiens
  siRNA target sequence for XTP3TPB (NM_015701.2,1199-1217).
ctgctatggcaaacatgta

SEQ ID NO: 355181 - DNA, 19 bp, Homo sapiens
  siRNA target sequence for XTP3TPB (NM_015701.2,1201-1219).
gctatggcaaacatgtaca

SEQ ID NO: 355182 - DNA, 19 bp, Homo sapiens
  siRNA target sequence for XTP3TPB (NM_015701.2,1312-1330).
ctgctagagcttatcatct

SEQ ID NO: 355183 - DNA, 19 bp, Homo sapiens
  siRNA target sequence for XTP3TPB (NM_015701.2,1395-1413).
gatataactgacaaaccaa

SEQ ID NO: 355184 - DNA, 19 bp, Homo sapiens
  siRNA target sequence for XTP3TPB (NM_015701.2,1419-1437).
gtgactgtaaaactaaagt

SEQ ID NO: 355185 - DNA, 19 bp, Homo sapiens
  siRNA target sequence for XTP3TPB (NM_015701.2,1484-1502).
gcctcactcctgtcaatat

SEQ ID NO: 355186 - DNA, 19 bp, Homo sapiens
  siRNA target sequence for CL25022 (NM_015702.1,293-311).
gctgcacctccagatatat

SEQ ID NO: 355187 - DNA, 19 bp, Homo sapiens
  siRNA target sequence for CL25022 (NM_015702.1,296-314).
gcacctccagatatatgct

SEQ ID NO: 355188 - DNA, 19 bp, Homo sapiens
  siRNA target sequence for CL25022 (NM_015702.1,373-391).
ccagcttcctgggaacata

SEQ ID NO: 355189 - DNA, 19 bp, Homo sapiens
  siRNA target sequence for CL25022 (NM_015702.1,464-482).
ctagcagaacctttatcaa

SEQ ID NO: 355190 - DNA, 19 bp, Homo sapiens
  siRNA target sequence for CL25022 (NM_015702.1,470-488).
gaacctttatcaagtgaaa

SEQ ID NO: 355191 - DNA, 19 bp, Homo sapiens
  siRNA target sequence for CL25022 (NM_015702.1,500-518).
gtgatggcacaatatgtga

SEQ ID NO: 355192 - DNA, 19 bp, Homo sapiens
  siRNA target sequence for CL25022 (NM_015702.1,562-580).
cagtgcagaaacttacttt

SEQ ID NO: 355193 - DNA, 19 bp, Homo sapiens
  siRNA target sequence for CL25022 (NM_015702.1,591-609).
gagtagagtgtgcaataca

SEQ ID NO: 355194 - DNA, 19 bp, Homo sapiens
  siRNA target sequence for CL25022 (NM_015702.1,628-646).
gcgaaaagattttgaatca

SEQ ID NO: 355195 - DNA, 19 bp, Homo sapiens
  siRNA target sequence for CL25022 (NM_015702.1,662-680).
gctaatggcaaactaatga

SEQ ID NO: 355196 - DNA, 19 bp, Homo sapiens
  siRNA target sequence for CL25022 (NM_015702.1,715-733).
gactgtttggagtgaagaa

SEQ ID NO: 355197 - DNA, 19 bp, Homo sapiens
  siRNA target sequence for CL25022 (NM_015702.1,800-818).
cttcgagctgagggttatt

SEQ ID NO: 355198 - DNA, 19 bp, Homo sapiens
  siRNA target sequence for CL25022 (NM_015702.1,812-830).
ggttattgggctgacttta

SEQ ID NO: 355199 - DNA, 19 bp, Homo sapiens
  siRNA target sequence for CL25022 (NM_015702.1,813-831).
gttattgggctgactttat

SEQ ID NO: 355200 - DNA, 19 bp, Homo sapiens
  siRNA target sequence for CL25022 (NM_015702.1,860-878).
ggaccatatacaaacaaca

SEQ ID NO: 355201 - DNA, 19 bp, Homo sapiens
  siRNA target sequence for CL25022 (NM_015702.1,899-917).
cgctaccgacatttaggat

SEQ ID NO: 355202 - DNA, 19 bp, Homo sapiens
  siRNA target sequence for CL25022 (NM_015702.1,900-918).
gctaccgacatttaggatt

SEQ ID NO: 355203 - DNA, 19 bp, Homo sapiens
  siRNA target sequence for CL25022 (NM_015702.1,932-950).
cttggatgctgtaaagtga

SEQ ID NO: 355204 - DNA, 19 bp, Homo sapiens
  siRNA target sequence for CL25022 (NM_015702.1,966-984).
ggggtacccatgtagttgt

SEQ ID NO: 355205 - DNA, 19 bp, Homo sapiens
  siRNA target sequence for CL25022 (NM_015702.1,967-985).
gggtacccatgtagttgta

SEQ ID NO: 355206 - DNA, 19 bp, Homo sapiens
  siRNA target sequence for CL25022 (NM_015702.1,977-995).
gtagttgtagggagtatct

SEQ ID NO: 355207 - DNA, 19 bp, Homo sapiens
  siRNA target sequence for CL25022 (NM_015702.1,980-998).
gttgtagggagtatcttca

SEQ ID NO: 355208 - DNA, 19 bp, Homo sapiens
  siRNA target sequence for CL25022 (NM_015702.1,983-1001).
gtagggagtatcttcacta

SEQ ID NO: 355209 - DNA, 19 bp, Homo sapiens
  siRNA target sequence for CL25022 (NM_015702.1,988-1006).
gagtatcttcactaatgca

SEQ ID NO: 355210 - DNA, 19 bp, Homo sapiens
  siRNA target sequence for CL25022 (NM_015702.1,1008-1026).
caccagacagccatattat

SEQ ID NO: 355211 - DNA, 19 bp, Homo sapiens
  siRNA target sequence for CL25022 (NM_015702.1,1010-1028).
ccagacagccatattatga

SEQ ID NO: 355212 - DNA, 19 bp, Homo sapiens
  siRNA target sequence for CL25022 (NM_015702.1,1011-1029).
cagacagccatattatgaa

SEQ ID NO: 355213 - DNA, 19 bp, Homo sapiens
  siRNA target sequence for DJ1042K10.2 (NM_015705.3,204-222).
gccctgactccgagcatat

SEQ ID NO: 355214 - DNA, 19 bp, Homo sapiens
  siRNA target sequence for DJ1042K10.2 (NM_015705.3,268-286).
cagagcaaccagagttcta

SEQ ID NO: 355215 - DNA, 19 bp, Homo sapiens
  siRNA target sequence for DJ1042K10.2 (NM_015705.3,270-288).
gagcaaccagagttctact

SEQ ID NO: 355216 - DNA, 19 bp, Homo sapiens
  siRNA target sequence for DJ1042K10.2 (NM_015705.3,583-601).
cctaccgcgagattgtgaa

SEQ ID NO: 355217 - DNA, 19 bp, Homo sapiens
  siRNA target sequence for DJ1042K10.2 (NM_015705.3,819-837).
gacgccttctggatgatgt

SEQ ID NO: 355218 - DNA, 19 bp, Homo sapiens
  siRNA target sequence for DJ1042K10.2 (NM_015705.3,1050-1068).
cgcatctgggacctgtttt

SEQ ID NO: 355219 - DNA, 19 bp, Homo sapiens
  siRNA target sequence for DJ1042K10.2 (NM_015705.3,1422-1440).
gcactcaaggccaagaaca

SEQ ID NO: 355220 - DNA, 19 bp, Homo sapiens
  siRNA target sequence for DJ1042K10.2 (NM_015705.3,1423-1441).
cactcaaggccaagaacat

SEQ ID NO: 355221 - DNA, 19 bp, Homo sapiens
  siRNA target sequence for DJ1042K10.2 (NM_015705.3,1536-1554).
ctgactccagactatagca

SEQ ID NO: 355222 - DNA, 19 bp, Homo sapiens
  siRNA target sequence for DJ1042K10.2 (NM_015705.3,1668-1686).
cgcaagaacgacatcatca

SEQ ID NO: 355223 - DNA, 19 bp, Homo sapiens
  siRNA target sequence for DJ1042K10.2 (NM_015705.3,1958-1976).
ggaggtcgagagagacttt

SEQ ID NO: 355224 - DNA, 19 bp, Homo sapiens
  siRNA target sequence for DJ1042K10.2 (NM_015705.3,1971-1989).
gactttgcctccgtgtatt

SEQ ID NO: 355225 - DNA, 19 bp, Homo sapiens
  siRNA target sequence for DJ1042K10.2 (NM_015705.3,1992-2010).
cgtctggtgctctgtaaga

SEQ ID NO: 355226 - DNA, 19 bp, Homo sapiens
  siRNA target sequence for GLTSCR1 (NM_015711.1,532-550).
ctccaagaggccaacatca

SEQ ID NO: 355227 - DNA, 19 bp, Homo sapiens
  siRNA target sequence for GLTSCR1 (NM_015711.1,2222-2240).
cgtctagcccggagaagat

SEQ ID NO: 355228 - DNA, 19 bp, Homo sapiens
  siRNA target sequence for GLTSCR1 (NM_015711.1,2365-2383).
cctgcctcggtcatagtca

SEQ ID NO: 355229 - DNA, 19 bp, Homo sapiens
  siRNA target sequence for GLTSCR1 (NM_015711.1,3081-3099).
ggctcttctcgagagattt

SEQ ID NO: 355230 - DNA, 19 bp, Homo sapiens
  siRNA target sequence for GLTSCR1 (NM_015711.1,3654-3672).
ccaggccatgctcaataaa

SEQ ID NO: 355231 - DNA, 19 bp, Homo sapiens
  siRNA target sequence for GLTSCR1 (NM_015711.1,3712-3730).
ccctcagcggagatggtaa

SEQ ID NO: 355232 - DNA, 19 bp, Homo sapiens
  siRNA target sequence for GLTSCR1 (NM_015711.1,3713-3731).
cctcagcggagatggtaat

SEQ ID NO: 355233 - DNA, 19 bp, Homo sapiens
  siRNA target sequence for GLTSCR1 (NM_015711.1,3732-3750).
gatcgaccgaatgttcatt

SEQ ID NO: 355234 - DNA, 19 bp, Homo sapiens
  siRNA target sequence for GLTSCR1 (NM_015711.1,3767-3785).
cccttgccttggataaaca

SEQ ID NO: 355235 - DNA, 19 bp, Homo sapiens
  siRNA target sequence for H326 (NM_015726.2,201-219).
ggcagaacagacttagcta

SEQ ID NO: 355236 - DNA, 19 bp, Homo sapiens
  siRNA target sequence for H326 (NM_015726.2,202-220).
gcagaacagacttagctaa

SEQ ID NO: 355237 - DNA, 19 bp, Homo sapiens
  siRNA target sequence for H326 (NM_015726.2,203-221).
cagaacagacttagctaat

SEQ ID NO: 355238 - DNA, 19 bp, Homo sapiens
  siRNA target sequence for H326 (NM_015726.2,275-293).
gacatcctcaggcattgaa

SEQ ID NO: 355239 - DNA, 19 bp, Homo sapiens
  siRNA target sequence for H326 (NM_015726.2,385-403).
gctcaggtgaagataagga

SEQ ID NO: 355240 - DNA, 19 bp, Homo sapiens
  siRNA target sequence for H326 (NM_015726.2,424-442).
ctggtcattactccattaa

SEQ ID NO: 355241 - DNA, 19 bp, Homo sapiens
  siRNA target sequence for H326 (NM_015726.2,747-765).
catactggttgtgtcaata

SEQ ID NO: 355242 - DNA, 19 bp, Homo sapiens
  siRNA target sequence for H326 (NM_015726.2,869-887).
gagtggccacaaaagtaat

SEQ ID NO: 355243 - DNA, 19 bp, Homo sapiens
  siRNA target sequence for H326 (NM_015726.2,871-889).
gtggccacaaaagtaatgt

SEQ ID NO: 355244 - DNA, 19 bp, Homo sapiens
  siRNA target sequence for H326 (NM_015726.2,1055-1073).
ctctccctgtacgttctta

SEQ ID NO: 355245 - DNA, 19 bp, Homo sapiens
  siRNA target sequence for H326 (NM_015726.2,1132-1150).
cgaaactggtggtgacaaa

SEQ ID NO: 355246 - DNA, 19 bp, Homo sapiens
  siRNA target sequence for H326 (NM_015726.2,1169-1187).
ggggctgtatacgatctat

SEQ ID NO: 355247 - DNA, 19 bp, Homo sapiens
  siRNA target sequence for H326 (NM_015726.2,1171-1189).
ggctgtatacgatctatgt

SEQ ID NO: 355248 - DNA, 19 bp, Homo sapiens
  siRNA target sequence for H326 (NM_015726.2,1173-1191).
ctgtatacgatctatgtga

SEQ ID NO: 355249 - DNA, 19 bp, Homo sapiens
  siRNA target sequence for H326 (NM_015726.2,1175-1193).
gtatacgatctatgtgaat

SEQ ID NO: 355250 - DNA, 19 bp, Homo sapiens
  siRNA target sequence for H326 (NM_015726.2,1326-1344).
gagtccaaagcaaacatca

SEQ ID NO: 355251 - DNA, 19 bp, Homo sapiens
  siRNA target sequence for H326 (NM_015726.2,1480-1498).
cagtaaaaggcgtcaattt

SEQ ID NO: 355252 - DNA, 19 bp, Homo sapiens
  siRNA target sequence for H326 (NM_015726.2,1482-1500).
gtaaaaggcgtcaatttct

SEQ ID NO: 355253 - DNA, 19 bp, Homo sapiens
  siRNA target sequence for H326 (NM_015726.2,1604-1622).
gggaggcgtggtaaactgt

SEQ ID NO: 355254 - DNA, 19 bp, Homo sapiens
  siRNA target sequence for H326 (NM_015726.2,1751-1769).
gcgggagcgggatgaagat

SEQ ID NO: 355255 - DNA, 19 bp, Homo sapiens
  siRNA target sequence for H326 (NM_015726.2,1778-1796).
ccaaactgacctgtttgat

SEQ ID NO: 355256 - DNA, 19 bp, Homo sapiens
  siRNA target sequence for LOC51035 (NM_015853.3,274-292).
gtggacgagcctttagaga

SEQ ID NO: 355257 - DNA, 19 bp, Homo sapiens
  siRNA target sequence for LOC51035 (NM_015853.3,293-311).
ctccccttggacatatcct

SEQ ID NO: 355258 - DNA, 19 bp, Homo sapiens
  siRNA target sequence for LOC51035 (NM_015853.3,471-489).
ggaacgggaggcattggaa

SEQ ID NO: 355259 - DNA, 19 bp, Homo sapiens
  siRNA target sequence for LOC51035 (NM_015853.3,601-619).
gagttagcagccagacaaa

SEQ ID NO: 355260 - DNA, 19 bp, Homo sapiens
  siRNA target sequence for C6orf32 (NM_015864.2,437-455).
ggtaggatcccagtctttt

SEQ ID NO: 355261 - DNA, 19 bp, Homo sapiens
  siRNA target sequence for C6orf32 (NM_015864.2,468-486).
cccaatgggatcattagaa

SEQ ID NO: 355262 - DNA, 19 bp, Homo sapiens
  siRNA target sequence for C6orf32 (NM_015864.2,532-550).
ggtgtaactccttcattga

SEQ ID NO: 355263 - DNA, 19 bp, Homo sapiens
  siRNA target sequence for C6orf32 (NM_015864.2,535-553).
gtaactccttcattgaaaa

SEQ ID NO: 355264 - DNA, 19 bp, Homo sapiens
  siRNA target sequence for C6orf32 (NM_015864.2,665-683).
cagggccttgaaaaatgga

SEQ ID NO: 355265 - DNA, 19 bp, Homo sapiens
  siRNA target sequence for C6orf32 (NM_015864.2,818-836).
gagacgcctggagtttcat

SEQ ID NO: 355266 - DNA, 19 bp, Homo sapiens
  siRNA target sequence for C6orf32 (NM_015864.2,820-838).
gacgcctggagtttcatat

SEQ ID NO: 355267 - DNA, 19 bp, Homo sapiens
  siRNA target sequence for C6orf32 (NM_015864.2,822-840).
cgcctggagtttcatataa

SEQ ID NO: 355268 - DNA, 19 bp, Homo sapiens
  siRNA target sequence for C6orf32 (NM_015864.2,825-843).
ctggagtttcatataagta

SEQ ID NO: 355269 - DNA, 19 bp, Homo sapiens
  siRNA target sequence for C6orf32 (NM_015864.2,841-859).
gtaaggtagatgaactcta

SEQ ID NO: 355270 - DNA, 19 bp, Homo sapiens
  siRNA target sequence for C6orf32 (NM_015864.2,953-971).
gagtctgacagagatcaat

SEQ ID NO: 355271 - DNA, 19 bp, Homo sapiens
  siRNA target sequence for C6orf32 (NM_015864.2,995-1013).
gaatatgtgcaccattgaa

SEQ ID NO: 355272 - DNA, 19 bp, Homo sapiens
  siRNA target sequence for C6orf32 (NM_015864.2,1080-1098).
ctctgtcctggagatcaat

SEQ ID NO: 355273 - DNA, 19 bp, Homo sapiens
  siRNA target sequence for C6orf32 (NM_015864.2,1084-1102).
gtcctggagatcaatatga

SEQ ID NO: 355274 - DNA, 19 bp, Homo sapiens
  siRNA target sequence for C6orf32 (NM_015864.2,1087-1105).
ctggagatcaatatgaaat

SEQ ID NO: 355275 - DNA, 19 bp, Homo sapiens
  siRNA target sequence for C6orf32 (NM_015864.2,1475-1493).
ggaaacgcccaccttcaaa

SEQ ID NO: 355276 - DNA, 19 bp, Homo sapiens
  siRNA target sequence for C6orf32 (NM_015864.2,1494-1512).
gaccactccttcttttcaa

SEQ ID NO: 355277 - DNA, 19 bp, Homo sapiens
  siRNA target sequence for C6orf32 (NM_015864.2,1666-1684).
cccctgcggagtttaacct

SEQ ID NO: 355278 - DNA, 19 bp, Homo sapiens
  siRNA target sequence for C6orf32 (NM_015864.2,1957-1975).
cggaaggaaacatcacaaa

SEQ ID NO: 355279 - DNA, 19 bp, Homo sapiens
  siRNA target sequence for C6orf32 (NM_015864.2,2066-2084).
ctgcagatcctttctagat

SEQ ID NO: 355280 - DNA, 19 bp, Homo sapiens
  siRNA target sequence for C6orf32 (NM_015864.2,2086-2104).
gaagcttagaggatgcttt

SEQ ID NO: 355281 - DNA, 19 bp, Homo sapiens
  siRNA target sequence for C6orf32 (NM_015864.2,2111-2129).
gcttttacttgcattagaa

SEQ ID NO: 355282 - DNA, 19 bp, Homo sapiens
  siRNA target sequence for C6orf32 (NM_015864.2,2165-2183).
gaaccaagaagtcatgaat

SEQ ID NO: 355283 - DNA, 19 bp, Homo sapiens
  siRNA target sequence for LOC51049 (NM_015883.1,790-808).
ggggcacctgccgttgaat

SEQ ID NO: 355284 - DNA, 19 bp, Homo sapiens
  siRNA target sequence for LOC51049 (NM_015883.1,791-809).
gggcacctgccgttgaatt

SEQ ID NO: 355285 - DNA, 19 bp, Homo sapiens
  siRNA target sequence for LOC51049 (NM_015883.1,793-811).
gcacctgccgttgaattgt

SEQ ID NO: 355286 - DNA, 19 bp, Homo sapiens
  siRNA target sequence for LOC51049 (NM_015883.1,794-812).
cacctgccgttgaattgtt

SEQ ID NO: 355287 - DNA, 19 bp, Homo sapiens
  siRNA target sequence for LOC51049 (NM_015883.1,796-814).
cctgccgttgaattgttct

SEQ ID NO: 355288 - DNA, 19 bp, Homo sapiens
  siRNA target sequence for LOC51049 (NM_015883.1,1063-1081).
gagctgacgttctattaca

SEQ ID NO: 355289 - DNA, 19 bp, Homo sapiens
  siRNA target sequence for LOC51049 (NM_015883.1,1065-1083).
gctgacgttctattacaaa

SEQ ID NO: 355290 - DNA, 19 bp, Homo sapiens
  siRNA target sequence for LOC51049 (NM_015883.1,1066-1084).
ctgacgttctattacaaaa

SEQ ID NO: 355291 - DNA, 19 bp, Homo sapiens
  siRNA target sequence for LOC51049 (NM_015883.1,1068-1086).
gacgttctattacaaaata

SEQ ID NO: 355292 - DNA, 19 bp, Homo sapiens
  siRNA target sequence for LOC51049 (NM_015883.1,1088-1106).
gcagcgtgcttatgaaact

SEQ ID NO: 355293 - DNA, 19 bp, Homo sapiens
  siRNA target sequence for LOC51049 (NM_015883.1,1328-1346).
gtgcgcttagggcttttct

SEQ ID NO: 355294 - DNA, 19 bp, Homo sapiens
  siRNA target sequence for LOC51049 (NM_015883.1,1339-1357).
gcttttctgccaagaatga

SEQ ID NO: 355295 - DNA, 19 bp, Homo sapiens
  siRNA target sequence for LOC51049 (NM_015883.1,1487-1505).
gagcatgggcggttcgttt

SEQ ID NO: 355296 - DNA, 19 bp, Homo sapiens
  siRNA target sequence for LOC51049 (NM_015883.1,1490-1508).
catgggcggttcgttttgt

SEQ ID NO: 355297 - DNA, 19 bp, Homo sapiens
  siRNA target sequence for LOC51049 (NM_015883.1,1495-1513).
gcggttcgttttgttagaa

SEQ ID NO: 355298 - DNA, 19 bp, Homo sapiens
  siRNA target sequence for LOC51049 (NM_015883.1,1496-1514).
cggttcgttttgttagaaa

SEQ ID NO: 355299 - DNA, 19 bp, Homo sapiens
  siRNA target sequence for LOC51049 (NM_015883.1,1498-1516).
gttcgttttgttagaaaga

SEQ ID NO: 355300 - DNA, 19 bp, Homo sapiens
  siRNA target sequence for LOC51049 (NM_015883.1,1521-1539).
cggattcacgagatggttt

SEQ ID NO: 355301 - DNA, 19 bp, Homo sapiens
  siRNA target sequence for LOC51049 (NM_015883.1,1522-1540).
ggattcacgagatggtttt

SEQ ID NO: 355302 - DNA, 19 bp, Homo sapiens
  siRNA target sequence for HOOK1 (NM_015888.3,345-363).
cttgtcaagatgtcaaaca

SEQ ID NO: 355303 - DNA, 19 bp, Homo sapiens
  siRNA target sequence for HOOK1 (NM_015888.3,382-400).
catggcacaagttcttcat

SEQ ID NO: 355304 - DNA, 19 bp, Homo sapiens
  siRNA target sequence for HOOK1 (NM_015888.3,413-431).
gcttggtttaacgaatctt

SEQ ID NO: 355305 - DNA, 19 bp, Homo sapiens
  siRNA target sequence for HOOK1 (NM_015888.3,418-436).
gtttaacgaatcttggtta

SEQ ID NO: 355306 - DNA, 19 bp, Homo sapiens
  siRNA target sequence for HOOK1 (NM_015888.3,429-447).
cttggttaagccgaattaa

SEQ ID NO: 355307 - DNA, 19 bp, Homo sapiens
  siRNA target sequence for HOOK1 (NM_015888.3,432-450).
ggttaagccgaattaaaga

SEQ ID NO: 355308 - DNA, 19 bp, Homo sapiens
  siRNA target sequence for HOOK1 (NM_015888.3,469-487).
gagaataaaggccagtaat

SEQ ID NO: 355309 - DNA, 19 bp, Homo sapiens
  siRNA target sequence for HOOK1 (NM_015888.3,497-515).
gtccttcaaggaattatga

SEQ ID NO: 355310 - DNA, 19 bp, Homo sapiens
  siRNA target sequence for HOOK1 (NM_015888.3,500-518).
cttcaaggaattatgagtt

SEQ ID NO: 355311 - DNA, 19 bp, Homo sapiens
  siRNA target sequence for HOOK1 (NM_015888.3,507-525).
gaattatgagttattatca

SEQ ID NO: 355312 - DNA, 19 bp, Homo sapiens
  siRNA target sequence for HOOK1 (NM_015888.3,554-572).
gcacttatccctgatttaa

SEQ ID NO: 355313 - DNA, 19 bp, Homo sapiens
  siRNA target sequence for HOOK1 (NM_015888.3,555-573).
cacttatccctgatttaaa

SEQ ID NO: 355314 - DNA, 19 bp, Homo sapiens
  siRNA target sequence for HOOK1 (NM_015888.3,563-581).
cctgatttaaaccaaataa

SEQ ID NO: 355315 - DNA, 19 bp, Homo sapiens
  siRNA target sequence for HOOK1 (NM_015888.3,609-627).
ggaggttgctccagcttat

SEQ ID NO: 355316 - DNA, 19 bp, Homo sapiens
  siRNA target sequence for HOOK1 (NM_015888.3,612-630).
ggttgctccagcttatttt

SEQ ID NO: 355317 - DNA, 19 bp, Homo sapiens
  siRNA target sequence for HOOK1 (NM_015888.3,613-631).
gttgctccagcttatttta

SEQ ID NO: 355318 - DNA, 19 bp, Homo sapiens
  siRNA target sequence for HOOK1 (NM_015888.3,616-634).
gctccagcttattttaggt

SEQ ID NO: 355319 - DNA, 19 bp, Homo sapiens
  siRNA target sequence for HOOK1 (NM_015888.3,617-635).
ctccagcttattttaggtt

SEQ ID NO: 355320 - DNA, 19 bp, Homo sapiens
  siRNA target sequence for HOOK1 (NM_015888.3,638-656).
gcgatcaactgtgaaaaga

SEQ ID NO: 355321 - DNA, 19 bp, Homo sapiens
  siRNA target sequence for HOOK1 (NM_015888.3,639-657).
cgatcaactgtgaaaagaa

SEQ ID NO: 355322 - DNA, 19 bp, Homo sapiens
  siRNA target sequence for HOOK1 (NM_015888.3,659-677).
caagaacatattcaaaata

SEQ ID NO: 355323 - DNA, 19 bp, Homo sapiens
  siRNA target sequence for HOOK1 (NM_015888.3,709-727).
ggtcatgactgctattcaa

SEQ ID NO: 355324 - DNA, 19 bp, Homo sapiens
  siRNA target sequence for HOOK1 (NM_015888.3,784-802).
ggagcaacagcttaaaaga

SEQ ID NO: 355325 - DNA, 19 bp, Homo sapiens
  siRNA target sequence for HOOK1 (NM_015888.3,882-900).
ctacacttcaagatgaaaa

SEQ ID NO: 355326 - DNA, 19 bp, Homo sapiens
  siRNA target sequence for HOOK1 (NM_015888.3,957-975).
gctcttttgatgatccaaa

SEQ ID NO: 355327 - DNA, 19 bp, Homo sapiens
  siRNA target sequence for HOOK1 (NM_015888.3,1007-1025).
caattacaactagaacaat

SEQ ID NO: 355328 - DNA, 19 bp, Homo sapiens
  siRNA target sequence for HOOK1 (NM_015888.3,1044-1062).
ggcttgaagctgcaaaaga

SEQ ID NO: 355329 - DNA, 19 bp, Homo sapiens
  siRNA target sequence for HOOK1 (NM_015888.3,1105-1123).
cgaattccagcataggaat

SEQ ID NO: 355330 - DNA, 19 bp, Homo sapiens
  siRNA target sequence for HOOK1 (NM_015888.3,1186-1204).
ggctacctctgataaagca

SEQ ID NO: 355331 - DNA, 19 bp, Homo sapiens
  siRNA target sequence for HOOK1 (NM_015888.3,1187-1205).
gctacctctgataaagcaa

SEQ ID NO: 355332 - DNA, 19 bp, Homo sapiens
  siRNA target sequence for HOOK1 (NM_015888.3,1188-1206).
ctacctctgataaagcaaa

SEQ ID NO: 355333 - DNA, 19 bp, Homo sapiens
  siRNA target sequence for HOOK1 (NM_015888.3,1213-1231).
ggagtcaacagttgagata

SEQ ID NO: 355334 - DNA, 19 bp, Homo sapiens
  siRNA target sequence for HOOK1 (NM_015888.3,1297-1315).
catgatgtatatgcataat

SEQ ID NO: 355335 - DNA, 19 bp, Homo sapiens
  siRNA target sequence for HOOK1 (NM_015888.3,1355-1373).
gcacgtacacaattagaaa

SEQ ID NO: 355336 - DNA, 19 bp, Homo sapiens
  siRNA target sequence for HOOK1 (NM_015888.3,1358-1376).
cgtacacaattagaaacat

SEQ ID NO: 355337 - DNA, 19 bp, Homo sapiens
  siRNA target sequence for HOOK1 (NM_015888.3,1359-1377).
gtacacaattagaaacata

SEQ ID NO: 355338 - DNA, 19 bp, Homo sapiens
  siRNA target sequence for HOOK1 (NM_015888.3,1433-1451).
gacacactagcgtttgaaa

SEQ ID NO: 355339 - DNA, 19 bp, Homo sapiens
  siRNA target sequence for HOOK1 (NM_015888.3,1508-1526).
gagcagcgtgatactttga

SEQ ID NO: 355340 - DNA, 19 bp, Homo sapiens
  siRNA target sequence for HOOK1 (NM_015888.3,1513-1531).
gcgtgatactttgaaagaa

SEQ ID NO: 355341 - DNA, 19 bp, Homo sapiens
  siRNA target sequence for HOOK1 (NM_015888.3,1514-1532).
cgtgatactttgaaagaaa

SEQ ID NO: 355342 - DNA, 19 bp, Homo sapiens
  siRNA target sequence for HOOK1 (NM_015888.3,1548-1566).
gatgttcacaagtacaaca

SEQ ID NO: 355343 - DNA, 19 bp, Homo sapiens
  siRNA target sequence for HOOK1 (NM_015888.3,1565-1583).
caggaccacctaaaccaaa

SEQ ID NO: 355344 - DNA, 19 bp, Homo sapiens
  siRNA target sequence for HOOK1 (NM_015888.3,1570-1588).
ccacctaaaccaaacagat

SEQ ID NO: 355345 - DNA, 19 bp, Homo sapiens
  siRNA target sequence for HOOK1 (NM_015888.3,1661-1679).
cgactgcaacatgaaaata

SEQ ID NO: 355346 - DNA, 19 bp, Homo sapiens
  siRNA target sequence for HOOK1 (NM_015888.3,1707-1725).
ctgagaatgaacgtattga

SEQ ID NO: 355347 - DNA, 19 bp, Homo sapiens
  siRNA target sequence for HOOK1 (NM_015888.3,1745-1763).
gaacagaaacaccgtaaaa

SEQ ID NO: 355348 - DNA, 19 bp, Homo sapiens
  siRNA target sequence for HOOK1 (NM_015888.3,1790-1808).
ctgagcaaagagcgtatta

SEQ ID NO: 355349 - DNA, 19 bp, Homo sapiens
  siRNA target sequence for HOOK1 (NM_015888.3,1792-1810).
gagcaaagagcgtattaga

SEQ ID NO: 355350 - DNA, 19 bp, Homo sapiens
  siRNA target sequence for HOOK1 (NM_015888.3,1794-1812).
gcaaagagcgtattagaga

SEQ ID NO: 355351 - DNA, 19 bp, Homo sapiens
  siRNA target sequence for HOOK1 (NM_015888.3,1795-1813).
caaagagcgtattagagaa

SEQ ID NO: 355352 - DNA, 19 bp, Homo sapiens
  siRNA target sequence for HOOK1 (NM_015888.3,1831-1849).
ggacctccagaaatcttta

SEQ ID NO: 355353 - DNA, 19 bp, Homo sapiens
  siRNA target sequence for HOOK1 (NM_015888.3,1874-1892).
ggcgaaagttccagcaaat

SEQ ID NO: 355354 - DNA, 19 bp, Homo sapiens
  siRNA target sequence for HOOK1 (NM_015888.3,1875-1893).
gcgaaagttccagcaaatt

SEQ ID NO: 355355 - DNA, 19 bp, Homo sapiens
  siRNA target sequence for HOOK1 (NM_015888.3,1876-1894).
cgaaagttccagcaaatta

SEQ ID NO: 355356 - DNA, 19 bp, Homo sapiens
  siRNA target sequence for HOOK1 (NM_015888.3,1877-1895).
gaaagttccagcaaattaa

SEQ ID NO: 355357 - DNA, 19 bp, Homo sapiens
  siRNA target sequence for HOOK1 (NM_015888.3,1973-1991).
gatcttcagccagatataa

SEQ ID NO: 355358 - DNA, 19 bp, Homo sapiens
  siRNA target sequence for HOOK1 (NM_015888.3,2112-2130).
ctttggatcccaagttaaa

SEQ ID NO: 355359 - DNA, 19 bp, Homo sapiens
  siRNA target sequence for HOOK1 (NM_015888.3,2132-2150).
ccagcatcagctgaaataa

SEQ ID NO: 355360 - DNA, 19 bp, Homo sapiens
  siRNA target sequence for HOOK1 (NM_015888.3,2141-2159).
gctgaaataatgctactaa

SEQ ID NO: 355361 - DNA, 19 bp, Homo sapiens
  siRNA target sequence for HOOK1 (NM_015888.3,2192-2210).
gagattctggagagtgaat

SEQ ID NO: 355362 - DNA, 19 bp, Homo sapiens
  siRNA target sequence for HOOK1 (NM_015888.3,2220-2238).
caaaattccgtgattatga

SEQ ID NO: 355363 - DNA, 19 bp, Homo sapiens
  siRNA target sequence for HOOK1 (NM_015888.3,2293-2311).
ggggatggaatctagactt

SEQ ID NO: 355364 - DNA, 19 bp, Homo sapiens
  siRNA target sequence for HOOK1 (NM_015888.3,2352-2370).
ctcctgcgcggtctttctt

SEQ ID NO: 355365 - DNA, 19 bp, Homo sapiens
  siRNA target sequence for ZMYND10 (NM_015896.2,471-489).
cacgaggcctccatcatca

SEQ ID NO: 355366 - DNA, 19 bp, Homo sapiens
  siRNA target sequence for ZMYND10 (NM_015896.2,701-719).
gaaggccctctcagtacta

SEQ ID NO: 355367 - DNA, 19 bp, Homo sapiens
  siRNA target sequence for ZMYND10 (NM_015896.2,758-776).
caccttgagccgtatgctt

SEQ ID NO: 355368 - DNA, 19 bp, Homo sapiens
  siRNA target sequence for ZMYND10 (NM_015896.2,868-886).
gcagccgttggcatactgt

SEQ ID NO: 355369 - DNA, 19 bp, Homo sapiens
  siRNA target sequence for ZMYND10 (NM_015896.2,978-996).
cgctactgcctcacaagtt

SEQ ID NO: 355370 - DNA, 19 bp, Homo sapiens
  siRNA target sequence for ZMYND10 (NM_015896.2,979-997).
gctactgcctcacaagttt

SEQ ID NO: 355371 - DNA, 19 bp, Homo sapiens
  siRNA target sequence for ZMYND10 (NM_015896.2,1000-1018).
ccaagggacggctactcaa

SEQ ID NO: 355372 - DNA, 19 bp, Homo sapiens
  siRNA target sequence for ZMYND10 (NM_015896.2,1092-1110).
catctgaccctaactgaaa

SEQ ID NO: 355373 - DNA, 19 bp, Homo sapiens
  siRNA target sequence for ZMYND10 (NM_015896.2,1164-1182).
cggctggagcgagaaaaca

SEQ ID NO: 355374 - DNA, 19 bp, Homo sapiens
  siRNA target sequence for ZMYND10 (NM_015896.2,1360-1378).
gctcacgatgccagaatga

SEQ ID NO: 355375 - DNA, 19 bp, Homo sapiens
  siRNA target sequence for ZMYND10 (NM_015896.2,1371-1389).
cagaatgagtggtattgct

SEQ ID NO: 355376 - DNA, 19 bp, Homo sapiens
  siRNA target sequence for ZMYND10 (NM_015896.2,1390-1408).
gcagggagtgccaagtcaa

SEQ ID NO: 355377 - DNA, 19 bp, Homo sapiens
  siRNA target sequence for LOC51054 (NM_015899.1,1485-1503).
cctgaataacgcatatggt

SEQ ID NO: 355378 - DNA, 19 bp, Homo sapiens
  siRNA target sequence for LOC51054 (NM_015899.1,1486-1504).
ctgaataacgcatatggta

SEQ ID NO: 355379 - DNA, 19 bp, Homo sapiens
  siRNA target sequence for LOC51054 (NM_015899.1,1540-1558).
ggggtttttgcgttagctt

SEQ ID NO: 355380 - DNA, 19 bp, Homo sapiens
  siRNA target sequence for LOC51054 (NM_015899.1,1541-1559).
gggtttttgcgttagcttt

SEQ ID NO: 355381 - DNA, 19 bp, Homo sapiens
  siRNA target sequence for LOC51054 (NM_015899.1,1542-1560).
ggtttttgcgttagcttta

SEQ ID NO: 355382 - DNA, 19 bp, Homo sapiens
  siRNA target sequence for LOC51054 (NM_015899.1,1593-1611).
cgcgttaaccgtaaaggaa

SEQ ID NO: 355383 - DNA, 19 bp, Homo sapiens
  siRNA target sequence for LOC51054 (NM_015899.1,1693-1711).
gccatactggacgctttat

SEQ ID NO: 355384 - DNA, 19 bp, Homo sapiens
  siRNA target sequence for NUDT13 (NM_015901.3,61-79).
cctgtattgtggaatagct

SEQ ID NO: 355385 - DNA, 19 bp, Homo sapiens
  siRNA target sequence for NUDT13 (NM_015901.3,62-80).
ctgtattgtggaatagctt

SEQ ID NO: 355386 - DNA, 19 bp, Homo sapiens
  siRNA target sequence for NUDT13 (NM_015901.3,129-147).
ctaagacacggtatttatt

SEQ ID NO: 355387 - DNA, 19 bp, Homo sapiens
  siRNA target sequence for NUDT13 (NM_015901.3,133-151).
gacacggtatttatttgaa

SEQ ID NO: 355388 - DNA, 19 bp, Homo sapiens
  siRNA target sequence for NUDT13 (NM_015901.3,233-251).
cagacttcagcacatcaat

SEQ ID NO: 355389 - DNA, 19 bp, Homo sapiens
  siRNA target sequence for NUDT13 (NM_015901.3,263-281).
cggcacagcctgttagagt

SEQ ID NO: 355390 - DNA, 19 bp, Homo sapiens
  siRNA target sequence for NUDT13 (NM_015901.3,264-282).
ggcacagcctgttagagtt

SEQ ID NO: 355391 - DNA, 19 bp, Homo sapiens
  siRNA target sequence for NUDT13 (NM_015901.3,329-347).
gattctgtgctgattggat

SEQ ID NO: 355392 - DNA, 19 bp, Homo sapiens
  siRNA target sequence for NUDT13 (NM_015901.3,389-407).
ctggatagctccttttcca

SEQ ID NO: 355393 - DNA, 19 bp, Homo sapiens
  siRNA target sequence for NUDT13 (NM_015901.3,391-409).
ggatagctccttttccata

SEQ ID NO: 355394 - DNA, 19 bp, Homo sapiens
  siRNA target sequence for NUDT13 (NM_015901.3,392-410).
gatagctccttttccataa

SEQ ID NO: 355395 - DNA, 19 bp, Homo sapiens
  siRNA target sequence for NUDT13 (NM_015901.3,445-463).
gctcaaggggtctttcatt

SEQ ID NO: 355396 - DNA, 19 bp, Homo sapiens
  siRNA target sequence for NUDT13 (NM_015901.3,471-489).
gaaaggcactctttcaact

SEQ ID NO: 355397 - DNA, 19 bp, Homo sapiens
  siRNA target sequence for NUDT13 (NM_015901.3,475-493).
ggcactctttcaactcaat

SEQ ID NO: 355398 - DNA, 19 bp, Homo sapiens
  siRNA target sequence for NUDT13 (NM_015901.3,540-558).
ggcatgatgctcatcagtt

SEQ ID NO: 355399 - DNA, 19 bp, Homo sapiens
  siRNA target sequence for NUDT13 (NM_015901.3,611-629).
gtgtgcccttccaataata

SEQ ID NO: 355400 - DNA, 19 bp, Homo sapiens
  siRNA target sequence for NUDT13 (NM_015901.3,613-631).
gtgcccttccaataatata

SEQ ID NO: 355401 - DNA, 19 bp, Homo sapiens
  siRNA target sequence for NUDT13 (NM_015901.3,617-635).
ccttccaataatataatct

SEQ ID NO: 355402 - DNA, 19 bp, Homo sapiens
  siRNA target sequence for NUDT13 (NM_015901.3,652-670).
ggtgaacttgagagaatta

SEQ ID NO: 355403 - DNA, 19 bp, Homo sapiens
  siRNA target sequence for NUDT13 (NM_015901.3,729-747).
cctatactcagcaacagaa

SEQ ID NO: 355404 - DNA, 19 bp, Homo sapiens
  siRNA target sequence for NUDT13 (NM_015901.3,763-781).
ctggctgccccctaagtta

SEQ ID NO: 355405 - DNA, 19 bp, Homo sapiens
  siRNA target sequence for NUDT13 (NM_015901.3,789-807).
cccaccaactgattaagga

SEQ ID NO: 355406 - DNA, 19 bp, Homo sapiens
  siRNA target sequence for LOC51057 (NM_015910.2,149-167).
cttctcacagacagtttta

SEQ ID NO: 355407 - DNA, 19 bp, Homo sapiens
  siRNA target sequence for LOC51057 (NM_015910.2,152-170).
ctcacagacagttttatca

SEQ ID NO: 355408 - DNA, 19 bp, Homo sapiens
  siRNA target sequence for LOC51057 (NM_015910.2,227-245).
gagtcttctgatgtaaaca

SEQ ID NO: 355409 - DNA, 19 bp, Homo sapiens
  siRNA target sequence for LOC51057 (NM_015910.2,316-334).
gacaacagagcgacatcta

SEQ ID NO: 355410 - DNA, 19 bp, Homo sapiens
  siRNA target sequence for LOC51057 (NM_015910.2,321-339).
cagagcgacatctagctat

SEQ ID NO: 355411 - DNA, 19 bp, Homo sapiens
  siRNA target sequence for LOC51057 (NM_015910.2,553-571).
ggagcactccgtaagtgta

SEQ ID NO: 355412 - DNA, 19 bp, Homo sapiens
  siRNA target sequence for LOC51057 (NM_015910.2,559-577).
ctccgtaagtgtagacaaa

SEQ ID NO: 355413 - DNA, 19 bp, Homo sapiens
  siRNA target sequence for LOC51057 (NM_015910.2,586-604).
ggctgacagctgcatctat

SEQ ID NO: 355414 - DNA, 19 bp, Homo sapiens
  siRNA target sequence for LOC51057 (NM_015910.2,590-608).
gacagctgcatctatgaat

SEQ ID NO: 355415 - DNA, 19 bp, Homo sapiens
  siRNA target sequence for LOC51057 (NM_015910.2,609-627).
gcattcggaataaaatcca

SEQ ID NO: 355416 - DNA, 19 bp, Homo sapiens
  siRNA target sequence for LOC51057 (NM_015910.2,634-652).
gtcagtcaccagaatacca

SEQ ID NO: 355417 - DNA, 19 bp, Homo sapiens
  siRNA target sequence for LOC51057 (NM_015910.2,643-661).
cagaataccactaaagtca

SEQ ID NO: 355418 - DNA, 19 bp, Homo sapiens
  siRNA target sequence for LOC51057 (NM_015910.2,645-663).
gaataccactaaagtcaaa

SEQ ID NO: 355419 - DNA, 19 bp, Homo sapiens
  siRNA target sequence for LOC51057 (NM_015910.2,675-693).
gctgcaggaatgttactga

SEQ ID NO: 355420 - DNA, 19 bp, Homo sapiens
  siRNA target sequence for LOC51057 (NM_015910.2,676-694).
ctgcaggaatgttactgaa

SEQ ID NO: 355421 - DNA, 19 bp, Homo sapiens
  siRNA target sequence for LOC51057 (NM_015910.2,723-741).
cttcgctaattctttatga

SEQ ID NO: 355422 - DNA, 19 bp, Homo sapiens
  siRNA target sequence for LOC51057 (NM_015910.2,727-745).
gctaattctttatgaaact

SEQ ID NO: 355423 - DNA, 19 bp, Homo sapiens
  siRNA target sequence for LOC51057 (NM_015910.2,839-857).
caaggggagttgcaaattt

SEQ ID NO: 355424 - DNA, 19 bp, Homo sapiens
  siRNA target sequence for LOC51057 (NM_015910.2,845-863).
gagttgcaaatttttgata

SEQ ID NO: 355425 - DNA, 19 bp, Homo sapiens
  siRNA target sequence for LOC51057 (NM_015910.2,866-884).
gctctatcccctattaaca

SEQ ID NO: 355426 - DNA, 19 bp, Homo sapiens
  siRNA target sequence for LOC51057 (NM_015910.2,912-930).
ccagggagactctgcaatt

SEQ ID NO: 355427 - DNA, 19 bp, Homo sapiens
  siRNA target sequence for LOC51057 (NM_015910.2,1011-1029).
gtagtgatatctatgatct

SEQ ID NO: 355428 - DNA, 19 bp, Homo sapiens
  siRNA target sequence for LOC51057 (NM_015910.2,1098-1116).
gacagctgggcctgataga

SEQ ID NO: 355429 - DNA, 19 bp, Homo sapiens
  siRNA target sequence for LOC51057 (NM_015910.2,1145-1163).
gagatctatgaggcaataa

SEQ ID NO: 355430 - DNA, 19 bp, Homo sapiens
  siRNA target sequence for LOC51057 (NM_015910.2,1215-1233).
gcatgagcgccattgtaaa

SEQ ID NO: 355431 - DNA, 19 bp, Homo sapiens
  siRNA target sequence for LOC51057 (NM_015910.2,1324-1342).
ggattccactatattggaa

SEQ ID NO: 355432 - DNA, 19 bp, Homo sapiens
  siRNA target sequence for LOC51057 (NM_015910.2,1325-1343).
gattccactatattggaat

SEQ ID NO: 355433 - DNA, 19 bp, Homo sapiens
  siRNA target sequence for LOC51057 (NM_015910.2,1393-1411).
caggtaccagaggtttgaa

SEQ ID NO: 355434 - DNA, 19 bp, Homo sapiens
  siRNA target sequence for LOC51057 (NM_015910.2,1439-1457).
ggtgctcgtgacctcttta

SEQ ID NO: 355435 - DNA, 19 bp, Homo sapiens
  siRNA target sequence for LOC51057 (NM_015910.2,1445-1463).
cgtgacctctttatggata

SEQ ID NO: 355436 - DNA, 19 bp, Homo sapiens
  siRNA target sequence for LOC51057 (NM_015910.2,1446-1464).
gtgacctctttatggatat

SEQ ID NO: 355437 - DNA, 19 bp, Homo sapiens
  siRNA target sequence for LOC51057 (NM_015910.2,1466-1484).
cattaccttgcactagata

SEQ ID NO: 355438 - DNA, 19 bp, Homo sapiens
  siRNA target sequence for LOC51057 (NM_015910.2,1476-1494).
cactagataaaggtgaatt

SEQ ID NO: 355439 - DNA, 19 bp, Homo sapiens
  siRNA target sequence for LOC51057 (NM_015910.2,1529-1547).
gacattgatgcagaatcaa

SEQ ID NO: 355440 - DNA, 19 bp, Homo sapiens
  siRNA target sequence for LOC51057 (NM_015910.2,1531-1549).
cattgatgcagaatcaata

SEQ ID NO: 355441 - DNA, 19 bp, Homo sapiens
  siRNA target sequence for LOC51057 (NM_015910.2,1582-1600).
cagaggggatatgctaaat

SEQ ID NO: 355442 - DNA, 19 bp, Homo sapiens
  siRNA target sequence for LOC51057 (NM_015910.2,1584-1602).
gaggggatatgctaaatga

SEQ ID NO: 355443 - DNA, 19 bp, Homo sapiens
  siRNA target sequence for LOC51057 (NM_015910.2,1594-1612).
gctaaatgaagcatttatt

SEQ ID NO: 355444 - DNA, 19 bp, Homo sapiens
  siRNA target sequence for LOC51057 (NM_015910.2,1671-1689).
gcccaacccacagacatat

SEQ ID NO: 355445 - DNA, 19 bp, Homo sapiens
  siRNA target sequence for LOC51057 (NM_015910.2,1672-1690).
cccaacccacagacatatt

SEQ ID NO: 355446 - DNA, 19 bp, Homo sapiens
  siRNA target sequence for LOC51057 (NM_015910.2,1685-1703).
catattttacaacaaagaa

SEQ ID NO: 355447 - DNA, 19 bp, Homo sapiens
  siRNA target sequence for LOC51057 (NM_015910.2,1719-1737).
ctaacagacaaataattga

SEQ ID NO: 355448 - DNA, 19 bp, Homo sapiens
  siRNA target sequence for LOC51057 (NM_015910.2,1770-1788).
ctggatttttgatgactaa

SEQ ID NO: 355449 - DNA, 19 bp, Homo sapiens
  siRNA target sequence for LOC51057 (NM_015910.2,1772-1790).
ggatttttgatgactaata

SEQ ID NO: 355450 - DNA, 19 bp, Homo sapiens
  siRNA target sequence for LOC51057 (NM_015910.2,1783-1801).
gactaatacctgtaatgca

SEQ ID NO: 355451 - DNA, 19 bp, Homo sapiens
  siRNA target sequence for LOC51057 (NM_015910.2,1857-1875).
ctctcaaaatgattcactt

SEQ ID NO: 355452 - DNA, 19 bp, Homo sapiens
  siRNA target sequence for LOC51059 (NM_015912.2,358-376).
ggatcttgctctcaacttt

SEQ ID NO: 355453 - DNA, 19 bp, Homo sapiens
  siRNA target sequence for LOC51059 (NM_015912.2,412-430).
cccctggtggagatagttt

SEQ ID NO: 355454 - DNA, 19 bp, Homo sapiens
  siRNA target sequence for LOC51059 (NM_015912.2,414-432).
cctggtggagatagtttta

SEQ ID NO: 355455 - DNA, 19 bp, Homo sapiens
  siRNA target sequence for LOC51059 (NM_015912.2,554-572).
ccaaaggtcttaatttaaa

SEQ ID NO: 355456 - DNA, 19 bp, Homo sapiens
  siRNA target sequence for LOC51059 (NM_015912.2,581-599).
gcgtcatagcacttgaaaa

SEQ ID NO: 355457 - DNA, 19 bp, Homo sapiens
  siRNA target sequence for LOC51059 (NM_015912.2,641-659).
caaagggcatgcctaaaga

SEQ ID NO: 355458 - DNA, 19 bp, Homo sapiens
  siRNA target sequence for LOC51059 (NM_015912.2,800-818).
gcggttcaccttgcattat

SEQ ID NO: 355459 - DNA, 19 bp, Homo sapiens
  siRNA target sequence for LOC51059 (NM_015912.2,803-821).
gttcaccttgcattatgga

SEQ ID NO: 355460 - DNA, 19 bp, Homo sapiens
  siRNA target sequence for LOC51059 (NM_015912.2,819-837).
ggatgacacagcatttaat

SEQ ID NO: 355461 - DNA, 19 bp, Homo sapiens
  siRNA target sequence for LOC51059 (NM_015912.2,851-869).
ccttcccggaggctaaaca

SEQ ID NO: 355462 - DNA, 19 bp, Homo sapiens
  siRNA target sequence for LOC51059 (NM_015912.2,852-870).
cttcccggaggctaaacat

SEQ ID NO: 355463 - DNA, 19 bp, Homo sapiens
  siRNA target sequence for LOC51059 (NM_015912.2,895-913).
gtgacccattccgttcatt

SEQ ID NO: 355464 - DNA, 19 bp, Homo sapiens
  siRNA target sequence for LOC51059 (NM_015912.2,905-923).
ccgttcattcccaggtttt

SEQ ID NO: 355465 - DNA, 19 bp, Homo sapiens
  siRNA target sequence for LOC51059 (NM_015912.2,1012-1030).
gtggaggttgtgaacttat

SEQ ID NO: 355466 - DNA, 19 bp, Homo sapiens
  siRNA target sequence for LOC51059 (NM_015912.2,1284-1302).
cagacctccggctggtaaa

SEQ ID NO: 355467 - DNA, 19 bp, Homo sapiens
  siRNA target sequence for LOC51059 (NM_015912.2,1288-1306).
cctccggctggtaaagact

SEQ ID NO: 355468 - DNA, 19 bp, Homo sapiens
  siRNA target sequence for LOC51059 (NM_015912.2,1289-1307).
ctccggctggtaaagactt

SEQ ID NO: 355469 - DNA, 19 bp, Homo sapiens
  siRNA target sequence for LOC51059 (NM_015912.2,1292-1310).
cggctggtaaagactttca

SEQ ID NO: 355470 - DNA, 19 bp, Homo sapiens
  siRNA target sequence for LOC51059 (NM_015912.2,1294-1312).
gctggtaaagactttcata

SEQ ID NO: 355471 - DNA, 19 bp, Homo sapiens
  siRNA target sequence for LOC51059 (NM_015912.2,1320-1338).
ggctccctggaggaaaact

SEQ ID NO: 355472 - DNA, 19 bp, Homo sapiens
  siRNA target sequence for LOC51063 (NM_015916.3,532-550).
ccctgatcgcagagaactt

SEQ ID NO: 355473 - DNA, 19 bp, Homo sapiens
  siRNA target sequence for LOC51063 (NM_015916.3,894-912).
cgtggtgaggcttatgtct

SEQ ID NO: 355474 - DNA, 19 bp, Homo sapiens
  siRNA target sequence for LOC51063 (NM_015916.3,1071-1089).
gagtcccagctctttggat

SEQ ID NO: 355475 - DNA, 19 bp, Homo sapiens
  siRNA target sequence for LOC51063 (NM_015916.3,1129-1147).
ccaagtgcctcaagcatta

SEQ ID NO: 355476 - DNA, 19 bp, Homo sapiens
  siRNA target sequence for LOC51063 (NM_015916.3,1288-1306).
cgctcaacaaggatgatga

SEQ ID NO: 355477 - DNA, 19 bp, Homo sapiens
  siRNA target sequence for LOC51063 (NM_015916.3,1363-1381).
ccatcaccggcgtctactt

SEQ ID NO: 355478 - DNA, 19 bp, Homo sapiens
  siRNA target sequence for POP5 (NM_015918.3,145-163).
ccagggtgcacggaacttt

SEQ ID NO: 355479 - DNA, 19 bp, Homo sapiens
  siRNA target sequence for POP5 (NM_015918.3,185-203).
cggcttcgcggttcgatat

SEQ ID NO: 355480 - DNA, 19 bp, Homo sapiens
  siRNA target sequence for POP5 (NM_015918.3,187-205).
gcttcgcggttcgatatct

SEQ ID NO: 355481 - DNA, 19 bp, Homo sapiens
  siRNA target sequence for POP5 (NM_015918.3,191-209).
cgcggttcgatatctcaat

SEQ ID NO: 355482 - DNA, 19 bp, Homo sapiens
  siRNA target sequence for POP5 (NM_015918.3,227-245).
gctacttcgatgcagaaaa

SEQ ID NO: 355483 - DNA, 19 bp, Homo sapiens
  siRNA target sequence for POP5 (NM_015918.3,231-249).
cttcgatgcagaaaagaat

SEQ ID NO: 355484 - DNA, 19 bp, Homo sapiens
  siRNA target sequence for POP5 (NM_015918.3,234-252).
cgatgcagaaaagaattct

SEQ ID NO: 355485 - DNA, 19 bp, Homo sapiens
  siRNA target sequence for POP5 (NM_015918.3,341-359).
gggaggtacaataagaaca

SEQ ID NO: 355486 - DNA, 19 bp, Homo sapiens
  siRNA target sequence for POP5 (NM_015918.3,358-376).
catgtcagaagttcctaat

SEQ ID NO: 355487 - DNA, 19 bp, Homo sapiens
  siRNA target sequence for POP5 (NM_015918.3,410-428).
gcagaactgcactgatgaa

SEQ ID NO: 355488 - DNA, 19 bp, Homo sapiens
  siRNA target sequence for POP5 (NM_015918.3,460-478).
caagaagctgcttattaga

SEQ ID NO: 355489 - DNA, 19 bp, Homo sapiens
  siRNA target sequence for C6orf82 (NM_015921.1,276-294).
gtggcctcccgccttttgt

SEQ ID NO: 355490 - DNA, 19 bp, Homo sapiens
  siRNA target sequence for C6orf82 (NM_015921.1,483-501).
ctcatccctcagattacat

SEQ ID NO: 355491 - DNA, 19 bp, Homo sapiens
  siRNA target sequence for C6orf82 (NM_015921.1,540-558).
gaggtgctgatgatgatta

SEQ ID NO: 355492 - DNA, 19 bp, Homo sapiens
  siRNA target sequence for C6orf82 (NM_015921.1,621-639).
gtggccgaggtaattgcat

SEQ ID NO: 355493 - DNA, 19 bp, Homo sapiens
  siRNA target sequence for ZSIG11 (NM_015926.3,533-551).
ctccatcgctgtctactat

SEQ ID NO: 355494 - DNA, 19 bp, Homo sapiens
  siRNA target sequence for ZSIG11 (NM_015926.3,828-846).
caggaagaccagatccatt

SEQ ID NO: 355495 - DNA, 19 bp, Homo sapiens
  siRNA target sequence for C13orf12 (NM_015932.2,89-107).
gacttggatctgagctaaa

SEQ ID NO: 355496 - DNA, 19 bp, Homo sapiens
  siRNA target sequence for C13orf12 (NM_015932.2,98-116).
ctgagctaaaggacagtat

SEQ ID NO: 355497 - DNA, 19 bp, Homo sapiens
  siRNA target sequence for C13orf12 (NM_015932.2,108-126).
ggacagtattccagttact

SEQ ID NO: 355498 - DNA, 19 bp, Homo sapiens
  siRNA target sequence for C13orf12 (NM_015932.2,160-178).
gatcttcttcggaaaggtt

SEQ ID NO: 355499 - DNA, 19 bp, Homo sapiens
  siRNA target sequence for C13orf12 (NM_015932.2,205-223).
cctagtcatccccttgaat

SEQ ID NO: 355500 - DNA, 19 bp, Homo sapiens
  siRNA target sequence for C13orf12 (NM_015932.2,206-224).
ctagtcatccccttgaatt

SEQ ID NO: 355501 - DNA, 19 bp, Homo sapiens
  siRNA target sequence for C13orf12 (NM_015932.2,278-296).
gaaacattcagggtctatt

SEQ ID NO: 355502 - DNA, 19 bp, Homo sapiens
  siRNA target sequence for C13orf12 (NM_015932.2,292-310).
ctatttgctccgctaaaat

SEQ ID NO: 355503 - DNA, 19 bp, Homo sapiens
  siRNA target sequence for C13orf12 (NM_015932.2,298-316).
gctccgctaaaattacaga

SEQ ID NO: 355504 - DNA, 19 bp, Homo sapiens
  siRNA target sequence for C13orf12 (NM_015932.2,339-357).
ggttcagcgtcttccattt

SEQ ID NO: 355505 - DNA, 19 bp, Homo sapiens
  siRNA target sequence for C13orf12 (NM_015932.2,358-376).
ctttcaagctcaaatcttt

SEQ ID NO: 355506 - DNA, 19 bp, Homo sapiens
  siRNA target sequence for C13orf12 (NM_015932.2,362-380).
caagctcaaatctttcact

SEQ ID NO: 355507 - DNA, 19 bp, Homo sapiens
  siRNA target sequence for C13orf12 (NM_015932.2,392-410).
ggggtaatgatgagactat

SEQ ID NO: 355508 - DNA, 19 bp, Homo sapiens
  siRNA target sequence for C13orf12 (NM_015932.2,393-411).
gggtaatgatgagactatt

SEQ ID NO: 355509 - DNA, 19 bp, Homo sapiens
  siRNA target sequence for C13orf12 (NM_015932.2,407-425).
ctattggatttgaggatat

SEQ ID NO: 355510 - DNA, 19 bp, Homo sapiens
  siRNA target sequence for C13orf12 (NM_015932.2,437-455).
catcacaaagcgaagtcat

SEQ ID NO: 355511 - DNA, 19 bp, Homo sapiens
  siRNA target sequence for PIGT (NM_015937.2,105-123).
gcctgcgggaggaacttgt

SEQ ID NO: 355512 - DNA, 19 bp, Homo sapiens
  siRNA target sequence for PIGT (NM_015937.2,200-218).
gaaggagtgtcccattaca

SEQ ID NO: 355513 - DNA, 19 bp, Homo sapiens
  siRNA target sequence for PIGT (NM_015937.2,242-260).
cagctgatctccaagtatt

SEQ ID NO: 355514 - DNA, 19 bp, Homo sapiens
  siRNA target sequence for PIGT (NM_015937.2,244-262).
gctgatctccaagtattct

SEQ ID NO: 355515 - DNA, 19 bp, Homo sapiens
  siRNA target sequence for PIGT (NM_015937.2,247-265).
gatctccaagtattctcta

SEQ ID NO: 355516 - DNA, 19 bp, Homo sapiens
  siRNA target sequence for PIGT (NM_015937.2,377-395).
gtcactgatgtggataaat

SEQ ID NO: 355517 - DNA, 19 bp, Homo sapiens
  siRNA target sequence for PIGT (NM_015937.2,435-453).
gcgcctctctcaacttcat

SEQ ID NO: 355518 - DNA, 19 bp, Homo sapiens
  siRNA target sequence for PIGT (NM_015937.2,741-759).
ccctgtcagttgtatttga

SEQ ID NO: 355519 - DNA, 19 bp, Homo sapiens
  siRNA target sequence for PIGT (NM_015937.2,742-760).
cctgtcagttgtatttgat

SEQ ID NO: 355520 - DNA, 19 bp, Homo sapiens
  siRNA target sequence for PIGT (NM_015937.2,915-933).
ccccgaccactacatatca

SEQ ID NO: 355521 - DNA, 19 bp, Homo sapiens
  siRNA target sequence for PIGT (NM_015937.2,955-973).
gaagacctatgccatctat

SEQ ID NO: 355522 - DNA, 19 bp, Homo sapiens
  siRNA target sequence for PIGT (NM_015937.2,1332-1350).
cagtcaccaaggtttccat

SEQ ID NO: 355523 - DNA, 19 bp, Homo sapiens
  siRNA target sequence for PIGT (NM_015937.2,1387-1405).
cacgccagatcctaaccat

SEQ ID NO: 355524 - DNA, 19 bp, Homo sapiens
  siRNA target sequence for PIGT (NM_015937.2,1398-1416).
ctaaccatggcttctatgt

SEQ ID NO: 355525 - DNA, 19 bp, Homo sapiens
  siRNA target sequence for PIGT (NM_015937.2,1515-1533).
ctgatggctctaactactt

SEQ ID NO: 355526 - DNA, 19 bp, Homo sapiens
  siRNA target sequence for CGI-12 (NM_015942.3,83-101).
ctttgtcagcccaacagat

SEQ ID NO: 355527 - DNA, 19 bp, Homo sapiens
  siRNA target sequence for CGI-12 (NM_015942.3,97-115).
cagatacccagatggttta

SEQ ID NO: 355528 - DNA, 19 bp, Homo sapiens
  siRNA target sequence for CGI-12 (NM_015942.3,148-166).
gcacaactcacaaaacgtt

SEQ ID NO: 355529 - DNA, 19 bp, Homo sapiens
  siRNA target sequence for CGI-12 (NM_015942.3,149-167).
cacaactcacaaaacgttt

SEQ ID NO: 355530 - DNA, 19 bp, Homo sapiens
  siRNA target sequence for CGI-12 (NM_015942.3,156-174).
cacaaaacgttttactaga

SEQ ID NO: 355531 - DNA, 19 bp, Homo sapiens
  siRNA target sequence for CGI-12 (NM_015942.3,263-281).
ggacttcctccttatggaa

SEQ ID NO: 355532 - DNA, 19 bp, Homo sapiens
  siRNA target sequence for CGI-12 (NM_015942.3,264-282).
gacttcctccttatggaat

SEQ ID NO: 355533 - DNA, 19 bp, Homo sapiens
  siRNA target sequence for CGI-12 (NM_015942.3,289-307).
cagtctactagctcaagta

SEQ ID NO: 355534 - DNA, 19 bp, Homo sapiens
  siRNA target sequence for CGI-12 (NM_015942.3,291-309).
gtctactagctcaagtagt

SEQ ID NO: 355535 - DNA, 19 bp, Homo sapiens
  siRNA target sequence for CGI-12 (NM_015942.3,517-535).
cgagactatgtggatcatt

SEQ ID NO: 355536 - DNA, 19 bp, Homo sapiens
  siRNA target sequence for CGI-12 (NM_015942.3,559-577).
cttctaggcgtggatttgt

SEQ ID NO: 355537 - DNA, 19 bp, Homo sapiens
  siRNA target sequence for CGI-12 (NM_015942.3,567-585).
cgtggatttgtccaagata

SEQ ID NO: 355538 - DNA, 19 bp, Homo sapiens
  siRNA target sequence for CGI-12 (NM_015942.3,570-588).
ggatttgtccaagatagaa

SEQ ID NO: 355539 - DNA, 19 bp, Homo sapiens
  siRNA target sequence for CGI-12 (NM_015942.3,672-690).
gggtatagaggataaccaa

SEQ ID NO: 355540 - DNA, 19 bp, Homo sapiens
  siRNA target sequence for CGI-12 (NM_015942.3,693-711).
gggagcattcctgacaaaa

SEQ ID NO: 355541 - DNA, 19 bp, Homo sapiens
  siRNA target sequence for CGI-12 (NM_015942.3,757-775).
gtggcttatctgcattcaa

SEQ ID NO: 355542 - DNA, 19 bp, Homo sapiens
  siRNA target sequence for CGI-12 (NM_015942.3,853-871).
gataacagattgggatttt

SEQ ID NO: 355543 - DNA, 19 bp, Homo sapiens
  siRNA target sequence for CGI-12 (NM_015942.3,947-965).
gtctggaacccgtgaaaga

SEQ ID NO: 355544 - DNA, 19 bp, Homo sapiens
  siRNA target sequence for CGI-12 (NM_015942.3,955-973).
cccgtgaaagaaaatatga

SEQ ID NO: 355545 - DNA, 19 bp, Homo sapiens
  siRNA target sequence for CGI-12 (NM_015942.3,956-974).
ccgtgaaagaaaatatgaa

SEQ ID NO: 355546 - DNA, 19 bp, Homo sapiens
  siRNA target sequence for CGI-12 (NM_015942.3,972-990).
gaaggtttatcgtcttgaa

SEQ ID NO: 355547 - DNA, 19 bp, Homo sapiens
  siRNA target sequence for CGI-12 (NM_015942.3,975-993).
ggtttatcgtcttgaactt

SEQ ID NO: 355548 - DNA, 19 bp, Homo sapiens
  siRNA target sequence for CGI-12 (NM_015942.3,982-1000).
cgtcttgaacttggtttta

SEQ ID NO: 355549 - DNA, 19 bp, Homo sapiens
  siRNA target sequence for CGI-12 (NM_015942.3,983-1001).
gtcttgaacttggttttaa

SEQ ID NO: 355550 - DNA, 19 bp, Homo sapiens
  siRNA target sequence for CGI-12 (NM_015942.3,994-1012).
ggttttaaacataacgaaa

SEQ ID NO: 355551 - DNA, 19 bp, Homo sapiens
  siRNA target sequence for CGI-12 (NM_015942.3,1009-1027).
gaaattcaacatatgatca

SEQ ID NO: 355552 - DNA, 19 bp, Homo sapiens
  siRNA target sequence for CGI-12 (NM_015942.3,1066-1084).
cttaccgagacgtttgatt

SEQ ID NO: 355553 - DNA, 19 bp, Homo sapiens
  siRNA target sequence for CGI-12 (NM_015942.3,1081-1099).
gattttgtgcacaatgtga

SEQ ID NO: 355554 - DNA, 19 bp, Homo sapiens
  siRNA target sequence for CGI-12 (NM_015942.3,1131-1149).
cccacaggtatttaataca

SEQ ID NO: 355555 - DNA, 19 bp, Homo sapiens
  siRNA target sequence for CGI-12 (NM_015942.3,1151-1169).
ggctgtttaaggtcaaaga

SEQ ID NO: 355556 - DNA, 19 bp, Homo sapiens
  siRNA target sequence for CGI-12 (NM_015942.3,1152-1170).
gctgtttaaggtcaaagaa

SEQ ID NO: 355557 - DNA, 19 bp, Homo sapiens
  siRNA target sequence for CGI-12 (NM_015942.3,1179-1197).
gtttcttacctatttagga

SEQ ID NO: 355558 - DNA, 19 bp, Homo sapiens
  siRNA target sequence for CGI-12 (NM_015942.3,1239-1257).
ggacaaactagtatctatt

SEQ ID NO: 355559 - DNA, 19 bp, Homo sapiens
  siRNA target sequence for CGI-12 (NM_015942.3,1281-1299).
gattgccaaagcatcagta

SEQ ID NO: 355560 - DNA, 19 bp, Homo sapiens
  siRNA target sequence for CGI-12 (NM_015942.3,1292-1310).
catcagtacaggactttga

SEQ ID NO: 355561 - DNA, 19 bp, Homo sapiens
  siRNA target sequence for SLC35B3 (NM_015948.2,455-473).
caatggatctcaagttcaa

SEQ ID NO: 355562 - DNA, 19 bp, Homo sapiens
  siRNA target sequence for SLC35B3 (NM_015948.2,460-478).
gatctcaagttcaacaatt

SEQ ID NO: 355563 - DNA, 19 bp, Homo sapiens
  siRNA target sequence for SLC35B3 (NM_015948.2,463-481).
ctcaagttcaacaattcca

SEQ ID NO: 355564 - DNA, 19 bp, Homo sapiens
  siRNA target sequence for SLC35B3 (NM_015948.2,559-577).
gtacttggcatgaatctca

SEQ ID NO: 355565 - DNA, 19 bp, Homo sapiens
  siRNA target sequence for SLC35B3 (NM_015948.2,613-631).
gttgctggagtttttgtat

SEQ ID NO: 355566 - DNA, 19 bp, Homo sapiens
  siRNA target sequence for SLC35B3 (NM_015948.2,647-665).
ggtatttacaggaattaat

SEQ ID NO: 355567 - DNA, 19 bp, Homo sapiens
  siRNA target sequence for SLC35B3 (NM_015948.2,712-730).
gtgcagtttgccttttact

SEQ ID NO: 355568 - DNA, 19 bp, Homo sapiens
  siRNA target sequence for SLC35B3 (NM_015948.2,731-749).
ccatatttggcctaataga

SEQ ID NO: 355569 - DNA, 19 bp, Homo sapiens
  siRNA target sequence for SLC35B3 (NM_015948.2,784-802).
ccaggaaaaacctacatga

SEQ ID NO: 355570 - DNA, 19 bp, Homo sapiens
  siRNA target sequence for SLC35B3 (NM_015948.2,794-812).
cctacatgataatagcttt

SEQ ID NO: 355571 - DNA, 19 bp, Homo sapiens
  siRNA target sequence for SLC35B3 (NM_015948.2,798-816).
catgataatagcttttcta

SEQ ID NO: 355572 - DNA, 19 bp, Homo sapiens
  siRNA target sequence for SLC35B3 (NM_015948.2,822-840).
gggtactatggggttatca

SEQ ID NO: 355573 - DNA, 19 bp, Homo sapiens
  siRNA target sequence for SLC35B3 (NM_015948.2,885-903).
caagtgctgcaaattgatt

SEQ ID NO: 355574 - DNA, 19 bp, Homo sapiens
  siRNA target sequence for SLC35B3 (NM_015948.2,912-930).
gctaggaggagtttttatt

SEQ ID NO: 355575 - DNA, 19 bp, Homo sapiens
  siRNA target sequence for SLC35B3 (NM_015948.2,958-976).
gtgtctgctgccatatgta

SEQ ID NO: 355576 - DNA, 19 bp, Homo sapiens
  siRNA target sequence for SLC35B3 (NM_015948.2,982-1000).
cttggcctgatatggttta

SEQ ID NO: 355577 - DNA, 19 bp, Homo sapiens
  siRNA target sequence for SLC35B3 (NM_015948.2,1038-1056).
gacgggtgtggtgcttatt

SEQ ID NO: 355578 - DNA, 19 bp, Homo sapiens
  siRNA target sequence for SLC35B3 (NM_015948.2,1080-1098).
cgtcattggaaatgttcaa

SEQ ID NO: 355579 - DNA, 19 bp, Homo sapiens
  siRNA target sequence for SLC35B3 (NM_015948.2,1124-1142).
cttctaattctgaaatggt

SEQ ID NO: 355580 - DNA, 19 bp, Homo sapiens
  siRNA target sequence for SLC35B3 (NM_015948.2,1135-1153).
gaaatggtattgtattcgt

SEQ ID NO: 355581 - DNA, 19 bp, Homo sapiens
  siRNA target sequence for SLC35B3 (NM_015948.2,1140-1158).
ggtattgtattcgtattca

SEQ ID NO: 355582 - DNA, 19 bp, Homo sapiens
  siRNA target sequence for SLC35B3 (NM_015948.2,1151-1169).
cgtattcaattggttttgt

SEQ ID NO: 355583 - DNA, 19 bp, Homo sapiens
  siRNA target sequence for SLC35B3 (NM_015948.2,1188-1206).
gacatgcactagtggatta

SEQ ID NO: 355584 - DNA, 19 bp, Homo sapiens
  siRNA target sequence for SLC35B3 (NM_015948.2,1237-1255).
ccagttcggacctatggtt

SEQ ID NO: 355585 - DNA, 19 bp, Homo sapiens
  siRNA target sequence for SLC35B3 (NM_015948.2,1238-1256).
cagttcggacctatggtta

SEQ ID NO: 355586 - DNA, 19 bp, Homo sapiens
  siRNA target sequence for SLC35B3 (NM_015948.2,1272-1290).
cctcactggatattttgga

SEQ ID NO: 355587 - DNA, 19 bp, Homo sapiens
  siRNA target sequence for SLC35B3 (NM_015948.2,1328-1346).
cacttattgctgtaacagt

SEQ ID NO: 355588 - DNA, 19 bp, Homo sapiens
  siRNA target sequence for SLC35B3 (NM_015948.2,1363-1381).
gcaatgaccattgtacttt

SEQ ID NO: 355589 - DNA, 19 bp, Homo sapiens
  siRNA target sequence for SLC35B3 (NM_015948.2,1368-1386).
gaccattgtactttcgttt

SEQ ID NO: 355590 - DNA, 19 bp, Homo sapiens
  siRNA target sequence for SLC35B3 (NM_015948.2,1370-1388).
ccattgtactttcgtttat

SEQ ID NO: 355591 - DNA, 19 bp, Homo sapiens
  siRNA target sequence for SLC35B3 (NM_015948.2,1371-1389).
cattgtactttcgtttata

SEQ ID NO: 355592 - DNA, 19 bp, Homo sapiens
  siRNA target sequence for SLC35B3 (NM_015948.2,1382-1400).
cgtttatattctttgctaa

SEQ ID NO: 355593 - DNA, 19 bp, Homo sapiens
  siRNA target sequence for SLC35B3 (NM_015948.2,1403-1421).
cattcacgtttcagtatgt

SEQ ID NO: 355594 - DNA, 19 bp, Homo sapiens
  siRNA target sequence for SLC35B3 (NM_015948.2,1424-1442).
ggtctggtttgttagttgt

SEQ ID NO: 355595 - DNA, 19 bp, Homo sapiens
  siRNA target sequence for SLC35B3 (NM_015948.2,1492-1510).
ctaccatcactgtatgatt

SEQ ID NO: 355596 - DNA, 19 bp, Homo sapiens
  siRNA target sequence for SLC35B3 (NM_015948.2,1495-1513).
ccatcactgtatgatttga

SEQ ID NO: 355597 - DNA, 19 bp, Homo sapiens
  siRNA target sequence for C7orf20 (NM_015949.2,453-471).
gagcgcgtgacctttgtgt

SEQ ID NO: 355598 - DNA, 19 bp, Homo sapiens
  siRNA target sequence for C7orf20 (NM_015949.2,682-700).
cccaggccgtgctacagtt

SEQ ID NO: 355599 - DNA, 19 bp, Homo sapiens
  siRNA target sequence for NOSIP (NM_015953.3,233-251).
ctatgggacccagaacatt

SEQ ID NO: 355600 - DNA, 19 bp, Homo sapiens
  siRNA target sequence for NOSIP (NM_015953.3,592-610).
gtgtgggtcctccaagtaa

SEQ ID NO: 355601 - DNA, 19 bp, Homo sapiens
  siRNA target sequence for MMRP19 (NM_015957.1,162-180).
ccagaactttgcaaacagt

SEQ ID NO: 355602 - DNA, 19 bp, Homo sapiens
  siRNA target sequence for MMRP19 (NM_015957.1,231-249).
catggcgatgaaatctaca

SEQ ID NO: 355603 - DNA, 19 bp, Homo sapiens
  siRNA target sequence for MMRP19 (NM_015957.1,262-280).
gagtgcaaaaggaacgaat

SEQ ID NO: 355604 - DNA, 19 bp, Homo sapiens
  siRNA target sequence for MMRP19 (NM_015957.1,291-309).
gacatgtttgtttgtgata

SEQ ID NO: 355605 - DNA, 19 bp, Homo sapiens
  siRNA target sequence for MMRP19 (NM_015957.1,293-311).
catgtttgtttgtgatata

SEQ ID NO: 355606 - DNA, 19 bp, Homo sapiens
  siRNA target sequence for MMRP19 (NM_015957.1,337-355).
cgccatcgaagaagctaaa

SEQ ID NO: 355607 - DNA, 19 bp, Homo sapiens
  siRNA target sequence for MMRP19 (NM_015957.1,361-379).
gccagtgtactcctctttt

SEQ ID NO: 355608 - DNA, 19 bp, Homo sapiens
  siRNA target sequence for MMRP19 (NM_015957.1,383-401).
gaatgcttacacaatgaga

SEQ ID NO: 355609 - DNA, 19 bp, Homo sapiens
  siRNA target sequence for MMRP19 (NM_015957.1,416-434).
gattcatacccactctaaa

SEQ ID NO: 355610 - DNA, 19 bp, Homo sapiens
  siRNA target sequence for MMRP19 (NM_015957.1,462-480).
ccaggacgggagtttaaaa

SEQ ID NO: 355611 - DNA, 19 bp, Homo sapiens
  siRNA target sequence for MMRP19 (NM_015957.1,463-481).
caggacgggagtttaaaat

SEQ ID NO: 355612 - DNA, 19 bp, Homo sapiens
  siRNA target sequence for MMRP19 (NM_015957.1,465-483).
ggacgggagtttaaaatta

SEQ ID NO: 355613 - DNA, 19 bp, Homo sapiens
  siRNA target sequence for MMRP19 (NM_015957.1,469-487).
gggagtttaaaattacaca

SEQ ID NO: 355614 - DNA, 19 bp, Homo sapiens
  siRNA target sequence for MMRP19 (NM_015957.1,517-535).
gtacttccggagggtatta

SEQ ID NO: 355615 - DNA, 19 bp, Homo sapiens
  siRNA target sequence for MMRP19 (NM_015957.1,523-541).
ccggagggtattatagata

SEQ ID NO: 355616 - DNA, 19 bp, Homo sapiens
  siRNA target sequence for MMRP19 (NM_015957.1,524-542).
cggagggtattatagatat

SEQ ID NO: 355617 - DNA, 19 bp, Homo sapiens
  siRNA target sequence for MMRP19 (NM_015957.1,538-556).
gatatgatgatatgttagt

SEQ ID NO: 355618 - DNA, 19 bp, Homo sapiens
  siRNA target sequence for MMRP19 (NM_015957.1,555-573).
gtggtacccattattgaga

SEQ ID NO: 355619 - DNA, 19 bp, Homo sapiens
  siRNA target sequence for MMRP19 (NM_015957.1,557-575).
ggtacccattattgagaat

SEQ ID NO: 355620 - DNA, 19 bp, Homo sapiens
  siRNA target sequence for MMRP19 (NM_015957.1,558-576).
gtacccattattgagaata

SEQ ID NO: 355621 - DNA, 19 bp, Homo sapiens
  siRNA target sequence for MMRP19 (NM_015957.1,604-622).
gaatggctcatgcaatgaa

SEQ ID NO: 355622 - DNA, 19 bp, Homo sapiens
  siRNA target sequence for MMRP19 (NM_015957.1,703-721).
ccatgtgtgagtgttatga

SEQ ID NO: 355623 - DNA, 19 bp, Homo sapiens
  siRNA target sequence for MMRP19 (NM_015957.1,732-750).
gatattgccgtatcaatga

SEQ ID NO: 355624 - DNA, 19 bp, Homo sapiens
  siRNA target sequence for MMRP19 (NM_015957.1,740-758).
cgtatcaatgaagaaagta

SEQ ID NO: 355625 - DNA, 19 bp, Homo sapiens
  siRNA target sequence for CGI-32 (NM_015960.1,120-138).
ctcctctgagcgaaaacga

SEQ ID NO: 355626 - DNA, 19 bp, Homo sapiens
  siRNA target sequence for CGI-32 (NM_015960.1,161-179).
ccggagcagcaaatggatt

SEQ ID NO: 355627 - DNA, 19 bp, Homo sapiens
  siRNA target sequence for CGI-32 (NM_015960.1,162-180).
cggagcagcaaatggattt

SEQ ID NO: 355628 - DNA, 19 bp, Homo sapiens
  siRNA target sequence for CGI-32 (NM_015960.1,164-182).
gagcagcaaatggatttct

SEQ ID NO: 355629 - DNA, 19 bp, Homo sapiens
  siRNA target sequence for CGI-32 (NM_015960.1,186-204).
ggaagtttgtgttgattca

SEQ ID NO: 355630 - DNA, 19 bp, Homo sapiens
  siRNA target sequence for CGI-32 (NM_015960.1,236-254).
gtgctgatcggattgaatt

SEQ ID NO: 355631 - DNA, 19 bp, Homo sapiens
  siRNA target sequence for CGI-32 (NM_015960.1,238-256).
gctgatcggattgaattat

SEQ ID NO: 355632 - DNA, 19 bp, Homo sapiens
  siRNA target sequence for CGI-32 (NM_015960.1,241-259).
gatcggattgaattatgtt

SEQ ID NO: 355633 - DNA, 19 bp, Homo sapiens
  siRNA target sequence for CGI-32 (NM_015960.1,325-343).
cagatcccagtttttgtga

SEQ ID NO: 355634 - DNA, 19 bp, Homo sapiens
  siRNA target sequence for CGI-32 (NM_015960.1,351-369).
gccacggggaggtgatttt

SEQ ID NO: 355635 - DNA, 19 bp, Homo sapiens
  siRNA target sequence for CGI-32 (NM_015960.1,357-375).
gggaggtgattttttgtat

SEQ ID NO: 355636 - DNA, 19 bp, Homo sapiens
  siRNA target sequence for CGI-32 (NM_015960.1,372-390).
gtattcagatcgtgaaatt

SEQ ID NO: 355637 - DNA, 19 bp, Homo sapiens
  siRNA target sequence for CGI-32 (NM_015960.1,444-462).
ggtttttggggcattgact

SEQ ID NO: 355638 - DNA, 19 bp, Homo sapiens
  siRNA target sequence for C14orf111 (NM_015962.1,33-51).
gaccatgaagcgaatgctt

SEQ ID NO: 355639 - DNA, 19 bp, Homo sapiens
  siRNA target sequence for C14orf111 (NM_015962.1,559-577).
gaacggatgccagatgatt

SEQ ID NO: 355640 - DNA, 19 bp, Homo sapiens
  siRNA target sequence for THAP4 (NM_015963.3,679-697).
gataagagtggcatttcta

SEQ ID NO: 355641 - DNA, 19 bp, Homo sapiens
  siRNA target sequence for THAP4 (NM_015963.3,718-736).
ggatctggggcgtgcaaat

SEQ ID NO: 355642 - DNA, 19 bp, Homo sapiens
  siRNA target sequence for THAP4 (NM_015963.3,719-737).
gatctggggcgtgcaaatt

SEQ ID NO: 355643 - DNA, 19 bp, Homo sapiens
  siRNA target sequence for THAP4 (NM_015963.3,722-740).
ctggggcgtgcaaatttat

SEQ ID NO: 355644 - DNA, 19 bp, Homo sapiens
  siRNA target sequence for THAP4 (NM_015963.3,746-764).
cacttcattcgtacagttt

SEQ ID NO: 355645 - DNA, 19 bp, Homo sapiens
  siRNA target sequence for THAP4 (NM_015963.3,1671-1689).
gttcaggctgaattctgaa

SEQ ID NO: 355646 - DNA, 19 bp, Homo sapiens
  siRNA target sequence for CGI-38 (NM_015964.1,282-300).
ctcgggtcatcaactatga

SEQ ID NO: 355647 - DNA, 19 bp, Homo sapiens
  siRNA target sequence for CGI-38 (NM_015964.1,323-341).
gagctggcgaccaagagat

SEQ ID NO: 355648 - DNA, 19 bp, Homo sapiens
  siRNA target sequence for CGI-38 (NM_015964.1,408-426).
ccaatgtgggcgtcactaa

SEQ ID NO: 355649 - DNA, 19 bp, Homo sapiens
  siRNA target sequence for CGI-38 (NM_015964.1,409-427).
caatgtgggcgtcactaaa

SEQ ID NO: 355650 - DNA, 19 bp, Homo sapiens
  siRNA target sequence for CGI-38 (NM_015964.1,413-431).
gtgggcgtcactaaagcaa

SEQ ID NO: 355651 - DNA, 19 bp, Homo sapiens
  siRNA target sequence for CGI-38 (NM_015964.1,415-433).
gggcgtcactaaagcaaaa

SEQ ID NO: 355652 - DNA, 19 bp, Homo sapiens
  siRNA target sequence for CGI-38 (NM_015964.1,416-434).
ggcgtcactaaagcaaaaa

SEQ ID NO: 355653 - DNA, 19 bp, Homo sapiens
  siRNA target sequence for SDBCAG84 (NM_015966.2,100-118).
gatgcctaccccaagactt

SEQ ID NO: 355654 - DNA, 19 bp, Homo sapiens
  siRNA target sequence for SDBCAG84 (NM_015966.2,151-169).
gccaccgtgaccattgtca

SEQ ID NO: 355655 - DNA, 19 bp, Homo sapiens
  siRNA target sequence for SDBCAG84 (NM_015966.2,263-281).
gagataaactgaagatcaa

SEQ ID NO: 355656 - DNA, 19 bp, Homo sapiens
  siRNA target sequence for SDBCAG84 (NM_015966.2,265-283).
gataaactgaagatcaaca

SEQ ID NO: 355657 - DNA, 19 bp, Homo sapiens
  siRNA target sequence for SDBCAG84 (NM_015966.2,279-297).
caacatcgatgtacttttt

SEQ ID NO: 355658 - DNA, 19 bp, Homo sapiens
  siRNA target sequence for SDBCAG84 (NM_015966.2,311-329).
gtgcctatctgagtattga

SEQ ID NO: 355659 - DNA, 19 bp, Homo sapiens
  siRNA target sequence for SDBCAG84 (NM_015966.2,514-532).
gaggcagaagatatcaagt

SEQ ID NO: 355660 - DNA, 19 bp, Homo sapiens
  siRNA target sequence for SDBCAG84 (NM_015966.2,523-541).
gatatcaagtgctgtaaca

SEQ ID NO: 355661 - DNA, 19 bp, Homo sapiens
  siRNA target sequence for SDBCAG84 (NM_015966.2,585-603).
cttcaagaacccagatact

SEQ ID NO: 355662 - DNA, 19 bp, Homo sapiens
  siRNA target sequence for SDBCAG84 (NM_015966.2,588-606).
caagaacccagatactatt

SEQ ID NO: 355663 - DNA, 19 bp, Homo sapiens
  siRNA target sequence for SDBCAG84 (NM_015966.2,676-694).
ggcttcttggaagtcaata

SEQ ID NO: 355664 - DNA, 19 bp, Homo sapiens
  siRNA target sequence for SDBCAG84 (NM_015966.2,677-695).
gcttcttggaagtcaataa

SEQ ID NO: 355665 - DNA, 19 bp, Homo sapiens
  siRNA target sequence for SDBCAG84 (NM_015966.2,949-967).
gtactgaggacaaatcagt

SEQ ID NO: 355666 - DNA, 19 bp, Homo sapiens
  siRNA target sequence for SDBCAG84 (NM_015966.2,971-989).
ctgtgaccagacatgagaa

SEQ ID NO: 355667 - DNA, 19 bp, Homo sapiens
  siRNA target sequence for POLR1D (NM_015972.1,235-253).
gaccataccctaggaaatt

SEQ ID NO: 355668 - DNA, 19 bp, Homo sapiens
  siRNA target sequence for POLR1D (NM_015972.1,254-272).
ctctacgttacatgatcat

SEQ ID NO: 355669 - DNA, 19 bp, Homo sapiens
  siRNA target sequence for POLR1D (NM_015972.1,413-431).
gccaacatgtgcttgacaa

SEQ ID NO: 355670 - DNA, 19 bp, Homo sapiens
  siRNA target sequence for POLR1D (NM_015972.1,440-458).
ccagcataaaggactataa

SEQ ID NO: 355671 - DNA, 19 bp, Homo sapiens
  siRNA target sequence for CGI-40 (NM_015996.1,217-235).
gcgagctggtcaacatcta

SEQ ID NO: 355672 - DNA, 19 bp, Homo sapiens
  siRNA target sequence for CGI-40 (NM_015996.1,286-304).
ctgtgaacgtcctgaacaa

SEQ ID NO: 355673 - DNA, 19 bp, Homo sapiens
  siRNA target sequence for CGI-40 (NM_015996.1,396-414).
cgcaagtacctctaccaaa

SEQ ID NO: 355674 - DNA, 19 bp, Homo sapiens
  siRNA target sequence for CGI-40 (NM_015996.1,397-415).
gcaagtacctctaccaaaa

SEQ ID NO: 355675 - DNA, 19 bp, Homo sapiens
  siRNA target sequence for CGI-40 (NM_015996.1,398-416).
caagtacctctaccaaaaa

SEQ ID NO: 355676 - DNA, 19 bp, Homo sapiens
  siRNA target sequence for CGI-40 (NM_015996.1,529-547).
gccgcatggacgattttgt

SEQ ID NO: 355677 - DNA, 19 bp, Homo sapiens
  siRNA target sequence for CGI-40 (NM_015996.1,561-579).
gagcagttcagcttcaata

SEQ ID NO: 355678 - DNA, 19 bp, Homo sapiens
  siRNA target sequence for CGI-40 (NM_015996.1,588-606).
gcacagccccagtacttca

SEQ ID NO: 355679 - DNA, 19 bp, Homo sapiens
  siRNA target sequence for CGI-40 (NM_015996.1,597-615).
cagtacttcaagtatgagt

SEQ ID NO: 355680 - DNA, 19 bp, Homo sapiens
  siRNA target sequence for CGI-40 (NM_015996.1,625-643).
gcgtggactcggtaattgt

SEQ ID NO: 355681 - DNA, 19 bp, Homo sapiens
  siRNA target sequence for CGI-40 (NM_015996.1,627-645).
gtggactcggtaattgtca

SEQ ID NO: 355682 - DNA, 19 bp, Homo sapiens
  siRNA target sequence for CGI-40 (NM_015996.1,778-796).
ccgtacagcgcaaagactt

SEQ ID NO: 355683 - DNA, 19 bp, Homo sapiens
  siRNA target sequence for CGI-40 (NM_015996.1,869-887).
ctaccccttcgcagaagat

SEQ ID NO: 355684 - DNA, 19 bp, Homo sapiens
  siRNA target sequence for CGI-40 (NM_015996.1,872-890).
ccccttcgcagaagatgaa

SEQ ID NO: 355685 - DNA, 19 bp, Homo sapiens
  siRNA target sequence for CGI-40 (NM_015996.1,900-918).
caagggcaccgccagaaaa

SEQ ID NO: 355686 - DNA, 19 bp, Homo sapiens
  siRNA target sequence for CGI-40 (NM_015996.1,963-981).
gtcagtgggatgctctttt

SEQ ID NO: 355687 - DNA, 19 bp, Homo sapiens
  siRNA target sequence for CGI-40 (NM_015996.1,1107-1125).
cgagtcctggctgattctt

SEQ ID NO: 355688 - DNA, 19 bp, Homo sapiens
  siRNA target sequence for CGI-40 (NM_015996.1,1129-1147).
ctggcagttccccttatga

SEQ ID NO: 355689 - DNA, 19 bp, Homo sapiens
  siRNA target sequence for CGI-40 (NM_015996.1,1138-1156).
ccccttatgagggttacaa

SEQ ID NO: 355690 - DNA, 19 bp, Homo sapiens
  siRNA target sequence for CGI-40 (NM_015996.1,1157-1175).
ctatggctcctttgagaat

SEQ ID NO: 355691 - DNA, 19 bp, Homo sapiens
  siRNA target sequence for CGI-40 (NM_015996.1,1213-1231).
gcactggggacctctctta

SEQ ID NO: 355692 - DNA, 19 bp, Homo sapiens
  siRNA target sequence for CGI-40 (NM_015996.1,1368-1386).
gatgactacgacacattga

SEQ ID NO: 355693 - DNA, 19 bp, Homo sapiens
  siRNA target sequence for CGI-40 (NM_015996.1,1391-1409).
catcgattccgacaagaat

SEQ ID NO: 355694 - DNA, 19 bp, Homo sapiens
  siRNA target sequence for CGI-40 (NM_015996.1,1395-1413).
gattccgacaagaatgtca

SEQ ID NO: 355695 - DNA, 19 bp, Homo sapiens
  siRNA target sequence for CGI-40 (NM_015996.1,1410-1428).
gtcattcgcaccaagcaat

SEQ ID NO: 355696 - DNA, 19 bp, Homo sapiens
  siRNA target sequence for CGI-40 (NM_015996.1,1420-1438).
ccaagcaatacctctatgt

SEQ ID NO: 355697 - DNA, 19 bp, Homo sapiens
  siRNA target sequence for CGI-40 (NM_015996.1,1464-1482).
cgtgttctgcggaaaaagt

SEQ ID NO: 355698 - DNA, 19 bp, Homo sapiens
  siRNA target sequence for CGI-40 (NM_015996.1,1851-1869).
gtgtgccccaactatacca

SEQ ID NO: 355699 - DNA, 19 bp, Homo sapiens
  siRNA target sequence for CGI-40 (NM_015996.1,1853-1871).
gtgccccaactataccaat

SEQ ID NO: 355700 - DNA, 19 bp, Homo sapiens
  siRNA target sequence for CGI-40 (NM_015996.1,1858-1876).
ccaactataccaatttcca

SEQ ID NO: 355701 - DNA, 19 bp, Homo sapiens
  siRNA target sequence for CGI-40 (NM_015996.1,2088-2106).
ctcagcacgcagctctatt

SEQ ID NO: 355702 - DNA, 19 bp, Homo sapiens
  siRNA target sequence for CGI-40 (NM_015996.1,2092-2110).
gcacgcagctctattacat

SEQ ID NO: 355703 - DNA, 19 bp, Homo sapiens
  siRNA target sequence for CGI-40 (NM_015996.1,2317-2335).
gcaacctgctcctttactt

SEQ ID NO: 355704 - DNA, 19 bp, Homo sapiens
  siRNA target sequence for CGI-40 (NM_015996.1,2422-2440).
ggggcttcgcgctcttctt

SEQ ID NO: 355705 - DNA, 19 bp, Homo sapiens
  siRNA target sequence for CGI-41 (NM_015997.2,716-734).
gatgcctacatcatcgaat

SEQ ID NO: 355706 - DNA, 19 bp, Homo sapiens
  siRNA target sequence for CGI-41 (NM_015997.2,719-737).
gcctacatcatcgaatttt

SEQ ID NO: 355707 - DNA, 19 bp, Homo sapiens
  siRNA target sequence for CGI-41 (NM_015997.2,720-738).
cctacatcatcgaattttt

SEQ ID NO: 355708 - DNA, 19 bp, Homo sapiens
  siRNA target sequence for CGI-41 (NM_015997.2,923-941).
cggatgcctggctttcaga

SEQ ID NO: 355709 - DNA, 19 bp, Homo sapiens
  siRNA target sequence for CGI-41 (NM_015997.2,970-988).
ccagagctcccgactaaca

SEQ ID NO: 355710 - DNA, 19 bp, Homo sapiens
  siRNA target sequence for CGI-41 (NM_015997.2,1077-1095).
gctgcacccaggttgtaga

SEQ ID NO: 355711 - DNA, 19 bp, Homo sapiens
  siRNA target sequence for CGI-41 (NM_015997.2,1466-1484).
gtgggctgctgctacatga

SEQ ID NO: 355712 - DNA, 19 bp, Homo sapiens
  siRNA target sequence for CGI-41 (NM_015997.2,1876-1894).
ggtggagacgcttattcta

SEQ ID NO: 355713 - DNA, 19 bp, Homo sapiens
  siRNA target sequence for CGI-48 (NM_016001.1,367-385).
gaggcccgagggttcaaga

SEQ ID NO: 355714 - DNA, 19 bp, Homo sapiens
  siRNA target sequence for CGI-48 (NM_016001.1,491-509).
ggttgacatgatgaacaat

SEQ ID NO: 355715 - DNA, 19 bp, Homo sapiens
  siRNA target sequence for CGI-48 (NM_016001.1,530-548).
gaaaaatgctagtgaaagt

SEQ ID NO: 355716 - DNA, 19 bp, Homo sapiens
  siRNA target sequence for CGI-48 (NM_016001.1,547-565).
gtaaactttcgaaagacaa

SEQ ID NO: 355717 - DNA, 19 bp, Homo sapiens
  siRNA target sequence for CGI-48 (NM_016001.1,556-574).
cgaaagacaaccttaaaaa

SEQ ID NO: 355718 - DNA, 19 bp, Homo sapiens
  siRNA target sequence for CGI-48 (NM_016001.1,629-647).
gactactaagcggaaaaca

SEQ ID NO: 355719 - DNA, 19 bp, Homo sapiens
  siRNA target sequence for CGI-48 (NM_016001.1,729-747).
ccaagaggaatcttgaaga

SEQ ID NO: 355720 - DNA, 19 bp, Homo sapiens
  siRNA target sequence for CGI-48 (NM_016001.1,816-834).
cccggtgcacagattgtga

SEQ ID NO: 355721 - DNA, 19 bp, Homo sapiens
  siRNA target sequence for CGI-48 (NM_016001.1,836-854).
ggttgctggattagataat

SEQ ID NO: 355722 - DNA, 19 bp, Homo sapiens
  siRNA target sequence for CGI-48 (NM_016001.1,849-867).
gataatgctgtatcactat

SEQ ID NO: 355723 - DNA, 19 bp, Homo sapiens
  siRNA target sequence for CGI-48 (NM_016001.1,900-918).
cagagcatctatttggaaa

SEQ ID NO: 355724 - DNA, 19 bp, Homo sapiens
  siRNA target sequence for CGI-48 (NM_016001.1,935-953).
ggcttgttttagtgctaat

SEQ ID NO: 355725 - DNA, 19 bp, Homo sapiens
  siRNA target sequence for CGI-48 (NM_016001.1,980-998).
ccacagcaaggttctttat

SEQ ID NO: 355726 - DNA, 19 bp, Homo sapiens
  siRNA target sequence for CGI-48 (NM_016001.1,1010-1028).
gctggctggaaagttaatt

SEQ ID NO: 355727 - DNA, 19 bp, Homo sapiens
  siRNA target sequence for CGI-48 (NM_016001.1,1013-1031).
ggctggaaagttaattcct

SEQ ID NO: 355728 - DNA, 19 bp, Homo sapiens
  siRNA target sequence for CGI-48 (NM_016001.1,1093-1111).
ggtccttcttgctcataaa

SEQ ID NO: 355729 - DNA, 19 bp, Homo sapiens
  siRNA target sequence for CGI-48 (NM_016001.1,1199-1217).
cacattctcttcagatagt

SEQ ID NO: 355730 - DNA, 19 bp, Homo sapiens
  siRNA target sequence for CGI-48 (NM_016001.1,1276-1294).
ggaagtgccttaacagatt

SEQ ID NO: 355731 - DNA, 19 bp, Homo sapiens
  siRNA target sequence for CGI-48 (NM_016001.1,1302-1320).
gaaggcagtttatatggat

SEQ ID NO: 355732 - DNA, 19 bp, Homo sapiens
  siRNA target sequence for CGI-48 (NM_016001.1,1305-1323).
ggcagtttatatggattaa

SEQ ID NO: 355733 - DNA, 19 bp, Homo sapiens
  siRNA target sequence for CGI-48 (NM_016001.1,1309-1327).
gtttatatggattaagcat

SEQ ID NO: 355734 - DNA, 19 bp, Homo sapiens
  siRNA target sequence for CGI-48 (NM_016001.1,1372-1390).
gtggagtggtaaatatata

SEQ ID NO: 355735 - DNA, 19 bp, Homo sapiens
  siRNA target sequence for CGI-48 (NM_016001.1,1423-1441).
caaagccaataaaagctat

SEQ ID NO: 355736 - DNA, 19 bp, Homo sapiens
  siRNA target sequence for CGI-48 (NM_016001.1,1437-1455).
gctataatgaacttggtta

SEQ ID NO: 355737 - DNA, 19 bp, Homo sapiens
  siRNA target sequence for CGI-48 (NM_016001.1,1472-1490).
gaccttcaatcctactaca

SEQ ID NO: 355738 - DNA, 19 bp, Homo sapiens
  siRNA target sequence for CGI-48 (NM_016001.1,1475-1493).
cttcaatcctactacagaa

SEQ ID NO: 355739 - DNA, 19 bp, Homo sapiens
  siRNA target sequence for CGI-48 (NM_016001.1,1624-1642).
ctccgagaagtggatactt

SEQ ID NO: 355740 - DNA, 19 bp, Homo sapiens
  siRNA target sequence for CGI-49 (NM_016002.1,241-259).
ccagcctcgcttgatgaaa

SEQ ID NO: 355741 - DNA, 19 bp, Homo sapiens
  siRNA target sequence for CGI-49 (NM_016002.1,271-289).
gcaacagttgtcctcaatt

SEQ ID NO: 355742 - DNA, 19 bp, Homo sapiens
  siRNA target sequence for CGI-49 (NM_016002.1,285-303).
caattgcgtaggaccatat

SEQ ID NO: 355743 - DNA, 19 bp, Homo sapiens
  siRNA target sequence for CGI-49 (NM_016002.1,421-439).
gcagacaaaggggtttata

SEQ ID NO: 355744 - DNA, 19 bp, Homo sapiens
  siRNA target sequence for CGI-49 (NM_016002.1,424-442).
gacaaaggggtttatatca

SEQ ID NO: 355745 - DNA, 19 bp, Homo sapiens
  siRNA target sequence for CGI-49 (NM_016002.1,528-546).
ggaaagtttcctgactata

SEQ ID NO: 355746 - DNA, 19 bp, Homo sapiens
  siRNA target sequence for CGI-49 (NM_016002.1,561-579).
ggggttgagcattcatgat

SEQ ID NO: 355747 - DNA, 19 bp, Homo sapiens
  siRNA target sequence for CGI-49 (NM_016002.1,584-602).
cctggaagtcagcaattta

SEQ ID NO: 355748 - DNA, 19 bp, Homo sapiens
  siRNA target sequence for CGI-49 (NM_016002.1,585-603).
ctggaagtcagcaatttat

SEQ ID NO: 355749 - DNA, 19 bp, Homo sapiens
  siRNA target sequence for CGI-49 (NM_016002.1,588-606).
gaagtcagcaatttatggt

SEQ ID NO: 355750 - DNA, 19 bp, Homo sapiens
  siRNA target sequence for CGI-49 (NM_016002.1,591-609).
gtcagcaatttatggtttt

SEQ ID NO: 355751 - DNA, 19 bp, Homo sapiens
  siRNA target sequence for CGI-49 (NM_016002.1,610-628).
ggagatcagagtaatttga

SEQ ID NO: 355752 - DNA, 19 bp, Homo sapiens
  siRNA target sequence for CGI-49 (NM_016002.1,663-681).
cccgctcattggtccaaaa

SEQ ID NO: 355753 - DNA, 19 bp, Homo sapiens
  siRNA target sequence for CGI-49 (NM_016002.1,664-682).
ccgctcattggtccaaaat

SEQ ID NO: 355754 - DNA, 19 bp, Homo sapiens
  siRNA target sequence for CGI-49 (NM_016002.1,665-683).
cgctcattggtccaaaatt

SEQ ID NO: 355755 - DNA, 19 bp, Homo sapiens
  siRNA target sequence for CGI-49 (NM_016002.1,673-691).
ggtccaaaattgaagagaa

SEQ ID NO: 355756 - DNA, 19 bp, Homo sapiens
  siRNA target sequence for CGI-49 (NM_016002.1,704-722).
cttattgtcgggaactcaa

SEQ ID NO: 355757 - DNA, 19 bp, Homo sapiens
  siRNA target sequence for CGI-49 (NM_016002.1,715-733).
gaactcaaaggttattcca

SEQ ID NO: 355758 - DNA, 19 bp, Homo sapiens
  siRNA target sequence for CGI-49 (NM_016002.1,767-785).
ggaggactcaacgttactt

SEQ ID NO: 355759 - DNA, 19 bp, Homo sapiens
  siRNA target sequence for CGI-49 (NM_016002.1,770-788).
ggactcaacgttacttgta

SEQ ID NO: 355760 - DNA, 19 bp, Homo sapiens
  siRNA target sequence for CGI-49 (NM_016002.1,771-789).
gactcaacgttacttgtat

SEQ ID NO: 355761 - DNA, 19 bp, Homo sapiens
  siRNA target sequence for CGI-49 (NM_016002.1,773-791).
ctcaacgttacttgtatga

SEQ ID NO: 355762 - DNA, 19 bp, Homo sapiens
  siRNA target sequence for CGI-49 (NM_016002.1,775-793).
caacgttacttgtatgaaa

SEQ ID NO: 355763 - DNA, 19 bp, Homo sapiens
  siRNA target sequence for CGI-49 (NM_016002.1,778-796).
cgttacttgtatgaaaatt

SEQ ID NO: 355764 - DNA, 19 bp, Homo sapiens
  siRNA target sequence for CGI-49 (NM_016002.1,801-819).
ggaatcaccagttcagtat

SEQ ID NO: 355765 - DNA, 19 bp, Homo sapiens
  siRNA target sequence for CGI-49 (NM_016002.1,814-832).
cagtatgctgcgtatgtaa

SEQ ID NO: 355766 - DNA, 19 bp, Homo sapiens
  siRNA target sequence for CGI-49 (NM_016002.1,816-834).
gtatgctgcgtatgtaact

SEQ ID NO: 355767 - DNA, 19 bp, Homo sapiens
  siRNA target sequence for CGI-49 (NM_016002.1,841-859).
ggcatcacctctgttatta

SEQ ID NO: 355768 - DNA, 19 bp, Homo sapiens
  siRNA target sequence for CGI-49 (NM_016002.1,842-860).
gcatcacctctgttattaa

SEQ ID NO: 355769 - DNA, 19 bp, Homo sapiens
  siRNA target sequence for CGI-49 (NM_016002.1,911-929).
gaaggcaacttctcataaa

SEQ ID NO: 355770 - DNA, 19 bp, Homo sapiens
  siRNA target sequence for CGI-49 (NM_016002.1,914-932).
ggcaacttctcataaaatt

SEQ ID NO: 355771 - DNA, 19 bp, Homo sapiens
  siRNA target sequence for CGI-49 (NM_016002.1,945-963).
ctcctttggctatttttca

SEQ ID NO: 355772 - DNA, 19 bp, Homo sapiens
  siRNA target sequence for CGI-49 (NM_016002.1,998-1016).
cctcattcacgctgacatt

SEQ ID NO: 355773 - DNA, 19 bp, Homo sapiens
  siRNA target sequence for CGI-49 (NM_016002.1,1001-1019).
cattcacgctgacattctt

SEQ ID NO: 355774 - DNA, 19 bp, Homo sapiens
  siRNA target sequence for CGI-49 (NM_016002.1,1035-1053).
ccaaggcactggtacagat

SEQ ID NO: 355775 - DNA, 19 bp, Homo sapiens
  siRNA target sequence for CGI-49 (NM_016002.1,1111-1129).
gtggctacccccatagcta

SEQ ID NO: 355776 - DNA, 19 bp, Homo sapiens
  siRNA target sequence for CGI-49 (NM_016002.1,1142-1160).
ccatgactcttctaagtga

SEQ ID NO: 355777 - DNA, 19 bp, Homo sapiens
  siRNA target sequence for CGI-49 (NM_016002.1,1143-1161).
catgactcttctaagtgat

SEQ ID NO: 355778 - DNA, 19 bp, Homo sapiens
  siRNA target sequence for CGI-49 (NM_016002.1,1255-1273).
gagtttagtgttattagca

SEQ ID NO: 355779 - DNA, 19 bp, Homo sapiens
  siRNA target sequence for DKFZP434J154 (NM_016003.1,121-139).
caccccatgaccacatgtt

SEQ ID NO: 355780 - DNA, 19 bp, Homo sapiens
  siRNA target sequence for DKFZP434J154 (NM_016003.1,173-191).
cgcccaggcaggtgtttgt

SEQ ID NO: 355781 - DNA, 19 bp, Homo sapiens
  siRNA target sequence for DKFZP434J154 (NM_016003.1,231-249).
gatgttcacgcatgtactt

SEQ ID NO: 355782 - DNA, 19 bp, Homo sapiens
  siRNA target sequence for DKFZP434J154 (NM_016003.1,263-281).
cagccgatacggaagatgt

SEQ ID NO: 355783 - DNA, 19 bp, Homo sapiens
  siRNA target sequence for C20orf9 (NM_016004.1,57-75).
gctgcggagtaccattctt

SEQ ID NO: 355784 - DNA, 19 bp, Homo sapiens
  siRNA target sequence for C20orf9 (NM_016004.1,58-76).
ctgcggagtaccattcttt

SEQ ID NO: 355785 - DNA, 19 bp, Homo sapiens
  siRNA target sequence for C20orf9 (NM_016004.1,61-79).
cggagtaccattcttttca

SEQ ID NO: 355786 - DNA, 19 bp, Homo sapiens
  siRNA target sequence for C20orf9 (NM_016004.1,199-217).
ggagtaaaactgtggatta

SEQ ID NO: 355787 - DNA, 19 bp, Homo sapiens
  siRNA target sequence for C20orf9 (NM_016004.1,323-341).
ccagatttgacaccaatat

SEQ ID NO: 355788 - DNA, 19 bp, Homo sapiens
  siRNA target sequence for C20orf9 (NM_016004.1,326-344).
gatttgacaccaatattaa

SEQ ID NO: 355789 - DNA, 19 bp, Homo sapiens
  siRNA target sequence for C20orf9 (NM_016004.1,365-383).
gaatcatggttaataatga

SEQ ID NO: 355790 - DNA, 19 bp, Homo sapiens
  siRNA target sequence for C20orf9 (NM_016004.1,483-501).
ggctgtgctggcgatcatt

SEQ ID NO: 355791 - DNA, 19 bp, Homo sapiens
  siRNA target sequence for C20orf9 (NM_016004.1,535-553).
ctcacctttgtgtatcctt

SEQ ID NO: 355792 - DNA, 19 bp, Homo sapiens
  siRNA target sequence for C20orf9 (NM_016004.1,537-555).
cacctttgtgtatcctttt

SEQ ID NO: 355793 - DNA, 19 bp, Homo sapiens
  siRNA target sequence for C20orf9 (NM_016004.1,612-630).
ctgcttcccacttaacaga

SEQ ID NO: 355794 - DNA, 19 bp, Homo sapiens
  siRNA target sequence for C20orf9 (NM_016004.1,629-647).
gacccattttggctttcta

SEQ ID NO: 355795 - DNA, 19 bp, Homo sapiens
  siRNA target sequence for C20orf9 (NM_016004.1,640-658).
gctttctatcactcaaaga

SEQ ID NO: 355796 - DNA, 19 bp, Homo sapiens
  siRNA target sequence for C20orf9 (NM_016004.1,773-791).
caggagacatccacctaaa

SEQ ID NO: 355797 - DNA, 19 bp, Homo sapiens
  siRNA target sequence for C20orf9 (NM_016004.1,783-801).
ccacctaaaccagattgat

SEQ ID NO: 355798 - DNA, 19 bp, Homo sapiens
  siRNA target sequence for C20orf9 (NM_016004.1,812-830).
cagagatttctgactacat

SEQ ID NO: 355799 - DNA, 19 bp, Homo sapiens
  siRNA target sequence for C20orf9 (NM_016004.1,814-832).
gagatttctgactacatga

SEQ ID NO: 355800 - DNA, 19 bp, Homo sapiens
  siRNA target sequence for C20orf9 (NM_016004.1,892-910).
gagatcccaagggacttta

SEQ ID NO: 355801 - DNA, 19 bp, Homo sapiens
  siRNA target sequence for C20orf9 (NM_016004.1,976-994).
cacgagcagctaaatgtga

SEQ ID NO: 355802 - DNA, 19 bp, Homo sapiens
  siRNA target sequence for C20orf9 (NM_016004.1,978-996).
cgagcagctaaatgtgaaa

SEQ ID NO: 355803 - DNA, 19 bp, Homo sapiens
  siRNA target sequence for C20orf9 (NM_016004.1,981-999).
gcagctaaatgtgaaacat

SEQ ID NO: 355804 - DNA, 19 bp, Homo sapiens
  siRNA target sequence for C20orf9 (NM_016004.1,1047-1065).
ccttcagcctgcggttttt

SEQ ID NO: 355805 - DNA, 19 bp, Homo sapiens
  siRNA target sequence for C20orf9 (NM_016004.1,1091-1109).
ctcctcctctggagctatt

SEQ ID NO: 355806 - DNA, 19 bp, Homo sapiens
  siRNA target sequence for C20orf9 (NM_016004.1,1094-1112).
ctcctctggagctatttga

SEQ ID NO: 355807 - DNA, 19 bp, Homo sapiens
  siRNA target sequence for C20orf9 (NM_016004.1,1096-1114).
cctctggagctatttgatt

SEQ ID NO: 355808 - DNA, 19 bp, Homo sapiens
  siRNA target sequence for C20orf9 (NM_016004.1,1141-1159).
gcacggctggctcagatta

SEQ ID NO: 355809 - DNA, 19 bp, Homo sapiens
  siRNA target sequence for C20orf9 (NM_016004.1,1144-1162).
cggctggctcagattacca

SEQ ID NO: 355810 - DNA, 19 bp, Homo sapiens
  siRNA target sequence for C20orf9 (NM_016004.1,1145-1163).
ggctggctcagattaccaa

SEQ ID NO: 355811 - DNA, 19 bp, Homo sapiens
  siRNA target sequence for C20orf9 (NM_016004.1,1146-1164).
gctggctcagattaccaat

SEQ ID NO: 355812 - DNA, 19 bp, Homo sapiens
  siRNA target sequence for C20orf9 (NM_016004.1,1150-1168).
gctcagattaccaataagt

SEQ ID NO: 355813 - DNA, 19 bp, Homo sapiens
  siRNA target sequence for C20orf9 (NM_016004.1,1161-1179).
caataagtgtactgaagaa

SEQ ID NO: 355814 - DNA, 19 bp, Homo sapiens
  siRNA target sequence for C20orf9 (NM_016004.1,1200-1218).
gaagtgtggtgatattctt

SEQ ID NO: 355815 - DNA, 19 bp, Homo sapiens
  siRNA target sequence for C20orf9 (NM_016004.1,1321-1339).
gacatcgatacaagtgaaa

SEQ ID NO: 355816 - DNA, 19 bp, Homo sapiens
  siRNA target sequence for C20orf9 (NM_016004.1,1323-1341).
catcgatacaagtgaaaca

SEQ ID NO: 355817 - DNA, 19 bp, Homo sapiens
  siRNA target sequence for D2LIC (NM_016008.2,628-646).
ccggtacctctggtcataa

SEQ ID NO: 355818 - DNA, 19 bp, Homo sapiens
  siRNA target sequence for D2LIC (NM_016008.2,629-647).
cggtacctctggtcataat

SEQ ID NO: 355819 - DNA, 19 bp, Homo sapiens
  siRNA target sequence for D2LIC (NM_016008.2,630-648).
ggtacctctggtcataatt

SEQ ID NO: 355820 - DNA, 19 bp, Homo sapiens
  siRNA target sequence for D2LIC (NM_016008.2,704-722).
gcaagacacttcgatttgt

SEQ ID NO: 355821 - DNA, 19 bp, Homo sapiens
  siRNA target sequence for D2LIC (NM_016008.2,705-723).
caagacacttcgatttgtt

SEQ ID NO: 355822 - DNA, 19 bp, Homo sapiens
  siRNA target sequence for D2LIC (NM_016008.2,739-757).
gcatcattaatgtttacca

SEQ ID NO: 355823 - DNA, 19 bp, Homo sapiens
  siRNA target sequence for D2LIC (NM_016008.2,879-897).
ggattctttcggtcaaata

SEQ ID NO: 355824 - DNA, 19 bp, Homo sapiens
  siRNA target sequence for D2LIC (NM_016008.2,981-999).
gctctttccaccaaagagt

SEQ ID NO: 355825 - DNA, 19 bp, Homo sapiens
  siRNA target sequence for D2LIC (NM_016008.2,998-1016).
gtattaacacgctgaaaga

SEQ ID NO: 355826 - DNA, 19 bp, Homo sapiens
  siRNA target sequence for D2LIC (NM_016008.2,1132-1150).
caaatcgagcttgattctt

SEQ ID NO: 355827 - DNA, 19 bp, Homo sapiens
  siRNA target sequence for SH3GLB1 (NM_016009.2,229-247).
gaatgtaccaaaatatgga

SEQ ID NO: 355828 - DNA, 19 bp, Homo sapiens
  siRNA target sequence for SH3GLB1 (NM_016009.2,261-279).
gaaacaaactgaagtgtta

SEQ ID NO: 355829 - DNA, 19 bp, Homo sapiens
  siRNA target sequence for SH3GLB1 (NM_016009.2,340-358).
gctccaagtcgtataaaca

SEQ ID NO: 355830 - DNA, 19 bp, Homo sapiens
  siRNA target sequence for SH3GLB1 (NM_016009.2,372-390).
gggacaatatatgattgat

SEQ ID NO: 355831 - DNA, 19 bp, Homo sapiens
  siRNA target sequence for SH3GLB1 (NM_016009.2,424-442).
ggtaatgcccttattaaat

SEQ ID NO: 355832 - DNA, 19 bp, Homo sapiens
  siRNA target sequence for SH3GLB1 (NM_016009.2,470-488).
cagcagacagagaactgat

SEQ ID NO: 355833 - DNA, 19 bp, Homo sapiens
  siRNA target sequence for SH3GLB1 (NM_016009.2,490-508).
caaacgtcagccttaaatt

SEQ ID NO: 355834 - DNA, 19 bp, Homo sapiens
  siRNA target sequence for SH3GLB1 (NM_016009.2,515-533).
ctcctttaagaaactttat

SEQ ID NO: 355835 - DNA, 19 bp, Homo sapiens
  siRNA target sequence for SH3GLB1 (NM_016009.2,604-622).
gcaaaaacgagactaaaaa

SEQ ID NO: 355836 - DNA, 19 bp, Homo sapiens
  siRNA target sequence for SH3GLB1 (NM_016009.2,691-709).
cgtcaagcagagattacca

SEQ ID NO: 355837 - DNA, 19 bp, Homo sapiens
  siRNA target sequence for SH3GLB1 (NM_016009.2,751-769).
cttcgctgtctgaatgact

SEQ ID NO: 355838 - DNA, 19 bp, Homo sapiens
  siRNA target sequence for SH3GLB1 (NM_016009.2,796-814).
gcacagtgttaccagtata

SEQ ID NO: 355839 - DNA, 19 bp, Homo sapiens
  siRNA target sequence for SH3GLB1 (NM_016009.2,828-846).
gaaacaactgggaagtttt

SEQ ID NO: 355840 - DNA, 19 bp, Homo sapiens
  siRNA target sequence for SH3GLB1 (NM_016009.2,838-856).
ggaagttttccatccaatt

SEQ ID NO: 355841 - DNA, 19 bp, Homo sapiens
  siRNA target sequence for SH3GLB1 (NM_016009.2,848-866).
catccaattatcttagtaa

SEQ ID NO: 355842 - DNA, 19 bp, Homo sapiens
  siRNA target sequence for SH3GLB1 (NM_016009.2,851-869).
ccaattatcttagtaacaa

SEQ ID NO: 355843 - DNA, 19 bp, Homo sapiens
  siRNA target sequence for SH3GLB1 (NM_016009.2,885-903).
gacacctgtaccatcagtt

SEQ ID NO: 355844 - DNA, 19 bp, Homo sapiens
  siRNA target sequence for SH3GLB1 (NM_016009.2,887-905).
cacctgtaccatcagtttt

SEQ ID NO: 355845 - DNA, 19 bp, Homo sapiens
  siRNA target sequence for SH3GLB1 (NM_016009.2,892-910).
gtaccatcagttttaccaa

SEQ ID NO: 355846 - DNA, 19 bp, Homo sapiens
  siRNA target sequence for SH3GLB1 (NM_016009.2,938-956).
caacaagtggcctagtaat

SEQ ID NO: 355847 - DNA, 19 bp, Homo sapiens
  siRNA target sequence for SH3GLB1 (NM_016009.2,1013-1031).
gggttctctatgattatga

SEQ ID NO: 355848 - DNA, 19 bp, Homo sapiens
  siRNA target sequence for SH3GLB1 (NM_016009.2,1034-1052).
cagcaaacagtactgaatt

SEQ ID NO: 355849 - DNA, 19 bp, Homo sapiens
  siRNA target sequence for SH3GLB1 (NM_016009.2,1036-1054).
gcaaacagtactgaattat

SEQ ID NO: 355850 - DNA, 19 bp, Homo sapiens
  siRNA target sequence for SH3GLB1 (NM_016009.2,1041-1059).
cagtactgaattatcactt

SEQ ID NO: 355851 - DNA, 19 bp, Homo sapiens
  siRNA target sequence for CGI-62 (NM_016010.1,182-200).
ctaaaaaacggaagacttt

SEQ ID NO: 355852 - DNA, 19 bp, Homo sapiens
  siRNA target sequence for CGI-62 (NM_016010.1,190-208).
cggaagacttttgattcaa

SEQ ID NO: 355853 - DNA, 19 bp, Homo sapiens
  siRNA target sequence for CGI-62 (NM_016010.1,230-248).
ctgatattccaacagtaaa

SEQ ID NO: 355854 - DNA, 19 bp, Homo sapiens
  siRNA target sequence for CGI-62 (NM_016010.1,274-292).
ccaaagaaaccatctaatt

SEQ ID NO: 355855 - DNA, 19 bp, Homo sapiens
  siRNA target sequence for CGI-62 (NM_016010.1,310-328).
gaattcattgctaccataa

SEQ ID NO: 355856 - DNA, 19 bp, Homo sapiens
  siRNA target sequence for CGI-62 (NM_016010.1,332-350).
cagctaaaggccttgatca

SEQ ID NO: 355857 - DNA, 19 bp, Homo sapiens
  siRNA target sequence for CGI-62 (NM_016010.1,392-410).
cttcttatgatcctgatta

SEQ ID NO: 355858 - DNA, 19 bp, Homo sapiens
  siRNA target sequence for CGI-62 (NM_016010.1,428-446).
gtcagaggagattcaatga

SEQ ID NO: 355859 - DNA, 19 bp, Homo sapiens
  siRNA target sequence for CGI-62 (NM_016010.1,481-499).
gaacaggcagcacgtatta

SEQ ID NO: 355860 - DNA, 19 bp, Homo sapiens
  siRNA target sequence for CGI-62 (NM_016010.1,484-502).
caggcagcacgtattagta

SEQ ID NO: 355861 - DNA, 19 bp, Homo sapiens
  siRNA target sequence for CGI-62 (NM_016010.1,486-504).
ggcagcacgtattagtaat

SEQ ID NO: 355862 - DNA, 19 bp, Homo sapiens
  siRNA target sequence for CGI-62 (NM_016010.1,565-583).
ccacccgcacttaaaaagt

SEQ ID NO: 355863 - DNA, 19 bp, Homo sapiens
  siRNA target sequence for CGI-62 (NM_016010.1,568-586).
cccgcacttaaaaagtcaa

SEQ ID NO: 355864 - DNA, 19 bp, Homo sapiens
  siRNA target sequence for CGI-62 (NM_016010.1,569-587).
ccgcacttaaaaagtcaaa

SEQ ID NO: 355865 - DNA, 19 bp, Homo sapiens
  siRNA target sequence for CGI-62 (NM_016010.1,570-588).
cgcacttaaaaagtcaaat

SEQ ID NO: 355866 - DNA, 19 bp, Homo sapiens
  siRNA target sequence for CGI-62 (NM_016010.1,571-589).
gcacttaaaaagtcaaatt

SEQ ID NO: 355867 - DNA, 19 bp, Homo sapiens
  siRNA target sequence for CGI-62 (NM_016010.1,635-653).
gtggcgctggcaaaactgt

SEQ ID NO: 355868 - DNA, 19 bp, Homo sapiens
  siRNA target sequence for CGI-62 (NM_016010.1,639-657).
cgctggcaaaactgttgta

SEQ ID NO: 355869 - DNA, 19 bp, Homo sapiens
  siRNA target sequence for CGI-62 (NM_016010.1,670-688).
ggtaaagtgtcttcaagta

SEQ ID NO: 355870 - DNA, 19 bp, Homo sapiens
  siRNA target sequence for CGI-62 (NM_016010.1,766-784).
gtcaaaccccgaaattcca

SEQ ID NO: 355871 - DNA, 19 bp, Homo sapiens
  siRNA target sequence for CGI-62 (NM_016010.1,812-830).
ccccaggtgtgcttacaaa

SEQ ID NO: 355872 - DNA, 19 bp, Homo sapiens
  siRNA target sequence for CGI-62 (NM_016010.1,815-833).
caggtgtgcttacaaacaa

SEQ ID NO: 355873 - DNA, 19 bp, Homo sapiens
  siRNA target sequence for CGI-62 (NM_016010.1,817-835).
ggtgtgcttacaaacaaaa

SEQ ID NO: 355874 - DNA, 19 bp, Homo sapiens
  siRNA target sequence for CGI-62 (NM_016010.1,954-972).
ccatgagtgtgggactaaa

SEQ ID NO: 355875 - DNA, 19 bp, Homo sapiens
  siRNA target sequence for CGI-62 (NM_016010.1,955-973).
catgagtgtgggactaaat

SEQ ID NO: 355876 - DNA, 19 bp, Homo sapiens
  siRNA target sequence for CGI-62 (NM_016010.1,966-984).
gactaaataccctgtagaa

SEQ ID NO: 355877 - DNA, 19 bp, Homo sapiens
  siRNA target sequence for CGI-62 (NM_016010.1,1007-1025).
gtggcattcgaagaatgat

SEQ ID NO: 355878 - DNA, 19 bp, Homo sapiens
  siRNA target sequence for CGI-62 (NM_016010.1,1011-1029).
cattcgaagaatgattcta

SEQ ID NO: 355879 - DNA, 19 bp, Homo sapiens
  siRNA target sequence for LUC7L2 (NM_016019.1,26-44).
cgatgctggaccagttgat

SEQ ID NO: 355880 - DNA, 19 bp, Homo sapiens
  siRNA target sequence for LUC7L2 (NM_016019.1,54-72).
ccgggacggagatacaact

SEQ ID NO: 355881 - DNA, 19 bp, Homo sapiens
  siRNA target sequence for LUC7L2 (NM_016019.1,68-86).
caactcgtcaacgaatcaa

SEQ ID NO: 355882 - DNA, 19 bp, Homo sapiens
  siRNA target sequence for LUC7L2 (NM_016019.1,71-89).
ctcgtcaacgaatcaaatt

SEQ ID NO: 355883 - DNA, 19 bp, Homo sapiens
  siRNA target sequence for LUC7L2 (NM_016019.1,73-91).
cgtcaacgaatcaaattca

SEQ ID NO: 355884 - DNA, 19 bp, Homo sapiens
  siRNA target sequence for LUC7L2 (NM_016019.1,123-141).
caactgttgtcctcatgat

SEQ ID NO: 355885 - DNA, 19 bp, Homo sapiens
  siRNA target sequence for LUC7L2 (NM_016019.1,197-215).
ctttaagagcggattatga

SEQ ID NO: 355886 - DNA, 19 bp, Homo sapiens
  siRNA target sequence for LUC7L2 (NM_016019.1,309-327).
ggccaagaaaagattagca

SEQ ID NO: 355887 - DNA, 19 bp, Homo sapiens
  siRNA target sequence for LUC7L2 (NM_016019.1,368-386).
cagaacgtgttcatgagtt

SEQ ID NO: 355888 - DNA, 19 bp, Homo sapiens
  siRNA target sequence for LUC7L2 (NM_016019.1,370-388).
gaacgtgttcatgagttaa

SEQ ID NO: 355889 - DNA, 19 bp, Homo sapiens
  siRNA target sequence for LUC7L2 (NM_016019.1,510-528).
ggaagtttatcggaattct

SEQ ID NO: 355890 - DNA, 19 bp, Homo sapiens
  siRNA target sequence for LUC7L2 (NM_016019.1,511-529).
gaagtttatcggaattcta

SEQ ID NO: 355891 - DNA, 19 bp, Homo sapiens
  siRNA target sequence for LUC7L2 (NM_016019.1,642-660).
gcacctgggatttattgaa

SEQ ID NO: 355892 - DNA, 19 bp, Homo sapiens
  siRNA target sequence for LUC7L2 (NM_016019.1,645-663).
cctgggatttattgaaata

SEQ ID NO: 355893 - DNA, 19 bp, Homo sapiens
  siRNA target sequence for LUC7L2 (NM_016019.1,648-666).
gggatttattgaaataaga

SEQ ID NO: 355894 - DNA, 19 bp, Homo sapiens
  siRNA target sequence for LUC7L2 (NM_016019.1,870-888).
gagaactcgatccaaatct

SEQ ID NO: 355895 - DNA, 19 bp, Homo sapiens
  siRNA target sequence for LUC7L2 (NM_016019.1,958-976).
cggcacagttctagagata

SEQ ID NO: 355896 - DNA, 19 bp, Homo sapiens
  siRNA target sequence for LUC7L2 (NM_016019.1,1107-1125).
gtcctatgagagtgctaat

SEQ ID NO: 355897 - DNA, 19 bp, Homo sapiens
  siRNA target sequence for LUC7L2 (NM_016019.1,1177-1195).
ctaactagctgtgtacatt

SEQ ID NO: 355898 - DNA, 19 bp, Homo sapiens
  siRNA target sequence for APH-1A (NM_016022.1,150-168).
gccttcgcgcttttcttga

SEQ ID NO: 355899 - DNA, 19 bp, Homo sapiens
  siRNA target sequence for APH-1A (NM_016022.1,151-169).
ccttcgcgcttttcttgat

SEQ ID NO: 355900 - DNA, 19 bp, Homo sapiens
  siRNA target sequence for APH-1A (NM_016022.1,183-201).
gacccgcttcgcgttatca

SEQ ID NO: 355901 - DNA, 19 bp, Homo sapiens
  siRNA target sequence for APH-1A (NM_016022.1,204-222).
ctggtcgcaggggcatttt

SEQ ID NO: 355902 - DNA, 19 bp, Homo sapiens
  siRNA target sequence for APH-1A (NM_016022.1,207-225).
gtcgcaggggcatttttct

SEQ ID NO: 355903 - DNA, 19 bp, Homo sapiens
  siRNA target sequence for APH-1A (NM_016022.1,303-321).
cagtacggcctcctgattt

SEQ ID NO: 355904 - DNA, 19 bp, Homo sapiens
  siRNA target sequence for APH-1A (NM_016022.1,308-326).
cggcctcctgatttttggt

SEQ ID NO: 355905 - DNA, 19 bp, Homo sapiens
  siRNA target sequence for APH-1A (NM_016022.1,390-408).
gcagatgaggggttagcat

SEQ ID NO: 355906 - DNA, 19 bp, Homo sapiens
  siRNA target sequence for APH-1A (NM_016022.1,443-461).
ccgccagatggcctatgtt

SEQ ID NO: 355907 - DNA, 19 bp, Homo sapiens
  siRNA target sequence for APH-1A (NM_016022.1,444-462).
cgccagatggcctatgttt

SEQ ID NO: 355908 - DNA, 19 bp, Homo sapiens
  siRNA target sequence for APH-1A (NM_016022.1,466-484).
gtctctccttcggtatcat

SEQ ID NO: 355909 - DNA, 19 bp, Homo sapiens
  siRNA target sequence for APH-1A (NM_016022.1,490-508).
gtgtcttctctgttatcaa

SEQ ID NO: 355910 - DNA, 19 bp, Homo sapiens
  siRNA target sequence for APH-1A (NM_016022.1,492-510).
gtcttctctgttatcaata

SEQ ID NO: 355911 - DNA, 19 bp, Homo sapiens
  siRNA target sequence for APH-1A (NM_016022.1,552-570).
ggagactcaccctattact

SEQ ID NO: 355912 - DNA, 19 bp, Homo sapiens
  siRNA target sequence for APH-1A (NM_016022.1,553-571).
gagactcaccctattactt

SEQ ID NO: 355913 - DNA, 19 bp, Homo sapiens
  siRNA target sequence for APH-1A (NM_016022.1,799-817).
gagggtccctccgaagtat

SEQ ID NO: 355914 - DNA, 19 bp, Homo sapiens
  siRNA target sequence for APH-1A (NM_016022.1,802-820).
ggtccctccgaagtattca

SEQ ID NO: 355915 - DNA, 19 bp, Homo sapiens
  siRNA target sequence for CGI-77 (NM_016023.2,137-155).
gaatgctgttcccaagaat

SEQ ID NO: 355916 - DNA, 19 bp, Homo sapiens
  siRNA target sequence for CGI-77 (NM_016023.2,240-258).
caattgaagctgactacta

SEQ ID NO: 355917 - DNA, 19 bp, Homo sapiens
  siRNA target sequence for CGI-77 (NM_016023.2,282-300).
gctgttaacatttcaaact

SEQ ID NO: 355918 - DNA, 19 bp, Homo sapiens
  siRNA target sequence for CGI-77 (NM_016023.2,317-335).
gccacctcggatatcaaaa

SEQ ID NO: 355919 - DNA, 19 bp, Homo sapiens
  siRNA target sequence for CGI-77 (NM_016023.2,388-406).
ggatagctgaagctgaaat

SEQ ID NO: 355920 - DNA, 19 bp, Homo sapiens
  siRNA target sequence for CGI-77 (NM_016023.2,424-442).
ccagacatatggaaagtga

SEQ ID NO: 355921 - DNA, 19 bp, Homo sapiens
  siRNA target sequence for CGI-77 (NM_016023.2,463-481).
cagctagacagttagaaat

SEQ ID NO: 355922 - DNA, 19 bp, Homo sapiens
  siRNA target sequence for CGI-77 (NM_016023.2,465-483).
gctagacagttagaaatta

SEQ ID NO: 355923 - DNA, 19 bp, Homo sapiens
  siRNA target sequence for CGI-77 (NM_016023.2,466-484).
ctagacagttagaaattaa

SEQ ID NO: 355924 - DNA, 19 bp, Homo sapiens
  siRNA target sequence for CGI-77 (NM_016023.2,477-495).
gaaattaaacagattccat

SEQ ID NO: 355925 - DNA, 19 bp, Homo sapiens
  siRNA target sequence for CGI-77 (NM_016023.2,496-514).
ctgatggccactgtatgta

SEQ ID NO: 355926 - DNA, 19 bp, Homo sapiens
  siRNA target sequence for CGI-77 (NM_016023.2,498-516).
gatggccactgtatgtata

SEQ ID NO: 355927 - DNA, 19 bp, Homo sapiens
  siRNA target sequence for CGI-77 (NM_016023.2,581-599).
gaccgctgagtatatgcaa

SEQ ID NO: 355928 - DNA, 19 bp, Homo sapiens
  siRNA target sequence for CGI-77 (NM_016023.2,636-654).
cctaatacaggagatatgt

SEQ ID NO: 355929 - DNA, 19 bp, Homo sapiens
  siRNA target sequence for CGI-77 (NM_016023.2,637-655).
ctaatacaggagatatgta

SEQ ID NO: 355930 - DNA, 19 bp, Homo sapiens
  siRNA target sequence for CGI-77 (NM_016023.2,754-772).
caccaatagagataataca

SEQ ID NO: 355931 - DNA, 19 bp, Homo sapiens
  siRNA target sequence for CGI-77 (NM_016023.2,764-782).
gataatacaggcagattct

SEQ ID NO: 355932 - DNA, 19 bp, Homo sapiens
  siRNA target sequence for CGI-77 (NM_016023.2,775-793).
cagattctcctcccattat

SEQ ID NO: 355933 - DNA, 19 bp, Homo sapiens
  siRNA target sequence for CGI-77 (NM_016023.2,788-806).
cattatagttggtgaagaa

SEQ ID NO: 355934 - DNA, 19 bp, Homo sapiens
  siRNA target sequence for CGI-77 (NM_016023.2,852-870).
ggcttaggagaacattata

SEQ ID NO: 355935 - DNA, 19 bp, Homo sapiens
  siRNA target sequence for CGI-77 (NM_016023.2,876-894).
gttacacggttggtaaaca

SEQ ID NO: 355936 - DNA, 19 bp, Homo sapiens
  siRNA target sequence for CGI-77 (NM_016023.2,880-898).
cacggttggtaaacatagt

SEQ ID NO: 355937 - DNA, 19 bp, Homo sapiens
  siRNA target sequence for CGI-77 (NM_016023.2,882-900).
cggttggtaaacatagtta

SEQ ID NO: 355938 - DNA, 19 bp, Homo sapiens
  siRNA target sequence for DREV1 (NM_016025.2,343-361).
cactccaggctgtctttgt

SEQ ID NO: 355939 - DNA, 19 bp, Homo sapiens
  siRNA target sequence for DREV1 (NM_016025.2,381-399).
ggaacacagatcttcttaa

SEQ ID NO: 355940 - DNA, 19 bp, Homo sapiens
  siRNA target sequence for DREV1 (NM_016025.2,418-436).
cgggctggctatttatcca

SEQ ID NO: 355941 - DNA, 19 bp, Homo sapiens
  siRNA target sequence for DREV1 (NM_016025.2,419-437).
gggctggctatttatccaa

SEQ ID NO: 355942 - DNA, 19 bp, Homo sapiens
  siRNA target sequence for DREV1 (NM_016025.2,420-438).
ggctggctatttatccaat

SEQ ID NO: 355943 - DNA, 19 bp, Homo sapiens
  siRNA target sequence for DREV1 (NM_016025.2,424-442).
ggctatttatccaattata

SEQ ID NO: 355944 - DNA, 19 bp, Homo sapiens
  siRNA target sequence for DREV1 (NM_016025.2,515-533).
ctcaatgtttgtgttttca

SEQ ID NO: 355945 - DNA, 19 bp, Homo sapiens
  siRNA target sequence for DREV1 (NM_016025.2,580-598).
cccacagacttcttgattt

SEQ ID NO: 355946 - DNA, 19 bp, Homo sapiens
  siRNA target sequence for DREV1 (NM_016025.2,634-652).
gccctcattttgaagaaat

SEQ ID NO: 355947 - DNA, 19 bp, Homo sapiens
  siRNA target sequence for DREV1 (NM_016025.2,661-679).
ctgagctttctgaaactat

SEQ ID NO: 355948 - DNA, 19 bp, Homo sapiens
  siRNA target sequence for DREV1 (NM_016025.2,707-725).
cagagtccttggtataaat

SEQ ID NO: 355949 - DNA, 19 bp, Homo sapiens
  siRNA target sequence for DREV1 (NM_016025.2,711-729).
gtccttggtataaatgaat

SEQ ID NO: 355950 - DNA, 19 bp, Homo sapiens
  siRNA target sequence for DREV1 (NM_016025.2,739-757).
cggggttccagtatgatgt

SEQ ID NO: 355951 - DNA, 19 bp, Homo sapiens
  siRNA target sequence for DREV1 (NM_016025.2,787-805).
gtgatcagcccctgacttt

SEQ ID NO: 355952 - DNA, 19 bp, Homo sapiens
  siRNA target sequence for DREV1 (NM_016025.2,789-807).
gatcagcccctgactttgt

SEQ ID NO: 355953 - DNA, 19 bp, Homo sapiens
  siRNA target sequence for DREV1 (NM_016025.2,962-980).
gaatagtctgcctgaagtt

SEQ ID NO: 355954 - DNA, 19 bp, Homo sapiens
  siRNA target sequence for DREV1 (NM_016025.2,1009-1027).
ctttcaccagactaccata

SEQ ID NO: 355955 - DNA, 19 bp, Homo sapiens
  siRNA target sequence for DREV1 (NM_016025.2,1031-1049).
gtgtgaaggcgacatgtat

SEQ ID NO: 355956 - DNA, 19 bp, Homo sapiens
  siRNA target sequence for DREV1 (NM_016025.2,1038-1056).
ggcgacatgtataatgact

SEQ ID NO: 355957 - DNA, 19 bp, Homo sapiens
  siRNA target sequence for DREV1 (NM_016025.2,1039-1057).
gcgacatgtataatgacta

SEQ ID NO: 355958 - DNA, 19 bp, Homo sapiens
  siRNA target sequence for CGI-83 (NM_016027.1,183-201).
ccagcaattccagaataca

SEQ ID NO: 355959 - DNA, 19 bp, Homo sapiens
  siRNA target sequence for CGI-83 (NM_016027.1,184-202).
cagcaattccagaatacat

SEQ ID NO: 355960 - DNA, 19 bp, Homo sapiens
  siRNA target sequence for CGI-83 (NM_016027.1,195-213).
gaatacatcagctgtttaa

SEQ ID NO: 355961 - DNA, 19 bp, Homo sapiens
  siRNA target sequence for CGI-83 (NM_016027.1,241-259).
caatccaggaaattgtagt

SEQ ID NO: 355962 - DNA, 19 bp, Homo sapiens
  siRNA target sequence for CGI-83 (NM_016027.1,266-284).
ctggcaccgagatcattct

SEQ ID NO: 355963 - DNA, 19 bp, Homo sapiens
  siRNA target sequence for CGI-83 (NM_016027.1,283-301).
ctggaggcataggagatat

SEQ ID NO: 355964 - DNA, 19 bp, Homo sapiens
  siRNA target sequence for CGI-83 (NM_016027.1,289-307).
gcataggagatatttgtaa

SEQ ID NO: 355965 - DNA, 19 bp, Homo sapiens
  siRNA target sequence for CGI-83 (NM_016027.1,321-339).
gacactacctattgcatta

SEQ ID NO: 355966 - DNA, 19 bp, Homo sapiens
  siRNA target sequence for CGI-83 (NM_016027.1,384-402).
ggagagcaacaatatgttt

SEQ ID NO: 355967 - DNA, 19 bp, Homo sapiens
  siRNA target sequence for CGI-83 (NM_016027.1,434-452).
gggagccactctaagagtt

SEQ ID NO: 355968 - DNA, 19 bp, Homo sapiens
  siRNA target sequence for CGI-83 (NM_016027.1,438-456).
gccactctaagagttctat

SEQ ID NO: 355969 - DNA, 19 bp, Homo sapiens
  siRNA target sequence for CGI-83 (NM_016027.1,439-457).
ccactctaagagttctata

SEQ ID NO: 355970 - DNA, 19 bp, Homo sapiens
  siRNA target sequence for CGI-83 (NM_016027.1,466-484).
gccacactgatgatcacat

SEQ ID NO: 355971 - DNA, 19 bp, Homo sapiens
  siRNA target sequence for CGI-83 (NM_016027.1,539-557).
ggaaggaacaacggtattt

SEQ ID NO: 355972 - DNA, 19 bp, Homo sapiens
  siRNA target sequence for CGI-83 (NM_016027.1,561-579).
gacctctatgattatatga

SEQ ID NO: 355973 - DNA, 19 bp, Homo sapiens
  siRNA target sequence for CGI-83 (NM_016027.1,570-588).
gattatatgaactctttaa

SEQ ID NO: 355974 - DNA, 19 bp, Homo sapiens
  siRNA target sequence for CGI-83 (NM_016027.1,635-653).
cccagtaattcataatgct

SEQ ID NO: 355975 - DNA, 19 bp, Homo sapiens
  siRNA target sequence for CGI-83 (NM_016027.1,654-672).
gaagctaaaattcaacaat

SEQ ID NO: 355976 - DNA, 19 bp, Homo sapiens
  siRNA target sequence for CGI-83 (NM_016027.1,699-717).
cagcaaattcttacattat

SEQ ID NO: 355977 - DNA, 19 bp, Homo sapiens
  siRNA target sequence for CGI-83 (NM_016027.1,712-730).
cattatttcgtgagaactt

SEQ ID NO: 355978 - DNA, 19 bp, Homo sapiens
  siRNA target sequence for CGI-83 (NM_016027.1,720-738).
cgtgagaactttgagaaat

SEQ ID NO: 355979 - DNA, 19 bp, Homo sapiens
  siRNA target sequence for CGI-83 (NM_016027.1,745-763).
cagtaatggagcttgtaaa

SEQ ID NO: 355980 - DNA, 19 bp, Homo sapiens
  siRNA target sequence for CGI-83 (NM_016027.1,781-799).
ctcctgagaatttacatga

SEQ ID NO: 355981 - DNA, 19 bp, Homo sapiens
  siRNA target sequence for CGI-83 (NM_016027.1,805-823).
ctaaacataatctcttact

SEQ ID NO: 355982 - DNA, 19 bp, Homo sapiens
  siRNA target sequence for CGI-85 (NM_016028.3,319-337).
ccctgaaggctggcaaaaa

SEQ ID NO: 355983 - DNA, 19 bp, Homo sapiens
  siRNA target sequence for CGI-85 (NM_016028.3,320-338).
cctgaaggctggcaaaaat

SEQ ID NO: 355984 - DNA, 19 bp, Homo sapiens
  siRNA target sequence for CGI-85 (NM_016028.3,345-363).
gagaggaggtcgaacagat

SEQ ID NO: 355985 - DNA, 19 bp, Homo sapiens
  siRNA target sequence for CGI-85 (NM_016028.3,349-367).
ggaggtcgaacagatgtaa

SEQ ID NO: 355986 - DNA, 19 bp, Homo sapiens
  siRNA target sequence for CGI-85 (NM_016028.3,350-368).
gaggtcgaacagatgtaat

SEQ ID NO: 355987 - DNA, 19 bp, Homo sapiens
  siRNA target sequence for CGI-85 (NM_016028.3,353-371).
gtcgaacagatgtaatggt

SEQ ID NO: 355988 - DNA, 19 bp, Homo sapiens
  siRNA target sequence for CGI-85 (NM_016028.3,355-373).
cgaacagatgtaatggtaa

SEQ ID NO: 355989 - DNA, 19 bp, Homo sapiens
  siRNA target sequence for CGI-85 (NM_016028.3,423-441).
gccaaggaactctgtgaaa

SEQ ID NO: 355990 - DNA, 19 bp, Homo sapiens
  siRNA target sequence for CGI-85 (NM_016028.3,468-486).
cttgatccctatttaggtt

SEQ ID NO: 355991 - DNA, 19 bp, Homo sapiens
  siRNA target sequence for CGI-85 (NM_016028.3,576-594).
gtgagatttaggcctatta

SEQ ID NO: 355992 - DNA, 19 bp, Homo sapiens
  siRNA target sequence for CGI-85 (NM_016028.3,618-636).
gaagtaattgaacgtttta

SEQ ID NO: 355993 - DNA, 19 bp, Homo sapiens
  siRNA target sequence for CGI-85 (NM_016028.3,688-706).
gggcacggcactattttct

SEQ ID NO: 355994 - DNA, 19 bp, Homo sapiens
  siRNA target sequence for CGI-85 (NM_016028.3,690-708).
gcacggcactattttctca

SEQ ID NO: 355995 - DNA, 19 bp, Homo sapiens
  siRNA target sequence for CGI-85 (NM_016028.3,691-709).
cacggcactattttctcaa

SEQ ID NO: 355996 - DNA, 19 bp, Homo sapiens
  siRNA target sequence for CGI-85 (NM_016028.3,694-712).
ggcactattttctcaacaa

SEQ ID NO: 355997 - DNA, 19 bp, Homo sapiens
  siRNA target sequence for CGI-85 (NM_016028.3,856-874).
ggaaacgaaatgacaaaat

SEQ ID NO: 355998 - DNA, 19 bp, Homo sapiens
  siRNA target sequence for CGI-85 (NM_016028.3,857-875).
gaaacgaaatgacaaaata

SEQ ID NO: 355999 - DNA, 19 bp, Homo sapiens
  siRNA target sequence for CGI-85 (NM_016028.3,861-879).
cgaaatgacaaaatagaat

SEQ ID NO: 356000 - DNA, 19 bp, Homo sapiens
  siRNA target sequence for CGI-85 (NM_016028.3,888-906).
ggttgtattgccgaacttt

SEQ ID NO: 356001 - DNA, 19 bp, Homo sapiens
  siRNA target sequence for CGI-85 (NM_016028.3,892-910).
gtattgccgaactttcaga

SEQ ID NO: 356002 - DNA, 19 bp, Homo sapiens
  siRNA target sequence for CGI-85 (NM_016028.3,915-933).
gaggagaacatgctactta

SEQ ID NO: 356003 - DNA, 19 bp, Homo sapiens
  siRNA target sequence for CGI-85 (NM_016028.3,917-935).
ggagaacatgctacttaga

SEQ ID NO: 356004 - DNA, 19 bp, Homo sapiens
  siRNA target sequence for CGI-85 (NM_016028.3,920-938).
gaacatgctacttagacat

SEQ ID NO: 356005 - DNA, 19 bp, Homo sapiens
  siRNA target sequence for CGI-85 (NM_016028.3,1019-1037).
ccatgattgcagacctaat

SEQ ID NO: 356006 - DNA, 19 bp, Homo sapiens
  siRNA target sequence for CGI-85 (NM_016028.3,1027-1045).
gcagacctaattgtaagtt

SEQ ID NO: 356007 - DNA, 19 bp, Homo sapiens
  siRNA target sequence for CGI-85 (NM_016028.3,1030-1048).
gacctaattgtaagtttgt

SEQ ID NO: 356008 - DNA, 19 bp, Homo sapiens
  siRNA target sequence for CGI-85 (NM_016028.3,1032-1050).
cctaattgtaagtttgtgt

SEQ ID NO: 356009 - DNA, 19 bp, Homo sapiens
  siRNA target sequence for CGI-85 (NM_016028.3,1049-1067).
gtcaactggtcgagataca

SEQ ID NO: 356010 - DNA, 19 bp, Homo sapiens
  siRNA target sequence for CGI-85 (NM_016028.3,1152-1170).
gagttctgcgagtgttaca

SEQ ID NO: 356011 - DNA, 19 bp, Homo sapiens
  siRNA target sequence for CGI-85 (NM_016028.3,1154-1172).
gttctgcgagtgttacact

SEQ ID NO: 356012 - DNA, 19 bp, Homo sapiens
  siRNA target sequence for CGI-85 (NM_016028.3,1219-1237).
ctgcgcctgctcctgttat

SEQ ID NO: 356013 - DNA, 19 bp, Homo sapiens
  siRNA target sequence for CGI-85 (NM_016028.3,1256-1274).
cagagaaacagataaacgt

SEQ ID NO: 356014 - DNA, 19 bp, Homo sapiens
  siRNA target sequence for CGI-85 (NM_016028.3,1260-1278).
gaaacagataaacgtttaa

SEQ ID NO: 356015 - DNA, 19 bp, Homo sapiens
  siRNA target sequence for CGI-85 (NM_016028.3,1272-1290).
cgtttaaataggcttaaaa

SEQ ID NO: 356016 - DNA, 19 bp, Homo sapiens
  siRNA target sequence for TTC15 (NM_016030.5,321-339).
ggcggagatgagtttggat

SEQ ID NO: 356017 - DNA, 19 bp, Homo sapiens
  siRNA target sequence for TTC15 (NM_016030.5,1049-1067).
gcacatccaggcagtgttt

SEQ ID NO: 356018 - DNA, 19 bp, Homo sapiens
  siRNA target sequence for TTC15 (NM_016030.5,1254-1272).
ggagatgcagttaaagact

SEQ ID NO: 356019 - DNA, 19 bp, Homo sapiens
  siRNA target sequence for TTC15 (NM_016030.5,1326-1344).
gccgactcagtggaacaat

SEQ ID NO: 356020 - DNA, 19 bp, Homo sapiens
  siRNA target sequence for TTC15 (NM_016030.5,1328-1346).
cgactcagtggaacaatct

SEQ ID NO: 356021 - DNA, 19 bp, Homo sapiens
  siRNA target sequence for TTC15 (NM_016030.5,1329-1347).
gactcagtggaacaatctt

SEQ ID NO: 356022 - DNA, 19 bp, Homo sapiens
  siRNA target sequence for TTC15 (NM_016030.5,1333-1351).
cagtggaacaatcttttgt

SEQ ID NO: 356023 - DNA, 19 bp, Homo sapiens
  siRNA target sequence for TTC15 (NM_016030.5,1353-1371).
ggattgaaacagctaatca

SEQ ID NO: 356024 - DNA, 19 bp, Homo sapiens
  siRNA target sequence for TTC15 (NM_016030.5,1365-1383).
ctaatcagctgcagaaact

SEQ ID NO: 356025 - DNA, 19 bp, Homo sapiens
  siRNA target sequence for TTC15 (NM_016030.5,1498-1516).
ggctggcactactagtgaa

SEQ ID NO: 356026 - DNA, 19 bp, Homo sapiens
  siRNA target sequence for TTC15 (NM_016030.5,1732-1750).
gcaagatcctggccaattt

SEQ ID NO: 356027 - DNA, 19 bp, Homo sapiens
  siRNA target sequence for TTC15 (NM_016030.5,1895-1913).
ggccgtggaggcgtatcat

SEQ ID NO: 356028 - DNA, 19 bp, Homo sapiens
  siRNA target sequence for TTC15 (NM_016030.5,1896-1914).
gccgtggaggcgtatcatt

SEQ ID NO: 356029 - DNA, 19 bp, Homo sapiens
  siRNA target sequence for TTC15 (NM_016030.5,1905-1923).
gcgtatcattcggttatca

SEQ ID NO: 356030 - DNA, 19 bp, Homo sapiens
  siRNA target sequence for TTC15 (NM_016030.5,1906-1924).
cgtatcattcggttatcaa

SEQ ID NO: 356031 - DNA, 19 bp, Homo sapiens
  siRNA target sequence for TTC15 (NM_016030.5,2046-2064).
gatggactacagggtaaaa

SEQ ID NO: 356032 - DNA, 19 bp, Homo sapiens
  siRNA target sequence for TTC15 (NM_016030.5,2050-2068).
gactacagggtaaaatcat

SEQ ID NO: 356033 - DNA, 19 bp, Homo sapiens
  siRNA target sequence for TTC15 (NM_016030.5,2058-2076).
ggtaaaatcatggttttga

SEQ ID NO: 356034 - DNA, 19 bp, Homo sapiens
  siRNA target sequence for TTC15 (NM_016030.5,2091-2109).
cttcacctcgggcagaata

SEQ ID NO: 356035 - DNA, 19 bp, Homo sapiens
  siRNA target sequence for TTC15 (NM_016030.5,2094-2112).
cacctcgggcagaataact

SEQ ID NO: 356036 - DNA, 19 bp, Homo sapiens
  siRNA target sequence for TTC15 (NM_016030.5,2096-2114).
cctcgggcagaataacttt

SEQ ID NO: 356037 - DNA, 19 bp, Homo sapiens
  siRNA target sequence for TTC15 (NM_016030.5,2118-2136).
gaagcccacaggttcttca

SEQ ID NO: 356038 - DNA, 19 bp, Homo sapiens
  siRNA target sequence for TTC15 (NM_016030.5,2128-2146).
ggttcttcacagagatctt

SEQ ID NO: 356039 - DNA, 19 bp, Homo sapiens
  siRNA target sequence for CGI-90 (NM_016033.1,252-270).
gtcgtatttgggttttgaa

SEQ ID NO: 356040 - DNA, 19 bp, Homo sapiens
  siRNA target sequence for CGI-90 (NM_016033.1,351-369).
gtatgaaagcggagaaaca

SEQ ID NO: 356041 - DNA, 19 bp, Homo sapiens
  siRNA target sequence for CGI-90 (NM_016033.1,382-400).
cagttgctaacccaataca

SEQ ID NO: 356042 - DNA, 19 bp, Homo sapiens
  siRNA target sequence for CGI-90 (NM_016033.1,501-519).
gtatgaagccctagagtat

SEQ ID NO: 356043 - DNA, 19 bp, Homo sapiens
  siRNA target sequence for CGI-90 (NM_016033.1,508-526).
gccctagagtatgcaaaaa

SEQ ID NO: 356044 - DNA, 19 bp, Homo sapiens
  siRNA target sequence for CGI-90 (NM_016033.1,560-578).
ctcataagtggtatgcaat

SEQ ID NO: 356045 - DNA, 19 bp, Homo sapiens
  siRNA target sequence for CGI-90 (NM_016033.1,604-622).
gaaggcatcaaggctaaaa

SEQ ID NO: 356046 - DNA, 19 bp, Homo sapiens
  siRNA target sequence for CGI-90 (NM_016033.1,676-694).
cctaaagatgctacttcaa

SEQ ID NO: 356047 - DNA, 19 bp, Homo sapiens
  siRNA target sequence for CGI-90 (NM_016033.1,677-695).
ctaaagatgctacttcaat

SEQ ID NO: 356048 - DNA, 19 bp, Homo sapiens
  siRNA target sequence for CGI-90 (NM_016033.1,697-715).
caccttatgggtatttggt

SEQ ID NO: 356049 - DNA, 19 bp, Homo sapiens
  siRNA target sequence for CGI-90 (NM_016033.1,729-747).
cgaaatgccttggtatcaa

SEQ ID NO: 356050 - DNA, 19 bp, Homo sapiens
  siRNA target sequence for CGI-90 (NM_016033.1,781-799).
cctagttccacctatgaga

SEQ ID NO: 356051 - DNA, 19 bp, Homo sapiens
  siRNA target sequence for CGI-90 (NM_016033.1,782-800).
ctagttccacctatgagaa

SEQ ID NO: 356052 - DNA, 19 bp, Homo sapiens
  siRNA target sequence for CGI-90 (NM_016033.1,798-816).
gaaggccttaggctacttt

SEQ ID NO: 356053 - DNA, 19 bp, Homo sapiens
  siRNA target sequence for CGI-90 (NM_016033.1,832-850).
gtggatccaaacttctaca

SEQ ID NO: 356054 - DNA, 19 bp, Homo sapiens
  siRNA target sequence for CGI-90 (NM_016033.1,907-925).
gctgctttctggctaatga

SEQ ID NO: 356055 - DNA, 19 bp, Homo sapiens
  siRNA target sequence for CGI-90 (NM_016033.1,979-997).
gctgctcagttgcttacaa

SEQ ID NO: 356056 - DNA, 19 bp, Homo sapiens
  siRNA target sequence for CGI-90 (NM_016033.1,982-1000).
gctcagttgcttacaagtt

SEQ ID NO: 356057 - DNA, 19 bp, Homo sapiens
  siRNA target sequence for CGI-90 (NM_016033.1,987-1005).
gttgcttacaagtttcagt

SEQ ID NO: 356058 - DNA, 19 bp, Homo sapiens
  siRNA target sequence for CGI-94 (NM_016037.1,240-258).
ggctcttgaaaaaaatcca

SEQ ID NO: 356059 - DNA, 19 bp, Homo sapiens
  siRNA target sequence for CGI-94 (NM_016037.1,338-356).
ccccagaacaactaaagct

SEQ ID NO: 356060 - DNA, 19 bp, Homo sapiens
  siRNA target sequence for CGI-94 (NM_016037.1,362-380).
gaactcaggacgtcaaata

SEQ ID NO: 356061 - DNA, 19 bp, Homo sapiens
  siRNA target sequence for CGI-94 (NM_016037.1,365-383).
ctcaggacgtcaaatatat

SEQ ID NO: 356062 - DNA, 19 bp, Homo sapiens
  siRNA target sequence for CGI-94 (NM_016037.1,370-388).
gacgtcaaatatatagaaa

SEQ ID NO: 356063 - DNA, 19 bp, Homo sapiens
  siRNA target sequence for CGI-94 (NM_016037.1,617-635).
ccaatcagactggacttaa

SEQ ID NO: 356064 - DNA, 19 bp, Homo sapiens
  siRNA target sequence for CGI-94 (NM_016037.1,705-723).
gttcgttattgctcagaaa

SEQ ID NO: 356065 - DNA, 19 bp, Homo sapiens
  siRNA target sequence for CGI-94 (NM_016037.1,727-745).
caaacacgcaaagatctta

SEQ ID NO: 356066 - DNA, 19 bp, Homo sapiens
  siRNA target sequence for CGI-94 (NM_016037.1,731-749).
cacgcaaagatcttatgga

SEQ ID NO: 356067 - DNA, 19 bp, Homo sapiens
  siRNA target sequence for CGI-94 (NM_016037.1,733-751).
cgcaaagatcttatggata

SEQ ID NO: 356068 - DNA, 19 bp, Homo sapiens
  siRNA target sequence for CGI-94 (NM_016037.1,783-801).
ggtgaactccccagctatt

SEQ ID NO: 356069 - DNA, 19 bp, Homo sapiens
  siRNA target sequence for CGI-94 (NM_016037.1,784-802).
gtgaactccccagctattt

SEQ ID NO: 356070 - DNA, 19 bp, Homo sapiens
  siRNA target sequence for CGI-94 (NM_016037.1,794-812).
cagctatttataaatttca

SEQ ID NO: 356071 - DNA, 19 bp, Homo sapiens
  siRNA target sequence for CGI-94 (NM_016037.1,811-829).
cagagtcgtcgaaaacgtt

SEQ ID NO: 356072 - DNA, 19 bp, Homo sapiens
  siRNA target sequence for C14orf166 (NM_016039.1,206-224).
cggcttcaactgcaaagat

SEQ ID NO: 356073 - DNA, 19 bp, Homo sapiens
  siRNA target sequence for C14orf166 (NM_016039.1,229-247).
cagaatttagaaacttcat

SEQ ID NO: 356074 - DNA, 19 bp, Homo sapiens
  siRNA target sequence for C14orf166 (NM_016039.1,272-290).
caggcactacaagattgaa

SEQ ID NO: 356075 - DNA, 19 bp, Homo sapiens
  siRNA target sequence for C14orf166 (NM_016039.1,274-292).
ggcactacaagattgaaga

SEQ ID NO: 356076 - DNA, 19 bp, Homo sapiens
  siRNA target sequence for C14orf166 (NM_016039.1,322-340).
gcgactggcccaagttctt

SEQ ID NO: 356077 - DNA, 19 bp, Homo sapiens
  siRNA target sequence for C14orf166 (NM_016039.1,387-405).
cgacaagaagctattgact

SEQ ID NO: 356078 - DNA, 19 bp, Homo sapiens
  siRNA target sequence for C14orf166 (NM_016039.1,404-422).
ctggcttcttggtttagct

SEQ ID NO: 356079 - DNA, 19 bp, Homo sapiens
  siRNA target sequence for C14orf166 (NM_016039.1,572-590).
ggctaacctgcttcagatt

SEQ ID NO: 356080 - DNA, 19 bp, Homo sapiens
  siRNA target sequence for C14orf166 (NM_016039.1,574-592).
ctaacctgcttcagattca

SEQ ID NO: 356081 - DNA, 19 bp, Homo sapiens
  siRNA target sequence for C14orf166 (NM_016039.1,623-641).
ggcaattcggattttggtt

SEQ ID NO: 356082 - DNA, 19 bp, Homo sapiens
  siRNA target sequence for C14orf166 (NM_016039.1,655-673).
cacaggatgcagttgctaa

SEQ ID NO: 356083 - DNA, 19 bp, Homo sapiens
  siRNA target sequence for C14orf166 (NM_016039.1,692-710).
gggcttacctgttgcttta

SEQ ID NO: 356084 - DNA, 19 bp, Homo sapiens
  siRNA target sequence for C14orf166 (NM_016039.1,694-712).
gcttacctgttgctttaga

SEQ ID NO: 356085 - DNA, 19 bp, Homo sapiens
  siRNA target sequence for C14orf166 (NM_016039.1,700-718).
ctgttgctttagacaaaca

SEQ ID NO: 356086 - DNA, 19 bp, Homo sapiens
  siRNA target sequence for C14orf166 (NM_016039.1,844-862).
caattattgctgatccaaa

SEQ ID NO: 356087 - DNA, 19 bp, Homo sapiens
  siRNA target sequence for C20orf45 (NM_016045.1,98-116).
cttcggagcacgtctttga

SEQ ID NO: 356088 - DNA, 19 bp, Homo sapiens
  siRNA target sequence for C20orf45 (NM_016045.1,198-216).
gttggacagacatatagat

SEQ ID NO: 356089 - DNA, 19 bp, Homo sapiens
  siRNA target sequence for C20orf45 (NM_016045.1,258-276).
gtggggactgccttccatt

SEQ ID NO: 356090 - DNA, 19 bp, Homo sapiens
  siRNA target sequence for C20orf45 (NM_016045.1,262-280).
ggactgccttccattgtga

SEQ ID NO: 356091 - DNA, 19 bp, Homo sapiens
  siRNA target sequence for C20orf45 (NM_016045.1,263-281).
gactgccttccattgtgaa

SEQ ID NO: 356092 - DNA, 19 bp, Homo sapiens
  siRNA target sequence for C20orf45 (NM_016045.1,292-310).
ggtgcagcaagaacgaaaa

SEQ ID NO: 356093 - DNA, 19 bp, Homo sapiens
  siRNA target sequence for C20orf45 (NM_016045.1,318-336).
gcaagaacattctgtagtt

SEQ ID NO: 356094 - DNA, 19 bp, Homo sapiens
  siRNA target sequence for C20orf45 (NM_016045.1,435-453).
ggatccagaaaaaactgtt

SEQ ID NO: 356095 - DNA, 19 bp, Homo sapiens
  siRNA target sequence for C20orf45 (NM_016045.1,514-532).
ctgatggcaagtacgatat

SEQ ID NO: 356096 - DNA, 19 bp, Homo sapiens
  siRNA target sequence for C20orf45 (NM_016045.1,550-568).
ggccgagaagcaatggaat

SEQ ID NO: 356097 - DNA, 19 bp, Homo sapiens
  siRNA target sequence for C20orf45 (NM_016045.1,672-690).
cgtgacagttggtagacaa

SEQ ID NO: 356098 - DNA, 19 bp, Homo sapiens
  siRNA target sequence for CGI-115 (NM_016052.2,150-168).
gctgtggatcggaaaagga

SEQ ID NO: 356099 - DNA, 19 bp, Homo sapiens
  siRNA target sequence for CGI-115 (NM_016052.2,159-177).
cggaaaaggaccactttta

SEQ ID NO: 356100 - DNA, 19 bp, Homo sapiens
  siRNA target sequence for CGI-115 (NM_016052.2,221-239).
gagccctgtgacaaagaaa

SEQ ID NO: 356101 - DNA, 19 bp, Homo sapiens
  siRNA target sequence for CGI-115 (NM_016052.2,296-314).
gctaaagtcctcaacaaga

SEQ ID NO: 356102 - DNA, 19 bp, Homo sapiens
  siRNA target sequence for CGI-115 (NM_016052.2,297-315).
ctaaagtcctcaacaagaa

SEQ ID NO: 356103 - DNA, 19 bp, Homo sapiens
  siRNA target sequence for CGI-115 (NM_016052.2,379-397).
gttaaagcaagaaagacta

SEQ ID NO: 356104 - DNA, 19 bp, Homo sapiens
  siRNA target sequence for CGI-115 (NM_016052.2,434-452).
gaaatgatgtgcagagtaa

SEQ ID NO: 356105 - DNA, 19 bp, Homo sapiens
  siRNA target sequence for CGI-115 (NM_016052.2,447-465).
gagtaaagccagatgttgt

SEQ ID NO: 356106 - DNA, 19 bp, Homo sapiens
  siRNA target sequence for CGI-115 (NM_016052.2,456-474).
cagatgttgtccaagacaa

SEQ ID NO: 356107 - DNA, 19 bp, Homo sapiens
  siRNA target sequence for CGI-115 (NM_016052.2,507-525).
caaggggtgtggtgcaatt

SEQ ID NO: 356108 - DNA, 19 bp, Homo sapiens
  siRNA target sequence for CGI-115 (NM_016052.2,510-528).
ggggtgtggtgcaattatt

SEQ ID NO: 356109 - DNA, 19 bp, Homo sapiens
  siRNA target sequence for CGI-115 (NM_016052.2,512-530).
ggtgtggtgcaattattta

SEQ ID NO: 356110 - DNA, 19 bp, Homo sapiens
  siRNA target sequence for CGI-115 (NM_016052.2,517-535).
ggtgcaattatttaatgct

SEQ ID NO: 356111 - DNA, 19 bp, Homo sapiens
  siRNA target sequence for CGI-115 (NM_016052.2,553-571).
gaatgttgatgaaaaggtt

SEQ ID NO: 356112 - DNA, 19 bp, Homo sapiens
  siRNA target sequence for CGI-115 (NM_016052.2,620-638).
gtttccaagaaagatttca

SEQ ID NO: 356113 - DNA, 19 bp, Homo sapiens
  siRNA target sequence for CGI-115 (NM_016052.2,745-763).
gacgatcctacgtgatgat

SEQ ID NO: 356114 - DNA, 19 bp, Homo sapiens
  siRNA target sequence for CGI-115 (NM_016052.2,747-765).
cgatcctacgtgatgattt

SEQ ID NO: 356115 - DNA, 19 bp, Homo sapiens
  siRNA target sequence for CGI-115 (NM_016052.2,836-854).
gcaagtgactctgatacat

SEQ ID NO: 356116 - DNA, 19 bp, Homo sapiens
  siRNA target sequence for CGI-116 (NM_016053.1,152-170).
gaccaaggtgccagctatt

SEQ ID NO: 356117 - DNA, 19 bp, Homo sapiens
  siRNA target sequence for CGI-116 (NM_016053.1,154-172).
ccaaggtgccagctattca

SEQ ID NO: 356118 - DNA, 19 bp, Homo sapiens
  siRNA target sequence for CGI-116 (NM_016053.1,161-179).
gccagctattcaacagaaa

SEQ ID NO: 356119 - DNA, 19 bp, Homo sapiens
  siRNA target sequence for CGI-116 (NM_016053.1,162-180).
ccagctattcaacagaaaa

SEQ ID NO: 356120 - DNA, 19 bp, Homo sapiens
  siRNA target sequence for CGI-116 (NM_016053.1,184-202).
cggtggcttttctaaacca

SEQ ID NO: 356121 - DNA, 19 bp, Homo sapiens
  siRNA target sequence for CGI-116 (NM_016053.1,224-242).
gttcctcaaccgcttttct

SEQ ID NO: 356122 - DNA, 19 bp, Homo sapiens
  siRNA target sequence for CGI-116 (NM_016053.1,230-248).
caaccgcttttctacagtt

SEQ ID NO: 356123 - DNA, 19 bp, Homo sapiens
  siRNA target sequence for CGI-116 (NM_016053.1,265-283).
cagacctttcacttcgtat

SEQ ID NO: 356124 - DNA, 19 bp, Homo sapiens
  siRNA target sequence for CGI-116 (NM_016053.1,274-292).
cacttcgtatccaacaaat

SEQ ID NO: 356125 - DNA, 19 bp, Homo sapiens
  siRNA target sequence for CGI-116 (NM_016053.1,315-333).
gatgcaaagttgtcatcta

SEQ ID NO: 356126 - DNA, 19 bp, Homo sapiens
  siRNA target sequence for CGI-116 (NM_016053.1,331-349).
ctatcccaggcctagatga

SEQ ID NO: 356127 - DNA, 19 bp, Homo sapiens
  siRNA target sequence for CGI-116 (NM_016053.1,348-366).
gatgtcacagttgaagtat

SEQ ID NO: 356128 - DNA, 19 bp, Homo sapiens
  siRNA target sequence for CGI-116 (NM_016053.1,357-375).
gttgaagtatctcctttaa

SEQ ID NO: 356129 - DNA, 19 bp, Homo sapiens
  siRNA target sequence for CGI-116 (NM_016053.1,456-474).
ctacaggaaagtgaagtat

SEQ ID NO: 356130 - DNA, 19 bp, Homo sapiens
  siRNA target sequence for CGI-116 (NM_016053.1,508-526).
caagatatgccagatatct

SEQ ID NO: 356131 - DNA, 19 bp, Homo sapiens
  siRNA target sequence for CGI-116 (NM_016053.1,635-653).
cgaaagtgagaaaactgta

SEQ ID NO: 356132 - DNA, 19 bp, Homo sapiens
  siRNA target sequence for CGI-116 (NM_016053.1,666-684).
gatagcgaatcttctttta

SEQ ID NO: 356133 - DNA, 19 bp, Homo sapiens
  siRNA target sequence for CGI-116 (NM_016053.1,670-688).
gcgaatcttcttttagtga

SEQ ID NO: 356134 - DNA, 19 bp, Homo sapiens
  siRNA target sequence for CGI-116 (NM_016053.1,671-689).
cgaatcttcttttagtgat

SEQ ID NO: 356135 - DNA, 19 bp, Homo sapiens
  siRNA target sequence for CGI-125 (NM_016060.1,144-162).
ggaatttgtgcaatgttta

SEQ ID NO: 356136 - DNA, 19 bp, Homo sapiens
  siRNA target sequence for CGI-125 (NM_016060.1,158-176).
gtttagccaacccaaatta

SEQ ID NO: 356137 - DNA, 19 bp, Homo sapiens
  siRNA target sequence for CGI-125 (NM_016060.1,163-181).
gccaacccaaattacctta

SEQ ID NO: 356138 - DNA, 19 bp, Homo sapiens
  siRNA target sequence for CGI-125 (NM_016060.1,164-182).
ccaacccaaattaccttaa

SEQ ID NO: 356139 - DNA, 19 bp, Homo sapiens
  siRNA target sequence for CGI-125 (NM_016060.1,165-183).
caacccaaattaccttaat

SEQ ID NO: 356140 - DNA, 19 bp, Homo sapiens
  siRNA target sequence for CGI-125 (NM_016060.1,191-209).
cccaaagaggttacttcaa

SEQ ID NO: 356141 - DNA, 19 bp, Homo sapiens
  siRNA target sequence for CGI-125 (NM_016060.1,192-210).
ccaaagaggttacttcaaa

SEQ ID NO: 356142 - DNA, 19 bp, Homo sapiens
  siRNA target sequence for CGI-125 (NM_016060.1,303-321).
gttagagctgctccaatat

SEQ ID NO: 356143 - DNA, 19 bp, Homo sapiens
  siRNA target sequence for CGI-125 (NM_016060.1,349-367).
gctcagtgtgcgaaattta

SEQ ID NO: 356144 - DNA, 19 bp, Homo sapiens
  siRNA target sequence for CGI-125 (NM_016060.1,350-368).
ctcagtgtgcgaaatttat

SEQ ID NO: 356145 - DNA, 19 bp, Homo sapiens
  siRNA target sequence for CGI-125 (NM_016060.1,354-372).
gtgtgcgaaatttattgat

SEQ ID NO: 356146 - DNA, 19 bp, Homo sapiens
  siRNA target sequence for CGI-125 (NM_016060.1,356-374).
gtgcgaaatttattgatga

SEQ ID NO: 356147 - DNA, 19 bp, Homo sapiens
  siRNA target sequence for CGI-125 (NM_016060.1,359-377).
cgaaatttattgatgaaca

SEQ ID NO: 356148 - DNA, 19 bp, Homo sapiens
  siRNA target sequence for CGI-125 (NM_016060.1,373-391).
gaacagcagattctacatt

SEQ ID NO: 356149 - DNA, 19 bp, Homo sapiens
  siRNA target sequence for CGI-127 (NM_016061.1,152-170).
cggtggtacccgtctgttt

SEQ ID NO: 356150 - DNA, 19 bp, Homo sapiens
  siRNA target sequence for CGI-127 (NM_016061.1,153-171).
ggtggtacccgtctgtttt

SEQ ID NO: 356151 - DNA, 19 bp, Homo sapiens
  siRNA target sequence for CGI-127 (NM_016061.1,156-174).
ggtacccgtctgttttctt

SEQ ID NO: 356152 - DNA, 19 bp, Homo sapiens
  siRNA target sequence for CGI-127 (NM_016061.1,175-193).
gtgcaaactgtgatacgat

SEQ ID NO: 356153 - DNA, 19 bp, Homo sapiens
  siRNA target sequence for CGI-127 (NM_016061.1,199-217).
ccaaccgctcagaactcat

SEQ ID NO: 356154 - DNA, 19 bp, Homo sapiens
  siRNA target sequence for CGI-127 (NM_016061.1,215-233).
catctccactcgtttcaca

SEQ ID NO: 356155 - DNA, 19 bp, Homo sapiens
  siRNA target sequence for CGI-127 (NM_016061.1,236-254).
cgccactggcagagcattt

SEQ ID NO: 356156 - DNA, 19 bp, Homo sapiens
  siRNA target sequence for CGI-127 (NM_016061.1,238-256).
ccactggcagagcatttct

SEQ ID NO: 356157 - DNA, 19 bp, Homo sapiens
  siRNA target sequence for CGI-127 (NM_016061.1,239-257).
cactggcagagcatttctt

SEQ ID NO: 356158 - DNA, 19 bp, Homo sapiens
  siRNA target sequence for CGI-127 (NM_016061.1,241-259).
ctggcagagcatttctttt

SEQ ID NO: 356159 - DNA, 19 bp, Homo sapiens
  siRNA target sequence for CGI-127 (NM_016061.1,255-273).
ctttttaacaaggtagtta

SEQ ID NO: 356160 - DNA, 19 bp, Homo sapiens
  siRNA target sequence for CGI-127 (NM_016061.1,390-408).
gaagacagccagcgatata

SEQ ID NO: 356161 - DNA, 19 bp, Homo sapiens
  siRNA target sequence for CGI-127 (NM_016061.1,395-413).
cagccagcgatataaggaa

SEQ ID NO: 356162 - DNA, 19 bp, Homo sapiens
  siRNA target sequence for CGI-127 (NM_016061.1,425-443).
cctggaacgtgctctagtt

SEQ ID NO: 356163 - DNA, 19 bp, Homo sapiens
  siRNA target sequence for CGI-127 (NM_016061.1,468-486).
catgtaccatctgataact

SEQ ID NO: 356164 - DNA, 19 bp, Homo sapiens
  siRNA target sequence for CGI-127 (NM_016061.1,471-489).
gtaccatctgataactctt

SEQ ID NO: 356165 - DNA, 19 bp, Homo sapiens
  siRNA target sequence for CGI-128 (NM_016062.1,166-184).
gcgagatcttcgatctgat

SEQ ID NO: 356166 - DNA, 19 bp, Homo sapiens
  siRNA target sequence for CGI-128 (NM_016062.1,287-305).
ggctttcacaccaaccatt

SEQ ID NO: 356167 - DNA, 19 bp, Homo sapiens
  siRNA target sequence for CGI-128 (NM_016062.1,314-332).
cagcatggccacccttatt

SEQ ID NO: 356168 - DNA, 19 bp, Homo sapiens
  siRNA target sequence for CGI-128 (NM_016062.1,364-382).
cccttcctcagcgtttcaa

SEQ ID NO: 356169 - DNA, 19 bp, Homo sapiens
  siRNA target sequence for CGI-128 (NM_016062.1,366-384).
cttcctcagcgtttcaaga

SEQ ID NO: 356170 - DNA, 19 bp, Homo sapiens
  siRNA target sequence for CGI-128 (NM_016062.1,383-401).
gatggacgtgcacattact

SEQ ID NO: 356171 - DNA, 19 bp, Homo sapiens
  siRNA target sequence for C6orf74 (NM_016063.1,197-215).
gcgtttcagatcacatgta

SEQ ID NO: 356172 - DNA, 19 bp, Homo sapiens
  siRNA target sequence for C6orf74 (NM_016063.1,231-249).
ggctatggtgatcaaagat

SEQ ID NO: 356173 - DNA, 19 bp, Homo sapiens
  siRNA target sequence for C6orf74 (NM_016063.1,342-360).
gtacgagacccaatctagt

SEQ ID NO: 356174 - DNA, 19 bp, Homo sapiens
  siRNA target sequence for C6orf74 (NM_016063.1,356-374).
ctagtgcagaagccaaatt

SEQ ID NO: 356175 - DNA, 19 bp, Homo sapiens
  siRNA target sequence for C6orf74 (NM_016063.1,451-469).
ctgcaagacttctatgatt

SEQ ID NO: 356176 - DNA, 19 bp, Homo sapiens
  siRNA target sequence for C6orf74 (NM_016063.1,496-514).
gagatagtccagcttgttt

SEQ ID NO: 356177 - DNA, 19 bp, Homo sapiens
  siRNA target sequence for C6orf74 (NM_016063.1,498-516).
gatagtccagcttgtttct

SEQ ID NO: 356178 - DNA, 19 bp, Homo sapiens
  siRNA target sequence for C6orf74 (NM_016063.1,527-545).
cagaaagaagcactaacat

SEQ ID NO: 356179 - DNA, 19 bp, Homo sapiens
  siRNA target sequence for TTC11 (NM_016068.1,173-191).
ccaagagcacgcagtttga

SEQ ID NO: 356180 - DNA, 19 bp, Homo sapiens
  siRNA target sequence for TTC11 (NM_016068.1,517-535).
gctgtgtccaagtccaaat

SEQ ID NO: 356181 - DNA, 19 bp, Homo sapiens
  siRNA target sequence for C13orf9 (NM_016075.1,90-108).
ggcgaggagaagataaaat

SEQ ID NO: 356182 - DNA, 19 bp, Homo sapiens
  siRNA target sequence for C13orf9 (NM_016075.1,117-135).
gggactctccttcttagta

SEQ ID NO: 356183 - DNA, 19 bp, Homo sapiens
  siRNA target sequence for C13orf9 (NM_016075.1,196-214).
cccaaattgtgttcattga

SEQ ID NO: 356184 - DNA, 19 bp, Homo sapiens
  siRNA target sequence for C13orf9 (NM_016075.1,245-263).
caaaatagtggttcatctt

SEQ ID NO: 356185 - DNA, 19 bp, Homo sapiens
  siRNA target sequence for C13orf9 (NM_016075.1,291-309).
ggcccattccagagtagta

SEQ ID NO: 356186 - DNA, 19 bp, Homo sapiens
  siRNA target sequence for C13orf9 (NM_016075.1,294-312).
ccattccagagtagtaaga

SEQ ID NO: 356187 - DNA, 19 bp, Homo sapiens
  siRNA target sequence for C13orf9 (NM_016075.1,323-341).
caaactctccttcaaagaa

SEQ ID NO: 356188 - DNA, 19 bp, Homo sapiens
  siRNA target sequence for C13orf9 (NM_016075.1,354-372).
gagttttacaggcgtttat

SEQ ID NO: 356189 - DNA, 19 bp, Homo sapiens
  siRNA target sequence for C13orf9 (NM_016075.1,356-374).
gttttacaggcgtttatca

SEQ ID NO: 356190 - DNA, 19 bp, Homo sapiens
  siRNA target sequence for C13orf9 (NM_016075.1,364-382).
ggcgtttatcagaggaaat

SEQ ID NO: 356191 - DNA, 19 bp, Homo sapiens
  siRNA target sequence for C13orf9 (NM_016075.1,366-384).
cgtttatcagaggaaatga

SEQ ID NO: 356192 - DNA, 19 bp, Homo sapiens
  siRNA target sequence for C13orf9 (NM_016075.1,416-434).
ccagtcattacaaacaaat

SEQ ID NO: 356193 - DNA, 19 bp, Homo sapiens
  siRNA target sequence for C13orf9 (NM_016075.1,439-457).
gaccccagccaggaagaat

SEQ ID NO: 356194 - DNA, 19 bp, Homo sapiens
  siRNA target sequence for C13orf9 (NM_016075.1,543-561).
gacctcagcaaactaatga

SEQ ID NO: 356195 - DNA, 19 bp, Homo sapiens
  siRNA target sequence for C13orf9 (NM_016075.1,546-564).
ctcagcaaactaatgatca

SEQ ID NO: 356196 - DNA, 19 bp, Homo sapiens
  siRNA target sequence for C13orf9 (NM_016075.1,639-657).
gatgagaccatcaggttta

SEQ ID NO: 356197 - DNA, 19 bp, Homo sapiens
  siRNA target sequence for C13orf9 (NM_016075.1,806-824).
ggaggtgtactgcttagta

SEQ ID NO: 356198 - DNA, 19 bp, Homo sapiens
  siRNA target sequence for C13orf9 (NM_016075.1,807-825).
gaggtgtactgcttagtaa

SEQ ID NO: 356199 - DNA, 19 bp, Homo sapiens
  siRNA target sequence for C13orf9 (NM_016075.1,827-845).
ccgagctcgaggaatggaa

SEQ ID NO: 356200 - DNA, 19 bp, Homo sapiens
  siRNA target sequence for C13orf9 (NM_016075.1,828-846).
cgagctcgaggaatggaat

SEQ ID NO: 356201 - DNA, 19 bp, Homo sapiens
  siRNA target sequence for C13orf9 (NM_016075.1,848-866).
gctctcaccagaagattta

SEQ ID NO: 356202 - DNA, 19 bp, Homo sapiens
  siRNA target sequence for C13orf9 (NM_016075.1,853-871).
caccagaagatttagtgaa

SEQ ID NO: 356203 - DNA, 19 bp, Homo sapiens
  siRNA target sequence for C13orf9 (NM_016075.1,924-942).
gacagtggcgtcatggtaa

SEQ ID NO: 356204 - DNA, 19 bp, Homo sapiens
  siRNA target sequence for C13orf9 (NM_016075.1,928-946).
gtggcgtcatggtaattga

SEQ ID NO: 356205 - DNA, 19 bp, Homo sapiens
  siRNA target sequence for C13orf9 (NM_016075.1,1002-1020).
gaaaagggatccctaacat

SEQ ID NO: 356206 - DNA, 19 bp, Homo sapiens
  siRNA target sequence for C13orf9 (NM_016075.1,1007-1025).
gggatccctaacatcagaa

SEQ ID NO: 356207 - DNA, 19 bp, Homo sapiens
  siRNA target sequence for C13orf9 (NM_016075.1,1018-1036).
catcagaagagtttgctaa

SEQ ID NO: 356208 - DNA, 19 bp, Homo sapiens
  siRNA target sequence for C13orf9 (NM_016075.1,1053-1071).
gtcctcctagccaaagaaa

SEQ ID NO: 356209 - DNA, 19 bp, Homo sapiens
  siRNA target sequence for C13orf9 (NM_016075.1,1119-1137).
gtggaaggcctgcgttttt

SEQ ID NO: 356210 - DNA, 19 bp, Homo sapiens
  siRNA target sequence for C13orf9 (NM_016075.1,1128-1146).
ctgcgtttttacccaaatt

SEQ ID NO: 356211 - DNA, 19 bp, Homo sapiens
  siRNA target sequence for C13orf9 (NM_016075.1,1130-1148).
gcgtttttacccaaattta

SEQ ID NO: 356212 - DNA, 19 bp, Homo sapiens
  siRNA target sequence for C13orf9 (NM_016075.1,1139-1157).
cccaaatttatttatgaca

SEQ ID NO: 356213 - DNA, 19 bp, Homo sapiens
  siRNA target sequence for PNAS-4 (NM_016076.2,611-629).
gattcctcgctggatcaat

SEQ ID NO: 356214 - DNA, 19 bp, Homo sapiens
  siRNA target sequence for PNAS-4 (NM_016076.2,638-656).
ctacttcagctcctgtata

SEQ ID NO: 356215 - DNA, 19 bp, Homo sapiens
  siRNA target sequence for PNAS-4 (NM_016076.2,647-665).
ctcctgtataccctttcta

SEQ ID NO: 356216 - DNA, 19 bp, Homo sapiens
  siRNA target sequence for FAM18B (NM_016078.1,757-775).
ggttggcggtggttatcat

SEQ ID NO: 356217 - DNA, 19 bp, Homo sapiens
  siRNA target sequence for FAM18B (NM_016078.1,793-811).
gtgccaacctgtatggtta

SEQ ID NO: 356218 - DNA, 19 bp, Homo sapiens
  siRNA target sequence for CDK5RAP1 (NM_016082.3,294-312).
ctatggctgccagatgaat

SEQ ID NO: 356219 - DNA, 19 bp, Homo sapiens
  siRNA target sequence for CDK5RAP1 (NM_016082.3,302-320).
gccagatgaatgtgaatga

SEQ ID NO: 356220 - DNA, 19 bp, Homo sapiens
  siRNA target sequence for CDK5RAP1 (NM_016082.3,327-345).
gatagcctggtccatctta

SEQ ID NO: 356221 - DNA, 19 bp, Homo sapiens
  siRNA target sequence for CDK5RAP1 (NM_016082.3,496-514).
gttcctctgaggattggaa

SEQ ID NO: 356222 - DNA, 19 bp, Homo sapiens
  siRNA target sequence for CDK5RAP1 (NM_016082.3,764-782).
gctactgcattgttccttt

SEQ ID NO: 356223 - DNA, 19 bp, Homo sapiens
  siRNA target sequence for CDK5RAP1 (NM_016082.3,807-825).
gcctattgcctccattcta

SEQ ID NO: 356224 - DNA, 19 bp, Homo sapiens
  siRNA target sequence for CDK5RAP1 (NM_016082.3,809-827).
ctattgcctccattctaga

SEQ ID NO: 356225 - DNA, 19 bp, Homo sapiens
  siRNA target sequence for CDK5RAP1 (NM_016082.3,867-885).
gacacttcttggtcagaat

SEQ ID NO: 356226 - DNA, 19 bp, Homo sapiens
  siRNA target sequence for CDK5RAP1 (NM_016082.3,877-895).
ggtcagaatgttaatagtt

SEQ ID NO: 356227 - DNA, 19 bp, Homo sapiens
  siRNA target sequence for CDK5RAP1 (NM_016082.3,924-942).
cagtgcagtgcctaccaat

SEQ ID NO: 356228 - DNA, 19 bp, Homo sapiens
  siRNA target sequence for CDK5RAP1 (NM_016082.3,943-961).
ctcagtcgtggctttacca

SEQ ID NO: 356229 - DNA, 19 bp, Homo sapiens
  siRNA target sequence for CDK5RAP1 (NM_016082.3,952-970).
ggctttaccaccaactata

SEQ ID NO: 356230 - DNA, 19 bp, Homo sapiens
  siRNA target sequence for CDK5RAP1 (NM_016082.3,953-971).
gctttaccaccaactataa

SEQ ID NO: 356231 - DNA, 19 bp, Homo sapiens
  siRNA target sequence for CDK5RAP1 (NM_016082.3,954-972).
ctttaccaccaactataaa

SEQ ID NO: 356232 - DNA, 19 bp, Homo sapiens
  siRNA target sequence for CDK5RAP1 (NM_016082.3,959-977).
ccaccaactataaaaccaa

SEQ ID NO: 356233 - DNA, 19 bp, Homo sapiens
  siRNA target sequence for CDK5RAP1 (NM_016082.3,1083-1101).
ggttctgcagctgattcat

SEQ ID NO: 356234 - DNA, 19 bp, Homo sapiens
  siRNA target sequence for CDK5RAP1 (NM_016082.3,1196-1214).
cttatgtggagttagttca

SEQ ID NO: 356235 - DNA, 19 bp, Homo sapiens
  siRNA target sequence for CDK5RAP1 (NM_016082.3,1204-1222).
gagttagttcaccatatta

SEQ ID NO: 356236 - DNA, 19 bp, Homo sapiens
  siRNA target sequence for CDK5RAP1 (NM_016082.3,1206-1224).
gttagttcaccatattaga

SEQ ID NO: 356237 - DNA, 19 bp, Homo sapiens
  siRNA target sequence for CDK5RAP1 (NM_016082.3,1245-1263).
cctcagcagcgatttcatt

SEQ ID NO: 356238 - DNA, 19 bp, Homo sapiens
  siRNA target sequence for CDK5RAP1 (NM_016082.3,1277-1295).
gtgagacggaggaagatca

SEQ ID NO: 356239 - DNA, 19 bp, Homo sapiens
  siRNA target sequence for CDK5RAP1 (NM_016082.3,1310-1328).
ctttgctccgggaagttca

SEQ ID NO: 356240 - DNA, 19 bp, Homo sapiens
  siRNA target sequence for CDK5RAP1 (NM_016082.3,1318-1336).
cgggaagttcagtacaaca

SEQ ID NO: 356241 - DNA, 19 bp, Homo sapiens
  siRNA target sequence for CDK5RAP1 (NM_016082.3,1319-1337).
gggaagttcagtacaacat

SEQ ID NO: 356242 - DNA, 19 bp, Homo sapiens
  siRNA target sequence for CDK5RAP1 (NM_016082.3,1368-1386).
gaagacacgggcatatcat

SEQ ID NO: 356243 - DNA, 19 bp, Homo sapiens
  siRNA target sequence for CDK5RAP1 (NM_016082.3,1424-1442).
ggcgtttggaggaactcat

SEQ ID NO: 356244 - DNA, 19 bp, Homo sapiens
  siRNA target sequence for CDK5RAP1 (NM_016082.3,1452-1470).
ccgagaagaagcaacaaaa

SEQ ID NO: 356245 - DNA, 19 bp, Homo sapiens
  siRNA target sequence for CDK5RAP1 (NM_016082.3,1682-1700).
cacttaggggacatgttct

SEQ ID NO: 356246 - DNA, 19 bp, Homo sapiens
  siRNA target sequence for CDK5RAP1 (NM_016082.3,1716-1734).
gagggactcttctgcatat

SEQ ID NO: 356247 - DNA, 19 bp, Homo sapiens
  siRNA target sequence for APR-3 (NM_016085.2,346-364).
cccgttgctgcctgaatca

SEQ ID NO: 356248 - DNA, 19 bp, Homo sapiens
  siRNA target sequence for APR-3 (NM_016085.2,410-428).
ggaccctggtccaaacttt

SEQ ID NO: 356249 - DNA, 19 bp, Homo sapiens
  siRNA target sequence for APR-3 (NM_016085.2,545-563).
caactgtcctggaggaatt

SEQ ID NO: 356250 - DNA, 19 bp, Homo sapiens
  siRNA target sequence for APR-3 (NM_016085.2,558-576).
ggaattaatgcctggaata

SEQ ID NO: 356251 - DNA, 19 bp, Homo sapiens
  siRNA target sequence for APR-3 (NM_016085.2,609-627).
caagggcaaaagaaccttt

SEQ ID NO: 356252 - DNA, 19 bp, Homo sapiens
  siRNA target sequence for APR-3 (NM_016085.2,613-631).
ggcaaaagaacctttgcaa

SEQ ID NO: 356253 - DNA, 19 bp, Homo sapiens
  siRNA target sequence for APR-3 (NM_016085.2,620-638).
gaacctttgcaataacact

SEQ ID NO: 356254 - DNA, 19 bp, Homo sapiens
  siRNA target sequence for APR-3 (NM_016085.2,712-730).
ctgatggtttccatggata

SEQ ID NO: 356255 - DNA, 19 bp, Homo sapiens
  siRNA target sequence for APR-3 (NM_016085.2,751-769).
cgttctcactgcttatgtt

SEQ ID NO: 356256 - DNA, 19 bp, Homo sapiens
  siRNA target sequence for APR-3 (NM_016085.2,828-846).
cgccgaaaagccaagactt

SEQ ID NO: 356257 - DNA, 19 bp, Homo sapiens
  siRNA target sequence for APR-3 (NM_016085.2,831-849).
cgaaaagccaagacttcat

SEQ ID NO: 356258 - DNA, 19 bp, Homo sapiens
  siRNA target sequence for LOC51122 (NM_016094.1,56-74).
gtccgaggagcataaggaa

SEQ ID NO: 356259 - DNA, 19 bp, Homo sapiens
  siRNA target sequence for LOC51122 (NM_016094.1,124-142).
ggcggattgctgtggaatt

SEQ ID NO: 356260 - DNA, 19 bp, Homo sapiens
  siRNA target sequence for LOC51122 (NM_016094.1,154-172).
gcgcaaacccaaaaatcta

SEQ ID NO: 356261 - DNA, 19 bp, Homo sapiens
  siRNA target sequence for LOC51122 (NM_016094.1,218-236).
gcatggtgtggaaggatta

SEQ ID NO: 356262 - DNA, 19 bp, Homo sapiens
  siRNA target sequence for LOC51122 (NM_016094.1,254-272).
gagctcaaagctcatgatt

SEQ ID NO: 356263 - DNA, 19 bp, Homo sapiens
  siRNA target sequence for Pfs2 (NM_016095.1,222-240).
ggcgattaacctgaaacaa

SEQ ID NO: 356264 - DNA, 19 bp, Homo sapiens
  siRNA target sequence for Pfs2 (NM_016095.1,335-353).
caatgcccagcccttacta

SEQ ID NO: 356265 - DNA, 19 bp, Homo sapiens
  siRNA target sequence for Pfs2 (NM_016095.1,361-379).
cttacgaagctcctgttaa

SEQ ID NO: 356266 - DNA, 19 bp, Homo sapiens
  siRNA target sequence for Pfs2 (NM_016095.1,365-383).
cgaagctcctgttaaatca

SEQ ID NO: 356267 - DNA, 19 bp, Homo sapiens
  siRNA target sequence for Pfs2 (NM_016095.1,418-436).
cggaccctggtcaaggata

SEQ ID NO: 356268 - DNA, 19 bp, Homo sapiens
  siRNA target sequence for Pfs2 (NM_016095.1,500-518).
cacatgccaagctggataa

SEQ ID NO: 356269 - DNA, 19 bp, Homo sapiens
  siRNA target sequence for Pfs2 (NM_016095.1,566-584).
cgctcaaccacatgtacaa

SEQ ID NO: 356270 - DNA, 19 bp, Homo sapiens
  siRNA target sequence for Pfs2 (NM_016095.1,567-585).
gctcaaccacatgtacaaa

SEQ ID NO: 356271 - DNA, 19 bp, Homo sapiens
  siRNA target sequence for GCP16 (NM_016099.1,184-202).
cgaactctaaataaccttt

SEQ ID NO: 356272 - DNA, 19 bp, Homo sapiens
  siRNA target sequence for GCP16 (NM_016099.1,185-203).
gaactctaaataaccttta

SEQ ID NO: 356273 - DNA, 19 bp, Homo sapiens
  siRNA target sequence for GCP16 (NM_016099.1,265-283).
gcatataccatcttcctat

SEQ ID NO: 356274 - DNA, 19 bp, Homo sapiens
  siRNA target sequence for GCP16 (NM_016099.1,280-298).
ctatgcatggaaactcatt

SEQ ID NO: 356275 - DNA, 19 bp, Homo sapiens
  siRNA target sequence for GCP16 (NM_016099.1,284-302).
gcatggaaactcattatga

SEQ ID NO: 356276 - DNA, 19 bp, Homo sapiens
  siRNA target sequence for GCP16 (NM_016099.1,393-411).
gcgaggactgcgagttatt

SEQ ID NO: 356277 - DNA, 19 bp, Homo sapiens
  siRNA target sequence for GCP16 (NM_016099.1,395-413).
gaggactgcgagttattga

SEQ ID NO: 356278 - DNA, 19 bp, Homo sapiens
  siRNA target sequence for GCP16 (NM_016099.1,397-415).
ggactgcgagttattgaaa

SEQ ID NO: 356279 - DNA, 19 bp, Homo sapiens
  siRNA target sequence for GCP16 (NM_016099.1,398-416).
gactgcgagttattgaaat

SEQ ID NO: 356280 - DNA, 19 bp, Homo sapiens
  siRNA target sequence for GCP16 (NM_016099.1,400-418).
ctgcgagttattgaaatta

SEQ ID NO: 356281 - DNA, 19 bp, Homo sapiens
  siRNA target sequence for GCP16 (NM_016099.1,403-421).
cgagttattgaaattacca

SEQ ID NO: 356282 - DNA, 19 bp, Homo sapiens
  siRNA target sequence for AIG1 (NM_016108.2,477-495).
ggacatcgcaccatcagta

SEQ ID NO: 356283 - DNA, 19 bp, Homo sapiens
  siRNA target sequence for AIG1 (NM_016108.2,478-496).
gacatcgcaccatcagtat

SEQ ID NO: 356284 - DNA, 19 bp, Homo sapiens
  siRNA target sequence for AIG1 (NM_016108.2,641-659).
gggtctacaaccatcttaa

SEQ ID NO: 356285 - DNA, 19 bp, Homo sapiens
  siRNA target sequence for AIG1 (NM_016108.2,642-660).
ggtctacaaccatcttaat

SEQ ID NO: 356286 - DNA, 19 bp, Homo sapiens
  siRNA target sequence for AIG1 (NM_016108.2,645-663).
ctacaaccatcttaatgaa

SEQ ID NO: 356287 - DNA, 19 bp, Homo sapiens
  siRNA target sequence for AIG1 (NM_016108.2,681-699).
gagaagttctgaacaacta

SEQ ID NO: 356288 - DNA, 19 bp, Homo sapiens
  siRNA target sequence for AIG1 (NM_016108.2,683-701).
gaagttctgaacaactata

SEQ ID NO: 356289 - DNA, 19 bp, Homo sapiens
  siRNA target sequence for AIG1 (NM_016108.2,686-704).
gttctgaacaactatatct

SEQ ID NO: 356290 - DNA, 19 bp, Homo sapiens
  siRNA target sequence for AIG1 (NM_016108.2,703-721).
ctgggatacacagaaaagt

SEQ ID NO: 356291 - DNA, 19 bp, Homo sapiens
  siRNA target sequence for KIAA0683 (NM_016111.1,255-273).
cgtccgggaagccattcat

SEQ ID NO: 356292 - DNA, 19 bp, Homo sapiens
  siRNA target sequence for KIAA0683 (NM_016111.1,1352-1370).
gggacagccgggatgaact

SEQ ID NO: 356293 - DNA, 19 bp, Homo sapiens
  siRNA target sequence for KIAA0683 (NM_016111.1,1790-1808).
ccacgtctgaggacataga

SEQ ID NO: 356294 - DNA, 19 bp, Homo sapiens
  siRNA target sequence for KIAA0683 (NM_016111.1,1990-2008).
ccggtggccgactatctga

SEQ ID NO: 356295 - DNA, 19 bp, Homo sapiens
  siRNA target sequence for KIAA0683 (NM_016111.1,2215-2233).
gtggaggagcggatcagaa

SEQ ID NO: 356296 - DNA, 19 bp, Homo sapiens
  siRNA target sequence for NY-REN-58 (NM_016122.1,700-718).
gttttaggaatctagatga

SEQ ID NO: 356297 - DNA, 19 bp, Homo sapiens
  siRNA target sequence for NY-REN-58 (NM_016122.1,736-754).
gagctgtatataataagct

SEQ ID NO: 356298 - DNA, 19 bp, Homo sapiens
  siRNA target sequence for NY-REN-58 (NM_016122.1,801-819).
gaagagtatgcacgtattt

SEQ ID NO: 356299 - DNA, 19 bp, Homo sapiens
  siRNA target sequence for NY-REN-58 (NM_016122.1,922-940).
gcaaacgagtggaacaact

SEQ ID NO: 356300 - DNA, 19 bp, Homo sapiens
  siRNA target sequence for NY-REN-58 (NM_016122.1,923-941).
caaacgagtggaacaactt

SEQ ID NO: 356301 - DNA, 19 bp, Homo sapiens
  siRNA target sequence for NY-REN-58 (NM_016122.1,939-957).
cttgctcgagaaaaagtct

SEQ ID NO: 356302 - DNA, 19 bp, Homo sapiens
  siRNA target sequence for NY-REN-58 (NM_016122.1,962-980).
gtgtcaaaaattaaaaggt

SEQ ID NO: 356303 - DNA, 19 bp, Homo sapiens
  siRNA target sequence for NY-REN-58 (NM_016122.1,986-1004).
ggctgaagtagcggaatta

SEQ ID NO: 356304 - DNA, 19 bp, Homo sapiens
  siRNA target sequence for NY-REN-58 (NM_016122.1,987-1005).
gctgaagtagcggaattaa

SEQ ID NO: 356305 - DNA, 19 bp, Homo sapiens
  siRNA target sequence for NY-REN-58 (NM_016122.1,988-1006).
ctgaagtagcggaattaaa

SEQ ID NO: 356306 - DNA, 19 bp, Homo sapiens
  siRNA target sequence for NY-REN-58 (NM_016122.1,997-1015).
cggaattaaaggctgaaaa

SEQ ID NO: 356307 - DNA, 19 bp, Homo sapiens
  siRNA target sequence for NY-REN-58 (NM_016122.1,1203-1221).
gctgaacgagaaataaata

SEQ ID NO: 356308 - DNA, 19 bp, Homo sapiens
  siRNA target sequence for NY-REN-58 (NM_016122.1,1209-1227).
cgagaaataaatacattgt

SEQ ID NO: 356309 - DNA, 19 bp, Homo sapiens
  siRNA target sequence for NY-REN-58 (NM_016122.1,1228-1246).
ccagtaaagtaaaagaact

SEQ ID NO: 356310 - DNA, 19 bp, Homo sapiens
  siRNA target sequence for NY-REN-58 (NM_016122.1,1229-1247).
cagtaaagtaaaagaactt

SEQ ID NO: 356311 - DNA, 19 bp, Homo sapiens
  siRNA target sequence for NY-REN-58 (NM_016122.1,1384-1402).
ctgttgaacatcacaaagt

SEQ ID NO: 356312 - DNA, 19 bp, Homo sapiens
  siRNA target sequence for NY-REN-58 (NM_016122.1,1413-1431).
gaaaaggatcgtgaattaa

SEQ ID NO: 356313 - DNA, 19 bp, Homo sapiens
  siRNA target sequence for NY-REN-58 (NM_016122.1,1418-1436).
ggatcgtgaattaatacgt

SEQ ID NO: 356314 - DNA, 19 bp, Homo sapiens
  siRNA target sequence for NY-REN-58 (NM_016122.1,1419-1437).
gatcgtgaattaatacgta

SEQ ID NO: 356315 - DNA, 19 bp, Homo sapiens
  siRNA target sequence for NY-REN-58 (NM_016122.1,1572-1590).
gatcagtatgaagagaaat

SEQ ID NO: 356316 - DNA, 19 bp, Homo sapiens
  siRNA target sequence for NY-REN-58 (NM_016122.1,1632-1650).
cttcagagtgttaggttaa

SEQ ID NO: 356317 - DNA, 19 bp, Homo sapiens
  siRNA target sequence for NY-REN-58 (NM_016122.1,1658-1676).
gcaacaaattgtgactatt

SEQ ID NO: 356318 - DNA, 19 bp, Homo sapiens
  siRNA target sequence for NY-REN-58 (NM_016122.1,1710-1728).
gacctaaaacagcaaatca

SEQ ID NO: 356319 - DNA, 19 bp, Homo sapiens
  siRNA target sequence for NY-REN-58 (NM_016122.1,1739-1757).
gatccaagtgacttcactt

SEQ ID NO: 356320 - DNA, 19 bp, Homo sapiens
  siRNA target sequence for NY-REN-58 (NM_016122.1,1775-1793).
cttgctgaattcaaaccaa

SEQ ID NO: 356321 - DNA, 19 bp, Homo sapiens
  siRNA target sequence for NY-REN-58 (NM_016122.1,1852-1870).
ctgaaaaagcgcaactaga

SEQ ID NO: 356322 - DNA, 19 bp, Homo sapiens
  siRNA target sequence for NY-REN-58 (NM_016122.1,1904-1922).
gtggttggaagaaaagcat

SEQ ID NO: 356323 - DNA, 19 bp, Homo sapiens
  siRNA target sequence for NY-REN-58 (NM_016122.1,1910-1928).
ggaagaaaagcataagctt

SEQ ID NO: 356324 - DNA, 19 bp, Homo sapiens
  siRNA target sequence for NY-REN-58 (NM_016122.1,2009-2027).
gagaaaatctcttcatgaa

SEQ ID NO: 356325 - DNA, 19 bp, Homo sapiens
  siRNA target sequence for LOC51136 (NM_016125.2,315-333).
cagataaactccataccta

SEQ ID NO: 356326 - DNA, 19 bp, Homo sapiens
  siRNA target sequence for LOC51136 (NM_016125.2,317-335).
gataaactccatacctaaa

SEQ ID NO: 356327 - DNA, 19 bp, Homo sapiens
  siRNA target sequence for LOC51136 (NM_016125.2,438-456).
gcaaggctgactgatgata

SEQ ID NO: 356328 - DNA, 19 bp, Homo sapiens
  siRNA target sequence for LOC51136 (NM_016125.2,461-479).
cgcagaatctggagatcat

SEQ ID NO: 356329 - DNA, 19 bp, Homo sapiens
  siRNA target sequence for LOC51136 (NM_016125.2,496-514).
cagaattccgctatctctt

SEQ ID NO: 356330 - DNA, 19 bp, Homo sapiens
  siRNA target sequence for LOC51136 (NM_016125.2,515-533).
caagtggctgcaaaaaagt

SEQ ID NO: 356331 - DNA, 19 bp, Homo sapiens
  siRNA target sequence for LOC51136 (NM_016125.2,524-542).
gcaaaaaagtcttccatat

SEQ ID NO: 356332 - DNA, 19 bp, Homo sapiens
  siRNA target sequence for LOC51136 (NM_016125.2,525-543).
caaaaaagtcttccatata

SEQ ID NO: 356333 - DNA, 19 bp, Homo sapiens
  siRNA target sequence for LOC51136 (NM_016125.2,552-570).
ctgagcgtcaaacttgtta

SEQ ID NO: 356334 - DNA, 19 bp, Homo sapiens
  siRNA target sequence for LOC51136 (NM_016125.2,556-574).
gcgtcaaacttgttatgca

SEQ ID NO: 356335 - DNA, 19 bp, Homo sapiens
  siRNA target sequence for LOC51136 (NM_016125.2,597-615).
ggaattgggctgctaacaa

SEQ ID NO: 356336 - DNA, 19 bp, Homo sapiens
  siRNA target sequence for LOC51668 (NM_016126.1,239-257).
ggcttgtaatccaaagtta

SEQ ID NO: 356337 - DNA, 19 bp, Homo sapiens
  siRNA target sequence for LOC51668 (NM_016126.1,241-259).
cttgtaatccaaagttact

SEQ ID NO: 356338 - DNA, 19 bp, Homo sapiens
  siRNA target sequence for LOC51668 (NM_016126.1,290-308).
gtctaaagagccagttgat

SEQ ID NO: 356339 - DNA, 19 bp, Homo sapiens
  siRNA target sequence for LOC51668 (NM_016126.1,381-399).
gatggctccgctacttact

SEQ ID NO: 356340 - DNA, 19 bp, Homo sapiens
  siRNA target sequence for MGC8721 (NM_016127.3,108-126).
ggaacgaccctgacagaat

SEQ ID NO: 356341 - DNA, 19 bp, Homo sapiens
  siRNA target sequence for MGC8721 (NM_016127.3,127-145).
gttgctgcgggatgtaaaa

SEQ ID NO: 356342 - DNA, 19 bp, Homo sapiens
  siRNA target sequence for MGC8721 (NM_016127.3,130-148).
gctgcgggatgtaaaagct

SEQ ID NO: 356343 - DNA, 19 bp, Homo sapiens
  siRNA target sequence for MGC8721 (NM_016127.3,158-176).
cactatgaccgctatacca

SEQ ID NO: 356344 - DNA, 19 bp, Homo sapiens
  siRNA target sequence for MGC8721 (NM_016127.3,199-217).
cccacagttgaaatgtgtt

SEQ ID NO: 356345 - DNA, 19 bp, Homo sapiens
  siRNA target sequence for MGC8721 (NM_016127.3,223-241).
cacagctggttgtgattct

SEQ ID NO: 356346 - DNA, 19 bp, Homo sapiens
  siRNA target sequence for MGC8721 (NM_016127.3,225-243).
cagctggttgtgattctta

SEQ ID NO: 356347 - DNA, 19 bp, Homo sapiens
  siRNA target sequence for MGC8721 (NM_016127.3,276-294).
gctgggatgggtatgatgt

SEQ ID NO: 356348 - DNA, 19 bp, Homo sapiens
  siRNA target sequence for MGC8721 (NM_016127.3,279-297).
gggatgggtatgatgtaca

SEQ ID NO: 356349 - DNA, 19 bp, Homo sapiens
  siRNA target sequence for MGC8721 (NM_016127.3,306-324).
gtaagacggacttagatat

SEQ ID NO: 356350 - DNA, 19 bp, Homo sapiens
  siRNA target sequence for MGC8721 (NM_016127.3,310-328).
gacggacttagatattgca

SEQ ID NO: 356351 - DNA, 19 bp, Homo sapiens
  siRNA target sequence for MGC8721 (NM_016127.3,312-330).
cggacttagatattgcata

SEQ ID NO: 356352 - DNA, 19 bp, Homo sapiens
  siRNA target sequence for MGC8721 (NM_016127.3,316-334).
cttagatattgcatacaaa

SEQ ID NO: 356353 - DNA, 19 bp, Homo sapiens
  siRNA target sequence for MGC8721 (NM_016127.3,372-390).
cctctgaagaccagtatgt

SEQ ID NO: 356354 - DNA, 19 bp, Homo sapiens
  siRNA target sequence for MGC8721 (NM_016127.3,373-391).
ctctgaagaccagtatgta

SEQ ID NO: 356355 - DNA, 19 bp, Homo sapiens
  siRNA target sequence for MGC8721 (NM_016127.3,377-395).
gaagaccagtatgtactaa

SEQ ID NO: 356356 - DNA, 19 bp, Homo sapiens
  siRNA target sequence for MGC8721 (NM_016127.3,402-420).
cttgtggcttggagtataa

SEQ ID NO: 356357 - DNA, 19 bp, Homo sapiens
  siRNA target sequence for MGC8721 (NM_016127.3,405-423).
gtggcttggagtataattt

SEQ ID NO: 356358 - DNA, 19 bp, Homo sapiens
  siRNA target sequence for MGC8721 (NM_016127.3,473-491).
cacggctttgcctctttct

SEQ ID NO: 356359 - DNA, 19 bp, Homo sapiens
  siRNA target sequence for MGC8721 (NM_016127.3,528-546).
gtaacatgagtggattgat

SEQ ID NO: 356360 - DNA, 19 bp, Homo sapiens
  siRNA target sequence for MGC8721 (NM_016127.3,596-614).
ctgagtgacgggcagtatt

SEQ ID NO: 356361 - DNA, 19 bp, Homo sapiens
  siRNA target sequence for MGC8721 (NM_016127.3,598-616).
gagtgacgggcagtattct

SEQ ID NO: 356362 - DNA, 19 bp, Homo sapiens
  siRNA target sequence for MGC8721 (NM_016127.3,817-835).
gggaactggtggaatacta

SEQ ID NO: 356363 - DNA, 19 bp, Homo sapiens
  siRNA target sequence for MGC8721 (NM_016127.3,824-842).
ggtggaatactaggatatt

SEQ ID NO: 356364 - DNA, 19 bp, Homo sapiens
  siRNA target sequence for MGC8721 (NM_016127.3,825-843).
gtggaatactaggatattt

SEQ ID NO: 356365 - DNA, 19 bp, Homo sapiens
  siRNA target sequence for MGC8721 (NM_016127.3,922-940).
gtggaatagggcttactca

SEQ ID NO: 356366 - DNA, 19 bp, Homo sapiens
  siRNA target sequence for MGC8721 (NM_016127.3,959-977).
ggcagctattcggtatgtt

SEQ ID NO: 356367 - DNA, 19 bp, Homo sapiens
  siRNA target sequence for MGC8721 (NM_016127.3,961-979).
cagctattcggtatgttca

SEQ ID NO: 356368 - DNA, 19 bp, Homo sapiens
  siRNA target sequence for MGC8721 (NM_016127.3,963-981).
gctattcggtatgttcaaa

SEQ ID NO: 356369 - DNA, 19 bp, Homo sapiens
  siRNA target sequence for MGC8721 (NM_016127.3,997-1015).
cagaactgcatcaggatat

SEQ ID NO: 356370 - DNA, 19 bp, Homo sapiens
  siRNA target sequence for COPS4 (NM_016129.2,147-165).
cagccgtgcgacaggattt

SEQ ID NO: 356371 - DNA, 19 bp, Homo sapiens
  siRNA target sequence for COPS4 (NM_016129.2,167-185).
gcccagctcatgaattcga

SEQ ID NO: 356372 - DNA, 19 bp, Homo sapiens
  siRNA target sequence for COPS4 (NM_016129.2,183-201).
cgagcggctctcataaaga

SEQ ID NO: 356373 - DNA, 19 bp, Homo sapiens
  siRNA target sequence for COPS4 (NM_016129.2,184-202).
gagcggctctcataaagat

SEQ ID NO: 356374 - DNA, 19 bp, Homo sapiens
  siRNA target sequence for COPS4 (NM_016129.2,186-204).
gcggctctcataaagatct

SEQ ID NO: 356375 - DNA, 19 bp, Homo sapiens
  siRNA target sequence for COPS4 (NM_016129.2,326-344).
cggcagttgctgactgatt

SEQ ID NO: 356376 - DNA, 19 bp, Homo sapiens
  siRNA target sequence for COPS4 (NM_016129.2,380-398).
gccaaagaaatctatcact

SEQ ID NO: 356377 - DNA, 19 bp, Homo sapiens
  siRNA target sequence for COPS4 (NM_016129.2,381-399).
ccaaagaaatctatcactt

SEQ ID NO: 356378 - DNA, 19 bp, Homo sapiens
  siRNA target sequence for COPS4 (NM_016129.2,412-430).
gatccagcctagagtcatt

SEQ ID NO: 356379 - DNA, 19 bp, Homo sapiens
  siRNA target sequence for COPS4 (NM_016129.2,440-458).
gagcaggttgcttccataa

SEQ ID NO: 356380 - DNA, 19 bp, Homo sapiens
  siRNA target sequence for COPS4 (NM_016129.2,442-460).
gcaggttgcttccataaga

SEQ ID NO: 356381 - DNA, 19 bp, Homo sapiens
  siRNA target sequence for COPS4 (NM_016129.2,515-533).
gtgttggtgggaattcctt

SEQ ID NO: 356382 - DNA, 19 bp, Homo sapiens
  siRNA target sequence for COPS4 (NM_016129.2,626-644).
caggcagaggcttacataa

SEQ ID NO: 356383 - DNA, 19 bp, Homo sapiens
  siRNA target sequence for COPS4 (NM_016129.2,651-669).
catcgttgcttcagaatga

SEQ ID NO: 356384 - DNA, 19 bp, Homo sapiens
  siRNA target sequence for COPS4 (NM_016129.2,672-690).
caaccaatgaacaattaca

SEQ ID NO: 356385 - DNA, 19 bp, Homo sapiens
  siRNA target sequence for COPS4 (NM_016129.2,708-726).
gctatgcacgtgttcttga

SEQ ID NO: 356386 - DNA, 19 bp, Homo sapiens
  siRNA target sequence for COPS4 (NM_016129.2,709-727).
ctatgcacgtgttcttgat

SEQ ID NO: 356387 - DNA, 19 bp, Homo sapiens
  siRNA target sequence for COPS4 (NM_016129.2,713-731).
gcacgtgttcttgattata

SEQ ID NO: 356388 - DNA, 19 bp, Homo sapiens
  siRNA target sequence for COPS4 (NM_016129.2,716-734).
cgtgttcttgattatagaa

SEQ ID NO: 356389 - DNA, 19 bp, Homo sapiens
  siRNA target sequence for COPS4 (NM_016129.2,750-768).
ctgcacaaaggtacaatga

SEQ ID NO: 356390 - DNA, 19 bp, Homo sapiens
  siRNA target sequence for COPS4 (NM_016129.2,769-787).
gctctcttacaagacaata

SEQ ID NO: 356391 - DNA, 19 bp, Homo sapiens
  siRNA target sequence for COPS4 (NM_016129.2,783-801).
caatagtccacgaaagtga

SEQ ID NO: 356392 - DNA, 19 bp, Homo sapiens
  siRNA target sequence for COPS4 (NM_016129.2,830-848).
cactgtacgatcttagcat

SEQ ID NO: 356393 - DNA, 19 bp, Homo sapiens
  siRNA target sequence for COPS4 (NM_016129.2,869-887).
cggatgctagctactcttt

SEQ ID NO: 356394 - DNA, 19 bp, Homo sapiens
  siRNA target sequence for COPS4 (NM_016129.2,918-936).
cctatgggatcctagagaa

SEQ ID NO: 356395 - DNA, 19 bp, Homo sapiens
  siRNA target sequence for COPS4 (NM_016129.2,919-937).
ctatgggatcctagagaaa

SEQ ID NO: 356396 - DNA, 19 bp, Homo sapiens
  siRNA target sequence for COPS4 (NM_016129.2,932-950).
gagaaaatgtatctagata

SEQ ID NO: 356397 - DNA, 19 bp, Homo sapiens
  siRNA target sequence for COPS4 (NM_016129.2,962-980).
ggaaatcaacttcaagaat

SEQ ID NO: 356398 - DNA, 19 bp, Homo sapiens
  siRNA target sequence for COPS4 (NM_016129.2,994-1012).
gatgcctcaccaaaaagca

SEQ ID NO: 356399 - DNA, 19 bp, Homo sapiens
  siRNA target sequence for COPS4 (NM_016129.2,1036-1054).
cttggacagagctgttatt

SEQ ID NO: 356400 - DNA, 19 bp, Homo sapiens
  siRNA target sequence for COPS4 (NM_016129.2,1039-1057).
ggacagagctgttattgaa

SEQ ID NO: 356401 - DNA, 19 bp, Homo sapiens
  siRNA target sequence for COPS4 (NM_016129.2,1044-1062).
gagctgttattgaacacaa

SEQ ID NO: 356402 - DNA, 19 bp, Homo sapiens
  siRNA target sequence for COPS4 (NM_016129.2,1046-1064).
gctgttattgaacacaatt

SEQ ID NO: 356403 - DNA, 19 bp, Homo sapiens
  siRNA target sequence for COPS4 (NM_016129.2,1047-1065).
ctgttattgaacacaattt

SEQ ID NO: 356404 - DNA, 19 bp, Homo sapiens
  siRNA target sequence for COPS4 (NM_016129.2,1049-1067).
gttattgaacacaatttgt

SEQ ID NO: 356405 - DNA, 19 bp, Homo sapiens
  siRNA target sequence for COPS4 (NM_016129.2,1133-1151).
gcagctaaggcggaaaaga

SEQ ID NO: 356406 - DNA, 19 bp, Homo sapiens
  siRNA target sequence for COPS4 (NM_016129.2,1134-1152).
cagctaaggcggaaaagat

SEQ ID NO: 356407 - DNA, 19 bp, Homo sapiens
  siRNA target sequence for COPS4 (NM_016129.2,1172-1190).
gaaggacgtatgaatggat

SEQ ID NO: 356408 - DNA, 19 bp, Homo sapiens
  siRNA target sequence for COPS4 (NM_016129.2,1201-1219).
gattgatggaatagttcat

SEQ ID NO: 356409 - DNA, 19 bp, Homo sapiens
  siRNA target sequence for COPS4 (NM_016129.2,1256-1274).
cagatccaatcactttgtt

SEQ ID NO: 356410 - DNA, 19 bp, Homo sapiens
  siRNA target sequence for INSIG2 (NM_016133.2,271-289).
ctagccagagtgtgaactt

SEQ ID NO: 356411 - DNA, 19 bp, Homo sapiens
  siRNA target sequence for INSIG2 (NM_016133.2,276-294).
cagagtgtgaacttgatga

SEQ ID NO: 356412 - DNA, 19 bp, Homo sapiens
  siRNA target sequence for INSIG2 (NM_016133.2,278-296).
gagtgtgaacttgatgatt

SEQ ID NO: 356413 - DNA, 19 bp, Homo sapiens
  siRNA target sequence for INSIG2 (NM_016133.2,297-315).
cgaggagtagtgctatttt

SEQ ID NO: 356414 - DNA, 19 bp, Homo sapiens
  siRNA target sequence for INSIG2 (NM_016133.2,300-318).
ggagtagtgctatttttta

SEQ ID NO: 356415 - DNA, 19 bp, Homo sapiens
  siRNA target sequence for INSIG2 (NM_016133.2,301-319).
gagtagtgctattttttat

SEQ ID NO: 356416 - DNA, 19 bp, Homo sapiens
  siRNA target sequence for INSIG2 (NM_016133.2,440-458).
cacggcttcagctgtgatt

SEQ ID NO: 356417 - DNA, 19 bp, Homo sapiens
  siRNA target sequence for INSIG2 (NM_016133.2,448-466).
cagctgtgattgggttatt

SEQ ID NO: 356418 - DNA, 19 bp, Homo sapiens
  siRNA target sequence for INSIG2 (NM_016133.2,450-468).
gctgtgattgggttattat

SEQ ID NO: 356419 - DNA, 19 bp, Homo sapiens
  siRNA target sequence for INSIG2 (NM_016133.2,473-491).
ctgcattgacagacatcta

SEQ ID NO: 356420 - DNA, 19 bp, Homo sapiens
  siRNA target sequence for INSIG2 (NM_016133.2,514-532).
gagagtggtccagtgtaat

SEQ ID NO: 356421 - DNA, 19 bp, Homo sapiens
  siRNA target sequence for INSIG2 (NM_016133.2,533-551).
gcggtgtgtagcagtcttt

SEQ ID NO: 356422 - DNA, 19 bp, Homo sapiens
  siRNA target sequence for INSIG2 (NM_016133.2,571-589).
gtgctaaagtggatttcga

SEQ ID NO: 356423 - DNA, 19 bp, Homo sapiens
  siRNA target sequence for INSIG2 (NM_016133.2,573-591).
gctaaagtggatttcgata

SEQ ID NO: 356424 - DNA, 19 bp, Homo sapiens
  siRNA target sequence for INSIG2 (NM_016133.2,574-592).
ctaaagtggatttcgataa

SEQ ID NO: 356425 - DNA, 19 bp, Homo sapiens
  siRNA target sequence for INSIG2 (NM_016133.2,581-599).
ggatttcgataacaacata

SEQ ID NO: 356426 - DNA, 19 bp, Homo sapiens
  siRNA target sequence for INSIG2 (NM_016133.2,613-631).
cactggctgcactatccat

SEQ ID NO: 356427 - DNA, 19 bp, Homo sapiens
  siRNA target sequence for INSIG2 (NM_016133.2,732-750).
ggtgtttaccaatatacat

SEQ ID NO: 356428 - DNA, 19 bp, Homo sapiens
  siRNA target sequence for INSIG2 (NM_016133.2,764-782).
ctatgttcgttcttggtta

SEQ ID NO: 356429 - DNA, 19 bp, Homo sapiens
  siRNA target sequence for INSIG2 (NM_016133.2,772-790).
gttcttggttaccatgtat

SEQ ID NO: 356430 - DNA, 19 bp, Homo sapiens
  siRNA target sequence for INSIG2 (NM_016133.2,805-823).
gcataacaatgggaaacat

SEQ ID NO: 356431 - DNA, 19 bp, Homo sapiens
  siRNA target sequence for INSIG2 (NM_016133.2,826-844).
gtcgacaactggcaatgta

SEQ ID NO: 356432 - DNA, 19 bp, Homo sapiens
  siRNA target sequence for INSIG2 (NM_016133.2,831-849).
caactggcaatgtacgaat

SEQ ID NO: 356433 - DNA, 19 bp, Homo sapiens
  siRNA target sequence for INSIG2 (NM_016133.2,834-852).
ctggcaatgtacgaatgta

SEQ ID NO: 356434 - DNA, 19 bp, Homo sapiens
  siRNA target sequence for INSIG2 (NM_016133.2,836-854).
ggcaatgtacgaatgtaaa

SEQ ID NO: 356435 - DNA, 19 bp, Homo sapiens
  siRNA target sequence for NSFL1C (NM_016143.3,1056-1074).
cgcgctagcgagcttttat

SEQ ID NO: 356436 - DNA, 19 bp, Homo sapiens
  siRNA target sequence for NSFL1C (NM_016143.3,1058-1076).
cgctagcgagcttttatga

SEQ ID NO: 356437 - DNA, 19 bp, Homo sapiens
  siRNA target sequence for NSFL1C (NM_016143.3,1138-1156).
ggcacagcccccagtgata

SEQ ID NO: 356438 - DNA, 19 bp, Homo sapiens
  siRNA target sequence for NSFL1C (NM_016143.3,1215-1233).
ggaaggccagaggttttat

SEQ ID NO: 356439 - DNA, 19 bp, Homo sapiens
  siRNA target sequence for NSFL1C (NM_016143.3,1250-1268).
gaagtggacagcagattgt

SEQ ID NO: 356440 - DNA, 19 bp, Homo sapiens
  siRNA target sequence for NSFL1C (NM_016143.3,1302-1320).
ggtggatgatctctttaaa

SEQ ID NO: 356441 - DNA, 19 bp, Homo sapiens
  siRNA target sequence for NSFL1C (NM_016143.3,1380-1398).
cagtaaaccgagaccattt

SEQ ID NO: 356442 - DNA, 19 bp, Homo sapiens
  siRNA target sequence for NSFL1C (NM_016143.3,1475-1493).
ccagccaagatgttcatgt

SEQ ID NO: 356443 - DNA, 19 bp, Homo sapiens
  siRNA target sequence for NSFL1C (NM_016143.3,1476-1494).
cagccaagatgttcatgta

SEQ ID NO: 356444 - DNA, 19 bp, Homo sapiens
  siRNA target sequence for NSFL1C (NM_016143.3,1478-1496).
gccaagatgttcatgtagt

SEQ ID NO: 356445 - DNA, 19 bp, Homo sapiens
  siRNA target sequence for NSFL1C (NM_016143.3,1479-1497).
ccaagatgttcatgtagta

SEQ ID NO: 356446 - DNA, 19 bp, Homo sapiens
  siRNA target sequence for NSFL1C (NM_016143.3,1480-1498).
caagatgttcatgtagtat

SEQ ID NO: 356447 - DNA, 19 bp, Homo sapiens
  siRNA target sequence for NSFL1C (NM_016143.3,1483-1501).
gatgttcatgtagtattga

SEQ ID NO: 356448 - DNA, 19 bp, Homo sapiens
  siRNA target sequence for NSFL1C (NM_016143.3,1548-1566).
ctaccaagacccatccaat

SEQ ID NO: 356449 - DNA, 19 bp, Homo sapiens
  siRNA target sequence for NSFL1C (NM_016143.3,1633-1651).
ggacaggtgaacttggata

SEQ ID NO: 356450 - DNA, 19 bp, Homo sapiens
  siRNA target sequence for NSFL1C (NM_016143.3,1634-1652).
gacaggtgaacttggatat

SEQ ID NO: 356451 - DNA, 19 bp, Homo sapiens
  siRNA target sequence for NSFL1C (NM_016143.3,1829-1847).
ctaccacaaacatccaaat

SEQ ID NO: 356452 - DNA, 19 bp, Homo sapiens
  siRNA target sequence for NSFL1C (NM_016143.3,1904-1922).
gcgacatccgactcttcat

SEQ ID NO: 356453 - DNA, 19 bp, Homo sapiens
  siRNA target sequence for NSFL1C (NM_016143.3,1946-1964).
ctgccaccagctttatcct

SEQ ID NO: 356454 - DNA, 19 bp, Homo sapiens
  siRNA target sequence for NSFL1C (NM_016143.3,1968-1986).
gactactttcccgaacaaa

SEQ ID NO: 356455 - DNA, 19 bp, Homo sapiens
  siRNA target sequence for NSFL1C (NM_016143.3,1970-1988).
ctactttcccgaacaaaga

SEQ ID NO: 356456 - DNA, 19 bp, Homo sapiens
  siRNA target sequence for PTD002 (NM_016144.2,78-96).
gtgtcactgataaatgcaa

SEQ ID NO: 356457 - DNA, 19 bp, Homo sapiens
  siRNA target sequence for PTD002 (NM_016144.2,82-100).
cactgataaatgcaataga

SEQ ID NO: 356458 - DNA, 19 bp, Homo sapiens
  siRNA target sequence for PTD002 (NM_016144.2,86-104).
gataaatgcaatagataca

SEQ ID NO: 356459 - DNA, 19 bp, Homo sapiens
  siRNA target sequence for PTD002 (NM_016144.2,122-140).
gctcactcggattcttcaa

SEQ ID NO: 356460 - DNA, 19 bp, Homo sapiens
  siRNA target sequence for PTD002 (NM_016144.2,123-141).
ctcactcggattcttcaaa

SEQ ID NO: 356461 - DNA, 19 bp, Homo sapiens
  siRNA target sequence for PTD002 (NM_016144.2,127-145).
ctcggattcttcaaaaact

SEQ ID NO: 356462 - DNA, 19 bp, Homo sapiens
  siRNA target sequence for PTD002 (NM_016144.2,199-217).
cggcattttctctagagaa

SEQ ID NO: 356463 - DNA, 19 bp, Homo sapiens
  siRNA target sequence for PTD002 (NM_016144.2,225-243).
cttcacctagttcttgaaa

SEQ ID NO: 356464 - DNA, 19 bp, Homo sapiens
  siRNA target sequence for PTD002 (NM_016144.2,230-248).
cctagttcttgaaacaata

SEQ ID NO: 356465 - DNA, 19 bp, Homo sapiens
  siRNA target sequence for PTD002 (NM_016144.2,234-252).
gttcttgaaacaatatcat

SEQ ID NO: 356466 - DNA, 19 bp, Homo sapiens
  siRNA target sequence for PTD002 (NM_016144.2,261-279).
gaacaggcagtgtatcaca

SEQ ID NO: 356467 - DNA, 19 bp, Homo sapiens
  siRNA target sequence for PTD002 (NM_016144.2,267-285).
gcagtgtatcacaatgtga

SEQ ID NO: 356468 - DNA, 19 bp, Homo sapiens
  siRNA target sequence for PTD002 (NM_016144.2,302-320).
gcagcaattagagaacatt

SEQ ID NO: 356469 - DNA, 19 bp, Homo sapiens
  siRNA target sequence for PTD002 (NM_016144.2,305-323).
gcaattagagaacattcat

SEQ ID NO: 356470 - DNA, 19 bp, Homo sapiens
  siRNA target sequence for PTD002 (NM_016144.2,314-332).
gaacattcatcttagacaa

SEQ ID NO: 356471 - DNA, 19 bp, Homo sapiens
  siRNA target sequence for PTD002 (NM_016144.2,342-360).
gaagcatttgtcaatacgt

SEQ ID NO: 356472 - DNA, 19 bp, Homo sapiens
  siRNA target sequence for PTD002 (NM_016144.2,351-369).
gtcaatacgtggtcttcta

SEQ ID NO: 356473 - DNA, 19 bp, Homo sapiens
  siRNA target sequence for PTD002 (NM_016144.2,367-385).
ctatgggtcaagaaacagt

SEQ ID NO: 356474 - DNA, 19 bp, Homo sapiens
  siRNA target sequence for PTD002 (NM_016144.2,439-457).
ggcagcttaaccttcagat

SEQ ID NO: 356475 - DNA, 19 bp, Homo sapiens
  siRNA target sequence for PTD002 (NM_016144.2,460-478).
ctcactctgctcaagcaaa

SEQ ID NO: 356476 - DNA, 19 bp, Homo sapiens
  siRNA target sequence for PTD002 (NM_016144.2,464-482).
ctctgctcaagcaaaacta

SEQ ID NO: 356477 - DNA, 19 bp, Homo sapiens
  siRNA target sequence for PTD002 (NM_016144.2,466-484).
ctgctcaagcaaaactaaa

SEQ ID NO: 356478 - DNA, 19 bp, Homo sapiens
  siRNA target sequence for PTD002 (NM_016144.2,468-486).
gctcaagcaaaactaaaat

SEQ ID NO: 356479 - DNA, 19 bp, Homo sapiens
  siRNA target sequence for PTD002 (NM_016144.2,487-505).
ctcctcaagctgtgttaca

SEQ ID NO: 356480 - DNA, 19 bp, Homo sapiens
  siRNA target sequence for PTD002 (NM_016144.2,490-508).
ctcaagctgtgttacaact

SEQ ID NO: 356481 - DNA, 19 bp, Homo sapiens
  siRNA target sequence for PTD002 (NM_016144.2,509-527).
cggagtgaacaatgaagat

SEQ ID NO: 356482 - DNA, 19 bp, Homo sapiens
  siRNA target sequence for PTD002 (NM_016144.2,510-528).
ggagtgaacaatgaagatt

SEQ ID NO: 356483 - DNA, 19 bp, Homo sapiens
  siRNA target sequence for PTD002 (NM_016144.2,590-608).
caagctagagactatacaa

SEQ ID NO: 356484 - DNA, 19 bp, Homo sapiens
  siRNA target sequence for LW-1 (NM_016153.1,720-738).
gaggacaagcgatcattga

SEQ ID NO: 356485 - DNA, 19 bp, Homo sapiens
  siRNA target sequence for LW-1 (NM_016153.1,722-740).
ggacaagcgatcattgagt

SEQ ID NO: 356486 - DNA, 19 bp, Homo sapiens
  siRNA target sequence for LW-1 (NM_016153.1,723-741).
gacaagcgatcattgagta

SEQ ID NO: 356487 - DNA, 19 bp, Homo sapiens
  siRNA target sequence for LW-1 (NM_016153.1,874-892).
ccactgggagccctaactt

SEQ ID NO: 356488 - DNA, 19 bp, Homo sapiens
  siRNA target sequence for LW-1 (NM_016153.1,933-951).
gaggaagcttcgttcagaa

SEQ ID NO: 356489 - DNA, 19 bp, Homo sapiens
  siRNA target sequence for LW-1 (NM_016153.1,1078-1096).
gggcttgtagagtgatcaa

SEQ ID NO: 356490 - DNA, 19 bp, Homo sapiens
  siRNA target sequence for LW-1 (NM_016153.1,1081-1099).
cttgtagagtgatcaatca

SEQ ID NO: 356491 - DNA, 19 bp, Homo sapiens
  siRNA target sequence for LW-1 (NM_016153.1,1084-1102).
gtagagtgatcaatcaaaa

SEQ ID NO: 356492 - DNA, 19 bp, Homo sapiens
  siRNA target sequence for LW-1 (NM_016153.1,1129-1147).
gggacgtcgcacacaaagt

SEQ ID NO: 356493 - DNA, 19 bp, Homo sapiens
  siRNA target sequence for LW-1 (NM_016153.1,1131-1149).
gacgtcgcacacaaagtgt

SEQ ID NO: 356494 - DNA, 19 bp, Homo sapiens
  siRNA target sequence for LW-1 (NM_016153.1,1133-1151).
cgtcgcacacaaagtgttt

SEQ ID NO: 356495 - DNA, 19 bp, Homo sapiens
  siRNA target sequence for LW-1 (NM_016153.1,1152-1170).
gccacaacttcgataaaga

SEQ ID NO: 356496 - DNA, 19 bp, Homo sapiens
  siRNA target sequence for LW-1 (NM_016153.1,1178-1196).
ccgccagctaaacttgtat

SEQ ID NO: 356497 - DNA, 19 bp, Homo sapiens
  siRNA target sequence for LW-1 (NM_016153.1,1209-1227).
cggcgtcaatgcactttca

SEQ ID NO: 356498 - DNA, 19 bp, Homo sapiens
  siRNA target sequence for LW-1 (NM_016153.1,1239-1257).
cgcattttctccgcaaaaa

SEQ ID NO: 356499 - DNA, 19 bp, Homo sapiens
  siRNA target sequence for LW-1 (NM_016153.1,1326-1344).
ctcctcgtgaggatgaaga

SEQ ID NO: 356500 - DNA, 19 bp, Homo sapiens
  siRNA target sequence for LW-1 (NM_016153.1,1358-1376).
caagtctgcaccaagacat

SEQ ID NO: 356501 - DNA, 19 bp, Homo sapiens
  siRNA target sequence for LW-1 (NM_016153.1,1443-1461).
cacacgtctccgaatgaga

SEQ ID NO: 356502 - DNA, 19 bp, Homo sapiens
  siRNA target sequence for LW-1 (NM_016153.1,1445-1463).
cacgtctccgaatgagaat

SEQ ID NO: 356503 - DNA, 19 bp, Homo sapiens
  siRNA target sequence for LW-1 (NM_016153.1,1447-1465).
cgtctccgaatgagaatga

SEQ ID NO: 356504 - DNA, 19 bp, Homo sapiens
  siRNA target sequence for LW-1 (NM_016153.1,1497-1515).
ggtcccaacacccaaatca

SEQ ID NO: 356505 - DNA, 19 bp, Homo sapiens
  siRNA target sequence for LW-1 (NM_016153.1,1696-1714).
ccactcagatgaattctta

SEQ ID NO: 356506 - DNA, 19 bp, Homo sapiens
  siRNA target sequence for RARG-1 (NM_016167.3,287-305).
gaccgtgcgcagggataaa

SEQ ID NO: 356507 - DNA, 19 bp, Homo sapiens
  siRNA target sequence for RARG-1 (NM_016167.3,405-423).
gcttcacagactaacatca

SEQ ID NO: 356508 - DNA, 19 bp, Homo sapiens
  siRNA target sequence for RARG-1 (NM_016167.3,406-424).
cttcacagactaacatcaa

SEQ ID NO: 356509 - DNA, 19 bp, Homo sapiens
  siRNA target sequence for RARG-1 (NM_016167.3,409-427).
cacagactaacatcaagaa

SEQ ID NO: 356510 - DNA, 19 bp, Homo sapiens
  siRNA target sequence for RARG-1 (NM_016167.3,487-505).
gaaatgactccaagaaagt

SEQ ID NO: 356511 - DNA, 19 bp, Homo sapiens
  siRNA target sequence for RARG-1 (NM_016167.3,600-618).
gcacaagccttcatacata

SEQ ID NO: 356512 - DNA, 19 bp, Homo sapiens
  siRNA target sequence for RARG-1 (NM_016167.3,603-621).
caagccttcatacataatt

SEQ ID NO: 356513 - DNA, 19 bp, Homo sapiens
  siRNA target sequence for RARG-1 (NM_016167.3,680-698).
caagaggttaccagtgaaa

SEQ ID NO: 356514 - DNA, 19 bp, Homo sapiens
  siRNA target sequence for RARG-1 (NM_016167.3,683-701).
gaggttaccagtgaaaaga

SEQ ID NO: 356515 - DNA, 19 bp, Homo sapiens
  siRNA target sequence for RARG-1 (NM_016167.3,706-724).
ctgtccagtttttgaataa

SEQ ID NO: 356516 - DNA, 19 bp, Homo sapiens
  siRNA target sequence for RARG-1 (NM_016167.3,710-728).
ccagtttttgaataatgct

SEQ ID NO: 356517 - DNA, 19 bp, Homo sapiens
  siRNA target sequence for RARG-1 (NM_016167.3,769-787).
gacggtggatggtcagaaa

SEQ ID NO: 356518 - DNA, 19 bp, Homo sapiens
  siRNA target sequence for GBDR1 (NM_016172.1,344-362).
cttagaagatcccaaaagt

SEQ ID NO: 356519 - DNA, 19 bp, Homo sapiens
  siRNA target sequence for GBDR1 (NM_016172.1,367-385).
cccatcataaattaatcca

SEQ ID NO: 356520 - DNA, 19 bp, Homo sapiens
  siRNA target sequence for GBDR1 (NM_016172.1,443-461).
ggaccaagatgtcctatta

SEQ ID NO: 356521 - DNA, 19 bp, Homo sapiens
  siRNA target sequence for GBDR1 (NM_016172.1,444-462).
gaccaagatgtcctattat

SEQ ID NO: 356522 - DNA, 19 bp, Homo sapiens
  siRNA target sequence for GBDR1 (NM_016172.1,453-471).
gtcctattattgataaaaa

SEQ ID NO: 356523 - DNA, 19 bp, Homo sapiens
  siRNA target sequence for GBDR1 (NM_016172.1,638-656).
gacagaactccggaagata

SEQ ID NO: 356524 - DNA, 19 bp, Homo sapiens
  siRNA target sequence for GBDR1 (NM_016172.1,888-906).
gaagacccgaccatagaca

SEQ ID NO: 356525 - DNA, 19 bp, Homo sapiens
  siRNA target sequence for GBDR1 (NM_016172.1,1005-1023).
gagctgacggaaatcttca

SEQ ID NO: 356526 - DNA, 19 bp, Homo sapiens
  siRNA target sequence for GBDR1 (NM_016172.1,1097-1115).
cgagaaagaggtgatagat

SEQ ID NO: 356527 - DNA, 19 bp, Homo sapiens
  siRNA target sequence for GBDR1 (NM_016172.1,1116-1134).
gccctcagagtgaacaaca

SEQ ID NO: 356528 - DNA, 19 bp, Homo sapiens
  siRNA target sequence for GBDR1 (NM_016172.1,1117-1135).
ccctcagagtgaacaacaa

SEQ ID NO: 356529 - DNA, 19 bp, Homo sapiens
  siRNA target sequence for GBDR1 (NM_016172.1,1271-1289).
caacccgaaaacattgcta

SEQ ID NO: 356530 - DNA, 19 bp, Homo sapiens
  siRNA target sequence for GBDR1 (NM_016172.1,1276-1294).
cgaaaacattgctagcatt

SEQ ID NO: 356531 - DNA, 19 bp, Homo sapiens
  siRNA target sequence for GBDR1 (NM_016172.1,1277-1295).
gaaaacattgctagcattt

SEQ ID NO: 356532 - DNA, 19 bp, Homo sapiens
  siRNA target sequence for GBDR1 (NM_016172.1,1325-1343).
cacccagtggatgaatgat

SEQ ID NO: 356533 - DNA, 19 bp, Homo sapiens
  siRNA target sequence for LOC51149 (NM_016175.1,363-381).
cctgccacctagaaaaagt

SEQ ID NO: 356534 - DNA, 19 bp, Homo sapiens
  siRNA target sequence for LOC51149 (NM_016175.1,646-664).
cgactatgtgacctcttta

SEQ ID NO: 356535 - DNA, 19 bp, Homo sapiens
  siRNA target sequence for OAZ3 (NM_016178.1,214-232).
gctgcctcgttgttataaa

SEQ ID NO: 356536 - DNA, 19 bp, Homo sapiens
  siRNA target sequence for OAZ3 (NM_016178.1,218-236).
cctcgttgttataaaagca

SEQ ID NO: 356537 - DNA, 19 bp, Homo sapiens
  siRNA target sequence for OAZ3 (NM_016178.1,225-243).
gttataaaagcatcactta

SEQ ID NO: 356538 - DNA, 19 bp, Homo sapiens
  siRNA target sequence for OAZ3 (NM_016178.1,340-358).
gtaaccacgaccagcttaa

SEQ ID NO: 356539 - DNA, 19 bp, Homo sapiens
  siRNA target sequence for OAZ3 (NM_016178.1,350-368).
ccagcttaaagaactgtat

SEQ ID NO: 356540 - DNA, 19 bp, Homo sapiens
  siRNA target sequence for OAZ3 (NM_016178.1,417-435).
gacccagtacagttagact

SEQ ID NO: 356541 - DNA, 19 bp, Homo sapiens
  siRNA target sequence for OAZ3 (NM_016178.1,423-441).
gtacagttagactttcact

SEQ ID NO: 356542 - DNA, 19 bp, Homo sapiens
  siRNA target sequence for OAZ3 (NM_016178.1,531-549).
caaggcaaccgggaaagtt

SEQ ID NO: 356543 - DNA, 19 bp, Homo sapiens
  siRNA target sequence for OAZ3 (NM_016178.1,534-552).
ggcaaccgggaaagtttga

SEQ ID NO: 356544 - DNA, 19 bp, Homo sapiens
  siRNA target sequence for OAZ3 (NM_016178.1,536-554).
caaccgggaaagtttgact

SEQ ID NO: 356545 - DNA, 19 bp, Homo sapiens
  siRNA target sequence for HN1 (NM_016185.1,147-165).
ggaatagctcccgagtttt

SEQ ID NO: 356546 - DNA, 19 bp, Homo sapiens
  siRNA target sequence for HN1 (NM_016185.1,173-191).
ccaggtggtggatccaatt

SEQ ID NO: 356547 - DNA, 19 bp, Homo sapiens
  siRNA target sequence for HN1 (NM_016185.1,179-197).
ggtggatccaatttttcat

SEQ ID NO: 356548 - DNA, 19 bp, Homo sapiens
  siRNA target sequence for AMOTL2 (NM_016201.2,760-778).
gtgaacggctccttcagtt

SEQ ID NO: 356549 - DNA, 19 bp, Homo sapiens
  siRNA target sequence for AMOTL2 (NM_016201.2,920-938).
gtaccctcatgttgtacta

SEQ ID NO: 356550 - DNA, 19 bp, Homo sapiens
  siRNA target sequence for AMOTL2 (NM_016201.2,1449-1467).
gacttcaaccgggatctta

SEQ ID NO: 356551 - DNA, 19 bp, Homo sapiens
  siRNA target sequence for AMOTL2 (NM_016201.2,1451-1469).
cttcaaccgggatcttaga

SEQ ID NO: 356552 - DNA, 19 bp, Homo sapiens
  siRNA target sequence for AMOTL2 (NM_016201.2,1472-1490).
gagattggaatctgcaaat

SEQ ID NO: 356553 - DNA, 19 bp, Homo sapiens
  siRNA target sequence for AMOTL2 (NM_016201.2,2279-2297).
caagtcggtgccatctgtt

SEQ ID NO: 356554 - DNA, 19 bp, Homo sapiens
  siRNA target sequence for AMOTL2 (NM_016201.2,2330-2348).
gcaagggctctcttctagt

SEQ ID NO: 356555 - DNA, 19 bp, Homo sapiens
  siRNA target sequence for LOC51159 (NM_016206.1,202-220).
ggccctttttccatgtaca

SEQ ID NO: 356556 - DNA, 19 bp, Homo sapiens
  siRNA target sequence for LOC51159 (NM_016206.1,267-285).
ctacctacaacaattagta

SEQ ID NO: 356557 - DNA, 19 bp, Homo sapiens
  siRNA target sequence for LOC51159 (NM_016206.1,303-321).
ctatcactcttgtaatcga

SEQ ID NO: 356558 - DNA, 19 bp, Homo sapiens
  siRNA target sequence for LOC51159 (NM_016206.1,343-361).
gtagcaagtcataatgttt

SEQ ID NO: 356559 - DNA, 19 bp, Homo sapiens
  siRNA target sequence for LOC51159 (NM_016206.1,378-396).
gggggtttatcttcattca

SEQ ID NO: 356560 - DNA, 19 bp, Homo sapiens
  siRNA target sequence for LOC51159 (NM_016206.1,436-454).
caaatgtttcatgtagtta

SEQ ID NO: 356561 - DNA, 19 bp, Homo sapiens
  siRNA target sequence for LOC51159 (NM_016206.1,627-645).
cttgcgatgtcctaagtct

SEQ ID NO: 356562 - DNA, 19 bp, Homo sapiens
  siRNA target sequence for LOC51159 (NM_016206.1,642-660).
gtctccaagcatcttattt

SEQ ID NO: 356563 - DNA, 19 bp, Homo sapiens
  siRNA target sequence for LOC51159 (NM_016206.1,778-796).
gttatggaaaagcaaacat

SEQ ID NO: 356564 - DNA, 19 bp, Homo sapiens
  siRNA target sequence for LOC51159 (NM_016206.1,886-904).
cactcaagcacaactgttt

SEQ ID NO: 356565 - DNA, 19 bp, Homo sapiens
  siRNA target sequence for LOC51159 (NM_016206.1,890-908).
caagcacaactgttttact

SEQ ID NO: 356566 - DNA, 19 bp, Homo sapiens
  siRNA target sequence for LOC51159 (NM_016206.1,968-986).
cacttgtacaagagactat

SEQ ID NO: 356567 - DNA, 19 bp, Homo sapiens
  siRNA target sequence for LOC51159 (NM_016206.1,1221-1239).
gtccagtgttatcattttt

SEQ ID NO: 356568 - DNA, 19 bp, Homo sapiens
  siRNA target sequence for LOC51159 (NM_016206.1,1309-1327).
cctatatcaaatcatcata

SEQ ID NO: 356569 - DNA, 19 bp, Homo sapiens
  siRNA target sequence for LOC51693 (NM_016209.1,326-344).
gcccttcgagacaacgaaa

SEQ ID NO: 356570 - DNA, 19 bp, Homo sapiens
  siRNA target sequence for LOC51693 (NM_016209.1,451-469).
ggtgacgtcgatgatgata

SEQ ID NO: 356571 - DNA, 19 bp, Homo sapiens
  siRNA target sequence for LOC51161 (NM_016210.2,823-841).
ctcatgcccatgtacaact

SEQ ID NO: 356572 - DNA, 19 bp, Homo sapiens
  siRNA target sequence for LOC51161 (NM_016210.2,851-869).
cggaggaacaagatgagtt

SEQ ID NO: 356573 - DNA, 19 bp, Homo sapiens
  siRNA target sequence for LOC51161 (NM_016210.2,934-952).
gccatgcagggcaagacta

SEQ ID NO: 356574 - DNA, 19 bp, Homo sapiens
  siRNA target sequence for TP53TG3 (NM_016212.1,379-397).
cgcagggttgtcaagtttt

SEQ ID NO: 356575 - DNA, 19 bp, Homo sapiens
  siRNA target sequence for C1orf9 (NM_016227.1,136-154).
cttggcacgcccctttcta

SEQ ID NO: 356576 - DNA, 19 bp, Homo sapiens
  siRNA target sequence for C1orf9 (NM_016227.1,140-158).
gcacgcccctttctatcta

SEQ ID NO: 356577 - DNA, 19 bp, Homo sapiens
  siRNA target sequence for C1orf9 (NM_016227.1,145-163).
cccctttctatctaccaat

SEQ ID NO: 356578 - DNA, 19 bp, Homo sapiens
  siRNA target sequence for C1orf9 (NM_016227.1,253-271).
ccacgaactgtgctcaaaa

SEQ ID NO: 356579 - DNA, 19 bp, Homo sapiens
  siRNA target sequence for C1orf9 (NM_016227.1,311-329).
gtggtgagcagcgaaacta

SEQ ID NO: 356580 - DNA, 19 bp, Homo sapiens
  siRNA target sequence for C1orf9 (NM_016227.1,313-331).
ggtgagcagcgaaactata

SEQ ID NO: 356581 - DNA, 19 bp, Homo sapiens
  siRNA target sequence for C1orf9 (NM_016227.1,318-336).
gcagcgaaactatagactt

SEQ ID NO: 356582 - DNA, 19 bp, Homo sapiens
  siRNA target sequence for C1orf9 (NM_016227.1,323-341).
gaaactatagacttctcta

SEQ ID NO: 356583 - DNA, 19 bp, Homo sapiens
  siRNA target sequence for C1orf9 (NM_016227.1,597-615).
ggactatcggtcacattct

SEQ ID NO: 356584 - DNA, 19 bp, Homo sapiens
  siRNA target sequence for EMCN (NM_016242.2,117-135).
gcttcaagtgaccattctt

SEQ ID NO: 356585 - DNA, 19 bp, Homo sapiens
  siRNA target sequence for EMCN (NM_016242.2,118-136).
cttcaagtgaccattcttt

SEQ ID NO: 356586 - DNA, 19 bp, Homo sapiens
  siRNA target sequence for EMCN (NM_016242.2,205-223).
gttactacaacaaaaccat

SEQ ID NO: 356587 - DNA, 19 bp, Homo sapiens
  siRNA target sequence for EMCN (NM_016242.2,236-254).
caaacacagaatcattaca

SEQ ID NO: 356588 - DNA, 19 bp, Homo sapiens
  siRNA target sequence for EMCN (NM_016242.2,299-317).
caatcaccaatgaattact

SEQ ID NO: 356589 - DNA, 19 bp, Homo sapiens
  siRNA target sequence for EMCN (NM_016242.2,340-358).
gctacttttttaacaagta

SEQ ID NO: 356590 - DNA, 19 bp, Homo sapiens
  siRNA target sequence for EMCN (NM_016242.2,405-423).
ctccatcatttcaaacgta

SEQ ID NO: 356591 - DNA, 19 bp, Homo sapiens
  siRNA target sequence for EMCN (NM_016242.2,411-429).
catttcaaacgtaacagta

SEQ ID NO: 356592 - DNA, 19 bp, Homo sapiens
  siRNA target sequence for EMCN (NM_016242.2,431-449).
caagtgttacacttccaaa

SEQ ID NO: 356593 - DNA, 19 bp, Homo sapiens
  siRNA target sequence for EMCN (NM_016242.2,572-590).
cctcaataccagttacaat

SEQ ID NO: 356594 - DNA, 19 bp, Homo sapiens
  siRNA target sequence for EMCN (NM_016242.2,622-640).
ggcactgagggtggaaaaa

SEQ ID NO: 356595 - DNA, 19 bp, Homo sapiens
  siRNA target sequence for EMCN (NM_016242.2,664-682).
cggtcttattccagtatta

SEQ ID NO: 356596 - DNA, 19 bp, Homo sapiens
  siRNA target sequence for EMCN (NM_016242.2,665-683).
ggtcttattccagtattat

SEQ ID NO: 356597 - DNA, 19 bp, Homo sapiens
  siRNA target sequence for EMCN (NM_016242.2,693-711).
ggttattgctttgattgta

SEQ ID NO: 356598 - DNA, 19 bp, Homo sapiens
  siRNA target sequence for EMCN (NM_016242.2,771-789).
gggcacaccagaaaatgga

SEQ ID NO: 356599 - DNA, 19 bp, Homo sapiens
  siRNA target sequence for EMCN (NM_016242.2,772-790).
ggcacaccagaaaatggaa

SEQ ID NO: 356600 - DNA, 19 bp, Homo sapiens
  siRNA target sequence for EMCN (NM_016242.2,799-817).
cctcagtctgataaagaga

SEQ ID NO: 356601 - DNA, 19 bp, Homo sapiens
  siRNA target sequence for EMCN (NM_016242.2,814-832).
gagagcgtgaagcttctta

SEQ ID NO: 356602 - DNA, 19 bp, Homo sapiens
  siRNA target sequence for EMCN (NM_016242.2,825-843).
gcttcttaccgttaagaca

SEQ ID NO: 356603 - DNA, 19 bp, Homo sapiens
  siRNA target sequence for EMCN (NM_016242.2,826-844).
cttcttaccgttaagacaa

SEQ ID NO: 356604 - DNA, 19 bp, Homo sapiens
  siRNA target sequence for EMCN (NM_016242.2,829-847).
cttaccgttaagacaattt

SEQ ID NO: 356605 - DNA, 19 bp, Homo sapiens
  siRNA target sequence for EMCN (NM_016242.2,833-851).
ccgttaagacaatttctca

SEQ ID NO: 356606 - DNA, 19 bp, Homo sapiens
  siRNA target sequence for EMCN (NM_016242.2,834-852).
cgttaagacaatttctcat

SEQ ID NO: 356607 - DNA, 19 bp, Homo sapiens
  siRNA target sequence for MAGEE1 (NM_016249.2,356-374).
ccgttccaggcgttccatt

SEQ ID NO: 356608 - DNA, 19 bp, Homo sapiens
  siRNA target sequence for MAGEE1 (NM_016249.2,371-389).
cattccgcaacgttgacaa

SEQ ID NO: 356609 - DNA, 19 bp, Homo sapiens
  siRNA target sequence for MAGEE1 (NM_016249.2,396-414).
cccgacctcagttgagtta

SEQ ID NO: 356610 - DNA, 19 bp, Homo sapiens
  siRNA target sequence for MAGEE1 (NM_016249.2,398-416).
cgacctcagttgagttaga

SEQ ID NO: 356611 - DNA, 19 bp, Homo sapiens
  siRNA target sequence for MAGEE1 (NM_016249.2,470-488).
ccgcctcttccactttgta

SEQ ID NO: 356612 - DNA, 19 bp, Homo sapiens
  siRNA target sequence for MAGEE1 (NM_016249.2,472-490).
gcctcttccactttgtact

SEQ ID NO: 356613 - DNA, 19 bp, Homo sapiens
  siRNA target sequence for MAGEE1 (NM_016249.2,558-576).
ggtgccctctggtgtgata

SEQ ID NO: 356614 - DNA, 19 bp, Homo sapiens
  siRNA target sequence for MAGEE1 (NM_016249.2,562-580).
ccctctggtgtgataccaa

SEQ ID NO: 356615 - DNA, 19 bp, Homo sapiens
  siRNA target sequence for MAGEE1 (NM_016249.2,563-581).
cctctggtgtgataccaaa

SEQ ID NO: 356616 - DNA, 19 bp, Homo sapiens
  siRNA target sequence for MAGEE1 (NM_016249.2,564-582).
ctctggtgtgataccaaat

SEQ ID NO: 356617 - DNA, 19 bp, Homo sapiens
  siRNA target sequence for MAGEE1 (NM_016249.2,566-584).
ctggtgtgataccaaatct

SEQ ID NO: 356618 - DNA, 19 bp, Homo sapiens
  siRNA target sequence for MAGEE1 (NM_016249.2,568-586).
ggtgtgataccaaatctta

SEQ ID NO: 356619 - DNA, 19 bp, Homo sapiens
  siRNA target sequence for MAGEE1 (NM_016249.2,744-762).
cagtgagtcctctttcaca

SEQ ID NO: 356620 - DNA, 19 bp, Homo sapiens
  siRNA target sequence for MAGEE1 (NM_016249.2,746-764).
gtgagtcctctttcacata

SEQ ID NO: 356621 - DNA, 19 bp, Homo sapiens
  siRNA target sequence for MAGEE1 (NM_016249.2,801-819).
cctgctcctcaaatacgaa

SEQ ID NO: 356622 - DNA, 19 bp, Homo sapiens
  siRNA target sequence for MAGEE1 (NM_016249.2,855-873).
gattgtcatcaagtacaaa

SEQ ID NO: 356623 - DNA, 19 bp, Homo sapiens
  siRNA target sequence for MAGEE1 (NM_016249.2,990-1008).
caccgatgagggtagtgat

SEQ ID NO: 356624 - DNA, 19 bp, Homo sapiens
  siRNA target sequence for MAGEE1 (NM_016249.2,1024-1042).
gagaacagcctcctgatta

SEQ ID NO: 356625 - DNA, 19 bp, Homo sapiens
  siRNA target sequence for MAGEE1 (NM_016249.2,1107-1125).
gaatgcagtaggggtatat

SEQ ID NO: 356626 - DNA, 19 bp, Homo sapiens
  siRNA target sequence for MAGEE1 (NM_016249.2,1223-1241).
gttctcctccatattatga

SEQ ID NO: 356627 - DNA, 19 bp, Homo sapiens
  siRNA target sequence for MAGEE1 (NM_016249.2,1226-1244).
ctcctccatattatgaatt

SEQ ID NO: 356628 - DNA, 19 bp, Homo sapiens
  siRNA target sequence for MAGEE1 (NM_016249.2,1321-1339).
gttcctagttcctttccat

SEQ ID NO: 356629 - DNA, 19 bp, Homo sapiens
  siRNA target sequence for MAGEE1 (NM_016249.2,1448-1466).
gcaacgtctccttttctga

SEQ ID NO: 356630 - DNA, 19 bp, Homo sapiens
  siRNA target sequence for FAM8A1 (NM_016255.1,240-258).
ccgcagccgacaaattgga

SEQ ID NO: 356631 - DNA, 19 bp, Homo sapiens
  siRNA target sequence for FAM8A1 (NM_016255.1,764-782).
gcaggcagagaatatgtta

SEQ ID NO: 356632 - DNA, 19 bp, Homo sapiens
  siRNA target sequence for FAM8A1 (NM_016255.1,769-787).
cagagaatatgttattcca

SEQ ID NO: 356633 - DNA, 19 bp, Homo sapiens
  siRNA target sequence for FAM8A1 (NM_016255.1,786-804).
catccttggcccacagatt

SEQ ID NO: 356634 - DNA, 19 bp, Homo sapiens
  siRNA target sequence for FAM8A1 (NM_016255.1,812-830).
gagatggtggatttcttta

SEQ ID NO: 356635 - DNA, 19 bp, Homo sapiens
  siRNA target sequence for FAM8A1 (NM_016255.1,848-866).
gcaaccattgtcttaagca

SEQ ID NO: 356636 - DNA, 19 bp, Homo sapiens
  siRNA target sequence for FAM8A1 (NM_016255.1,849-867).
caaccattgtcttaagcat

SEQ ID NO: 356637 - DNA, 19 bp, Homo sapiens
  siRNA target sequence for FAM8A1 (NM_016255.1,852-870).
ccattgtcttaagcattat

SEQ ID NO: 356638 - DNA, 19 bp, Homo sapiens
  siRNA target sequence for FAM8A1 (NM_016255.1,874-892).
cctcagtgggataaaggat

SEQ ID NO: 356639 - DNA, 19 bp, Homo sapiens
  siRNA target sequence for FAM8A1 (NM_016255.1,890-908).
gatatctctaagtttgcta

SEQ ID NO: 356640 - DNA, 19 bp, Homo sapiens
  siRNA target sequence for FAM8A1 (NM_016255.1,895-913).
ctctaagtttgctatgcat

SEQ ID NO: 356641 - DNA, 19 bp, Homo sapiens
  siRNA target sequence for FAM8A1 (NM_016255.1,897-915).
ctaagtttgctatgcatta

SEQ ID NO: 356642 - DNA, 19 bp, Homo sapiens
  siRNA target sequence for FAM8A1 (NM_016255.1,901-919).
gtttgctatgcattatata

SEQ ID NO: 356643 - DNA, 19 bp, Homo sapiens
  siRNA target sequence for FAM8A1 (NM_016255.1,971-989).
gttgtggcacttatataca

SEQ ID NO: 356644 - DNA, 19 bp, Homo sapiens
  siRNA target sequence for FAM8A1 (NM_016255.1,974-992).
gtggcacttatatacagat

SEQ ID NO: 356645 - DNA, 19 bp, Homo sapiens
  siRNA target sequence for FAM8A1 (NM_016255.1,976-994).
ggcacttatatacagatta

SEQ ID NO: 356646 - DNA, 19 bp, Homo sapiens
  siRNA target sequence for FAM8A1 (NM_016255.1,977-995).
gcacttatatacagattat

SEQ ID NO: 356647 - DNA, 19 bp, Homo sapiens
  siRNA target sequence for FAM8A1 (NM_016255.1,1083-1101).
gtgatacatcagtgcttat

SEQ ID NO: 356648 - DNA, 19 bp, Homo sapiens
  siRNA target sequence for FAM8A1 (NM_016255.1,1104-1122).
caccaagtcgggttttagt

SEQ ID NO: 356649 - DNA, 19 bp, Homo sapiens
  siRNA target sequence for FAM8A1 (NM_016255.1,1106-1124).
ccaagtcgggttttagtga

SEQ ID NO: 356650 - DNA, 19 bp, Homo sapiens
  siRNA target sequence for FAM8A1 (NM_016255.1,1107-1125).
caagtcgggttttagtgat

SEQ ID NO: 356651 - DNA, 19 bp, Homo sapiens
  siRNA target sequence for FAM8A1 (NM_016255.1,1112-1130).
cgggttttagtgattcctt

SEQ ID NO: 356652 - DNA, 19 bp, Homo sapiens
  siRNA target sequence for FAM8A1 (NM_016255.1,1155-1173).
ccactatccgagctttgat

SEQ ID NO: 356653 - DNA, 19 bp, Homo sapiens
  siRNA target sequence for FAM8A1 (NM_016255.1,1162-1180).
ccgagctttgatcaagaat

SEQ ID NO: 356654 - DNA, 19 bp, Homo sapiens
  siRNA target sequence for FAM8A1 (NM_016255.1,1163-1181).
cgagctttgatcaagaatt

SEQ ID NO: 356655 - DNA, 19 bp, Homo sapiens
  siRNA target sequence for FAM8A1 (NM_016255.1,1260-1278).
caggaaccattgtggtaaa

SEQ ID NO: 356656 - DNA, 19 bp, Homo sapiens
  siRNA target sequence for FAM8A1 (NM_016255.1,1262-1280).
ggaaccattgtggtaaaaa

SEQ ID NO: 356657 - DNA, 19 bp, Homo sapiens
  siRNA target sequence for FZR1 (NM_016263.2,198-216).
ccaactggagcgtgaactt

SEQ ID NO: 356658 - DNA, 19 bp, Homo sapiens
  siRNA target sequence for FZR1 (NM_016263.2,222-240).
ggattaacgagaatgagaa

SEQ ID NO: 356659 - DNA, 19 bp, Homo sapiens
  siRNA target sequence for FZR1 (NM_016263.2,390-408).
cctccacgcctgagaagaa

SEQ ID NO: 356660 - DNA, 19 bp, Homo sapiens
  siRNA target sequence for CKIP-1 (NM_016274.3,360-378).
ggctgggtccggaaattct

SEQ ID NO: 356661 - DNA, 19 bp, Homo sapiens
  siRNA target sequence for CKIP-1 (NM_016274.3,601-619).
cggcacccaacctgatctt

SEQ ID NO: 356662 - DNA, 19 bp, Homo sapiens
  siRNA target sequence for CKIP-1 (NM_016274.3,1007-1025).
ccgaccttgggaaaaaaca

SEQ ID NO: 356663 - DNA, 19 bp, Homo sapiens
  siRNA target sequence for CKIP-1 (NM_016274.3,1064-1082).
gttgacgcccacagagaaa

SEQ ID NO: 356664 - DNA, 19 bp, Homo sapiens
  siRNA target sequence for CKIP-1 (NM_016274.3,1365-1383).
gaggcatcatcgaattgga

SEQ ID NO: 356665 - DNA, 19 bp, Homo sapiens
  siRNA target sequence for SELT (NM_016275.2,463-481).
cttcttgagcaacatgatt

SEQ ID NO: 356666 - DNA, 19 bp, Homo sapiens
  siRNA target sequence for KIAA1007 (NM_016284.2,328-346).
ctggtggacaatttaacca

SEQ ID NO: 356667 - DNA, 19 bp, Homo sapiens
  siRNA target sequence for KIAA1007 (NM_016284.2,471-489).
cagtggcaaagatttccat

SEQ ID NO: 356668 - DNA, 19 bp, Homo sapiens
  siRNA target sequence for KIAA1007 (NM_016284.2,487-505).
catcagactcagtttctga

SEQ ID NO: 356669 - DNA, 19 bp, Homo sapiens
  siRNA target sequence for KIAA1007 (NM_016284.2,511-529).
gagtgtgcgttgctgatta

SEQ ID NO: 356670 - DNA, 19 bp, Homo sapiens
  siRNA target sequence for KIAA1007 (NM_016284.2,515-533).
gtgcgttgctgattacaaa

SEQ ID NO: 356671 - DNA, 19 bp, Homo sapiens
  siRNA target sequence for KIAA1007 (NM_016284.2,552-570).
gctgtcctatgccattgat

SEQ ID NO: 356672 - DNA, 19 bp, Homo sapiens
  siRNA target sequence for KIAA1007 (NM_016284.2,636-654).
gctcaaattaagcaaagta

SEQ ID NO: 356673 - DNA, 19 bp, Homo sapiens
  siRNA target sequence for KIAA1007 (NM_016284.2,647-665).
gcaaagtacaagaggtaat

SEQ ID NO: 356674 - DNA, 19 bp, Homo sapiens
  siRNA target sequence for KIAA1007 (NM_016284.2,648-666).
caaagtacaagaggtaatt

SEQ ID NO: 356675 - DNA, 19 bp, Homo sapiens
  siRNA target sequence for KIAA1007 (NM_016284.2,709-727).
ggtttcgctgcccagttta

SEQ ID NO: 356676 - DNA, 19 bp, Homo sapiens
  siRNA target sequence for KIAA1007 (NM_016284.2,710-728).
gtttcgctgcccagtttat

SEQ ID NO: 356677 - DNA, 19 bp, Homo sapiens
  siRNA target sequence for KIAA1007 (NM_016284.2,743-761).
cagatcttctgcgttctta

SEQ ID NO: 356678 - DNA, 19 bp, Homo sapiens
  siRNA target sequence for KIAA1007 (NM_016284.2,745-763).
gatcttctgcgttcttaca

SEQ ID NO: 356679 - DNA, 19 bp, Homo sapiens
  siRNA target sequence for KIAA1007 (NM_016284.2,768-786).
cgcagacgtcagtggaaat

SEQ ID NO: 356680 - DNA, 19 bp, Homo sapiens
  siRNA target sequence for KIAA1007 (NM_016284.2,774-792).
cgtcagtggaaatcaagaa

SEQ ID NO: 356681 - DNA, 19 bp, Homo sapiens
  siRNA target sequence for KIAA1007 (NM_016284.2,796-814).
ggcttccaagatatagcaa

SEQ ID NO: 356682 - DNA, 19 bp, Homo sapiens
  siRNA target sequence for KIAA1007 (NM_016284.2,797-815).
gcttccaagatatagcaat

SEQ ID NO: 356683 - DNA, 19 bp, Homo sapiens
  siRNA target sequence for KIAA1007 (NM_016284.2,886-904).
cagatagacgcttttctta

SEQ ID NO: 356684 - DNA, 19 bp, Homo sapiens
  siRNA target sequence for KIAA1007 (NM_016284.2,906-924).
gacgctgcgcagagatttt

SEQ ID NO: 356685 - DNA, 19 bp, Homo sapiens
  siRNA target sequence for KIAA1007 (NM_016284.2,945-963).
ggtgctcgcaccactttta

SEQ ID NO: 356686 - DNA, 19 bp, Homo sapiens
  siRNA target sequence for KIAA1007 (NM_016284.2,946-964).
gtgctcgcaccacttttat

SEQ ID NO: 356687 - DNA, 19 bp, Homo sapiens
  siRNA target sequence for KIAA1007 (NM_016284.2,970-988).
gaaaaacgggacattctaa

SEQ ID NO: 356688 - DNA, 19 bp, Homo sapiens
  siRNA target sequence for KIAA1007 (NM_016284.2,1013-1031).
gaggggtagctaaaaccat

SEQ ID NO: 356689 - DNA, 19 bp, Homo sapiens
  siRNA target sequence for KIAA1007 (NM_016284.2,1040-1058).
gctctttggctgatttcat

SEQ ID NO: 356690 - DNA, 19 bp, Homo sapiens
  siRNA target sequence for KIAA1007 (NM_016284.2,1170-1188).
gatggctcgaactcattca

SEQ ID NO: 356691 - DNA, 19 bp, Homo sapiens
  siRNA target sequence for KIAA1007 (NM_016284.2,1181-1199).
ctcattcaggattaacaga

SEQ ID NO: 356692 - DNA, 19 bp, Homo sapiens
  siRNA target sequence for KIAA1007 (NM_016284.2,1302-1320).
cttgattgacgttcttaaa

SEQ ID NO: 356693 - DNA, 19 bp, Homo sapiens
  siRNA target sequence for KIAA1007 (NM_016284.2,1411-1429).
gtggtttatggcattcaga

SEQ ID NO: 356694 - DNA, 19 bp, Homo sapiens
  siRNA target sequence for KIAA1007 (NM_016284.2,1428-1446).
gaggggtttgggtatggaa

SEQ ID NO: 356695 - DNA, 19 bp, Homo sapiens
  siRNA target sequence for KIAA1007 (NM_016284.2,1433-1451).
gtttgggtatggaagtgtt

SEQ ID NO: 356696 - DNA, 19 bp, Homo sapiens
  siRNA target sequence for KIAA1007 (NM_016284.2,1452-1470).
cccagtagacctcatatat

SEQ ID NO: 356697 - DNA, 19 bp, Homo sapiens
  siRNA target sequence for KIAA1007 (NM_016284.2,1453-1471).
ccagtagacctcatatata

SEQ ID NO: 356698 - DNA, 19 bp, Homo sapiens
  siRNA target sequence for KIAA1007 (NM_016284.2,1497-1515).
gctctccttcattcaacat

SEQ ID NO: 356699 - DNA, 19 bp, Homo sapiens
  siRNA target sequence for KIAA1007 (NM_016284.2,1536-1554).
cttctgttttgctgactat

SEQ ID NO: 356700 - DNA, 19 bp, Homo sapiens
  siRNA target sequence for KIAA1007 (NM_016284.2,1632-1650).
cttggatttgattgaatct

SEQ ID NO: 356701 - DNA, 19 bp, Homo sapiens
  siRNA target sequence for KIAA1007 (NM_016284.2,1721-1739).
gtccagacatgctggtatt

SEQ ID NO: 356702 - DNA, 19 bp, Homo sapiens
  siRNA target sequence for KIAA1007 (NM_016284.2,1772-1790).
ccttgcgccatgaacttat

SEQ ID NO: 356703 - DNA, 19 bp, Homo sapiens
  siRNA target sequence for KIAA1007 (NM_016284.2,1793-1811).
ccactctgatgccaatttt

SEQ ID NO: 356704 - DNA, 19 bp, Homo sapiens
  siRNA target sequence for KIAA1007 (NM_016284.2,1876-1894).
ccctcaattcgccaactta

SEQ ID NO: 356705 - DNA, 19 bp, Homo sapiens
  siRNA target sequence for KIAA1007 (NM_016284.2,1877-1895).
cctcaattcgccaacttat

SEQ ID NO: 356706 - DNA, 19 bp, Homo sapiens
  siRNA target sequence for KIAA1007 (NM_016284.2,1880-1898).
caattcgccaacttatcat

SEQ ID NO: 356707 - DNA, 19 bp, Homo sapiens
  siRNA target sequence for KIAA1007 (NM_016284.2,1944-1962).
ggccaaattgtctcgaata

SEQ ID NO: 356708 - DNA, 19 bp, Homo sapiens
  siRNA target sequence for KIAA1007 (NM_016284.2,1978-1996).
gacttgaaggccttgtcaa

SEQ ID NO: 356709 - DNA, 19 bp, Homo sapiens
  siRNA target sequence for KIAA1007 (NM_016284.2,1988-2006).
ccttgtcaatgctgctaaa

SEQ ID NO: 356710 - DNA, 19 bp, Homo sapiens
  siRNA target sequence for KIAA1007 (NM_016284.2,1992-2010).
gtcaatgctgctaaatggt

SEQ ID NO: 356711 - DNA, 19 bp, Homo sapiens
  siRNA target sequence for KIAA1007 (NM_016284.2,2001-2019).
gctaaatggtactccattt

SEQ ID NO: 356712 - DNA, 19 bp, Homo sapiens
  siRNA target sequence for KIAA1007 (NM_016284.2,2048-2066).
cttcacgtcgtgaatacct

SEQ ID NO: 356713 - DNA, 19 bp, Homo sapiens
  siRNA target sequence for KIAA1007 (NM_016284.2,2054-2072).
gtcgtgaatacctcaaact

SEQ ID NO: 356714 - DNA, 19 bp, Homo sapiens
  siRNA target sequence for KIAA1007 (NM_016284.2,2074-2092).
gataagtggctcacagata

SEQ ID NO: 356715 - DNA, 19 bp, Homo sapiens
  siRNA target sequence for KIAA1007 (NM_016284.2,2082-2100).
gctcacagataaaattcga

SEQ ID NO: 356716 - DNA, 19 bp, Homo sapiens
  siRNA target sequence for KIAA1007 (NM_016284.2,2121-2139).
ccaggcgtgtatgactttt

SEQ ID NO: 356717 - DNA, 19 bp, Homo sapiens
  siRNA target sequence for KIAA1007 (NM_016284.2,2122-2140).
caggcgtgtatgacttttt

SEQ ID NO: 356718 - DNA, 19 bp, Homo sapiens
  siRNA target sequence for KIAA1007 (NM_016284.2,2124-2142).
ggcgtgtatgactttttta

SEQ ID NO: 356719 - DNA, 19 bp, Homo sapiens
  siRNA target sequence for KIAA1007 (NM_016284.2,2168-2186).
gcggacttgccccagaaaa

SEQ ID NO: 356720 - DNA, 19 bp, Homo sapiens
  siRNA target sequence for KIAA1007 (NM_016284.2,2218-2236).
gaaactttggcgacaatgt

SEQ ID NO: 356721 - DNA, 19 bp, Homo sapiens
  siRNA target sequence for KIAA1007 (NM_016284.2,2255-2273).
gtgcagggagtgtttctca

SEQ ID NO: 356722 - DNA, 19 bp, Homo sapiens
  siRNA target sequence for KIAA1007 (NM_016284.2,2301-2319).
ggtagccaattgcagtaat

SEQ ID NO: 356723 - DNA, 19 bp, Homo sapiens
  siRNA target sequence for KIAA1007 (NM_016284.2,2306-2324).
ccaattgcagtaatgttat

SEQ ID NO: 356724 - DNA, 19 bp, Homo sapiens
  siRNA target sequence for KIAA1007 (NM_016284.2,2312-2330).
gcagtaatgttatgaataa

SEQ ID NO: 356725 - DNA, 19 bp, Homo sapiens
  siRNA target sequence for KIAA1007 (NM_016284.2,2418-2436).
ccctcttgctggaatgaca

SEQ ID NO: 356726 - DNA, 19 bp, Homo sapiens
  siRNA target sequence for KIAA1007 (NM_016284.2,2419-2437).
cctcttgctggaatgacat

SEQ ID NO: 356727 - DNA, 19 bp, Homo sapiens
  siRNA target sequence for KIAA1007 (NM_016284.2,2425-2443).
gctggaatgacatctctta

SEQ ID NO: 356728 - DNA, 19 bp, Homo sapiens
  siRNA target sequence for KIAA1007 (NM_016284.2,2433-2451).
gacatctcttagtataggt

SEQ ID NO: 356729 - DNA, 19 bp, Homo sapiens
  siRNA target sequence for KIAA1007 (NM_016284.2,2462-2480).
cccctcacacccagagtat

SEQ ID NO: 356730 - DNA, 19 bp, Homo sapiens
  siRNA target sequence for KIAA1007 (NM_016284.2,2526-2544).
gtcaccagcaaaagcattt

SEQ ID NO: 356731 - DNA, 19 bp, Homo sapiens
  siRNA target sequence for KIAA1007 (NM_016284.2,2551-2569).
ctttcaacccccaatcaga

SEQ ID NO: 356732 - DNA, 19 bp, Homo sapiens
  siRNA target sequence for KIAA1007 (NM_016284.2,2634-2652).
cagcctgactggtatagga

SEQ ID NO: 356733 - DNA, 19 bp, Homo sapiens
  siRNA target sequence for KIAA1007 (NM_016284.2,2788-2806).
gcaaaccagcactttagta

SEQ ID NO: 356734 - DNA, 19 bp, Homo sapiens
  siRNA target sequence for KIAA1007 (NM_016284.2,2789-2807).
caaaccagcactttagtaa

SEQ ID NO: 356735 - DNA, 19 bp, Homo sapiens
  siRNA target sequence for KIAA1007 (NM_016284.2,2831-2849).
gctatttccagcgaatata

SEQ ID NO: 356736 - DNA, 19 bp, Homo sapiens
  siRNA target sequence for KIAA1007 (NM_016284.2,2832-2850).
ctatttccagcgaatatat

SEQ ID NO: 356737 - DNA, 19 bp, Homo sapiens
  siRNA target sequence for KIAA1007 (NM_016284.2,2838-2856).
ccagcgaatatataatcat

SEQ ID NO: 356738 - DNA, 19 bp, Homo sapiens
  siRNA target sequence for KIAA1007 (NM_016284.2,2867-2885).
caaccatgtctgttgatga

SEQ ID NO: 356739 - DNA, 19 bp, Homo sapiens
  siRNA target sequence for KIAA1007 (NM_016284.2,2874-2892).
gtctgttgatgaggtatta

SEQ ID NO: 356740 - DNA, 19 bp, Homo sapiens
  siRNA target sequence for KIAA1007 (NM_016284.2,2928-2946).
gagggaacgagaagtattt

SEQ ID NO: 356741 - DNA, 19 bp, Homo sapiens
  siRNA target sequence for KIAA1007 (NM_016284.2,2930-2948).
gggaacgagaagtatttaa

SEQ ID NO: 356742 - DNA, 19 bp, Homo sapiens
  siRNA target sequence for KIAA1007 (NM_016284.2,2935-2953).
cgagaagtatttaactgta

SEQ ID NO: 356743 - DNA, 19 bp, Homo sapiens
  siRNA target sequence for KIAA1007 (NM_016284.2,2941-2959).
gtatttaactgtatgctaa

SEQ ID NO: 356744 - DNA, 19 bp, Homo sapiens
  siRNA target sequence for KIAA1007 (NM_016284.2,2960-2978).
ggaacttgtttgaagaata

SEQ ID NO: 356745 - DNA, 19 bp, Homo sapiens
  siRNA target sequence for KIAA1007 (NM_016284.2,2961-2979).
gaacttgtttgaagaatat

SEQ ID NO: 356746 - DNA, 19 bp, Homo sapiens
  siRNA target sequence for KIAA1007 (NM_016284.2,2992-3010).
cagtatcctgataaagagt

SEQ ID NO: 356747 - DNA, 19 bp, Homo sapiens
  siRNA target sequence for KIAA1007 (NM_016284.2,2994-3012).
gtatcctgataaagagtta

SEQ ID NO: 356748 - DNA, 19 bp, Homo sapiens
  siRNA target sequence for KIAA1007 (NM_016284.2,3001-3019).
gataaagagttacatataa

SEQ ID NO: 356749 - DNA, 19 bp, Homo sapiens
  siRNA target sequence for KIAA1007 (NM_016284.2,3026-3044).
gcctatttggtggtataat

SEQ ID NO: 356750 - DNA, 19 bp, Homo sapiens
  siRNA target sequence for KIAA1007 (NM_016284.2,3027-3045).
cctatttggtggtataatt

SEQ ID NO: 356751 - DNA, 19 bp, Homo sapiens
  siRNA target sequence for KIAA1007 (NM_016284.2,3077-3095).
gtctggctctacgatatgt

SEQ ID NO: 356752 - DNA, 19 bp, Homo sapiens
  siRNA target sequence for KIAA1007 (NM_016284.2,3081-3099).
ggctctacgatatgttctt

SEQ ID NO: 356753 - DNA, 19 bp, Homo sapiens
  siRNA target sequence for KIAA1007 (NM_016284.2,3083-3101).
ctctacgatatgttcttga

SEQ ID NO: 356754 - DNA, 19 bp, Homo sapiens
  siRNA target sequence for KIAA1007 (NM_016284.2,3105-3123).
cttacgcaagccttttgga

SEQ ID NO: 356755 - DNA, 19 bp, Homo sapiens
  siRNA target sequence for KIAA1007 (NM_016284.2,3115-3133).
ccttttggatccaaaatgt

SEQ ID NO: 356756 - DNA, 19 bp, Homo sapiens
  siRNA target sequence for KIAA1007 (NM_016284.2,3141-3159).
cgggattgctgcactagat

SEQ ID NO: 356757 - DNA, 19 bp, Homo sapiens
  siRNA target sequence for KIAA1007 (NM_016284.2,3142-3160).
gggattgctgcactagata

SEQ ID NO: 356758 - DNA, 19 bp, Homo sapiens
  siRNA target sequence for KIAA1007 (NM_016284.2,3144-3162).
gattgctgcactagataga

SEQ ID NO: 356759 - DNA, 19 bp, Homo sapiens
  siRNA target sequence for KIAA1007 (NM_016284.2,3149-3167).
ctgcactagatagatttaa

SEQ ID NO: 356760 - DNA, 19 bp, Homo sapiens
  siRNA target sequence for KIAA1007 (NM_016284.2,3154-3172).
ctagatagatttaaaaaca

SEQ ID NO: 356761 - DNA, 19 bp, Homo sapiens
  siRNA target sequence for KIAA1007 (NM_016284.2,3180-3198).
ggactatccccagtattgt

SEQ ID NO: 356762 - DNA, 19 bp, Homo sapiens
  siRNA target sequence for KIAA1007 (NM_016284.2,3212-3230).
ctatcagtcactttatgca

SEQ ID NO: 356763 - DNA, 19 bp, Homo sapiens
  siRNA target sequence for KIAA1007 (NM_016284.2,3399-3417).
ggtaaccacctcaacaact

SEQ ID NO: 356764 - DNA, 19 bp, Homo sapiens
  siRNA target sequence for KIAA1007 (NM_016284.2,3400-3418).
gtaaccacctcaacaacta

SEQ ID NO: 356765 - DNA, 19 bp, Homo sapiens
  siRNA target sequence for KIAA1007 (NM_016284.2,3478-3496).
gtgccaccttctattaata

SEQ ID NO: 356766 - DNA, 19 bp, Homo sapiens
  siRNA target sequence for KIAA1007 (NM_016284.2,3481-3499).
ccaccttctattaatacta

SEQ ID NO: 356767 - DNA, 19 bp, Homo sapiens
  siRNA target sequence for KIAA1007 (NM_016284.2,3484-3502).
ccttctattaatactacaa

SEQ ID NO: 356768 - DNA, 19 bp, Homo sapiens
  siRNA target sequence for KIAA1007 (NM_016284.2,3600-3618).
ctcacagtcaaatatgaca

SEQ ID NO: 356769 - DNA, 19 bp, Homo sapiens
  siRNA target sequence for KIAA1007 (NM_016284.2,3784-3802).
gagacctacagaaacatta

SEQ ID NO: 356770 - DNA, 19 bp, Homo sapiens
  siRNA target sequence for KIAA1007 (NM_016284.2,3788-3806).
cctacagaaacattaaagt

SEQ ID NO: 356771 - DNA, 19 bp, Homo sapiens
  siRNA target sequence for KIAA1007 (NM_016284.2,3847-3865).
cgttctttgctgaagaact

SEQ ID NO: 356772 - DNA, 19 bp, Homo sapiens
  siRNA target sequence for KIAA1007 (NM_016284.2,3869-3887).
gacattggctaggaatgat

SEQ ID NO: 356773 - DNA, 19 bp, Homo sapiens
  siRNA target sequence for KIAA1007 (NM_016284.2,3875-3893).
ggctaggaatgatcacatt

SEQ ID NO: 356774 - DNA, 19 bp, Homo sapiens
  siRNA target sequence for KIAA1007 (NM_016284.2,3876-3894).
gctaggaatgatcacatta

SEQ ID NO: 356775 - DNA, 19 bp, Homo sapiens
  siRNA target sequence for KIAA1007 (NM_016284.2,3880-3898).
ggaatgatcacattagcta

SEQ ID NO: 356776 - DNA, 19 bp, Homo sapiens
  siRNA target sequence for KIAA1007 (NM_016284.2,3918-3936).
cactgacttggatgtgaaa

SEQ ID NO: 356777 - DNA, 19 bp, Homo sapiens
  siRNA target sequence for KIAA1007 (NM_016284.2,3922-3940).
gacttggatgtgaaatcat

SEQ ID NO: 356778 - DNA, 19 bp, Homo sapiens
  siRNA target sequence for KIAA1007 (NM_016284.2,3942-3960).
gctgctagaggcttatgtt

SEQ ID NO: 356779 - DNA, 19 bp, Homo sapiens
  siRNA target sequence for KIAA1007 (NM_016284.2,3943-3961).
ctgctagaggcttatgtta

SEQ ID NO: 356780 - DNA, 19 bp, Homo sapiens
  siRNA target sequence for KIAA1007 (NM_016284.2,4019-4037).
gcattcgtagtgtggtttt

SEQ ID NO: 356781 - DNA, 19 bp, Homo sapiens
  siRNA target sequence for KIAA1007 (NM_016284.2,4020-4038).
cattcgtagtgtggttttt

SEQ ID NO: 356782 - DNA, 19 bp, Homo sapiens
  siRNA target sequence for KIAA1007 (NM_016284.2,4052-4070).
cttggacaatggcaattat

SEQ ID NO: 356783 - DNA, 19 bp, Homo sapiens
  siRNA target sequence for KIAA1007 (NM_016284.2,4056-4074).
gacaatggcaattatgaat

SEQ ID NO: 356784 - DNA, 19 bp, Homo sapiens
  siRNA target sequence for KIAA1007 (NM_016284.2,4140-4158).
ctgcaagaaccttgcatta

SEQ ID NO: 356785 - DNA, 19 bp, Homo sapiens
  siRNA target sequence for KIAA1007 (NM_016284.2,4149-4167).
ccttgcattagacatcaat

SEQ ID NO: 356786 - DNA, 19 bp, Homo sapiens
  siRNA target sequence for KIAA1007 (NM_016284.2,4180-4198).
ggaaacctcctaaaggata

SEQ ID NO: 356787 - DNA, 19 bp, Homo sapiens
  siRNA target sequence for KIAA1007 (NM_016284.2,4185-4203).
cctcctaaaggataaagat

SEQ ID NO: 356788 - DNA, 19 bp, Homo sapiens
  siRNA target sequence for KIAA1007 (NM_016284.2,4264-4282).
gaactccctcccatcacaa

SEQ ID NO: 356789 - DNA, 19 bp, Homo sapiens
  siRNA target sequence for KIAA1007 (NM_016284.2,4306-4324).
gctaccaacaccacttgta

SEQ ID NO: 356790 - DNA, 19 bp, Homo sapiens
  siRNA target sequence for KIAA1007 (NM_016284.2,4353-4371).
cagctaccacgacatcaat

SEQ ID NO: 356791 - DNA, 19 bp, Homo sapiens
  siRNA target sequence for KIAA1007 (NM_016284.2,4355-4373).
gctaccacgacatcaatgt

SEQ ID NO: 356792 - DNA, 19 bp, Homo sapiens
  siRNA target sequence for KIAA1007 (NM_016284.2,4360-4378).
cacgacatcaatgtctatt

SEQ ID NO: 356793 - DNA, 19 bp, Homo sapiens
  siRNA target sequence for KIAA1007 (NM_016284.2,4387-4405).
ggcttggcaccacacatta

SEQ ID NO: 356794 - DNA, 19 bp, Homo sapiens
  siRNA target sequence for KIAA1007 (NM_016284.2,4399-4417).
cacattactctgaatccaa

SEQ ID NO: 356795 - DNA, 19 bp, Homo sapiens
  siRNA target sequence for KIAA1007 (NM_016284.2,4457-4475).
gtgtgcgtcaggcaattga

SEQ ID NO: 356796 - DNA, 19 bp, Homo sapiens
  siRNA target sequence for KIAA1007 (NM_016284.2,4502-4520).
ctgtggtggatcgatcaat

SEQ ID NO: 356797 - DNA, 19 bp, Homo sapiens
  siRNA target sequence for KIAA1007 (NM_016284.2,4504-4522).
gtggtggatcgatcaatta

SEQ ID NO: 356798 - DNA, 19 bp, Homo sapiens
  siRNA target sequence for KIAA1007 (NM_016284.2,4507-4525).
gtggatcgatcaattaaga

SEQ ID NO: 356799 - DNA, 19 bp, Homo sapiens
  siRNA target sequence for KIAA1007 (NM_016284.2,4509-4527).
ggatcgatcaattaagatt

SEQ ID NO: 356800 - DNA, 19 bp, Homo sapiens
  siRNA target sequence for KIAA1007 (NM_016284.2,4524-4542).
gattgccatgactacttgt

SEQ ID NO: 356801 - DNA, 19 bp, Homo sapiens
  siRNA target sequence for KIAA1007 (NM_016284.2,4533-4551).
gactacttgtgagcaaata

SEQ ID NO: 356802 - DNA, 19 bp, Homo sapiens
  siRNA target sequence for KIAA1007 (NM_016284.2,4535-4553).
ctacttgtgagcaaatagt

SEQ ID NO: 356803 - DNA, 19 bp, Homo sapiens
  siRNA target sequence for KIAA1007 (NM_016284.2,4546-4564).
caaatagtcaggaaggatt

SEQ ID NO: 356804 - DNA, 19 bp, Homo sapiens
  siRNA target sequence for KIAA1007 (NM_016284.2,4609-4627).
cacatgatgcgtaacttga

SEQ ID NO: 356805 - DNA, 19 bp, Homo sapiens
  siRNA target sequence for KIAA1007 (NM_016284.2,4724-4742).
ccccacaacaaagagaaat

SEQ ID NO: 356806 - DNA, 19 bp, Homo sapiens
  siRNA target sequence for KIAA1007 (NM_016284.2,4831-4849).
cctgagatggacaagagat

SEQ ID NO: 356807 - DNA, 19 bp, Homo sapiens
  siRNA target sequence for KIAA1007 (NM_016284.2,4845-4863).
gagattagcaactgaattt

SEQ ID NO: 356808 - DNA, 19 bp, Homo sapiens
  siRNA target sequence for KIAA1007 (NM_016284.2,4847-4865).
gattagcaactgaatttga

SEQ ID NO: 356809 - DNA, 19 bp, Homo sapiens
  siRNA target sequence for KIAA1007 (NM_016284.2,4936-4954).
cggatgccagagcaaatca

SEQ ID NO: 356810 - DNA, 19 bp, Homo sapiens
  siRNA target sequence for KIAA1007 (NM_016284.2,5017-5035).
gttcctggcttcttaccta

SEQ ID NO: 356811 - DNA, 19 bp, Homo sapiens
  siRNA target sequence for KIAA1007 (NM_016284.2,5028-5046).
cttacctacaaatgactta

SEQ ID NO: 356812 - DNA, 19 bp, Homo sapiens
  siRNA target sequence for KIAA1007 (NM_016284.2,5048-5066).
gtcagcccacgggattttt

SEQ ID NO: 356813 - DNA, 19 bp, Homo sapiens
  siRNA target sequence for KIAA1007 (NM_016284.2,5082-5100).
gcaagcttgggcaacagat

SEQ ID NO: 356814 - DNA, 19 bp, Homo sapiens
  siRNA target sequence for KIAA1007 (NM_016284.2,5087-5105).
cttgggcaacagatgatgt

SEQ ID NO: 356815 - DNA, 19 bp, Homo sapiens
  siRNA target sequence for KIAA1007 (NM_016284.2,5098-5116).
gatgatgtagctcagattt

SEQ ID NO: 356816 - DNA, 19 bp, Homo sapiens
  siRNA target sequence for KIAA1007 (NM_016284.2,5208-5226).
cttggaggttgtagtttta

SEQ ID NO: 356817 - DNA, 19 bp, Homo sapiens
  siRNA target sequence for KIAA1007 (NM_016284.2,5211-5229).
ggaggttgtagttttatct

SEQ ID NO: 356818 - DNA, 19 bp, Homo sapiens
  siRNA target sequence for KIAA1007 (NM_016284.2,5246-5264).
ccatagctgctcttggatt

SEQ ID NO: 356819 - DNA, 19 bp, Homo sapiens
  siRNA target sequence for KIAA1007 (NM_016284.2,5274-5292).
ggctgtagagggcttacta

SEQ ID NO: 356820 - DNA, 19 bp, Homo sapiens
  siRNA target sequence for KIAA1007 (NM_016284.2,5342-5360).
gccacctcttggtcctaaa

SEQ ID NO: 356821 - DNA, 19 bp, Homo sapiens
  siRNA target sequence for KIAA1007 (NM_016284.2,5343-5361).
ccacctcttggtcctaaaa

SEQ ID NO: 356822 - DNA, 19 bp, Homo sapiens
  siRNA target sequence for KIAA1007 (NM_016284.2,5346-5364).
cctcttggtcctaaaagct

SEQ ID NO: 356823 - DNA, 19 bp, Homo sapiens
  siRNA target sequence for KIAA1007 (NM_016284.2,5409-5427).
gatcacaaggtgcctaatt

SEQ ID NO: 356824 - DNA, 19 bp, Homo sapiens
  siRNA target sequence for KIAA1007 (NM_016284.2,5412-5430).
cacaaggtgcctaattgaa

SEQ ID NO: 356825 - DNA, 19 bp, Homo sapiens
  siRNA target sequence for KIAA1007 (NM_016284.2,5460-5478).
ggctgtggagctgctaatt

SEQ ID NO: 356826 - DNA, 19 bp, Homo sapiens
  siRNA target sequence for KIAA1007 (NM_016284.2,5469-5487).
gctgctaattcgcaatcat

SEQ ID NO: 356827 - DNA, 19 bp, Homo sapiens
  siRNA target sequence for KIAA1007 (NM_016284.2,5470-5488).
ctgctaattcgcaatcatt

SEQ ID NO: 356828 - DNA, 19 bp, Homo sapiens
  siRNA target sequence for KIAA1007 (NM_016284.2,5561-5579).
catttgctatgcagttagt

SEQ ID NO: 356829 - DNA, 19 bp, Homo sapiens
  siRNA target sequence for KIAA1007 (NM_016284.2,5566-5584).
gctatgcagttagtaaaaa

SEQ ID NO: 356830 - DNA, 19 bp, Homo sapiens
  siRNA target sequence for KIAA1007 (NM_016284.2,5647-5665).
gaaaccctcatgaggatta

SEQ ID NO: 356831 - DNA, 19 bp, Homo sapiens
  siRNA target sequence for KIAA1007 (NM_016284.2,5726-5744).
ccaactatgaagcaatgat

SEQ ID NO: 356832 - DNA, 19 bp, Homo sapiens
  siRNA target sequence for KIAA1007 (NM_016284.2,5727-5745).
caactatgaagcaatgatt

SEQ ID NO: 356833 - DNA, 19 bp, Homo sapiens
  siRNA target sequence for KIAA1007 (NM_016284.2,5730-5748).
ctatgaagcaatgattgat

SEQ ID NO: 356834 - DNA, 19 bp, Homo sapiens
  siRNA target sequence for KIAA1007 (NM_016284.2,5758-5776).
ggaggcccaaactttatga

SEQ ID NO: 356835 - DNA, 19 bp, Homo sapiens
  siRNA target sequence for KIAA1007 (NM_016284.2,5759-5777).
gaggcccaaactttatgat

SEQ ID NO: 356836 - DNA, 19 bp, Homo sapiens
  siRNA target sequence for KIAA1007 (NM_016284.2,5890-5908).
cgcgacagtaccaaagctt

SEQ ID NO: 356837 - DNA, 19 bp, Homo sapiens
  siRNA target sequence for KIAA1007 (NM_016284.2,5891-5909).
gcgacagtaccaaagcttt

SEQ ID NO: 356838 - DNA, 19 bp, Homo sapiens
  siRNA target sequence for KIAA1007 (NM_016284.2,5928-5946).
gatgcaccagcaaggaata

SEQ ID NO: 356839 - DNA, 19 bp, Homo sapiens
  siRNA target sequence for KIAA1007 (NM_016284.2,5932-5950).
caccagcaaggaatactga

SEQ ID NO: 356840 - DNA, 19 bp, Homo sapiens
  siRNA target sequence for KIAA1007 (NM_016284.2,5949-5967).
gaagaccgatgatctcata

SEQ ID NO: 356841 - DNA, 19 bp, Homo sapiens
  siRNA target sequence for KIAA1007 (NM_016284.2,5980-5998).
cgtctgtgtactgaaatgt

SEQ ID NO: 356842 - DNA, 19 bp, Homo sapiens
  siRNA target sequence for KIAA1007 (NM_016284.2,6067-6085).
cgagccaagtgctatcaca

SEQ ID NO: 356843 - DNA, 19 bp, Homo sapiens
  siRNA target sequence for KIAA1007 (NM_016284.2,6112-6130).
gcactgctcgtgaaacact

SEQ ID NO: 356844 - DNA, 19 bp, Homo sapiens
  siRNA target sequence for KIAA1007 (NM_016284.2,6171-6189).
gaacaaggtccttggtata

SEQ ID NO: 356845 - DNA, 19 bp, Homo sapiens
  siRNA target sequence for KIAA1007 (NM_016284.2,6174-6192).
caaggtccttggtatagta

SEQ ID NO: 356846 - DNA, 19 bp, Homo sapiens
  siRNA target sequence for KIAA1007 (NM_016284.2,6217-6235).
gatgttcgtcagagtgaat

SEQ ID NO: 356847 - DNA, 19 bp, Homo sapiens
  siRNA target sequence for KIAA1007 (NM_016284.2,6244-6262).
cttccctaccatcgaattt

SEQ ID NO: 356848 - DNA, 19 bp, Homo sapiens
  siRNA target sequence for KIAA1007 (NM_016284.2,6248-6266).
cctaccatcgaatttttat

SEQ ID NO: 356849 - DNA, 19 bp, Homo sapiens
  siRNA target sequence for KIAA1007 (NM_016284.2,6354-6372).
catcttgaggcctaccaaa

SEQ ID NO: 356850 - DNA, 19 bp, Homo sapiens
  siRNA target sequence for KIAA1007 (NM_016284.2,6369-6387).
caaagctcctggctttgta

SEQ ID NO: 356851 - DNA, 19 bp, Homo sapiens
  siRNA target sequence for KIAA1007 (NM_016284.2,6391-6409).
gcctggcttgaactgattt

SEQ ID NO: 356852 - DNA, 19 bp, Homo sapiens
  siRNA target sequence for KIAA1007 (NM_016284.2,6405-6423).
gatttcccatcggatattt

SEQ ID NO: 356853 - DNA, 19 bp, Homo sapiens
  siRNA target sequence for KIAA1007 (NM_016284.2,6411-6429).
ccatcggatatttattgca

SEQ ID NO: 356854 - DNA, 19 bp, Homo sapiens
  siRNA target sequence for KIAA1007 (NM_016284.2,6416-6434).
ggatatttattgcaagaat

SEQ ID NO: 356855 - DNA, 19 bp, Homo sapiens
  siRNA target sequence for KIAA1007 (NM_016284.2,6471-6489).
gtatgcacagctactgatt

SEQ ID NO: 356856 - DNA, 19 bp, Homo sapiens
  siRNA target sequence for KIAA1007 (NM_016284.2,6484-6502).
ctgattgatttattcaaat

SEQ ID NO: 356857 - DNA, 19 bp, Homo sapiens
  siRNA target sequence for KIAA1007 (NM_016284.2,6526-6544).
gtggaactcaccaaaccta

SEQ ID NO: 356858 - DNA, 19 bp, Homo sapiens
  siRNA target sequence for KIAA1007 (NM_016284.2,6532-6550).
ctcaccaaacctatgcaaa

SEQ ID NO: 356859 - DNA, 19 bp, Homo sapiens
  siRNA target sequence for KIAA1007 (NM_016284.2,6552-6570).
cctctacaagggcacttta

SEQ ID NO: 356860 - DNA, 19 bp, Homo sapiens
  siRNA target sequence for KIAA1007 (NM_016284.2,6553-6571).
ctctacaagggcactttaa

SEQ ID NO: 356861 - DNA, 19 bp, Homo sapiens
  siRNA target sequence for KIAA1007 (NM_016284.2,6555-6573).
ctacaagggcactttaaga

SEQ ID NO: 356862 - DNA, 19 bp, Homo sapiens
  siRNA target sequence for KIAA1007 (NM_016284.2,6576-6594).
gctgctggttcttttgcat

SEQ ID NO: 356863 - DNA, 19 bp, Homo sapiens
  siRNA target sequence for KIAA1007 (NM_016284.2,6602-6620).
cagagttcctttgtgatta

SEQ ID NO: 356864 - DNA, 19 bp, Homo sapiens
  siRNA target sequence for KIAA1007 (NM_016284.2,6606-6624).
gttcctttgtgattaccat

SEQ ID NO: 356865 - DNA, 19 bp, Homo sapiens
  siRNA target sequence for KIAA1007 (NM_016284.2,6609-6627).
cctttgtgattaccattat

SEQ ID NO: 356866 - DNA, 19 bp, Homo sapiens
  siRNA target sequence for KIAA1007 (NM_016284.2,6637-6655).
gatgtgatcccacctaatt

SEQ ID NO: 356867 - DNA, 19 bp, Homo sapiens
  siRNA target sequence for KIAA1007 (NM_016284.2,6711-6729).
cgacccattcactcctaat

SEQ ID NO: 356868 - DNA, 19 bp, Homo sapiens
  siRNA target sequence for KIAA1007 (NM_016284.2,6714-6732).
cccattcactcctaatcta

SEQ ID NO: 356869 - DNA, 19 bp, Homo sapiens
  siRNA target sequence for KIAA1007 (NM_016284.2,6715-6733).
ccattcactcctaatctaa

SEQ ID NO: 356870 - DNA, 19 bp, Homo sapiens
  siRNA target sequence for KIAA1007 (NM_016284.2,6716-6734).
cattcactcctaatctaaa

SEQ ID NO: 356871 - DNA, 19 bp, Homo sapiens
  siRNA target sequence for KIAA1007 (NM_016284.2,6730-6748).
ctaaaggtggacatgttga

SEQ ID NO: 356872 - DNA, 19 bp, Homo sapiens
  siRNA target sequence for KIAA1007 (NM_016284.2,6738-6756).
ggacatgttgagtgaaatt

SEQ ID NO: 356873 - DNA, 19 bp, Homo sapiens
  siRNA target sequence for KIAA1007 (NM_016284.2,6766-6784).
ccccggattctcaccaatt

SEQ ID NO: 356874 - DNA, 19 bp, Homo sapiens
  siRNA target sequence for KIAA1007 (NM_016284.2,6767-6785).
cccggattctcaccaattt

SEQ ID NO: 356875 - DNA, 19 bp, Homo sapiens
  siRNA target sequence for KIAA1007 (NM_016284.2,6779-6797).
ccaatttcactggagtaat

SEQ ID NO: 356876 - DNA, 19 bp, Homo sapiens
  siRNA target sequence for KIAA1007 (NM_016284.2,6817-6835).
gatttggattcctatctta

SEQ ID NO: 356877 - DNA, 19 bp, Homo sapiens
  siRNA target sequence for KIAA1007 (NM_016284.2,6839-6857).
ctcgatcaccagtcacttt

SEQ ID NO: 356878 - DNA, 19 bp, Homo sapiens
  siRNA target sequence for KIAA1007 (NM_016284.2,6875-6893).
gcaacctacaggtatccaa

SEQ ID NO: 356879 - DNA, 19 bp, Homo sapiens
  siRNA target sequence for KIAA1007 (NM_016284.2,7061-7079).
ctgagggtcgctatctctt

SEQ ID NO: 356880 - DNA, 19 bp, Homo sapiens
  siRNA target sequence for KIAA1007 (NM_016284.2,7063-7081).
gagggtcgctatctctttt

SEQ ID NO: 356881 - DNA, 19 bp, Homo sapiens
  siRNA target sequence for KIAA1007 (NM_016284.2,7066-7084).
ggtcgctatctctttttga

SEQ ID NO: 356882 - DNA, 19 bp, Homo sapiens
  siRNA target sequence for KIAA1007 (NM_016284.2,7067-7085).
gtcgctatctctttttgaa

SEQ ID NO: 356883 - DNA, 19 bp, Homo sapiens
  siRNA target sequence for KIAA1007 (NM_016284.2,7099-7117).
cagctccggtacccaaata

SEQ ID NO: 356884 - DNA, 19 bp, Homo sapiens
  siRNA target sequence for KIAA1007 (NM_016284.2,7120-7138).
cacactcactacttcagtt

SEQ ID NO: 356885 - DNA, 19 bp, Homo sapiens
  siRNA target sequence for KIAA1007 (NM_016284.2,7139-7157).
gcaccatgctgtacctttt

SEQ ID NO: 356886 - DNA, 19 bp, Homo sapiens
  siRNA target sequence for KIAA1007 (NM_016284.2,7140-7158).
caccatgctgtaccttttt

SEQ ID NO: 356887 - DNA, 19 bp, Homo sapiens
  siRNA target sequence for KIAA1007 (NM_016284.2,7206-7224).
cttggaacggttgattgta

SEQ ID NO: 356888 - DNA, 19 bp, Homo sapiens
  siRNA target sequence for KIAA1007 (NM_016284.2,7209-7227).
ggaacggttgattgtaaat

SEQ ID NO: 356889 - DNA, 19 bp, Homo sapiens
  siRNA target sequence for KIAA1007 (NM_016284.2,7210-7228).
gaacggttgattgtaaata

SEQ ID NO: 356890 - DNA, 19 bp, Homo sapiens
  siRNA target sequence for KIAA1007 (NM_016284.2,7234-7252).
catccttggggtcttctta

SEQ ID NO: 356891 - DNA, 19 bp, Homo sapiens
  siRNA target sequence for KIAA1007 (NM_016284.2,7237-7255).
ccttggggtcttcttatta

SEQ ID NO: 356892 - DNA, 19 bp, Homo sapiens
  siRNA target sequence for KIAA1007 (NM_016284.2,7241-7259).
ggggtcttcttattacctt

SEQ ID NO: 356893 - DNA, 19 bp, Homo sapiens
  siRNA target sequence for KIAA1007 (NM_016284.2,7316-7334).
gtgccccagaaatcgaaaa

SEQ ID NO: 356894 - DNA, 19 bp, Homo sapiens
  siRNA target sequence for KIAA1007 (NM_016284.2,7318-7336).
gccccagaaatcgaaaagt

SEQ ID NO: 356895 - DNA, 19 bp, Homo sapiens
  siRNA target sequence for KIAA1007 (NM_016284.2,7319-7337).
ccccagaaatcgaaaagtt

SEQ ID NO: 356896 - DNA, 19 bp, Homo sapiens
  siRNA target sequence for MO25 (NM_016289.2,532-550).
cttgctcaagaactctata

SEQ ID NO: 356897 - DNA, 19 bp, Homo sapiens
  siRNA target sequence for MO25 (NM_016289.2,566-584).
gcaccctggtagctgattt

SEQ ID NO: 356898 - DNA, 19 bp, Homo sapiens
  siRNA target sequence for MO25 (NM_016289.2,618-636).
ggctcaaattttcaacaat

SEQ ID NO: 356899 - DNA, 19 bp, Homo sapiens
  siRNA target sequence for MO25 (NM_016289.2,619-637).
gctcaaattttcaacaata

SEQ ID NO: 356900 - DNA, 19 bp, Homo sapiens
  siRNA target sequence for MO25 (NM_016289.2,662-680).
gaactcctactgttgaata

SEQ ID NO: 356901 - DNA, 19 bp, Homo sapiens
  siRNA target sequence for MO25 (NM_016289.2,665-683).
ctcctactgttgaatacat

SEQ ID NO: 356902 - DNA, 19 bp, Homo sapiens
  siRNA target sequence for MO25 (NM_016289.2,733-751).
ccagaaatagctctaaatt

SEQ ID NO: 356903 - DNA, 19 bp, Homo sapiens
  siRNA target sequence for MO25 (NM_016289.2,807-825).
gtggtcggaacagttttat

SEQ ID NO: 356904 - DNA, 19 bp, Homo sapiens
  siRNA target sequence for MO25 (NM_016289.2,809-827).
ggtcggaacagttttatga

SEQ ID NO: 356905 - DNA, 19 bp, Homo sapiens
  siRNA target sequence for MO25 (NM_016289.2,810-828).
gtcggaacagttttatgat

SEQ ID NO: 356906 - DNA, 19 bp, Homo sapiens
  siRNA target sequence for MO25 (NM_016289.2,834-852).
cagatatgtcgaaatgtca

SEQ ID NO: 356907 - DNA, 19 bp, Homo sapiens
  siRNA target sequence for MO25 (NM_016289.2,861-879).
catagcttcagatgcattt

SEQ ID NO: 356908 - DNA, 19 bp, Homo sapiens
  siRNA target sequence for MO25 (NM_016289.2,933-951).
ggaacagcattatgataga

SEQ ID NO: 356909 - DNA, 19 bp, Homo sapiens
  siRNA target sequence for MO25 (NM_016289.2,934-952).
gaacagcattatgatagat

SEQ ID NO: 356910 - DNA, 19 bp, Homo sapiens
  siRNA target sequence for MO25 (NM_016289.2,1014-1032).
gaagcttctcggtgaacta

SEQ ID NO: 356911 - DNA, 19 bp, Homo sapiens
  siRNA target sequence for MO25 (NM_016289.2,1023-1041).
cggtgaactactactagat

SEQ ID NO: 356912 - DNA, 19 bp, Homo sapiens
  siRNA target sequence for MO25 (NM_016289.2,1024-1042).
ggtgaactactactagata

SEQ ID NO: 356913 - DNA, 19 bp, Homo sapiens
  siRNA target sequence for MO25 (NM_016289.2,1036-1054).
ctagatagacacaacttca

SEQ ID NO: 356914 - DNA, 19 bp, Homo sapiens
  siRNA target sequence for MO25 (NM_016289.2,1039-1057).
gatagacacaacttcacaa

SEQ ID NO: 356915 - DNA, 19 bp, Homo sapiens
  siRNA target sequence for MO25 (NM_016289.2,1107-1125).
cctgctgcgagacaaaagt

SEQ ID NO: 356916 - DNA, 19 bp, Homo sapiens
  siRNA target sequence for MO25 (NM_016289.2,1168-1186).
gtagccaatcctaacaaga

SEQ ID NO: 356917 - DNA, 19 bp, Homo sapiens
  siRNA target sequence for MO25 (NM_016289.2,1187-1205).
cgcagcccatcctagacat

SEQ ID NO: 356918 - DNA, 19 bp, Homo sapiens
  siRNA target sequence for MO25 (NM_016289.2,1215-1233).
gaaccaggccaaactcata

SEQ ID NO: 356919 - DNA, 19 bp, Homo sapiens
  siRNA target sequence for MO25 (NM_016289.2,1265-1283).
cggaggatgagcagtttaa

SEQ ID NO: 356920 - DNA, 19 bp, Homo sapiens
  siRNA target sequence for MO25 (NM_016289.2,1284-1302).
cgacgagaagacctattta

SEQ ID NO: 356921 - DNA, 19 bp, Homo sapiens
  siRNA target sequence for MO25 (NM_016289.2,1287-1305).
cgagaagacctatttagtt

SEQ ID NO: 356922 - DNA, 19 bp, Homo sapiens
  siRNA target sequence for MO25 (NM_016289.2,1290-1308).
gaagacctatttagttaaa

SEQ ID NO: 356923 - DNA, 19 bp, Homo sapiens
  siRNA target sequence for LOC51186 (NM_016303.1,370-388).
ggaggaggccaaagcaaaa

SEQ ID NO: 356924 - DNA, 19 bp, Homo sapiens
  siRNA target sequence for LOC51186 (NM_016303.1,443-461).
cacaacaggcatttaagca

SEQ ID NO: 356925 - DNA, 19 bp, Homo sapiens
  siRNA target sequence for LOC51186 (NM_016303.1,527-545).
gtgatgcgttggaaggtta

SEQ ID NO: 356926 - DNA, 19 bp, Homo sapiens
  siRNA target sequence for LOC51186 (NM_016303.1,532-550).
gcgttggaaggttaatcga

SEQ ID NO: 356927 - DNA, 19 bp, Homo sapiens
  siRNA target sequence for LOC51186 (NM_016303.1,533-551).
cgttggaaggttaatcgaa

SEQ ID NO: 356928 - DNA, 19 bp, Homo sapiens
  siRNA target sequence for LOC51186 (NM_016303.1,534-552).
gttggaaggttaatcgaaa

SEQ ID NO: 356929 - DNA, 19 bp, Homo sapiens
  siRNA target sequence for LOC51186 (NM_016303.1,538-556).
gaaggttaatcgaaaccat

SEQ ID NO: 356930 - DNA, 19 bp, Homo sapiens
  siRNA target sequence for LOC51186 (NM_016303.1,553-571).
ccatccttacccctattta

SEQ ID NO: 356931 - DNA, 19 bp, Homo sapiens
  siRNA target sequence for LOC51186 (NM_016303.1,554-572).
catccttacccctatttaa

SEQ ID NO: 356932 - DNA, 19 bp, Homo sapiens
  siRNA target sequence for SS18L2 (NM_016305.1,133-151).
gcaaggcggaagtcaatca

SEQ ID NO: 356933 - DNA, 19 bp, Homo sapiens
  siRNA target sequence for SS18L2 (NM_016305.1,134-152).
caaggcggaagtcaatcaa

SEQ ID NO: 356934 - DNA, 19 bp, Homo sapiens
  siRNA target sequence for SS18L2 (NM_016305.1,185-203).
ccagctgatccgctgtatt

SEQ ID NO: 356935 - DNA, 19 bp, Homo sapiens
  siRNA target sequence for SS18L2 (NM_016305.1,196-214).
gctgtattgtggagtatca

SEQ ID NO: 356936 - DNA, 19 bp, Homo sapiens
  siRNA target sequence for SS18L2 (NM_016305.1,199-217).
gtattgtggagtatcagaa

SEQ ID NO: 356937 - DNA, 19 bp, Homo sapiens
  siRNA target sequence for SS18L2 (NM_016305.1,245-263).
gtaccagcatgtgttacat

SEQ ID NO: 356938 - DNA, 19 bp, Homo sapiens
  siRNA target sequence for SS18L2 (NM_016305.1,248-266).
ccagcatgtgttacataga

SEQ ID NO: 356939 - DNA, 19 bp, Homo sapiens
  siRNA target sequence for SS18L2 (NM_016305.1,251-269).
gcatgtgttacatagaaat

SEQ ID NO: 356940 - DNA, 19 bp, Homo sapiens
  siRNA target sequence for SS18L2 (NM_016305.1,301-319).
gtccaaccagcacttcaaa

SEQ ID NO: 356941 - DNA, 19 bp, Homo sapiens
  siRNA target sequence for COPS7A (NM_016319.1,279-297).
gctggacatgcccaatgtt

SEQ ID NO: 356942 - DNA, 19 bp, Homo sapiens
  siRNA target sequence for COPS7A (NM_016319.1,280-298).
ctggacatgcccaatgtta

SEQ ID NO: 356943 - DNA, 19 bp, Homo sapiens
  siRNA target sequence for COPS7A (NM_016319.1,282-300).
ggacatgcccaatgttaga

SEQ ID NO: 356944 - DNA, 19 bp, Homo sapiens
  siRNA target sequence for COPS7A (NM_016319.1,333-351).
ccggctgctcacagtgttt

SEQ ID NO: 356945 - DNA, 19 bp, Homo sapiens
  siRNA target sequence for COPS7A (NM_016319.1,359-377).
ggacatacgctgactactt

SEQ ID NO: 356946 - DNA, 19 bp, Homo sapiens
  siRNA target sequence for COPS7A (NM_016319.1,360-378).
gacatacgctgactactta

SEQ ID NO: 356947 - DNA, 19 bp, Homo sapiens
  siRNA target sequence for COPS7A (NM_016319.1,390-408).
gaatcttcctccactaaca

SEQ ID NO: 356948 - DNA, 19 bp, Homo sapiens
  siRNA target sequence for COPS7A (NM_016319.1,497-515).
ctcttgccctgcgtaatgt

SEQ ID NO: 356949 - DNA, 19 bp, Homo sapiens
  siRNA target sequence for COPS7A (NM_016319.1,719-737).
gccgtgccaaccaacacaa

SEQ ID NO: 356950 - DNA, 19 bp, Homo sapiens
  siRNA target sequence for COPS7A (NM_016319.1,933-951).
ccgagggagcgccaagatt

SEQ ID NO: 356951 - DNA, 19 bp, Homo sapiens
  siRNA target sequence for COPS7A (NM_016319.1,937-955).
gggagcgccaagatttggt

SEQ ID NO: 356952 - DNA, 19 bp, Homo sapiens
  siRNA target sequence for SFMBT1 (NM_016329.1,430-448).
ctatgggtcttttaaacat

SEQ ID NO: 356953 - DNA, 19 bp, Homo sapiens
  siRNA target sequence for SFMBT1 (NM_016329.1,449-467).
gtggacacacgtttgcaaa

SEQ ID NO: 356954 - DNA, 19 bp, Homo sapiens
  siRNA target sequence for SFMBT1 (NM_016329.1,529-547).
ggttgccaccgttatcact

SEQ ID NO: 356955 - DNA, 19 bp, Homo sapiens
  siRNA target sequence for SFMBT1 (NM_016329.1,562-580).
gctccttctccgctatgat

SEQ ID NO: 356956 - DNA, 19 bp, Homo sapiens
  siRNA target sequence for SFMBT1 (NM_016329.1,593-611).
gatcggagagcagatttct

SEQ ID NO: 356957 - DNA, 19 bp, Homo sapiens
  siRNA target sequence for SFMBT1 (NM_016329.1,647-665).
gggtggtgtgagcagaata

SEQ ID NO: 356958 - DNA, 19 bp, Homo sapiens
  siRNA target sequence for SFMBT1 (NM_016329.1,689-707).
ggcatcagagataaagtat

SEQ ID NO: 356959 - DNA, 19 bp, Homo sapiens
  siRNA target sequence for SFMBT1 (NM_016329.1,736-754).
cctgataggagcatgtagt

SEQ ID NO: 356960 - DNA, 19 bp, Homo sapiens
  siRNA target sequence for SFMBT1 (NM_016329.1,782-800).
cgtaatgggaggaatcctt

SEQ ID NO: 356961 - DNA, 19 bp, Homo sapiens
  siRNA target sequence for SFMBT1 (NM_016329.1,792-810).
ggaatcctttagatctcat

SEQ ID NO: 356962 - DNA, 19 bp, Homo sapiens
  siRNA target sequence for SFMBT1 (NM_016329.1,815-833).
ccaggatccagactagaat

SEQ ID NO: 356963 - DNA, 19 bp, Homo sapiens
  siRNA target sequence for SFMBT1 (NM_016329.1,825-843).
gactagaatgtcaagcttt

SEQ ID NO: 356964 - DNA, 19 bp, Homo sapiens
  siRNA target sequence for SFMBT1 (NM_016329.1,839-857).
gctttccaggactctttaa

SEQ ID NO: 356965 - DNA, 19 bp, Homo sapiens
  siRNA target sequence for SFMBT1 (NM_016329.1,858-876).
gcacttggattgttactgt

SEQ ID NO: 356966 - DNA, 19 bp, Homo sapiens
  siRNA target sequence for SFMBT1 (NM_016329.1,859-877).
cacttggattgttactgta

SEQ ID NO: 356967 - DNA, 19 bp, Homo sapiens
  siRNA target sequence for SFMBT1 (NM_016329.1,864-882).
ggattgttactgtagtaga

SEQ ID NO: 356968 - DNA, 19 bp, Homo sapiens
  siRNA target sequence for SFMBT1 (NM_016329.1,865-883).
gattgttactgtagtagaa

SEQ ID NO: 356969 - DNA, 19 bp, Homo sapiens
  siRNA target sequence for SFMBT1 (NM_016329.1,897-915).
ggctgaagctacgttatga

SEQ ID NO: 356970 - DNA, 19 bp, Homo sapiens
  siRNA target sequence for SFMBT1 (NM_016329.1,920-938).
cttgaaagttctgacaatt

SEQ ID NO: 356971 - DNA, 19 bp, Homo sapiens
  siRNA target sequence for SFMBT1 (NM_016329.1,927-945).
gttctgacaattatgaaca

SEQ ID NO: 356972 - DNA, 19 bp, Homo sapiens
  siRNA target sequence for SFMBT1 (NM_016329.1,952-970).
gtattacttggatccattt

SEQ ID NO: 356973 - DNA, 19 bp, Homo sapiens
  siRNA target sequence for SFMBT1 (NM_016329.1,1018-1036).
cccttcagccattagacat

SEQ ID NO: 356974 - DNA, 19 bp, Homo sapiens
  siRNA target sequence for SFMBT1 (NM_016329.1,1025-1043).
gccattagacatctaaaaa

SEQ ID NO: 356975 - DNA, 19 bp, Homo sapiens
  siRNA target sequence for SFMBT1 (NM_016329.1,1026-1044).
ccattagacatctaaaaaa

SEQ ID NO: 356976 - DNA, 19 bp, Homo sapiens
  siRNA target sequence for SFMBT1 (NM_016329.1,1097-1115).
ccattaccatcttacttat

SEQ ID NO: 356977 - DNA, 19 bp, Homo sapiens
  siRNA target sequence for SFMBT1 (NM_016329.1,1098-1116).
cattaccatcttacttatt

SEQ ID NO: 356978 - DNA, 19 bp, Homo sapiens
  siRNA target sequence for SFMBT1 (NM_016329.1,1104-1122).
catcttacttatttaagga

SEQ ID NO: 356979 - DNA, 19 bp, Homo sapiens
  siRNA target sequence for SFMBT1 (NM_016329.1,1142-1160).
catacattctctgtaaaca

SEQ ID NO: 356980 - DNA, 19 bp, Homo sapiens
  siRNA target sequence for SFMBT1 (NM_016329.1,1152-1170).
ctgtaaacatgaaattgga

SEQ ID NO: 356981 - DNA, 19 bp, Homo sapiens
  siRNA target sequence for SFMBT1 (NM_016329.1,1203-1221).
ctcctgctacagttgttaa

SEQ ID NO: 356982 - DNA, 19 bp, Homo sapiens
  siRNA target sequence for SFMBT1 (NM_016329.1,1206-1224).
ctgctacagttgttaaggt

SEQ ID NO: 356983 - DNA, 19 bp, Homo sapiens
  siRNA target sequence for SFMBT1 (NM_016329.1,1208-1226).
gctacagttgttaaggttt

SEQ ID NO: 356984 - DNA, 19 bp, Homo sapiens
  siRNA target sequence for SFMBT1 (NM_016329.1,1209-1227).
ctacagttgttaaggtttt

SEQ ID NO: 356985 - DNA, 19 bp, Homo sapiens
  siRNA target sequence for SFMBT1 (NM_016329.1,1276-1294).
ccacgcacggcgatccttt

SEQ ID NO: 356986 - DNA, 19 bp, Homo sapiens
  siRNA target sequence for SFMBT1 (NM_016329.1,1280-1298).
gcacggcgatcctttgtgt

SEQ ID NO: 356987 - DNA, 19 bp, Homo sapiens
  siRNA target sequence for SFMBT1 (NM_016329.1,1398-1416).
gggctgactacctcaaaca

SEQ ID NO: 356988 - DNA, 19 bp, Homo sapiens
  siRNA target sequence for SFMBT1 (NM_016329.1,1443-1461).
ggtgcttccctccgttaat

SEQ ID NO: 356989 - DNA, 19 bp, Homo sapiens
  siRNA target sequence for SFMBT1 (NM_016329.1,1444-1462).
gtgcttccctccgttaatt

SEQ ID NO: 356990 - DNA, 19 bp, Homo sapiens
  siRNA target sequence for SFMBT1 (NM_016329.1,1455-1473).
cgttaatttctgaacatga

SEQ ID NO: 356991 - DNA, 19 bp, Homo sapiens
  siRNA target sequence for SFMBT1 (NM_016329.1,1456-1474).
gttaatttctgaacatgaa

SEQ ID NO: 356992 - DNA, 19 bp, Homo sapiens
  siRNA target sequence for SFMBT1 (NM_016329.1,1594-1612).
gcctatacctgaatgtatt

SEQ ID NO: 356993 - DNA, 19 bp, Homo sapiens
  siRNA target sequence for SFMBT1 (NM_016329.1,1683-1701).
ctcgccgagcacgagtata

SEQ ID NO: 356994 - DNA, 19 bp, Homo sapiens
  siRNA target sequence for SFMBT1 (NM_016329.1,1685-1703).
cgccgagcacgagtatata

SEQ ID NO: 356995 - DNA, 19 bp, Homo sapiens
  siRNA target sequence for SFMBT1 (NM_016329.1,1686-1704).
gccgagcacgagtatataa

SEQ ID NO: 356996 - DNA, 19 bp, Homo sapiens
  siRNA target sequence for SFMBT1 (NM_016329.1,1687-1705).
ccgagcacgagtatataaa

SEQ ID NO: 356997 - DNA, 19 bp, Homo sapiens
  siRNA target sequence for SFMBT1 (NM_016329.1,1689-1707).
gagcacgagtatataaaca

SEQ ID NO: 356998 - DNA, 19 bp, Homo sapiens
  siRNA target sequence for SFMBT1 (NM_016329.1,1691-1709).
gcacgagtatataaacaga

SEQ ID NO: 356999 - DNA, 19 bp, Homo sapiens
  siRNA target sequence for SFMBT1 (NM_016329.1,1794-1812).
ccacagagtcagttatgat

SEQ ID NO: 357000 - DNA, 19 bp, Homo sapiens
  siRNA target sequence for SFMBT1 (NM_016329.1,1795-1813).
cacagagtcagttatgatt

SEQ ID NO: 357001 - DNA, 19 bp, Homo sapiens
  siRNA target sequence for SFMBT1 (NM_016329.1,1797-1815).
cagagtcagttatgattaa

SEQ ID NO: 357002 - DNA, 19 bp, Homo sapiens
  siRNA target sequence for SFMBT1 (NM_016329.1,1830-1848).
gtccaaagatatacttcaa

SEQ ID NO: 357003 - DNA, 19 bp, Homo sapiens
  siRNA target sequence for SFMBT1 (NM_016329.1,1863-1881).
cagggccatatcttaacaa

SEQ ID NO: 357004 - DNA, 19 bp, Homo sapiens
  siRNA target sequence for SFMBT1 (NM_016329.1,1926-1944).
gtgttctggtccttagaga

SEQ ID NO: 357005 - DNA, 19 bp, Homo sapiens
  siRNA target sequence for SFMBT1 (NM_016329.1,1941-1959).
gagaggtcctcactttact

SEQ ID NO: 357006 - DNA, 19 bp, Homo sapiens
  siRNA target sequence for SFMBT1 (NM_016329.1,1943-1961).
gaggtcctcactttactta

SEQ ID NO: 357007 - DNA, 19 bp, Homo sapiens
  siRNA target sequence for SFMBT1 (NM_016329.1,2068-2086).
gagttatcgggctactgtt

SEQ ID NO: 357008 - DNA, 19 bp, Homo sapiens
  siRNA target sequence for SFMBT1 (NM_016329.1,2076-2094).
gggctactgttgagatagt

SEQ ID NO: 357009 - DNA, 19 bp, Homo sapiens
  siRNA target sequence for SFMBT1 (NM_016329.1,2078-2096).
gctactgttgagatagtga

SEQ ID NO: 357010 - DNA, 19 bp, Homo sapiens
  siRNA target sequence for SFMBT1 (NM_016329.1,2079-2097).
ctactgttgagatagtgaa

SEQ ID NO: 357011 - DNA, 19 bp, Homo sapiens
  siRNA target sequence for SFMBT1 (NM_016329.1,2105-2123).
gatcgggtgactgaattct

SEQ ID NO: 357012 - DNA, 19 bp, Homo sapiens
  siRNA target sequence for SFMBT1 (NM_016329.1,2124-2142).
gccggcaaacctgtatcaa

SEQ ID NO: 357013 - DNA, 19 bp, Homo sapiens
  siRNA target sequence for SFMBT1 (NM_016329.1,2125-2143).
ccggcaaacctgtatcaaa

SEQ ID NO: 357014 - DNA, 19 bp, Homo sapiens
  siRNA target sequence for SFMBT1 (NM_016329.1,2221-2239).
gaccaaatacacacactat

SEQ ID NO: 357015 - DNA, 19 bp, Homo sapiens
  siRNA target sequence for SFMBT1 (NM_016329.1,2223-2241).
ccaaatacacacactatta

SEQ ID NO: 357016 - DNA, 19 bp, Homo sapiens
  siRNA target sequence for SFMBT1 (NM_016329.1,2273-2291).
ccacctggtgggcatagta

SEQ ID NO: 357017 - DNA, 19 bp, Homo sapiens
  siRNA target sequence for SFMBT1 (NM_016329.1,2274-2292).
cacctggtgggcatagtaa

SEQ ID NO: 357018 - DNA, 19 bp, Homo sapiens
  siRNA target sequence for SFMBT1 (NM_016329.1,2276-2294).
cctggtgggcatagtaact

SEQ ID NO: 357019 - DNA, 19 bp, Homo sapiens
  siRNA target sequence for SFMBT1 (NM_016329.1,2277-2295).
ctggtgggcatagtaactt

SEQ ID NO: 357020 - DNA, 19 bp, Homo sapiens
  siRNA target sequence for SFMBT1 (NM_016329.1,2282-2300).
gggcatagtaacttagctt

SEQ ID NO: 357021 - DNA, 19 bp, Homo sapiens
  siRNA target sequence for SFMBT1 (NM_016329.1,2462-2480).
ctaagtgaaggcagtacat

SEQ ID NO: 357022 - DNA, 19 bp, Homo sapiens
  siRNA target sequence for SFMBT1 (NM_016329.1,2571-2589).
cgctgcctccagatagaca

SEQ ID NO: 357023 - DNA, 19 bp, Homo sapiens
  siRNA target sequence for SFMBT1 (NM_016329.1,2602-2620).
ggagcttcgcaccttttca

SEQ ID NO: 357024 - DNA, 19 bp, Homo sapiens
  siRNA target sequence for SFMBT1 (NM_016329.1,2606-2624).
cttcgcaccttttcatttt

SEQ ID NO: 357025 - DNA, 19 bp, Homo sapiens
  siRNA target sequence for SFMBT1 (NM_016329.1,2693-2711).
gacagtaaccccttgaagt

SEQ ID NO: 357026 - DNA, 19 bp, Homo sapiens
  siRNA target sequence for SFMBT1 (NM_016329.1,2726-2744).
gttgtgcggttcatcagat

SEQ ID NO: 357027 - DNA, 19 bp, Homo sapiens
  siRNA target sequence for SFMBT1 (NM_016329.1,2746-2764).
cactgactgtgctccatta

SEQ ID NO: 357028 - DNA, 19 bp, Homo sapiens
  siRNA target sequence for SFMBT1 (NM_016329.1,2750-2768).
gactgtgctccattagcaa

SEQ ID NO: 357029 - DNA, 19 bp, Homo sapiens
  siRNA target sequence for SFMBT1 (NM_016329.1,2754-2772).
gtgctccattagcaagaat

SEQ ID NO: 357030 - DNA, 19 bp, Homo sapiens
  siRNA target sequence for SFMBT1 (NM_016329.1,2756-2774).
gctccattagcaagaatat

SEQ ID NO: 357031 - DNA, 19 bp, Homo sapiens
  siRNA target sequence for SFMBT1 (NM_016329.1,2823-2841).
ccactgttcaagaatgcat

SEQ ID NO: 357032 - DNA, 19 bp, Homo sapiens
  siRNA target sequence for SFMBT1 (NM_016329.1,2834-2852).
gaatgcatggacttaaaat

SEQ ID NO: 357033 - DNA, 19 bp, Homo sapiens
  siRNA target sequence for SFMBT1 (NM_016329.1,2870-2888).
ctttgccatcacatagaga

SEQ ID NO: 357034 - DNA, 19 bp, Homo sapiens
  siRNA target sequence for SFMBT1 (NM_016329.1,2881-2899).
catagagaggatcaagttt

SEQ ID NO: 357035 - DNA, 19 bp, Homo sapiens
  siRNA target sequence for SFMBT1 (NM_016329.1,2887-2905).
gaggatcaagtttgctttt

SEQ ID NO: 357036 - DNA, 19 bp, Homo sapiens
  siRNA target sequence for ANC_2H01 (NM_016331.1,482-500).
ctacacccttctcgttatt

SEQ ID NO: 357037 - DNA, 19 bp, Homo sapiens
  siRNA target sequence for ANC_2H01 (NM_016331.1,487-505).
cccttctcgttattcagat

SEQ ID NO: 357038 - DNA, 19 bp, Homo sapiens
  siRNA target sequence for ANC_2H01 (NM_016331.1,488-506).
ccttctcgttattcagatt

SEQ ID NO: 357039 - DNA, 19 bp, Homo sapiens
  siRNA target sequence for ANC_2H01 (NM_016331.1,508-526).
ctctggaataagcagaatt

SEQ ID NO: 357040 - DNA, 19 bp, Homo sapiens
  siRNA target sequence for ANC_2H01 (NM_016331.1,561-579).
gttacagtgtctgttctat

SEQ ID NO: 357041 - DNA, 19 bp, Homo sapiens
  siRNA target sequence for ANC_2H01 (NM_016331.1,576-594).
ctatgagacagccagattt

SEQ ID NO: 357042 - DNA, 19 bp, Homo sapiens
  siRNA target sequence for ANC_2H01 (NM_016331.1,630-648).
ccgagacgtcaaatgactt

SEQ ID NO: 357043 - DNA, 19 bp, Homo sapiens
  siRNA target sequence for ANC_2H01 (NM_016331.1,704-722).
cccagtcctgtacttagaa

SEQ ID NO: 357044 - DNA, 19 bp, Homo sapiens
  siRNA target sequence for ANC_2H01 (NM_016331.1,708-726).
gtcctgtacttagaattct

SEQ ID NO: 357045 - DNA, 19 bp, Homo sapiens
  siRNA target sequence for ANC_2H01 (NM_016331.1,711-729).
ctgtacttagaattctaga

SEQ ID NO: 357046 - DNA, 19 bp, Homo sapiens
  siRNA target sequence for ANC_2H01 (NM_016331.1,817-835).
ccaagaggagagtcctata

SEQ ID NO: 357047 - DNA, 19 bp, Homo sapiens
  siRNA target sequence for ANC_2H01 (NM_016331.1,934-952).
ccaagaccaaactgatgaa

SEQ ID NO: 357048 - DNA, 19 bp, Homo sapiens
  siRNA target sequence for ANC_2H01 (NM_016331.1,953-971).
gaaccgccagctaaacttt

SEQ ID NO: 357049 - DNA, 19 bp, Homo sapiens
  siRNA target sequence for ANC_2H01 (NM_016331.1,958-976).
gccagctaaactttgtaaa

SEQ ID NO: 357050 - DNA, 19 bp, Homo sapiens
  siRNA target sequence for ANC_2H01 (NM_016331.1,1064-1082).
gaactttgtgagtttaaca

SEQ ID NO: 357051 - DNA, 19 bp, Homo sapiens
  siRNA target sequence for ANC_2H01 (NM_016331.1,1109-1127).
catatgatcctgaagcata

SEQ ID NO: 357052 - DNA, 19 bp, Homo sapiens
  siRNA target sequence for ANC_2H01 (NM_016331.1,1114-1132).
gatcctgaagcataaacgt

SEQ ID NO: 357053 - DNA, 19 bp, Homo sapiens
  siRNA target sequence for ANC_2H01 (NM_016331.1,1120-1138).
gaagcataaacgtactgat

SEQ ID NO: 357054 - DNA, 19 bp, Homo sapiens
  siRNA target sequence for ANC_2H01 (NM_016331.1,1123-1141).
gcataaacgtactgattca

SEQ ID NO: 357055 - DNA, 19 bp, Homo sapiens
  siRNA target sequence for ANC_2H01 (NM_016331.1,1151-1169).
cgagtatgcaaggaaagtt

SEQ ID NO: 357056 - DNA, 19 bp, Homo sapiens
  siRNA target sequence for ANC_2H01 (NM_016331.1,1152-1170).
gagtatgcaaggaaagttt

SEQ ID NO: 357057 - DNA, 19 bp, Homo sapiens
  siRNA target sequence for ANC_2H01 (NM_016331.1,1163-1181).
gaaagtttctctaccaata

SEQ ID NO: 357058 - DNA, 19 bp, Homo sapiens
  siRNA target sequence for ANC_2H01 (NM_016331.1,1167-1185).
gtttctctaccaatatgct

SEQ ID NO: 357059 - DNA, 19 bp, Homo sapiens
  siRNA target sequence for ANC_2H01 (NM_016331.1,1173-1191).
ctaccaatatgcttctgat

SEQ ID NO: 357060 - DNA, 19 bp, Homo sapiens
  siRNA target sequence for ANC_2H01 (NM_016331.1,1211-1229).
gaagaggatccctacattt

SEQ ID NO: 357061 - DNA, 19 bp, Homo sapiens
  siRNA target sequence for ANC_2H01 (NM_016331.1,1217-1235).
gatccctacatttgtaaat

SEQ ID NO: 357062 - DNA, 19 bp, Homo sapiens
  siRNA target sequence for ANC_2H01 (NM_016331.1,1279-1297).
cattgcagacacccatttt

SEQ ID NO: 357063 - DNA, 19 bp, Homo sapiens
  siRNA target sequence for ANC_2H01 (NM_016331.1,1284-1302).
cagacacccattttagtga

SEQ ID NO: 357064 - DNA, 19 bp, Homo sapiens
  siRNA target sequence for ANC_2H01 (NM_016331.1,1315-1333).
gtgtgaacagtgtgatgta

SEQ ID NO: 357065 - DNA, 19 bp, Homo sapiens
  siRNA target sequence for ANC_2H01 (NM_016331.1,1350-1368).
gtgaactctacctacattt

SEQ ID NO: 357066 - DNA, 19 bp, Homo sapiens
  siRNA target sequence for ANC_2H01 (NM_016331.1,1460-1478).
gagcatgcatgtaaattaa

SEQ ID NO: 357067 - DNA, 19 bp, Homo sapiens
  siRNA target sequence for ANC_2H01 (NM_016331.1,1462-1480).
gcatgcatgtaaattaata

SEQ ID NO: 357068 - DNA, 19 bp, Homo sapiens
  siRNA target sequence for ANC_2H01 (NM_016331.1,1481-1499).
gagttaagtgataagtata

SEQ ID NO: 357069 - DNA, 19 bp, Homo sapiens
  siRNA target sequence for ANC_2H01 (NM_016331.1,1528-1546).
cttaagcaaaattaccttt

SEQ ID NO: 357070 - DNA, 19 bp, Homo sapiens
  siRNA target sequence for ANC_2H01 (NM_016331.1,1591-1609).
gagtagacttcacacaaat

SEQ ID NO: 357071 - DNA, 19 bp, Homo sapiens
  siRNA target sequence for ANC_2H01 (NM_016331.1,1617-1635).
ggcatgttgctattgaaca

SEQ ID NO: 357072 - DNA, 19 bp, Homo sapiens
  siRNA target sequence for ANC_2H01 (NM_016331.1,1618-1636).
gcatgttgctattgaacat

SEQ ID NO: 357073 - DNA, 19 bp, Homo sapiens
  siRNA target sequence for ANC_2H01 (NM_016331.1,1619-1637).
catgttgctattgaacata

SEQ ID NO: 357074 - DNA, 19 bp, Homo sapiens
  siRNA target sequence for ANC_2H01 (NM_016331.1,1691-1709).
ctagaatattgcaagcatt

SEQ ID NO: 357075 - DNA, 19 bp, Homo sapiens
  siRNA target sequence for ANC_2H01 (NM_016331.1,1705-1723).
gcatttaaattcacattta

SEQ ID NO: 357076 - DNA, 19 bp, Homo sapiens
  siRNA target sequence for ANC_2H01 (NM_016331.1,1730-1748).
gggatttatttatgtcaat

SEQ ID NO: 357077 - DNA, 19 bp, Homo sapiens
  siRNA target sequence for ANC_2H01 (NM_016331.1,1809-1827).
cagctgacttgcctcataa

SEQ ID NO: 357078 - DNA, 19 bp, Homo sapiens
  siRNA target sequence for SRRM2 (NM_016333.2,317-335).
gtgagcggcctgactacaa

SEQ ID NO: 357079 - DNA, 19 bp, Homo sapiens
  siRNA target sequence for SRRM2 (NM_016333.2,467-485).
ggtacgaggaacagcaaat

SEQ ID NO: 357080 - DNA, 19 bp, Homo sapiens
  siRNA target sequence for SRRM2 (NM_016333.2,468-486).
gtacgaggaacagcaaatt

SEQ ID NO: 357081 - DNA, 19 bp, Homo sapiens
  siRNA target sequence for SRRM2 (NM_016333.2,500-518).
cgacctttcgactcatgtt

SEQ ID NO: 357082 - DNA, 19 bp, Homo sapiens
  siRNA target sequence for SRRM2 (NM_016333.2,645-663).
catcagtgattcttacgta

SEQ ID NO: 357083 - DNA, 19 bp, Homo sapiens
  siRNA target sequence for SRRM2 (NM_016333.2,660-678).
cgtagatggcagctctttt

SEQ ID NO: 357084 - DNA, 19 bp, Homo sapiens
  siRNA target sequence for SRRM2 (NM_016333.2,689-707).
gtcgtgcccgagaagctaa

SEQ ID NO: 357085 - DNA, 19 bp, Homo sapiens
  siRNA target sequence for SRRM2 (NM_016333.2,719-737).
ctgagcctcccaaacctta

SEQ ID NO: 357086 - DNA, 19 bp, Homo sapiens
  siRNA target sequence for SRRM2 (NM_016333.2,836-854).
ctcctcgacgggagagaaa

SEQ ID NO: 357087 - DNA, 19 bp, Homo sapiens
  siRNA target sequence for SRRM2 (NM_016333.2,890-908).
ctgagtccaagaaacgtaa

SEQ ID NO: 357088 - DNA, 19 bp, Homo sapiens
  siRNA target sequence for SRRM2 (NM_016333.2,894-912).
gtccaagaaacgtaagcat

SEQ ID NO: 357089 - DNA, 19 bp, Homo sapiens
  siRNA target sequence for SRRM2 (NM_016333.2,925-943).
ccaaagagcaaacgtaaat

SEQ ID NO: 357090 - DNA, 19 bp, Homo sapiens
  siRNA target sequence for SRRM2 (NM_016333.2,937-955).
cgtaaatctaaggacaaaa

SEQ ID NO: 357091 - DNA, 19 bp, Homo sapiens
  siRNA target sequence for SRRM2 (NM_016333.2,963-981).
gcggtctcgaagtacaaca

SEQ ID NO: 357092 - DNA, 19 bp, Homo sapiens
  siRNA target sequence for SRRM2 (NM_016333.2,1030-1048).
gcttcctcctccgatactt

SEQ ID NO: 357093 - DNA, 19 bp, Homo sapiens
  siRNA target sequence for SRRM2 (NM_016333.2,1063-1081).
cgaagtgctgcagctaaaa

SEQ ID NO: 357094 - DNA, 19 bp, Homo sapiens
  siRNA target sequence for SRRM2 (NM_016333.2,1069-1087).
gctgcagctaaaactcata

SEQ ID NO: 357095 - DNA, 19 bp, Homo sapiens
  siRNA target sequence for SRRM2 (NM_016333.2,1140-1158).
gggagatgcgcctttcagt

SEQ ID NO: 357096 - DNA, 19 bp, Homo sapiens
  siRNA target sequence for SRRM2 (NM_016333.2,1194-1212).
cccggagactgctacgaaa

SEQ ID NO: 357097 - DNA, 19 bp, Homo sapiens
  siRNA target sequence for SRRM2 (NM_016333.2,1215-1233).
gcctagcagcccttatgaa

SEQ ID NO: 357098 - DNA, 19 bp, Homo sapiens
  siRNA target sequence for SRRM2 (NM_016333.2,1220-1238).
gcagcccttatgaagacaa

SEQ ID NO: 357099 - DNA, 19 bp, Homo sapiens
  siRNA target sequence for SRRM2 (NM_016333.2,1221-1239).
cagcccttatgaagacaaa

SEQ ID NO: 357100 - DNA, 19 bp, Homo sapiens
  siRNA target sequence for SRRM2 (NM_016333.2,1224-1242).
cccttatgaagacaaagat

SEQ ID NO: 357101 - DNA, 19 bp, Homo sapiens
  siRNA target sequence for SRRM2 (NM_016333.2,1431-1449).
ccgttcaccacctaagtct

SEQ ID NO: 357102 - DNA, 19 bp, Homo sapiens
  siRNA target sequence for SRRM2 (NM_016333.2,1567-1585).
gggtcccaccgagagattt

SEQ ID NO: 357103 - DNA, 19 bp, Homo sapiens
  siRNA target sequence for SRRM2 (NM_016333.2,1569-1587).
gtcccaccgagagatttct

SEQ ID NO: 357104 - DNA, 19 bp, Homo sapiens
  siRNA target sequence for SRRM2 (NM_016333.2,1572-1590).
ccaccgagagatttcttct

SEQ ID NO: 357105 - DNA, 19 bp, Homo sapiens
  siRNA target sequence for SRRM2 (NM_016333.2,1573-1591).
caccgagagatttcttctt

SEQ ID NO: 357106 - DNA, 19 bp, Homo sapiens
  siRNA target sequence for SRRM2 (NM_016333.2,1575-1593).
ccgagagatttcttcttct

SEQ ID NO: 357107 - DNA, 19 bp, Homo sapiens
  siRNA target sequence for SRRM2 (NM_016333.2,1586-1604).
cttcttctcccacatctaa

SEQ ID NO: 357108 - DNA, 19 bp, Homo sapiens
  siRNA target sequence for SRRM2 (NM_016333.2,1611-1629).
ctcacatggccgagcaaaa

SEQ ID NO: 357109 - DNA, 19 bp, Homo sapiens
  siRNA target sequence for SRRM2 (NM_016333.2,1620-1638).
ccgagcaaaacgggataaa

SEQ ID NO: 357110 - DNA, 19 bp, Homo sapiens
  siRNA target sequence for SRRM2 (NM_016333.2,1621-1639).
cgagcaaaacgggataaat

SEQ ID NO: 357111 - DNA, 19 bp, Homo sapiens
  siRNA target sequence for SRRM2 (NM_016333.2,1785-1803).
gaggtggggaagatctaga

SEQ ID NO: 357112 - DNA, 19 bp, Homo sapiens
  siRNA target sequence for SRRM2 (NM_016333.2,1903-1921).
gggaggtcccactctagat

SEQ ID NO: 357113 - DNA, 19 bp, Homo sapiens
  siRNA target sequence for SRRM2 (NM_016333.2,2083-2101).
cctgctaggcgcagatcta

SEQ ID NO: 357114 - DNA, 19 bp, Homo sapiens
  siRNA target sequence for SRRM2 (NM_016333.2,2122-2140).
cgcaggtctcgtagtagat

SEQ ID NO: 357115 - DNA, 19 bp, Homo sapiens
  siRNA target sequence for SRRM2 (NM_016333.2,2124-2142).
caggtctcgtagtagatca

SEQ ID NO: 357116 - DNA, 19 bp, Homo sapiens
  siRNA target sequence for SRRM2 (NM_016333.2,2323-2341).
ggaagatcccgcagtagaa

SEQ ID NO: 357117 - DNA, 19 bp, Homo sapiens
  siRNA target sequence for SRRM2 (NM_016333.2,2331-2349).
ccgcagtagaagcttagtt

SEQ ID NO: 357118 - DNA, 19 bp, Homo sapiens
  siRNA target sequence for SRRM2 (NM_016333.2,2332-2350).
cgcagtagaagcttagtta

SEQ ID NO: 357119 - DNA, 19 bp, Homo sapiens
  siRNA target sequence for SRRM2 (NM_016333.2,2334-2352).
cagtagaagcttagttaga

SEQ ID NO: 357120 - DNA, 19 bp, Homo sapiens
  siRNA target sequence for SRRM2 (NM_016333.2,2475-2493).
gaaatctcgcatttcttca

SEQ ID NO: 357121 - DNA, 19 bp, Homo sapiens
  siRNA target sequence for SRRM2 (NM_016333.2,2518-2536).
ccacggtccaaagcaaaat

SEQ ID NO: 357122 - DNA, 19 bp, Homo sapiens
  siRNA target sequence for SRRM2 (NM_016333.2,2627-2645).
cctcccaacctaaagctaa

SEQ ID NO: 357123 - DNA, 19 bp, Homo sapiens
  siRNA target sequence for SRRM2 (NM_016333.2,2665-2683).
cgcagtcgctccagttctt

SEQ ID NO: 357124 - DNA, 19 bp, Homo sapiens
  siRNA target sequence for SRRM2 (NM_016333.2,2681-2699).
cttctccgccacctaaaca

SEQ ID NO: 357125 - DNA, 19 bp, Homo sapiens
  siRNA target sequence for SRRM2 (NM_016333.2,2684-2702).
ctccgccacctaaacagaa

SEQ ID NO: 357126 - DNA, 19 bp, Homo sapiens
  siRNA target sequence for SRRM2 (NM_016333.2,2689-2707).
ccacctaaacagaaatcta

SEQ ID NO: 357127 - DNA, 19 bp, Homo sapiens
  siRNA target sequence for SRRM2 (NM_016333.2,2722-2740).
caaagtcattccagttcat

SEQ ID NO: 357128 - DNA, 19 bp, Homo sapiens
  siRNA target sequence for SRRM2 (NM_016333.2,2738-2756).
catctcctcatcctaaagt

SEQ ID NO: 357129 - DNA, 19 bp, Homo sapiens
  siRNA target sequence for SRRM2 (NM_016333.2,2741-2759).
ctcctcatcctaaagtgaa

SEQ ID NO: 357130 - DNA, 19 bp, Homo sapiens
  siRNA target sequence for SRRM2 (NM_016333.2,2743-2761).
cctcatcctaaagtgaaat

SEQ ID NO: 357131 - DNA, 19 bp, Homo sapiens
  siRNA target sequence for SRRM2 (NM_016333.2,2773-2791).
ccgaggcaagggtccataa

SEQ ID NO: 357132 - DNA, 19 bp, Homo sapiens
  siRNA target sequence for SRRM2 (NM_016333.2,2775-2793).
gaggcaagggtccataaca

SEQ ID NO: 357133 - DNA, 19 bp, Homo sapiens
  siRNA target sequence for SRRM2 (NM_016333.2,2778-2796).
gcaagggtccataacaagt

SEQ ID NO: 357134 - DNA, 19 bp, Homo sapiens
  siRNA target sequence for SRRM2 (NM_016333.2,2833-2851).
cggagctgttttgaatcat

SEQ ID NO: 357135 - DNA, 19 bp, Homo sapiens
  siRNA target sequence for SRRM2 (NM_016333.2,2907-2925).
ctctcctcctagagtgaaa

SEQ ID NO: 357136 - DNA, 19 bp, Homo sapiens
  siRNA target sequence for SRRM2 (NM_016333.2,2974-2992).
cccaaagtgaaggcaataa

SEQ ID NO: 357137 - DNA, 19 bp, Homo sapiens
  siRNA target sequence for SRRM2 (NM_016333.2,2975-2993).
ccaaagtgaaggcaataat

SEQ ID NO: 357138 - DNA, 19 bp, Homo sapiens
  siRNA target sequence for SRRM2 (NM_016333.2,3045-3063).
ggtgacgtcgagaacaact

SEQ ID NO: 357139 - DNA, 19 bp, Homo sapiens
  siRNA target sequence for SRRM2 (NM_016333.2,3067-3085).
cggcgaagcagatcagtat

SEQ ID NO: 357140 - DNA, 19 bp, Homo sapiens
  siRNA target sequence for SRRM2 (NM_016333.2,3107-3125).
ccagattgttgccaagata

SEQ ID NO: 357141 - DNA, 19 bp, Homo sapiens
  siRNA target sequence for SRRM2 (NM_016333.2,3272-3290).
gtccccaagagaagtctaa

SEQ ID NO: 357142 - DNA, 19 bp, Homo sapiens
  siRNA target sequence for SRRM2 (NM_016333.2,3285-3303).
gtctaaagactcactagtt

SEQ ID NO: 357143 - DNA, 19 bp, Homo sapiens
  siRNA target sequence for SRRM2 (NM_016333.2,3287-3305).
ctaaagactcactagttca

SEQ ID NO: 357144 - DNA, 19 bp, Homo sapiens
  siRNA target sequence for SRRM2 (NM_016333.2,3292-3310).
gactcactagttcaaagtt

SEQ ID NO: 357145 - DNA, 19 bp, Homo sapiens
  siRNA target sequence for SRRM2 (NM_016333.2,3328-3346).
ctctgtgcaggagtaaaat

SEQ ID NO: 357146 - DNA, 19 bp, Homo sapiens
  siRNA target sequence for SRRM2 (NM_016333.2,3390-3408).
gcaactgaaaggacaatct

SEQ ID NO: 357147 - DNA, 19 bp, Homo sapiens
  siRNA target sequence for SRRM2 (NM_016333.2,3453-3471).
gagacagagtcattcagaa

SEQ ID NO: 357148 - DNA, 19 bp, Homo sapiens
  siRNA target sequence for SRRM2 (NM_016333.2,3475-3493).
ccatctctgcagagcaaat

SEQ ID NO: 357149 - DNA, 19 bp, Homo sapiens
  siRNA target sequence for SRRM2 (NM_016333.2,3479-3497).
ctctgcagagcaaatctca

SEQ ID NO: 357150 - DNA, 19 bp, Homo sapiens
  siRNA target sequence for SRRM2 (NM_016333.2,3514-3532).
ggtcggtccaggtcttcat

SEQ ID NO: 357151 - DNA, 19 bp, Homo sapiens
  siRNA target sequence for SRRM2 (NM_016333.2,3590-3608).
cagcgagtcctatgttgaa

SEQ ID NO: 357152 - DNA, 19 bp, Homo sapiens
  siRNA target sequence for SRRM2 (NM_016333.2,3682-3700).
ctcttggggcagagtagat

SEQ ID NO: 357153 - DNA, 19 bp, Homo sapiens
  siRNA target sequence for SRRM2 (NM_016333.2,3764-3782).
ctcctagacagaaagacaa

SEQ ID NO: 357154 - DNA, 19 bp, Homo sapiens
  siRNA target sequence for SRRM2 (NM_016333.2,3814-3832).
gagtcttcactggtattca

SEQ ID NO: 357155 - DNA, 19 bp, Homo sapiens
  siRNA target sequence for SRRM2 (NM_016333.2,3914-3932).
ctacgtcaagccaagatga

SEQ ID NO: 357156 - DNA, 19 bp, Homo sapiens
  siRNA target sequence for SRRM2 (NM_016333.2,4009-4027).
gaaatgtccacaagtaact

SEQ ID NO: 357157 - DNA, 19 bp, Homo sapiens
  siRNA target sequence for SRRM2 (NM_016333.2,4017-4035).
cacaagtaactttgaatca

SEQ ID NO: 357158 - DNA, 19 bp, Homo sapiens
  siRNA target sequence for SRRM2 (NM_016333.2,4056-4074).
gcctgctgtgtctttgact

SEQ ID NO: 357159 - DNA, 19 bp, Homo sapiens
  siRNA target sequence for SRRM2 (NM_016333.2,4202-4220).
gctttggatcacctttaga

SEQ ID NO: 357160 - DNA, 19 bp, Homo sapiens
  siRNA target sequence for SRRM2 (NM_016333.2,4234-4252).
ggcccacttggtacagaaa

SEQ ID NO: 357161 - DNA, 19 bp, Homo sapiens
  siRNA target sequence for SRRM2 (NM_016333.2,4235-4253).
gcccacttggtacagaaat

SEQ ID NO: 357162 - DNA, 19 bp, Homo sapiens
  siRNA target sequence for SRRM2 (NM_016333.2,4314-4332).
ggaaacagatccatctcta

SEQ ID NO: 357163 - DNA, 19 bp, Homo sapiens
  siRNA target sequence for SRRM2 (NM_016333.2,4467-4485).
ctcgagagaaagaagtagt

SEQ ID NO: 357164 - DNA, 19 bp, Homo sapiens
  siRNA target sequence for SRRM2 (NM_016333.2,4551-4569).
gtcttctccaggacttaga

SEQ ID NO: 357165 - DNA, 19 bp, Homo sapiens
  siRNA target sequence for SRRM2 (NM_016333.2,4618-4636).
ggaatgaaagatataccta

SEQ ID NO: 357166 - DNA, 19 bp, Homo sapiens
  siRNA target sequence for SRRM2 (NM_016333.2,4651-4669).
gggagaagcgaatgtgatt

SEQ ID NO: 357167 - DNA, 19 bp, Homo sapiens
  siRNA target sequence for SRRM2 (NM_016333.2,4653-4671).
gagaagcgaatgtgattct

SEQ ID NO: 357168 - DNA, 19 bp, Homo sapiens
  siRNA target sequence for SRRM2 (NM_016333.2,4768-4786).
gaaagaagcgggtcagaat

SEQ ID NO: 357169 - DNA, 19 bp, Homo sapiens
  siRNA target sequence for SRRM2 (NM_016333.2,4776-4794).
cgggtcagaatcatcagtt

SEQ ID NO: 357170 - DNA, 19 bp, Homo sapiens
  siRNA target sequence for SRRM2 (NM_016333.2,4779-4797).
gtcagaatcatcagttgat

SEQ ID NO: 357171 - DNA, 19 bp, Homo sapiens
  siRNA target sequence for SRRM2 (NM_016333.2,4842-4860).
gggatcctctcaagaactt

SEQ ID NO: 357172 - DNA, 19 bp, Homo sapiens
  siRNA target sequence for SRRM2 (NM_016333.2,4844-4862).
gatcctctcaagaacttga

SEQ ID NO: 357173 - DNA, 19 bp, Homo sapiens
  siRNA target sequence for SRRM2 (NM_016333.2,4850-4868).
ctcaagaacttgatgtgaa

SEQ ID NO: 357174 - DNA, 19 bp, Homo sapiens
  siRNA target sequence for SRRM2 (NM_016333.2,4953-4971).
gagtcggtctggatcatct

SEQ ID NO: 357175 - DNA, 19 bp, Homo sapiens
  siRNA target sequence for SRRM2 (NM_016333.2,5025-5043).
ctcccctgaagtgaaagat

SEQ ID NO: 357176 - DNA, 19 bp, Homo sapiens
  siRNA target sequence for SRRM2 (NM_016333.2,5027-5045).
cccctgaagtgaaagataa

SEQ ID NO: 357177 - DNA, 19 bp, Homo sapiens
  siRNA target sequence for SRRM2 (NM_016333.2,5065-5083).
gcacagagtggttctgatt

SEQ ID NO: 357178 - DNA, 19 bp, Homo sapiens
  siRNA target sequence for SRRM2 (NM_016333.2,5190-5208).
cgagtcctctcctgaacat

SEQ ID NO: 357179 - DNA, 19 bp, Homo sapiens
  siRNA target sequence for SRRM2 (NM_016333.2,5203-5221).
gaacatccgcccaaatcca

SEQ ID NO: 357180 - DNA, 19 bp, Homo sapiens
  siRNA target sequence for SRRM2 (NM_016333.2,5365-5383).
ccagaaactcgctctagaa

SEQ ID NO: 357181 - DNA, 19 bp, Homo sapiens
  siRNA target sequence for SRRM2 (NM_016333.2,5421-5439).
cccggagccagccgaaaaa

SEQ ID NO: 357182 - DNA, 19 bp, Homo sapiens
  siRNA target sequence for SRRM2 (NM_016333.2,5422-5440).
ccggagccagccgaaaaat

SEQ ID NO: 357183 - DNA, 19 bp, Homo sapiens
  siRNA target sequence for SRRM2 (NM_016333.2,5425-5443).
gagccagccgaaaaatcga

SEQ ID NO: 357184 - DNA, 19 bp, Homo sapiens
  siRNA target sequence for SRRM2 (NM_016333.2,5803-5821).
ccgtggaaacgctctagat

SEQ ID NO: 357185 - DNA, 19 bp, Homo sapiens
  siRNA target sequence for SRRM2 (NM_016333.2,6022-6040).
cgtcgttcaaggtctagaa

SEQ ID NO: 357186 - DNA, 19 bp, Homo sapiens
  siRNA target sequence for SRRM2 (NM_016333.2,6033-6051).
gtctagaacgccaacaaca

SEQ ID NO: 357187 - DNA, 19 bp, Homo sapiens
  siRNA target sequence for SRRM2 (NM_016333.2,6130-6148).
cgatctcgaagcagaactt

SEQ ID NO: 357188 - DNA, 19 bp, Homo sapiens
  siRNA target sequence for SRRM2 (NM_016333.2,6151-6169).
cctatcactcgcagaagat

SEQ ID NO: 357189 - DNA, 19 bp, Homo sapiens
  siRNA target sequence for SRRM2 (NM_016333.2,6156-6174).
cactcgcagaagatcaaga

SEQ ID NO: 357190 - DNA, 19 bp, Homo sapiens
  siRNA target sequence for SRRM2 (NM_016333.2,6285-6303).
ccggacacctccagctatt

SEQ ID NO: 357191 - DNA, 19 bp, Homo sapiens
  siRNA target sequence for SRRM2 (NM_016333.2,6331-6349).
ctgttaccacgcaaacgtt

SEQ ID NO: 357192 - DNA, 19 bp, Homo sapiens
  siRNA target sequence for SRRM2 (NM_016333.2,6356-6374).
gtcgctcaccacttgctat

SEQ ID NO: 357193 - DNA, 19 bp, Homo sapiens
  siRNA target sequence for SRRM2 (NM_016333.2,6412-6430).
cggggtaaacggtccttaa

SEQ ID NO: 357194 - DNA, 19 bp, Homo sapiens
  siRNA target sequence for SRRM2 (NM_016333.2,6414-6432).
gggtaaacggtccttaaca

SEQ ID NO: 357195 - DNA, 19 bp, Homo sapiens
  siRNA target sequence for SRRM2 (NM_016333.2,6615-6633).
cagatcacctggaatgctt

SEQ ID NO: 357196 - DNA, 19 bp, Homo sapiens
  siRNA target sequence for SRRM2 (NM_016333.2,6637-6655).
ccccttggcagctctagaa

SEQ ID NO: 357197 - DNA, 19 bp, Homo sapiens
  siRNA target sequence for SRRM2 (NM_016333.2,6639-6657).
ccttggcagctctagaaca

SEQ ID NO: 357198 - DNA, 19 bp, Homo sapiens
  siRNA target sequence for SRRM2 (NM_016333.2,6832-6850).
ggccttgctgcaagaatgt

SEQ ID NO: 357199 - DNA, 19 bp, Homo sapiens
  siRNA target sequence for SRRM2 (NM_016333.2,7016-7034).
cagcagcggccatgaactt

SEQ ID NO: 357200 - DNA, 19 bp, Homo sapiens
  siRNA target sequence for SRRM2 (NM_016333.2,7335-7353).
gatggctccagcattgtct

SEQ ID NO: 357201 - DNA, 19 bp, Homo sapiens
  siRNA target sequence for SRRM2 (NM_016333.2,7592-7610).
cagaccaatcccgttgttt

SEQ ID NO: 357202 - DNA, 19 bp, Homo sapiens
  siRNA target sequence for SRRM2 (NM_016333.2,7594-7612).
gaccaatcccgttgtttga

SEQ ID NO: 357203 - DNA, 19 bp, Homo sapiens
  siRNA target sequence for SRRM2 (NM_016333.2,7596-7614).
ccaatcccgttgtttgatt

SEQ ID NO: 357204 - DNA, 19 bp, Homo sapiens
  siRNA target sequence for SRRM2 (NM_016333.2,7890-7908).
ctctggctccagttctagt

SEQ ID NO: 357205 - DNA, 19 bp, Homo sapiens
  siRNA target sequence for LOC51198 (NM_016349.1,127-145).
gccgcgtgcctgcaacaat

SEQ ID NO: 357206 - DNA, 19 bp, Homo sapiens
  siRNA target sequence for LOC51198 (NM_016349.1,178-196).
cggtttggcagcagtcatt

SEQ ID NO: 357207 - DNA, 19 bp, Homo sapiens
  siRNA target sequence for LOC51204 (NM_016360.2,339-357).
ggcaggacgctgcacttta

SEQ ID NO: 357208 - DNA, 19 bp, Homo sapiens
  siRNA target sequence for LOC51204 (NM_016360.2,391-409).
ccaaagtcaggcacatcaa

SEQ ID NO: 357209 - DNA, 19 bp, Homo sapiens
  siRNA target sequence for LOC51204 (NM_016360.2,435-453).
cgcatcttctccaaactct

SEQ ID NO: 357210 - DNA, 19 bp, Homo sapiens
  siRNA target sequence for LOC51204 (NM_016360.2,445-463).
ccaaactctgtttgaacat

SEQ ID NO: 357211 - DNA, 19 bp, Homo sapiens
  siRNA target sequence for LOC51204 (NM_016360.2,464-482).
ccgcctggcagtgaaagaa

SEQ ID NO: 357212 - DNA, 19 bp, Homo sapiens
  siRNA target sequence for LOC51204 (NM_016360.2,508-526).
gcaacctggccaatatctt

SEQ ID NO: 357213 - DNA, 19 bp, Homo sapiens
  siRNA target sequence for LOC51204 (NM_016360.2,530-548).
ggtgtgtcgcagcaaacat

SEQ ID NO: 357214 - DNA, 19 bp, Homo sapiens
  siRNA target sequence for LOC51204 (NM_016360.2,531-549).
gtgtgtcgcagcaaacata

SEQ ID NO: 357215 - DNA, 19 bp, Homo sapiens
  siRNA target sequence for LOC51204 (NM_016360.2,552-570).
cccaagtcaacgattgaga

SEQ ID NO: 357216 - DNA, 19 bp, Homo sapiens
  siRNA target sequence for LOC51204 (NM_016360.2,642-660).
ctgctcatcgaggcattat

SEQ ID NO: 357217 - DNA, 19 bp, Homo sapiens
  siRNA target sequence for LOC51204 (NM_016360.2,644-662).
gctcatcgaggcattatct

SEQ ID NO: 357218 - DNA, 19 bp, Homo sapiens
  siRNA target sequence for LOC51204 (NM_016360.2,650-668).
cgaggcattatctaacagt

SEQ ID NO: 357219 - DNA, 19 bp, Homo sapiens
  siRNA target sequence for LOC51204 (NM_016360.2,651-669).
gaggcattatctaacagta

SEQ ID NO: 357220 - DNA, 19 bp, Homo sapiens
  siRNA target sequence for LOC51204 (NM_016360.2,677-695).
gtgccaagcagacattaga

SEQ ID NO: 357221 - DNA, 19 bp, Homo sapiens
  siRNA target sequence for LOC51204 (NM_016360.2,681-699).
caagcagacattagacata

SEQ ID NO: 357222 - DNA, 19 bp, Homo sapiens
  siRNA target sequence for LOC51204 (NM_016360.2,685-703).
cagacattagacatatcct

SEQ ID NO: 357223 - DNA, 19 bp, Homo sapiens
  siRNA target sequence for LOC51204 (NM_016360.2,733-751).
gagctcgtcactcttttga

SEQ ID NO: 357224 - DNA, 19 bp, Homo sapiens
  siRNA target sequence for LOC51204 (NM_016360.2,735-753).
gctcgtcactcttttgaca

SEQ ID NO: 357225 - DNA, 19 bp, Homo sapiens
  siRNA target sequence for LOC51204 (NM_016360.2,736-754).
ctcgtcactcttttgacaa

SEQ ID NO: 357226 - DNA, 19 bp, Homo sapiens
  siRNA target sequence for LOC51204 (NM_016360.2,738-756).
cgtcactcttttgacaaaa

SEQ ID NO: 357227 - DNA, 19 bp, Homo sapiens
  siRNA target sequence for LOC51204 (NM_016360.2,739-757).
gtcactcttttgacaaaaa

SEQ ID NO: 357228 - DNA, 19 bp, Homo sapiens
  siRNA target sequence for LOC51204 (NM_016360.2,964-982).
cctgtgcactagagttcat

SEQ ID NO: 357229 - DNA, 19 bp, Homo sapiens
  siRNA target sequence for LOC51204 (NM_016360.2,975-993).
gagttcatccccaactcaa

SEQ ID NO: 357230 - DNA, 19 bp, Homo sapiens
  siRNA target sequence for LOC51204 (NM_016360.2,1052-1070).
caaccacgaggatgtgatt

SEQ ID NO: 357231 - DNA, 19 bp, Homo sapiens
  siRNA target sequence for LOC51204 (NM_016360.2,1065-1083).
gtgattcacgtctatgata

SEQ ID NO: 357232 - DNA, 19 bp, Homo sapiens
  siRNA target sequence for LOC51212 (NM_016380.1,164-182).
caggatgagggcaggaatt

SEQ ID NO: 357233 - DNA, 19 bp, Homo sapiens
  siRNA target sequence for LOC51212 (NM_016380.1,166-184).
ggatgagggcaggaattca

SEQ ID NO: 357234 - DNA, 19 bp, Homo sapiens
  siRNA target sequence for LOC51212 (NM_016380.1,270-288).
gtacaggggagcagatatt

SEQ ID NO: 357235 - DNA, 19 bp, Homo sapiens
  siRNA target sequence for LOC51212 (NM_016380.1,273-291).
caggggagcagatattcta

SEQ ID NO: 357236 - DNA, 19 bp, Homo sapiens
  siRNA target sequence for LOC51212 (NM_016380.1,276-294).
gggagcagatattctagaa

SEQ ID NO: 357237 - DNA, 19 bp, Homo sapiens
  siRNA target sequence for LOC51212 (NM_016380.1,292-310).
gaatgaggatccttctctt

SEQ ID NO: 357238 - DNA, 19 bp, Homo sapiens
  siRNA target sequence for LOC51212 (NM_016380.1,321-339).
gctttcagtctaaaaacat

SEQ ID NO: 357239 - DNA, 19 bp, Homo sapiens
  siRNA target sequence for LOC51212 (NM_016380.1,361-379).
gcagcctcctaagaaaaat

SEQ ID NO: 357240 - DNA, 19 bp, Homo sapiens
  siRNA target sequence for LOC51212 (NM_016380.1,365-383).
cctcctaagaaaaatgagt

SEQ ID NO: 357241 - DNA, 19 bp, Homo sapiens
  siRNA target sequence for LOC51212 (NM_016380.1,578-596).
gattgccccagttctgatt

SEQ ID NO: 357242 - DNA, 19 bp, Homo sapiens
  siRNA target sequence for LOC51212 (NM_016380.1,608-626).
ggtgagaccactaggtatt

SEQ ID NO: 357243 - DNA, 19 bp, Homo sapiens
  siRNA target sequence for LOC51212 (NM_016380.1,609-627).
gtgagaccactaggtattt

SEQ ID NO: 357244 - DNA, 19 bp, Homo sapiens
  siRNA target sequence for LOC51212 (NM_016380.1,632-650).
gaacagagtagcatgctat

SEQ ID NO: 357245 - DNA, 19 bp, Homo sapiens
  siRNA target sequence for LOC51212 (NM_016380.1,637-655).
gagtagcatgctatttcct

SEQ ID NO: 357246 - DNA, 19 bp, Homo sapiens
  siRNA target sequence for LOC51212 (NM_016380.1,746-764).
gaaagcggaatgttttgta

SEQ ID NO: 357247 - DNA, 19 bp, Homo sapiens
  siRNA target sequence for LOC51212 (NM_016380.1,750-768).
gcggaatgttttgtacaaa

SEQ ID NO: 357248 - DNA, 19 bp, Homo sapiens
  siRNA target sequence for LOC51212 (NM_016380.1,751-769).
cggaatgttttgtacaaat

SEQ ID NO: 357249 - DNA, 19 bp, Homo sapiens
  siRNA target sequence for LOC51212 (NM_016380.1,779-797).
gtggctagacggacactat

SEQ ID NO: 357250 - DNA, 19 bp, Homo sapiens
  siRNA target sequence for LOC51212 (NM_016380.1,781-799).
ggctagacggacactattt

SEQ ID NO: 357251 - DNA, 19 bp, Homo sapiens
  siRNA target sequence for HOM-TES-85 (NM_016383.1,17-35).
gcttcgtttcggaagctaa

SEQ ID NO: 357252 - DNA, 19 bp, Homo sapiens
  siRNA target sequence for HOM-TES-85 (NM_016383.1,27-45).
ggaagctaacgctttctga

SEQ ID NO: 357253 - DNA, 19 bp, Homo sapiens
  siRNA target sequence for HOM-TES-85 (NM_016383.1,31-49).
gctaacgctttctgaaaaa

SEQ ID NO: 357254 - DNA, 19 bp, Homo sapiens
  siRNA target sequence for HOM-TES-85 (NM_016383.1,65-83).
cccagtcggaaaaaggtta

SEQ ID NO: 357255 - DNA, 19 bp, Homo sapiens
  siRNA target sequence for HOM-TES-85 (NM_016383.1,66-84).
ccagtcggaaaaaggttaa

SEQ ID NO: 357256 - DNA, 19 bp, Homo sapiens
  siRNA target sequence for HOM-TES-85 (NM_016383.1,97-115).
gtctctagacgacattata

SEQ ID NO: 357257 - DNA, 19 bp, Homo sapiens
  siRNA target sequence for HOM-TES-85 (NM_016383.1,99-117).
ctctagacgacattataat

SEQ ID NO: 357258 - DNA, 19 bp, Homo sapiens
  siRNA target sequence for HOM-TES-85 (NM_016383.1,101-119).
ctagacgacattataatct

SEQ ID NO: 357259 - DNA, 19 bp, Homo sapiens
  siRNA target sequence for HOM-TES-85 (NM_016383.1,104-122).
gacgacattataatctata

SEQ ID NO: 357260 - DNA, 19 bp, Homo sapiens
  siRNA target sequence for HOM-TES-85 (NM_016383.1,106-124).
cgacattataatctataaa

SEQ ID NO: 357261 - DNA, 19 bp, Homo sapiens
  siRNA target sequence for HOM-TES-85 (NM_016383.1,165-183).
gacagaaccatagtaaaaa

SEQ ID NO: 357262 - DNA, 19 bp, Homo sapiens
  siRNA target sequence for HOM-TES-85 (NM_016383.1,169-187).
gaaccatagtaaaaaggaa

SEQ ID NO: 357263 - DNA, 19 bp, Homo sapiens
  siRNA target sequence for HOM-TES-85 (NM_016383.1,191-209).
ccttcaagacagcaatcaa

SEQ ID NO: 357264 - DNA, 19 bp, Homo sapiens
  siRNA target sequence for HOM-TES-85 (NM_016383.1,202-220).
gcaatcaaaagctcataga

SEQ ID NO: 357265 - DNA, 19 bp, Homo sapiens
  siRNA target sequence for HOM-TES-85 (NM_016383.1,227-245).
catcggagaggctactcaa

SEQ ID NO: 357266 - DNA, 19 bp, Homo sapiens
  siRNA target sequence for HOM-TES-85 (NM_016383.1,230-248).
cggagaggctactcaagat

SEQ ID NO: 357267 - DNA, 19 bp, Homo sapiens
  siRNA target sequence for HOM-TES-85 (NM_016383.1,410-428).
gaggggaaccagcatcaat

SEQ ID NO: 357268 - DNA, 19 bp, Homo sapiens
  siRNA target sequence for HOM-TES-85 (NM_016383.1,440-458).
ccggacaaatcagaagaat

SEQ ID NO: 357269 - DNA, 19 bp, Homo sapiens
  siRNA target sequence for HOM-TES-85 (NM_016383.1,506-524).
cacttagagagatctcttt

SEQ ID NO: 357270 - DNA, 19 bp, Homo sapiens
  siRNA target sequence for HOM-TES-85 (NM_016383.1,537-555).
gatctcaagggcagctaaa

SEQ ID NO: 357271 - DNA, 19 bp, Homo sapiens
  siRNA target sequence for HOM-TES-85 (NM_016383.1,556-574).
gagacatcatccccaatat

SEQ ID NO: 357272 - DNA, 19 bp, Homo sapiens
  siRNA target sequence for HOM-TES-85 (NM_016383.1,861-879).
ctgagagagatctcataaa

SEQ ID NO: 357273 - DNA, 19 bp, Homo sapiens
  siRNA target sequence for HOM-TES-85 (NM_016383.1,908-926).
gaaagacatcagagatact

SEQ ID NO: 357274 - DNA, 19 bp, Homo sapiens
  siRNA target sequence for HSPC109 (NM_016390.2,64-82).
gtgaacacggccaaaggat

SEQ ID NO: 357275 - DNA, 19 bp, Homo sapiens
  siRNA target sequence for HSPC109 (NM_016390.2,308-326).
ctacttggccggtcagatt

SEQ ID NO: 357276 - DNA, 19 bp, Homo sapiens
  siRNA target sequence for HSPC109 (NM_016390.2,630-648).
ggccacggctcctttgtca

SEQ ID NO: 357277 - DNA, 19 bp, Homo sapiens
  siRNA target sequence for HSPC109 (NM_016390.2,753-771).
catggcaaagtggtatcat

SEQ ID NO: 357278 - DNA, 19 bp, Homo sapiens
  siRNA target sequence for HSPC109 (NM_016390.2,1035-1053).
gacctgtacgtcaatacct

SEQ ID NO: 357279 - DNA, 19 bp, Homo sapiens
  siRNA target sequence for HSPC129 (NM_016396.1,306-324).
ccggcttgttgtcttcaat

SEQ ID NO: 357280 - DNA, 19 bp, Homo sapiens
  siRNA target sequence for HSPC129 (NM_016396.1,307-325).
cggcttgttgtcttcaatt

SEQ ID NO: 357281 - DNA, 19 bp, Homo sapiens
  siRNA target sequence for HSPC129 (NM_016396.1,308-326).
ggcttgttgtcttcaatta

SEQ ID NO: 357282 - DNA, 19 bp, Homo sapiens
  siRNA target sequence for HSPC129 (NM_016396.1,372-390).
cttcaaaacggagtagaat

SEQ ID NO: 357283 - DNA, 19 bp, Homo sapiens
  siRNA target sequence for HSPC129 (NM_016396.1,384-402).
gtagaattgaacgtgatat

SEQ ID NO: 357284 - DNA, 19 bp, Homo sapiens
  siRNA target sequence for HSPC129 (NM_016396.1,392-410).
gaacgtgatatagataaca

SEQ ID NO: 357285 - DNA, 19 bp, Homo sapiens
  siRNA target sequence for HSPC129 (NM_016396.1,395-413).
cgtgatatagataacaatt

SEQ ID NO: 357286 - DNA, 19 bp, Homo sapiens
  siRNA target sequence for HSPC129 (NM_016396.1,396-414).
gtgatatagataacaattt

SEQ ID NO: 357287 - DNA, 19 bp, Homo sapiens
  siRNA target sequence for HSPC129 (NM_016396.1,398-416).
gatatagataacaatttga

SEQ ID NO: 357288 - DNA, 19 bp, Homo sapiens
  siRNA target sequence for HSPC129 (NM_016396.1,500-518).
ggtagttatgaaatgacaa

SEQ ID NO: 357289 - DNA, 19 bp, Homo sapiens
  siRNA target sequence for HSPC129 (NM_016396.1,589-607).
gttggggaccatattttca

SEQ ID NO: 357290 - DNA, 19 bp, Homo sapiens
  siRNA target sequence for HSPC129 (NM_016396.1,644-662).
ggaacgtcaggatcagatt

SEQ ID NO: 357291 - DNA, 19 bp, Homo sapiens
  siRNA target sequence for HSPC129 (NM_016396.1,725-743).
gagatcactaccagtacta

SEQ ID NO: 357292 - DNA, 19 bp, Homo sapiens
  siRNA target sequence for HSPC129 (NM_016396.1,727-745).
gatcactaccagtactact

SEQ ID NO: 357293 - DNA, 19 bp, Homo sapiens
  siRNA target sequence for HSPC129 (NM_016396.1,730-748).
cactaccagtactactaca

SEQ ID NO: 357294 - DNA, 19 bp, Homo sapiens
  siRNA target sequence for HSPC129 (NM_016396.1,738-756).
gtactactacatcaactaa

SEQ ID NO: 357295 - DNA, 19 bp, Homo sapiens
  siRNA target sequence for HSPC129 (NM_016396.1,759-777).
gagcagcttactcaaatca

SEQ ID NO: 357296 - DNA, 19 bp, Homo sapiens
  siRNA target sequence for HSPC129 (NM_016396.1,785-803).
caagtgagaccatcactaa

SEQ ID NO: 357297 - DNA, 19 bp, Homo sapiens
  siRNA target sequence for HSPC129 (NM_016396.1,788-806).
gtgagaccatcactaaaca

SEQ ID NO: 357298 - DNA, 19 bp, Homo sapiens
  siRNA target sequence for HSPC129 (NM_016396.1,853-871).
ccttacagcaccagtaact

SEQ ID NO: 357299 - DNA, 19 bp, Homo sapiens
  siRNA target sequence for HSPC129 (NM_016396.1,872-890).
ccagatagtggttattcat

SEQ ID NO: 357300 - DNA, 19 bp, Homo sapiens
  siRNA target sequence for HSPC129 (NM_016396.1,898-916).
cgcggaggccacctatgaa

SEQ ID NO: 357301 - DNA, 19 bp, Homo sapiens
  siRNA target sequence for HSPC129 (NM_016396.1,900-918).
cggaggccacctatgaaga

SEQ ID NO: 357302 - DNA, 19 bp, Homo sapiens
  siRNA target sequence for HSPC129 (NM_016396.1,901-919).
ggaggccacctatgaagaa

SEQ ID NO: 357303 - DNA, 19 bp, Homo sapiens
  siRNA target sequence for HSPC129 (NM_016396.1,929-947).
gtatttgacccctattatt

SEQ ID NO: 357304 - DNA, 19 bp, Homo sapiens
  siRNA target sequence for HSPC129 (NM_016396.1,935-953).
gacccctattatttcatca

SEQ ID NO: 357305 - DNA, 19 bp, Homo sapiens
  siRNA target sequence for HSPC129 (NM_016396.1,937-955).
cccctattatttcatcaaa

SEQ ID NO: 357306 - DNA, 19 bp, Homo sapiens
  siRNA target sequence for HSPC129 (NM_016396.1,961-979).
cccgccactgacagaagaa

SEQ ID NO: 357307 - DNA, 19 bp, Homo sapiens
  siRNA target sequence for HSPC129 (NM_016396.1,963-981).
cgccactgacagaagaaca

SEQ ID NO: 357308 - DNA, 19 bp, Homo sapiens
  siRNA target sequence for HSPC129 (NM_016396.1,966-984).
cactgacagaagaacaact

SEQ ID NO: 357309 - DNA, 19 bp, Homo sapiens
  siRNA target sequence for HSPC129 (NM_016396.1,998-1016).
gctcttccgttgaaaacaa

SEQ ID NO: 357310 - DNA, 19 bp, Homo sapiens
  siRNA target sequence for HSPC129 (NM_016396.1,1025-1043).
ccggaattctccctagttt

SEQ ID NO: 357311 - DNA, 19 bp, Homo sapiens
  siRNA target sequence for HSPC129 (NM_016396.1,1055-1073).
gaaacactagtgcattgta

SEQ ID NO: 357312 - DNA, 19 bp, Homo sapiens
  siRNA target sequence for HSPC129 (NM_016396.1,1061-1079).
ctagtgcattgtagtctaa

SEQ ID NO: 357313 - DNA, 19 bp, Homo sapiens
  siRNA target sequence for HSPC129 (NM_016396.1,1136-1154).
caggtttatgtgagattaa

SEQ ID NO: 357314 - DNA, 19 bp, Homo sapiens
  siRNA target sequence for HSPC129 (NM_016396.1,1236-1254).
cagacaagttactgaacat

SEQ ID NO: 357315 - DNA, 19 bp, Homo sapiens
  siRNA target sequence for HSPC129 (NM_016396.1,1240-1258).
caagttactgaacatacta

SEQ ID NO: 357316 - DNA, 19 bp, Homo sapiens
  siRNA target sequence for HSPC129 (NM_016396.1,1285-1303).
ccggcttttccgtgaacat

SEQ ID NO: 357317 - DNA, 19 bp, Homo sapiens
  siRNA target sequence for HSPC129 (NM_016396.1,1286-1304).
cggcttttccgtgaacatt

SEQ ID NO: 357318 - DNA, 19 bp, Homo sapiens
  siRNA target sequence for HSPC129 (NM_016396.1,1288-1306).
gcttttccgtgaacattgt

SEQ ID NO: 357319 - DNA, 19 bp, Homo sapiens
  siRNA target sequence for HSPC129 (NM_016396.1,1311-1329).
gtgtacaaggaaactatat

SEQ ID NO: 357320 - DNA, 19 bp, Homo sapiens
  siRNA target sequence for HSPC129 (NM_016396.1,1313-1331).
gtacaaggaaactatataa

SEQ ID NO: 357321 - DNA, 19 bp, Homo sapiens
  siRNA target sequence for HSPC129 (NM_016396.1,1413-1431).
ctaatggaatccctataga

SEQ ID NO: 357322 - DNA, 19 bp, Homo sapiens
  siRNA target sequence for HSPC129 (NM_016396.1,1418-1436).
ggaatccctatagaaagtt

SEQ ID NO: 357323 - DNA, 19 bp, Homo sapiens
  siRNA target sequence for HSPC129 (NM_016396.1,1425-1443).
ctatagaaagttggtttat

SEQ ID NO: 357324 - DNA, 19 bp, Homo sapiens
  siRNA target sequence for HSPC129 (NM_016396.1,1430-1448).
gaaagttggtttatggata

SEQ ID NO: 357325 - DNA, 19 bp, Homo sapiens
  siRNA target sequence for HSPC129 (NM_016396.1,1536-1554).
gatttcgcttgcatgattt

SEQ ID NO: 357326 - DNA, 19 bp, Homo sapiens
  siRNA target sequence for TH1L (NM_016397.2,159-177).
gcaagaatgcctgcataaa

SEQ ID NO: 357327 - DNA, 19 bp, Homo sapiens
  siRNA target sequence for TH1L (NM_016397.2,160-178).
caagaatgcctgcataaat

SEQ ID NO: 357328 - DNA, 19 bp, Homo sapiens
  siRNA target sequence for TH1L (NM_016397.2,182-200).
ccacccgggattatatcat

SEQ ID NO: 357329 - DNA, 19 bp, Homo sapiens
  siRNA target sequence for TH1L (NM_016397.2,219-237).
cactctgaagaggtatttt

SEQ ID NO: 357330 - DNA, 19 bp, Homo sapiens
  siRNA target sequence for TH1L (NM_016397.2,245-263).
gagggtctccagagaatgt

SEQ ID NO: 357331 - DNA, 19 bp, Homo sapiens
  siRNA target sequence for TH1L (NM_016397.2,387-405).
gagtttgctgatcaaacat

SEQ ID NO: 357332 - DNA, 19 bp, Homo sapiens
  siRNA target sequence for TH1L (NM_016397.2,389-407).
gtttgctgatcaaacattt

SEQ ID NO: 357333 - DNA, 19 bp, Homo sapiens
  siRNA target sequence for TH1L (NM_016397.2,414-432).
ccgcaaagcagattctatt

SEQ ID NO: 357334 - DNA, 19 bp, Homo sapiens
  siRNA target sequence for TH1L (NM_016397.2,415-433).
cgcaaagcagattctattt

SEQ ID NO: 357335 - DNA, 19 bp, Homo sapiens
  siRNA target sequence for TH1L (NM_016397.2,486-504).
cacgtggcgggaccttttt

SEQ ID NO: 357336 - DNA, 19 bp, Homo sapiens
  siRNA target sequence for TH1L (NM_016397.2,488-506).
cgtggcgggacctttttta

SEQ ID NO: 357337 - DNA, 19 bp, Homo sapiens
  siRNA target sequence for TH1L (NM_016397.2,489-507).
gtggcgggaccttttttat

SEQ ID NO: 357338 - DNA, 19 bp, Homo sapiens
  siRNA target sequence for TH1L (NM_016397.2,491-509).
ggcgggaccttttttataa

SEQ ID NO: 357339 - DNA, 19 bp, Homo sapiens
  siRNA target sequence for TH1L (NM_016397.2,492-510).
gcgggaccttttttataaa

SEQ ID NO: 357340 - DNA, 19 bp, Homo sapiens
  siRNA target sequence for TH1L (NM_016397.2,546-564).
cttcaccgttaagcttatt

SEQ ID NO: 357341 - DNA, 19 bp, Homo sapiens
  siRNA target sequence for TH1L (NM_016397.2,549-567).
caccgttaagcttatttct

SEQ ID NO: 357342 - DNA, 19 bp, Homo sapiens
  siRNA target sequence for TH1L (NM_016397.2,551-569).
ccgttaagcttatttctga

SEQ ID NO: 357343 - DNA, 19 bp, Homo sapiens
  siRNA target sequence for TH1L (NM_016397.2,608-626).
catgccagcagctagaagt

SEQ ID NO: 357344 - DNA, 19 bp, Homo sapiens
  siRNA target sequence for TH1L (NM_016397.2,645-663).
gacctctctagctacaatt

SEQ ID NO: 357345 - DNA, 19 bp, Homo sapiens
  siRNA target sequence for TH1L (NM_016397.2,650-668).
ctctagctacaattttaga

SEQ ID NO: 357346 - DNA, 19 bp, Homo sapiens
  siRNA target sequence for TH1L (NM_016397.2,990-1008).
ccctcctccggttgaactt

SEQ ID NO: 357347 - DNA, 19 bp, Homo sapiens
  siRNA target sequence for TH1L (NM_016397.2,1041-1059).
gcagtcactctttaaacca

SEQ ID NO: 357348 - DNA, 19 bp, Homo sapiens
  siRNA target sequence for TH1L (NM_016397.2,1078-1096).
gaccacaagcacaaataca

SEQ ID NO: 357349 - DNA, 19 bp, Homo sapiens
  siRNA target sequence for TH1L (NM_016397.2,1149-1167).
gcgagtgagcatcaataaa

SEQ ID NO: 357350 - DNA, 19 bp, Homo sapiens
  siRNA target sequence for TH1L (NM_016397.2,1176-1194).
gaagtcaacgtcaaaagct

SEQ ID NO: 357351 - DNA, 19 bp, Homo sapiens
  siRNA target sequence for TH1L (NM_016397.2,1193-1211).
ctgtcgaaaccgttcacaa

SEQ ID NO: 357352 - DNA, 19 bp, Homo sapiens
  siRNA target sequence for TH1L (NM_016397.2,1198-1216).
gaaaccgttcacaatttgt

SEQ ID NO: 357353 - DNA, 19 bp, Homo sapiens
  siRNA target sequence for TH1L (NM_016397.2,1230-1248).
caaaggggcctctgaacta

SEQ ID NO: 357354 - DNA, 19 bp, Homo sapiens
  siRNA target sequence for TH1L (NM_016397.2,1283-1301).
ggtttccagtggtagcaat

SEQ ID NO: 357355 - DNA, 19 bp, Homo sapiens
  siRNA target sequence for TH1L (NM_016397.2,1317-1335).
ggtggattggactgtatca

SEQ ID NO: 357356 - DNA, 19 bp, Homo sapiens
  siRNA target sequence for TH1L (NM_016397.2,1334-1352).
cagaaccaaggtactttca

SEQ ID NO: 357357 - DNA, 19 bp, Homo sapiens
  siRNA target sequence for TH1L (NM_016397.2,1437-1455).
gcagctgcttgttaagctt

SEQ ID NO: 357358 - DNA, 19 bp, Homo sapiens
  siRNA target sequence for TH1L (NM_016397.2,1440-1458).
gctgcttgttaagcttttt

SEQ ID NO: 357359 - DNA, 19 bp, Homo sapiens
  siRNA target sequence for TH1L (NM_016397.2,1533-1551).
cctgctgagtcgaggttat

SEQ ID NO: 357360 - DNA, 19 bp, Homo sapiens
  siRNA target sequence for TH1L (NM_016397.2,1536-1554).
gctgagtcgaggttatgta

SEQ ID NO: 357361 - DNA, 19 bp, Homo sapiens
  siRNA target sequence for TH1L (NM_016397.2,1539-1557).
gagtcgaggttatgtactt

SEQ ID NO: 357362 - DNA, 19 bp, Homo sapiens
  siRNA target sequence for TH1L (NM_016397.2,1566-1584).
cagttacatccgaaagtgt

SEQ ID NO: 357363 - DNA, 19 bp, Homo sapiens
  siRNA target sequence for TH1L (NM_016397.2,1593-1611).
gctggacactgacatttca

SEQ ID NO: 357364 - DNA, 19 bp, Homo sapiens
  siRNA target sequence for TH1L (NM_016397.2,1610-1628).
cactcattcgctattttgt

SEQ ID NO: 357365 - DNA, 19 bp, Homo sapiens
  siRNA target sequence for TH1L (NM_016397.2,1612-1630).
ctcattcgctattttgtca

SEQ ID NO: 357366 - DNA, 19 bp, Homo sapiens
  siRNA target sequence for TH1L (NM_016397.2,1644-1662).
cgtcattgctcctccttat

SEQ ID NO: 357367 - DNA, 19 bp, Homo sapiens
  siRNA target sequence for TH1L (NM_016397.2,1645-1663).
gtcattgctcctccttata

SEQ ID NO: 357368 - DNA, 19 bp, Homo sapiens
  siRNA target sequence for TH1L (NM_016397.2,1667-1685).
ctgacttcgtgcaactttt

SEQ ID NO: 357369 - DNA, 19 bp, Homo sapiens
  siRNA target sequence for TH1L (NM_016397.2,1710-1728).
catcgcaggtaccatcaaa

SEQ ID NO: 357370 - DNA, 19 bp, Homo sapiens
  siRNA target sequence for TH1L (NM_016397.2,1746-1764).
ccctgtgacggagtttata

SEQ ID NO: 357371 - DNA, 19 bp, Homo sapiens
  siRNA target sequence for HSPC132 (NM_016399.2,82-100).
gtacgaccagtgcttcaat

SEQ ID NO: 357372 - DNA, 19 bp, Homo sapiens
  siRNA target sequence for HSPC132 (NM_016399.2,101-119).
cgctggttcgccgagaaat

SEQ ID NO: 357373 - DNA, 19 bp, Homo sapiens
  siRNA target sequence for HSPC132 (NM_016399.2,102-120).
gctggttcgccgagaaatt

SEQ ID NO: 357374 - DNA, 19 bp, Homo sapiens
  siRNA target sequence for HSPC132 (NM_016399.2,103-121).
ctggttcgccgagaaattt

SEQ ID NO: 357375 - DNA, 19 bp, Homo sapiens
  siRNA target sequence for HSPC132 (NM_016399.2,105-123).
ggttcgccgagaaatttct

SEQ ID NO: 357376 - DNA, 19 bp, Homo sapiens
  siRNA target sequence for HSPC138 (NM_016401.2,251-269).
gcaagtggcagaggataaa

SEQ ID NO: 357377 - DNA, 19 bp, Homo sapiens
  siRNA target sequence for HSPC138 (NM_016401.2,279-297).
gacttacctgattatgaaa

SEQ ID NO: 357378 - DNA, 19 bp, Homo sapiens
  siRNA target sequence for HSPC138 (NM_016401.2,353-371).
gggaggatctgtctacttt

SEQ ID NO: 357379 - DNA, 19 bp, Homo sapiens
  siRNA target sequence for HSPC138 (NM_016401.2,354-372).
ggaggatctgtctactttt

SEQ ID NO: 357380 - DNA, 19 bp, Homo sapiens
  siRNA target sequence for HSPC138 (NM_016401.2,357-375).
ggatctgtctacttttctt

SEQ ID NO: 357381 - DNA, 19 bp, Homo sapiens
  siRNA target sequence for HSPC138 (NM_016401.2,358-376).
gatctgtctacttttctta

SEQ ID NO: 357382 - DNA, 19 bp, Homo sapiens
  siRNA target sequence for HSPC138 (NM_016401.2,490-508).
cttttggagccatgaatat

SEQ ID NO: 357383 - DNA, 19 bp, Homo sapiens
  siRNA target sequence for HSPC138 (NM_016401.2,525-543).
gttgctcagattggaattt

SEQ ID NO: 357384 - DNA, 19 bp, Homo sapiens
  siRNA target sequence for HSPC138 (NM_016401.2,572-590).
gcagactcctgtaggtaat

SEQ ID NO: 357385 - DNA, 19 bp, Homo sapiens
  siRNA target sequence for HSPC138 (NM_016401.2,575-593).
gactcctgtaggtaatgct

SEQ ID NO: 357386 - DNA, 19 bp, Homo sapiens
  siRNA target sequence for HSPC138 (NM_016401.2,602-620).
ctcagttgactcattcact

SEQ ID NO: 357387 - DNA, 19 bp, Homo sapiens
  siRNA target sequence for HSPC138 (NM_016401.2,638-656).
gttggacaatttctacaat

SEQ ID NO: 357388 - DNA, 19 bp, Homo sapiens
  siRNA target sequence for HSPC138 (NM_016401.2,641-659).
ggacaatttctacaatttt

SEQ ID NO: 357389 - DNA, 19 bp, Homo sapiens
  siRNA target sequence for HSPC138 (NM_016401.2,650-668).
ctacaattttgcttcatca

SEQ ID NO: 357390 - DNA, 19 bp, Homo sapiens
  siRNA target sequence for HSPC138 (NM_016401.2,722-740).
ggcaaatgtggttctgaaa

SEQ ID NO: 357391 - DNA, 19 bp, Homo sapiens
  siRNA target sequence for HSPC138 (NM_016401.2,723-741).
gcaaatgtggttctgaaat

SEQ ID NO: 357392 - DNA, 19 bp, Homo sapiens
  siRNA target sequence for HSPC138 (NM_016401.2,731-749).
ggttctgaaatggtatgaa

SEQ ID NO: 357393 - DNA, 19 bp, Homo sapiens
  siRNA target sequence for HSPC138 (NM_016401.2,771-789).
cagaaccctctcttttgga

SEQ ID NO: 357394 - DNA, 19 bp, Homo sapiens
  siRNA target sequence for C20orf43 (NM_016407.1,75-93).
gttgcgacgggggaacaat

SEQ ID NO: 357395 - DNA, 19 bp, Homo sapiens
  siRNA target sequence for C20orf43 (NM_016407.1,163-181).
ggcccaatggaactattgt

SEQ ID NO: 357396 - DNA, 19 bp, Homo sapiens
  siRNA target sequence for C20orf43 (NM_016407.1,164-182).
gcccaatggaactattgta

SEQ ID NO: 357397 - DNA, 19 bp, Homo sapiens
  siRNA target sequence for C20orf43 (NM_016407.1,180-198).
gtactctaagtcaggaaat

SEQ ID NO: 357398 - DNA, 19 bp, Homo sapiens
  siRNA target sequence for C20orf43 (NM_016407.1,227-245).
cttggcagactttataaca

SEQ ID NO: 357399 - DNA, 19 bp, Homo sapiens
  siRNA target sequence for C20orf43 (NM_016407.1,252-270).
ccgtcattgaatttctctt

SEQ ID NO: 357400 - DNA, 19 bp, Homo sapiens
  siRNA target sequence for C20orf43 (NM_016407.1,302-320).
gcagcatctcacattaaaa

SEQ ID NO: 357401 - DNA, 19 bp, Homo sapiens
  siRNA target sequence for C20orf43 (NM_016407.1,306-324).
catctcacattaaaagcat

SEQ ID NO: 357402 - DNA, 19 bp, Homo sapiens
  siRNA target sequence for C20orf43 (NM_016407.1,313-331).
cattaaaagcattaagaat

SEQ ID NO: 357403 - DNA, 19 bp, Homo sapiens
  siRNA target sequence for C20orf43 (NM_016407.1,343-361).
gaagctttctgataatcct

SEQ ID NO: 357404 - DNA, 19 bp, Homo sapiens
  siRNA target sequence for C20orf43 (NM_016407.1,521-539).
gagataaaagcggaagttt

SEQ ID NO: 357405 - DNA, 19 bp, Homo sapiens
  siRNA target sequence for C20orf43 (NM_016407.1,755-773).
gaagaagccagccttgatt

SEQ ID NO: 357406 - DNA, 19 bp, Homo sapiens
  siRNA target sequence for C20orf43 (NM_016407.1,890-908).
gaatcggaggcctacaagt

SEQ ID NO: 357407 - DNA, 19 bp, Homo sapiens
  siRNA target sequence for CDK5RAP1 (NM_016408.2,301-319).
ggctgctggaccgactttt

SEQ ID NO: 357408 - DNA, 19 bp, Homo sapiens
  siRNA target sequence for CDK5RAP1 (NM_016408.2,303-321).
ctgctggaccgacttttca

SEQ ID NO: 357409 - DNA, 19 bp, Homo sapiens
  siRNA target sequence for CDK5RAP1 (NM_016408.2,306-324).
ctggaccgacttttcaaca

SEQ ID NO: 357410 - DNA, 19 bp, Homo sapiens
  siRNA target sequence for CDK5RAP1 (NM_016408.2,308-326).
ggaccgacttttcaacatt

SEQ ID NO: 357411 - DNA, 19 bp, Homo sapiens
  siRNA target sequence for CDK5RAP1 (NM_016408.2,309-327).
gaccgacttttcaacattt

SEQ ID NO: 357412 - DNA, 19 bp, Homo sapiens
  siRNA target sequence for RNF141 (NM_016422.3,172-190).
gatcagacacagttggtta

SEQ ID NO: 357413 - DNA, 19 bp, Homo sapiens
  siRNA target sequence for RNF141 (NM_016422.3,175-193).
cagacacagttggttatta

SEQ ID NO: 357414 - DNA, 19 bp, Homo sapiens
  siRNA target sequence for RNF141 (NM_016422.3,181-199).
cagttggttattaacaagt

SEQ ID NO: 357415 - DNA, 19 bp, Homo sapiens
  siRNA target sequence for RNF141 (NM_016422.3,238-256).
gagagtggctccttaactt

SEQ ID NO: 357416 - DNA, 19 bp, Homo sapiens
  siRNA target sequence for RNF141 (NM_016422.3,240-258).
gagtggctccttaacttat

SEQ ID NO: 357417 - DNA, 19 bp, Homo sapiens
  siRNA target sequence for RNF141 (NM_016422.3,248-266).
ccttaacttatgaagaatt

SEQ ID NO: 357418 - DNA, 19 bp, Homo sapiens
  siRNA target sequence for RNF141 (NM_016422.3,272-290).
ggagagtagctgagcttaa

SEQ ID NO: 357419 - DNA, 19 bp, Homo sapiens
  siRNA target sequence for RNF141 (NM_016422.3,273-291).
gagagtagctgagcttaat

SEQ ID NO: 357420 - DNA, 19 bp, Homo sapiens
  siRNA target sequence for RNF141 (NM_016422.3,275-293).
gagtagctgagcttaatga

SEQ ID NO: 357421 - DNA, 19 bp, Homo sapiens
  siRNA target sequence for RNF141 (NM_016422.3,390-408).
ggtggtctgtaccaagatt

SEQ ID NO: 357422 - DNA, 19 bp, Homo sapiens
  siRNA target sequence for RNF141 (NM_016422.3,391-409).
gtggtctgtaccaagatta

SEQ ID NO: 357423 - DNA, 19 bp, Homo sapiens
  siRNA target sequence for RNF141 (NM_016422.3,430-448).
gaggcatcacggatcatga

SEQ ID NO: 357424 - DNA, 19 bp, Homo sapiens
  siRNA target sequence for RNF141 (NM_016422.3,432-450).
ggcatcacggatcatgaat

SEQ ID NO: 357425 - DNA, 19 bp, Homo sapiens
  siRNA target sequence for RNF141 (NM_016422.3,433-451).
gcatcacggatcatgaatt

SEQ ID NO: 357426 - DNA, 19 bp, Homo sapiens
  siRNA target sequence for RNF141 (NM_016422.3,434-452).
catcacggatcatgaattt

SEQ ID NO: 357427 - DNA, 19 bp, Homo sapiens
  siRNA target sequence for RNF141 (NM_016422.3,437-455).
cacggatcatgaatttata

SEQ ID NO: 357428 - DNA, 19 bp, Homo sapiens
  siRNA target sequence for RNF141 (NM_016422.3,469-487).
ctttataaagatatcacaa

SEQ ID NO: 357429 - DNA, 19 bp, Homo sapiens
  siRNA target sequence for RNF141 (NM_016422.3,513-531).
gagctccacctctgaagaa

SEQ ID NO: 357430 - DNA, 19 bp, Homo sapiens
  siRNA target sequence for RNF141 (NM_016422.3,607-625).
gaggaggagtgttgtatct

SEQ ID NO: 357431 - DNA, 19 bp, Homo sapiens
  siRNA target sequence for RNF141 (NM_016422.3,708-726).
caggaattgccctatttgt

SEQ ID NO: 357432 - DNA, 19 bp, Homo sapiens
  siRNA target sequence for RNF141 (NM_016422.3,719-737).
ctatttgtcgcctacagat

SEQ ID NO: 357433 - DNA, 19 bp, Homo sapiens
  siRNA target sequence for RNF141 (NM_016422.3,735-753).
gatgactggagcaaatgaa

SEQ ID NO: 357434 - DNA, 19 bp, Homo sapiens
  siRNA target sequence for RNF141 (NM_016422.3,784-802).
gatgatatggctaactata

SEQ ID NO: 357435 - DNA, 19 bp, Homo sapiens
  siRNA target sequence for RNF141 (NM_016422.3,793-811).
gctaactatattcttaaca

SEQ ID NO: 357436 - DNA, 19 bp, Homo sapiens
  siRNA target sequence for TCEB3L (NM_016427.1,842-860).
ggcactcccctactttgat

SEQ ID NO: 357437 - DNA, 19 bp, Homo sapiens
  siRNA target sequence for TCEB3L (NM_016427.1,1042-1060).
cacagtcactcgaacaaga

SEQ ID NO: 357438 - DNA, 19 bp, Homo sapiens
  siRNA target sequence for TCEB3L (NM_016427.1,1166-1184).
caccgactgctcatttgga

SEQ ID NO: 357439 - DNA, 19 bp, Homo sapiens
  siRNA target sequence for TCEB3L (NM_016427.1,1250-1268).
ccactctgtcatgtgaaaa

SEQ ID NO: 357440 - DNA, 19 bp, Homo sapiens
  siRNA target sequence for TCEB3L (NM_016427.1,1712-1730).
gtgcccaggtgcttagaaa

SEQ ID NO: 357441 - DNA, 19 bp, Homo sapiens
  siRNA target sequence for TCEB3L (NM_016427.1,1810-1828).
cagctgtatcgcagaaaga

SEQ ID NO: 357442 - DNA, 19 bp, Homo sapiens
  siRNA target sequence for TCEB3L (NM_016427.1,1860-1878).
cgaattacggaggaatcat

SEQ ID NO: 357443 - DNA, 19 bp, Homo sapiens
  siRNA target sequence for TCEB3L (NM_016427.1,1965-1983).
gcggctgagagtaatgaca

SEQ ID NO: 357444 - DNA, 19 bp, Homo sapiens
  siRNA target sequence for TCEB3L (NM_016427.1,1966-1984).
cggctgagagtaatgacaa

SEQ ID NO: 357445 - DNA, 19 bp, Homo sapiens
  siRNA target sequence for TCEB3L (NM_016427.1,1971-1989).
gagagtaatgacaacgaat

SEQ ID NO: 357446 - DNA, 19 bp, Homo sapiens
  siRNA target sequence for TCEB3L (NM_016427.1,2114-2132).
ccgaaaatggggagatcaa

SEQ ID NO: 357447 - DNA, 19 bp, Homo sapiens
  siRNA target sequence for NESH (NM_016428.2,591-609).
ctactgcgaggacaactat

SEQ ID NO: 357448 - DNA, 19 bp, Homo sapiens
  siRNA target sequence for C20orf41 (NM_016434.2,541-559).
catctctgcccgcaagatt

SEQ ID NO: 357449 - DNA, 19 bp, Homo sapiens
  siRNA target sequence for C20orf41 (NM_016434.2,587-605).
ccggatcgggccttgtcat

SEQ ID NO: 357450 - DNA, 19 bp, Homo sapiens
  siRNA target sequence for C20orf41 (NM_016434.2,652-670).
cacggacatcccaaagatt

SEQ ID NO: 357451 - DNA, 19 bp, Homo sapiens
  siRNA target sequence for C20orf41 (NM_016434.2,654-672).
cggacatcccaaagattat

SEQ ID NO: 357452 - DNA, 19 bp, Homo sapiens
  siRNA target sequence for C20orf41 (NM_016434.2,655-673).
ggacatcccaaagattatt

SEQ ID NO: 357453 - DNA, 19 bp, Homo sapiens
  siRNA target sequence for C20orf41 (NM_016434.2,656-674).
gacatcccaaagattattt

SEQ ID NO: 357454 - DNA, 19 bp, Homo sapiens
  siRNA target sequence for C20orf41 (NM_016434.2,851-869).
cgctcctgtcatttctaca

SEQ ID NO: 357455 - DNA, 19 bp, Homo sapiens
  siRNA target sequence for C20orf41 (NM_016434.2,992-1010).
cagcaagccgacatcatat

SEQ ID NO: 357456 - DNA, 19 bp, Homo sapiens
  siRNA target sequence for C20orf41 (NM_016434.2,995-1013).
caagccgacatcatattca

SEQ ID NO: 357457 - DNA, 19 bp, Homo sapiens
  siRNA target sequence for C20orf41 (NM_016434.2,1006-1024).
catattcatgccgtacaat

SEQ ID NO: 357458 - DNA, 19 bp, Homo sapiens
  siRNA target sequence for C20orf41 (NM_016434.2,1044-1062).
gccgcagagcacacaacat

SEQ ID NO: 357459 - DNA, 19 bp, Homo sapiens
  siRNA target sequence for C20orf41 (NM_016434.2,1047-1065).
gcagagcacacaacattga

SEQ ID NO: 357460 - DNA, 19 bp, Homo sapiens
  siRNA target sequence for C20orf41 (NM_016434.2,1072-1090).
ggggacagtcgtgatcttt

SEQ ID NO: 357461 - DNA, 19 bp, Homo sapiens
  siRNA target sequence for C20orf41 (NM_016434.2,1074-1092).
ggacagtcgtgatctttga

SEQ ID NO: 357462 - DNA, 19 bp, Homo sapiens
  siRNA target sequence for C20orf41 (NM_016434.2,1100-1118).
cacaacgtggagaagatgt

SEQ ID NO: 357463 - DNA, 19 bp, Homo sapiens
  siRNA target sequence for C20orf41 (NM_016434.2,1164-1182).
caggactggacgtcataga

SEQ ID NO: 357464 - DNA, 19 bp, Homo sapiens
  siRNA target sequence for C20orf41 (NM_016434.2,1757-1775).
gtccgctccctcatcctta

SEQ ID NO: 357465 - DNA, 19 bp, Homo sapiens
  siRNA target sequence for C20orf41 (NM_016434.2,2255-2273).
ggccgtggtgtgattgtca

SEQ ID NO: 357466 - DNA, 19 bp, Homo sapiens
  siRNA target sequence for C20orf41 (NM_016434.2,2532-2550).
cccacgtcagggtgtatga

SEQ ID NO: 357467 - DNA, 19 bp, Homo sapiens
  siRNA target sequence for C20orf41 (NM_016434.2,2534-2552).
cacgtcagggtgtatgaca

SEQ ID NO: 357468 - DNA, 19 bp, Homo sapiens
  siRNA target sequence for C20orf41 (NM_016434.2,2571-2589).
gagacgtggcccagttctt

SEQ ID NO: 357469 - DNA, 19 bp, Homo sapiens
  siRNA target sequence for C20orf41 (NM_016434.2,2592-2610).
gtgttgccgagcgaactat

SEQ ID NO: 357470 - DNA, 19 bp, Homo sapiens
  siRNA target sequence for C20orf41 (NM_016434.2,2698-2716).
caccaggaaagctaagagt

SEQ ID NO: 357471 - DNA, 19 bp, Homo sapiens
  siRNA target sequence for C20orf41 (NM_016434.2,3061-3079).
gttgagccaagccaacttt

SEQ ID NO: 357472 - DNA, 19 bp, Homo sapiens
  siRNA target sequence for C20orf41 (NM_016434.2,3585-3603).
cagcgctgacagcctataa

SEQ ID NO: 357473 - DNA, 19 bp, Homo sapiens
  siRNA target sequence for C20orf41 (NM_016434.2,3588-3606).
cgctgacagcctataagca

SEQ ID NO: 357474 - DNA, 19 bp, Homo sapiens
  siRNA target sequence for C20orf41 (NM_016434.2,3589-3607).
gctgacagcctataagcaa

SEQ ID NO: 357475 - DNA, 19 bp, Homo sapiens
  siRNA target sequence for CLST11240 (NM_016438.2,396-414).
cgtggttccaccaagatgt

SEQ ID NO: 357476 - DNA, 19 bp, Homo sapiens
  siRNA target sequence for CLST11240 (NM_016438.2,474-492).
ctaggtgctgtgtacacaa

SEQ ID NO: 357477 - DNA, 19 bp, Homo sapiens
  siRNA target sequence for CLST11240 (NM_016438.2,477-495).
ggtgctgtgtacacaatgt

SEQ ID NO: 357478 - DNA, 19 bp, Homo sapiens
  siRNA target sequence for CLST11240 (NM_016438.2,478-496).
gtgctgtgtacacaatgta

SEQ ID NO: 357479 - DNA, 19 bp, Homo sapiens
  siRNA target sequence for CLST11240 (NM_016438.2,480-498).
gctgtgtacacaatgtaca

SEQ ID NO: 357480 - DNA, 19 bp, Homo sapiens
  siRNA target sequence for CLST11240 (NM_016438.2,490-508).
caatgtacagcgattacgt

SEQ ID NO: 357481 - DNA, 19 bp, Homo sapiens
  siRNA target sequence for NGX6 (NM_016446.2,1339-1357).
ccgtgcgccaggaaaacgt

SEQ ID NO: 357482 - DNA, 19 bp, Homo sapiens
  siRNA target sequence for NGX6 (NM_016446.2,1413-1431).
gtgacctgttccaaagagt

SEQ ID NO: 357483 - DNA, 19 bp, Homo sapiens
  siRNA target sequence for NGX6 (NM_016446.2,1646-1664).
gctgctgcgcacacacaat

SEQ ID NO: 357484 - DNA, 19 bp, Homo sapiens
  siRNA target sequence for NGX6 (NM_016446.2,1654-1672).
gcacacacaattatctgta

SEQ ID NO: 357485 - DNA, 19 bp, Homo sapiens
  siRNA target sequence for NGX6 (NM_016446.2,1728-1746).
gatgcgctcacctatggat

SEQ ID NO: 357486 - DNA, 19 bp, Homo sapiens
  siRNA target sequence for NGX6 (NM_016446.2,1774-1792).
gcctgagcaacctcatgtt

SEQ ID NO: 357487 - DNA, 19 bp, Homo sapiens
  siRNA target sequence for NGX6 (NM_016446.2,1811-1829).
ggccattcggagtcgatat

SEQ ID NO: 357488 - DNA, 19 bp, Homo sapiens
  siRNA target sequence for NGX6 (NM_016446.2,1813-1831).
ccattcggagtcgatatgt

SEQ ID NO: 357489 - DNA, 19 bp, Homo sapiens
  siRNA target sequence for NGX6 (NM_016446.2,1880-1898).
cggtggtgtctgcatctta

SEQ ID NO: 357490 - DNA, 19 bp, Homo sapiens
  siRNA target sequence for NGX6 (NM_016446.2,1921-1939).
ggtgggtcacagtctgtat

SEQ ID NO: 357491 - DNA, 19 bp, Homo sapiens
  siRNA target sequence for NGX6 (NM_016446.2,1955-1973).
cgagggtttgggaatgtct

SEQ ID NO: 357492 - DNA, 19 bp, Homo sapiens
  siRNA target sequence for NGX6 (NM_016446.2,1976-1994).
gccttcactgtgtcttcta

SEQ ID NO: 357493 - DNA, 19 bp, Homo sapiens
  siRNA target sequence for NGX6 (NM_016446.2,1978-1996).
cttcactgtgtcttctaca

SEQ ID NO: 357494 - DNA, 19 bp, Homo sapiens
  siRNA target sequence for NGX6 (NM_016446.2,2024-2042).
gtcatgcatagataatggt

SEQ ID NO: 357495 - DNA, 19 bp, Homo sapiens
  siRNA target sequence for NGX6 (NM_016446.2,2029-2047).
gcatagataatggtcattt

SEQ ID NO: 357496 - DNA, 19 bp, Homo sapiens
  siRNA target sequence for RAMP (NM_016448.1,135-153).
gcttggcgtcctgagaaat

SEQ ID NO: 357497 - DNA, 19 bp, Homo sapiens
  siRNA target sequence for RAMP (NM_016448.1,284-302).
ccaatatggaacatgtact

SEQ ID NO: 357498 - DNA, 19 bp, Homo sapiens
  siRNA target sequence for RAMP (NM_016448.1,285-303).
caatatggaacatgtacta

SEQ ID NO: 357499 - DNA, 19 bp, Homo sapiens
  siRNA target sequence for RAMP (NM_016448.1,322-340).
ggctttgttcgattgtata

SEQ ID NO: 357500 - DNA, 19 bp, Homo sapiens
  siRNA target sequence for RAMP (NM_016448.1,323-341).
gctttgttcgattgtataa

SEQ ID NO: 357501 - DNA, 19 bp, Homo sapiens
  siRNA target sequence for RAMP (NM_016448.1,331-349).
cgattgtataacacagaat

SEQ ID NO: 357502 - DNA, 19 bp, Homo sapiens
  siRNA target sequence for RAMP (NM_016448.1,419-437).
gggttcctggtgaacttaa

SEQ ID NO: 357503 - DNA, 19 bp, Homo sapiens
  siRNA target sequence for RAMP (NM_016448.1,420-438).
ggttcctggtgaacttaaa

SEQ ID NO: 357504 - DNA, 19 bp, Homo sapiens
  siRNA target sequence for RAMP (NM_016448.1,427-445).
ggtgaacttaaacttgtta

SEQ ID NO: 357505 - DNA, 19 bp, Homo sapiens
  siRNA target sequence for RAMP (NM_016448.1,455-473).
gtgatcaaacagccaaatt

SEQ ID NO: 357506 - DNA, 19 bp, Homo sapiens
  siRNA target sequence for RAMP (NM_016448.1,457-475).
gatcaaacagccaaatttt

SEQ ID NO: 357507 - DNA, 19 bp, Homo sapiens
  siRNA target sequence for RAMP (NM_016448.1,570-588).
ctgtacgggtggaagagat

SEQ ID NO: 357508 - DNA, 19 bp, Homo sapiens
  siRNA target sequence for RAMP (NM_016448.1,581-599).
gaagagatggcaacattat

SEQ ID NO: 357509 - DNA, 19 bp, Homo sapiens
  siRNA target sequence for RAMP (NM_016448.1,606-624).
ggataccaggtgcaacaaa

SEQ ID NO: 357510 - DNA, 19 bp, Homo sapiens
  siRNA target sequence for RAMP (NM_016448.1,607-625).
gataccaggtgcaacaaaa

SEQ ID NO: 357511 - DNA, 19 bp, Homo sapiens
  siRNA target sequence for RAMP (NM_016448.1,611-629).
ccaggtgcaacaaaaaaga

SEQ ID NO: 357512 - DNA, 19 bp, Homo sapiens
  siRNA target sequence for RAMP (NM_016448.1,612-630).
caggtgcaacaaaaaagat

SEQ ID NO: 357513 - DNA, 19 bp, Homo sapiens
  siRNA target sequence for RAMP (NM_016448.1,633-651).
gttttataggcaagtgaat

SEQ ID NO: 357514 - DNA, 19 bp, Homo sapiens
  siRNA target sequence for RAMP (NM_016448.1,731-749).
ctccttctgtggatttcca

SEQ ID NO: 357515 - DNA, 19 bp, Homo sapiens
  siRNA target sequence for RAMP (NM_016448.1,778-796).
gacgagaataccttagtct

SEQ ID NO: 357516 - DNA, 19 bp, Homo sapiens
  siRNA target sequence for RAMP (NM_016448.1,822-840).
caaagtatgggatttacgt

SEQ ID NO: 357517 - DNA, 19 bp, Homo sapiens
  siRNA target sequence for RAMP (NM_016448.1,830-848).
gggatttacgtaagaatta

SEQ ID NO: 357518 - DNA, 19 bp, Homo sapiens
  siRNA target sequence for RAMP (NM_016448.1,831-849).
ggatttacgtaagaattat

SEQ ID NO: 357519 - DNA, 19 bp, Homo sapiens
  siRNA target sequence for RAMP (NM_016448.1,832-850).
gatttacgtaagaattata

SEQ ID NO: 357520 - DNA, 19 bp, Homo sapiens
  siRNA target sequence for RAMP (NM_016448.1,843-861).
gaattatactgcttatcga

SEQ ID NO: 357521 - DNA, 19 bp, Homo sapiens
  siRNA target sequence for RAMP (NM_016448.1,859-877).
cgacaagaacccatagcat

SEQ ID NO: 357522 - DNA, 19 bp, Homo sapiens
  siRNA target sequence for RAMP (NM_016448.1,869-887).
ccatagcatccaagtcttt

SEQ ID NO: 357523 - DNA, 19 bp, Homo sapiens
  siRNA target sequence for RAMP (NM_016448.1,899-917).
gtagcagcactcgaaaact

SEQ ID NO: 357524 - DNA, 19 bp, Homo sapiens
  siRNA target sequence for RAMP (NM_016448.1,905-923).
gcactcgaaaacttggata

SEQ ID NO: 357525 - DNA, 19 bp, Homo sapiens
  siRNA target sequence for RAMP (NM_016448.1,906-924).
cactcgaaaacttggatat

SEQ ID NO: 357526 - DNA, 19 bp, Homo sapiens
  siRNA target sequence for RAMP (NM_016448.1,910-928).
cgaaaacttggatattcaa

SEQ ID NO: 357527 - DNA, 19 bp, Homo sapiens
  siRNA target sequence for RAMP (NM_016448.1,919-937).
ggatattcaagtctgattt

SEQ ID NO: 357528 - DNA, 19 bp, Homo sapiens
  siRNA target sequence for RAMP (NM_016448.1,949-967).
ggctctactttatttgcta

SEQ ID NO: 357529 - DNA, 19 bp, Homo sapiens
  siRNA target sequence for RAMP (NM_016448.1,950-968).
gctctactttatttgctaa

SEQ ID NO: 357530 - DNA, 19 bp, Homo sapiens
  siRNA target sequence for RAMP (NM_016448.1,965-983).
ctaattgcacagacgataa

SEQ ID NO: 357531 - DNA, 19 bp, Homo sapiens
  siRNA target sequence for RAMP (NM_016448.1,976-994).
gacgataacatctacatgt

SEQ ID NO: 357532 - DNA, 19 bp, Homo sapiens
  siRNA target sequence for RAMP (NM_016448.1,978-996).
cgataacatctacatgttt

SEQ ID NO: 357533 - DNA, 19 bp, Homo sapiens
  siRNA target sequence for RAMP (NM_016448.1,979-997).
gataacatctacatgttta

SEQ ID NO: 357534 - DNA, 19 bp, Homo sapiens
  siRNA target sequence for RAMP (NM_016448.1,1082-1100).
cagatgaccagtttttagt

SEQ ID NO: 357535 - DNA, 19 bp, Homo sapiens
  siRNA target sequence for RAMP (NM_016448.1,1101-1119).
cagtggctcaagtgatgaa

SEQ ID NO: 357536 - DNA, 19 bp, Homo sapiens
  siRNA target sequence for RAMP (NM_016448.1,1114-1132).
gatgaagctgcctacatat

SEQ ID NO: 357537 - DNA, 19 bp, Homo sapiens
  siRNA target sequence for RAMP (NM_016448.1,1216-1234).
gacttcacaaagattgcta

SEQ ID NO: 357538 - DNA, 19 bp, Homo sapiens
  siRNA target sequence for RAMP (NM_016448.1,1238-1256).
gttctgatgacaatacact

SEQ ID NO: 357539 - DNA, 19 bp, Homo sapiens
  siRNA target sequence for RAMP (NM_016448.1,1352-1370).
gacctggcctagtaacagt

SEQ ID NO: 357540 - DNA, 19 bp, Homo sapiens
  siRNA target sequence for RAMP (NM_016448.1,1354-1372).
cctggcctagtaacagtaa

SEQ ID NO: 357541 - DNA, 19 bp, Homo sapiens
  siRNA target sequence for RAMP (NM_016448.1,1413-1431).
gtgcaatccatccaattct

SEQ ID NO: 357542 - DNA, 19 bp, Homo sapiens
  siRNA target sequence for RAMP (NM_016448.1,1493-1511).
ctcctacgttctctattaa

SEQ ID NO: 357543 - DNA, 19 bp, Homo sapiens
  siRNA target sequence for RAMP (NM_016448.1,1495-1513).
cctacgttctctattaaaa

SEQ ID NO: 357544 - DNA, 19 bp, Homo sapiens
  siRNA target sequence for RAMP (NM_016448.1,1531-1549).
cggtctcccatcaacagaa

SEQ ID NO: 357545 - DNA, 19 bp, Homo sapiens
  siRNA target sequence for RAMP (NM_016448.1,1658-1676).
cttcggagaccaagatcat

SEQ ID NO: 357546 - DNA, 19 bp, Homo sapiens
  siRNA target sequence for RAMP (NM_016448.1,1730-1748).
cttgctctgagtctagaaa

SEQ ID NO: 357547 - DNA, 19 bp, Homo sapiens
  siRNA target sequence for RAMP (NM_016448.1,1778-1796).
gtctggagagtgtgaaaca

SEQ ID NO: 357548 - DNA, 19 bp, Homo sapiens
  siRNA target sequence for RAMP (NM_016448.1,1831-1849).
cttgatggccaagttgaaa

SEQ ID NO: 357549 - DNA, 19 bp, Homo sapiens
  siRNA target sequence for RAMP (NM_016448.1,1840-1858).
caagttgaaaatcttcatt

SEQ ID NO: 357550 - DNA, 19 bp, Homo sapiens
  siRNA target sequence for RAMP (NM_016448.1,1905-1923).
ctctctaggtcctaccaaa

SEQ ID NO: 357551 - DNA, 19 bp, Homo sapiens
  siRNA target sequence for RAMP (NM_016448.1,1962-1980).
gcctccgtctcctatcagt

SEQ ID NO: 357552 - DNA, 19 bp, Homo sapiens
  siRNA target sequence for RAMP (NM_016448.1,1972-1990).
cctatcagtccgtatgctt

SEQ ID NO: 357553 - DNA, 19 bp, Homo sapiens
  siRNA target sequence for RAMP (NM_016448.1,1977-1995).
cagtccgtatgcttcagaa

SEQ ID NO: 357554 - DNA, 19 bp, Homo sapiens
  siRNA target sequence for RAMP (NM_016448.1,2003-2021).
gaacgctacctcttccttt

SEQ ID NO: 357555 - DNA, 19 bp, Homo sapiens
  siRNA target sequence for RAMP (NM_016448.1,2007-2025).
gctacctcttcctttgaga

SEQ ID NO: 357556 - DNA, 19 bp, Homo sapiens
  siRNA target sequence for RAMP (NM_016448.1,2044-2062).
gaaatggtaggcaaagaga

SEQ ID NO: 357557 - DNA, 19 bp, Homo sapiens
  siRNA target sequence for RAMP (NM_016448.1,2049-2067).
ggtaggcaaagagaatagt

SEQ ID NO: 357558 - DNA, 19 bp, Homo sapiens
  siRNA target sequence for RAMP (NM_016448.1,2050-2068).
gtaggcaaagagaatagtt

SEQ ID NO: 357559 - DNA, 19 bp, Homo sapiens
  siRNA target sequence for RAMP (NM_016448.1,2106-2124).
caaacggaaggctgagaat

SEQ ID NO: 357560 - DNA, 19 bp, Homo sapiens
  siRNA target sequence for RAMP (NM_016448.1,2273-2291).
ctgaacactcaacagaatt

SEQ ID NO: 357561 - DNA, 19 bp, Homo sapiens
  siRNA target sequence for LOC51233 (NM_016449.1,291-309).
ctgacctgttgtatcaact

SEQ ID NO: 357562 - DNA, 19 bp, Homo sapiens
  siRNA target sequence for LOC51233 (NM_016449.1,332-350).
gaaggacgcaccctgttat

SEQ ID NO: 357563 - DNA, 19 bp, Homo sapiens
  siRNA target sequence for LOC51233 (NM_016449.1,336-354).
gacgcaccctgttatgaat

SEQ ID NO: 357564 - DNA, 19 bp, Homo sapiens
  siRNA target sequence for LOC51233 (NM_016449.1,338-356).
cgcaccctgttatgaatct

SEQ ID NO: 357565 - DNA, 19 bp, Homo sapiens
  siRNA target sequence for LOC51234 (NM_016454.2,293-311).
gggtcccctcaaacagatt

SEQ ID NO: 357566 - DNA, 19 bp, Homo sapiens
  siRNA target sequence for LOC51234 (NM_016454.2,306-324).
cagattcccatgaatctct

SEQ ID NO: 357567 - DNA, 19 bp, Homo sapiens
  siRNA target sequence for LOC51234 (NM_016454.2,355-373).
ccatcttccctactatgat

SEQ ID NO: 357568 - DNA, 19 bp, Homo sapiens
  siRNA target sequence for LOC51234 (NM_016454.2,364-382).
ctactatgatggtgtgtat

SEQ ID NO: 357569 - DNA, 19 bp, Homo sapiens
  siRNA target sequence for LOC51234 (NM_016454.2,367-385).
ctatgatggtgtgtatgat

SEQ ID NO: 357570 - DNA, 19 bp, Homo sapiens
  siRNA target sequence for LOC51234 (NM_016454.2,431-449).
caagatgttagaaagttca

SEQ ID NO: 357571 - DNA, 19 bp, Homo sapiens
  siRNA target sequence for LOC51234 (NM_016454.2,465-483).
cagggtttggtctatctca

SEQ ID NO: 357572 - DNA, 19 bp, Homo sapiens
  siRNA target sequence for LOC51234 (NM_016454.2,499-517).
gtttggcattggctgttta

SEQ ID NO: 357573 - DNA, 19 bp, Homo sapiens
  siRNA target sequence for LOC51234 (NM_016454.2,504-522).
gcattggctgtttacaagt

SEQ ID NO: 357574 - DNA, 19 bp, Homo sapiens
  siRNA target sequence for LOC51234 (NM_016454.2,524-542).
ccagtccatgggactgtta

SEQ ID NO: 357575 - DNA, 19 bp, Homo sapiens
  siRNA target sequence for LOC51234 (NM_016454.2,547-565).
cacatgcatcggattggtt

SEQ ID NO: 357576 - DNA, 19 bp, Homo sapiens
  siRNA target sequence for LOC51236 (NM_016458.2,731-749).
gggacgctgcggaattgct

SEQ ID NO: 357577 - DNA, 19 bp, Homo sapiens
  siRNA target sequence for LOC51236 (NM_016458.2,783-801).
gacctgaggtggacattct

SEQ ID NO: 357578 - DNA, 19 bp, Homo sapiens
  siRNA target sequence for PACAP (NM_016459.2,553-571).
ggctctccaggacatgttt

SEQ ID NO: 357579 - DNA, 19 bp, Homo sapiens
  siRNA target sequence for PACAP (NM_016459.2,562-580).
ggacatgtttgcactactt

SEQ ID NO: 357580 - DNA, 19 bp, Homo sapiens
  siRNA target sequence for PACAP (NM_016459.2,719-737).
ctaccctcctctgaaagaa

SEQ ID NO: 357581 - DNA, 19 bp, Homo sapiens
  siRNA target sequence for PACAP (NM_016459.2,873-891).
cccctctggactcaaataa

SEQ ID NO: 357582 - DNA, 19 bp, Homo sapiens
  siRNA target sequence for PACAP (NM_016459.2,874-892).
ccctctggactcaaataaa

SEQ ID NO: 357583 - DNA, 19 bp, Homo sapiens
  siRNA target sequence for PACAP (NM_016459.2,875-893).
cctctggactcaaataaaa

SEQ ID NO: 357584 - DNA, 19 bp, Homo sapiens
  siRNA target sequence for HSPC196 (NM_016464.2,180-198).
ctccagaccagtaactaca

SEQ ID NO: 357585 - DNA, 19 bp, Homo sapiens
  siRNA target sequence for HSPC196 (NM_016464.2,382-400).
gcctggtcaacctcctatt

SEQ ID NO: 357586 - DNA, 19 bp, Homo sapiens
  siRNA target sequence for HSPC196 (NM_016464.2,387-405).
gtcaacctcctattccata

SEQ ID NO: 357587 - DNA, 19 bp, Homo sapiens
  siRNA target sequence for HSPC196 (NM_016464.2,395-413).
cctattccataagttcaaa

SEQ ID NO: 357588 - DNA, 19 bp, Homo sapiens
  siRNA target sequence for HSPC196 (NM_016464.2,462-480).
catgtctgggtcatgaact

SEQ ID NO: 357589 - DNA, 19 bp, Homo sapiens
  siRNA target sequence for HSPC196 (NM_016464.2,549-567).
ctagcagcagtgttgtact

SEQ ID NO: 357590 - DNA, 19 bp, Homo sapiens
  siRNA target sequence for HSPC196 (NM_016464.2,560-578).
gttgtactgctacttctat

SEQ ID NO: 357591 - DNA, 19 bp, Homo sapiens
  siRNA target sequence for MGC41816 (NM_016466.4,154-172).
ctgggccgagtgaagcatt

SEQ ID NO: 357592 - DNA, 19 bp, Homo sapiens
  siRNA target sequence for MGC41816 (NM_016466.4,157-175).
ggccgagtgaagcatttaa

SEQ ID NO: 357593 - DNA, 19 bp, Homo sapiens
  siRNA target sequence for MGC41816 (NM_016466.4,158-176).
gccgagtgaagcatttaat

SEQ ID NO: 357594 - DNA, 19 bp, Homo sapiens
  siRNA target sequence for MGC41816 (NM_016466.4,161-179).
gagtgaagcatttaatcca

SEQ ID NO: 357595 - DNA, 19 bp, Homo sapiens
  siRNA target sequence for MGC41816 (NM_016466.4,362-380).
cgcggctcctgctatcaca

SEQ ID NO: 357596 - DNA, 19 bp, Homo sapiens
  siRNA target sequence for MGC41816 (NM_016466.4,363-381).
gcggctcctgctatcacat

SEQ ID NO: 357597 - DNA, 19 bp, Homo sapiens
  siRNA target sequence for MGC41816 (NM_016466.4,413-431).
gcatgaccagtctgcataa

SEQ ID NO: 357598 - DNA, 19 bp, Homo sapiens
  siRNA target sequence for LOC51240 (NM_016467.3,146-164).
caaatacccgtgtcatgaa

SEQ ID NO: 357599 - DNA, 19 bp, Homo sapiens
  siRNA target sequence for LOC51240 (NM_016467.3,170-188).
ggggtatgtggctgacata

SEQ ID NO: 357600 - DNA, 19 bp, Homo sapiens
  siRNA target sequence for LOC51240 (NM_016467.3,171-189).
gggtatgtggctgacatat

SEQ ID NO: 357601 - DNA, 19 bp, Homo sapiens
  siRNA target sequence for LOC51240 (NM_016467.3,196-214).
ggagttggcttgcttcata

SEQ ID NO: 357602 - DNA, 19 bp, Homo sapiens
  siRNA target sequence for LOC51240 (NM_016467.3,197-215).
gagttggcttgcttcatat

SEQ ID NO: 357603 - DNA, 19 bp, Homo sapiens
  siRNA target sequence for LOC51240 (NM_016467.3,250-268).
gttgcttggactttaacaa

SEQ ID NO: 357604 - DNA, 19 bp, Homo sapiens
  siRNA target sequence for LOC51240 (NM_016467.3,253-271).
gcttggactttaacaaata

SEQ ID NO: 357605 - DNA, 19 bp, Homo sapiens
  siRNA target sequence for LOC51240 (NM_016467.3,283-301).
ctggggatgtacgtatttt

SEQ ID NO: 357606 - DNA, 19 bp, Homo sapiens
  siRNA target sequence for LOC51240 (NM_016467.3,287-305).
ggatgtacgtatttttgca

SEQ ID NO: 357607 - DNA, 19 bp, Homo sapiens
  siRNA target sequence for LOC51240 (NM_016467.3,349-367).
gcaaggctcctaactcatt

SEQ ID NO: 357608 - DNA, 19 bp, Homo sapiens
  siRNA target sequence for LOC51240 (NM_016467.3,378-396).
ggactatggagtacagttt

SEQ ID NO: 357609 - DNA, 19 bp, Homo sapiens
  siRNA target sequence for LOC51240 (NM_016467.3,379-397).
gactatggagtacagttta

SEQ ID NO: 357610 - DNA, 19 bp, Homo sapiens
  siRNA target sequence for LOC51240 (NM_016467.3,381-399).
ctatggagtacagtttaca

SEQ ID NO: 357611 - DNA, 19 bp, Homo sapiens
  siRNA target sequence for LOC51240 (NM_016467.3,522-540).
caaaatgccacaactacat

SEQ ID NO: 357612 - DNA, 19 bp, Homo sapiens
  siRNA target sequence for LOC51240 (NM_016467.3,541-559).
ggtgttcggatctttggaa

SEQ ID NO: 357613 - DNA, 19 bp, Homo sapiens
  siRNA target sequence for LOC51240 (NM_016467.3,542-560).
gtgttcggatctttggaat

SEQ ID NO: 357614 - DNA, 19 bp, Homo sapiens
  siRNA target sequence for LOC51240 (NM_016467.3,544-562).
gttcggatctttggaatta

SEQ ID NO: 357615 - DNA, 19 bp, Homo sapiens
  siRNA target sequence for C14orf112 (NM_016468.3,113-131).
cgtgcttttcgcaagaaca

SEQ ID NO: 357616 - DNA, 19 bp, Homo sapiens
  siRNA target sequence for C14orf112 (NM_016468.3,114-132).
gtgcttttcgcaagaacaa

SEQ ID NO: 357617 - DNA, 19 bp, Homo sapiens
  siRNA target sequence for C14orf112 (NM_016468.3,116-134).
gcttttcgcaagaacaaga

SEQ ID NO: 357618 - DNA, 19 bp, Homo sapiens
  siRNA target sequence for C14orf112 (NM_016468.3,166-184).
gattgttggaggttctttt

SEQ ID NO: 357619 - DNA, 19 bp, Homo sapiens
  siRNA target sequence for C14orf112 (NM_016468.3,186-204).
gtcttcgtgagttttctca

SEQ ID NO: 357620 - DNA, 19 bp, Homo sapiens
  siRNA target sequence for C14orf112 (NM_016468.3,276-294).
ctttagagtcggaatatga

SEQ ID NO: 357621 - DNA, 19 bp, Homo sapiens
  siRNA target sequence for C14orf112 (NM_016468.3,281-299).
gagtcggaatatgagaaaa

SEQ ID NO: 357622 - DNA, 19 bp, Homo sapiens
  siRNA target sequence for C14orf112 (NM_016468.3,285-303).
cggaatatgagaaaatcaa

SEQ ID NO: 357623 - DNA, 19 bp, Homo sapiens
  siRNA target sequence for C14orf112 (NM_016468.3,386-404).
gaaagccttaagactaaga

SEQ ID NO: 357624 - DNA, 19 bp, Homo sapiens
  siRNA target sequence for C14orf112 (NM_016468.3,392-410).
cttaagactaagacaactt

SEQ ID NO: 357625 - DNA, 19 bp, Homo sapiens
  siRNA target sequence for C20orf111 (NM_016470.6,327-345).
gggtctacaaggaagtctt

SEQ ID NO: 357626 - DNA, 19 bp, Homo sapiens
  siRNA target sequence for C20orf111 (NM_016470.6,369-387).
cgtcgtcgacgttctaagt

SEQ ID NO: 357627 - DNA, 19 bp, Homo sapiens
  siRNA target sequence for C20orf111 (NM_016470.6,541-559).
ctacttctctcgatgctaa

SEQ ID NO: 357628 - DNA, 19 bp, Homo sapiens
  siRNA target sequence for C20orf111 (NM_016470.6,544-562).
cttctctcgatgctaatca

SEQ ID NO: 357629 - DNA, 19 bp, Homo sapiens
  siRNA target sequence for C20orf111 (NM_016470.6,604-622).
ggctcccatcagagagtaa

SEQ ID NO: 357630 - DNA, 19 bp, Homo sapiens
  siRNA target sequence for C20orf111 (NM_016470.6,678-696).
gatctctctgactttcaat

SEQ ID NO: 357631 - DNA, 19 bp, Homo sapiens
  siRNA target sequence for C20orf111 (NM_016470.6,693-711).
caatcagtttccaagctaa

SEQ ID NO: 357632 - DNA, 19 bp, Homo sapiens
  siRNA target sequence for C20orf111 (NM_016470.6,697-715).
cagtttccaagctaaacca

SEQ ID NO: 357633 - DNA, 19 bp, Homo sapiens
  siRNA target sequence for C20orf111 (NM_016470.6,946-964).
caggctacatggagtatta

SEQ ID NO: 357634 - DNA, 19 bp, Homo sapiens
  siRNA target sequence for C20orf111 (NM_016470.6,949-967).
gctacatggagtattactt

SEQ ID NO: 357635 - DNA, 19 bp, Homo sapiens
  siRNA target sequence for C14orf129 (NM_016472.2,161-179).
ggagctaagcagtatgtca

SEQ ID NO: 357636 - DNA, 19 bp, Homo sapiens
  siRNA target sequence for C14orf129 (NM_016472.2,270-288).
ctctttgctgttaacaaca

SEQ ID NO: 357637 - DNA, 19 bp, Homo sapiens
  siRNA target sequence for C14orf129 (NM_016472.2,316-334).
cggatgatgtggcctatat

SEQ ID NO: 357638 - DNA, 19 bp, Homo sapiens
  siRNA target sequence for C14orf129 (NM_016472.2,318-336).
gatgatgtggcctatatca

SEQ ID NO: 357639 - DNA, 19 bp, Homo sapiens
  siRNA target sequence for C14orf129 (NM_016472.2,437-455).
gactccctaccatgaaaca

SEQ ID NO: 357640 - DNA, 19 bp, Homo sapiens
  siRNA target sequence for C14orf129 (NM_016472.2,504-522).
ggaaacgcactgcttcaaa

SEQ ID NO: 357641 - DNA, 19 bp, Homo sapiens
  siRNA target sequence for C14orf129 (NM_016472.2,548-566).
gacagtcatgactacactt

SEQ ID NO: 357642 - DNA, 19 bp, Homo sapiens
  siRNA target sequence for LOC51244 (NM_016474.3,461-479).
gtgcccatagagattctca

SEQ ID NO: 357643 - DNA, 19 bp, Homo sapiens
  siRNA target sequence for LOC51244 (NM_016474.3,463-481).
gcccatagagattctcaaa

SEQ ID NO: 357644 - DNA, 19 bp, Homo sapiens
  siRNA target sequence for LOC51244 (NM_016474.3,498-516).
cgacgatgaggaaaacctt

SEQ ID NO: 357645 - DNA, 19 bp, Homo sapiens
  siRNA target sequence for LOC51244 (NM_016474.3,594-612).
gcgctgtatgagaaaggat

SEQ ID NO: 357646 - DNA, 19 bp, Homo sapiens
  siRNA target sequence for LOC51244 (NM_016474.3,624-642).
gctggagatggataaaaat

SEQ ID NO: 357647 - DNA, 19 bp, Homo sapiens
  siRNA target sequence for LOC51244 (NM_016474.3,627-645).
ggagatggataaaaatctt

SEQ ID NO: 357648 - DNA, 19 bp, Homo sapiens
  siRNA target sequence for LOC51244 (NM_016474.3,770-788).
ccgtacattatgaagacat

SEQ ID NO: 357649 - DNA, 19 bp, Homo sapiens
  siRNA target sequence for LOC51244 (NM_016474.3,771-789).
cgtacattatgaagacatt

SEQ ID NO: 357650 - DNA, 19 bp, Homo sapiens
  siRNA target sequence for LOC51244 (NM_016474.3,830-848).
cctttgcccgagacaaaga

SEQ ID NO: 357651 - DNA, 19 bp, Homo sapiens
  siRNA target sequence for LOC51244 (NM_016474.3,1164-1182).
gtgggaccgcggaaaagaa

SEQ ID NO: 357652 - DNA, 19 bp, Homo sapiens
  siRNA target sequence for LOC51244 (NM_016474.3,1167-1185).
ggaccgcggaaaagaattt

SEQ ID NO: 357653 - DNA, 19 bp, Homo sapiens
  siRNA target sequence for LOC51244 (NM_016474.3,1168-1186).
gaccgcggaaaagaatttt

SEQ ID NO: 357654 - DNA, 19 bp, Homo sapiens
  siRNA target sequence for LOC51244 (NM_016474.3,1171-1189).
cgcggaaaagaattttcct

SEQ ID NO: 357655 - DNA, 19 bp, Homo sapiens
  siRNA target sequence for LOC51244 (NM_016474.3,1362-1380).
cggacctagccctgaacat

SEQ ID NO: 357656 - DNA, 19 bp, Homo sapiens
  siRNA target sequence for LOC51244 (NM_016474.3,1418-1436).
cccccacagttactttcaa

SEQ ID NO: 357657 - DNA, 19 bp, Homo sapiens
  siRNA target sequence for LOC51244 (NM_016474.3,1422-1440).
cacagttactttcaaaact

SEQ ID NO: 357658 - DNA, 19 bp, Homo sapiens
  siRNA target sequence for LOC51244 (NM_016474.3,1449-1467).
catgatttcctattacaaa

SEQ ID NO: 357659 - DNA, 19 bp, Homo sapiens
  siRNA target sequence for C14orf100 (NM_016475.2,106-124).
cagcatgccttggacttta

SEQ ID NO: 357660 - DNA, 19 bp, Homo sapiens
  siRNA target sequence for C14orf100 (NM_016475.2,108-126).
gcatgccttggactttatt

SEQ ID NO: 357661 - DNA, 19 bp, Homo sapiens
  siRNA target sequence for C14orf100 (NM_016475.2,127-145).
gtgggaagaccctattatt

SEQ ID NO: 357662 - DNA, 19 bp, Homo sapiens
  siRNA target sequence for C14orf100 (NM_016475.2,202-220).
gaacgaatgcacagaaata

SEQ ID NO: 357663 - DNA, 19 bp, Homo sapiens
  siRNA target sequence for C14orf100 (NM_016475.2,280-298).
caatgcttcctctggtttt

SEQ ID NO: 357664 - DNA, 19 bp, Homo sapiens
  siRNA target sequence for C14orf100 (NM_016475.2,300-318).
cattggttcttcattgaat

SEQ ID NO: 357665 - DNA, 19 bp, Homo sapiens
  siRNA target sequence for C14orf100 (NM_016475.2,304-322).
ggttcttcattgaatggta

SEQ ID NO: 357666 - DNA, 19 bp, Homo sapiens
  siRNA target sequence for C14orf100 (NM_016475.2,320-338).
gtactcggggaaaaagagt

SEQ ID NO: 357667 - DNA, 19 bp, Homo sapiens
  siRNA target sequence for C14orf100 (NM_016475.2,343-361).
gcgcacttttccaacacat

SEQ ID NO: 357668 - DNA, 19 bp, Homo sapiens
  siRNA target sequence for C14orf100 (NM_016475.2,354-372).
caacacatcactgcattat

SEQ ID NO: 357669 - DNA, 19 bp, Homo sapiens
  siRNA target sequence for C14orf100 (NM_016475.2,379-397).
gcagcatggcagctattat

SEQ ID NO: 357670 - DNA, 19 bp, Homo sapiens
  siRNA target sequence for C14orf100 (NM_016475.2,417-435).
ccagttggtgttctttata

SEQ ID NO: 357671 - DNA, 19 bp, Homo sapiens
  siRNA target sequence for C14orf100 (NM_016475.2,418-436).
cagttggtgttctttatat

SEQ ID NO: 357672 - DNA, 19 bp, Homo sapiens
  siRNA target sequence for C14orf100 (NM_016475.2,423-441).
ggtgttctttatattcgtt

SEQ ID NO: 357673 - DNA, 19 bp, Homo sapiens
  siRNA target sequence for C14orf100 (NM_016475.2,438-456).
cgttcatgtcgagtattga

SEQ ID NO: 357674 - DNA, 19 bp, Homo sapiens
  siRNA target sequence for C14orf100 (NM_016475.2,439-457).
gttcatgtcgagtattgat

SEQ ID NO: 357675 - DNA, 19 bp, Homo sapiens
  siRNA target sequence for C14orf100 (NM_016475.2,448-466).
gagtattgatgctttctga

SEQ ID NO: 357676 - DNA, 19 bp, Homo sapiens
  siRNA target sequence for C14orf100 (NM_016475.2,465-483).
gactggtacacgatgcttt

SEQ ID NO: 357677 - DNA, 19 bp, Homo sapiens
  siRNA target sequence for C14orf100 (NM_016475.2,488-506).
cccaagtccagattacgtt

SEQ ID NO: 357678 - DNA, 19 bp, Homo sapiens
  siRNA target sequence for C14orf100 (NM_016475.2,489-507).
ccaagtccagattacgtta

SEQ ID NO: 357679 - DNA, 19 bp, Homo sapiens
  siRNA target sequence for C14orf100 (NM_016475.2,509-527).
cacagtacactgtactcat

SEQ ID NO: 357680 - DNA, 19 bp, Homo sapiens
  siRNA target sequence for C14orf100 (NM_016475.2,531-549).
gccgtctacccactatata

SEQ ID NO: 357681 - DNA, 19 bp, Homo sapiens
  siRNA target sequence for C14orf100 (NM_016475.2,539-557).
cccactatataccattgta

SEQ ID NO: 357682 - DNA, 19 bp, Homo sapiens
  siRNA target sequence for C14orf100 (NM_016475.2,540-558).
ccactatataccattgtat

SEQ ID NO: 357683 - DNA, 19 bp, Homo sapiens
  siRNA target sequence for C14orf100 (NM_016475.2,543-561).
ctatataccattgtattta

SEQ ID NO: 357684 - DNA, 19 bp, Homo sapiens
  siRNA target sequence for C14orf100 (NM_016475.2,569-587).
cgcattctgcttggtatta

SEQ ID NO: 357685 - DNA, 19 bp, Homo sapiens
  siRNA target sequence for C14orf100 (NM_016475.2,570-588).
gcattctgcttggtattaa

SEQ ID NO: 357686 - DNA, 19 bp, Homo sapiens
  siRNA target sequence for C14orf100 (NM_016475.2,628-646).
gtgggttagggaaatctga

SEQ ID NO: 357687 - DNA, 19 bp, Homo sapiens
  siRNA target sequence for C14orf100 (NM_016475.2,636-654).
gggaaatctgatcgattta

SEQ ID NO: 357688 - DNA, 19 bp, Homo sapiens
  siRNA target sequence for C14orf100 (NM_016475.2,637-655).
ggaaatctgatcgatttaa

SEQ ID NO: 357689 - DNA, 19 bp, Homo sapiens
  siRNA target sequence for C14orf100 (NM_016475.2,638-656).
gaaatctgatcgatttaaa

SEQ ID NO: 357690 - DNA, 19 bp, Homo sapiens
  siRNA target sequence for C14orf100 (NM_016475.2,645-663).
gatcgatttaaaagtattt

SEQ ID NO: 357691 - DNA, 19 bp, Homo sapiens
  siRNA target sequence for C14orf100 (NM_016475.2,712-730).
gtggaggccttttatatta

SEQ ID NO: 357692 - DNA, 19 bp, Homo sapiens
  siRNA target sequence for C14orf100 (NM_016475.2,734-752).
cttcccatacattatatta

SEQ ID NO: 357693 - DNA, 19 bp, Homo sapiens
  siRNA target sequence for C14orf100 (NM_016475.2,813-831).
gatcttctggtcagaaaga

SEQ ID NO: 357694 - DNA, 19 bp, Homo sapiens
  siRNA target sequence for C14orf100 (NM_016475.2,826-844).
gaaagaaaagacttattgt

SEQ ID NO: 357695 - DNA, 19 bp, Homo sapiens
  siRNA target sequence for C14orf100 (NM_016475.2,848-866).
cttcagccactggttactt

SEQ ID NO: 357696 - DNA, 19 bp, Homo sapiens
  siRNA target sequence for C14orf100 (NM_016475.2,892-910).
ccagagtggataaacttga

SEQ ID NO: 357697 - DNA, 19 bp, Homo sapiens
  siRNA target sequence for C14orf100 (NM_016475.2,940-958).
ctacaccagccctttttta

SEQ ID NO: 357698 - DNA, 19 bp, Homo sapiens
  siRNA target sequence for C14orf100 (NM_016475.2,946-964).
cagcccttttttacttgtt

SEQ ID NO: 357699 - DNA, 19 bp, Homo sapiens
  siRNA target sequence for C14orf100 (NM_016475.2,948-966).
gcccttttttacttgttca

SEQ ID NO: 357700 - DNA, 19 bp, Homo sapiens
  siRNA target sequence for C14orf100 (NM_016475.2,981-999).
gaaccttcaaggatactct

SEQ ID NO: 357701 - DNA, 19 bp, Homo sapiens
  siRNA target sequence for NIPA (NM_016478.2,162-180).
cccgcttgaggctctctat

SEQ ID NO: 357702 - DNA, 19 bp, Homo sapiens
  siRNA target sequence for NIPA (NM_016478.2,164-182).
cgcttgaggctctctatga

SEQ ID NO: 357703 - DNA, 19 bp, Homo sapiens
  siRNA target sequence for NIPA (NM_016478.2,214-232).
gccacatcccagtcagtta

SEQ ID NO: 357704 - DNA, 19 bp, Homo sapiens
  siRNA target sequence for NIPA (NM_016478.2,215-233).
ccacatcccagtcagttaa

SEQ ID NO: 357705 - DNA, 19 bp, Homo sapiens
  siRNA target sequence for NIPA (NM_016478.2,216-234).
cacatcccagtcagttaat

SEQ ID NO: 357706 - DNA, 19 bp, Homo sapiens
  siRNA target sequence for NIPA (NM_016478.2,349-367).
ccactcgtctgtgcaaaat

SEQ ID NO: 357707 - DNA, 19 bp, Homo sapiens
  siRNA target sequence for NIPA (NM_016478.2,350-368).
cactcgtctgtgcaaaata

SEQ ID NO: 357708 - DNA, 19 bp, Homo sapiens
  siRNA target sequence for NIPA (NM_016478.2,407-425).
ctagctgtcaagcttttct

SEQ ID NO: 357709 - DNA, 19 bp, Homo sapiens
  siRNA target sequence for NIPA (NM_016478.2,434-452).
gtttacaaccagcttttga

SEQ ID NO: 357710 - DNA, 19 bp, Homo sapiens
  siRNA target sequence for NIPA (NM_016478.2,508-526).
catgagaagttctgtttct

SEQ ID NO: 357711 - DNA, 19 bp, Homo sapiens
  siRNA target sequence for NIPA (NM_016478.2,567-585).
cctggatgagcctgctatt

SEQ ID NO: 357712 - DNA, 19 bp, Homo sapiens
  siRNA target sequence for NIPA (NM_016478.2,570-588).
ggatgagcctgctattctt

SEQ ID NO: 357713 - DNA, 19 bp, Homo sapiens
  siRNA target sequence for NIPA (NM_016478.2,574-592).
gagcctgctattcttgtta

SEQ ID NO: 357714 - DNA, 19 bp, Homo sapiens
  siRNA target sequence for NIPA (NM_016478.2,580-598).
gctattcttgttagtgaat

SEQ ID NO: 357715 - DNA, 19 bp, Homo sapiens
  siRNA target sequence for NIPA (NM_016478.2,593-611).
gtgaattcctagatcgttt

SEQ ID NO: 357716 - DNA, 19 bp, Homo sapiens
  siRNA target sequence for NIPA (NM_016478.2,654-672).
gccggaggacttgaaaact

SEQ ID NO: 357717 - DNA, 19 bp, Homo sapiens
  siRNA target sequence for NIPA (NM_016478.2,655-673).
ccggaggacttgaaaacta

SEQ ID NO: 357718 - DNA, 19 bp, Homo sapiens
  siRNA target sequence for NIPA (NM_016478.2,656-674).
cggaggacttgaaaactat

SEQ ID NO: 357719 - DNA, 19 bp, Homo sapiens
  siRNA target sequence for NIPA (NM_016478.2,786-804).
ccacgtcactgcctgtatt

SEQ ID NO: 357720 - DNA, 19 bp, Homo sapiens
  siRNA target sequence for NIPA (NM_016478.2,790-808).
gtcactgcctgtattctct

SEQ ID NO: 357721 - DNA, 19 bp, Homo sapiens
  siRNA target sequence for NIPA (NM_016478.2,899-917).
ggggcttccagcagattga

SEQ ID NO: 357722 - DNA, 19 bp, Homo sapiens
  siRNA target sequence for NIPA (NM_016478.2,901-919).
ggcttccagcagattgaat

SEQ ID NO: 357723 - DNA, 19 bp, Homo sapiens
  siRNA target sequence for NIPA (NM_016478.2,1337-1355).
ggtgcccttgggtgaatat

SEQ ID NO: 357724 - DNA, 19 bp, Homo sapiens
  siRNA target sequence for NIPA (NM_016478.2,1341-1359).
cccttgggtgaatatcaca

SEQ ID NO: 357725 - DNA, 19 bp, Homo sapiens
  siRNA target sequence for NIPA (NM_016478.2,1447-1465).
ctcttggcgcacaaacagt

SEQ ID NO: 357726 - DNA, 19 bp, Homo sapiens
  siRNA target sequence for NIPA (NM_016478.2,1514-1532).
ggaaagtattccgaatatt

SEQ ID NO: 357727 - DNA, 19 bp, Homo sapiens
  siRNA target sequence for PAIP2 (NM_016480.2,175-193).
ctagcccaagcatcatcaa

SEQ ID NO: 357728 - DNA, 19 bp, Homo sapiens
  siRNA target sequence for PAIP2 (NM_016480.2,178-196).
gcccaagcatcatcaatga

SEQ ID NO: 357729 - DNA, 19 bp, Homo sapiens
  siRNA target sequence for PAIP2 (NM_016480.2,179-197).
cccaagcatcatcaatgaa

SEQ ID NO: 357730 - DNA, 19 bp, Homo sapiens
  siRNA target sequence for PAIP2 (NM_016480.2,203-221).
gattattaacggtcattct

SEQ ID NO: 357731 - DNA, 19 bp, Homo sapiens
  siRNA target sequence for PAIP2 (NM_016480.2,359-377).
gcatgaatggtttattcca

SEQ ID NO: 357732 - DNA, 19 bp, Homo sapiens
  siRNA target sequence for PAIP2 (NM_016480.2,382-400).
gagatctcccacaaactat

SEQ ID NO: 357733 - DNA, 19 bp, Homo sapiens
  siRNA target sequence for PAIP2 (NM_016480.2,417-435).
cagtttaatgaccttgtta

SEQ ID NO: 357734 - DNA, 19 bp, Homo sapiens
  siRNA target sequence for PAIP2 (NM_016480.2,467-485).
ggtcaagagcaatctgaat

SEQ ID NO: 357735 - DNA, 19 bp, Homo sapiens
  siRNA target sequence for PAIP2 (NM_016480.2,510-528).
ggggtgaagtacggaaata

SEQ ID NO: 357736 - DNA, 19 bp, Homo sapiens
  siRNA target sequence for PAIP2 (NM_016480.2,511-529).
gggtgaagtacggaaatat

SEQ ID NO: 357737 - DNA, 19 bp, Homo sapiens
  siRNA target sequence for PAIP2 (NM_016480.2,512-530).
ggtgaagtacggaaatatt

SEQ ID NO: 357738 - DNA, 19 bp, Homo sapiens
  siRNA target sequence for PAIP2 (NM_016480.2,513-531).
gtgaagtacggaaatattt

SEQ ID NO: 357739 - DNA, 19 bp, Homo sapiens
  siRNA target sequence for LOC51759 (NM_016482.2,351-369).
gcacctggggacatcgttt

SEQ ID NO: 357740 - DNA, 19 bp, Homo sapiens
  siRNA target sequence for LOC51759 (NM_016482.2,352-370).
cacctggggacatcgtttt

SEQ ID NO: 357741 - DNA, 19 bp, Homo sapiens
  siRNA target sequence for LOC51759 (NM_016482.2,354-372).
cctggggacatcgttttct

SEQ ID NO: 357742 - DNA, 19 bp, Homo sapiens
  siRNA target sequence for LOC51759 (NM_016482.2,365-383).
cgttttctgcagaaaccaa

SEQ ID NO: 357743 - DNA, 19 bp, Homo sapiens
  siRNA target sequence for LOC51759 (NM_016482.2,400-418).
gcagacatgatgaagtaca

SEQ ID NO: 357744 - DNA, 19 bp, Homo sapiens
  siRNA target sequence for LOC51759 (NM_016482.2,457-475).
catgaggaacagaaagtta

SEQ ID NO: 357745 - DNA, 19 bp, Homo sapiens
  siRNA target sequence for LOC51759 (NM_016482.2,468-486).
gaaagttaagccaaagaat

SEQ ID NO: 357746 - DNA, 19 bp, Homo sapiens
  siRNA target sequence for LOC51759 (NM_016482.2,492-510).
ggactgtctttatgaactt

SEQ ID NO: 357747 - DNA, 19 bp, Homo sapiens
  siRNA target sequence for LOC51759 (NM_016482.2,594-612).
cctgggcatcgatgctaaa

SEQ ID NO: 357748 - DNA, 19 bp, Homo sapiens
  siRNA target sequence for LOC51759 (NM_016482.2,595-613).
ctgggcatcgatgctaaaa

SEQ ID NO: 357749 - DNA, 19 bp, Homo sapiens
  siRNA target sequence for LOC51759 (NM_016482.2,597-615).
gggcatcgatgctaaaata

SEQ ID NO: 357750 - DNA, 19 bp, Homo sapiens
  siRNA target sequence for LOC51759 (NM_016482.2,598-616).
ggcatcgatgctaaaataa

SEQ ID NO: 357751 - DNA, 19 bp, Homo sapiens
  siRNA target sequence for LOC51759 (NM_016482.2,599-617).
gcatcgatgctaaaataaa

SEQ ID NO: 357752 - DNA, 19 bp, Homo sapiens
  siRNA target sequence for LOC51759 (NM_016482.2,732-750).
gcacaacagattttatcat

SEQ ID NO: 357753 - DNA, 19 bp, Homo sapiens
  siRNA target sequence for PHF7 (NM_016483.4,925-943).
ctggggatcccgaaaaatt

SEQ ID NO: 357754 - DNA, 19 bp, Homo sapiens
  siRNA target sequence for PHF7 (NM_016483.4,965-983).
caatatcagcgtgcattat

SEQ ID NO: 357755 - DNA, 19 bp, Homo sapiens
  siRNA target sequence for PHF7 (NM_016483.4,971-989).
cagcgtgcattatttctgt

SEQ ID NO: 357756 - DNA, 19 bp, Homo sapiens
  siRNA target sequence for PHF7 (NM_016483.4,986-1004).
ctgtcttatcttatctagt

SEQ ID NO: 357757 - DNA, 19 bp, Homo sapiens
  siRNA target sequence for PHF7 (NM_016483.4,988-1006).
gtcttatcttatctagtaa

SEQ ID NO: 357758 - DNA, 19 bp, Homo sapiens
  siRNA target sequence for PHF7 (NM_016483.4,1186-1204).
ggggttgcctttcacaatt

SEQ ID NO: 357759 - DNA, 19 bp, Homo sapiens
  siRNA target sequence for PHF7 (NM_016483.4,1278-1296).
gaaagctgcatcttatgtt

SEQ ID NO: 357760 - DNA, 19 bp, Homo sapiens
  siRNA target sequence for PHF7 (NM_016483.4,1334-1352).
gagcccgtgttgtagtcaa

SEQ ID NO: 357761 - DNA, 19 bp, Homo sapiens
  siRNA target sequence for PHF7 (NM_016483.4,1364-1382).
ccgcaagtgcatacagaaa

SEQ ID NO: 357762 - DNA, 19 bp, Homo sapiens
  siRNA target sequence for PHF7 (NM_016483.4,1365-1383).
cgcaagtgcatacagaaat

SEQ ID NO: 357763 - DNA, 19 bp, Homo sapiens
  siRNA target sequence for PHF7 (NM_016483.4,1388-1406).
ccacacatcagcaaagcat

SEQ ID NO: 357764 - DNA, 19 bp, Homo sapiens
  siRNA target sequence for PHF7 (NM_016483.4,1426-1444).
gtaacaatcgaaaagagtt

SEQ ID NO: 357765 - DNA, 19 bp, Homo sapiens
  siRNA target sequence for PHF7 (NM_016483.4,1513-1531).
gggctttctcagacttata

SEQ ID NO: 357766 - DNA, 19 bp, Homo sapiens
  siRNA target sequence for PHF7 (NM_016483.4,1555-1573).
cccccatctgtctgtatga

SEQ ID NO: 357767 - DNA, 19 bp, Homo sapiens
  siRNA target sequence for PHF7 (NM_016483.4,1556-1574).
ccccatctgtctgtatgaa

SEQ ID NO: 357768 - DNA, 19 bp, Homo sapiens
  siRNA target sequence for PHF7 (NM_016483.4,1664-1682).
ctctcttagatctaacagt

SEQ ID NO: 357769 - DNA, 19 bp, Homo sapiens
  siRNA target sequence for PHF7 (NM_016483.4,1725-1743).
gactacatacctgaaaact

SEQ ID NO: 357770 - DNA, 19 bp, Homo sapiens
  siRNA target sequence for PHF7 (NM_016483.4,1914-1932).
ggtgtcagaatcactaaca

SEQ ID NO: 357771 - DNA, 19 bp, Homo sapiens
  siRNA target sequence for C6orf55 (NM_016485.3,41-59).
cgctccccgcacagttcaa

SEQ ID NO: 357772 - DNA, 19 bp, Homo sapiens
  siRNA target sequence for C6orf55 (NM_016485.3,43-61).
ctccccgcacagttcaaga

SEQ ID NO: 357773 - DNA, 19 bp, Homo sapiens
  siRNA target sequence for C6orf55 (NM_016485.3,109-127).
cctgtggtggcttattact

SEQ ID NO: 357774 - DNA, 19 bp, Homo sapiens
  siRNA target sequence for C6orf55 (NM_016485.3,117-135).
ggcttattactgtcgttta

SEQ ID NO: 357775 - DNA, 19 bp, Homo sapiens
  siRNA target sequence for C6orf55 (NM_016485.3,118-136).
gcttattactgtcgtttat

SEQ ID NO: 357776 - DNA, 19 bp, Homo sapiens
  siRNA target sequence for C6orf55 (NM_016485.3,119-137).
cttattactgtcgtttata

SEQ ID NO: 357777 - DNA, 19 bp, Homo sapiens
  siRNA target sequence for C6orf55 (NM_016485.3,151-169).
ggaatgaagatcgatagta

SEQ ID NO: 357778 - DNA, 19 bp, Homo sapiens
  siRNA target sequence for C6orf55 (NM_016485.3,152-170).
gaatgaagatcgatagtaa

SEQ ID NO: 357779 - DNA, 19 bp, Homo sapiens
  siRNA target sequence for C6orf55 (NM_016485.3,173-191).
ctcctgaatgtcgcaaatt

SEQ ID NO: 357780 - DNA, 19 bp, Homo sapiens
  siRNA target sequence for C6orf55 (NM_016485.3,175-193).
cctgaatgtcgcaaatttt

SEQ ID NO: 357781 - DNA, 19 bp, Homo sapiens
  siRNA target sequence for C6orf55 (NM_016485.3,178-196).
gaatgtcgcaaatttttat

SEQ ID NO: 357782 - DNA, 19 bp, Homo sapiens
  siRNA target sequence for C6orf55 (NM_016485.3,184-202).
cgcaaatttttatcaaagt

SEQ ID NO: 357783 - DNA, 19 bp, Homo sapiens
  siRNA target sequence for C6orf55 (NM_016485.3,201-219).
gttaatggatcagttagaa

SEQ ID NO: 357784 - DNA, 19 bp, Homo sapiens
  siRNA target sequence for C6orf55 (NM_016485.3,251-269).
ctattactcaagaaatagt

SEQ ID NO: 357785 - DNA, 19 bp, Homo sapiens
  siRNA target sequence for C6orf55 (NM_016485.3,331-349).
cgtgctggacgatttcaca

SEQ ID NO: 357786 - DNA, 19 bp, Homo sapiens
  siRNA target sequence for C6orf55 (NM_016485.3,332-350).
gtgctggacgatttcacaa

SEQ ID NO: 357787 - DNA, 19 bp, Homo sapiens
  siRNA target sequence for C6orf55 (NM_016485.3,337-355).
ggacgatttcacaaaaaca

SEQ ID NO: 357788 - DNA, 19 bp, Homo sapiens
  siRNA target sequence for C6orf55 (NM_016485.3,338-356).
gacgatttcacaaaaacat

SEQ ID NO: 357789 - DNA, 19 bp, Homo sapiens
  siRNA target sequence for C6orf55 (NM_016485.3,340-358).
cgatttcacaaaaacatga

SEQ ID NO: 357790 - DNA, 19 bp, Homo sapiens
  siRNA target sequence for C6orf55 (NM_016485.3,341-359).
gatttcacaaaaacatgat

SEQ ID NO: 357791 - DNA, 19 bp, Homo sapiens
  siRNA target sequence for C6orf55 (NM_016485.3,354-372).
catgatcaagtccttctat

SEQ ID NO: 357792 - DNA, 19 bp, Homo sapiens
  siRNA target sequence for C6orf55 (NM_016485.3,387-405).
gatagatgtcataacagta

SEQ ID NO: 357793 - DNA, 19 bp, Homo sapiens
  siRNA target sequence for C6orf55 (NM_016485.3,449-467).
ccagatggaaggcaacata

SEQ ID NO: 357794 - DNA, 19 bp, Homo sapiens
  siRNA target sequence for C6orf55 (NM_016485.3,459-477).
ggcaacatacatccataat

SEQ ID NO: 357795 - DNA, 19 bp, Homo sapiens
  siRNA target sequence for C6orf55 (NM_016485.3,460-478).
gcaacatacatccataatt

SEQ ID NO: 357796 - DNA, 19 bp, Homo sapiens
  siRNA target sequence for C6orf55 (NM_016485.3,627-645).
gccatcaggcaactatact

SEQ ID NO: 357797 - DNA, 19 bp, Homo sapiens
  siRNA target sequence for C6orf55 (NM_016485.3,707-725).
gcacaggtgtagcaagtaa

SEQ ID NO: 357798 - DNA, 19 bp, Homo sapiens
  siRNA target sequence for C6orf55 (NM_016485.3,712-730).
ggtgtagcaagtaatacta

SEQ ID NO: 357799 - DNA, 19 bp, Homo sapiens
  siRNA target sequence for C6orf55 (NM_016485.3,713-731).
gtgtagcaagtaatactat

SEQ ID NO: 357800 - DNA, 19 bp, Homo sapiens
  siRNA target sequence for C6orf55 (NM_016485.3,747-765).
gactatacctgccattgat

SEQ ID NO: 357801 - DNA, 19 bp, Homo sapiens
  siRNA target sequence for C6orf55 (NM_016485.3,758-776).
ccattgatcccgcactttt

SEQ ID NO: 357802 - DNA, 19 bp, Homo sapiens
  siRNA target sequence for C6orf55 (NM_016485.3,763-781).
gatcccgcacttttcaata

SEQ ID NO: 357803 - DNA, 19 bp, Homo sapiens
  siRNA target sequence for C6orf55 (NM_016485.3,767-785).
ccgcacttttcaatacaat

SEQ ID NO: 357804 - DNA, 19 bp, Homo sapiens
  siRNA target sequence for C6orf55 (NM_016485.3,860-878).
ctttgcagtatgaagatgt

SEQ ID NO: 357805 - DNA, 19 bp, Homo sapiens
  siRNA target sequence for C6orf55 (NM_016485.3,882-900).
cactgctgtccagaatcta

SEQ ID NO: 357806 - DNA, 19 bp, Homo sapiens
  siRNA target sequence for LOC51249 (NM_016486.2,690-708).
catggtttgccttccttat

SEQ ID NO: 357807 - DNA, 19 bp, Homo sapiens
  siRNA target sequence for LOC51249 (NM_016486.2,884-902).
ccagaaaaaggacataaga

SEQ ID NO: 357808 - DNA, 19 bp, Homo sapiens
  siRNA target sequence for C6orf203 (NM_016487.2,146-164).
ccgagggacaccttcatca

SEQ ID NO: 357809 - DNA, 19 bp, Homo sapiens
  siRNA target sequence for C6orf203 (NM_016487.2,147-165).
cgagggacaccttcatcat

SEQ ID NO: 357810 - DNA, 19 bp, Homo sapiens
  siRNA target sequence for C6orf203 (NM_016487.2,148-166).
gagggacaccttcatcata

SEQ ID NO: 357811 - DNA, 19 bp, Homo sapiens
  siRNA target sequence for C6orf203 (NM_016487.2,152-170).
gacaccttcatcatacaaa

SEQ ID NO: 357812 - DNA, 19 bp, Homo sapiens
  siRNA target sequence for C6orf203 (NM_016487.2,178-196).
cttcctggaatcgatactt

SEQ ID NO: 357813 - DNA, 19 bp, Homo sapiens
  siRNA target sequence for C6orf203 (NM_016487.2,181-199).
cctggaatcgatacttgta

SEQ ID NO: 357814 - DNA, 19 bp, Homo sapiens
  siRNA target sequence for C6orf203 (NM_016487.2,182-200).
ctggaatcgatacttgtat

SEQ ID NO: 357815 - DNA, 19 bp, Homo sapiens
  siRNA target sequence for C6orf203 (NM_016487.2,184-202).
ggaatcgatacttgtattt

SEQ ID NO: 357816 - DNA, 19 bp, Homo sapiens
  siRNA target sequence for C6orf203 (NM_016487.2,185-203).
gaatcgatacttgtatttt

SEQ ID NO: 357817 - DNA, 19 bp, Homo sapiens
  siRNA target sequence for C6orf203 (NM_016487.2,212-230).
caagttacgtgcaccaaat

SEQ ID NO: 357818 - DNA, 19 bp, Homo sapiens
  siRNA target sequence for C6orf203 (NM_016487.2,215-233).
gttacgtgcaccaaattat

SEQ ID NO: 357819 - DNA, 19 bp, Homo sapiens
  siRNA target sequence for C6orf203 (NM_016487.2,265-283).
gactcccagggcttttact

SEQ ID NO: 357820 - DNA, 19 bp, Homo sapiens
  siRNA target sequence for C6orf203 (NM_016487.2,310-328).
ccgtaagactcaaaagtaa

SEQ ID NO: 357821 - DNA, 19 bp, Homo sapiens
  siRNA target sequence for C6orf203 (NM_016487.2,325-343).
gtaatataaggtctacaaa

SEQ ID NO: 357822 - DNA, 19 bp, Homo sapiens
  siRNA target sequence for C6orf203 (NM_016487.2,334-352).
ggtctacaaaatctactaa

SEQ ID NO: 357823 - DNA, 19 bp, Homo sapiens
  siRNA target sequence for C6orf203 (NM_016487.2,441-459).
gatcctactgtagtcaaaa

SEQ ID NO: 357824 - DNA, 19 bp, Homo sapiens
  siRNA target sequence for C6orf203 (NM_016487.2,444-462).
cctactgtagtcaaaaact

SEQ ID NO: 357825 - DNA, 19 bp, Homo sapiens
  siRNA target sequence for C6orf203 (NM_016487.2,490-508).
cttttcggtatgatgttgt

SEQ ID NO: 357826 - DNA, 19 bp, Homo sapiens
  siRNA target sequence for C6orf203 (NM_016487.2,510-528).
ctgaagacggggctagata

SEQ ID NO: 357827 - DNA, 19 bp, Homo sapiens
  siRNA target sequence for C6orf203 (NM_016487.2,512-530).
gaagacggggctagatatt

SEQ ID NO: 357828 - DNA, 19 bp, Homo sapiens
  siRNA target sequence for C6orf203 (NM_016487.2,738-756).
gtgttacggcggtggaaaa

SEQ ID NO: 357829 - DNA, 19 bp, Homo sapiens
  siRNA target sequence for C6orf203 (NM_016487.2,740-758).
gttacggcggtggaaaagt

SEQ ID NO: 357830 - DNA, 19 bp, Homo sapiens
  siRNA target sequence for C6orf203 (NM_016487.2,744-762).
cggcggtggaaaagtttaa

SEQ ID NO: 357831 - DNA, 19 bp, Homo sapiens
  siRNA target sequence for C6orf203 (NM_016487.2,747-765).
cggtggaaaagtttaaagt

SEQ ID NO: 357832 - DNA, 19 bp, Homo sapiens
  siRNA target sequence for NT5C3 (NM_016489.10,444-462).
ctaaacttaaagaaattgt

SEQ ID NO: 357833 - DNA, 19 bp, Homo sapiens
  siRNA target sequence for NT5C3 (NM_016489.10,552-570).
ctggaatcggcgatgtact

SEQ ID NO: 357834 - DNA, 19 bp, Homo sapiens
  siRNA target sequence for NT5C3 (NM_016489.10,555-573).
gaatcggcgatgtactaga

SEQ ID NO: 357835 - DNA, 19 bp, Homo sapiens
  siRNA target sequence for NT5C3 (NM_016489.10,650-668).
ggggtgctcaaaggattta

SEQ ID NO: 357836 - DNA, 19 bp, Homo sapiens
  siRNA target sequence for NT5C3 (NM_016489.10,651-669).
gggtgctcaaaggatttaa

SEQ ID NO: 357837 - DNA, 19 bp, Homo sapiens
  siRNA target sequence for NT5C3 (NM_016489.10,672-690).
gagaactaattcatgtatt

SEQ ID NO: 357838 - DNA, 19 bp, Homo sapiens
  siRNA target sequence for NT5C3 (NM_016489.10,705-723).
gtgccttgaggaatacaga

SEQ ID NO: 357839 - DNA, 19 bp, Homo sapiens
  siRNA target sequence for NT5C3 (NM_016489.10,709-727).
cttgaggaatacagaatat

SEQ ID NO: 357840 - DNA, 19 bp, Homo sapiens
  siRNA target sequence for NT5C3 (NM_016489.10,734-752).
caactaaaagacaatagta

SEQ ID NO: 357841 - DNA, 19 bp, Homo sapiens
  siRNA target sequence for NT5C3 (NM_016489.10,807-825).
ccaatgttgagcacattct

SEQ ID NO: 357842 - DNA, 19 bp, Homo sapiens
  siRNA target sequence for NT5C3 (NM_016489.10,824-842).
ctgaaaattggatatctaa

SEQ ID NO: 357843 - DNA, 19 bp, Homo sapiens
  siRNA target sequence for NT5C3 (NM_016489.10,871-889).
gtacatggactcttatgat

SEQ ID NO: 357844 - DNA, 19 bp, Homo sapiens
  siRNA target sequence for NT5C3 (NM_016489.10,877-895).
ggactcttatgatattgtt

SEQ ID NO: 357845 - DNA, 19 bp, Homo sapiens
  siRNA target sequence for NT5C3 (NM_016489.10,917-935).
gaagtagccaactctattt

SEQ ID NO: 357846 - DNA, 19 bp, Homo sapiens
  siRNA target sequence for LOC51252 (NM_016490.3,222-240).
catctctcaggcaatacct

SEQ ID NO: 357847 - DNA, 19 bp, Homo sapiens
  siRNA target sequence for LOC51255 (NM_016494.2,35-53).
cgtcctatttcgatgaaca

SEQ ID NO: 357848 - DNA, 19 bp, Homo sapiens
  siRNA target sequence for LOC51255 (NM_016494.2,106-124).
gagctcgcaaggtcacttt

SEQ ID NO: 357849 - DNA, 19 bp, Homo sapiens
  siRNA target sequence for LOC51255 (NM_016494.2,109-127).
ctcgcaaggtcacttttca

SEQ ID NO: 357850 - DNA, 19 bp, Homo sapiens
  siRNA target sequence for LOC51255 (NM_016494.2,111-129).
cgcaaggtcacttttcaat

SEQ ID NO: 357851 - DNA, 19 bp, Homo sapiens
  siRNA target sequence for LOC51255 (NM_016494.2,147-165).
cttggggttggtagtagat

SEQ ID NO: 357852 - DNA, 19 bp, Homo sapiens
  siRNA target sequence for LOC51255 (NM_016494.2,257-275).
gccccgtgtgtcttttgga

SEQ ID NO: 357853 - DNA, 19 bp, Homo sapiens
  siRNA target sequence for LOC51255 (NM_016494.2,258-276).
ccccgtgtgtcttttggaa

SEQ ID NO: 357854 - DNA, 19 bp, Homo sapiens
  siRNA target sequence for LOC51255 (NM_016494.2,259-277).
cccgtgtgtcttttggaat

SEQ ID NO: 357855 - DNA, 19 bp, Homo sapiens
  siRNA target sequence for LOC51255 (NM_016494.2,260-278).
ccgtgtgtcttttggaatt

SEQ ID NO: 357856 - DNA, 19 bp, Homo sapiens
  siRNA target sequence for LOC51255 (NM_016494.2,393-411).
cactgatgacgacacttat

SEQ ID NO: 357857 - DNA, 19 bp, Homo sapiens
  siRNA target sequence for TBC1D7 (NM_016495.2,100-118).
gaggactctcagagaaact

SEQ ID NO: 357858 - DNA, 19 bp, Homo sapiens
  siRNA target sequence for TBC1D7 (NM_016495.2,111-129).
gagaaactttcgttcagta

SEQ ID NO: 357859 - DNA, 19 bp, Homo sapiens
  siRNA target sequence for TBC1D7 (NM_016495.2,113-131).
gaaactttcgttcagtata

SEQ ID NO: 357860 - DNA, 19 bp, Homo sapiens
  siRNA target sequence for TBC1D7 (NM_016495.2,121-139).
cgttcagtatattatgaga

SEQ ID NO: 357861 - DNA, 19 bp, Homo sapiens
  siRNA target sequence for TBC1D7 (NM_016495.2,198-216).
ccgtctggatactgagaaa

SEQ ID NO: 357862 - DNA, 19 bp, Homo sapiens
  siRNA target sequence for TBC1D7 (NM_016495.2,204-222).
ggatactgagaaactttgt

SEQ ID NO: 357863 - DNA, 19 bp, Homo sapiens
  siRNA target sequence for TBC1D7 (NM_016495.2,211-229).
gagaaactttgtactttta

SEQ ID NO: 357864 - DNA, 19 bp, Homo sapiens
  siRNA target sequence for TBC1D7 (NM_016495.2,252-270).
catgtaccgtgcattggta

SEQ ID NO: 357865 - DNA, 19 bp, Homo sapiens
  siRNA target sequence for TBC1D7 (NM_016495.2,272-290).
ggaaggtgcttctaggaat

SEQ ID NO: 357866 - DNA, 19 bp, Homo sapiens
  siRNA target sequence for TBC1D7 (NM_016495.2,311-329).
cccatgccaaggtgatgat

SEQ ID NO: 357867 - DNA, 19 bp, Homo sapiens
  siRNA target sequence for TBC1D7 (NM_016495.2,369-387).
gaaagtcgttcgctttgtt

SEQ ID NO: 357868 - DNA, 19 bp, Homo sapiens
  siRNA target sequence for TBC1D7 (NM_016495.2,375-393).
cgttcgctttgttagtgat

SEQ ID NO: 357869 - DNA, 19 bp, Homo sapiens
  siRNA target sequence for TBC1D7 (NM_016495.2,532-550).
gatagtgtcgactgttact

SEQ ID NO: 357870 - DNA, 19 bp, Homo sapiens
  siRNA target sequence for TBC1D7 (NM_016495.2,559-577).
cgacgctttgtgaaccaat

SEQ ID NO: 357871 - DNA, 19 bp, Homo sapiens
  siRNA target sequence for TBC1D7 (NM_016495.2,568-586).
gtgaaccaattaaatacca

SEQ ID NO: 357872 - DNA, 19 bp, Homo sapiens
  siRNA target sequence for TBC1D7 (NM_016495.2,584-602).
ccaagtaccgggattcctt

SEQ ID NO: 357873 - DNA, 19 bp, Homo sapiens
  siRNA target sequence for TBC1D7 (NM_016495.2,612-630).
gccaaaagcgtttgaacaa

SEQ ID NO: 357874 - DNA, 19 bp, Homo sapiens
  siRNA target sequence for TBC1D7 (NM_016495.2,614-632).
caaaagcgtttgaacaata

SEQ ID NO: 357875 - DNA, 19 bp, Homo sapiens
  siRNA target sequence for TBC1D7 (NM_016495.2,619-637).
gcgtttgaacaatacttga

SEQ ID NO: 357876 - DNA, 19 bp, Homo sapiens
  siRNA target sequence for TBC1D7 (NM_016495.2,687-705).
gcccaaacttccttatgat

SEQ ID NO: 357877 - DNA, 19 bp, Homo sapiens
  siRNA target sequence for TBC1D7 (NM_016495.2,719-737).
ggtgctttgcgggatgttt

SEQ ID NO: 357878 - DNA, 19 bp, Homo sapiens
  siRNA target sequence for TBC1D7 (NM_016495.2,739-757).
cctgaatccagtttacaga

SEQ ID NO: 357879 - DNA, 19 bp, Homo sapiens
  siRNA target sequence for TBC1D7 (NM_016495.2,775-793).
gtgagtggatcctgtaaga

SEQ ID NO: 357880 - DNA, 19 bp, Homo sapiens
  siRNA target sequence for TBC1D7 (NM_016495.2,786-804).
ctgtaagatcctagttttt

SEQ ID NO: 357881 - DNA, 19 bp, Homo sapiens
  siRNA target sequence for TBC1D7 (NM_016495.2,788-806).
gtaagatcctagtttttgt

SEQ ID NO: 357882 - DNA, 19 bp, Homo sapiens
  siRNA target sequence for TBC1D7 (NM_016495.2,805-823).
gtagctgtcgaaattttat

SEQ ID NO: 357883 - DNA, 19 bp, Homo sapiens
  siRNA target sequence for TBC1D7 (NM_016495.2,931-949).
gacttgtggcacaaacact

SEQ ID NO: 357884 - DNA, 19 bp, Homo sapiens
  siRNA target sequence for TBC1D7 (NM_016495.2,952-970).
gggaccccggtccattcaa

SEQ ID NO: 357885 - DNA, 19 bp, Homo sapiens
  siRNA target sequence for HSPC242 (NM_016498.2,378-396).
ggcggatgccattgacaaa

SEQ ID NO: 357886 - DNA, 19 bp, Homo sapiens
  siRNA target sequence for HSPC242 (NM_016498.2,612-630).
gttgaccatccccatcatt

SEQ ID NO: 357887 - DNA, 19 bp, Homo sapiens
  siRNA target sequence for MGC:13379 (NM_016499.2,341-359).
gccatgatggcctcctatt

SEQ ID NO: 357888 - DNA, 19 bp, Homo sapiens
  siRNA target sequence for MGC:13379 (NM_016499.2,342-360).
ccatgatggcctcctatta

SEQ ID NO: 357889 - DNA, 19 bp, Homo sapiens
  siRNA target sequence for MGC874 (NM_016500.3,292-310).
gcaacgatcctgacattga

SEQ ID NO: 357890 - DNA, 19 bp, Homo sapiens
  siRNA target sequence for MGC874 (NM_016500.3,445-463).
cccttaggatagatgtgtt

SEQ ID NO: 357891 - DNA, 19 bp, Homo sapiens
  siRNA target sequence for MGC874 (NM_016500.3,563-581).
gctgcgactagattgttct

SEQ ID NO: 357892 - DNA, 19 bp, Homo sapiens
  siRNA target sequence for MGC874 (NM_016500.3,612-630).
gcccccaggatacaattct

SEQ ID NO: 357893 - DNA, 19 bp, Homo sapiens
  siRNA target sequence for MGC874 (NM_016500.3,613-631).
cccccaggatacaattctt

SEQ ID NO: 357894 - DNA, 19 bp, Homo sapiens
  siRNA target sequence for MGC874 (NM_016500.3,614-632).
ccccaggatacaattcttt

SEQ ID NO: 357895 - DNA, 19 bp, Homo sapiens
  siRNA target sequence for MGC874 (NM_016500.3,649-667).
ggaaccgggaaggctataa

SEQ ID NO: 357896 - DNA, 19 bp, Homo sapiens
  siRNA target sequence for MGC874 (NM_016500.3,662-680).
ctataacaaagctgtttat

SEQ ID NO: 357897 - DNA, 19 bp, Homo sapiens
  siRNA target sequence for FLJ10597 (NM_016501.2,398-416).
cggtgttcagtggtgtata

SEQ ID NO: 357898 - DNA, 19 bp, Homo sapiens
  siRNA target sequence for FLJ10597 (NM_016501.2,457-475).
gatcctctccttagtctta

SEQ ID NO: 357899 - DNA, 19 bp, Homo sapiens
  siRNA target sequence for FLJ10597 (NM_016501.2,476-494).
gctcatggggctctttata

SEQ ID NO: 357900 - DNA, 19 bp, Homo sapiens
  siRNA target sequence for FLJ10597 (NM_016501.2,477-495).
ctcatggggctctttataa

SEQ ID NO: 357901 - DNA, 19 bp, Homo sapiens
  siRNA target sequence for VPS54 (NM_016516.1,90-108).
gtagatccgtcaaaacaca

SEQ ID NO: 357902 - DNA, 19 bp, Homo sapiens
  siRNA target sequence for VPS54 (NM_016516.1,150-168).
cccacaggtgattcacata

SEQ ID NO: 357903 - DNA, 19 bp, Homo sapiens
  siRNA target sequence for VPS54 (NM_016516.1,152-170).
cacaggtgattcacatagt

SEQ ID NO: 357904 - DNA, 19 bp, Homo sapiens
  siRNA target sequence for VPS54 (NM_016516.1,156-174).
ggtgattcacatagtttat

SEQ ID NO: 357905 - DNA, 19 bp, Homo sapiens
  siRNA target sequence for VPS54 (NM_016516.1,157-175).
gtgattcacatagtttata

SEQ ID NO: 357906 - DNA, 19 bp, Homo sapiens
  siRNA target sequence for VPS54 (NM_016516.1,177-195).
gttgccccatctctagtta

SEQ ID NO: 357907 - DNA, 19 bp, Homo sapiens
  siRNA target sequence for VPS54 (NM_016516.1,187-205).
ctctagttacagatcaaca

SEQ ID NO: 357908 - DNA, 19 bp, Homo sapiens
  siRNA target sequence for VPS54 (NM_016516.1,212-230).
gactgtatatcattccaaa

SEQ ID NO: 357909 - DNA, 19 bp, Homo sapiens
  siRNA target sequence for VPS54 (NM_016516.1,239-257).
cccagcagcattaaacgat

SEQ ID NO: 357910 - DNA, 19 bp, Homo sapiens
  siRNA target sequence for VPS54 (NM_016516.1,247-265).
cattaaacgatcctagatt

SEQ ID NO: 357911 - DNA, 19 bp, Homo sapiens
  siRNA target sequence for VPS54 (NM_016516.1,254-272).
cgatcctagattagcaaaa

SEQ ID NO: 357912 - DNA, 19 bp, Homo sapiens
  siRNA target sequence for VPS54 (NM_016516.1,255-273).
gatcctagattagcaaaaa

SEQ ID NO: 357913 - DNA, 19 bp, Homo sapiens
  siRNA target sequence for VPS54 (NM_016516.1,298-316).
catggggattggactttgt

SEQ ID NO: 357914 - DNA, 19 bp, Homo sapiens
  siRNA target sequence for VPS54 (NM_016516.1,324-342).
gaagtcataccttcattct

SEQ ID NO: 357915 - DNA, 19 bp, Homo sapiens
  siRNA target sequence for VPS54 (NM_016516.1,358-376).
gcaaggaacattttacagt

SEQ ID NO: 357916 - DNA, 19 bp, Homo sapiens
  siRNA target sequence for VPS54 (NM_016516.1,438-456).
cctaaagataccttcgaaa

SEQ ID NO: 357917 - DNA, 19 bp, Homo sapiens
  siRNA target sequence for VPS54 (NM_016516.1,449-467).
cttcgaaaggactctttta

SEQ ID NO: 357918 - DNA, 19 bp, Homo sapiens
  siRNA target sequence for VPS54 (NM_016516.1,498-516).
gagcaagtacctaagattt

SEQ ID NO: 357919 - DNA, 19 bp, Homo sapiens
  siRNA target sequence for VPS54 (NM_016516.1,501-519).
caagtacctaagattttta

SEQ ID NO: 357920 - DNA, 19 bp, Homo sapiens
  siRNA target sequence for VPS54 (NM_016516.1,536-554).
cttggatgattccttaact

SEQ ID NO: 357921 - DNA, 19 bp, Homo sapiens
  siRNA target sequence for VPS54 (NM_016516.1,612-630).
gatgcagcttcctcaaagt

SEQ ID NO: 357922 - DNA, 19 bp, Homo sapiens
  siRNA target sequence for VPS54 (NM_016516.1,623-641).
ctcaaagttgcttcaagaa

SEQ ID NO: 357923 - DNA, 19 bp, Homo sapiens
  siRNA target sequence for VPS54 (NM_016516.1,649-667).
gccattatctggatattgt

SEQ ID NO: 357924 - DNA, 19 bp, Homo sapiens
  siRNA target sequence for VPS54 (NM_016516.1,689-707).
gatctctctacgttcagaa

SEQ ID NO: 357925 - DNA, 19 bp, Homo sapiens
  siRNA target sequence for VPS54 (NM_016516.1,696-714).
ctacgttcagaagcatttt

SEQ ID NO: 357926 - DNA, 19 bp, Homo sapiens
  siRNA target sequence for VPS54 (NM_016516.1,782-800).
gcttcgagataaaattgca

SEQ ID NO: 357927 - DNA, 19 bp, Homo sapiens
  siRNA target sequence for VPS54 (NM_016516.1,825-843).
ggatcactccacattttaa

SEQ ID NO: 357928 - DNA, 19 bp, Homo sapiens
  siRNA target sequence for VPS54 (NM_016516.1,921-939).
cctacagtacaggtgttat

SEQ ID NO: 357929 - DNA, 19 bp, Homo sapiens
  siRNA target sequence for VPS54 (NM_016516.1,922-940).
ctacagtacaggtgttatt

SEQ ID NO: 357930 - DNA, 19 bp, Homo sapiens
  siRNA target sequence for VPS54 (NM_016516.1,932-950).
ggtgttattatctacttct

SEQ ID NO: 357931 - DNA, 19 bp, Homo sapiens
  siRNA target sequence for VPS54 (NM_016516.1,968-986).
ggacttaatagcaacaaca

SEQ ID NO: 357932 - DNA, 19 bp, Homo sapiens
  siRNA target sequence for VPS54 (NM_016516.1,982-1000).
caacacaagaggttctaca

SEQ ID NO: 357933 - DNA, 19 bp, Homo sapiens
  siRNA target sequence for VPS54 (NM_016516.1,1037-1055).
gggatcacagctttgtgaa

SEQ ID NO: 357934 - DNA, 19 bp, Homo sapiens
  siRNA target sequence for VPS54 (NM_016516.1,1220-1238).
ctatggtgaaaaaatggtt

SEQ ID NO: 357935 - DNA, 19 bp, Homo sapiens
  siRNA target sequence for VPS54 (NM_016516.1,1224-1242).
ggtgaaaaaatggttatta

SEQ ID NO: 357936 - DNA, 19 bp, Homo sapiens
  siRNA target sequence for VPS54 (NM_016516.1,1365-1383).
gatctgctcaaggatattt

SEQ ID NO: 357937 - DNA, 19 bp, Homo sapiens
  siRNA target sequence for VPS54 (NM_016516.1,1409-1427).
gagagtgaaggcaacatta

SEQ ID NO: 357938 - DNA, 19 bp, Homo sapiens
  siRNA target sequence for VPS54 (NM_016516.1,1411-1429).
gagtgaaggcaacattaaa

SEQ ID NO: 357939 - DNA, 19 bp, Homo sapiens
  siRNA target sequence for VPS54 (NM_016516.1,1533-1551).
gacacagaggtggcttatt

SEQ ID NO: 357940 - DNA, 19 bp, Homo sapiens
  siRNA target sequence for VPS54 (NM_016516.1,1614-1632).
gttgacactacctctcaaa

SEQ ID NO: 357941 - DNA, 19 bp, Homo sapiens
  siRNA target sequence for VPS54 (NM_016516.1,1674-1692).
gtatccgagccagaatgta

SEQ ID NO: 357942 - DNA, 19 bp, Homo sapiens
  siRNA target sequence for VPS54 (NM_016516.1,1679-1697).
cgagccagaatgtactact

SEQ ID NO: 357943 - DNA, 19 bp, Homo sapiens
  siRNA target sequence for VPS54 (NM_016516.1,1682-1700).
gccagaatgtactactgat

SEQ ID NO: 357944 - DNA, 19 bp, Homo sapiens
  siRNA target sequence for VPS54 (NM_016516.1,1721-1739).
cacatcatcatctgctatt

SEQ ID NO: 357945 - DNA, 19 bp, Homo sapiens
  siRNA target sequence for VPS54 (NM_016516.1,1797-1815).
ggaaagctggcaaataata

SEQ ID NO: 357946 - DNA, 19 bp, Homo sapiens
  siRNA target sequence for VPS54 (NM_016516.1,1851-1869).
catgatcgagctgtcaaat

SEQ ID NO: 357947 - DNA, 19 bp, Homo sapiens
  siRNA target sequence for VPS54 (NM_016516.1,1863-1881).
gtcaaatttctcatgtcaa

SEQ ID NO: 357948 - DNA, 19 bp, Homo sapiens
  siRNA target sequence for VPS54 (NM_016516.1,1874-1892).
catgtcaagagcaaaggat

SEQ ID NO: 357949 - DNA, 19 bp, Homo sapiens
  siRNA target sequence for VPS54 (NM_016516.1,1899-1917).
cttgagaagctaaattcca

SEQ ID NO: 357950 - DNA, 19 bp, Homo sapiens
  siRNA target sequence for VPS54 (NM_016516.1,1915-1933).
ccatggaattcataacact

SEQ ID NO: 357951 - DNA, 19 bp, Homo sapiens
  siRNA target sequence for VPS54 (NM_016516.1,1919-1937).
ggaattcataacactttct

SEQ ID NO: 357952 - DNA, 19 bp, Homo sapiens
  siRNA target sequence for VPS54 (NM_016516.1,1920-1938).
gaattcataacactttcta

SEQ ID NO: 357953 - DNA, 19 bp, Homo sapiens
  siRNA target sequence for VPS54 (NM_016516.1,2069-2087).
cagcctcctcttagacaat

SEQ ID NO: 357954 - DNA, 19 bp, Homo sapiens
  siRNA target sequence for VPS54 (NM_016516.1,2071-2089).
gcctcctcttagacaatga

SEQ ID NO: 357955 - DNA, 19 bp, Homo sapiens
  siRNA target sequence for VPS54 (NM_016516.1,2247-2265).
ggaaccgtattgctgttaa

SEQ ID NO: 357956 - DNA, 19 bp, Homo sapiens
  siRNA target sequence for VPS54 (NM_016516.1,2248-2266).
gaaccgtattgctgttaat

SEQ ID NO: 357957 - DNA, 19 bp, Homo sapiens
  siRNA target sequence for VPS54 (NM_016516.1,2297-2315).
ggataacatcccatctgtt

SEQ ID NO: 357958 - DNA, 19 bp, Homo sapiens
  siRNA target sequence for VPS54 (NM_016516.1,2298-2316).
gataacatcccatctgtta

SEQ ID NO: 357959 - DNA, 19 bp, Homo sapiens
  siRNA target sequence for VPS54 (NM_016516.1,2313-2331).
gttactactgacatgctta

SEQ ID NO: 357960 - DNA, 19 bp, Homo sapiens
  siRNA target sequence for VPS54 (NM_016516.1,2328-2346).
cttactcgtctgtcagatt

SEQ ID NO: 357961 - DNA, 19 bp, Homo sapiens
  siRNA target sequence for VPS54 (NM_016516.1,2332-2350).
ctcgtctgtcagatttatt

SEQ ID NO: 357962 - DNA, 19 bp, Homo sapiens
  siRNA target sequence for VPS54 (NM_016516.1,2334-2352).
cgtctgtcagatttattga

SEQ ID NO: 357963 - DNA, 19 bp, Homo sapiens
  siRNA target sequence for VPS54 (NM_016516.1,2335-2353).
gtctgtcagatttattgaa

SEQ ID NO: 357964 - DNA, 19 bp, Homo sapiens
  siRNA target sequence for VPS54 (NM_016516.1,2354-2372).
gtacttcaattcaagaagt

SEQ ID NO: 357965 - DNA, 19 bp, Homo sapiens
  siRNA target sequence for VPS54 (NM_016516.1,2365-2383).
caagaagttgccagttagt

SEQ ID NO: 357966 - DNA, 19 bp, Homo sapiens
  siRNA target sequence for VPS54 (NM_016516.1,2406-2424).
gttgttggactaaaaacga

SEQ ID NO: 357967 - DNA, 19 bp, Homo sapiens
  siRNA target sequence for VPS54 (NM_016516.1,2409-2427).
gttggactaaaaacgataa

SEQ ID NO: 357968 - DNA, 19 bp, Homo sapiens
  siRNA target sequence for VPS54 (NM_016516.1,2412-2430).
ggactaaaaacgataacta

SEQ ID NO: 357969 - DNA, 19 bp, Homo sapiens
  siRNA target sequence for VPS54 (NM_016516.1,2415-2433).
ctaaaaacgataactacaa

SEQ ID NO: 357970 - DNA, 19 bp, Homo sapiens
  siRNA target sequence for VPS54 (NM_016516.1,2452-2470).
cacgatgtttgcagttaat

SEQ ID NO: 357971 - DNA, 19 bp, Homo sapiens
  siRNA target sequence for VPS54 (NM_016516.1,2465-2483).
gttaattgtgcactacatt

SEQ ID NO: 357972 - DNA, 19 bp, Homo sapiens
  siRNA target sequence for VPS54 (NM_016516.1,2485-2503).
ctgtgatccgggctcattt

SEQ ID NO: 357973 - DNA, 19 bp, Homo sapiens
  siRNA target sequence for VPS54 (NM_016516.1,2489-2507).
gatccgggctcattttgaa

SEQ ID NO: 357974 - DNA, 19 bp, Homo sapiens
  siRNA target sequence for VPS54 (NM_016516.1,2511-2529).
cgactaccacctaagcaat

SEQ ID NO: 357975 - DNA, 19 bp, Homo sapiens
  siRNA target sequence for VPS54 (NM_016516.1,2517-2535).
ccacctaagcaatatagca

SEQ ID NO: 357976 - DNA, 19 bp, Homo sapiens
  siRNA target sequence for VPS54 (NM_016516.1,2518-2536).
cacctaagcaatatagcat

SEQ ID NO: 357977 - DNA, 19 bp, Homo sapiens
  siRNA target sequence for VPS54 (NM_016516.1,2560-2578).
ctaaggactaccatgatca

SEQ ID NO: 357978 - DNA, 19 bp, Homo sapiens
  siRNA target sequence for VPS54 (NM_016516.1,2574-2592).
gatcacatagctgaaatat

SEQ ID NO: 357979 - DNA, 19 bp, Homo sapiens
  siRNA target sequence for VPS54 (NM_016516.1,2596-2614).
ctaagcttgtagcgataat

SEQ ID NO: 357980 - DNA, 19 bp, Homo sapiens
  siRNA target sequence for VPS54 (NM_016516.1,2600-2618).
gcttgtagcgataatggat

SEQ ID NO: 357981 - DNA, 19 bp, Homo sapiens
  siRNA target sequence for VPS54 (NM_016516.1,2601-2619).
cttgtagcgataatggata

SEQ ID NO: 357982 - DNA, 19 bp, Homo sapiens
  siRNA target sequence for VPS54 (NM_016516.1,2607-2625).
gcgataatggatagcttat

SEQ ID NO: 357983 - DNA, 19 bp, Homo sapiens
  siRNA target sequence for VPS54 (NM_016516.1,2608-2626).
cgataatggatagcttatt

SEQ ID NO: 357984 - DNA, 19 bp, Homo sapiens
  siRNA target sequence for VPS54 (NM_016516.1,2628-2646).
gacaagctgttatctaagt

SEQ ID NO: 357985 - DNA, 19 bp, Homo sapiens
  siRNA target sequence for VPS54 (NM_016516.1,2677-2695).
gtttcaggaatatttgtaa

SEQ ID NO: 357986 - DNA, 19 bp, Homo sapiens
  siRNA target sequence for VPS54 (NM_016516.1,2681-2699).
caggaatatttgtaagcaa

SEQ ID NO: 357987 - DNA, 19 bp, Homo sapiens
  siRNA target sequence for VPS54 (NM_016516.1,2711-2729).
gcacgaagctatatttgat

SEQ ID NO: 357988 - DNA, 19 bp, Homo sapiens
  siRNA target sequence for VPS54 (NM_016516.1,2855-2873).
cacagcagatgtagctttt

SEQ ID NO: 357989 - DNA, 19 bp, Homo sapiens
  siRNA target sequence for LOC51759 (NM_016520.1,30-48).
gccggtcgtccggaagatt

SEQ ID NO: 357990 - DNA, 19 bp, Homo sapiens
  siRNA target sequence for LOC51759 (NM_016520.1,31-49).
ccggtcgtccggaagattt

SEQ ID NO: 357991 - DNA, 19 bp, Homo sapiens
  siRNA target sequence for LOC51759 (NM_016520.1,32-50).
cggtcgtccggaagatttt

SEQ ID NO: 357992 - DNA, 19 bp, Homo sapiens
  siRNA target sequence for LOC51759 (NM_016520.1,96-114).
ctcagaggaggttcgatta

SEQ ID NO: 357993 - DNA, 19 bp, Homo sapiens
  siRNA target sequence for LOC51759 (NM_016520.1,98-116).
cagaggaggttcgattaaa

SEQ ID NO: 357994 - DNA, 19 bp, Homo sapiens
  siRNA target sequence for LOC51759 (NM_016520.1,843-861).
ggcaactgatgactatcat

SEQ ID NO: 357995 - DNA, 19 bp, Homo sapiens
  siRNA target sequence for LOC51759 (NM_016520.1,859-877).
cattatgagaagttcaaga

SEQ ID NO: 357996 - DNA, 19 bp, Homo sapiens
  siRNA target sequence for LOC51760 (NM_016524.2,354-372).
cattaaacgagggttttct

SEQ ID NO: 357997 - DNA, 19 bp, Homo sapiens
  siRNA target sequence for LOC51760 (NM_016524.2,361-379).
cgagggttttctttctaga

SEQ ID NO: 357998 - DNA, 19 bp, Homo sapiens
  siRNA target sequence for LOC51760 (NM_016524.2,362-380).
gagggttttctttctagaa

SEQ ID NO: 357999 - DNA, 19 bp, Homo sapiens
  siRNA target sequence for LOC51760 (NM_016524.2,684-702).
gctctccactcatcgatat

SEQ ID NO: 358000 - DNA, 19 bp, Homo sapiens
  siRNA target sequence for LOC51760 (NM_016524.2,687-705).
ctccactcatcgatattaa

SEQ ID NO: 358001 - DNA, 19 bp, Homo sapiens
  siRNA target sequence for LOC51760 (NM_016524.2,758-776).
gtgctcagacggacctata

SEQ ID NO: 358002 - DNA, 19 bp, Homo sapiens
  siRNA target sequence for LOC51760 (NM_016524.2,1183-1201).
ctcccgccactgtgtcatt

SEQ ID NO: 358003 - DNA, 19 bp, Homo sapiens
  siRNA target sequence for LOC51760 (NM_016524.2,1397-1415).
ggttcagacccctttgtga

SEQ ID NO: 358004 - DNA, 19 bp, Homo sapiens
  siRNA target sequence for LOC51760 (NM_016524.2,1423-1441).
gctggtgcatggactcaaa

SEQ ID NO: 358005 - DNA, 19 bp, Homo sapiens
  siRNA target sequence for LOC51760 (NM_016524.2,1426-1444).
ggtgcatggactcaaactt

SEQ ID NO: 358006 - DNA, 19 bp, Homo sapiens
  siRNA target sequence for LOC51760 (NM_016524.2,1453-1471).
caagaagacgtccttctta

SEQ ID NO: 358007 - DNA, 19 bp, Homo sapiens
  siRNA target sequence for LOC51760 (NM_016524.2,1465-1483).
cttcttaaggggcacaatt

SEQ ID NO: 358008 - DNA, 19 bp, Homo sapiens
  siRNA target sequence for LOC51760 (NM_016524.2,1468-1486).
cttaaggggcacaattgat

SEQ ID NO: 358009 - DNA, 19 bp, Homo sapiens
  siRNA target sequence for LOC51760 (NM_016524.2,1484-1502).
gatcctttctacaatgaat

SEQ ID NO: 358010 - DNA, 19 bp, Homo sapiens
  siRNA target sequence for LOC51760 (NM_016524.2,1543-1561).
cagcctagtgtttacagtt

SEQ ID NO: 358011 - DNA, 19 bp, Homo sapiens
  siRNA target sequence for LOC51760 (NM_016524.2,1557-1575).
cagttttcggccacaacat

SEQ ID NO: 358012 - DNA, 19 bp, Homo sapiens
  siRNA target sequence for LOC51760 (NM_016524.2,1607-1625).
gtcattggccagtactctt

SEQ ID NO: 358013 - DNA, 19 bp, Homo sapiens
  siRNA target sequence for UBAP1 (NM_016525.3,319-337).
caaaacaccagctaaagtt

SEQ ID NO: 358014 - DNA, 19 bp, Homo sapiens
  siRNA target sequence for UBAP1 (NM_016525.3,330-348).
ctaaagttggtctacctat

SEQ ID NO: 358015 - DNA, 19 bp, Homo sapiens
  siRNA target sequence for UBAP1 (NM_016525.3,389-407).
gtacagtatgacttctctt

SEQ ID NO: 358016 - DNA, 19 bp, Homo sapiens
  siRNA target sequence for UBAP1 (NM_016525.3,394-412).
gtatgacttctctttggaa

SEQ ID NO: 358017 - DNA, 19 bp, Homo sapiens
  siRNA target sequence for UBAP1 (NM_016525.3,425-443).
gagtgggctgaagagatta

SEQ ID NO: 358018 - DNA, 19 bp, Homo sapiens
  siRNA target sequence for UBAP1 (NM_016525.3,519-537).
gcccagagggcgatagcaa

SEQ ID NO: 358019 - DNA, 19 bp, Homo sapiens
  siRNA target sequence for UBAP1 (NM_016525.3,520-538).
cccagagggcgatagcaaa

SEQ ID NO: 358020 - DNA, 19 bp, Homo sapiens
  siRNA target sequence for UBAP1 (NM_016525.3,521-539).
ccagagggcgatagcaaaa

SEQ ID NO: 358021 - DNA, 19 bp, Homo sapiens
  siRNA target sequence for UBAP1 (NM_016525.3,522-540).
cagagggcgatagcaaaat

SEQ ID NO: 358022 - DNA, 19 bp, Homo sapiens
  siRNA target sequence for UBAP1 (NM_016525.3,524-542).
gagggcgatagcaaaatga

SEQ ID NO: 358023 - DNA, 19 bp, Homo sapiens
  siRNA target sequence for UBAP1 (NM_016525.3,680-698).
cacataaaggcggatttca

SEQ ID NO: 358024 - DNA, 19 bp, Homo sapiens
  siRNA target sequence for UBAP1 (NM_016525.3,682-700).
cataaaggcggatttcaat

SEQ ID NO: 358025 - DNA, 19 bp, Homo sapiens
  siRNA target sequence for UBAP1 (NM_016525.3,742-760).
ggagttaaaaactattgat

SEQ ID NO: 358026 - DNA, 19 bp, Homo sapiens
  siRNA target sequence for UBAP1 (NM_016525.3,792-810).
gaaccactggacccattat

SEQ ID NO: 358027 - DNA, 19 bp, Homo sapiens
  siRNA target sequence for UBAP1 (NM_016525.3,804-822).
ccattatggctcagttatt

SEQ ID NO: 358028 - DNA, 19 bp, Homo sapiens
  siRNA target sequence for UBAP1 (NM_016525.3,813-831).
ctcagttattggacaataa

SEQ ID NO: 358029 - DNA, 19 bp, Homo sapiens
  siRNA target sequence for UBAP1 (NM_016525.3,890-908).
gaacgggcaaccctagatt

SEQ ID NO: 358030 - DNA, 19 bp, Homo sapiens
  siRNA target sequence for UBAP1 (NM_016525.3,893-911).
cgggcaaccctagatttca

SEQ ID NO: 358031 - DNA, 19 bp, Homo sapiens
  siRNA target sequence for UBAP1 (NM_016525.3,894-912).
gggcaaccctagatttcaa

SEQ ID NO: 358032 - DNA, 19 bp, Homo sapiens
  siRNA target sequence for UBAP1 (NM_016525.3,905-923).
gatttcaagcctcttcata

SEQ ID NO: 358033 - DNA, 19 bp, Homo sapiens
  siRNA target sequence for UBAP1 (NM_016525.3,926-944).
cccaatggctttataacct

SEQ ID NO: 358034 - DNA, 19 bp, Homo sapiens
  siRNA target sequence for UBAP1 (NM_016525.3,927-945).
ccaatggctttataacctt

SEQ ID NO: 358035 - DNA, 19 bp, Homo sapiens
  siRNA target sequence for UBAP1 (NM_016525.3,956-974).
ggcaactgtgaaaagatgt

SEQ ID NO: 358036 - DNA, 19 bp, Homo sapiens
  siRNA target sequence for UBAP1 (NM_016525.3,1007-1025).
cctgcagtaagcaatatca

SEQ ID NO: 358037 - DNA, 19 bp, Homo sapiens
  siRNA target sequence for UBAP1 (NM_016525.3,1008-1026).
ctgcagtaagcaatatcaa

SEQ ID NO: 358038 - DNA, 19 bp, Homo sapiens
  siRNA target sequence for UBAP1 (NM_016525.3,1081-1099).
gctggcgagcactttccat

SEQ ID NO: 358039 - DNA, 19 bp, Homo sapiens
  siRNA target sequence for UBAP1 (NM_016525.3,1289-1307).
gaatcatcacctccaaata

SEQ ID NO: 358040 - DNA, 19 bp, Homo sapiens
  siRNA target sequence for UBAP1 (NM_016525.3,1315-1333).
cacggtcacccctcctaat

SEQ ID NO: 358041 - DNA, 19 bp, Homo sapiens
  siRNA target sequence for UBAP1 (NM_016525.3,1317-1335).
cggtcacccctcctaattt

SEQ ID NO: 358042 - DNA, 19 bp, Homo sapiens
  siRNA target sequence for UBAP1 (NM_016525.3,1321-1339).
cacccctcctaatttctca

SEQ ID NO: 358043 - DNA, 19 bp, Homo sapiens
  siRNA target sequence for UBAP1 (NM_016525.3,1499-1517).
cagattctcgactatctct

SEQ ID NO: 358044 - DNA, 19 bp, Homo sapiens
  siRNA target sequence for UBAP1 (NM_016525.3,1501-1519).
gattctcgactatctcttt

SEQ ID NO: 358045 - DNA, 19 bp, Homo sapiens
  siRNA target sequence for UBAP1 (NM_016525.3,1545-1563).
gcttcgaccctcttttagt

SEQ ID NO: 358046 - DNA, 19 bp, Homo sapiens
  siRNA target sequence for UBAP1 (NM_016525.3,1670-1688).
gaagttttgctattacaca

SEQ ID NO: 358047 - DNA, 19 bp, Homo sapiens
  siRNA target sequence for BET1L (NM_016526.3,238-256).
ccacggtgtgcgtgtatca

SEQ ID NO: 358048 - DNA, 19 bp, Homo sapiens
  siRNA target sequence for BET1L (NM_016526.3,315-333).
cgggtgggtggtcaaatca

SEQ ID NO: 358049 - DNA, 19 bp, Homo sapiens
  siRNA target sequence for FLJ39616 (NM_016534.2,154-172).
cgctctcctccgacatact

SEQ ID NO: 358050 - DNA, 19 bp, Homo sapiens
  siRNA target sequence for HSPC189 (NM_016535.2,324-342).
caaccactacctgcttatt

SEQ ID NO: 358051 - DNA, 19 bp, Homo sapiens
  siRNA target sequence for HSPC189 (NM_016535.2,328-346).
cactacctgcttattgaca

SEQ ID NO: 358052 - DNA, 19 bp, Homo sapiens
  siRNA target sequence for HSPC059 (NM_016536.2,269-287).
gttgtgtgaccaaaaagtt

SEQ ID NO: 358053 - DNA, 19 bp, Homo sapiens
  siRNA target sequence for HSPC059 (NM_016536.2,369-387).
caatggtcttggagacaat

SEQ ID NO: 358054 - DNA, 19 bp, Homo sapiens
  siRNA target sequence for HSPC059 (NM_016536.2,402-420).
caacttagagggtcaagaa

SEQ ID NO: 358055 - DNA, 19 bp, Homo sapiens
  siRNA target sequence for HSPC059 (NM_016536.2,497-515).
ctacttttcatcggataat

SEQ ID NO: 358056 - DNA, 19 bp, Homo sapiens
  siRNA target sequence for HSPC059 (NM_016536.2,567-585).
ctacctgtcatgccttatt

SEQ ID NO: 358057 - DNA, 19 bp, Homo sapiens
  siRNA target sequence for HSPC059 (NM_016536.2,570-588).
cctgtcatgccttattcaa

SEQ ID NO: 358058 - DNA, 19 bp, Homo sapiens
  siRNA target sequence for HSPC059 (NM_016536.2,589-607).
catgaggaaaatcataata

SEQ ID NO: 358059 - DNA, 19 bp, Homo sapiens
  siRNA target sequence for HSPC059 (NM_016536.2,601-619).
cataatatagaaaaatgct

SEQ ID NO: 358060 - DNA, 19 bp, Homo sapiens
  siRNA target sequence for HSPC059 (NM_016536.2,634-652).
cacaggaatacctttagca

SEQ ID NO: 358061 - DNA, 19 bp, Homo sapiens
  siRNA target sequence for HSPC059 (NM_016536.2,636-654).
caggaatacctttagcaaa

SEQ ID NO: 358062 - DNA, 19 bp, Homo sapiens
  siRNA target sequence for HSPC059 (NM_016536.2,729-747).
ctttggtcgtacttctgat

SEQ ID NO: 358063 - DNA, 19 bp, Homo sapiens
  siRNA target sequence for HSPC059 (NM_016536.2,734-752).
gtcgtacttctgatctcat

SEQ ID NO: 358064 - DNA, 19 bp, Homo sapiens
  siRNA target sequence for HSPC059 (NM_016536.2,740-758).
cttctgatctcattcaaca

SEQ ID NO: 358065 - DNA, 19 bp, Homo sapiens
  siRNA target sequence for HSPC059 (NM_016536.2,897-915).
ctttagttattgttcacaa

SEQ ID NO: 358066 - DNA, 19 bp, Homo sapiens
  siRNA target sequence for HSPC059 (NM_016536.2,1072-1090).
cttggttcacaccttacat

SEQ ID NO: 358067 - DNA, 19 bp, Homo sapiens
  siRNA target sequence for HSPC059 (NM_016536.2,1157-1175).
gtgcctcccaactgaatga

SEQ ID NO: 358068 - DNA, 19 bp, Homo sapiens
  siRNA target sequence for HSPC059 (NM_016536.2,1401-1419).
ctttatttgtggcaaacaa

SEQ ID NO: 358069 - DNA, 19 bp, Homo sapiens
  siRNA target sequence for HSPC059 (NM_016536.2,1485-1503).
ctttattcgtgttgcatat

SEQ ID NO: 358070 - DNA, 19 bp, Homo sapiens
  siRNA target sequence for HSPC059 (NM_016536.2,1566-1584).
ctttgtacgtgctacacaa

SEQ ID NO: 358071 - DNA, 19 bp, Homo sapiens
  siRNA target sequence for HSPC059 (NM_016536.2,1570-1588).
gtacgtgctacacaactta

SEQ ID NO: 358072 - DNA, 19 bp, Homo sapiens
  siRNA target sequence for HSPC059 (NM_016536.2,1573-1591).
cgtgctacacaacttacat

SEQ ID NO: 358073 - DNA, 19 bp, Homo sapiens
  siRNA target sequence for HSPC059 (NM_016536.2,1883-1901).
gtgtccagtgtggtaaaga

SEQ ID NO: 358074 - DNA, 19 bp, Homo sapiens
  siRNA target sequence for HSPC059 (NM_016536.2,1885-1903).
gtccagtgtggtaaagact

SEQ ID NO: 358075 - DNA, 19 bp, Homo sapiens
  siRNA target sequence for HSPC059 (NM_016536.2,1927-1945).
caacatacaaggcttcata

SEQ ID NO: 358076 - DNA, 19 bp, Homo sapiens
  siRNA target sequence for HSPC059 (NM_016536.2,1930-1948).
catacaaggcttcataatt

SEQ ID NO: 358077 - DNA, 19 bp, Homo sapiens
  siRNA target sequence for IER5 (NM_016545.2,559-577).
ctggagtcggggacgtttt

SEQ ID NO: 358078 - DNA, 19 bp, Homo sapiens
  siRNA target sequence for IER5 (NM_016545.2,562-580).
gagtcggggacgtttttca

SEQ ID NO: 358079 - DNA, 19 bp, Homo sapiens
  siRNA target sequence for IER5 (NM_016545.2,895-913).
gctcgaccccgctcaagaa

SEQ ID NO: 358080 - DNA, 19 bp, Homo sapiens
  siRNA target sequence for ANKMY1 (NM_016552.1,216-234).
gaacatgaagcttggatat

SEQ ID NO: 358081 - DNA, 19 bp, Homo sapiens
  siRNA target sequence for ANKMY1 (NM_016552.1,248-266).
ggcccacaggcgagtcata

SEQ ID NO: 358082 - DNA, 19 bp, Homo sapiens
  siRNA target sequence for ANKMY1 (NM_016552.1,252-270).
cacaggcgagtcataccat

SEQ ID NO: 358083 - DNA, 19 bp, Homo sapiens
  siRNA target sequence for ANKMY1 (NM_016552.1,263-281).
cataccatgggcagtttta

SEQ ID NO: 358084 - DNA, 19 bp, Homo sapiens
  siRNA target sequence for ANKMY1 (NM_016552.1,330-348).
cagtttcacgggcacattt

SEQ ID NO: 358085 - DNA, 19 bp, Homo sapiens
  siRNA target sequence for ANKMY1 (NM_016552.1,332-350).
gtttcacgggcacatttta

SEQ ID NO: 358086 - DNA, 19 bp, Homo sapiens
  siRNA target sequence for ANKMY1 (NM_016552.1,661-679).
cggtttcttctgaatgaca

SEQ ID NO: 358087 - DNA, 19 bp, Homo sapiens
  siRNA target sequence for ANKMY1 (NM_016552.1,687-705).
gctgcctccagaaatgtat

SEQ ID NO: 358088 - DNA, 19 bp, Homo sapiens
  siRNA target sequence for ANKMY1 (NM_016552.1,768-786).
ccgcatcttcctcaatgaa

SEQ ID NO: 358089 - DNA, 19 bp, Homo sapiens
  siRNA target sequence for ANKMY1 (NM_016552.1,769-787).
cgcatcttcctcaatgaaa

SEQ ID NO: 358090 - DNA, 19 bp, Homo sapiens
  siRNA target sequence for ANKMY1 (NM_016552.1,770-788).
gcatcttcctcaatgaaat

SEQ ID NO: 358091 - DNA, 19 bp, Homo sapiens
  siRNA target sequence for ANKMY1 (NM_016552.1,808-826).
ggagaaccatggttcataa

SEQ ID NO: 358092 - DNA, 19 bp, Homo sapiens
  siRNA target sequence for ANKMY1 (NM_016552.1,809-827).
gagaaccatggttcataat

SEQ ID NO: 358093 - DNA, 19 bp, Homo sapiens
  siRNA target sequence for ANKMY1 (NM_016552.1,811-829).
gaaccatggttcataatca

SEQ ID NO: 358094 - DNA, 19 bp, Homo sapiens
  siRNA target sequence for ANKMY1 (NM_016552.1,815-833).
catggttcataatcaatga

SEQ ID NO: 358095 - DNA, 19 bp, Homo sapiens
  siRNA target sequence for ANKMY1 (NM_016552.1,856-874).
cagaagcaaacttacaagt

SEQ ID NO: 358096 - DNA, 19 bp, Homo sapiens
  siRNA target sequence for ANKMY1 (NM_016552.1,952-970).
gggcccaaagagcaacttt

SEQ ID NO: 358097 - DNA, 19 bp, Homo sapiens
  siRNA target sequence for ANKMY1 (NM_016552.1,1103-1121).
gccacaacgacattgtcaa

SEQ ID NO: 358098 - DNA, 19 bp, Homo sapiens
  siRNA target sequence for ANKMY1 (NM_016552.1,1215-1233).
gtccttcaagcccaatgtt

SEQ ID NO: 358099 - DNA, 19 bp, Homo sapiens
  siRNA target sequence for ANKMY1 (NM_016552.1,1255-1273).
ccccaggaacctccaaaat

SEQ ID NO: 358100 - DNA, 19 bp, Homo sapiens
  siRNA target sequence for ANKMY1 (NM_016552.1,1347-1365).
gccttcccagggtagctat

SEQ ID NO: 358101 - DNA, 19 bp, Homo sapiens
  siRNA target sequence for ANKMY1 (NM_016552.1,1542-1560).
ggacgtgttgggaaacaca

SEQ ID NO: 358102 - DNA, 19 bp, Homo sapiens
  siRNA target sequence for ANKMY1 (NM_016552.1,1577-1595).
gcagtgctgagacgaaatt

SEQ ID NO: 358103 - DNA, 19 bp, Homo sapiens
  siRNA target sequence for ANKMY1 (NM_016552.1,1582-1600).
gctgagacgaaatttgagt

SEQ ID NO: 358104 - DNA, 19 bp, Homo sapiens
  siRNA target sequence for ANKMY1 (NM_016552.1,2041-2059).
gacgaggacgacacttaca

SEQ ID NO: 358105 - DNA, 19 bp, Homo sapiens
  siRNA target sequence for ANKMY1 (NM_016552.1,2243-2261).
cccacggagcaaatcctaa

SEQ ID NO: 358106 - DNA, 19 bp, Homo sapiens
  siRNA target sequence for ANKMY1 (NM_016552.1,2539-2557).
gactatggctacttcagat

SEQ ID NO: 358107 - DNA, 19 bp, Homo sapiens
  siRNA target sequence for ANKMY1 (NM_016552.1,2807-2825).
ggcaaattcccttcttcaa

SEQ ID NO: 358108 - DNA, 19 bp, Homo sapiens
  siRNA target sequence for ANKMY1 (NM_016552.1,2809-2827).
caaattcccttcttcaagt

SEQ ID NO: 358109 - DNA, 19 bp, Homo sapiens
  siRNA target sequence for PEX5R (NM_016559.1,186-204).
gtgatgaagacctcgaaat

SEQ ID NO: 358110 - DNA, 19 bp, Homo sapiens
  siRNA target sequence for PEX5R (NM_016559.1,188-206).
gatgaagacctcgaaataa

SEQ ID NO: 358111 - DNA, 19 bp, Homo sapiens
  siRNA target sequence for PEX5R (NM_016559.1,196-214).
cctcgaaataattgttgat

SEQ ID NO: 358112 - DNA, 19 bp, Homo sapiens
  siRNA target sequence for PEX5R (NM_016559.1,305-323).
cccctccttactatgacat

SEQ ID NO: 358113 - DNA, 19 bp, Homo sapiens
  siRNA target sequence for PEX5R (NM_016559.1,366-384).
gtccctccatcgatgactt

SEQ ID NO: 358114 - DNA, 19 bp, Homo sapiens
  siRNA target sequence for PEX5R (NM_016559.1,397-415).
caaatcggaagcaatagca

SEQ ID NO: 358115 - DNA, 19 bp, Homo sapiens
  siRNA target sequence for PEX5R (NM_016559.1,418-436).
gccagtaacatccaataca

SEQ ID NO: 358116 - DNA, 19 bp, Homo sapiens
  siRNA target sequence for PEX5R (NM_016559.1,616-634).
gacttcatccttagatcta

SEQ ID NO: 358117 - DNA, 19 bp, Homo sapiens
  siRNA target sequence for PEX5R (NM_016559.1,621-639).
catccttagatctagacat

SEQ ID NO: 358118 - DNA, 19 bp, Homo sapiens
  siRNA target sequence for PEX5R (NM_016559.1,660-678).
gggacgatgttaagtttca

SEQ ID NO: 358119 - DNA, 19 bp, Homo sapiens
  siRNA target sequence for PEX5R (NM_016559.1,661-679).
ggacgatgttaagtttcat

SEQ ID NO: 358120 - DNA, 19 bp, Homo sapiens
  siRNA target sequence for PEX5R (NM_016559.1,729-747).
catctagaactggatcaaa

SEQ ID NO: 358121 - DNA, 19 bp, Homo sapiens
  siRNA target sequence for PEX5R (NM_016559.1,763-781).
ctcagaacacagatctcaa

SEQ ID NO: 358122 - DNA, 19 bp, Homo sapiens
  siRNA target sequence for PEX5R (NM_016559.1,820-838).
gtcggcttcagaattggaa

SEQ ID NO: 358123 - DNA, 19 bp, Homo sapiens
  siRNA target sequence for PEX5R (NM_016559.1,822-840).
cggcttcagaattggaatt

SEQ ID NO: 358124 - DNA, 19 bp, Homo sapiens
  siRNA target sequence for PEX5R (NM_016559.1,825-843).
cttcagaattggaattagt

SEQ ID NO: 358125 - DNA, 19 bp, Homo sapiens
  siRNA target sequence for PEX5R (NM_016559.1,856-874).
ggctcgactgaccaaagaa

SEQ ID NO: 358126 - DNA, 19 bp, Homo sapiens
  siRNA target sequence for PEX5R (NM_016559.1,879-897).
gctggggaagcgcattact

SEQ ID NO: 358127 - DNA, 19 bp, Homo sapiens
  siRNA target sequence for PEX5R (NM_016559.1,880-898).
ctggggaagcgcattactt

SEQ ID NO: 358128 - DNA, 19 bp, Homo sapiens
  siRNA target sequence for PEX5R (NM_016559.1,888-906).
gcgcattactttctagaaa

SEQ ID NO: 358129 - DNA, 19 bp, Homo sapiens
  siRNA target sequence for PEX5R (NM_016559.1,941-959).
gcagcagtggagtcagata

SEQ ID NO: 358130 - DNA, 19 bp, Homo sapiens
  siRNA target sequence for PEX5R (NM_016559.1,960-978).
cagagttttgggataagat

SEQ ID NO: 358131 - DNA, 19 bp, Homo sapiens
  siRNA target sequence for PEX5R (NM_016559.1,1279-1297).
ccagaggtgcttagaatta

SEQ ID NO: 358132 - DNA, 19 bp, Homo sapiens
  siRNA target sequence for PEX5R (NM_016559.1,1324-1342).
ggccttggctgtgagttat

SEQ ID NO: 358133 - DNA, 19 bp, Homo sapiens
  siRNA target sequence for PEX5R (NM_016559.1,1325-1343).
gccttggctgtgagttata

SEQ ID NO: 358134 - DNA, 19 bp, Homo sapiens
  siRNA target sequence for PEX5R (NM_016559.1,1331-1349).
gctgtgagttatactaaca

SEQ ID NO: 358135 - DNA, 19 bp, Homo sapiens
  siRNA target sequence for PEX5R (NM_016559.1,1368-1386).
cctgtgacgctctgaagaa

SEQ ID NO: 358136 - DNA, 19 bp, Homo sapiens
  siRNA target sequence for PEX5R (NM_016559.1,1373-1391).
gacgctctgaagaattgga

SEQ ID NO: 358137 - DNA, 19 bp, Homo sapiens
  siRNA target sequence for PEX5R (NM_016559.1,1389-1407).
ggattaagcaaaatccaaa

SEQ ID NO: 358138 - DNA, 19 bp, Homo sapiens
  siRNA target sequence for PEX5R (NM_016559.1,1462-1480).
gtctaagtccccagttgat

SEQ ID NO: 358139 - DNA, 19 bp, Homo sapiens
  siRNA target sequence for PEX5R (NM_016559.1,1563-1581).
caggtctaggggttctgtt

SEQ ID NO: 358140 - DNA, 19 bp, Homo sapiens
  siRNA target sequence for PEX5R (NM_016559.1,1588-1606).
gagtggagaatttaataga

SEQ ID NO: 358141 - DNA, 19 bp, Homo sapiens
  siRNA target sequence for PEX5R (NM_016559.1,1725-1743).
cgcgagcactggagattca

SEQ ID NO: 358142 - DNA, 19 bp, Homo sapiens
  siRNA target sequence for PEX5R (NM_016559.1,1762-1780).
cagatacaacctaggaata

SEQ ID NO: 358143 - DNA, 19 bp, Homo sapiens
  siRNA target sequence for PEX5R (NM_016559.1,1811-1829).
gcggtcagcaattttctca

SEQ ID NO: 358144 - DNA, 19 bp, Homo sapiens
  siRNA target sequence for PEX5R (NM_016559.1,1832-1850).
gccctcagtttgcaaagaa

SEQ ID NO: 358145 - DNA, 19 bp, Homo sapiens
  siRNA target sequence for PEX5R (NM_016559.1,1881-1899).
ctgcaatctctgggaatat

SEQ ID NO: 358146 - DNA, 19 bp, Homo sapiens
  siRNA target sequence for PEX5R (NM_016559.1,1948-1966).
cttccaggcggctaatctt

SEQ ID NO: 358147 - DNA, 19 bp, Homo sapiens
  siRNA target sequence for E2IG2 (NM_016565.1,190-208).
ggacccaacgggtgaagaa

SEQ ID NO: 358148 - DNA, 19 bp, Homo sapiens
  siRNA target sequence for E2IG2 (NM_016565.1,330-348).
gtgcaggcgttcaaggatt

SEQ ID NO: 358149 - DNA, 19 bp, Homo sapiens
  siRNA target sequence for PTX1 (NM_016570.1,93-111).
ggcgactgaatcggaaaaa

SEQ ID NO: 358150 - DNA, 19 bp, Homo sapiens
  siRNA target sequence for PTX1 (NM_016570.1,94-112).
gcgactgaatcggaaaaaa

SEQ ID NO: 358151 - DNA, 19 bp, Homo sapiens
  siRNA target sequence for PTX1 (NM_016570.1,95-113).
cgactgaatcggaaaaaaa

SEQ ID NO: 358152 - DNA, 19 bp, Homo sapiens
  siRNA target sequence for PTX1 (NM_016570.1,98-116).
ctgaatcggaaaaaaactt

SEQ ID NO: 358153 - DNA, 19 bp, Homo sapiens
  siRNA target sequence for PTX1 (NM_016570.1,100-118).
gaatcggaaaaaaacttta

SEQ ID NO: 358154 - DNA, 19 bp, Homo sapiens
  siRNA target sequence for PTX1 (NM_016570.1,104-122).
cggaaaaaaactttaagtt

SEQ ID NO: 358155 - DNA, 19 bp, Homo sapiens
  siRNA target sequence for PTX1 (NM_016570.1,151-169).
ggttcctgagagctatgta

SEQ ID NO: 358156 - DNA, 19 bp, Homo sapiens
  siRNA target sequence for PTX1 (NM_016570.1,179-197).
gccagtggaggtacagttt

SEQ ID NO: 358157 - DNA, 19 bp, Homo sapiens
  siRNA target sequence for PTX1 (NM_016570.1,181-199).
cagtggaggtacagtttct

SEQ ID NO: 358158 - DNA, 19 bp, Homo sapiens
  siRNA target sequence for PTX1 (NM_016570.1,222-240).
ctttattaaccataatgga

SEQ ID NO: 358159 - DNA, 19 bp, Homo sapiens
  siRNA target sequence for PTX1 (NM_016570.1,244-262).
ctcagtatatcaagataca

SEQ ID NO: 358160 - DNA, 19 bp, Homo sapiens
  siRNA target sequence for PTX1 (NM_016570.1,284-302).
gtagacaaggatttttcta

SEQ ID NO: 358161 - DNA, 19 bp, Homo sapiens
  siRNA target sequence for PTX1 (NM_016570.1,336-354).
ccatgaagtgtcaatatgt

SEQ ID NO: 358162 - DNA, 19 bp, Homo sapiens
  siRNA target sequence for PTX1 (NM_016570.1,356-374).
ggagcggatgtattggatt

SEQ ID NO: 358163 - DNA, 19 bp, Homo sapiens
  siRNA target sequence for PTX1 (NM_016570.1,357-375).
gagcggatgtattggattt

SEQ ID NO: 358164 - DNA, 19 bp, Homo sapiens
  siRNA target sequence for PTX1 (NM_016570.1,410-428).
gtttatgaaccaacagtat

SEQ ID NO: 358165 - DNA, 19 bp, Homo sapiens
  siRNA target sequence for PTX1 (NM_016570.1,504-522).
cacttcaagatgtgatatt

SEQ ID NO: 358166 - DNA, 19 bp, Homo sapiens
  siRNA target sequence for PTX1 (NM_016570.1,557-575).
ccaccaagagaagatgatt

SEQ ID NO: 358167 - DNA, 19 bp, Homo sapiens
  siRNA target sequence for PTX1 (NM_016570.1,605-623).
catggccatctatatgtca

SEQ ID NO: 358168 - DNA, 19 bp, Homo sapiens
  siRNA target sequence for PTX1 (NM_016570.1,608-626).
ggccatctatatgtcaata

SEQ ID NO: 358169 - DNA, 19 bp, Homo sapiens
  siRNA target sequence for PTX1 (NM_016570.1,609-627).
gccatctatatgtcaataa

SEQ ID NO: 358170 - DNA, 19 bp, Homo sapiens
  siRNA target sequence for PTX1 (NM_016570.1,632-650).
gcagggaattttcacataa

SEQ ID NO: 358171 - DNA, 19 bp, Homo sapiens
  siRNA target sequence for PTX1 (NM_016570.1,761-779).
gagcttgttccagcaatta

SEQ ID NO: 358172 - DNA, 19 bp, Homo sapiens
  siRNA target sequence for PTX1 (NM_016570.1,763-781).
gcttgttccagcaattatt

SEQ ID NO: 358173 - DNA, 19 bp, Homo sapiens
  siRNA target sequence for PTX1 (NM_016570.1,770-788).
ccagcaattattaatcctt

SEQ ID NO: 358174 - DNA, 19 bp, Homo sapiens
  siRNA target sequence for PTX1 (NM_016570.1,774-792).
caattattaatcctttaga

SEQ ID NO: 358175 - DNA, 19 bp, Homo sapiens
  siRNA target sequence for PTX1 (NM_016570.1,818-836).
cacaaccagatgttccaat

SEQ ID NO: 358176 - DNA, 19 bp, Homo sapiens
  siRNA target sequence for PTX1 (NM_016570.1,846-864).
cagttgtgccaacaaaact

SEQ ID NO: 358177 - DNA, 19 bp, Homo sapiens
  siRNA target sequence for PTX1 (NM_016570.1,854-872).
ccaacaaaactacatacat

SEQ ID NO: 358178 - DNA, 19 bp, Homo sapiens
  siRNA target sequence for PTX1 (NM_016570.1,882-900).
cagcagacacccatcagtt

SEQ ID NO: 358179 - DNA, 19 bp, Homo sapiens
  siRNA target sequence for PTX1 (NM_016570.1,916-934).
ggaacgtatcattaaccat

SEQ ID NO: 358180 - DNA, 19 bp, Homo sapiens
  siRNA target sequence for PTX1 (NM_016570.1,957-975).
ctgggatatttatgaaata

SEQ ID NO: 358181 - DNA, 19 bp, Homo sapiens
  siRNA target sequence for PTX1 (NM_016570.1,1050-1068).
gtattgttggaggaatctt

SEQ ID NO: 358182 - DNA, 19 bp, Homo sapiens
  siRNA target sequence for PTX1 (NM_016570.1,1071-1089).
caacaacaggcatgttaca

SEQ ID NO: 358183 - DNA, 19 bp, Homo sapiens
  siRNA target sequence for TU12B1-TY (NM_016575.1,166-184).
caccttggtgttttattca

SEQ ID NO: 358184 - DNA, 19 bp, Homo sapiens
  siRNA target sequence for TU12B1-TY (NM_016575.1,168-186).
ccttggtgttttattcaaa

SEQ ID NO: 358185 - DNA, 19 bp, Homo sapiens
  siRNA target sequence for TU12B1-TY (NM_016575.1,188-206).
cacctccacacgctgatat

SEQ ID NO: 358186 - DNA, 19 bp, Homo sapiens
  siRNA target sequence for TU12B1-TY (NM_016575.1,190-208).
cctccacacgctgatattt

SEQ ID NO: 358187 - DNA, 19 bp, Homo sapiens
  siRNA target sequence for TU12B1-TY (NM_016575.1,191-209).
ctccacacgctgatattta

SEQ ID NO: 358188 - DNA, 19 bp, Homo sapiens
  siRNA target sequence for TU12B1-TY (NM_016575.1,213-231).
ctgcacgggaccttctcat

SEQ ID NO: 358189 - DNA, 19 bp, Homo sapiens
  siRNA target sequence for TU12B1-TY (NM_016575.1,216-234).
cacgggaccttctcatcaa

SEQ ID NO: 358190 - DNA, 19 bp, Homo sapiens
  siRNA target sequence for TU12B1-TY (NM_016575.1,287-305).
gcaattcgtggacttcatt

SEQ ID NO: 358191 - DNA, 19 bp, Homo sapiens
  siRNA target sequence for TU12B1-TY (NM_016575.1,294-312).
gtggacttcattatgatgt

SEQ ID NO: 358192 - DNA, 19 bp, Homo sapiens
  siRNA target sequence for TU12B1-TY (NM_016575.1,297-315).
gacttcattatgatgtaca

SEQ ID NO: 358193 - DNA, 19 bp, Homo sapiens
  siRNA target sequence for TU12B1-TY (NM_016575.1,311-329).
gtacagcgggcagtattaa

SEQ ID NO: 358194 - DNA, 19 bp, Homo sapiens
  siRNA target sequence for TU12B1-TY (NM_016575.1,314-332).
cagcgggcagtattaatga

SEQ ID NO: 358195 - DNA, 19 bp, Homo sapiens
  siRNA target sequence for TU12B1-TY (NM_016575.1,317-335).
cgggcagtattaatgaaga

SEQ ID NO: 358196 - DNA, 19 bp, Homo sapiens
  siRNA target sequence for TU12B1-TY (NM_016575.1,331-349).
gaagatcgatgcttttcat

SEQ ID NO: 358197 - DNA, 19 bp, Homo sapiens
  siRNA target sequence for TU12B1-TY (NM_016575.1,529-547).
cctgtcctgcgtgaatgaa

SEQ ID NO: 358198 - DNA, 19 bp, Homo sapiens
  siRNA target sequence for TU12B1-TY (NM_016575.1,530-548).
ctgtcctgcgtgaatgaat

SEQ ID NO: 358199 - DNA, 19 bp, Homo sapiens
  siRNA target sequence for TU12B1-TY (NM_016575.1,619-637).
cgtccacatcaaaggaata

SEQ ID NO: 358200 - DNA, 19 bp, Homo sapiens
  siRNA target sequence for TU12B1-TY (NM_016575.1,659-677).
gacattgaaaagtacatct

SEQ ID NO: 358201 - DNA, 19 bp, Homo sapiens
  siRNA target sequence for TU12B1-TY (NM_016575.1,767-785).
gtggacaaagggatgagtt

SEQ ID NO: 358202 - DNA, 19 bp, Homo sapiens
  siRNA target sequence for TU12B1-TY (NM_016575.1,839-857).
gagaagccaaacttcttta

SEQ ID NO: 358203 - DNA, 19 bp, Homo sapiens
  siRNA target sequence for TU12B1-TY (NM_016575.1,870-888).
ggcctttccgaaagatgaa

SEQ ID NO: 358204 - DNA, 19 bp, Homo sapiens
  siRNA target sequence for TU12B1-TY (NM_016575.1,890-908).
gagaaaggtgtcttactct

SEQ ID NO: 358205 - DNA, 19 bp, Homo sapiens
  siRNA target sequence for TU12B1-TY (NM_016575.1,909-927).
gggataaaatccataagtt

SEQ ID NO: 358206 - DNA, 19 bp, Homo sapiens
  siRNA target sequence for TU12B1-TY (NM_016575.1,946-964).
caagcagggtaatttatat

SEQ ID NO: 358207 - DNA, 19 bp, Homo sapiens
  siRNA target sequence for TU12B1-TY (NM_016575.1,992-1010).
ggatccagagtgttgtatt

SEQ ID NO: 358208 - DNA, 19 bp, Homo sapiens
  siRNA target sequence for TU12B1-TY (NM_016575.1,1038-1056).
cggatttgaccctaaagca

SEQ ID NO: 358209 - DNA, 19 bp, Homo sapiens
  siRNA target sequence for TU12B1-TY (NM_016575.1,1039-1057).
ggatttgaccctaaagcat

SEQ ID NO: 358210 - DNA, 19 bp, Homo sapiens
  siRNA target sequence for TU12B1-TY (NM_016575.1,1111-1129).
gaacacggagcaatacatt

SEQ ID NO: 358211 - DNA, 19 bp, Homo sapiens
  siRNA target sequence for TU12B1-TY (NM_016575.1,1152-1170).
ccttgactggcttattgga

SEQ ID NO: 358212 - DNA, 19 bp, Homo sapiens
  siRNA target sequence for TU12B1-TY (NM_016575.1,1153-1171).
cttgactggcttattggaa

SEQ ID NO: 358213 - DNA, 19 bp, Homo sapiens
  siRNA target sequence for TU12B1-TY (NM_016575.1,1244-1262).
cgagaaatgaccaagagtt

SEQ ID NO: 358214 - DNA, 19 bp, Homo sapiens
  siRNA target sequence for TU12B1-TY (NM_016575.1,1252-1270).
gaccaagagtttcttcaat

SEQ ID NO: 358215 - DNA, 19 bp, Homo sapiens
  siRNA target sequence for TU12B1-TY (NM_016575.1,1332-1350).
cgcgcttcgctgacatcta

SEQ ID NO: 358216 - DNA, 19 bp, Homo sapiens
  siRNA target sequence for TU12B1-TY (NM_016575.1,1382-1400).
gacgtcagccacactttct

SEQ ID NO: 358217 - DNA, 19 bp, Homo sapiens
  siRNA target sequence for SITPEC (NM_016581.2,347-365).
gcagacggtgcagaaattt

SEQ ID NO: 358218 - DNA, 19 bp, Homo sapiens
  siRNA target sequence for SITPEC (NM_016581.2,615-633).
gagttcctgctgattcaga

SEQ ID NO: 358219 - DNA, 19 bp, Homo sapiens
  siRNA target sequence for SITPEC (NM_016581.2,685-703).
ggttccctcgattcatgaa

SEQ ID NO: 358220 - DNA, 19 bp, Homo sapiens
  siRNA target sequence for SITPEC (NM_016581.2,954-972).
ctgtggctccgcaacaagt

SEQ ID NO: 358221 - DNA, 19 bp, Homo sapiens
  siRNA target sequence for SITPEC (NM_016581.2,962-980).
ccgcaacaagtgtgtgtat

SEQ ID NO: 358222 - DNA, 19 bp, Homo sapiens
  siRNA target sequence for SITPEC (NM_016581.2,963-981).
cgcaacaagtgtgtgtatt

SEQ ID NO: 358223 - DNA, 19 bp, Homo sapiens
  siRNA target sequence for SITPEC (NM_016581.2,964-982).
gcaacaagtgtgtgtatta

SEQ ID NO: 358224 - DNA, 19 bp, Homo sapiens
  siRNA target sequence for SITPEC (NM_016581.2,1090-1108).
ggagtggctgggacaacta

SEQ ID NO: 358225 - DNA, 19 bp, Homo sapiens
  siRNA target sequence for SITPEC (NM_016581.2,1099-1117).
gggacaactacgagtttga

SEQ ID NO: 358226 - DNA, 19 bp, Homo sapiens
  siRNA target sequence for SITPEC (NM_016581.2,1101-1119).
gacaactacgagtttgaca

SEQ ID NO: 358227 - DNA, 19 bp, Homo sapiens
  siRNA target sequence for IL23A (NM_016584.2,319-337).
gggacacatggatctaaga

SEQ ID NO: 358228 - DNA, 19 bp, Homo sapiens
  siRNA target sequence for IL23A (NM_016584.2,442-460).
gatccaccagggtctgatt

SEQ ID NO: 358229 - DNA, 19 bp, Homo sapiens
  siRNA target sequence for IL23A (NM_016584.2,453-471).
gtctgattttttatgagaa

SEQ ID NO: 358230 - DNA, 19 bp, Homo sapiens
  siRNA target sequence for IL23A (NM_016584.2,472-490).
gctgctaggatcggatatt

SEQ ID NO: 358231 - DNA, 19 bp, Homo sapiens
  siRNA target sequence for IL23A (NM_016584.2,473-491).
ctgctaggatcggatattt

SEQ ID NO: 358232 - DNA, 19 bp, Homo sapiens
  siRNA target sequence for IL23A (NM_016584.2,476-494).
ctaggatcggatattttca

SEQ ID NO: 358233 - DNA, 19 bp, Homo sapiens
  siRNA target sequence for IL23A (NM_016584.2,593-611).
gagactcagcagattccaa

SEQ ID NO: 358234 - DNA, 19 bp, Homo sapiens
  siRNA target sequence for NRN1 (NM_016588.2,663-681).
gttgaacggcagatatatt

SEQ ID NO: 358235 - DNA, 19 bp, Homo sapiens
  siRNA target sequence for NRN1 (NM_016588.2,666-684).
gaacggcagatatatttca

SEQ ID NO: 358236 - DNA, 19 bp, Homo sapiens
  siRNA target sequence for NRN1 (NM_016588.2,848-866).
gcacatactgggaggattt

SEQ ID NO: 358237 - DNA, 19 bp, Homo sapiens
  siRNA target sequence for NRN1 (NM_016588.2,851-869).
catactgggaggatttcca

SEQ ID NO: 358238 - DNA, 19 bp, Homo sapiens
  siRNA target sequence for NRN1 (NM_016588.2,900-918).
ccaggaaggggcgaaagat

SEQ ID NO: 358239 - DNA, 19 bp, Homo sapiens
  siRNA target sequence for NRN1 (NM_016588.2,901-919).
caggaaggggcgaaagata

SEQ ID NO: 358240 - DNA, 19 bp, Homo sapiens
  siRNA target sequence for NRN1 (NM_016588.2,960-978).
ccaaggcagcttattcgaa

SEQ ID NO: 358241 - DNA, 19 bp, Homo sapiens
  siRNA target sequence for C5orf7 (NM_016604.2,380-398).
ccaggacctagcgatcttt

SEQ ID NO: 358242 - DNA, 19 bp, Homo sapiens
  siRNA target sequence for C5orf7 (NM_016604.2,383-401).
ggacctagcgatctttgta

SEQ ID NO: 358243 - DNA, 19 bp, Homo sapiens
  siRNA target sequence for C5orf7 (NM_016604.2,386-404).
cctagcgatctttgtagaa

SEQ ID NO: 358244 - DNA, 19 bp, Homo sapiens
  siRNA target sequence for C5orf7 (NM_016604.2,387-405).
ctagcgatctttgtagaat

SEQ ID NO: 358245 - DNA, 19 bp, Homo sapiens
  siRNA target sequence for C5orf7 (NM_016604.2,391-409).
cgatctttgtagaatttga

SEQ ID NO: 358246 - DNA, 19 bp, Homo sapiens
  siRNA target sequence for C5orf7 (NM_016604.2,473-491).
gctggaagggtctcttgta

SEQ ID NO: 358247 - DNA, 19 bp, Homo sapiens
  siRNA target sequence for C5orf7 (NM_016604.2,562-580).
cttttactccccttgtaga

SEQ ID NO: 358248 - DNA, 19 bp, Homo sapiens
  siRNA target sequence for C5orf7 (NM_016604.2,568-586).
ctccccttgtagataaact

SEQ ID NO: 358249 - DNA, 19 bp, Homo sapiens
  siRNA target sequence for C5orf7 (NM_016604.2,652-670).
ccaatgggttgcatctgtt

SEQ ID NO: 358250 - DNA, 19 bp, Homo sapiens
  siRNA target sequence for C5orf7 (NM_016604.2,653-671).
caatgggttgcatctgttt

SEQ ID NO: 358251 - DNA, 19 bp, Homo sapiens
  siRNA target sequence for C5orf7 (NM_016604.2,658-676).
ggttgcatctgtttcagat

SEQ ID NO: 358252 - DNA, 19 bp, Homo sapiens
  siRNA target sequence for C5orf7 (NM_016604.2,668-686).
gtttcagatgggaacagat

SEQ ID NO: 358253 - DNA, 19 bp, Homo sapiens
  siRNA target sequence for C5orf7 (NM_016604.2,679-697).
gaacagatagccaaaacca

SEQ ID NO: 358254 - DNA, 19 bp, Homo sapiens
  siRNA target sequence for C5orf7 (NM_016604.2,743-761).
gatcagtgaccaaaagcta

SEQ ID NO: 358255 - DNA, 19 bp, Homo sapiens
  siRNA target sequence for C5orf7 (NM_016604.2,882-900).
cttatggaggtgtctgtaa

SEQ ID NO: 358256 - DNA, 19 bp, Homo sapiens
  siRNA target sequence for C5orf7 (NM_016604.2,922-940).
cggtagatcccagactaat

SEQ ID NO: 358257 - DNA, 19 bp, Homo sapiens
  siRNA target sequence for C5orf7 (NM_016604.2,931-949).
ccagactaatccatgtgat

SEQ ID NO: 358258 - DNA, 19 bp, Homo sapiens
  siRNA target sequence for C5orf7 (NM_016604.2,976-994).
gcgaggggggtacgttaaa

SEQ ID NO: 358259 - DNA, 19 bp, Homo sapiens
  siRNA target sequence for C5orf7 (NM_016604.2,977-995).
cgaggggggtacgttaaaa

SEQ ID NO: 358260 - DNA, 19 bp, Homo sapiens
  siRNA target sequence for C5orf7 (NM_016604.2,980-998).
ggggggtacgttaaaagca

SEQ ID NO: 358261 - DNA, 19 bp, Homo sapiens
  siRNA target sequence for C5orf7 (NM_016604.2,985-1003).
gtacgttaaaagcagtaaa

SEQ ID NO: 358262 - DNA, 19 bp, Homo sapiens
  siRNA target sequence for C5orf7 (NM_016604.2,1234-1252).
catttgtcccccagataaa

SEQ ID NO: 358263 - DNA, 19 bp, Homo sapiens
  siRNA target sequence for C5orf7 (NM_016604.2,1244-1262).
ccagataaaccgcaacatt

SEQ ID NO: 358264 - DNA, 19 bp, Homo sapiens
  siRNA target sequence for C5orf7 (NM_016604.2,1565-1583).
gcaggcctcgggagagaat

SEQ ID NO: 358265 - DNA, 19 bp, Homo sapiens
  siRNA target sequence for C5orf7 (NM_016604.2,1566-1584).
caggcctcgggagagaatt

SEQ ID NO: 358266 - DNA, 19 bp, Homo sapiens
  siRNA target sequence for C5orf7 (NM_016604.2,1568-1586).
ggcctcgggagagaattca

SEQ ID NO: 358267 - DNA, 19 bp, Homo sapiens
  siRNA target sequence for C5orf7 (NM_016604.2,1578-1596).
gagaattcaagaaattcta

SEQ ID NO: 358268 - DNA, 19 bp, Homo sapiens
  siRNA target sequence for C5orf7 (NM_016604.2,1782-1800).
caatgcatgtcccaaactt

SEQ ID NO: 358269 - DNA, 19 bp, Homo sapiens
  siRNA target sequence for C5orf7 (NM_016604.2,1803-1821).
cctaccagtaactacttca

SEQ ID NO: 358270 - DNA, 19 bp, Homo sapiens
  siRNA target sequence for C5orf7 (NM_016604.2,1814-1832).
ctacttcactactgtttca

SEQ ID NO: 358271 - DNA, 19 bp, Homo sapiens
  siRNA target sequence for C5orf7 (NM_016604.2,1822-1840).
ctactgtttcagagagttt

SEQ ID NO: 358272 - DNA, 19 bp, Homo sapiens
  siRNA target sequence for C5orf7 (NM_016604.2,1852-1870).
cttctagtcgggactcatt

SEQ ID NO: 358273 - DNA, 19 bp, Homo sapiens
  siRNA target sequence for C5orf7 (NM_016604.2,1855-1873).
ctagtcgggactcattcaa

SEQ ID NO: 358274 - DNA, 19 bp, Homo sapiens
  siRNA target sequence for C5orf7 (NM_016604.2,1858-1876).
gtcgggactcattcaaaca

SEQ ID NO: 358275 - DNA, 19 bp, Homo sapiens
  siRNA target sequence for C5orf7 (NM_016604.2,1860-1878).
cgggactcattcaaacaaa

SEQ ID NO: 358276 - DNA, 19 bp, Homo sapiens
  siRNA target sequence for C5orf7 (NM_016604.2,2035-2053).
cccgtaccccagagaatca

SEQ ID NO: 358277 - DNA, 19 bp, Homo sapiens
  siRNA target sequence for C5orf7 (NM_016604.2,2036-2054).
ccgtaccccagagaatcat

SEQ ID NO: 358278 - DNA, 19 bp, Homo sapiens
  siRNA target sequence for C5orf7 (NM_016604.2,2038-2056).
gtaccccagagaatcatga

SEQ ID NO: 358279 - DNA, 19 bp, Homo sapiens
  siRNA target sequence for C5orf7 (NM_016604.2,2136-2154).
cacagccctttcagtagtt

SEQ ID NO: 358280 - DNA, 19 bp, Homo sapiens
  siRNA target sequence for C5orf7 (NM_016604.2,2239-2257).
ctgcagattcggcatcttt

SEQ ID NO: 358281 - DNA, 19 bp, Homo sapiens
  siRNA target sequence for C5orf7 (NM_016604.2,2248-2266).
cggcatctttagcaaagaa

SEQ ID NO: 358282 - DNA, 19 bp, Homo sapiens
  siRNA target sequence for C5orf7 (NM_016604.2,2267-2285).
gaaacccctcttcattaca

SEQ ID NO: 358283 - DNA, 19 bp, Homo sapiens
  siRNA target sequence for C5orf7 (NM_016604.2,2291-2309).
ctcctccaagctagtatct

SEQ ID NO: 358284 - DNA, 19 bp, Homo sapiens
  siRNA target sequence for C5orf7 (NM_016604.2,2472-2490).
gacaatcccctcctcaaaa

SEQ ID NO: 358285 - DNA, 19 bp, Homo sapiens
  siRNA target sequence for C5orf7 (NM_016604.2,2478-2496).
cccctcctcaaaaccttta

SEQ ID NO: 358286 - DNA, 19 bp, Homo sapiens
  siRNA target sequence for C5orf7 (NM_016604.2,2480-2498).
cctcctcaaaacctttagt

SEQ ID NO: 358287 - DNA, 19 bp, Homo sapiens
  siRNA target sequence for C5orf7 (NM_016604.2,2481-2499).
ctcctcaaaacctttagta

SEQ ID NO: 358288 - DNA, 19 bp, Homo sapiens
  siRNA target sequence for C5orf7 (NM_016604.2,2514-2532).
cactcaggcggctttctgt

SEQ ID NO: 358289 - DNA, 19 bp, Homo sapiens
  siRNA target sequence for C5orf7 (NM_016604.2,2555-2573).
ggagaacaaagctcctttt

SEQ ID NO: 358290 - DNA, 19 bp, Homo sapiens
  siRNA target sequence for C5orf7 (NM_016604.2,2763-2781).
ctgttgctgggcaaaagca

SEQ ID NO: 358291 - DNA, 19 bp, Homo sapiens
  siRNA target sequence for C5orf7 (NM_016604.2,2900-2918).
ggatgggtcatgcatcaat

SEQ ID NO: 358292 - DNA, 19 bp, Homo sapiens
  siRNA target sequence for C5orf7 (NM_016604.2,2957-2975).
ggagcggtaccggaagttt

SEQ ID NO: 358293 - DNA, 19 bp, Homo sapiens
  siRNA target sequence for C5orf7 (NM_016604.2,2958-2976).
gagcggtaccggaagttta

SEQ ID NO: 358294 - DNA, 19 bp, Homo sapiens
  siRNA target sequence for C5orf7 (NM_016604.2,2979-2997).
gaacaggagcaagatgatt

SEQ ID NO: 358295 - DNA, 19 bp, Homo sapiens
  siRNA target sequence for C5orf7 (NM_016604.2,2982-3000).
caggagcaagatgattcta

SEQ ID NO: 358296 - DNA, 19 bp, Homo sapiens
  siRNA target sequence for C5orf7 (NM_016604.2,2987-3005).
gcaagatgattctactgta

SEQ ID NO: 358297 - DNA, 19 bp, Homo sapiens
  siRNA target sequence for C5orf7 (NM_016604.2,3021-3039).
cacttccggaggttgatct

SEQ ID NO: 358298 - DNA, 19 bp, Homo sapiens
  siRNA target sequence for C5orf7 (NM_016604.2,3032-3050).
gttgatcttcactcgaaaa

SEQ ID NO: 358299 - DNA, 19 bp, Homo sapiens
  siRNA target sequence for C5orf7 (NM_016604.2,3059-3077).
ccgtgtggaggggttttta

SEQ ID NO: 358300 - DNA, 19 bp, Homo sapiens
  siRNA target sequence for C5orf7 (NM_016604.2,3060-3078).
cgtgtggaggggtttttaa

SEQ ID NO: 358301 - DNA, 19 bp, Homo sapiens
  siRNA target sequence for C5orf7 (NM_016604.2,3131-3149).
cctagcagaagggatagat

SEQ ID NO: 358302 - DNA, 19 bp, Homo sapiens
  siRNA target sequence for C5orf7 (NM_016604.2,3136-3154).
cagaagggatagatctaga

SEQ ID NO: 358303 - DNA, 19 bp, Homo sapiens
  siRNA target sequence for C5orf7 (NM_016604.2,3194-3212).
ctgccagctcgtaatgtct

SEQ ID NO: 358304 - DNA, 19 bp, Homo sapiens
  siRNA target sequence for C5orf7 (NM_016604.2,3301-3319).
gtgaaacaactctcttcaa

SEQ ID NO: 358305 - DNA, 19 bp, Homo sapiens
  siRNA target sequence for C5orf7 (NM_016604.2,3458-3476).
gtcccacgaaccagagaat

SEQ ID NO: 358306 - DNA, 19 bp, Homo sapiens
  siRNA target sequence for C5orf7 (NM_016604.2,3460-3478).
cccacgaaccagagaatct

SEQ ID NO: 358307 - DNA, 19 bp, Homo sapiens
  siRNA target sequence for C5orf7 (NM_016604.2,3462-3480).
cacgaaccagagaatctca

SEQ ID NO: 358308 - DNA, 19 bp, Homo sapiens
  siRNA target sequence for C5orf7 (NM_016604.2,3477-3495).
ctcatgcccacacaaatta

SEQ ID NO: 358309 - DNA, 19 bp, Homo sapiens
  siRNA target sequence for C5orf7 (NM_016604.2,3498-3516).
cctggcacagctctttaca

SEQ ID NO: 358310 - DNA, 19 bp, Homo sapiens
  siRNA target sequence for C5orf7 (NM_016604.2,3499-3517).
ctggcacagctctttacaa

SEQ ID NO: 358311 - DNA, 19 bp, Homo sapiens
  siRNA target sequence for C5orf7 (NM_016604.2,3564-3582).
gcaaactgcccttgtatca

SEQ ID NO: 358312 - DNA, 19 bp, Homo sapiens
  siRNA target sequence for C5orf7 (NM_016604.2,3577-3595).
gtatcagtcgacagaacaa

SEQ ID NO: 358313 - DNA, 19 bp, Homo sapiens
  siRNA target sequence for C5orf7 (NM_016604.2,3583-3601).
gtcgacagaacaaatctgt

SEQ ID NO: 358314 - DNA, 19 bp, Homo sapiens
  siRNA target sequence for C5orf7 (NM_016604.2,3585-3603).
cgacagaacaaatctgtat

SEQ ID NO: 358315 - DNA, 19 bp, Homo sapiens
  siRNA target sequence for C5orf7 (NM_016604.2,3586-3604).
gacagaacaaatctgtatt

SEQ ID NO: 358316 - DNA, 19 bp, Homo sapiens
  siRNA target sequence for C5orf7 (NM_016604.2,3629-3647).
gtcacagcttcctagcata

SEQ ID NO: 358317 - DNA, 19 bp, Homo sapiens
  siRNA target sequence for C5orf7 (NM_016604.2,3657-3675).
gcctcttctggaaacgaaa

SEQ ID NO: 358318 - DNA, 19 bp, Homo sapiens
  siRNA target sequence for C5orf7 (NM_016604.2,3791-3809).
ggcatcaaatagcaatagt

SEQ ID NO: 358319 - DNA, 19 bp, Homo sapiens
  siRNA target sequence for C5orf7 (NM_016604.2,3866-3884).
gcactggttggcagattta

SEQ ID NO: 358320 - DNA, 19 bp, Homo sapiens
  siRNA target sequence for C5orf7 (NM_016604.2,3869-3887).
ctggttggcagatttagca

SEQ ID NO: 358321 - DNA, 19 bp, Homo sapiens
  siRNA target sequence for C5orf7 (NM_016604.2,4002-4020).
ccgctgactccaaagcttt

SEQ ID NO: 358322 - DNA, 19 bp, Homo sapiens
  siRNA target sequence for C5orf7 (NM_016604.2,4192-4210).
gcctacccaactttcttga

SEQ ID NO: 358323 - DNA, 19 bp, Homo sapiens
  siRNA target sequence for C5orf7 (NM_016604.2,4221-4239).
gcctcagtggtagaaaata

SEQ ID NO: 358324 - DNA, 19 bp, Homo sapiens
  siRNA target sequence for C5orf7 (NM_016604.2,4222-4240).
cctcagtggtagaaaataa

SEQ ID NO: 358325 - DNA, 19 bp, Homo sapiens
  siRNA target sequence for C5orf7 (NM_016604.2,4266-4284).
gcctgcaacttgactgata

SEQ ID NO: 358326 - DNA, 19 bp, Homo sapiens
  siRNA target sequence for C5orf7 (NM_016604.2,4323-4341).
gtgctagatccccatactt

SEQ ID NO: 358327 - DNA, 19 bp, Homo sapiens
  siRNA target sequence for C5orf7 (NM_016604.2,4325-4343).
gctagatccccatacttct

SEQ ID NO: 358328 - DNA, 19 bp, Homo sapiens
  siRNA target sequence for C5orf7 (NM_016604.2,4446-4464).
ctggtttcgggggtacata

SEQ ID NO: 358329 - DNA, 19 bp, Homo sapiens
  siRNA target sequence for C5orf7 (NM_016604.2,4448-4466).
ggtttcgggggtacataaa

SEQ ID NO: 358330 - DNA, 19 bp, Homo sapiens
  siRNA target sequence for C5orf7 (NM_016604.2,4449-4467).
gtttcgggggtacataaaa

SEQ ID NO: 358331 - DNA, 19 bp, Homo sapiens
  siRNA target sequence for C5orf7 (NM_016604.2,4516-4534).
gagaccaggatgtagactt

SEQ ID NO: 358332 - DNA, 19 bp, Homo sapiens
  siRNA target sequence for C5orf7 (NM_016604.2,4543-4561).
gcaggaactgtgctataat

SEQ ID NO: 358333 - DNA, 19 bp, Homo sapiens
  siRNA target sequence for C5orf7 (NM_016604.2,4555-4573).
ctataatttccgatgtgaa

SEQ ID NO: 358334 - DNA, 19 bp, Homo sapiens
  siRNA target sequence for C5orf7 (NM_016604.2,4569-4587).
gtgaaagttcgggatttct

SEQ ID NO: 358335 - DNA, 19 bp, Homo sapiens
  siRNA target sequence for C5orf7 (NM_016604.2,4589-4607).
ggatggtttcgagatcata

SEQ ID NO: 358336 - DNA, 19 bp, Homo sapiens
  siRNA target sequence for C5orf7 (NM_016604.2,4590-4608).
gatggtttcgagatcatat

SEQ ID NO: 358337 - DNA, 19 bp, Homo sapiens
  siRNA target sequence for C5orf7 (NM_016604.2,4593-4611).
ggtttcgagatcatatgca

SEQ ID NO: 358338 - DNA, 19 bp, Homo sapiens
  siRNA target sequence for C5orf7 (NM_016604.2,4594-4612).
gtttcgagatcatatgcaa

SEQ ID NO: 358339 - DNA, 19 bp, Homo sapiens
  siRNA target sequence for C5orf7 (NM_016604.2,4638-4656).
ccaatggtgctcaaactca

SEQ ID NO: 358340 - DNA, 19 bp, Homo sapiens
  siRNA target sequence for C5orf7 (NM_016604.2,4639-4657).
caatggtgctcaaactcaa

SEQ ID NO: 358341 - DNA, 19 bp, Homo sapiens
  siRNA target sequence for C5orf7 (NM_016604.2,4691-4709).
gatgccaaccaggtttgaa

SEQ ID NO: 358342 - DNA, 19 bp, Homo sapiens
  siRNA target sequence for C5orf7 (NM_016604.2,4694-4712).
gccaaccaggtttgaagat

SEQ ID NO: 358343 - DNA, 19 bp, Homo sapiens
  siRNA target sequence for C5orf7 (NM_016604.2,4777-4795).
ggctacctagctactttgt

SEQ ID NO: 358344 - DNA, 19 bp, Homo sapiens
  siRNA target sequence for C5orf7 (NM_016604.2,4823-4841).
caacgcctatgggttgata

SEQ ID NO: 358345 - DNA, 19 bp, Homo sapiens
  siRNA target sequence for C5orf7 (NM_016604.2,4826-4844).
cgcctatgggttgataaca

SEQ ID NO: 358346 - DNA, 19 bp, Homo sapiens
  siRNA target sequence for C5orf7 (NM_016604.2,4858-4876).
gagttggtacaacaaatct

SEQ ID NO: 358347 - DNA, 19 bp, Homo sapiens
  siRNA target sequence for C5orf7 (NM_016604.2,4931-4949).
cggggagggtgctcatgat

SEQ ID NO: 358348 - DNA, 19 bp, Homo sapiens
  siRNA target sequence for C5orf7 (NM_016604.2,5022-5040).
gagaagccaggtgctttat

SEQ ID NO: 358349 - DNA, 19 bp, Homo sapiens
  siRNA target sequence for C5orf7 (NM_016604.2,5171-5189).
cctccgtaagcgactctat

SEQ ID NO: 358350 - DNA, 19 bp, Homo sapiens
  siRNA target sequence for C5orf7 (NM_016604.2,5268-5286).
caggttcacaatctataca

SEQ ID NO: 358351 - DNA, 19 bp, Homo sapiens
  siRNA target sequence for C5orf7 (NM_016604.2,5270-5288).
ggttcacaatctatacagt

SEQ ID NO: 358352 - DNA, 19 bp, Homo sapiens
  siRNA target sequence for C5orf7 (NM_016604.2,5313-5331).
gtatctccagaacatgtaa

SEQ ID NO: 358353 - DNA, 19 bp, Homo sapiens
  siRNA target sequence for C5orf7 (NM_016604.2,5343-5361).
cgcctgactcaggaattca

SEQ ID NO: 358354 - DNA, 19 bp, Homo sapiens
  siRNA target sequence for C5orf7 (NM_016604.2,5360-5378).
caggcatctctctaacact

SEQ ID NO: 358355 - DNA, 19 bp, Homo sapiens
  siRNA target sequence for C5orf7 (NM_016604.2,5367-5385).
ctctctaacactcatacaa

SEQ ID NO: 358356 - DNA, 19 bp, Homo sapiens
  siRNA target sequence for C5orf7 (NM_016604.2,5369-5387).
ctctaacactcatacaaat

SEQ ID NO: 358357 - DNA, 19 bp, Homo sapiens
  siRNA target sequence for C5orf7 (NM_016604.2,5371-5389).
ctaacactcatacaaatca

SEQ ID NO: 358358 - DNA, 19 bp, Homo sapiens
  siRNA target sequence for C5orf7 (NM_016604.2,5403-5421).
caggtgaagaacatcattt

SEQ ID NO: 358359 - DNA, 19 bp, Homo sapiens
  siRNA target sequence for C5orf7 (NM_016604.2,5453-5471).
caaggctcatgaatccaaa

SEQ ID NO: 358360 - DNA, 19 bp, Homo sapiens
  siRNA target sequence for LOC51308 (NM_016606.1,134-152).
cgagacgctcacggatata

SEQ ID NO: 358361 - DNA, 19 bp, Homo sapiens
  siRNA target sequence for LOC51308 (NM_016606.1,312-330).
cgagacaagagctatgaga

SEQ ID NO: 358362 - DNA, 19 bp, Homo sapiens
  siRNA target sequence for ALEX3 (NM_016607.2,536-554).
gggctacgccaggaaagta

SEQ ID NO: 358363 - DNA, 19 bp, Homo sapiens
  siRNA target sequence for ALEX3 (NM_016607.2,610-628).
gactgactaggggaagaaa

SEQ ID NO: 358364 - DNA, 19 bp, Homo sapiens
  siRNA target sequence for ALEX3 (NM_016607.2,734-752).
caatgagagcaagagtata

SEQ ID NO: 358365 - DNA, 19 bp, Homo sapiens
  siRNA target sequence for ALEX3 (NM_016607.2,990-1008).
gcatttaacagagatatta

SEQ ID NO: 358366 - DNA, 19 bp, Homo sapiens
  siRNA target sequence for ALEX3 (NM_016607.2,1028-1046).
cccaattgtcgcaaagatt

SEQ ID NO: 358367 - DNA, 19 bp, Homo sapiens
  siRNA target sequence for ALEX3 (NM_016607.2,1035-1053).
gtcgcaaagattctcaata

SEQ ID NO: 358368 - DNA, 19 bp, Homo sapiens
  siRNA target sequence for ALEX3 (NM_016607.2,1037-1055).
cgcaaagattctcaatact

SEQ ID NO: 358369 - DNA, 19 bp, Homo sapiens
  siRNA target sequence for ALEX3 (NM_016607.2,1054-1072).
ctcgggatcccatagttaa

SEQ ID NO: 358370 - DNA, 19 bp, Homo sapiens
  siRNA target sequence for ALEX3 (NM_016607.2,1057-1075).
gggatcccatagttaagga

SEQ ID NO: 358371 - DNA, 19 bp, Homo sapiens
  siRNA target sequence for ALEX3 (NM_016607.2,1058-1076).
ggatcccatagttaaggaa

SEQ ID NO: 358372 - DNA, 19 bp, Homo sapiens
  siRNA target sequence for ALEX3 (NM_016607.2,1059-1077).
gatcccatagttaaggaaa

SEQ ID NO: 358373 - DNA, 19 bp, Homo sapiens
  siRNA target sequence for ALEX3 (NM_016607.2,1080-1098).
gctttaattgtcctgaata

SEQ ID NO: 358374 - DNA, 19 bp, Homo sapiens
  siRNA target sequence for ALEX3 (NM_016607.2,1122-1140).
cagcgcaggcttaaagtat

SEQ ID NO: 358375 - DNA, 19 bp, Homo sapiens
  siRNA target sequence for ALEX3 (NM_016607.2,1125-1143).
cgcaggcttaaagtataca

SEQ ID NO: 358376 - DNA, 19 bp, Homo sapiens
  siRNA target sequence for ALEX3 (NM_016607.2,1126-1144).
gcaggcttaaagtatacat

SEQ ID NO: 358377 - DNA, 19 bp, Homo sapiens
  siRNA target sequence for ALEX3 (NM_016607.2,1130-1148).
gcttaaagtatacatgaat

SEQ ID NO: 358378 - DNA, 19 bp, Homo sapiens
  siRNA target sequence for ALEX3 (NM_016607.2,1200-1218).
gctggactgagattgctta

SEQ ID NO: 358379 - DNA, 19 bp, Homo sapiens
  siRNA target sequence for ALEX3 (NM_016607.2,1206-1224).
ctgagattgcttacaaata

SEQ ID NO: 358380 - DNA, 19 bp, Homo sapiens
  siRNA target sequence for ALEX3 (NM_016607.2,1228-1246).
ctgttactaatgagtatca

SEQ ID NO: 358381 - DNA, 19 bp, Homo sapiens
  siRNA target sequence for ALEX3 (NM_016607.2,1451-1469).
ggtcatatttgagaacata

SEQ ID NO: 358382 - DNA, 19 bp, Homo sapiens
  siRNA target sequence for ALEX3 (NM_016607.2,1497-1515).
gaacctactcagaatcaat

SEQ ID NO: 358383 - DNA, 19 bp, Homo sapiens
  siRNA target sequence for ALEX3 (NM_016607.2,1521-1539).
gaaggttcactttttttct

SEQ ID NO: 358384 - DNA, 19 bp, Homo sapiens
  siRNA target sequence for ALEX1 (NM_016608.1,431-449).
ctgctactgtgtatacaga

SEQ ID NO: 358385 - DNA, 19 bp, Homo sapiens
  siRNA target sequence for ALEX1 (NM_016608.1,465-483).
gacgagaacgagaaaatct

SEQ ID NO: 358386 - DNA, 19 bp, Homo sapiens
  siRNA target sequence for ALEX1 (NM_016608.1,530-548).
gactgtgaaaggagctaaa

SEQ ID NO: 358387 - DNA, 19 bp, Homo sapiens
  siRNA target sequence for ALEX1 (NM_016608.1,565-583).
ggtctggggccaaacttca

SEQ ID NO: 358388 - DNA, 19 bp, Homo sapiens
  siRNA target sequence for ALEX1 (NM_016608.1,626-644).
ggattgtccgggtgtaaaa

SEQ ID NO: 358389 - DNA, 19 bp, Homo sapiens
  siRNA target sequence for ALEX1 (NM_016608.1,631-649).
gtccgggtgtaaaagagaa

SEQ ID NO: 358390 - DNA, 19 bp, Homo sapiens
  siRNA target sequence for ALEX1 (NM_016608.1,779-797).
gacccttgcaccgagttta

SEQ ID NO: 358391 - DNA, 19 bp, Homo sapiens
  siRNA target sequence for ALEX1 (NM_016608.1,933-951).
cggagaggcaagttcaact

SEQ ID NO: 358392 - DNA, 19 bp, Homo sapiens
  siRNA target sequence for ALEX1 (NM_016608.1,934-952).
ggagaggcaagttcaactt

SEQ ID NO: 358393 - DNA, 19 bp, Homo sapiens
  siRNA target sequence for ALEX1 (NM_016608.1,940-958).
gcaagttcaactttcctta

SEQ ID NO: 358394 - DNA, 19 bp, Homo sapiens
  siRNA target sequence for ALEX1 (NM_016608.1,1007-1025).
catcctggagcgaacaaat

SEQ ID NO: 358395 - DNA, 19 bp, Homo sapiens
  siRNA target sequence for ALEX1 (NM_016608.1,1010-1028).
cctggagcgaacaaatgat

SEQ ID NO: 358396 - DNA, 19 bp, Homo sapiens
  siRNA target sequence for ALEX1 (NM_016608.1,1017-1035).
cgaacaaatgatcctttta

SEQ ID NO: 358397 - DNA, 19 bp, Homo sapiens
  siRNA target sequence for ALEX1 (NM_016608.1,1067-1085).
caatgcagcatattcattt

SEQ ID NO: 358398 - DNA, 19 bp, Homo sapiens
  siRNA target sequence for ALEX1 (NM_016608.1,1109-1127).
gggtggtgtcccaattatt

SEQ ID NO: 358399 - DNA, 19 bp, Homo sapiens
  siRNA target sequence for ALEX1 (NM_016608.1,1171-1189).
cttacaatgcccttaataa

SEQ ID NO: 358400 - DNA, 19 bp, Homo sapiens
  siRNA target sequence for ALEX1 (NM_016608.1,1289-1307).
ggctgggctaagactgtta

SEQ ID NO: 358401 - DNA, 19 bp, Homo sapiens
  siRNA target sequence for ALEX1 (NM_016608.1,1290-1308).
gctgggctaagactgttaa

SEQ ID NO: 358402 - DNA, 19 bp, Homo sapiens
  siRNA target sequence for ALEX1 (NM_016608.1,1293-1311).
gggctaagactgttaacca

SEQ ID NO: 358403 - DNA, 19 bp, Homo sapiens
  siRNA target sequence for ALEX1 (NM_016608.1,1294-1312).
ggctaagactgttaaccaa

SEQ ID NO: 358404 - DNA, 19 bp, Homo sapiens
  siRNA target sequence for ALEX1 (NM_016608.1,1392-1410).
cacttcaccaagatacaga

SEQ ID NO: 358405 - DNA, 19 bp, Homo sapiens
  siRNA target sequence for ALEX1 (NM_016608.1,1456-1474).
gagagctggtcagttgtaa

SEQ ID NO: 358406 - DNA, 19 bp, Homo sapiens
  siRNA target sequence for ALEX1 (NM_016608.1,1460-1478).
gctggtcagttgtaaagta

SEQ ID NO: 358407 - DNA, 19 bp, Homo sapiens
  siRNA target sequence for ALEX1 (NM_016608.1,1586-1604).
cgcatcatccaggaaagaa

SEQ ID NO: 358408 - DNA, 19 bp, Homo sapiens
  siRNA target sequence for ALEX1 (NM_016608.1,1686-1704).
gatctggtggtgaaagtaa

SEQ ID NO: 358409 - DNA, 19 bp, Homo sapiens
  siRNA target sequence for DKFZp434L142 (NM_016613.4,403-421).
ctgcgtgtgccatctactt

SEQ ID NO: 358410 - DNA, 19 bp, Homo sapiens
  siRNA target sequence for DKFZp434L142 (NM_016613.4,587-605).
gcccaatgtggtgtacatt

SEQ ID NO: 358411 - DNA, 19 bp, Homo sapiens
  siRNA target sequence for DKFZp434L142 (NM_016613.4,783-801).
ggagcaaacctggttaaga

SEQ ID NO: 358412 - DNA, 19 bp, Homo sapiens
  siRNA target sequence for DKFZp434L142 (NM_016613.4,919-937).
cctggctgagcaaagatga

SEQ ID NO: 358413 - DNA, 19 bp, Homo sapiens
  siRNA target sequence for DKFZp434L142 (NM_016613.4,1066-1084).
gcccctgtgggcttctcaa

SEQ ID NO: 358414 - DNA, 19 bp, Homo sapiens
  siRNA target sequence for DKFZp434L142 (NM_016613.4,1245-1263).
gacacccattcttctgtta

SEQ ID NO: 358415 - DNA, 19 bp, Homo sapiens
  siRNA target sequence for DKFZp434L142 (NM_016613.4,1249-1267).
cccattcttctgttaagct

SEQ ID NO: 358416 - DNA, 19 bp, Homo sapiens
  siRNA target sequence for DKFZp434L142 (NM_016613.4,1265-1283).
gctcacctggggaacttat

SEQ ID NO: 358417 - DNA, 19 bp, Homo sapiens
  siRNA target sequence for DKFZp434L142 (NM_016613.4,1373-1391).
caagatggcactctttgat

SEQ ID NO: 358418 - DNA, 19 bp, Homo sapiens
  siRNA target sequence for DKFZp434L142 (NM_016613.4,1413-1431).
cgcttagatacaaattgct

SEQ ID NO: 358419 - DNA, 19 bp, Homo sapiens
  siRNA target sequence for DKFZp434L142 (NM_016613.4,1459-1477).
cctgtgtacagaatggatt

SEQ ID NO: 358420 - DNA, 19 bp, Homo sapiens
  siRNA target sequence for DKFZp434L142 (NM_016613.4,1474-1492).
gattgaggccaaaatgtga

SEQ ID NO: 358421 - DNA, 19 bp, Homo sapiens
  siRNA target sequence for DKFZp434L142 (NM_016613.4,1507-1525).
cggctctagcacacattat

SEQ ID NO: 358422 - DNA, 19 bp, Homo sapiens
  siRNA target sequence for DKFZp434L142 (NM_016613.4,1510-1528).
ctctagcacacattatcca

SEQ ID NO: 358423 - DNA, 19 bp, Homo sapiens
  siRNA target sequence for DKFZp434L142 (NM_016613.4,1520-1538).
cattatccagcgaaagcat

SEQ ID NO: 358424 - DNA, 19 bp, Homo sapiens
  siRNA target sequence for DKFZp434L142 (NM_016613.4,1539-1557).
gacccaaggcatttggttt

SEQ ID NO: 358425 - DNA, 19 bp, Homo sapiens
  siRNA target sequence for DKFZp434L142 (NM_016613.4,1583-1601).
caggagtgaagataactta

SEQ ID NO: 358426 - DNA, 19 bp, Homo sapiens
  siRNA target sequence for DKFZp434L142 (NM_016613.4,1697-1715).
gtttcttgataaagtgtat

SEQ ID NO: 358427 - DNA, 19 bp, Homo sapiens
  siRNA target sequence for DKFZp434L142 (NM_016613.4,1741-1759).
gaattgaaaagcttatcga

SEQ ID NO: 358428 - DNA, 19 bp, Homo sapiens
  siRNA target sequence for DKFZp434L142 (NM_016613.4,1746-1764).
gaaaagcttatcgatgtaa

SEQ ID NO: 358429 - DNA, 19 bp, Homo sapiens
  siRNA target sequence for DKFZp434L142 (NM_016613.4,1770-1788).
cacagagccaaaattctta

SEQ ID NO: 358430 - DNA, 19 bp, Homo sapiens
  siRNA target sequence for DKFZp434L142 (NM_016613.4,1803-1821).
gcacacggggtcaaagtat

SEQ ID NO: 358431 - DNA, 19 bp, Homo sapiens
  siRNA target sequence for DKFZp434L142 (NM_016613.4,1804-1822).
cacacggggtcaaagtatt

SEQ ID NO: 358432 - DNA, 19 bp, Homo sapiens
  siRNA target sequence for DKFZp434L142 (NM_016613.4,1808-1826).
cggggtcaaagtattacct

SEQ ID NO: 358433 - DNA, 19 bp, Homo sapiens
  siRNA target sequence for DKFZp434L142 (NM_016613.4,1809-1827).
ggggtcaaagtattaccta

SEQ ID NO: 358434 - DNA, 19 bp, Homo sapiens
  siRNA target sequence for DKFZp434L142 (NM_016613.4,1810-1828).
gggtcaaagtattacctat

SEQ ID NO: 358435 - DNA, 19 bp, Homo sapiens
  siRNA target sequence for DKFZp434L142 (NM_016613.4,1814-1832).
caaagtattacctatgaat

SEQ ID NO: 358436 - DNA, 19 bp, Homo sapiens
  siRNA target sequence for DKFZp434L142 (NM_016613.4,1818-1836).
gtattacctatgaatgaat

SEQ ID NO: 358437 - DNA, 19 bp, Homo sapiens
  siRNA target sequence for LOC51315 (NM_016618.1,517-535).
ggaaacctgtgggtacaaa

SEQ ID NO: 358438 - DNA, 19 bp, Homo sapiens
  siRNA target sequence for LOC51315 (NM_016618.1,552-570).
gacccacgtatagaatgtt

SEQ ID NO: 358439 - DNA, 19 bp, Homo sapiens
  siRNA target sequence for LOC51315 (NM_016618.1,579-597).
gactcccatctgaaaccat

SEQ ID NO: 358440 - DNA, 19 bp, Homo sapiens
  siRNA target sequence for LOC51315 (NM_016618.1,604-622).
ctacccaagatcatgcaat

SEQ ID NO: 358441 - DNA, 19 bp, Homo sapiens
  siRNA target sequence for LOC51315 (NM_016618.1,607-625).
cccaagatcatgcaatatt

SEQ ID NO: 358442 - DNA, 19 bp, Homo sapiens
  siRNA target sequence for LOC51315 (NM_016618.1,665-683).
gcccatgacagcagattga

SEQ ID NO: 358443 - DNA, 19 bp, Homo sapiens
  siRNA target sequence for LOC51315 (NM_016618.1,738-756).
cagtacccctgaactttaa

SEQ ID NO: 358444 - DNA, 19 bp, Homo sapiens
  siRNA target sequence for LOC51315 (NM_016618.1,744-762).
ccctgaactttaatcaaca

SEQ ID NO: 358445 - DNA, 19 bp, Homo sapiens
  siRNA target sequence for LOC51315 (NM_016618.1,777-795).
gctcacatggtgtagaaca

SEQ ID NO: 358446 - DNA, 19 bp, Homo sapiens
  siRNA target sequence for LOC51315 (NM_016618.1,785-803).
ggtgtagaacatagagttt

SEQ ID NO: 358447 - DNA, 19 bp, Homo sapiens
  siRNA target sequence for LOC51315 (NM_016618.1,786-804).
gtgtagaacatagagttta

SEQ ID NO: 358448 - DNA, 19 bp, Homo sapiens
  siRNA target sequence for LOC51315 (NM_016618.1,788-806).
gtagaacatagagtttaca

SEQ ID NO: 358449 - DNA, 19 bp, Homo sapiens
  siRNA target sequence for LOC51315 (NM_016618.1,809-827).
cacttctcctcagataaca

SEQ ID NO: 358450 - DNA, 19 bp, Homo sapiens
  siRNA target sequence for LOC51315 (NM_016618.1,826-844).
cagtaccagtactcatcaa

SEQ ID NO: 358451 - DNA, 19 bp, Homo sapiens
  siRNA target sequence for LOC51315 (NM_016618.1,910-928).
ggaggagcggtctaagcat

SEQ ID NO: 358452 - DNA, 19 bp, Homo sapiens
  siRNA target sequence for LOC51315 (NM_016618.1,911-929).
gaggagcggtctaagcata

SEQ ID NO: 358453 - DNA, 19 bp, Homo sapiens
  siRNA target sequence for LOC51315 (NM_016618.1,914-932).
gagcggtctaagcataaga

SEQ ID NO: 358454 - DNA, 19 bp, Homo sapiens
  siRNA target sequence for LOC51315 (NM_016618.1,916-934).
gcggtctaagcataagaga

SEQ ID NO: 358455 - DNA, 19 bp, Homo sapiens
  siRNA target sequence for LOC51315 (NM_016618.1,942-960).
gctgcgaggaaattgactt

SEQ ID NO: 358456 - DNA, 19 bp, Homo sapiens
  siRNA target sequence for LOC51315 (NM_016618.1,943-961).
ctgcgaggaaattgactta

SEQ ID NO: 358457 - DNA, 19 bp, Homo sapiens
  siRNA target sequence for LOC51315 (NM_016618.1,945-963).
gcgaggaaattgacttaga

SEQ ID NO: 358458 - DNA, 19 bp, Homo sapiens
  siRNA target sequence for LOC51315 (NM_016618.1,968-986).
cacaagagcatccaaagaa

SEQ ID NO: 358459 - DNA, 19 bp, Homo sapiens
  siRNA target sequence for LOC51315 (NM_016618.1,1059-1077).
gccgagatgtagtctctaa

SEQ ID NO: 358460 - DNA, 19 bp, Homo sapiens
  siRNA target sequence for LOC51315 (NM_016618.1,1084-1102).
ggaacgtaagcgtacaaaa

SEQ ID NO: 358461 - DNA, 19 bp, Homo sapiens
  siRNA target sequence for LOC51315 (NM_016618.1,1085-1103).
gaacgtaagcgtacaaaaa

SEQ ID NO: 358462 - DNA, 19 bp, Homo sapiens
  siRNA target sequence for PLAC8 (NM_016619.1,258-276).
caagttgcagctgatatga

SEQ ID NO: 358463 - DNA, 19 bp, Homo sapiens
  siRNA target sequence for PLAC8 (NM_016619.1,341-359).
ccctggatctatttgtgat

SEQ ID NO: 358464 - DNA, 19 bp, Homo sapiens
  siRNA target sequence for PLAC8 (NM_016619.1,360-378).
gactatatggcaactcttt

SEQ ID NO: 358465 - DNA, 19 bp, Homo sapiens
  siRNA target sequence for PLAC8 (NM_016619.1,402-420).
caaatcaagagagatatca

SEQ ID NO: 358466 - DNA, 19 bp, Homo sapiens
  siRNA target sequence for PLAC8 (NM_016619.1,427-445).
ggagagccatgcgtacttt

SEQ ID NO: 358467 - DNA, 19 bp, Homo sapiens
  siRNA target sequence for BM-005 (NM_016620.1,76-94).
gtcactttcgccatcttaa

SEQ ID NO: 358468 - DNA, 19 bp, Homo sapiens
  siRNA target sequence for BM-005 (NM_016620.1,96-114).
gtcccaaggccatatgctt

SEQ ID NO: 358469 - DNA, 19 bp, Homo sapiens
  siRNA target sequence for BM-005 (NM_016620.1,141-159).
gatcgcaattcacttctaa

SEQ ID NO: 358470 - DNA, 19 bp, Homo sapiens
  siRNA target sequence for BM-005 (NM_016620.1,194-212).
gttgatggaggaaattcgt

SEQ ID NO: 358471 - DNA, 19 bp, Homo sapiens
  siRNA target sequence for BM-005 (NM_016620.1,201-219).
gaggaaattcgtgaattga

SEQ ID NO: 358472 - DNA, 19 bp, Homo sapiens
  siRNA target sequence for BM-005 (NM_016620.1,211-229).
gtgaattgaaagaacttca

SEQ ID NO: 358473 - DNA, 19 bp, Homo sapiens
  siRNA target sequence for BM-005 (NM_016620.1,238-256).
gaagaagtgcacgattaca

SEQ ID NO: 358474 - DNA, 19 bp, Homo sapiens
  siRNA target sequence for BM-005 (NM_016620.1,276-294).
ggtaccaattgccctaaaa

SEQ ID NO: 358475 - DNA, 19 bp, Homo sapiens
  siRNA target sequence for BM-005 (NM_016620.1,280-298).
ccaattgccctaaaacatt

SEQ ID NO: 358476 - DNA, 19 bp, Homo sapiens
  siRNA target sequence for BM-005 (NM_016620.1,346-364).
gtgaagagtgtaacttcat

SEQ ID NO: 358477 - DNA, 19 bp, Homo sapiens
  siRNA target sequence for BM-005 (NM_016620.1,428-446).
ccctatggtcacttctgat

SEQ ID NO: 358478 - DNA, 19 bp, Homo sapiens
  siRNA target sequence for BM-005 (NM_016620.1,429-447).
cctatggtcacttctgata

SEQ ID NO: 358479 - DNA, 19 bp, Homo sapiens
  siRNA target sequence for BM-005 (NM_016620.1,430-448).
ctatggtcacttctgatat

SEQ ID NO: 358480 - DNA, 19 bp, Homo sapiens
  siRNA target sequence for BM-005 (NM_016620.1,492-510).
gtagtaggatcatccaaaa

SEQ ID NO: 358481 - DNA, 19 bp, Homo sapiens
  siRNA target sequence for BM-005 (NM_016620.1,514-532).
cagctacctacatatgtaa

SEQ ID NO: 358482 - DNA, 19 bp, Homo sapiens
  siRNA target sequence for BM-005 (NM_016620.1,516-534).
gctacctacatatgtaaga

SEQ ID NO: 358483 - DNA, 19 bp, Homo sapiens
  siRNA target sequence for BM-005 (NM_016620.1,536-554).
gtgtccttttactacttca

SEQ ID NO: 358484 - DNA, 19 bp, Homo sapiens
  siRNA target sequence for BM-005 (NM_016620.1,550-568).
cttcagccaaaagtgtttt

SEQ ID NO: 358485 - DNA, 19 bp, Homo sapiens
  siRNA target sequence for BM-005 (NM_016620.1,581-599).
ggagtacttgcattcatca

SEQ ID NO: 358486 - DNA, 19 bp, Homo sapiens
  siRNA target sequence for BM-005 (NM_016620.1,584-602).
gtacttgcattcatcatca

SEQ ID NO: 358487 - DNA, 19 bp, Homo sapiens
  siRNA target sequence for BM-005 (NM_016620.1,622-640).
gtcctcttggacttgataa

SEQ ID NO: 358488 - DNA, 19 bp, Homo sapiens
  siRNA target sequence for BM-005 (NM_016620.1,624-642).
cctcttggacttgataaaa

SEQ ID NO: 358489 - DNA, 19 bp, Homo sapiens
  siRNA target sequence for BM-005 (NM_016620.1,682-700).
gcactaaaacattaactaa

SEQ ID NO: 358490 - DNA, 19 bp, Homo sapiens
  siRNA target sequence for BM-005 (NM_016620.1,747-765).
gtgaagcgaacatttggat

SEQ ID NO: 358491 - DNA, 19 bp, Homo sapiens
  siRNA target sequence for BM-005 (NM_016620.1,769-787).
cctcacaatcaagtagttt

SEQ ID NO: 358492 - DNA, 19 bp, Homo sapiens
  siRNA target sequence for BM-005 (NM_016620.1,804-822).
cggccacacagaatacaga

SEQ ID NO: 358493 - DNA, 19 bp, Homo sapiens
  siRNA target sequence for BM-005 (NM_016620.1,805-823).
ggccacacagaatacagaa

SEQ ID NO: 358494 - DNA, 19 bp, Homo sapiens
  siRNA target sequence for BM-005 (NM_016620.1,821-839).
gaaagctcggaaaagcatt

SEQ ID NO: 358495 - DNA, 19 bp, Homo sapiens
  siRNA target sequence for BM-005 (NM_016620.1,841-859).
cccaatcaggtgtaaacat

SEQ ID NO: 358496 - DNA, 19 bp, Homo sapiens
  siRNA target sequence for BM-005 (NM_016620.1,843-861).
caatcaggtgtaaacatgt

SEQ ID NO: 358497 - DNA, 19 bp, Homo sapiens
  siRNA target sequence for BM-005 (NM_016620.1,852-870).
gtaaacatgtgcaatcaaa

SEQ ID NO: 358498 - DNA, 19 bp, Homo sapiens
  siRNA target sequence for BM-005 (NM_016620.1,880-898).
ctcataagaatgttacaat

SEQ ID NO: 358499 - DNA, 19 bp, Homo sapiens
  siRNA target sequence for BM-005 (NM_016620.1,882-900).
cataagaatgttacaatta

SEQ ID NO: 358500 - DNA, 19 bp, Homo sapiens
  siRNA target sequence for BM-005 (NM_016620.1,905-923).
cagcgttgaccaaaaacct

SEQ ID NO: 358501 - DNA, 19 bp, Homo sapiens
  siRNA target sequence for BM-005 (NM_016620.1,907-925).
gcgttgaccaaaaacctaa

SEQ ID NO: 358502 - DNA, 19 bp, Homo sapiens
  siRNA target sequence for BM-005 (NM_016620.1,912-930).
gaccaaaaacctaagtatt

SEQ ID NO: 358503 - DNA, 19 bp, Homo sapiens
  siRNA target sequence for BM-005 (NM_016620.1,973-991).
gccactatttgtatagaca

SEQ ID NO: 358504 - DNA, 19 bp, Homo sapiens
  siRNA target sequence for BM-005 (NM_016620.1,983-1001).
gtatagacacaaatatgaa

SEQ ID NO: 358505 - DNA, 19 bp, Homo sapiens
  siRNA target sequence for BM-005 (NM_016620.1,999-1017).
gaaaactataggatgatca

SEQ ID NO: 358506 - DNA, 19 bp, Homo sapiens
  siRNA target sequence for BM-005 (NM_016620.1,1083-1101).
cacctgttttcatcatcaa

SEQ ID NO: 358507 - DNA, 19 bp, Homo sapiens
  siRNA target sequence for BM-005 (NM_016620.1,1088-1106).
gttttcatcatcaagtaat

SEQ ID NO: 358508 - DNA, 19 bp, Homo sapiens
  siRNA target sequence for BM-005 (NM_016620.1,1147-1165).
ccaaaaggcctgaaagctt

SEQ ID NO: 358509 - DNA, 19 bp, Homo sapiens
  siRNA target sequence for BM-005 (NM_016620.1,1244-1262).
ggatagctatccagatttt

SEQ ID NO: 358510 - DNA, 19 bp, Homo sapiens
  siRNA target sequence for BM-005 (NM_016620.1,1274-1292).
gactgttgtcgttttgcaa

SEQ ID NO: 358511 - DNA, 19 bp, Homo sapiens
  siRNA target sequence for BM-005 (NM_016620.1,1281-1299).
gtcgttttgcaaaaactta

SEQ ID NO: 358512 - DNA, 19 bp, Homo sapiens
  siRNA target sequence for BM-005 (NM_016620.1,1345-1363).
cctgggataatgttgagtt

SEQ ID NO: 358513 - DNA, 19 bp, Homo sapiens
  siRNA target sequence for BM-005 (NM_016620.1,1375-1393).
ctacacaggccatagaaga

SEQ ID NO: 358514 - DNA, 19 bp, Homo sapiens
  siRNA target sequence for BM-005 (NM_016620.1,1392-1410).
gatgaaacctatagtgata

SEQ ID NO: 358515 - DNA, 19 bp, Homo sapiens
  siRNA target sequence for BM-005 (NM_016620.1,1486-1504).
ctcttagttatgaccaaaa

SEQ ID NO: 358516 - DNA, 19 bp, Homo sapiens
  siRNA target sequence for BM-005 (NM_016620.1,1530-1548).
gaagatactggaagtaaca

SEQ ID NO: 358517 - DNA, 19 bp, Homo sapiens
  siRNA target sequence for BM-005 (NM_016620.1,1533-1551).
gatactggaagtaacaact

SEQ ID NO: 358518 - DNA, 19 bp, Homo sapiens
  siRNA target sequence for BM-005 (NM_016620.1,1550-1568).
ctttttgcatgagatacat

SEQ ID NO: 358519 - DNA, 19 bp, Homo sapiens
  siRNA target sequence for BM-005 (NM_016620.1,1596-1614).
gcttcattgtcaaagcata

SEQ ID NO: 358520 - DNA, 19 bp, Homo sapiens
  siRNA target sequence for BM-005 (NM_016620.1,1604-1622).
gtcaaagcatagttctgtt

SEQ ID NO: 358521 - DNA, 19 bp, Homo sapiens
  siRNA target sequence for BM-005 (NM_016620.1,1606-1624).
caaagcatagttctgtttt

SEQ ID NO: 358522 - DNA, 19 bp, Homo sapiens
  siRNA target sequence for BM-005 (NM_016620.1,1663-1681).
cttactgcccagcaacatt

SEQ ID NO: 358523 - DNA, 19 bp, Homo sapiens
  siRNA target sequence for BM-005 (NM_016620.1,1670-1688).
cccagcaacatttgaaaca

SEQ ID NO: 358524 - DNA, 19 bp, Homo sapiens
  siRNA target sequence for BM-005 (NM_016620.1,1690-1708).
gtgttgggttatcaaatca

SEQ ID NO: 358525 - DNA, 19 bp, Homo sapiens
  siRNA target sequence for BM-005 (NM_016620.1,1742-1760).
ctatgaagcccgtcatgtt

SEQ ID NO: 358526 - DNA, 19 bp, Homo sapiens
  siRNA target sequence for BM-005 (NM_016620.1,1758-1776).
gttgtatcaccagaacaaa

SEQ ID NO: 358527 - DNA, 19 bp, Homo sapiens
  siRNA target sequence for BM-005 (NM_016620.1,1816-1834).
gcacaggaacacctgttaa

SEQ ID NO: 358528 - DNA, 19 bp, Homo sapiens
  siRNA target sequence for BM-005 (NM_016620.1,1837-1855).
gagttagaaaagctataga

SEQ ID NO: 358529 - DNA, 19 bp, Homo sapiens
  siRNA target sequence for BM-005 (NM_016620.1,1839-1857).
gttagaaaagctatagaga

SEQ ID NO: 358530 - DNA, 19 bp, Homo sapiens
  siRNA target sequence for BM-005 (NM_016620.1,1896-1914).
ggtggttggtttgatacta

SEQ ID NO: 358531 - DNA, 19 bp, Homo sapiens
  siRNA target sequence for BM-005 (NM_016620.1,1897-1915).
gtggttggtttgatactaa

SEQ ID NO: 358532 - DNA, 19 bp, Homo sapiens
  siRNA target sequence for BM-005 (NM_016620.1,1899-1917).
ggttggtttgatactaaaa

SEQ ID NO: 358533 - DNA, 19 bp, Homo sapiens
  siRNA target sequence for BM-009 (NM_016623.2,433-451).
caggtgaatgtagtattaa

SEQ ID NO: 358534 - DNA, 19 bp, Homo sapiens
  siRNA target sequence for BM-009 (NM_016623.2,575-593).
cactagtaggcaaattaaa

SEQ ID NO: 358535 - DNA, 19 bp, Homo sapiens
  siRNA target sequence for BM-009 (NM_016623.2,577-595).
ctagtaggcaaattaaaga

SEQ ID NO: 358536 - DNA, 19 bp, Homo sapiens
  siRNA target sequence for BM-009 (NM_016623.2,615-633).
gaggttagaagcagcatta

SEQ ID NO: 358537 - DNA, 19 bp, Homo sapiens
  siRNA target sequence for BM-009 (NM_016623.2,692-710).
gagagcaggctcttgctaa

SEQ ID NO: 358538 - DNA, 19 bp, Homo sapiens
  siRNA target sequence for BM-009 (NM_016623.2,697-715).
caggctcttgctaaacagt

SEQ ID NO: 358539 - DNA, 19 bp, Homo sapiens
  siRNA target sequence for BM-009 (NM_016623.2,699-717).
ggctcttgctaaacagttt

SEQ ID NO: 358540 - DNA, 19 bp, Homo sapiens
  siRNA target sequence for BM-009 (NM_016623.2,735-753).
cacactccggtttgatgaa

SEQ ID NO: 358541 - DNA, 19 bp, Homo sapiens
  siRNA target sequence for BM-009 (NM_016623.2,737-755).
cactccggtttgatgaact

SEQ ID NO: 358542 - DNA, 19 bp, Homo sapiens
  siRNA target sequence for BM-009 (NM_016623.2,743-761).
ggtttgatgaactcaagat

SEQ ID NO: 358543 - DNA, 19 bp, Homo sapiens
  siRNA target sequence for BM-009 (NM_016623.2,764-782).
caaatcctgccatacagaa

SEQ ID NO: 358544 - DNA, 19 bp, Homo sapiens
  siRNA target sequence for BM-009 (NM_016623.2,791-809).
gctattatagaagaacatt

SEQ ID NO: 358545 - DNA, 19 bp, Homo sapiens
  siRNA target sequence for BM-009 (NM_016623.2,871-889).
gcaaatcgaatgtctttgt

SEQ ID NO: 358546 - DNA, 19 bp, Homo sapiens
  siRNA target sequence for BM-009 (NM_016623.2,872-890).
caaatcgaatgtctttgtt

SEQ ID NO: 358547 - DNA, 19 bp, Homo sapiens
  siRNA target sequence for BM-009 (NM_016623.2,1086-1104).
ggtaatggtgggtgtcata

SEQ ID NO: 358548 - DNA, 19 bp, Homo sapiens
  siRNA target sequence for BM-009 (NM_016623.2,1087-1105).
gtaatggtgggtgtcataa

SEQ ID NO: 358549 - DNA, 19 bp, Homo sapiens
  siRNA target sequence for BM-009 (NM_016623.2,1093-1111).
gtgggtgtcataatactct

SEQ ID NO: 358550 - DNA, 19 bp, Homo sapiens
  siRNA target sequence for BM-009 (NM_016623.2,1095-1113).
gggtgtcataatactctat

SEQ ID NO: 358551 - DNA, 19 bp, Homo sapiens
  siRNA target sequence for BM-009 (NM_016623.2,1126-1144).
ccagtgggagcatttgcta

SEQ ID NO: 358552 - DNA, 19 bp, Homo sapiens
  siRNA target sequence for BM-009 (NM_016623.2,1127-1145).
cagtgggagcatttgctaa

SEQ ID NO: 358553 - DNA, 19 bp, Homo sapiens
  siRNA target sequence for BM-009 (NM_016623.2,1129-1147).
gtgggagcatttgctaaaa

SEQ ID NO: 358554 - DNA, 19 bp, Homo sapiens
  siRNA target sequence for BM-009 (NM_016623.2,1168-1186).
ggttgtatcaaagttctta

SEQ ID NO: 358555 - DNA, 19 bp, Homo sapiens
  siRNA target sequence for BM-009 (NM_016623.2,1172-1190).
gtatcaaagttcttaagga

SEQ ID NO: 358556 - DNA, 19 bp, Homo sapiens
  siRNA target sequence for BM-009 (NM_016623.2,1188-1206).
ggaccaacctcctaatagt

SEQ ID NO: 358557 - DNA, 19 bp, Homo sapiens
  siRNA target sequence for BM-009 (NM_016623.2,1205-1223).
gtgtggaaggtcttctaaa

SEQ ID NO: 358558 - DNA, 19 bp, Homo sapiens
  siRNA target sequence for BM-009 (NM_016623.2,1225-1243).
gctctcaggtacacaacaa

SEQ ID NO: 358559 - DNA, 19 bp, Homo sapiens
  siRNA target sequence for BM-009 (NM_016623.2,1226-1244).
ctctcaggtacacaacaaa

SEQ ID NO: 358560 - DNA, 19 bp, Homo sapiens
  siRNA target sequence for BM-009 (NM_016623.2,1258-1276).
gagactacctccaagcaaa

SEQ ID NO: 358561 - DNA, 19 bp, Homo sapiens
  siRNA target sequence for MGC12197 (NM_016625.2,114-132).
gggacgtcggtcatcagat

SEQ ID NO: 358562 - DNA, 19 bp, Homo sapiens
  siRNA target sequence for MGC12197 (NM_016625.2,115-133).
ggacgtcggtcatcagata

SEQ ID NO: 358563 - DNA, 19 bp, Homo sapiens
  siRNA target sequence for MGC12197 (NM_016625.2,119-137).
gtcggtcatcagatactga

SEQ ID NO: 358564 - DNA, 19 bp, Homo sapiens
  siRNA target sequence for MGC12197 (NM_016625.2,189-207).
gagcagttcttcagatagt

SEQ ID NO: 358565 - DNA, 19 bp, Homo sapiens
  siRNA target sequence for MGC12197 (NM_016625.2,192-210).
cagttcttcagatagtaga

SEQ ID NO: 358566 - DNA, 19 bp, Homo sapiens
  siRNA target sequence for MGC12197 (NM_016625.2,197-215).
cttcagatagtagaacata

SEQ ID NO: 358567 - DNA, 19 bp, Homo sapiens
  siRNA target sequence for MGC12197 (NM_016625.2,260-278).
cttggtccagagatcttca

SEQ ID NO: 358568 - DNA, 19 bp, Homo sapiens
  siRNA target sequence for MGC12197 (NM_016625.2,274-292).
cttcagcctcgttcacatt

SEQ ID NO: 358569 - DNA, 19 bp, Homo sapiens
  siRNA target sequence for MGC12197 (NM_016625.2,279-297).
gcctcgttcacattcttat

SEQ ID NO: 358570 - DNA, 19 bp, Homo sapiens
  siRNA target sequence for MGC12197 (NM_016625.2,281-299).
ctcgttcacattcttatga

SEQ ID NO: 358571 - DNA, 19 bp, Homo sapiens
  siRNA target sequence for MGC12197 (NM_016625.2,283-301).
cgttcacattcttatgata

SEQ ID NO: 358572 - DNA, 19 bp, Homo sapiens
  siRNA target sequence for MGC12197 (NM_016625.2,375-393).
gggtcgagggaaatcctat

SEQ ID NO: 358573 - DNA, 19 bp, Homo sapiens
  siRNA target sequence for MGC12197 (NM_016625.2,376-394).
ggtcgagggaaatcctata

SEQ ID NO: 358574 - DNA, 19 bp, Homo sapiens
  siRNA target sequence for MGC12197 (NM_016625.2,400-418).
cagaggtctaggtcaaaaa

SEQ ID NO: 358575 - DNA, 19 bp, Homo sapiens
  siRNA target sequence for MGC12197 (NM_016625.2,445-463).
cctcgtctccgttctcata

SEQ ID NO: 358576 - DNA, 19 bp, Homo sapiens
  siRNA target sequence for MGC12197 (NM_016625.2,460-478).
catagtcgtagcagtgaaa

SEQ ID NO: 358577 - DNA, 19 bp, Homo sapiens
  siRNA target sequence for MGC12197 (NM_016625.2,503-521).
gtcggtctcgggatagaga

SEQ ID NO: 358578 - DNA, 19 bp, Homo sapiens
  siRNA target sequence for MGC12197 (NM_016625.2,523-541).
cgacgtaagggcagagata

SEQ ID NO: 358579 - DNA, 19 bp, Homo sapiens
  siRNA target sequence for MGC12197 (NM_016625.2,524-542).
gacgtaagggcagagataa

SEQ ID NO: 358580 - DNA, 19 bp, Homo sapiens
  siRNA target sequence for MGC12197 (NM_016625.2,577-595).
gacaaggaattacataaca

SEQ ID NO: 358581 - DNA, 19 bp, Homo sapiens
  siRNA target sequence for MGC12197 (NM_016625.2,621-639).
caaagctggattagaacat

SEQ ID NO: 358582 - DNA, 19 bp, Homo sapiens
  siRNA target sequence for MGC12197 (NM_016625.2,934-952).
gatccacccagtactgaaa

SEQ ID NO: 358583 - DNA, 19 bp, Homo sapiens
  siRNA target sequence for MGC12197 (NM_016625.2,971-989).
gcatccctactgctatcaa

SEQ ID NO: 358584 - DNA, 19 bp, Homo sapiens
  siRNA target sequence for MGC12197 (NM_016625.2,983-1001).
ctatcaagtaccaagatga

SEQ ID NO: 358585 - DNA, 19 bp, Homo sapiens
  siRNA target sequence for MGC12197 (NM_016625.2,1011-1029).
ggcccatccaaatttattt

SEQ ID NO: 358586 - DNA, 19 bp, Homo sapiens
  siRNA target sequence for MGC12197 (NM_016625.2,1059-1077).
gttcaagagattaattgct

SEQ ID NO: 358587 - DNA, 19 bp, Homo sapiens
  siRNA target sequence for MGC12197 (NM_016625.2,1076-1094).
ctctccgacaagaaagact

SEQ ID NO: 358588 - DNA, 19 bp, Homo sapiens
  siRNA target sequence for MGC12197 (NM_016625.2,1078-1096).
ctccgacaagaaagactaa

SEQ ID NO: 358589 - DNA, 19 bp, Homo sapiens
  siRNA target sequence for LOC51320 (NM_016626.2,359-377).
gccctgctccggagaaaga

SEQ ID NO: 358590 - DNA, 19 bp, Homo sapiens
  siRNA target sequence for LOC51320 (NM_016626.2,440-458).
cgccagggttgtaaaatta

SEQ ID NO: 358591 - DNA, 19 bp, Homo sapiens
  siRNA target sequence for LOC51320 (NM_016626.2,461-479).
gcactgagagccaagacaa

SEQ ID NO: 358592 - DNA, 19 bp, Homo sapiens
  siRNA target sequence for LOC51320 (NM_016626.2,462-480).
cactgagagccaagacaaa

SEQ ID NO: 358593 - DNA, 19 bp, Homo sapiens
  siRNA target sequence for LOC51320 (NM_016626.2,602-620).
cgtgcatctcgaaacaaaa

SEQ ID NO: 358594 - DNA, 19 bp, Homo sapiens
  siRNA target sequence for LOC51320 (NM_016626.2,625-643).
gcctgccctgggaggatta

SEQ ID NO: 358595 - DNA, 19 bp, Homo sapiens
  siRNA target sequence for LOC51320 (NM_016626.2,632-650).
ctgggaggattatcatgta

SEQ ID NO: 358596 - DNA, 19 bp, Homo sapiens
  siRNA target sequence for LOC51320 (NM_016626.2,693-711).
cttatcgtgtggtaggatt

SEQ ID NO: 358597 - DNA, 19 bp, Homo sapiens
  siRNA target sequence for LOC51320 (NM_016626.2,723-741).
ccaaaggagcaactattaa

SEQ ID NO: 358598 - DNA, 19 bp, Homo sapiens
  siRNA target sequence for LOC51320 (NM_016626.2,729-747).
gagcaactattaaaagaat

SEQ ID NO: 358599 - DNA, 19 bp, Homo sapiens
  siRNA target sequence for LOC51320 (NM_016626.2,754-772).
gcagacccacacctacata

SEQ ID NO: 358600 - DNA, 19 bp, Homo sapiens
  siRNA target sequence for LOC51320 (NM_016626.2,757-775).
gacccacacctacatagta

SEQ ID NO: 358601 - DNA, 19 bp, Homo sapiens
  siRNA target sequence for LOC51320 (NM_016626.2,760-778).
ccacacctacatagtaact

SEQ ID NO: 358602 - DNA, 19 bp, Homo sapiens
  siRNA target sequence for LOC51320 (NM_016626.2,867-885).
ccatgcgtacaggaaacta

SEQ ID NO: 358603 - DNA, 19 bp, Homo sapiens
  siRNA target sequence for LOC51320 (NM_016626.2,868-886).
catgcgtacaggaaactat

SEQ ID NO: 358604 - DNA, 19 bp, Homo sapiens
  siRNA target sequence for LOC51320 (NM_016626.2,871-889).
gcgtacaggaaactatata

SEQ ID NO: 358605 - DNA, 19 bp, Homo sapiens
  siRNA target sequence for LOC51320 (NM_016626.2,873-891).
gtacaggaaactatataga

SEQ ID NO: 358606 - DNA, 19 bp, Homo sapiens
  siRNA target sequence for LOC51320 (NM_016626.2,883-901).
ctatatagagctcaatgaa

SEQ ID NO: 358607 - DNA, 19 bp, Homo sapiens
  siRNA target sequence for LOC51320 (NM_016626.2,893-911).
ctcaatgaagagaatgatt

SEQ ID NO: 358608 - DNA, 19 bp, Homo sapiens
  siRNA target sequence for LOC51320 (NM_016626.2,996-1014).
gcgcaagaatgatatccaa

SEQ ID NO: 358609 - DNA, 19 bp, Homo sapiens
  siRNA target sequence for LOC51320 (NM_016626.2,997-1015).
cgcaagaatgatatccaat

SEQ ID NO: 358610 - DNA, 19 bp, Homo sapiens
  siRNA target sequence for LOC51320 (NM_016626.2,1006-1024).
gatatccaattatcgaaat

SEQ ID NO: 358611 - DNA, 19 bp, Homo sapiens
  siRNA target sequence for LOC51320 (NM_016626.2,1043-1061).
ggaagtggctctacagatt

SEQ ID NO: 358612 - DNA, 19 bp, Homo sapiens
  siRNA target sequence for LOC51320 (NM_016626.2,1184-1202).
gcctttgactctttaccaa

SEQ ID NO: 358613 - DNA, 19 bp, Homo sapiens
  siRNA target sequence for LOC51320 (NM_016626.2,1199-1217).
ccaacatctgctcaaacta

SEQ ID NO: 358614 - DNA, 19 bp, Homo sapiens
  siRNA target sequence for LOC51320 (NM_016626.2,1263-1281).
gtgatccttctggtaacat

SEQ ID NO: 358615 - DNA, 19 bp, Homo sapiens
  siRNA target sequence for LOC51320 (NM_016626.2,1265-1283).
gatccttctggtaacatga

SEQ ID NO: 358616 - DNA, 19 bp, Homo sapiens
  siRNA target sequence for LOC51320 (NM_016626.2,1375-1393).
gagcgacccacctagtaca

SEQ ID NO: 358617 - DNA, 19 bp, Homo sapiens
  siRNA target sequence for LOC51320 (NM_016626.2,1434-1452).
ctaatggtaccaatagtta

SEQ ID NO: 358618 - DNA, 19 bp, Homo sapiens
  siRNA target sequence for LOC51320 (NM_016626.2,1525-1543).
ctttgagaatgaggttatt

SEQ ID NO: 358619 - DNA, 19 bp, Homo sapiens
  siRNA target sequence for LOC51320 (NM_016626.2,1583-1601).
gaatgtgccaacaagatct

SEQ ID NO: 358620 - DNA, 19 bp, Homo sapiens
  siRNA target sequence for LOC51320 (NM_016626.2,1649-1667).
caggcaatccaaattcact

SEQ ID NO: 358621 - DNA, 19 bp, Homo sapiens
  siRNA target sequence for WAC (NM_016628.2,226-244).
gatccttcaccaccaaata

SEQ ID NO: 358622 - DNA, 19 bp, Homo sapiens
  siRNA target sequence for WAC (NM_016628.2,249-267).
gttgcggagatctgatagt

SEQ ID NO: 358623 - DNA, 19 bp, Homo sapiens
  siRNA target sequence for WAC (NM_016628.2,296-314).
gtcacagtaaggccaaaaa

SEQ ID NO: 358624 - DNA, 19 bp, Homo sapiens
  siRNA target sequence for WAC (NM_016628.2,391-409).
gctcttcatagttcaaatt

SEQ ID NO: 358625 - DNA, 19 bp, Homo sapiens
  siRNA target sequence for WAC (NM_016628.2,397-415).
catagttcaaattcacatt

SEQ ID NO: 358626 - DNA, 19 bp, Homo sapiens
  siRNA target sequence for WAC (NM_016628.2,446-464).
cttcagatgcaccttatga

SEQ ID NO: 358627 - DNA, 19 bp, Homo sapiens
  siRNA target sequence for WAC (NM_016628.2,475-493).
gactggtctgagcatatta

SEQ ID NO: 358628 - DNA, 19 bp, Homo sapiens
  siRNA target sequence for WAC (NM_016628.2,494-512).
gctcttctgggaaaaagta

SEQ ID NO: 358629 - DNA, 19 bp, Homo sapiens
  siRNA target sequence for WAC (NM_016628.2,516-534).
ctacaattgtcgaacagaa

SEQ ID NO: 358630 - DNA, 19 bp, Homo sapiens
  siRNA target sequence for WAC (NM_016628.2,524-542).
gtcgaacagaagtttcaca

SEQ ID NO: 358631 - DNA, 19 bp, Homo sapiens
  siRNA target sequence for WAC (NM_016628.2,862-880).
gttccttctagtccattta

SEQ ID NO: 358632 - DNA, 19 bp, Homo sapiens
  siRNA target sequence for WAC (NM_016628.2,906-924).
gaaatcatttgatgctaat

SEQ ID NO: 358633 - DNA, 19 bp, Homo sapiens
  siRNA target sequence for WAC (NM_016628.2,919-937).
gctaatggagcatctactt

SEQ ID NO: 358634 - DNA, 19 bp, Homo sapiens
  siRNA target sequence for WAC (NM_016628.2,920-938).
ctaatggagcatctacttt

SEQ ID NO: 358635 - DNA, 19 bp, Homo sapiens
  siRNA target sequence for WAC (NM_016628.2,969-987).
ccctgcacagaaaacagaa

SEQ ID NO: 358636 - DNA, 19 bp, Homo sapiens
  siRNA target sequence for WAC (NM_016628.2,1007-1025).
gagacaaacccgtatcaca

SEQ ID NO: 358637 - DNA, 19 bp, Homo sapiens
  siRNA target sequence for WAC (NM_016628.2,1009-1027).
gacaaacccgtatcacatt

SEQ ID NO: 358638 - DNA, 19 bp, Homo sapiens
  siRNA target sequence for WAC (NM_016628.2,1011-1029).
caaacccgtatcacattct

SEQ ID NO: 358639 - DNA, 19 bp, Homo sapiens
  siRNA target sequence for WAC (NM_016628.2,1128-1146).
gccaatacctcccttactt

SEQ ID NO: 358640 - DNA, 19 bp, Homo sapiens
  siRNA target sequence for WAC (NM_016628.2,1130-1148).
caatacctcccttacttca

SEQ ID NO: 358641 - DNA, 19 bp, Homo sapiens
  siRNA target sequence for WAC (NM_016628.2,1149-1167).
ggacccaaatcttcttaga

SEQ ID NO: 358642 - DNA, 19 bp, Homo sapiens
  siRNA target sequence for WAC (NM_016628.2,1190-1208).
ccacgctgcagcttaataa

SEQ ID NO: 358643 - DNA, 19 bp, Homo sapiens
  siRNA target sequence for WAC (NM_016628.2,1191-1209).
cacgctgcagcttaataat

SEQ ID NO: 358644 - DNA, 19 bp, Homo sapiens
  siRNA target sequence for WAC (NM_016628.2,1194-1212).
gctgcagcttaataattct

SEQ ID NO: 358645 - DNA, 19 bp, Homo sapiens
  siRNA target sequence for WAC (NM_016628.2,1211-1229).
ctaatgtggacatatctaa

SEQ ID NO: 358646 - DNA, 19 bp, Homo sapiens
  siRNA target sequence for WAC (NM_016628.2,1268-1286).
cactgcagtctataattca

SEQ ID NO: 358647 - DNA, 19 bp, Homo sapiens
  siRNA target sequence for WAC (NM_016628.2,1270-1288).
ctgcagtctataattcata

SEQ ID NO: 358648 - DNA, 19 bp, Homo sapiens
  siRNA target sequence for WAC (NM_016628.2,1303-1321).
ggaccatctgctttcaaca

SEQ ID NO: 358649 - DNA, 19 bp, Homo sapiens
  siRNA target sequence for WAC (NM_016628.2,1317-1335).
caacataacgtctctgatt

SEQ ID NO: 358650 - DNA, 19 bp, Homo sapiens
  siRNA target sequence for WAC (NM_016628.2,1320-1338).
cataacgtctctgatttct

SEQ ID NO: 358651 - DNA, 19 bp, Homo sapiens
  siRNA target sequence for WAC (NM_016628.2,1358-1376).
cacaagcccagccatctaa

SEQ ID NO: 358652 - DNA, 19 bp, Homo sapiens
  siRNA target sequence for WAC (NM_016628.2,1378-1396).
cagtctccgatgtctttaa

SEQ ID NO: 358653 - DNA, 19 bp, Homo sapiens
  siRNA target sequence for WAC (NM_016628.2,1407-1425).
gtcatccccaagatcatat

SEQ ID NO: 358654 - DNA, 19 bp, Homo sapiens
  siRNA target sequence for WAC (NM_016628.2,1465-1483).
cctatcaaacctttgatca

SEQ ID NO: 358655 - DNA, 19 bp, Homo sapiens
  siRNA target sequence for WAC (NM_016628.2,1513-1531).
gttagtactccagtagtta

SEQ ID NO: 358656 - DNA, 19 bp, Homo sapiens
  siRNA target sequence for WAC (NM_016628.2,1517-1535).
gtactccagtagttaagca

SEQ ID NO: 358657 - DNA, 19 bp, Homo sapiens
  siRNA target sequence for WAC (NM_016628.2,1581-1599).
caagcagcaaggtcatgaa

SEQ ID NO: 358658 - DNA, 19 bp, Homo sapiens
  siRNA target sequence for WAC (NM_016628.2,1654-1672).
ggtcccaatcatacttcta

SEQ ID NO: 358659 - DNA, 19 bp, Homo sapiens
  siRNA target sequence for WAC (NM_016628.2,1655-1673).
gtcccaatcatacttctaa

SEQ ID NO: 358660 - DNA, 19 bp, Homo sapiens
  siRNA target sequence for WAC (NM_016628.2,1657-1675).
cccaatcatacttctaata

SEQ ID NO: 358661 - DNA, 19 bp, Homo sapiens
  siRNA target sequence for WAC (NM_016628.2,1659-1677).
caatcatacttctaatagt

SEQ ID NO: 358662 - DNA, 19 bp, Homo sapiens
  siRNA target sequence for WAC (NM_016628.2,1699-1717).
gttgtaccacagaattctt

SEQ ID NO: 358663 - DNA, 19 bp, Homo sapiens
  siRNA target sequence for WAC (NM_016628.2,1720-1738).
gcccgatccacgtgttcat

SEQ ID NO: 358664 - DNA, 19 bp, Homo sapiens
  siRNA target sequence for WAC (NM_016628.2,1721-1739).
cccgatccacgtgttcatt

SEQ ID NO: 358665 - DNA, 19 bp, Homo sapiens
  siRNA target sequence for WAC (NM_016628.2,1722-1740).
ccgatccacgtgttcatta

SEQ ID NO: 358666 - DNA, 19 bp, Homo sapiens
  siRNA target sequence for WAC (NM_016628.2,1723-1741).
cgatccacgtgttcattaa

SEQ ID NO: 358667 - DNA, 19 bp, Homo sapiens
  siRNA target sequence for WAC (NM_016628.2,1834-1852).
cgcgaagaagcgcataaca

SEQ ID NO: 358668 - DNA, 19 bp, Homo sapiens
  siRNA target sequence for WAC (NM_016628.2,1835-1853).
gcgaagaagcgcataacat

SEQ ID NO: 358669 - DNA, 19 bp, Homo sapiens
  siRNA target sequence for WAC (NM_016628.2,1844-1862).
cgcataacatgggaactat

SEQ ID NO: 358670 - DNA, 19 bp, Homo sapiens
  siRNA target sequence for WAC (NM_016628.2,1845-1863).
gcataacatgggaactatt

SEQ ID NO: 358671 - DNA, 19 bp, Homo sapiens
  siRNA target sequence for WAC (NM_016628.2,1864-1882).
cacatgtccgaaatttgta

SEQ ID NO: 358672 - DNA, 19 bp, Homo sapiens
  siRNA target sequence for WAC (NM_016628.2,1866-1884).
catgtccgaaatttgtact

SEQ ID NO: 358673 - DNA, 19 bp, Homo sapiens
  siRNA target sequence for WAC (NM_016628.2,1871-1889).
ccgaaatttgtactgaatt

SEQ ID NO: 358674 - DNA, 19 bp, Homo sapiens
  siRNA target sequence for WAC (NM_016628.2,1911-1929).
ccgagtatgtgaaattcaa

SEQ ID NO: 358675 - DNA, 19 bp, Homo sapiens
  siRNA target sequence for WAC (NM_016628.2,1938-1956).
gcgagagcaaaggatacta

SEQ ID NO: 358676 - DNA, 19 bp, Homo sapiens
  siRNA target sequence for WAC (NM_016628.2,1939-1957).
cgagagcaaaggatactat

SEQ ID NO: 358677 - DNA, 19 bp, Homo sapiens
  siRNA target sequence for LOC51333 (NM_016643.1,708-726).
gcctaagctcgcacttcat

SEQ ID NO: 358678 - DNA, 19 bp, Homo sapiens
  siRNA target sequence for LOC51333 (NM_016643.1,709-727).
cctaagctcgcacttcatt

SEQ ID NO: 358679 - DNA, 19 bp, Homo sapiens
  siRNA target sequence for LOC51334 (NM_016644.1,573-591).
caaagtgcaggctaatgca

SEQ ID NO: 358680 - DNA, 19 bp, Homo sapiens
  siRNA target sequence for LOC51334 (NM_016644.1,582-600).
ggctaatgcaccgcttatt

SEQ ID NO: 358681 - DNA, 19 bp, Homo sapiens
  siRNA target sequence for LOC51334 (NM_016644.1,720-738).
caatcctgtaaaaaccaat

SEQ ID NO: 358682 - DNA, 19 bp, Homo sapiens
  siRNA target sequence for LOC51334 (NM_016644.1,767-785).
caggtggacctaacaaaat

SEQ ID NO: 358683 - DNA, 19 bp, Homo sapiens
  siRNA target sequence for LOC51334 (NM_016644.1,772-790).
ggacctaacaaaattccaa

SEQ ID NO: 358684 - DNA, 19 bp, Homo sapiens
  siRNA target sequence for LOC51334 (NM_016644.1,849-867).
gatgcatagacctgaaaaa

SEQ ID NO: 358685 - DNA, 19 bp, Homo sapiens
  siRNA target sequence for LOC51334 (NM_016644.1,893-911).
gagaacgagttcggtttaa

SEQ ID NO: 358686 - DNA, 19 bp, Homo sapiens
  siRNA target sequence for LOC51334 (NM_016644.1,898-916).
cgagttcggtttaatgaaa

SEQ ID NO: 358687 - DNA, 19 bp, Homo sapiens
  siRNA target sequence for LOC51334 (NM_016644.1,1159-1177).
ccacagaagacgatcttga

SEQ ID NO: 358688 - DNA, 19 bp, Homo sapiens
  siRNA target sequence for HDCMA18P (NM_016648.1,595-613).
gagtatttagcgctacaaa

SEQ ID NO: 358689 - DNA, 19 bp, Homo sapiens
  siRNA target sequence for HDCMA18P (NM_016648.1,597-615).
gtatttagcgctacaaaaa

SEQ ID NO: 358690 - DNA, 19 bp, Homo sapiens
  siRNA target sequence for HDCMA18P (NM_016648.1,616-634).
gctagcatggcttctttaa

SEQ ID NO: 358691 - DNA, 19 bp, Homo sapiens
  siRNA target sequence for HDCMA18P (NM_016648.1,740-758).
gtcgcacccaggagaaagt

SEQ ID NO: 358692 - DNA, 19 bp, Homo sapiens
  siRNA target sequence for HDCMA18P (NM_016648.1,742-760).
cgcacccaggagaaagtta

SEQ ID NO: 358693 - DNA, 19 bp, Homo sapiens
  siRNA target sequence for HDCMA18P (NM_016648.1,777-795).
gttcgtgagtggagtgatt

SEQ ID NO: 358694 - DNA, 19 bp, Homo sapiens
  siRNA target sequence for HDCMA18P (NM_016648.1,790-808).
gtgattgtgaagatcatta

SEQ ID NO: 358695 - DNA, 19 bp, Homo sapiens
  siRNA target sequence for HDCMA18P (NM_016648.1,885-903).
gctagaaggggatacagaa

SEQ ID NO: 358696 - DNA, 19 bp, Homo sapiens
  siRNA target sequence for HDCMA18P (NM_016648.1,886-904).
ctagaaggggatacagaat

SEQ ID NO: 358697 - DNA, 19 bp, Homo sapiens
  siRNA target sequence for HDCMA18P (NM_016648.1,899-917).
cagaatgccatgctagatt

SEQ ID NO: 358698 - DNA, 19 bp, Homo sapiens
  siRNA target sequence for HDCMA18P (NM_016648.1,1004-1022).
gtgatcacgaacaaaggta

SEQ ID NO: 358699 - DNA, 19 bp, Homo sapiens
  siRNA target sequence for HDCMA18P (NM_016648.1,1006-1024).
gatcacgaacaaaggtatt

SEQ ID NO: 358700 - DNA, 19 bp, Homo sapiens
  siRNA target sequence for HDCMA18P (NM_016648.1,1027-1045).
cagaagattttggttgata

SEQ ID NO: 358701 - DNA, 19 bp, Homo sapiens
  siRNA target sequence for HDCMA18P (NM_016648.1,1042-1060).
gatagacaggcaaaactta

SEQ ID NO: 358702 - DNA, 19 bp, Homo sapiens
  siRNA target sequence for HDCMA18P (NM_016648.1,1046-1064).
gacaggcaaaacttaatca

SEQ ID NO: 358703 - DNA, 19 bp, Homo sapiens
  siRNA target sequence for HDCMA18P (NM_016648.1,1101-1119).
caccaaagctgaaaagatt

SEQ ID NO: 358704 - DNA, 19 bp, Homo sapiens
  siRNA target sequence for HDCMA18P (NM_016648.1,1116-1134).
gattagactggcaaagact

SEQ ID NO: 358705 - DNA, 19 bp, Homo sapiens
  siRNA target sequence for HDCMA18P (NM_016648.1,1131-1149).
gactcaacaagcgagtaaa

SEQ ID NO: 358706 - DNA, 19 bp, Homo sapiens
  siRNA target sequence for HDCMA18P (NM_016648.1,1135-1153).
caacaagcgagtaaacata

SEQ ID NO: 358707 - DNA, 19 bp, Homo sapiens
  siRNA target sequence for HDCMA18P (NM_016648.1,1138-1156).
caagcgagtaaacatataa

SEQ ID NO: 358708 - DNA, 19 bp, Homo sapiens
  siRNA target sequence for HDCMA18P (NM_016648.1,1141-1159).
gcgagtaaacatataagat

SEQ ID NO: 358709 - DNA, 19 bp, Homo sapiens
  siRNA target sequence for HDCMA18P (NM_016648.1,1142-1160).
cgagtaaacatataagatt

SEQ ID NO: 358710 - DNA, 19 bp, Homo sapiens
  siRNA target sequence for HDCMA18P (NM_016648.1,1143-1161).
gagtaaacatataagattt

SEQ ID NO: 358711 - DNA, 19 bp, Homo sapiens
  siRNA target sequence for C20orf6 (NM_016649.3,534-552).
ctcatgtaaatttaagata

SEQ ID NO: 358712 - DNA, 19 bp, Homo sapiens
  siRNA target sequence for C20orf6 (NM_016649.3,536-554).
catgtaaatttaagataga

SEQ ID NO: 358713 - DNA, 19 bp, Homo sapiens
  siRNA target sequence for C20orf6 (NM_016649.3,549-567).
gatagattcaaacataagt

SEQ ID NO: 358714 - DNA, 19 bp, Homo sapiens
  siRNA target sequence for C20orf6 (NM_016649.3,566-584).
gtccgaagaaggatagcaa

SEQ ID NO: 358715 - DNA, 19 bp, Homo sapiens
  siRNA target sequence for C20orf6 (NM_016649.3,573-591).
gaaggatagcaaagaattt

SEQ ID NO: 358716 - DNA, 19 bp, Homo sapiens
  siRNA target sequence for C20orf6 (NM_016649.3,621-639).
cattgttcaacatactaca

SEQ ID NO: 358717 - DNA, 19 bp, Homo sapiens
  siRNA target sequence for C20orf6 (NM_016649.3,673-691).
gactcaggcacctctgaaa

SEQ ID NO: 358718 - DNA, 19 bp, Homo sapiens
  siRNA target sequence for C20orf6 (NM_016649.3,680-698).
gcacctctgaaattgtgaa

SEQ ID NO: 358719 - DNA, 19 bp, Homo sapiens
  siRNA target sequence for C20orf6 (NM_016649.3,704-722).
ccagaatcgagtgttctaa

SEQ ID NO: 358720 - DNA, 19 bp, Homo sapiens
  siRNA target sequence for C20orf6 (NM_016649.3,743-761).
cagtggttcaactcataat

SEQ ID NO: 358721 - DNA, 19 bp, Homo sapiens
  siRNA target sequence for C20orf6 (NM_016649.3,745-763).
gtggttcaactcataatga

SEQ ID NO: 358722 - DNA, 19 bp, Homo sapiens
  siRNA target sequence for C20orf6 (NM_016649.3,748-766).
gttcaactcataatgacaa

SEQ ID NO: 358723 - DNA, 19 bp, Homo sapiens
  siRNA target sequence for C20orf6 (NM_016649.3,836-854).
cagaaagcgttagtgaaat

SEQ ID NO: 358724 - DNA, 19 bp, Homo sapiens
  siRNA target sequence for C20orf6 (NM_016649.3,1012-1030).
cttgcaaggggtaaaggaa

SEQ ID NO: 358725 - DNA, 19 bp, Homo sapiens
  siRNA target sequence for C20orf6 (NM_016649.3,1143-1161).
gattacacgtcgattagca

SEQ ID NO: 358726 - DNA, 19 bp, Homo sapiens
  siRNA target sequence for C20orf6 (NM_016649.3,1150-1168).
cgtcgattagcagtttgta

SEQ ID NO: 358727 - DNA, 19 bp, Homo sapiens
  siRNA target sequence for C20orf6 (NM_016649.3,1151-1169).
gtcgattagcagtttgtaa

SEQ ID NO: 358728 - DNA, 19 bp, Homo sapiens
  siRNA target sequence for C20orf6 (NM_016649.3,1153-1171).
cgattagcagtttgtaaca

SEQ ID NO: 358729 - DNA, 19 bp, Homo sapiens
  siRNA target sequence for C20orf6 (NM_016649.3,1154-1172).
gattagcagtttgtaacat

SEQ ID NO: 358730 - DNA, 19 bp, Homo sapiens
  siRNA target sequence for C20orf6 (NM_016649.3,1170-1188).
catggactgggatagatta

SEQ ID NO: 358731 - DNA, 19 bp, Homo sapiens
  siRNA target sequence for C20orf6 (NM_016649.3,1203-1221).
gctggctctgttcaattca

SEQ ID NO: 358732 - DNA, 19 bp, Homo sapiens
  siRNA target sequence for C20orf6 (NM_016649.3,1228-1246).
cccaaaggaggtgtaatat

SEQ ID NO: 358733 - DNA, 19 bp, Homo sapiens
  siRNA target sequence for C20orf6 (NM_016649.3,1229-1247).
ccaaaggaggtgtaatatt

SEQ ID NO: 358734 - DNA, 19 bp, Homo sapiens
  siRNA target sequence for C20orf6 (NM_016649.3,1309-1327).
ggaccagtagagctattaa

SEQ ID NO: 358735 - DNA, 19 bp, Homo sapiens
  siRNA target sequence for C20orf6 (NM_016649.3,1312-1330).
ccagtagagctattaagta

SEQ ID NO: 358736 - DNA, 19 bp, Homo sapiens
  siRNA target sequence for C20orf6 (NM_016649.3,1313-1331).
cagtagagctattaagtat

SEQ ID NO: 358737 - DNA, 19 bp, Homo sapiens
  siRNA target sequence for C20orf6 (NM_016649.3,1354-1372).
gactggacgtctagagaaa

SEQ ID NO: 358738 - DNA, 19 bp, Homo sapiens
  siRNA target sequence for C20orf6 (NM_016649.3,1404-1422).
gtactattatgcagtagta

SEQ ID NO: 358739 - DNA, 19 bp, Homo sapiens
  siRNA target sequence for C20orf6 (NM_016649.3,1433-1451).
ctccggaaacagctagtaa

SEQ ID NO: 358740 - DNA, 19 bp, Homo sapiens
  siRNA target sequence for C20orf6 (NM_016649.3,1435-1453).
ccggaaacagctagtaaaa

SEQ ID NO: 358741 - DNA, 19 bp, Homo sapiens
  siRNA target sequence for C20orf6 (NM_016649.3,1436-1454).
cggaaacagctagtaaaat

SEQ ID NO: 358742 - DNA, 19 bp, Homo sapiens
  siRNA target sequence for C20orf6 (NM_016649.3,1477-1495).
gaatttgaaagtagttgtt

SEQ ID NO: 358743 - DNA, 19 bp, Homo sapiens
  siRNA target sequence for C20orf6 (NM_016649.3,1496-1514).
ctttcatagatctaaggtt

SEQ ID NO: 358744 - DNA, 19 bp, Homo sapiens
  siRNA target sequence for C20orf6 (NM_016649.3,1511-1529).
ggtttataccagatgatat

SEQ ID NO: 358745 - DNA, 19 bp, Homo sapiens
  siRNA target sequence for C20orf6 (NM_016649.3,1555-1573).
gtagcctcagaagtgaatt

SEQ ID NO: 358746 - DNA, 19 bp, Homo sapiens
  siRNA target sequence for C20orf6 (NM_016649.3,1577-1595).
cagcatataaaccaaaata

SEQ ID NO: 358747 - DNA, 19 bp, Homo sapiens
  siRNA target sequence for C20orf6 (NM_016649.3,1616-1634).
gaacatcaacggtggaaat

SEQ ID NO: 358748 - DNA, 19 bp, Homo sapiens
  siRNA target sequence for C20orf6 (NM_016649.3,1725-1743).
cttagcttcctctagtgaa

SEQ ID NO: 358749 - DNA, 19 bp, Homo sapiens
  siRNA target sequence for C20orf6 (NM_016649.3,1764-1782).
ggagctacaaggtgatgat

SEQ ID NO: 358750 - DNA, 19 bp, Homo sapiens
  siRNA target sequence for C20orf6 (NM_016649.3,1856-1874).
ggcagctcttgcaggttat

SEQ ID NO: 358751 - DNA, 19 bp, Homo sapiens
  siRNA target sequence for C20orf6 (NM_016649.3,1928-1946).
gggttccaggtcttaaaga

SEQ ID NO: 358752 - DNA, 19 bp, Homo sapiens
  siRNA target sequence for C20orf6 (NM_016649.3,1971-1989).
caaattggaaggaaaggat

SEQ ID NO: 358753 - DNA, 19 bp, Homo sapiens
  siRNA target sequence for C20orf6 (NM_016649.3,1993-2011).
ctgaccccttgggaacaat

SEQ ID NO: 358754 - DNA, 19 bp, Homo sapiens
  siRNA target sequence for C20orf6 (NM_016649.3,2115-2133).
cccatactttgctgaagaa

SEQ ID NO: 358755 - DNA, 19 bp, Homo sapiens
  siRNA target sequence for C20orf6 (NM_016649.3,2162-2180).
cggtaaaatctgcaaaaga

SEQ ID NO: 358756 - DNA, 19 bp, Homo sapiens
  siRNA target sequence for C20orf6 (NM_016649.3,2358-2376).
ggatgactttgaggtaaat

SEQ ID NO: 358757 - DNA, 19 bp, Homo sapiens
  siRNA target sequence for C20orf6 (NM_016649.3,2387-2405).
cacggtttcaggcaatgta

SEQ ID NO: 358758 - DNA, 19 bp, Homo sapiens
  siRNA target sequence for C20orf6 (NM_016649.3,2389-2407).
cggtttcaggcaatgtaca

SEQ ID NO: 358759 - DNA, 19 bp, Homo sapiens
  siRNA target sequence for C20orf6 (NM_016649.3,2406-2424).
cacttcccacttgttcaat

SEQ ID NO: 358760 - DNA, 19 bp, Homo sapiens
  siRNA target sequence for C20orf6 (NM_016649.3,2408-2426).
cttcccacttgttcaattt

SEQ ID NO: 358761 - DNA, 19 bp, Homo sapiens
  siRNA target sequence for C20orf6 (NM_016649.3,2431-2449).
ccctcagatcccaatttca

SEQ ID NO: 358762 - DNA, 19 bp, Homo sapiens
  siRNA target sequence for C20orf6 (NM_016649.3,2432-2450).
cctcagatcccaatttcaa

SEQ ID NO: 358763 - DNA, 19 bp, Homo sapiens
  siRNA target sequence for C20orf6 (NM_016649.3,2503-2521).
cggaaagaacaagaactta

SEQ ID NO: 358764 - DNA, 19 bp, Homo sapiens
  siRNA target sequence for UBN1 (NM_016936.2,745-763).
ccctgaatcctgcgttttt

SEQ ID NO: 358765 - DNA, 19 bp, Homo sapiens
  siRNA target sequence for UBN1 (NM_016936.2,747-765).
ctgaatcctgcgtttttga

SEQ ID NO: 358766 - DNA, 19 bp, Homo sapiens
  siRNA target sequence for UBN1 (NM_016936.2,829-847).
cagctgttcggattacact

SEQ ID NO: 358767 - DNA, 19 bp, Homo sapiens
  siRNA target sequence for UBN1 (NM_016936.2,874-892).
gctgcccagagttcttcta

SEQ ID NO: 358768 - DNA, 19 bp, Homo sapiens
  siRNA target sequence for UBN1 (NM_016936.2,931-949).
gccttcagcctggagataa

SEQ ID NO: 358769 - DNA, 19 bp, Homo sapiens
  siRNA target sequence for UBN1 (NM_016936.2,936-954).
cagcctggagataagaaga

SEQ ID NO: 358770 - DNA, 19 bp, Homo sapiens
  siRNA target sequence for UBN1 (NM_016936.2,1005-1023).
gaggcccttgcccgaaaat

SEQ ID NO: 358771 - DNA, 19 bp, Homo sapiens
  siRNA target sequence for UBN1 (NM_016936.2,1009-1027).
cccttgcccgaaaatttga

SEQ ID NO: 358772 - DNA, 19 bp, Homo sapiens
  siRNA target sequence for UBN1 (NM_016936.2,1010-1028).
ccttgcccgaaaatttgaa

SEQ ID NO: 358773 - DNA, 19 bp, Homo sapiens
  siRNA target sequence for UBN1 (NM_016936.2,1079-1097).
cgatatggggtatggttat

SEQ ID NO: 358774 - DNA, 19 bp, Homo sapiens
  siRNA target sequence for UBN1 (NM_016936.2,1085-1103).
ggggtatggttatgatgaa

SEQ ID NO: 358775 - DNA, 19 bp, Homo sapiens
  siRNA target sequence for UBN1 (NM_016936.2,1086-1104).
gggtatggttatgatgaat

SEQ ID NO: 358776 - DNA, 19 bp, Homo sapiens
  siRNA target sequence for UBN1 (NM_016936.2,1105-1123).
ccgactccttcatcgataa

SEQ ID NO: 358777 - DNA, 19 bp, Homo sapiens
  siRNA target sequence for UBN1 (NM_016936.2,1107-1125).
gactccttcatcgataact

SEQ ID NO: 358778 - DNA, 19 bp, Homo sapiens
  siRNA target sequence for UBN1 (NM_016936.2,1165-1183).
cgaagtatggaggatttta

SEQ ID NO: 358779 - DNA, 19 bp, Homo sapiens
  siRNA target sequence for UBN1 (NM_016936.2,1173-1191).
ggaggattttacattaact

SEQ ID NO: 358780 - DNA, 19 bp, Homo sapiens
  siRNA target sequence for UBN1 (NM_016936.2,1193-1211).
gggaaccctgcagtttaga

SEQ ID NO: 358781 - DNA, 19 bp, Homo sapiens
  siRNA target sequence for UBN1 (NM_016936.2,1195-1213).
gaaccctgcagtttagaca

SEQ ID NO: 358782 - DNA, 19 bp, Homo sapiens
  siRNA target sequence for UBN1 (NM_016936.2,1432-1450).
gcgttaaagagatgctaaa

SEQ ID NO: 358783 - DNA, 19 bp, Homo sapiens
  siRNA target sequence for UBN1 (NM_016936.2,1681-1699).
gtcccttccgagatatgga

SEQ ID NO: 358784 - DNA, 19 bp, Homo sapiens
  siRNA target sequence for UBN1 (NM_016936.2,1853-1871).
cacccaggatattaatgga

SEQ ID NO: 358785 - DNA, 19 bp, Homo sapiens
  siRNA target sequence for UBN1 (NM_016936.2,1870-1888).
gaatcctattagacataga

SEQ ID NO: 358786 - DNA, 19 bp, Homo sapiens
  siRNA target sequence for UBN1 (NM_016936.2,1979-1997).
caagcgtgctcggaaactt

SEQ ID NO: 358787 - DNA, 19 bp, Homo sapiens
  siRNA target sequence for UBN1 (NM_016936.2,2159-2177).
gcagagggaccggatttgt

SEQ ID NO: 358788 - DNA, 19 bp, Homo sapiens
  siRNA target sequence for UBN1 (NM_016936.2,2160-2178).
cagagggaccggatttgtt

SEQ ID NO: 358789 - DNA, 19 bp, Homo sapiens
  siRNA target sequence for UBN1 (NM_016936.2,2226-2244).
cctcggaagaagttccaat

SEQ ID NO: 358790 - DNA, 19 bp, Homo sapiens
  siRNA target sequence for UBN1 (NM_016936.2,2436-2454).
catgggcacctgacttcaa

SEQ ID NO: 358791 - DNA, 19 bp, Homo sapiens
  siRNA target sequence for UBN1 (NM_016936.2,2472-2490).
gttatggccccttctaaaa

SEQ ID NO: 358792 - DNA, 19 bp, Homo sapiens
  siRNA target sequence for UBN1 (NM_016936.2,2506-2524).
cgtctacgaagcctgataa

SEQ ID NO: 358793 - DNA, 19 bp, Homo sapiens
  siRNA target sequence for UBN1 (NM_016936.2,2507-2525).
gtctacgaagcctgataaa

SEQ ID NO: 358794 - DNA, 19 bp, Homo sapiens
  siRNA target sequence for UBN1 (NM_016936.2,2509-2527).
ctacgaagcctgataaaaa

SEQ ID NO: 358795 - DNA, 19 bp, Homo sapiens
  siRNA target sequence for UBN1 (NM_016936.2,2512-2530).
cgaagcctgataaaaaggt

SEQ ID NO: 358796 - DNA, 19 bp, Homo sapiens
  siRNA target sequence for UBN1 (NM_016936.2,2513-2531).
gaagcctgataaaaaggtt

SEQ ID NO: 358797 - DNA, 19 bp, Homo sapiens
  siRNA target sequence for UBN1 (NM_016936.2,2735-2753).
ggaattggctgcattgaat

SEQ ID NO: 358798 - DNA, 19 bp, Homo sapiens
  siRNA target sequence for UBN1 (NM_016936.2,2760-2778).
gcagctgggaactctgaat

SEQ ID NO: 358799 - DNA, 19 bp, Homo sapiens
  siRNA target sequence for UBN1 (NM_016936.2,2817-2835).
gttggaggcgttttatgta

SEQ ID NO: 358800 - DNA, 19 bp, Homo sapiens
  siRNA target sequence for UBN1 (NM_016936.2,2895-2913).
ctgcagtcacccctcaatt

SEQ ID NO: 358801 - DNA, 19 bp, Homo sapiens
  siRNA target sequence for UBN1 (NM_016936.2,3014-3032).
gggcctgccagaagtacat

SEQ ID NO: 358802 - DNA, 19 bp, Homo sapiens
  siRNA target sequence for UBN1 (NM_016936.2,3027-3045).
gtacatcagtccaaagcta

SEQ ID NO: 358803 - DNA, 19 bp, Homo sapiens
  siRNA target sequence for UBN1 (NM_016936.2,3129-3147).
ggcactcagcagcagaaaa

SEQ ID NO: 358804 - DNA, 19 bp, Homo sapiens
  siRNA target sequence for UBN1 (NM_016936.2,3160-3178).
catctccatttgccaataa

SEQ ID NO: 358805 - DNA, 19 bp, Homo sapiens
  siRNA target sequence for UBN1 (NM_016936.2,3163-3181).
ctccatttgccaataagct

SEQ ID NO: 358806 - DNA, 19 bp, Homo sapiens
  siRNA target sequence for UBN1 (NM_016936.2,3217-3235).
gttccctcctgcagttagt

SEQ ID NO: 358807 - DNA, 19 bp, Homo sapiens
  siRNA target sequence for UBN1 (NM_016936.2,3220-3238).
ccctcctgcagttagtgaa

SEQ ID NO: 358808 - DNA, 19 bp, Homo sapiens
  siRNA target sequence for UBN1 (NM_016936.2,3387-3405).
ggctcatcttacaagaata

SEQ ID NO: 358809 - DNA, 19 bp, Homo sapiens
  siRNA target sequence for UBN1 (NM_016936.2,3388-3406).
gctcatcttacaagaataa

SEQ ID NO: 358810 - DNA, 19 bp, Homo sapiens
  siRNA target sequence for UBN1 (NM_016936.2,3389-3407).
ctcatcttacaagaataat

SEQ ID NO: 358811 - DNA, 19 bp, Homo sapiens
  siRNA target sequence for UBN1 (NM_016936.2,3471-3489).
ccagtccagagttctgttt

SEQ ID NO: 358812 - DNA, 19 bp, Homo sapiens
  siRNA target sequence for UBN1 (NM_016936.2,3542-3560).
ccgacccgtcccaagttca

SEQ ID NO: 358813 - DNA, 19 bp, Homo sapiens
  siRNA target sequence for UBN1 (NM_016936.2,3683-3701).
gccctctgcagttagtagt

SEQ ID NO: 358814 - DNA, 19 bp, Homo sapiens
  siRNA target sequence for UBN1 (NM_016936.2,3709-3727).
cgtctacctccttgtcaaa

SEQ ID NO: 358815 - DNA, 19 bp, Homo sapiens
  siRNA target sequence for UBN1 (NM_016936.2,3710-3728).
gtctacctccttgtcaaaa

SEQ ID NO: 358816 - DNA, 19 bp, Homo sapiens
  siRNA target sequence for UBN1 (NM_016936.2,3767-3785).
gatggcttcaccctacaaa

SEQ ID NO: 358817 - DNA, 19 bp, Homo sapiens
  siRNA target sequence for UBN1 (NM_016936.2,3820-3838).
cgaactccttgggaattat

SEQ ID NO: 358818 - DNA, 19 bp, Homo sapiens
  siRNA target sequence for UBN1 (NM_016936.2,3821-3839).
gaactccttgggaattata

SEQ ID NO: 358819 - DNA, 19 bp, Homo sapiens
  siRNA target sequence for UBN1 (NM_016936.2,4086-4104).
gctgtaccacggaaattgt

SEQ ID NO: 358820 - DNA, 19 bp, Homo sapiens
  siRNA target sequence for C6orf48 (NM_016947.1,277-295).
ctgctgactcaaaacaact

SEQ ID NO: 358821 - DNA, 19 bp, Homo sapiens
  siRNA target sequence for C6orf48 (NM_016947.1,282-300).
gactcaaaacaactaatga

SEQ ID NO: 358822 - DNA, 19 bp, Homo sapiens
  siRNA target sequence for C6orf48 (NM_016947.1,388-406).
catggagagaagctttgta

SEQ ID NO: 358823 - DNA, 19 bp, Homo sapiens
  siRNA target sequence for C21orf18 (NM_017438.1,102-120).
ccggatcagaagacgaaaa

SEQ ID NO: 358824 - DNA, 19 bp, Homo sapiens
  siRNA target sequence for C21orf18 (NM_017438.1,121-139).
ctctgcggaagttctgaat

SEQ ID NO: 358825 - DNA, 19 bp, Homo sapiens
  siRNA target sequence for C21orf18 (NM_017438.1,154-172).
gagagccacaagtctgaat

SEQ ID NO: 358826 - DNA, 19 bp, Homo sapiens
  siRNA target sequence for C21orf18 (NM_017438.1,207-225).
gtttcaagattcaaactta

SEQ ID NO: 358827 - DNA, 19 bp, Homo sapiens
  siRNA target sequence for C21orf18 (NM_017438.1,222-240).
cttagcgcctgcttgtttt

SEQ ID NO: 358828 - DNA, 19 bp, Homo sapiens
  siRNA target sequence for C21orf18 (NM_017438.1,282-300).
ggagggacagatgattatt

SEQ ID NO: 358829 - DNA, 19 bp, Homo sapiens
  siRNA target sequence for C21orf18 (NM_017438.1,283-301).
gagggacagatgattattt

SEQ ID NO: 358830 - DNA, 19 bp, Homo sapiens
  siRNA target sequence for C21orf18 (NM_017438.1,348-366).
ctacttaggggcatacatt

SEQ ID NO: 358831 - DNA, 19 bp, Homo sapiens
  siRNA target sequence for C21orf18 (NM_017438.1,351-369).
cttaggggcatacattact

SEQ ID NO: 358832 - DNA, 19 bp, Homo sapiens
  siRNA target sequence for C21orf18 (NM_017438.1,355-373).
ggggcatacattactaagt

SEQ ID NO: 358833 - DNA, 19 bp, Homo sapiens
  siRNA target sequence for C21orf18 (NM_017438.1,403-421).
ctgtgcacctttttagttt

SEQ ID NO: 358834 - DNA, 19 bp, Homo sapiens
  siRNA target sequence for C21orf18 (NM_017438.1,405-423).
gtgcacctttttagtttca

SEQ ID NO: 358835 - DNA, 19 bp, Homo sapiens
  siRNA target sequence for C21orf18 (NM_017438.1,567-585).
ccacgtgcaggagttcttt

SEQ ID NO: 358836 - DNA, 19 bp, Homo sapiens
  siRNA target sequence for C21orf18 (NM_017438.1,788-806).
gcccacatgtccaggtaaa

SEQ ID NO: 358837 - DNA, 19 bp, Homo sapiens
  siRNA target sequence for C21orf18 (NM_017438.1,789-807).
cccacatgtccaggtaaaa

SEQ ID NO: 358838 - DNA, 19 bp, Homo sapiens
  siRNA target sequence for C21orf18 (NM_017438.1,808-826).
gcagcgtttaatgaagaaa

SEQ ID NO: 358839 - DNA, 19 bp, Homo sapiens
  siRNA target sequence for C21orf18 (NM_017438.1,823-841).
gaaactcattcttacgaaa

SEQ ID NO: 358840 - DNA, 19 bp, Homo sapiens
  siRNA target sequence for C21orf18 (NM_017438.1,863-881).
gaaagcatgaagaggtatt

SEQ ID NO: 358841 - DNA, 19 bp, Homo sapiens
  siRNA target sequence for C21orf18 (NM_017438.1,868-886).
catgaagaggtattcatct

SEQ ID NO: 358842 - DNA, 19 bp, Homo sapiens
  siRNA target sequence for C21orf18 (NM_017438.1,887-905).
gttacggccctcacgataa

SEQ ID NO: 358843 - DNA, 19 bp, Homo sapiens
  siRNA target sequence for C21orf18 (NM_017438.1,891-909).
cggccctcacgataatcaa

SEQ ID NO: 358844 - DNA, 19 bp, Homo sapiens
  siRNA target sequence for C21orf18 (NM_017438.1,918-936).
cctggaatacggatttgtt

SEQ ID NO: 358845 - DNA, 19 bp, Homo sapiens
  siRNA target sequence for C21orf18 (NM_017438.1,1045-1063).
catggctatatagaaaatt

SEQ ID NO: 358846 - DNA, 19 bp, Homo sapiens
  siRNA target sequence for C21orf18 (NM_017438.1,1050-1068).
ctatatagaaaatttgaca

SEQ ID NO: 358847 - DNA, 19 bp, Homo sapiens
  siRNA target sequence for C21orf18 (NM_017438.1,1106-1124).
cccttaagttgttatgtct

SEQ ID NO: 358848 - DNA, 19 bp, Homo sapiens
  siRNA target sequence for C21orf18 (NM_017438.1,1159-1177).
cttcttggggaggtaattt

SEQ ID NO: 358849 - DNA, 19 bp, Homo sapiens
  siRNA target sequence for C21orf18 (NM_017438.1,1180-1198).
gatacgaatgagaagacaa

SEQ ID NO: 358850 - DNA, 19 bp, Homo sapiens
  siRNA target sequence for C21orf18 (NM_017438.1,1203-1221).
ggacatagcccagaaaata

SEQ ID NO: 358851 - DNA, 19 bp, Homo sapiens
  siRNA target sequence for C21orf18 (NM_017438.1,1210-1228).
gcccagaaaatatgctatt

SEQ ID NO: 358852 - DNA, 19 bp, Homo sapiens
  siRNA target sequence for C21orf18 (NM_017438.1,1211-1229).
cccagaaaatatgctatta

SEQ ID NO: 358853 - DNA, 19 bp, Homo sapiens
  siRNA target sequence for C21orf18 (NM_017438.1,1212-1230).
ccagaaaatatgctattat

SEQ ID NO: 358854 - DNA, 19 bp, Homo sapiens
  siRNA target sequence for C21orf18 (NM_017438.1,1244-1262).
ctaatgctgtgcttcaaaa

SEQ ID NO: 358855 - DNA, 19 bp, Homo sapiens
  siRNA target sequence for C21orf18 (NM_017438.1,1255-1273).
cttcaaaaggtgtctcata

SEQ ID NO: 358856 - DNA, 19 bp, Homo sapiens
  siRNA target sequence for C21orf18 (NM_017438.1,1291-1309).
gccctgataaaccaactaa

SEQ ID NO: 358857 - DNA, 19 bp, Homo sapiens
  siRNA target sequence for C21orf18 (NM_017438.1,1331-1349).
cggaagagctaaagattct

SEQ ID NO: 358858 - DNA, 19 bp, Homo sapiens
  siRNA target sequence for C21orf18 (NM_017438.1,1361-1379).
ccgagaccctgcacagttt

SEQ ID NO: 358859 - DNA, 19 bp, Homo sapiens
  siRNA target sequence for C21orf18 (NM_017438.1,1365-1383).
gaccctgcacagtttgcaa

SEQ ID NO: 358860 - DNA, 19 bp, Homo sapiens
  siRNA target sequence for C21orf91 (NM_017447.2,99-117).
ccttctgccacatttgttt

SEQ ID NO: 358861 - DNA, 19 bp, Homo sapiens
  siRNA target sequence for C21orf91 (NM_017447.2,152-170).
ctcttgcacaccaaatcat

SEQ ID NO: 358862 - DNA, 19 bp, Homo sapiens
  siRNA target sequence for C21orf91 (NM_017447.2,154-172).
cttgcacaccaaatcatta

SEQ ID NO: 358863 - DNA, 19 bp, Homo sapiens
  siRNA target sequence for C21orf91 (NM_017447.2,168-186).
cattaaggggccataaaga

SEQ ID NO: 358864 - DNA, 19 bp, Homo sapiens
  siRNA target sequence for C21orf91 (NM_017447.2,227-245).
cctcgatctaagctttcaa

SEQ ID NO: 358865 - DNA, 19 bp, Homo sapiens
  siRNA target sequence for C21orf91 (NM_017447.2,228-246).
ctcgatctaagctttcaaa

SEQ ID NO: 358866 - DNA, 19 bp, Homo sapiens
  siRNA target sequence for C21orf91 (NM_017447.2,230-248).
cgatctaagctttcaaaaa

SEQ ID NO: 358867 - DNA, 19 bp, Homo sapiens
  siRNA target sequence for C21orf91 (NM_017447.2,249-267).
gtacttatgaagaagttaa

SEQ ID NO: 358868 - DNA, 19 bp, Homo sapiens
  siRNA target sequence for C21orf91 (NM_017447.2,271-289).
cattttgagtaagaagata

SEQ ID NO: 358869 - DNA, 19 bp, Homo sapiens
  siRNA target sequence for C21orf91 (NM_017447.2,299-317).
gtgcagtatgcacaaaata

SEQ ID NO: 358870 - DNA, 19 bp, Homo sapiens
  siRNA target sequence for C21orf91 (NM_017447.2,359-377).
catcatctgtttaatttca

SEQ ID NO: 358871 - DNA, 19 bp, Homo sapiens
  siRNA target sequence for C21orf91 (NM_017447.2,466-484).
catctctaactgtacacaa

SEQ ID NO: 358872 - DNA, 19 bp, Homo sapiens
  siRNA target sequence for C21orf91 (NM_017447.2,469-487).
ctctaactgtacacaaaga

SEQ ID NO: 358873 - DNA, 19 bp, Homo sapiens
  siRNA target sequence for C21orf91 (NM_017447.2,471-489).
ctaactgtacacaaagaat

SEQ ID NO: 358874 - DNA, 19 bp, Homo sapiens
  siRNA target sequence for C21orf91 (NM_017447.2,477-495).
gtacacaaagaattttgga

SEQ ID NO: 358875 - DNA, 19 bp, Homo sapiens
  siRNA target sequence for C21orf91 (NM_017447.2,536-554).
gattcaggtgccactttat

SEQ ID NO: 358876 - DNA, 19 bp, Homo sapiens
  siRNA target sequence for C21orf91 (NM_017447.2,547-565).
cactttatgtcgtaacagt

SEQ ID NO: 358877 - DNA, 19 bp, Homo sapiens
  siRNA target sequence for C21orf91 (NM_017447.2,618-636).
ctagtccagaggctaatgt

SEQ ID NO: 358878 - DNA, 19 bp, Homo sapiens
  siRNA target sequence for C21orf91 (NM_017447.2,663-681).
gagaggaattgaattcgat

SEQ ID NO: 358879 - DNA, 19 bp, Homo sapiens
  siRNA target sequence for C21orf91 (NM_017447.2,821-839).
ctgaagaactgttctaagt

SEQ ID NO: 358880 - DNA, 19 bp, Homo sapiens
  siRNA target sequence for C21orf91 (NM_017447.2,857-875).
gggcgaacaggaatgaagt

SEQ ID NO: 358881 - DNA, 19 bp, Homo sapiens
  siRNA target sequence for C21orf91 (NM_017447.2,876-894).
cgcacctacccataaacaa

SEQ ID NO: 358882 - DNA, 19 bp, Homo sapiens
  siRNA target sequence for C21orf91 (NM_017447.2,878-896).
cacctacccataaacaact

SEQ ID NO: 358883 - DNA, 19 bp, Homo sapiens
  siRNA target sequence for ELD/OSA1 (NM_017519.1,655-673).
ccgtcccggagtttaataa

SEQ ID NO: 358884 - DNA, 19 bp, Homo sapiens
  siRNA target sequence for ELD/OSA1 (NM_017519.1,656-674).
cgtcccggagtttaataat

SEQ ID NO: 358885 - DNA, 19 bp, Homo sapiens
  siRNA target sequence for ELD/OSA1 (NM_017519.1,657-675).
gtcccggagtttaataatt

SEQ ID NO: 358886 - DNA, 19 bp, Homo sapiens
  siRNA target sequence for ELD/OSA1 (NM_017519.1,660-678).
ccggagtttaataattact

SEQ ID NO: 358887 - DNA, 19 bp, Homo sapiens
  siRNA target sequence for ELD/OSA1 (NM_017519.1,661-679).
cggagtttaataattacta

SEQ ID NO: 358888 - DNA, 19 bp, Homo sapiens
  siRNA target sequence for ELD/OSA1 (NM_017519.1,662-680).
ggagtttaataattactat

SEQ ID NO: 358889 - DNA, 19 bp, Homo sapiens
  siRNA target sequence for ELD/OSA1 (NM_017519.1,854-872).
cagccagtgcaaccattat

SEQ ID NO: 358890 - DNA, 19 bp, Homo sapiens
  siRNA target sequence for ELD/OSA1 (NM_017519.1,1517-1535).
ccagggcagcccaatggat

SEQ ID NO: 358891 - DNA, 19 bp, Homo sapiens
  siRNA target sequence for ELD/OSA1 (NM_017519.1,1522-1540).
gcagcccaatggatccaat

SEQ ID NO: 358892 - DNA, 19 bp, Homo sapiens
  siRNA target sequence for ELD/OSA1 (NM_017519.1,1639-1657).
gcccacagcggtatccaat

SEQ ID NO: 358893 - DNA, 19 bp, Homo sapiens
  siRNA target sequence for ELD/OSA1 (NM_017519.1,1640-1658).
cccacagcggtatccaatt

SEQ ID NO: 358894 - DNA, 19 bp, Homo sapiens
  siRNA target sequence for ELD/OSA1 (NM_017519.1,1764-1782).
ggccaacagccatattaca

SEQ ID NO: 358895 - DNA, 19 bp, Homo sapiens
  siRNA target sequence for ELD/OSA1 (NM_017519.1,1810-1828).
caccccaggcgcagtatct

SEQ ID NO: 358896 - DNA, 19 bp, Homo sapiens
  siRNA target sequence for ELD/OSA1 (NM_017519.1,1878-1896).
gaaggctatggaactagat

SEQ ID NO: 358897 - DNA, 19 bp, Homo sapiens
  siRNA target sequence for ELD/OSA1 (NM_017519.1,1883-1901).
ctatggaactagatctcaa

SEQ ID NO: 358898 - DNA, 19 bp, Homo sapiens
  siRNA target sequence for ELD/OSA1 (NM_017519.1,1924-1942).
ctaaccatgaagacttgaa

SEQ ID NO: 358899 - DNA, 19 bp, Homo sapiens
  siRNA target sequence for ELD/OSA1 (NM_017519.1,1928-1946).
ccatgaagacttgaactta

SEQ ID NO: 358900 - DNA, 19 bp, Homo sapiens
  siRNA target sequence for ELD/OSA1 (NM_017519.1,1929-1947).
catgaagacttgaacttaa

SEQ ID NO: 358901 - DNA, 19 bp, Homo sapiens
  siRNA target sequence for ELD/OSA1 (NM_017519.1,2008-2026).
cgggaacggaagcaacttt

SEQ ID NO: 358902 - DNA, 19 bp, Homo sapiens
  siRNA target sequence for ELD/OSA1 (NM_017519.1,2197-2215).
caatctctcctgcaagtat

SEQ ID NO: 358903 - DNA, 19 bp, Homo sapiens
  siRNA target sequence for ELD/OSA1 (NM_017519.1,2244-2262).
cccgggagccagtcagaat

SEQ ID NO: 358904 - DNA, 19 bp, Homo sapiens
  siRNA target sequence for ELD/OSA1 (NM_017519.1,2425-2443).
gtagctttcagcagagtaa

SEQ ID NO: 358905 - DNA, 19 bp, Homo sapiens
  siRNA target sequence for ELD/OSA1 (NM_017519.1,2429-2447).
ctttcagcagagtaactca

SEQ ID NO: 358906 - DNA, 19 bp, Homo sapiens
  siRNA target sequence for ELD/OSA1 (NM_017519.1,2648-2666).
gatgcagaacagaccattt

SEQ ID NO: 358907 - DNA, 19 bp, Homo sapiens
  siRNA target sequence for ELD/OSA1 (NM_017519.1,2657-2675).
cagaccatttcctggaaat

SEQ ID NO: 358908 - DNA, 19 bp, Homo sapiens
  siRNA target sequence for ELD/OSA1 (NM_017519.1,2970-2988).
gtgggtcttgcagatatga

SEQ ID NO: 358909 - DNA, 19 bp, Homo sapiens
  siRNA target sequence for ELD/OSA1 (NM_017519.1,3064-3082).
gcaagtcaaaggatagcta

SEQ ID NO: 358910 - DNA, 19 bp, Homo sapiens
  siRNA target sequence for ELD/OSA1 (NM_017519.1,3430-3448).
ggggtttggcccaggttaa

SEQ ID NO: 358911 - DNA, 19 bp, Homo sapiens
  siRNA target sequence for ELD/OSA1 (NM_017519.1,3432-3450).
ggtttggcccaggttaata

SEQ ID NO: 358912 - DNA, 19 bp, Homo sapiens
  siRNA target sequence for ELD/OSA1 (NM_017519.1,3433-3451).
gtttggcccaggttaataa

SEQ ID NO: 358913 - DNA, 19 bp, Homo sapiens
  siRNA target sequence for ELD/OSA1 (NM_017519.1,3468-3486).
gagctggcaaccaacctaa

SEQ ID NO: 358914 - DNA, 19 bp, Homo sapiens
  siRNA target sequence for ELD/OSA1 (NM_017519.1,3473-3491).
ggcaaccaacctaaacgtt

SEQ ID NO: 358915 - DNA, 19 bp, Homo sapiens
  siRNA target sequence for ELD/OSA1 (NM_017519.1,3507-3525).
gcagcgagctccctgaaaa

SEQ ID NO: 358916 - DNA, 19 bp, Homo sapiens
  siRNA target sequence for ELD/OSA1 (NM_017519.1,3783-3801).
ggaagaagcagtacaatca

SEQ ID NO: 358917 - DNA, 19 bp, Homo sapiens
  siRNA target sequence for ELD/OSA1 (NM_017519.1,3967-3985).
gaagcagcgagccctttat

SEQ ID NO: 358918 - DNA, 19 bp, Homo sapiens
  siRNA target sequence for ELD/OSA1 (NM_017519.1,4039-4057).
cctccggagcaatgtctaa

SEQ ID NO: 358919 - DNA, 19 bp, Homo sapiens
  siRNA target sequence for ELD/OSA1 (NM_017519.1,4106-4124).
ccgaaggcatgaaccttat

SEQ ID NO: 358920 - DNA, 19 bp, Homo sapiens
  siRNA target sequence for ELD/OSA1 (NM_017519.1,4198-4216).
cacagcagccgaattacaa

SEQ ID NO: 358921 - DNA, 19 bp, Homo sapiens
  siRNA target sequence for ELD/OSA1 (NM_017519.1,4255-4273).
gccacgagggcgacatgta

SEQ ID NO: 358922 - DNA, 19 bp, Homo sapiens
  siRNA target sequence for ELD/OSA1 (NM_017519.1,4257-4275).
cacgagggcgacatgtaca

SEQ ID NO: 358923 - DNA, 19 bp, Homo sapiens
  siRNA target sequence for ELD/OSA1 (NM_017519.1,4260-4278).
gagggcgacatgtacaaca

SEQ ID NO: 358924 - DNA, 19 bp, Homo sapiens
  siRNA target sequence for ELD/OSA1 (NM_017519.1,4423-4441).
gaatcccgcctcagatgat

SEQ ID NO: 358925 - DNA, 19 bp, Homo sapiens
  siRNA target sequence for ELD/OSA1 (NM_017519.1,4473-4491).
gggcctcagcagaatatgt

SEQ ID NO: 358926 - DNA, 19 bp, Homo sapiens
  siRNA target sequence for ELD/OSA1 (NM_017519.1,4492-4510).
gggcagcacgcaatgatat

SEQ ID NO: 358927 - DNA, 19 bp, Homo sapiens
  siRNA target sequence for ELD/OSA1 (NM_017519.1,4599-4617).
gtacccgatcagaggataa

SEQ ID NO: 358928 - DNA, 19 bp, Homo sapiens
  siRNA target sequence for ELD/OSA1 (NM_017519.1,4603-4621).
ccgatcagaggataaatca

SEQ ID NO: 358929 - DNA, 19 bp, Homo sapiens
  siRNA target sequence for ELD/OSA1 (NM_017519.1,4604-4622).
cgatcagaggataaatcat

SEQ ID NO: 358930 - DNA, 19 bp, Homo sapiens
  siRNA target sequence for ELD/OSA1 (NM_017519.1,4648-4666).
gccagcgtcagccttatat

SEQ ID NO: 358931 - DNA, 19 bp, Homo sapiens
  siRNA target sequence for ELD/OSA1 (NM_017519.1,4650-4668).
cagcgtcagccttatatgt

SEQ ID NO: 358932 - DNA, 19 bp, Homo sapiens
  siRNA target sequence for ELD/OSA1 (NM_017519.1,4942-4960).
catcacaaccagtcttgaa

SEQ ID NO: 358933 - DNA, 19 bp, Homo sapiens
  siRNA target sequence for ELD/OSA1 (NM_017519.1,5063-5081).
ggacactattaatattctt

SEQ ID NO: 358934 - DNA, 19 bp, Homo sapiens
  siRNA target sequence for ELD/OSA1 (NM_017519.1,5119-5137).
cccagttgtctggatttct

SEQ ID NO: 358935 - DNA, 19 bp, Homo sapiens
  siRNA target sequence for ELD/OSA1 (NM_017519.1,5131-5149).
gatttctcgaacttttagt

SEQ ID NO: 358936 - DNA, 19 bp, Homo sapiens
  siRNA target sequence for ELD/OSA1 (NM_017519.1,5142-5160).
cttttagtcgagtacttta

SEQ ID NO: 358937 - DNA, 19 bp, Homo sapiens
  siRNA target sequence for ELD/OSA1 (NM_017519.1,5148-5166).
gtcgagtactttagaaaat

SEQ ID NO: 358938 - DNA, 19 bp, Homo sapiens
  siRNA target sequence for ELD/OSA1 (NM_017519.1,5207-5225).
gggagaccccagccaaaaa

SEQ ID NO: 358939 - DNA, 19 bp, Homo sapiens
  siRNA target sequence for ELD/OSA1 (NM_017519.1,5216-5234).
cagccaaaaagcacttgat

SEQ ID NO: 358940 - DNA, 19 bp, Homo sapiens
  siRNA target sequence for ELD/OSA1 (NM_017519.1,5218-5236).
gccaaaaagcacttgatca

SEQ ID NO: 358941 - DNA, 19 bp, Homo sapiens
  siRNA target sequence for ELD/OSA1 (NM_017519.1,5431-5449).
ccaagcaagccagtaagtt

SEQ ID NO: 358942 - DNA, 19 bp, Homo sapiens
  siRNA target sequence for ELD/OSA1 (NM_017519.1,5480-5498).
gaacaacctgtttgttgtt

SEQ ID NO: 358943 - DNA, 19 bp, Homo sapiens
  siRNA target sequence for ELD/OSA1 (NM_017519.1,5650-5668).
gctccgcaggtagaaagaa

SEQ ID NO: 358944 - DNA, 19 bp, Homo sapiens
  siRNA target sequence for ELD/OSA1 (NM_017519.1,5651-5669).
ctccgcaggtagaaagaaa

SEQ ID NO: 358945 - DNA, 19 bp, Homo sapiens
  siRNA target sequence for ELD/OSA1 (NM_017519.1,5653-5671).
ccgcaggtagaaagaaaga

SEQ ID NO: 358946 - DNA, 19 bp, Homo sapiens
  siRNA target sequence for ELD/OSA1 (NM_017519.1,5787-5805).
cagaccgaaagcagtaagt

SEQ ID NO: 358947 - DNA, 19 bp, Homo sapiens
  siRNA target sequence for ELD/OSA1 (NM_017519.1,5800-5818).
gtaagtttccctttggtat

SEQ ID NO: 358948 - DNA, 19 bp, Homo sapiens
  siRNA target sequence for ELD/OSA1 (NM_017519.1,5976-5994).
ggcaatgatgccgaaatgt

SEQ ID NO: 358949 - DNA, 19 bp, Homo sapiens
  siRNA target sequence for ELD/OSA1 (NM_017519.1,6069-6087).
gcaccgcagacctatgaga

SEQ ID NO: 358950 - DNA, 19 bp, Homo sapiens
  siRNA target sequence for ELD/OSA1 (NM_017519.1,6070-6088).
caccgcagacctatgagaa

SEQ ID NO: 358951 - DNA, 19 bp, Homo sapiens
  siRNA target sequence for ELD/OSA1 (NM_017519.1,6073-6091).
cgcagacctatgagaaaga

SEQ ID NO: 358952 - DNA, 19 bp, Homo sapiens
  siRNA target sequence for ELD/OSA1 (NM_017519.1,6150-6168).
gaggtcttgagggataaca

SEQ ID NO: 358953 - DNA, 19 bp, Homo sapiens
  siRNA target sequence for ELD/OSA1 (NM_017519.1,6211-6229).
ctgcttacacggaaagcat

SEQ ID NO: 358954 - DNA, 19 bp, Homo sapiens
  siRNA target sequence for ELD/OSA1 (NM_017519.1,6275-6293).
gtctgcagaggcacaagat

SEQ ID NO: 358955 - DNA, 19 bp, Homo sapiens
  siRNA target sequence for ELD/OSA1 (NM_017519.1,6285-6303).
gcacaagatccctttccaa

SEQ ID NO: 358956 - DNA, 19 bp, Homo sapiens
  siRNA target sequence for ELD/OSA1 (NM_017519.1,6348-6366).
gagaccctctgtaaactca

SEQ ID NO: 358957 - DNA, 19 bp, Homo sapiens
  siRNA target sequence for ELD/OSA1 (NM_017519.1,6352-6370).
ccctctgtaaactcagtat

SEQ ID NO: 358958 - DNA, 19 bp, Homo sapiens
  siRNA target sequence for ELD/OSA1 (NM_017519.1,6398-6416).
ggccactcctccatttagt

SEQ ID NO: 358959 - DNA, 19 bp, Homo sapiens
  siRNA target sequence for ELD/OSA1 (NM_017519.1,6415-6433).
gtcgtcaggagaaattcta

SEQ ID NO: 358960 - DNA, 19 bp, Homo sapiens
  siRNA target sequence for ELD/OSA1 (NM_017519.1,6471-6489).
ccagtctgtcgagaaatgt

SEQ ID NO: 358961 - DNA, 19 bp, Homo sapiens
  siRNA target sequence for ELD/OSA1 (NM_017519.1,6490-6508).
ccatggcgcttttatcgaa

SEQ ID NO: 358962 - DNA, 19 bp, Homo sapiens
  siRNA target sequence for ELD/OSA1 (NM_017519.1,6559-6577).
gaagcattggaaacttgat

SEQ ID NO: 358963 - DNA, 19 bp, Homo sapiens
  siRNA target sequence for ELD/OSA1 (NM_017519.1,6664-6682).
cacctagcgtagacatgat

SEQ ID NO: 358964 - DNA, 19 bp, Homo sapiens
  siRNA target sequence for ELD/OSA1 (NM_017519.1,6666-6684).
cctagcgtagacatgatgt

SEQ ID NO: 358965 - DNA, 19 bp, Homo sapiens
  siRNA target sequence for ELD/OSA1 (NM_017519.1,6764-6782).
gctggatatctcgatatca

SEQ ID NO: 358966 - DNA, 19 bp, Homo sapiens
  siRNA target sequence for HSJ001348 (NM_017527.2,751-769).
cctcaagtgttgtaaaatt

SEQ ID NO: 358967 - DNA, 19 bp, Homo sapiens
  siRNA target sequence for HSJ001348 (NM_017527.2,802-820).
ctcatcagtgttcaaagaa

SEQ ID NO: 358968 - DNA, 19 bp, Homo sapiens
  siRNA target sequence for LOC55565 (NM_017530.1,381-399).
cccgtcggaaacagacaaa

SEQ ID NO: 358969 - DNA, 19 bp, Homo sapiens
  siRNA target sequence for LOC55565 (NM_017530.1,439-457).
ggagacgacacaagatgaa

SEQ ID NO: 358970 - DNA, 19 bp, Homo sapiens
  siRNA target sequence for LOC55565 (NM_017530.1,562-580).
ggtcacagggaatttgaat

SEQ ID NO: 358971 - DNA, 19 bp, Homo sapiens
  siRNA target sequence for LOC55565 (NM_017530.1,563-581).
gtcacagggaatttgaatt

SEQ ID NO: 358972 - DNA, 19 bp, Homo sapiens
  siRNA target sequence for LOC55565 (NM_017530.1,565-583).
cacagggaatttgaattct

SEQ ID NO: 358973 - DNA, 19 bp, Homo sapiens
  siRNA target sequence for LOC55565 (NM_017530.1,747-765).
gtcgccacctcttaatcca

SEQ ID NO: 358974 - DNA, 19 bp, Homo sapiens
  siRNA target sequence for LOC55565 (NM_017530.1,768-786).
cggaggaccagcgatctaa

SEQ ID NO: 358975 - DNA, 19 bp, Homo sapiens
  siRNA target sequence for LOC55565 (NM_017530.1,770-788).
gaggaccagcgatctaact

SEQ ID NO: 358976 - DNA, 19 bp, Homo sapiens
  siRNA target sequence for LOC55565 (NM_017530.1,772-790).
ggaccagcgatctaactgt

SEQ ID NO: 358977 - DNA, 19 bp, Homo sapiens
  siRNA target sequence for LOC55565 (NM_017530.1,842-860).
cttcctgaagtactaaata

SEQ ID NO: 358978 - DNA, 19 bp, Homo sapiens
  siRNA target sequence for LOC55565 (NM_017530.1,900-918).
gtgctgaggggaaggatat

SEQ ID NO: 358979 - DNA, 19 bp, Homo sapiens
  siRNA target sequence for LOC55565 (NM_017530.1,953-971).
ctgcttgtgtgcaacaact

SEQ ID NO: 358980 - DNA, 19 bp, Homo sapiens
  siRNA target sequence for LOC55565 (NM_017530.1,972-990).
gtgctgcctaccgtaaact

SEQ ID NO: 358981 - DNA, 19 bp, Homo sapiens
  siRNA target sequence for LOC55565 (NM_017530.1,1024-1042).
ggctctacgtcgacagaat

SEQ ID NO: 358982 - DNA, 19 bp, Homo sapiens
  siRNA target sequence for LOC55565 (NM_017530.1,1026-1044).
ctctacgtcgacagaatga

SEQ ID NO: 358983 - DNA, 19 bp, Homo sapiens
  siRNA target sequence for LOC55565 (NM_017530.1,1333-1351).
gatgttgcgagctcagttt

SEQ ID NO: 358984 - DNA, 19 bp, Homo sapiens
  siRNA target sequence for DKFZp566H0824 (NM_017535.1,4214-4232).
gcagcgctgagcactttca

SEQ ID NO: 358985 - DNA, 19 bp, Homo sapiens
  siRNA target sequence for GALNT10 (NM_017540.3,368-386).
ccagggtgggccatatcta

SEQ ID NO: 358986 - DNA, 19 bp, Homo sapiens
  siRNA target sequence for GALNT10 (NM_017540.3,526-544).
gatgtcgcagtccagaaaa

SEQ ID NO: 358987 - DNA, 19 bp, Homo sapiens
  siRNA target sequence for GALNT10 (NM_017540.3,557-575).
cccttaactgcaagagttt

SEQ ID NO: 358988 - DNA, 19 bp, Homo sapiens
  siRNA target sequence for GALNT10 (NM_017540.3,559-577).
cttaactgcaagagtttca

SEQ ID NO: 358989 - DNA, 19 bp, Homo sapiens
  siRNA target sequence for GALNT10 (NM_017540.3,650-668).
ggggggagatccgaaatgt

SEQ ID NO: 358990 - DNA, 19 bp, Homo sapiens
  siRNA target sequence for GALNT10 (NM_017540.3,677-695).
ggctgtgtgcagacacaaa

SEQ ID NO: 358991 - DNA, 19 bp, Homo sapiens
  siRNA target sequence for GALNT10 (NM_017540.3,898-916).
ggcaaccagctgtggaaat

SEQ ID NO: 358992 - DNA, 19 bp, Homo sapiens
  siRNA target sequence for GALNT10 (NM_017540.3,899-917).
gcaaccagctgtggaaata

SEQ ID NO: 358993 - DNA, 19 bp, Homo sapiens
  siRNA target sequence for GALNT10 (NM_017540.3,977-995).
gtgaccataggatcttcat

SEQ ID NO: 358994 - DNA, 19 bp, Homo sapiens
  siRNA target sequence for GALNT10 (NM_017540.3,979-997).
gaccataggatcttcatga

SEQ ID NO: 358995 - DNA, 19 bp, Homo sapiens
  siRNA target sequence for DKFZp434L0850 (NM_017558.1,144-162).
ccatgggggctgttcagat

SEQ ID NO: 358996 - DNA, 19 bp, Homo sapiens
  siRNA target sequence for DKFZp434L0850 (NM_017558.1,158-176).
cagatgggattggtcaata

SEQ ID NO: 358997 - DNA, 19 bp, Homo sapiens
  siRNA target sequence for DKFZp434L0850 (NM_017558.1,164-182).
ggattggtcaatatgttca

SEQ ID NO: 358998 - DNA, 19 bp, Homo sapiens
  siRNA target sequence for DKFZp434L0850 (NM_017558.1,165-183).
gattggtcaatatgttcaa

SEQ ID NO: 358999 - DNA, 19 bp, Homo sapiens
  siRNA target sequence for DKFZp434L0850 (NM_017558.1,170-188).
gtcaatatgttcaaaggat

SEQ ID NO: 359000 - DNA, 19 bp, Homo sapiens
  siRNA target sequence for DKFZp434L0850 (NM_017558.1,186-204).
gatttcaaagcaaggtttt

SEQ ID NO: 359001 - DNA, 19 bp, Homo sapiens
  siRNA target sequence for DKFZp434L0850 (NM_017558.1,223-241).
ggtggttacagaagaagaa

SEQ ID NO: 359002 - DNA, 19 bp, Homo sapiens
  siRNA target sequence for DKFZp434L0850 (NM_017558.1,239-257).
gaagtaaaccgaatgctta

SEQ ID NO: 359003 - DNA, 19 bp, Homo sapiens
  siRNA target sequence for DKFZp434L0850 (NM_017558.1,333-351).
cacagatcatcgaactctt

SEQ ID NO: 359004 - DNA, 19 bp, Homo sapiens
  siRNA target sequence for DKFZp434L0850 (NM_017558.1,337-355).
gatcatcgaactcttagat

SEQ ID NO: 359005 - DNA, 19 bp, Homo sapiens
  siRNA target sequence for DKFZp434L0850 (NM_017558.1,392-410).
gacctggatcaggcattat

SEQ ID NO: 359006 - DNA, 19 bp, Homo sapiens
  siRNA target sequence for DKFZp434L0850 (NM_017558.1,413-431).
cagccctttccatcagaaa

SEQ ID NO: 359007 - DNA, 19 bp, Homo sapiens
  siRNA target sequence for DKFZp434L0850 (NM_017558.1,416-434).
ccctttccatcagaaatta

SEQ ID NO: 359008 - DNA, 19 bp, Homo sapiens
  siRNA target sequence for DKFZp434L0850 (NM_017558.1,453-471).
cctgtgaagtctatgaagt

SEQ ID NO: 359009 - DNA, 19 bp, Homo sapiens
  siRNA target sequence for DKFZp434L0850 (NM_017558.1,454-472).
ctgtgaagtctatgaagtt

SEQ ID NO: 359010 - DNA, 19 bp, Homo sapiens
  siRNA target sequence for DKFZp434L0850 (NM_017558.1,463-481).
ctatgaagttccactgatt

SEQ ID NO: 359011 - DNA, 19 bp, Homo sapiens
  siRNA target sequence for DKFZp434L0850 (NM_017558.1,467-485).
gaagttccactgattttga

SEQ ID NO: 359012 - DNA, 19 bp, Homo sapiens
  siRNA target sequence for DKFZp434L0850 (NM_017558.1,504-522).
caaggttggtgaaagttgt

SEQ ID NO: 359013 - DNA, 19 bp, Homo sapiens
  siRNA target sequence for DKFZp434L0850 (NM_017558.1,527-545).
gaaagttcgccttacttta

SEQ ID NO: 359014 - DNA, 19 bp, Homo sapiens
  siRNA target sequence for DKFZp434L0850 (NM_017558.1,534-552).
cgccttactttaaagtaat

SEQ ID NO: 359015 - DNA, 19 bp, Homo sapiens
  siRNA target sequence for DKFZp434L0850 (NM_017558.1,585-603).
ctggagtgccttccatatt

SEQ ID NO: 359016 - DNA, 19 bp, Homo sapiens
  siRNA target sequence for DKFZp434L0850 (NM_017558.1,654-672).
cctgtgttactgaaagaga

SEQ ID NO: 359017 - DNA, 19 bp, Homo sapiens
  siRNA target sequence for DKFZp434L0850 (NM_017558.1,705-723).
cacgagccattctcgattt

SEQ ID NO: 359018 - DNA, 19 bp, Homo sapiens
  siRNA target sequence for DKFZp434L0850 (NM_017558.1,831-849).
gtaggcctttctctataga

SEQ ID NO: 359019 - DNA, 19 bp, Homo sapiens
  siRNA target sequence for DKFZp434L0850 (NM_017558.1,841-859).
ctctatagaaccagctatt

SEQ ID NO: 359020 - DNA, 19 bp, Homo sapiens
  siRNA target sequence for DKFZp434L0850 (NM_017558.1,936-954).
gacttatcgtgtgttatga

SEQ ID NO: 359021 - DNA, 19 bp, Homo sapiens
  siRNA target sequence for DKFZp434L0850 (NM_017558.1,938-956).
cttatcgtgtgttatgaca

SEQ ID NO: 359022 - DNA, 19 bp, Homo sapiens
  siRNA target sequence for DKFZp434L0850 (NM_017558.1,967-985).
ggtgtttgtatctctctat

SEQ ID NO: 359023 - DNA, 19 bp, Homo sapiens
  siRNA target sequence for DKFZp434L0850 (NM_017558.1,987-1005).
gagctgccatagacatgaa

SEQ ID NO: 359024 - DNA, 19 bp, Homo sapiens
  siRNA target sequence for DKFZp434L0850 (NM_017558.1,1033-1051).
catcgagaaaacctacata

SEQ ID NO: 359025 - DNA, 19 bp, Homo sapiens
  siRNA target sequence for DKFZp434L0850 (NM_017558.1,1036-1054).
cgagaaaacctacatatct

SEQ ID NO: 359026 - DNA, 19 bp, Homo sapiens
  siRNA target sequence for DKFZp434L0850 (NM_017558.1,1057-1075).
ggccaatcagcgaactata

SEQ ID NO: 359027 - DNA, 19 bp, Homo sapiens
  siRNA target sequence for DKFZp434L0850 (NM_017558.1,1058-1076).
gccaatcagcgaactataa

SEQ ID NO: 359028 - DNA, 19 bp, Homo sapiens
  siRNA target sequence for DKFZp434L0850 (NM_017558.1,1067-1085).
cgaactataaccattcaca

SEQ ID NO: 359029 - DNA, 19 bp, Homo sapiens
  siRNA target sequence for DKFZp434L0850 (NM_017558.1,1078-1096).
cattcacaatcgcagtaat

SEQ ID NO: 359030 - DNA, 19 bp, Homo sapiens
  siRNA target sequence for DKFZp434L0850 (NM_017558.1,1082-1100).
cacaatcgcagtaatatca

SEQ ID NO: 359031 - DNA, 19 bp, Homo sapiens
  siRNA target sequence for DKFZp434L0850 (NM_017558.1,1084-1102).
caatcgcagtaatatcatt

SEQ ID NO: 359032 - DNA, 19 bp, Homo sapiens
  siRNA target sequence for DKFZp434L0850 (NM_017558.1,1112-1130).
ctgtggaaggtatttgcta

SEQ ID NO: 359033 - DNA, 19 bp, Homo sapiens
  siRNA target sequence for DKFZp434L0850 (NM_017558.1,1164-1182).
cctgtgatgatctgatcaa

SEQ ID NO: 359034 - DNA, 19 bp, Homo sapiens
  siRNA target sequence for DKFZp434L0850 (NM_017558.1,1219-1237).
gtgcattactgatccttta

SEQ ID NO: 359035 - DNA, 19 bp, Homo sapiens
  siRNA target sequence for DKFZp434L0850 (NM_017558.1,1221-1239).
gcattactgatcctttact

SEQ ID NO: 359036 - DNA, 19 bp, Homo sapiens
  siRNA target sequence for DKFZp434L0850 (NM_017558.1,1265-1283).
cgaacctttgcgaatcaga

SEQ ID NO: 359037 - DNA, 19 bp, Homo sapiens
  siRNA target sequence for DKFZp434L0850 (NM_017558.1,1352-1370).
gatgtctggcccaactcat

SEQ ID NO: 359038 - DNA, 19 bp, Homo sapiens
  siRNA target sequence for DKFZp434L0850 (NM_017558.1,1387-1405).
gtactttaacccactagaa

SEQ ID NO: 359039 - DNA, 19 bp, Homo sapiens
  siRNA target sequence for DKFZp434L0850 (NM_017558.1,1412-1430).
ctctatcaacagaccattt

SEQ ID NO: 359040 - DNA, 19 bp, Homo sapiens
  siRNA target sequence for DKFZp434L0850 (NM_017558.1,1458-1476).
gtctgcccctccgaatcaa

SEQ ID NO: 359041 - DNA, 19 bp, Homo sapiens
  siRNA target sequence for DKFZp434L0850 (NM_017558.1,1540-1558).
cactggatctgcacattgt

SEQ ID NO: 359042 - DNA, 19 bp, Homo sapiens
  siRNA target sequence for DKFZp434L0850 (NM_017558.1,1557-1575).
gttatgaggcgatactgta

SEQ ID NO: 359043 - DNA, 19 bp, Homo sapiens
  siRNA target sequence for DKFZp434L0850 (NM_017558.1,1802-1820).
ggacctaccttccatttta

SEQ ID NO: 359044 - DNA, 19 bp, Homo sapiens
  siRNA target sequence for DKFZp434L0850 (NM_017558.1,1806-1824).
ctaccttccattttaatgt

SEQ ID NO: 359045 - DNA, 19 bp, Homo sapiens
  siRNA target sequence for DKFZp434L0850 (NM_017558.1,1900-1918).
gatccccatgacttacaaa

SEQ ID NO: 359046 - DNA, 19 bp, Homo sapiens
  siRNA target sequence for DKFZp434L0850 (NM_017558.1,1938-1956).
gccttggccataaaagcat

SEQ ID NO: 359047 - DNA, 19 bp, Homo sapiens
  siRNA target sequence for DKFZp434L0850 (NM_017558.1,2082-2100).
ctgctatcagggtgacatt

SEQ ID NO: 359048 - DNA, 19 bp, Homo sapiens
  siRNA target sequence for DKFZp434L0850 (NM_017558.1,2165-2183).
gaggtgctggcgctcttaa

SEQ ID NO: 359049 - DNA, 19 bp, Homo sapiens
  siRNA target sequence for DKFZp434L0850 (NM_017558.1,2167-2185).
ggtgctggcgctcttaatt

SEQ ID NO: 359050 - DNA, 19 bp, Homo sapiens
  siRNA target sequence for DKFZp434L0850 (NM_017558.1,2168-2186).
gtgctggcgctcttaatta

SEQ ID NO: 359051 - DNA, 19 bp, Homo sapiens
  siRNA target sequence for DKFZp434L0850 (NM_017558.1,2170-2188).
gctggcgctcttaattaca

SEQ ID NO: 359052 - DNA, 19 bp, Homo sapiens
  siRNA target sequence for DKFZp434L0850 (NM_017558.1,2252-2270).
ctgaagtacccgtatgaga

SEQ ID NO: 359053 - DNA, 19 bp, Homo sapiens
  siRNA target sequence for DKFZp434L0850 (NM_017558.1,2254-2272).
gaagtacccgtatgagaaa

SEQ ID NO: 359054 - DNA, 19 bp, Homo sapiens
  siRNA target sequence for DKFZp434L0850 (NM_017558.1,2451-2469).
ccacggtttacatctcaat

SEQ ID NO: 359055 - DNA, 19 bp, Homo sapiens
  siRNA target sequence for DKFZp434L0850 (NM_017558.1,2454-2472).
cggtttacatctcaatctt

SEQ ID NO: 359056 - DNA, 19 bp, Homo sapiens
  siRNA target sequence for DKFZp434L0850 (NM_017558.1,2480-2498).
caggacccccctttggtat

SEQ ID NO: 359057 - DNA, 19 bp, Homo sapiens
  siRNA target sequence for DKFZp434L0850 (NM_017558.1,2488-2506).
ccctttggtatgtcactta

SEQ ID NO: 359058 - DNA, 19 bp, Homo sapiens
  siRNA target sequence for DKFZp434L0850 (NM_017558.1,2516-2534).
ggagaaggcccagttatct

SEQ ID NO: 359059 - DNA, 19 bp, Homo sapiens
  siRNA target sequence for DKFZp434L0850 (NM_017558.1,2517-2535).
gagaaggcccagttatcta

SEQ ID NO: 359060 - DNA, 19 bp, Homo sapiens
  siRNA target sequence for DKFZp434L0850 (NM_017558.1,2533-2551).
ctacgtccatcccaatcaa

SEQ ID NO: 359061 - DNA, 19 bp, Homo sapiens
  siRNA target sequence for DKFZp434L0850 (NM_017558.1,2562-2580).
ggaatatctacgtcctaaa

SEQ ID NO: 359062 - DNA, 19 bp, Homo sapiens
  siRNA target sequence for DKFZp434L0850 (NM_017558.1,2563-2581).
gaatatctacgtcctaaaa

SEQ ID NO: 359063 - DNA, 19 bp, Homo sapiens
  siRNA target sequence for DKFZp434L0850 (NM_017558.1,2592-2610).
ggattctcaacctatgcaa

SEQ ID NO: 359064 - DNA, 19 bp, Homo sapiens
  siRNA target sequence for DKFZp434L0850 (NM_017558.1,2668-2686).
gacgattgaacccaatgaa

SEQ ID NO: 359065 - DNA, 19 bp, Homo sapiens
  siRNA target sequence for DKFZp434L0850 (NM_017558.1,2829-2847).
ccactattgtttcagataa

SEQ ID NO: 359066 - DNA, 19 bp, Homo sapiens
  siRNA target sequence for DKFZp434L0850 (NM_017558.1,2886-2904).
gcctggatacccactatta

SEQ ID NO: 359067 - DNA, 19 bp, Homo sapiens
  siRNA target sequence for DKFZp434L0850 (NM_017558.1,2906-2924).
cactttaagttgatcaaca

SEQ ID NO: 359068 - DNA, 19 bp, Homo sapiens
  siRNA target sequence for DKFZp434L0850 (NM_017558.1,2928-2946).
gacgtcggatccaacagtt

SEQ ID NO: 359069 - DNA, 19 bp, Homo sapiens
  siRNA target sequence for DKFZp434L0850 (NM_017558.1,2931-2949).
gtcggatccaacagttgtt

SEQ ID NO: 359070 - DNA, 19 bp, Homo sapiens
  siRNA target sequence for DKFZp434L0850 (NM_017558.1,2933-2951).
cggatccaacagttgttct

SEQ ID NO: 359071 - DNA, 19 bp, Homo sapiens
  siRNA target sequence for DKFZp434L0850 (NM_017558.1,2944-2962).
gttgttctggatgaatgat

SEQ ID NO: 359072 - DNA, 19 bp, Homo sapiens
  siRNA target sequence for DKFZp434L0850 (NM_017558.1,3109-3127).
cccaggccaggcaattgat

SEQ ID NO: 359073 - DNA, 19 bp, Homo sapiens
  siRNA target sequence for DKFZp434L0850 (NM_017558.1,3114-3132).
gccaggcaattgatgtgat

SEQ ID NO: 359074 - DNA, 19 bp, Homo sapiens
  siRNA target sequence for DKFZp434L0850 (NM_017558.1,3115-3133).
ccaggcaattgatgtgata

SEQ ID NO: 359075 - DNA, 19 bp, Homo sapiens
  siRNA target sequence for DKFZp434L0850 (NM_017558.1,3130-3148).
gatactcgaaggctattct

SEQ ID NO: 359076 - DNA, 19 bp, Homo sapiens
  siRNA target sequence for DKFZp434H2215 (NM_017559.1,124-142).
ctgccaaaacccttttcaa

SEQ ID NO: 359077 - DNA, 19 bp, Homo sapiens
  siRNA target sequence for DKFZp434H2215 (NM_017559.1,159-177).
ccggaccgtcactaccaaa

SEQ ID NO: 359078 - DNA, 19 bp, Homo sapiens
  siRNA target sequence for DKFZp434H2215 (NM_017559.1,199-217).
ggcaatttggtcaacttct

SEQ ID NO: 359079 - DNA, 19 bp, Homo sapiens
  siRNA target sequence for DKFZp434H2215 (NM_017559.1,200-218).
gcaatttggtcaacttctt

SEQ ID NO: 359080 - DNA, 19 bp, Homo sapiens
  siRNA target sequence for DKFZp434H2215 (NM_017559.1,315-333).
gctgaaccccatcaaatta

SEQ ID NO: 359081 - DNA, 19 bp, Homo sapiens
  siRNA target sequence for DKFZp434H2215 (NM_017559.1,318-336).
gaaccccatcaaattagct

SEQ ID NO: 359082 - DNA, 19 bp, Homo sapiens
  siRNA target sequence for DKFZp434H2215 (NM_017559.1,411-429).
ggccaagaatgcagaaaat

SEQ ID NO: 359083 - DNA, 19 bp, Homo sapiens
  siRNA target sequence for DKFZp434H2215 (NM_017559.1,531-549).
ctcaacgcactcagaatct

SEQ ID NO: 359084 - DNA, 19 bp, Homo sapiens
  siRNA target sequence for DKFZp434H2215 (NM_017559.1,569-587).
cggacacccccttcatctt

SEQ ID NO: 359085 - DNA, 19 bp, Homo sapiens
  siRNA target sequence for DKFZp434H2215 (NM_017559.1,570-588).
ggacacccccttcatcttt

SEQ ID NO: 359086 - DNA, 19 bp, Homo sapiens
  siRNA target sequence for DKFZp434H2215 (NM_017559.1,705-723).
gttgcccgaggcaaagaat

SEQ ID NO: 359087 - DNA, 19 bp, Homo sapiens
  siRNA target sequence for DKFZp434H2215 (NM_017559.1,724-742).
cgtccatggatcttcaaca

SEQ ID NO: 359088 - DNA, 19 bp, Homo sapiens
  siRNA target sequence for DKFZp434H2215 (NM_017559.1,837-855).
gtggtgcaagccctacaaa

SEQ ID NO: 359089 - DNA, 19 bp, Homo sapiens
  siRNA target sequence for DKFZp434H2215 (NM_017559.1,981-999).
ggatctggaatacctattt

SEQ ID NO: 359090 - DNA, 19 bp, Homo sapiens
  siRNA target sequence for FAM20A (NM_017565.1,322-340).
gcacgatcgtgcacaactt

SEQ ID NO: 359091 - DNA, 19 bp, Homo sapiens
  siRNA target sequence for FAM20A (NM_017565.1,323-341).
cacgatcgtgcacaacttt

SEQ ID NO: 359092 - DNA, 19 bp, Homo sapiens
  siRNA target sequence for FAM20A (NM_017565.1,703-721).
ccaccatcagtgctgatta

SEQ ID NO: 359093 - DNA, 19 bp, Homo sapiens
  siRNA target sequence for FAM20A (NM_017565.1,707-725).
catcagtgctgattacagt

SEQ ID NO: 359094 - DNA, 19 bp, Homo sapiens
  siRNA target sequence for FAM20A (NM_017565.1,756-774).
gactgcacccagattgtga

SEQ ID NO: 359095 - DNA, 19 bp, Homo sapiens
  siRNA target sequence for FAM20A (NM_017565.1,758-776).
ctgcacccagattgtgaaa

SEQ ID NO: 359096 - DNA, 19 bp, Homo sapiens
  siRNA target sequence for FAM20A (NM_017565.1,870-888).
ccagtggacttcttctact

SEQ ID NO: 359097 - DNA, 19 bp, Homo sapiens
  siRNA target sequence for FAM20A (NM_017565.1,871-889).
cagtggacttcttctactt

SEQ ID NO: 359098 - DNA, 19 bp, Homo sapiens
  siRNA target sequence for FAM20A (NM_017565.1,873-891).
gtggacttcttctacttca

SEQ ID NO: 359099 - DNA, 19 bp, Homo sapiens
  siRNA target sequence for FAM20A (NM_017565.1,875-893).
ggacttcttctacttcatt

SEQ ID NO: 359100 - DNA, 19 bp, Homo sapiens
  siRNA target sequence for FAM20A (NM_017565.1,1004-1022).
cctagaggtcaccaagaat

SEQ ID NO: 359101 - DNA, 19 bp, Homo sapiens
  siRNA target sequence for FAM20A (NM_017565.1,1023-1041).
gaaatcctgcagagtgttt

SEQ ID NO: 359102 - DNA, 19 bp, Homo sapiens
  siRNA target sequence for FAM20A (NM_017565.1,1077-1095).
gccaagtgtccatacatgt

SEQ ID NO: 359103 - DNA, 19 bp, Homo sapiens
  siRNA target sequence for FAM20A (NM_017565.1,1244-1262).
ggtcaatcccctttactgt

SEQ ID NO: 359104 - DNA, 19 bp, Homo sapiens
  siRNA target sequence for FAM20A (NM_017565.1,1356-1374).
gaccggcaccattatgaga

SEQ ID NO: 359105 - DNA, 19 bp, Homo sapiens
  siRNA target sequence for FAM20A (NM_017565.1,1360-1378).
ggcaccattatgagatgtt

SEQ ID NO: 359106 - DNA, 19 bp, Homo sapiens
  siRNA target sequence for FAM20A (NM_017565.1,1389-1407).
ggggatgatgggttcctta

SEQ ID NO: 359107 - DNA, 19 bp, Homo sapiens
  siRNA target sequence for FAM20A (NM_017565.1,1390-1408).
gggatgatgggttccttat

SEQ ID NO: 359108 - DNA, 19 bp, Homo sapiens
  siRNA target sequence for FAM20A (NM_017565.1,1391-1409).
ggatgatgggttccttatt

SEQ ID NO: 359109 - DNA, 19 bp, Homo sapiens
  siRNA target sequence for FAM20A (NM_017565.1,1435-1453).
gacgacactcccatgatga

SEQ ID NO: 359110 - DNA, 19 bp, Homo sapiens
  siRNA target sequence for FAM20A (NM_017565.1,1437-1455).
cgacactcccatgatgaaa

SEQ ID NO: 359111 - DNA, 19 bp, Homo sapiens
  siRNA target sequence for FAM20A (NM_017565.1,1550-1568).
cgatgtgatgcgagaatca

SEQ ID NO: 359112 - DNA, 19 bp, Homo sapiens
  siRNA target sequence for FAM20A (NM_017565.1,1678-1696).
gacagcagagtgtcatagt

SEQ ID NO: 359113 - DNA, 19 bp, Homo sapiens
  siRNA target sequence for DKFZp434G0522 (NM_017566.2,224-242).
ccaccctcaccaaggttaa

SEQ ID NO: 359114 - DNA, 19 bp, Homo sapiens
  siRNA target sequence for DKFZp434G0522 (NM_017566.2,225-243).
caccctcaccaaggttaaa

SEQ ID NO: 359115 - DNA, 19 bp, Homo sapiens
  siRNA target sequence for DKFZp434G0522 (NM_017566.2,253-271).
ctcggttcatcctgagaaa

SEQ ID NO: 359116 - DNA, 19 bp, Homo sapiens
  siRNA target sequence for DKFZp434G0522 (NM_017566.2,283-301).
cctttttggaggtgaatat

SEQ ID NO: 359117 - DNA, 19 bp, Homo sapiens
  siRNA target sequence for DKFZp434G0522 (NM_017566.2,304-322).
caacggccaaaaaactttt

SEQ ID NO: 359118 - DNA, 19 bp, Homo sapiens
  siRNA target sequence for DKFZp434G0522 (NM_017566.2,331-349).
cgagctctatgtctacaat

SEQ ID NO: 359119 - DNA, 19 bp, Homo sapiens
  siRNA target sequence for DKFZp434G0522 (NM_017566.2,332-350).
gagctctatgtctacaata

SEQ ID NO: 359120 - DNA, 19 bp, Homo sapiens
  siRNA target sequence for DKFZp434G0522 (NM_017566.2,358-376).
ggacacctggaccaaagtt

SEQ ID NO: 359121 - DNA, 19 bp, Homo sapiens
  siRNA target sequence for DKFZp434G0522 (NM_017566.2,477-495).
ccaacggagagcagttcta

SEQ ID NO: 359122 - DNA, 19 bp, Homo sapiens
  siRNA target sequence for DKFZp434G0522 (NM_017566.2,538-556).
ctgggaacaagtcaaatca

SEQ ID NO: 359123 - DNA, 19 bp, Homo sapiens
  siRNA target sequence for DKFZp434G0522 (NM_017566.2,623-641).
ggtggcttccatgaaagta

SEQ ID NO: 359124 - DNA, 19 bp, Homo sapiens
  siRNA target sequence for DKFZp434G0522 (NM_017566.2,639-657).
gtacacgggattacatcta

SEQ ID NO: 359125 - DNA, 19 bp, Homo sapiens
  siRNA target sequence for DKFZp434G0522 (NM_017566.2,664-682).
cgacgtgtatgcctttaat

SEQ ID NO: 359126 - DNA, 19 bp, Homo sapiens
  siRNA target sequence for DKFZp434G0522 (NM_017566.2,834-852).
cacggcactcagacatgtt

SEQ ID NO: 359127 - DNA, 19 bp, Homo sapiens
  siRNA target sequence for DKFZp434G0522 (NM_017566.2,1014-1032).
gcctgtcgggcgagttctt

SEQ ID NO: 359128 - DNA, 19 bp, Homo sapiens
  siRNA target sequence for DKFZp434G0522 (NM_017566.2,1016-1034).
ctgtcgggcgagttcttca

SEQ ID NO: 359129 - DNA, 19 bp, Homo sapiens
  siRNA target sequence for DKFZp434G0522 (NM_017566.2,1057-1075).
caccaggaaccgttggttt

SEQ ID NO: 359130 - DNA, 19 bp, Homo sapiens
  siRNA target sequence for DKFZp434G0522 (NM_017566.2,1224-1242).
gcaccgtggtcaccattaa

SEQ ID NO: 359131 - DNA, 19 bp, Homo sapiens
  siRNA target sequence for DKFZp434G0522 (NM_017566.2,1227-1245).
ccgtggtcaccattaagca

SEQ ID NO: 359132 - DNA, 19 bp, Homo sapiens
  siRNA target sequence for DKFZp434G0522 (NM_017566.2,1381-1399).
cgtctatgggggcatgttt

SEQ ID NO: 359133 - DNA, 19 bp, Homo sapiens
  siRNA target sequence for P38IP (NM_017569.2,286-304).
gcaacaagctttagaacta

SEQ ID NO: 359134 - DNA, 19 bp, Homo sapiens
  siRNA target sequence for P38IP (NM_017569.2,353-371).
cctaaaaggaaatacctat

SEQ ID NO: 359135 - DNA, 19 bp, Homo sapiens
  siRNA target sequence for P38IP (NM_017569.2,407-425).
gacttgtatattgaagaat

SEQ ID NO: 359136 - DNA, 19 bp, Homo sapiens
  siRNA target sequence for P38IP (NM_017569.2,530-548).
ccaggaaatgagggatatt

SEQ ID NO: 359137 - DNA, 19 bp, Homo sapiens
  siRNA target sequence for P38IP (NM_017569.2,562-580).
gggaaaaaacggatcagat

SEQ ID NO: 359138 - DNA, 19 bp, Homo sapiens
  siRNA target sequence for P38IP (NM_017569.2,648-666).
ctcctattttggttgatct

SEQ ID NO: 359139 - DNA, 19 bp, Homo sapiens
  siRNA target sequence for P38IP (NM_017569.2,678-696).
ctcaggttaatatttttca

SEQ ID NO: 359140 - DNA, 19 bp, Homo sapiens
  siRNA target sequence for P38IP (NM_017569.2,702-720).
gatgtgtcatagcagaaat

SEQ ID NO: 359141 - DNA, 19 bp, Homo sapiens
  siRNA target sequence for P38IP (NM_017569.2,734-752).
cagtccagtaacatgaaat

SEQ ID NO: 359142 - DNA, 19 bp, Homo sapiens
  siRNA target sequence for P38IP (NM_017569.2,736-754).
gtccagtaacatgaaatct

SEQ ID NO: 359143 - DNA, 19 bp, Homo sapiens
  siRNA target sequence for P38IP (NM_017569.2,764-782).
caaagtcggcacattctct

SEQ ID NO: 359144 - DNA, 19 bp, Homo sapiens
  siRNA target sequence for P38IP (NM_017569.2,941-959).
gcaaacagactgctctata

SEQ ID NO: 359145 - DNA, 19 bp, Homo sapiens
  siRNA target sequence for P38IP (NM_017569.2,973-991).
gaacactcgcccaatgaaa

SEQ ID NO: 359146 - DNA, 19 bp, Homo sapiens
  siRNA target sequence for P38IP (NM_017569.2,983-1001).
ccaatgaaacggtgtttca

SEQ ID NO: 359147 - DNA, 19 bp, Homo sapiens
  siRNA target sequence for P38IP (NM_017569.2,984-1002).
caatgaaacggtgtttcaa

SEQ ID NO: 359148 - DNA, 19 bp, Homo sapiens
  siRNA target sequence for P38IP (NM_017569.2,992-1010).
cggtgtttcaagaggtatt

SEQ ID NO: 359149 - DNA, 19 bp, Homo sapiens
  siRNA target sequence for P38IP (NM_017569.2,1024-1042).
gaatcggcagcaagatcta

SEQ ID NO: 359150 - DNA, 19 bp, Homo sapiens
  siRNA target sequence for P38IP (NM_017569.2,1029-1047).
ggcagcaagatctatctca

SEQ ID NO: 359151 - DNA, 19 bp, Homo sapiens
  siRNA target sequence for P38IP (NM_017569.2,1064-1082).
cagctgaggttacttgatt

SEQ ID NO: 359152 - DNA, 19 bp, Homo sapiens
  siRNA target sequence for P38IP (NM_017569.2,1071-1089).
ggttacttgatttcttaca

SEQ ID NO: 359153 - DNA, 19 bp, Homo sapiens
  siRNA target sequence for P38IP (NM_017569.2,1072-1090).
gttacttgatttcttacaa

SEQ ID NO: 359154 - DNA, 19 bp, Homo sapiens
  siRNA target sequence for P38IP (NM_017569.2,1118-1136).
cattatgacctcaaaattt

SEQ ID NO: 359155 - DNA, 19 bp, Homo sapiens
  siRNA target sequence for P38IP (NM_017569.2,1141-1159).
ggcaggaaattgtgtagat

SEQ ID NO: 359156 - DNA, 19 bp, Homo sapiens
  siRNA target sequence for P38IP (NM_017569.2,1189-1207).
cataccttctgaagtagat

SEQ ID NO: 359157 - DNA, 19 bp, Homo sapiens
  siRNA target sequence for P38IP (NM_017569.2,1228-1246).
ggaaaagtctatcaaatct

SEQ ID NO: 359158 - DNA, 19 bp, Homo sapiens
  siRNA target sequence for P38IP (NM_017569.2,1269-1287).
ggccagcccatgatgtaaa

SEQ ID NO: 359159 - DNA, 19 bp, Homo sapiens
  siRNA target sequence for P38IP (NM_017569.2,1270-1288).
gccagcccatgatgtaaaa

SEQ ID NO: 359160 - DNA, 19 bp, Homo sapiens
  siRNA target sequence for P38IP (NM_017569.2,1356-1374).
cgcttggagatccacttta

SEQ ID NO: 359161 - DNA, 19 bp, Homo sapiens
  siRNA target sequence for P38IP (NM_017569.2,1441-1459).
gtccacagatgatcattca

SEQ ID NO: 359162 - DNA, 19 bp, Homo sapiens
  siRNA target sequence for P38IP (NM_017569.2,1443-1461).
ccacagatgatcattcaaa

SEQ ID NO: 359163 - DNA, 19 bp, Homo sapiens
  siRNA target sequence for P38IP (NM_017569.2,1491-1509).
ctgagagggtagtcaatca

SEQ ID NO: 359164 - DNA, 19 bp, Homo sapiens
  siRNA target sequence for P38IP (NM_017569.2,1493-1511).
gagagggtagtcaatcagt

SEQ ID NO: 359165 - DNA, 19 bp, Homo sapiens
  siRNA target sequence for P38IP (NM_017569.2,1671-1689).
gacccccaccaatcaaact

SEQ ID NO: 359166 - DNA, 19 bp, Homo sapiens
  siRNA target sequence for P38IP (NM_017569.2,1812-1830).
ctgtggatctcaatcaagt

SEQ ID NO: 359167 - DNA, 19 bp, Homo sapiens
  siRNA target sequence for P38IP (NM_017569.2,1908-1926).
ctgctggacttaacttcat

SEQ ID NO: 359168 - DNA, 19 bp, Homo sapiens
  siRNA target sequence for P38IP (NM_017569.2,1981-1999).
catgctgggctgtaacact

SEQ ID NO: 359169 - DNA, 19 bp, Homo sapiens
  siRNA target sequence for P38IP (NM_017569.2,2103-2121).
gtgttccatttggtttaaa

SEQ ID NO: 359170 - DNA, 19 bp, Homo sapiens
  siRNA target sequence for P38IP (NM_017569.2,2130-2148).
caagtctcaggcccttaaa

SEQ ID NO: 359171 - DNA, 19 bp, Homo sapiens
  siRNA target sequence for P38IP (NM_017569.2,2133-2151).
gtctcaggcccttaaatct

SEQ ID NO: 359172 - DNA, 19 bp, Homo sapiens
  siRNA target sequence for P38IP (NM_017569.2,2163-2181).
caggtggttcacttatttt

SEQ ID NO: 359173 - DNA, 19 bp, Homo sapiens
  siRNA target sequence for P38IP (NM_017569.2,2239-2257).
gcagcccacaacttgtagt

SEQ ID NO: 359174 - DNA, 19 bp, Homo sapiens
  siRNA target sequence for P38IP (NM_017569.2,2391-2409).
cgattcttgcagcatcaaa

SEQ ID NO: 359175 - DNA, 19 bp, Homo sapiens
  siRNA target sequence for LOC55580 (NM_017571.1,807-825).
gagactttgcagcaattga

SEQ ID NO: 359176 - DNA, 19 bp, Homo sapiens
  siRNA target sequence for LOC55580 (NM_017571.1,811-829).
ctttgcagcaattgatcat

SEQ ID NO: 359177 - DNA, 19 bp, Homo sapiens
  siRNA target sequence for LOC55580 (NM_017571.1,816-834).
cagcaattgatcatgatgt

SEQ ID NO: 359178 - DNA, 19 bp, Homo sapiens
  siRNA target sequence for LOC55580 (NM_017571.1,833-851).
gtcgttgccaaatgtctta

SEQ ID NO: 359179 - DNA, 19 bp, Homo sapiens
  siRNA target sequence for LOC55580 (NM_017571.1,835-853).
cgttgccaaatgtcttaat

SEQ ID NO: 359180 - DNA, 19 bp, Homo sapiens
  siRNA target sequence for LOC55580 (NM_017571.1,839-857).
gccaaatgtcttaatcatt

SEQ ID NO: 359181 - DNA, 19 bp, Homo sapiens
  siRNA target sequence for LOC55580 (NM_017571.1,994-1012).
cagcggttgccgcacatat

SEQ ID NO: 359182 - DNA, 19 bp, Homo sapiens
  siRNA target sequence for LOC55580 (NM_017571.1,997-1015).
cggttgccgcacatattca

SEQ ID NO: 359183 - DNA, 19 bp, Homo sapiens
  siRNA target sequence for LOC55580 (NM_017571.1,998-1016).
ggttgccgcacatattcaa

SEQ ID NO: 359184 - DNA, 19 bp, Homo sapiens
  siRNA target sequence for LOC55580 (NM_017571.1,1057-1075).
ggatggaagtgactgatat

SEQ ID NO: 359185 - DNA, 19 bp, Homo sapiens
  siRNA target sequence for LOC55580 (NM_017571.1,1112-1130).
ggcattgcatctaaaaaga

SEQ ID NO: 359186 - DNA, 19 bp, Homo sapiens
  siRNA target sequence for LOC55580 (NM_017571.1,1114-1132).
cattgcatctaaaaagact

SEQ ID NO: 359187 - DNA, 19 bp, Homo sapiens
  siRNA target sequence for LOC55580 (NM_017571.1,1184-1202).
gcgggatggtctccatttt

SEQ ID NO: 359188 - DNA, 19 bp, Homo sapiens
  siRNA target sequence for LOC55580 (NM_017571.1,1250-1268).
catgaagcgaacagaaagt

SEQ ID NO: 359189 - DNA, 19 bp, Homo sapiens
  siRNA target sequence for LOC55580 (NM_017571.1,1261-1279).
cagaaagtcgacaacatct

SEQ ID NO: 359190 - DNA, 19 bp, Homo sapiens
  siRNA target sequence for LOC55580 (NM_017571.1,1315-1333).
gaaggcttaggcaggaatt

SEQ ID NO: 359191 - DNA, 19 bp, Homo sapiens
  siRNA target sequence for LOC55580 (NM_017571.1,1352-1370).
gttgttggattgtaaacaa

SEQ ID NO: 359192 - DNA, 19 bp, Homo sapiens
  siRNA target sequence for LOC55580 (NM_017571.1,1358-1376).
ggattgtaaacaagaactt

SEQ ID NO: 359193 - DNA, 19 bp, Homo sapiens
  siRNA target sequence for LOC55580 (NM_017571.1,1402-1420).
ggctgcaacaagagaacat

SEQ ID NO: 359194 - DNA, 19 bp, Homo sapiens
  siRNA target sequence for LOC55580 (NM_017571.1,1450-1468).
gaatgtaccgagatgaatt

SEQ ID NO: 359195 - DNA, 19 bp, Homo sapiens
  siRNA target sequence for LOC55580 (NM_017571.1,1537-1555).
gactacatgatattgaatt

SEQ ID NO: 359196 - DNA, 19 bp, Homo sapiens
  siRNA target sequence for LOC55580 (NM_017571.1,1539-1557).
ctacatgatattgaatttt

SEQ ID NO: 359197 - DNA, 19 bp, Homo sapiens
  siRNA target sequence for LOC55580 (NM_017571.1,1642-1660).
ctcgtgctcgttctgataa

SEQ ID NO: 359198 - DNA, 19 bp, Homo sapiens
  siRNA target sequence for LOC55580 (NM_017571.1,1644-1662).
cgtgctcgttctgataaat

SEQ ID NO: 359199 - DNA, 19 bp, Homo sapiens
  siRNA target sequence for LOC55580 (NM_017571.1,1645-1663).
gtgctcgttctgataaatt

SEQ ID NO: 359200 - DNA, 19 bp, Homo sapiens
  siRNA target sequence for LOC55580 (NM_017571.1,1685-1703).
cttacaactgaaagctaaa

SEQ ID NO: 359201 - DNA, 19 bp, Homo sapiens
  siRNA target sequence for LOC55580 (NM_017571.1,1798-1816).
gtatggatgaatcattaca

SEQ ID NO: 359202 - DNA, 19 bp, Homo sapiens
  siRNA target sequence for LOC55580 (NM_017571.1,1802-1820).
ggatgaatcattacatctt

SEQ ID NO: 359203 - DNA, 19 bp, Homo sapiens
  siRNA target sequence for LOC55580 (NM_017571.1,1833-1851).
gaacagatatccagaacta

SEQ ID NO: 359204 - DNA, 19 bp, Homo sapiens
  siRNA target sequence for LOC55580 (NM_017571.1,1838-1856).
gatatccagaactagtgaa

SEQ ID NO: 359205 - DNA, 19 bp, Homo sapiens
  siRNA target sequence for LOC55580 (NM_017571.1,1885-1903).
gccatgaggtgaatgagtt

SEQ ID NO: 359206 - DNA, 19 bp, Homo sapiens
  siRNA target sequence for LOC55580 (NM_017571.1,1895-1913).
gaatgagttgacatcaagt

SEQ ID NO: 359207 - DNA, 19 bp, Homo sapiens
  siRNA target sequence for LOC55580 (NM_017571.1,1899-1917).
gagttgacatcaagtagat

SEQ ID NO: 359208 - DNA, 19 bp, Homo sapiens
  siRNA target sequence for LOC55580 (NM_017571.1,1901-1919).
gttgacatcaagtagatta

SEQ ID NO: 359209 - DNA, 19 bp, Homo sapiens
  siRNA target sequence for LOC55580 (NM_017571.1,1906-1924).
catcaagtagattattgaa

SEQ ID NO: 359210 - DNA, 19 bp, Homo sapiens
  siRNA target sequence for LOC55580 (NM_017571.1,1992-2010).
gaaggcaatgcttccaaaa

SEQ ID NO: 359211 - DNA, 19 bp, Homo sapiens
  siRNA target sequence for LOC55580 (NM_017571.1,2087-2105).
gcaaagtcttcagaattgt

SEQ ID NO: 359212 - DNA, 19 bp, Homo sapiens
  siRNA target sequence for LOC55580 (NM_017571.1,2133-2151).
gagaaagctcagcttgaaa

SEQ ID NO: 359213 - DNA, 19 bp, Homo sapiens
  siRNA target sequence for LOC55580 (NM_017571.1,2140-2158).
ctcagcttgaaaaaacaat

SEQ ID NO: 359214 - DNA, 19 bp, Homo sapiens
  siRNA target sequence for LOC55580 (NM_017571.1,2226-2244).
caaacagtgtcttccttaa

SEQ ID NO: 359215 - DNA, 19 bp, Homo sapiens
  siRNA target sequence for LOC55580 (NM_017571.1,2329-2347).
caagtagcaagctaagcaa

SEQ ID NO: 359216 - DNA, 19 bp, Homo sapiens
  siRNA target sequence for LOC55580 (NM_017571.1,2586-2604).
ctgacctttcagttagaat

SEQ ID NO: 359217 - DNA, 19 bp, Homo sapiens
  siRNA target sequence for LOC55580 (NM_017571.1,2623-2641).
cccaacttgatgaggaaaa

SEQ ID NO: 359218 - DNA, 19 bp, Homo sapiens
  siRNA target sequence for LOC55580 (NM_017571.1,2642-2660).
cttagaactgcgaaggaat

SEQ ID NO: 359219 - DNA, 19 bp, Homo sapiens
  siRNA target sequence for LOC55580 (NM_017571.1,2694-2712).
gctcagctacagctagaaa

SEQ ID NO: 359220 - DNA, 19 bp, Homo sapiens
  siRNA target sequence for LOC55580 (NM_017571.1,2780-2798).
gaaaacagaacgcttagaa

SEQ ID NO: 359221 - DNA, 19 bp, Homo sapiens
  siRNA target sequence for LOC55580 (NM_017571.1,2804-2822).
ctaccagggtttagatata

SEQ ID NO: 359222 - DNA, 19 bp, Homo sapiens
  siRNA target sequence for LOC55580 (NM_017571.1,2845-2863).
ctttagagaacagcaataa

SEQ ID NO: 359223 - DNA, 19 bp, Homo sapiens
  siRNA target sequence for LOC55580 (NM_017571.1,2873-2891).
gcaattagagagtgaacta

SEQ ID NO: 359224 - DNA, 19 bp, Homo sapiens
  siRNA target sequence for LOC55580 (NM_017571.1,2884-2902).
gtgaactacaagacttaga

SEQ ID NO: 359225 - DNA, 19 bp, Homo sapiens
  siRNA target sequence for LOC55580 (NM_017571.1,2886-2904).
gaactacaagacttagaga

SEQ ID NO: 359226 - DNA, 19 bp, Homo sapiens
  siRNA target sequence for LOC55580 (NM_017571.1,2950-2968).
ctagcaaaagactagaaca

SEQ ID NO: 359227 - DNA, 19 bp, Homo sapiens
  siRNA target sequence for C17orf31 (NM_017575.3,169-187).
gcctttctcggctaaggaa

SEQ ID NO: 359228 - DNA, 19 bp, Homo sapiens
  siRNA target sequence for C17orf31 (NM_017575.3,252-270).
gattgctctgctgttgaaa

SEQ ID NO: 359229 - DNA, 19 bp, Homo sapiens
  siRNA target sequence for C17orf31 (NM_017575.3,277-295).
cacagcccgttaaagatgt

SEQ ID NO: 359230 - DNA, 19 bp, Homo sapiens
  siRNA target sequence for C17orf31 (NM_017575.3,354-372).
ggacaagaatcctttccta

SEQ ID NO: 359231 - DNA, 19 bp, Homo sapiens
  siRNA target sequence for C17orf31 (NM_017575.3,384-402).
caagaggatcgtagtctaa

SEQ ID NO: 359232 - DNA, 19 bp, Homo sapiens
  siRNA target sequence for C17orf31 (NM_017575.3,387-405).
gaggatcgtagtctaaaaa

SEQ ID NO: 359233 - DNA, 19 bp, Homo sapiens
  siRNA target sequence for C17orf31 (NM_017575.3,389-407).
ggatcgtagtctaaaaatt

SEQ ID NO: 359234 - DNA, 19 bp, Homo sapiens
  siRNA target sequence for C17orf31 (NM_017575.3,390-408).
gatcgtagtctaaaaatta

SEQ ID NO: 359235 - DNA, 19 bp, Homo sapiens
  siRNA target sequence for C17orf31 (NM_017575.3,393-411).
cgtagtctaaaaattatca

SEQ ID NO: 359236 - DNA, 19 bp, Homo sapiens
  siRNA target sequence for C17orf31 (NM_017575.3,394-412).
gtagtctaaaaattatcaa

SEQ ID NO: 359237 - DNA, 19 bp, Homo sapiens
  siRNA target sequence for C17orf31 (NM_017575.3,427-445).
ccgacctgcagatctatca

SEQ ID NO: 359238 - DNA, 19 bp, Homo sapiens
  siRNA target sequence for C17orf31 (NM_017575.3,453-471).
cgacgtttgcagactgtta

SEQ ID NO: 359239 - DNA, 19 bp, Homo sapiens
  siRNA target sequence for C17orf31 (NM_017575.3,457-475).
gtttgcagactgttagcaa

SEQ ID NO: 359240 - DNA, 19 bp, Homo sapiens
  siRNA target sequence for C17orf31 (NM_017575.3,461-479).
gcagactgttagcaaagaa

SEQ ID NO: 359241 - DNA, 19 bp, Homo sapiens
  siRNA target sequence for C17orf31 (NM_017575.3,572-590).
ggaagttgcgaataaacca

SEQ ID NO: 359242 - DNA, 19 bp, Homo sapiens
  siRNA target sequence for C17orf31 (NM_017575.3,734-752).
ctactcccgctcagacaaa

SEQ ID NO: 359243 - DNA, 19 bp, Homo sapiens
  siRNA target sequence for C17orf31 (NM_017575.3,819-837).
ggcctgacggataatggat

SEQ ID NO: 359244 - DNA, 19 bp, Homo sapiens
  siRNA target sequence for C17orf31 (NM_017575.3,899-917).
gtcctcaaccgattcctta

SEQ ID NO: 359245 - DNA, 19 bp, Homo sapiens
  siRNA target sequence for C17orf31 (NM_017575.3,913-931).
ccttagacgaggacagaat

SEQ ID NO: 359246 - DNA, 19 bp, Homo sapiens
  siRNA target sequence for C17orf31 (NM_017575.3,1048-1066).
gcactcttcgtgtcacttt

SEQ ID NO: 359247 - DNA, 19 bp, Homo sapiens
  siRNA target sequence for C17orf31 (NM_017575.3,1105-1123).
ggtcagccagggatgatat

SEQ ID NO: 359248 - DNA, 19 bp, Homo sapiens
  siRNA target sequence for C17orf31 (NM_017575.3,1108-1126).
cagccagggatgatatgga

SEQ ID NO: 359249 - DNA, 19 bp, Homo sapiens
  siRNA target sequence for C17orf31 (NM_017575.3,1186-1204).
ccaaaaacccgaaacaaga

SEQ ID NO: 359250 - DNA, 19 bp, Homo sapiens
  siRNA target sequence for C17orf31 (NM_017575.3,1215-1233).
cgtggtcgtggcattctga

SEQ ID NO: 359251 - DNA, 19 bp, Homo sapiens
  siRNA target sequence for C17orf31 (NM_017575.3,1216-1234).
gtggtcgtggcattctgat

SEQ ID NO: 359252 - DNA, 19 bp, Homo sapiens
  siRNA target sequence for C17orf31 (NM_017575.3,1218-1236).
ggtcgtggcattctgattt

SEQ ID NO: 359253 - DNA, 19 bp, Homo sapiens
  siRNA target sequence for C17orf31 (NM_017575.3,1250-1268).
caccctatctgtcaattca

SEQ ID NO: 359254 - DNA, 19 bp, Homo sapiens
  siRNA target sequence for C17orf31 (NM_017575.3,1295-1313).
gggacctcggcttttgttt

SEQ ID NO: 359255 - DNA, 19 bp, Homo sapiens
  siRNA target sequence for C17orf31 (NM_017575.3,1366-1384).
gattgtgggacccaaacaa

SEQ ID NO: 359256 - DNA, 19 bp, Homo sapiens
  siRNA target sequence for C17orf31 (NM_017575.3,1392-1410).
cagaaacctgctctaaaga

SEQ ID NO: 359257 - DNA, 19 bp, Homo sapiens
  siRNA target sequence for C17orf31 (NM_017575.3,1449-1467).
gaagtcagccctacatctt

SEQ ID NO: 359258 - DNA, 19 bp, Homo sapiens
  siRNA target sequence for C17orf31 (NM_017575.3,1485-1503).
gctcaggcatcttactata

SEQ ID NO: 359259 - DNA, 19 bp, Homo sapiens
  siRNA target sequence for C17orf31 (NM_017575.3,1486-1504).
ctcaggcatcttactataa

SEQ ID NO: 359260 - DNA, 19 bp, Homo sapiens
  siRNA target sequence for C17orf31 (NM_017575.3,1488-1506).
caggcatcttactataagt

SEQ ID NO: 359261 - DNA, 19 bp, Homo sapiens
  siRNA target sequence for C17orf31 (NM_017575.3,1490-1508).
ggcatcttactataagttt

SEQ ID NO: 359262 - DNA, 19 bp, Homo sapiens
  siRNA target sequence for C17orf31 (NM_017575.3,1492-1510).
catcttactataagtttca

SEQ ID NO: 359263 - DNA, 19 bp, Homo sapiens
  siRNA target sequence for C17orf31 (NM_017575.3,1514-1532).
ctctgacaacccctattat

SEQ ID NO: 359264 - DNA, 19 bp, Homo sapiens
  siRNA target sequence for C17orf31 (NM_017575.3,1516-1534).
ctgacaacccctattatta

SEQ ID NO: 359265 - DNA, 19 bp, Homo sapiens
  siRNA target sequence for C17orf31 (NM_017575.3,1576-1594).
gctataaccctctacagta

SEQ ID NO: 359266 - DNA, 19 bp, Homo sapiens
  siRNA target sequence for C17orf31 (NM_017575.3,1649-1667).
gactccgtcaggacagtat

SEQ ID NO: 359267 - DNA, 19 bp, Homo sapiens
  siRNA target sequence for C17orf31 (NM_017575.3,1651-1669).
ctccgtcaggacagtatgt

SEQ ID NO: 359268 - DNA, 19 bp, Homo sapiens
  siRNA target sequence for C17orf31 (NM_017575.3,1653-1671).
ccgtcaggacagtatgtgt

SEQ ID NO: 359269 - DNA, 19 bp, Homo sapiens
  siRNA target sequence for C17orf31 (NM_017575.3,1877-1895).
gcgctgtattctattagat

SEQ ID NO: 359270 - DNA, 19 bp, Homo sapiens
  siRNA target sequence for C17orf31 (NM_017575.3,1934-1952).
gtggaagaatgctttctat

SEQ ID NO: 359271 - DNA, 19 bp, Homo sapiens
  siRNA target sequence for C17orf31 (NM_017575.3,1936-1954).
ggaagaatgctttctatca

SEQ ID NO: 359272 - DNA, 19 bp, Homo sapiens
  siRNA target sequence for C17orf31 (NM_017575.3,2010-2028).
cagattcggaacagacttt

SEQ ID NO: 359273 - DNA, 19 bp, Homo sapiens
  siRNA target sequence for C17orf31 (NM_017575.3,2079-2097).
ctgcaggttacttacaagt

SEQ ID NO: 359274 - DNA, 19 bp, Homo sapiens
  siRNA target sequence for C17orf31 (NM_017575.3,2082-2100).
caggttacttacaagttca

SEQ ID NO: 359275 - DNA, 19 bp, Homo sapiens
  siRNA target sequence for C17orf31 (NM_017575.3,2084-2102).
ggttacttacaagttcaaa

SEQ ID NO: 359276 - DNA, 19 bp, Homo sapiens
  siRNA target sequence for C17orf31 (NM_017575.3,2142-2160).
ccattacgcaagacagtaa

SEQ ID NO: 359277 - DNA, 19 bp, Homo sapiens
  siRNA target sequence for C17orf31 (NM_017575.3,2143-2161).
cattacgcaagacagtaaa

SEQ ID NO: 359278 - DNA, 19 bp, Homo sapiens
  siRNA target sequence for C17orf31 (NM_017575.3,2178-2196).
gcccagcgatgcatgatat

SEQ ID NO: 359279 - DNA, 19 bp, Homo sapiens
  siRNA target sequence for C17orf31 (NM_017575.3,2192-2210).
gatatgccaaggagatatt

SEQ ID NO: 359280 - DNA, 19 bp, Homo sapiens
  siRNA target sequence for C17orf31 (NM_017575.3,2230-2248).
ccagtgatacagcgaatta

SEQ ID NO: 359281 - DNA, 19 bp, Homo sapiens
  siRNA target sequence for C17orf31 (NM_017575.3,2282-2300).
gcacattgctcccaagaat

SEQ ID NO: 359282 - DNA, 19 bp, Homo sapiens
  siRNA target sequence for C17orf31 (NM_017575.3,2348-2366).
gaagcttgacgctgtctat

SEQ ID NO: 359283 - DNA, 19 bp, Homo sapiens
  siRNA target sequence for C17orf31 (NM_017575.3,2352-2370).
cttgacgctgtctattact

SEQ ID NO: 359284 - DNA, 19 bp, Homo sapiens
  siRNA target sequence for C17orf31 (NM_017575.3,2355-2373).
gacgctgtctattactata

SEQ ID NO: 359285 - DNA, 19 bp, Homo sapiens
  siRNA target sequence for C17orf31 (NM_017575.3,2369-2387).
ctatatgcgcagtttagct

SEQ ID NO: 359286 - DNA, 19 bp, Homo sapiens
  siRNA target sequence for C17orf31 (NM_017575.3,2417-2435).
gagtctcatgagcttgttt

SEQ ID NO: 359287 - DNA, 19 bp, Homo sapiens
  siRNA target sequence for C17orf31 (NM_017575.3,2419-2437).
gtctcatgagcttgtttga

SEQ ID NO: 359288 - DNA, 19 bp, Homo sapiens
  siRNA target sequence for C17orf31 (NM_017575.3,2471-2489).
gaagcaacatgaggaattt

SEQ ID NO: 359289 - DNA, 19 bp, Homo sapiens
  siRNA target sequence for C17orf31 (NM_017575.3,2677-2695).
ggttcatcctcagttttct

SEQ ID NO: 359290 - DNA, 19 bp, Homo sapiens
  siRNA target sequence for C17orf31 (NM_017575.3,2815-2833).
cccgcatgctgcagcttat

SEQ ID NO: 359291 - DNA, 19 bp, Homo sapiens
  siRNA target sequence for C17orf31 (NM_017575.3,2825-2843).
gcagcttatgaccatcaat

SEQ ID NO: 359292 - DNA, 19 bp, Homo sapiens
  siRNA target sequence for C17orf31 (NM_017575.3,2826-2844).
cagcttatgaccatcaata

SEQ ID NO: 359293 - DNA, 19 bp, Homo sapiens
  siRNA target sequence for C17orf31 (NM_017575.3,2829-2847).
cttatgaccatcaatatgt

SEQ ID NO: 359294 - DNA, 19 bp, Homo sapiens
  siRNA target sequence for C17orf31 (NM_017575.3,2957-2975).
ccgctgcacctgcttactt

SEQ ID NO: 359295 - DNA, 19 bp, Homo sapiens
  siRNA target sequence for C17orf31 (NM_017575.3,2962-2980).
gcacctgcttacttaagga

SEQ ID NO: 359296 - DNA, 19 bp, Homo sapiens
  siRNA target sequence for C17orf31 (NM_017575.3,3178-3196).
ggtcgacgctggctgattt

SEQ ID NO: 359297 - DNA, 19 bp, Homo sapiens
  siRNA target sequence for C17orf31 (NM_017575.3,3186-3204).
ctggctgatttctgtaaca

SEQ ID NO: 359298 - DNA, 19 bp, Homo sapiens
  siRNA target sequence for C17orf31 (NM_017575.3,3207-3225).
ctgactgcagtgaatcagt

SEQ ID NO: 359299 - DNA, 19 bp, Homo sapiens
  siRNA target sequence for C17orf31 (NM_017575.3,3255-3273).
gatgacctcacccttctta

SEQ ID NO: 359300 - DNA, 19 bp, Homo sapiens
  siRNA target sequence for C17orf31 (NM_017575.3,3347-3365).
gaaaacctcggataaggtt

SEQ ID NO: 359301 - DNA, 19 bp, Homo sapiens
  siRNA target sequence for C17orf31 (NM_017575.3,3353-3371).
ctcggataaggttattgca

SEQ ID NO: 359302 - DNA, 19 bp, Homo sapiens
  siRNA target sequence for C17orf31 (NM_017575.3,3445-3463).
cattcaagggtggaaagta

SEQ ID NO: 359303 - DNA, 19 bp, Homo sapiens
  siRNA target sequence for C17orf31 (NM_017575.3,3542-3560).
ggaggatgtggtgattgaa

SEQ ID NO: 359304 - DNA, 19 bp, Homo sapiens
  siRNA target sequence for C17orf31 (NM_017575.3,3715-3733).
ggcagatggagctcgaaat

SEQ ID NO: 359305 - DNA, 19 bp, Homo sapiens
  siRNA target sequence for C17orf31 (NM_017575.3,3832-3850).
ccctcatcgtgatcaatga

SEQ ID NO: 359306 - DNA, 19 bp, Homo sapiens
  siRNA target sequence for C17orf31 (NM_017575.3,3991-4009).
ccagccgtggcaatgaact

SEQ ID NO: 359307 - DNA, 19 bp, Homo sapiens
  siRNA target sequence for C17orf31 (NM_017575.3,4086-4104).
ctccactactgcaaagaca

SEQ ID NO: 359308 - DNA, 19 bp, Homo sapiens
  siRNA target sequence for C17orf31 (NM_017575.3,4196-4214).
gaaggcgctcacaaggaat

SEQ ID NO: 359309 - DNA, 19 bp, Homo sapiens
  siRNA target sequence for C17orf31 (NM_017575.3,4199-4217).
ggcgctcacaaggaatgtt

SEQ ID NO: 359310 - DNA, 19 bp, Homo sapiens
  siRNA target sequence for DKFZp434C0328 (NM_017577.1,1341-1359).
cacgctttatgcagaaatt

SEQ ID NO: 359311 - DNA, 19 bp, Homo sapiens
  siRNA target sequence for DKFZp434C0328 (NM_017577.1,1362-1380).
ccagttctagaaatataat

SEQ ID NO: 359312 - DNA, 19 bp, Homo sapiens
  siRNA target sequence for DKFZp434C0328 (NM_017577.1,1363-1381).
cagttctagaaatataata

SEQ ID NO: 359313 - DNA, 19 bp, Homo sapiens
  siRNA target sequence for DKFZp434C0328 (NM_017577.1,1431-1449).
gaacgatgacctacactat

SEQ ID NO: 359314 - DNA, 19 bp, Homo sapiens
  siRNA target sequence for DKFZp434C0328 (NM_017577.1,1434-1452).
cgatgacctacactatagt

SEQ ID NO: 359315 - DNA, 19 bp, Homo sapiens
  siRNA target sequence for DKFZp434C0328 (NM_017577.1,1444-1462).
cactatagtccttaatagt

SEQ ID NO: 359316 - DNA, 19 bp, Homo sapiens
  siRNA target sequence for DKFZp434C0328 (NM_017577.1,1518-1536).
gtcgggaagcacgatttta

SEQ ID NO: 359317 - DNA, 19 bp, Homo sapiens
  siRNA target sequence for DKFZp434C0328 (NM_017577.1,1520-1538).
cgggaagcacgattttatt

SEQ ID NO: 359318 - DNA, 19 bp, Homo sapiens
  siRNA target sequence for DKFZp434C0328 (NM_017577.1,1521-1539).
gggaagcacgattttattt

SEQ ID NO: 359319 - DNA, 19 bp, Homo sapiens
  siRNA target sequence for DKFZp434C0328 (NM_017577.1,1565-1583).
gatgtcccctaccatgatt

SEQ ID NO: 359320 - DNA, 19 bp, Homo sapiens
  siRNA target sequence for DKFZp434C0328 (NM_017577.1,1593-1611).
ccgtgaacagatactgtat

SEQ ID NO: 359321 - DNA, 19 bp, Homo sapiens
  siRNA target sequence for DKFZp434C0328 (NM_017577.1,1595-1613).
gtgaacagatactgtatca

SEQ ID NO: 359322 - DNA, 19 bp, Homo sapiens
  siRNA target sequence for DKFZp434C0328 (NM_017577.1,1606-1624).
ctgtatcatccgatcttca

SEQ ID NO: 359323 - DNA, 19 bp, Homo sapiens
  siRNA target sequence for DKFZp434C0328 (NM_017577.1,1675-1693).
gccatggggccttgtcaaa

SEQ ID NO: 359324 - DNA, 19 bp, Homo sapiens
  siRNA target sequence for DKFZp434C0328 (NM_017577.1,1676-1694).
ccatggggccttgtcaaat

SEQ ID NO: 359325 - DNA, 19 bp, Homo sapiens
  siRNA target sequence for DKFZp434C0328 (NM_017577.1,1681-1699).
gggccttgtcaaatcttta

SEQ ID NO: 359326 - DNA, 19 bp, Homo sapiens
  siRNA target sequence for DKFZp434C0328 (NM_017577.1,1683-1701).
gccttgtcaaatctttaat

SEQ ID NO: 359327 - DNA, 19 bp, Homo sapiens
  siRNA target sequence for DKFZp434C0328 (NM_017577.1,1742-1760).
cagcttgaatcagatttgt

SEQ ID NO: 359328 - DNA, 19 bp, Homo sapiens
  siRNA target sequence for DKFZp434C0328 (NM_017577.1,1744-1762).
gcttgaatcagatttgtta

SEQ ID NO: 359329 - DNA, 19 bp, Homo sapiens
  siRNA target sequence for DKFZp434C0328 (NM_017577.1,1840-1858).
caaccgaacagcagaaaca

SEQ ID NO: 359330 - DNA, 19 bp, Homo sapiens
  siRNA target sequence for DKFZp434C0328 (NM_017577.1,1914-1932).
gggatattacaggaaagaa

SEQ ID NO: 359331 - DNA, 19 bp, Homo sapiens
  siRNA target sequence for DKFZp434C0328 (NM_017577.1,1948-1966).
ctataacgtcactcttatt

SEQ ID NO: 359332 - DNA, 19 bp, Homo sapiens
  siRNA target sequence for DKFZp434C0328 (NM_017577.1,2026-2044).
gctgtcaaagatagaacat

SEQ ID NO: 359333 - DNA, 19 bp, Homo sapiens
  siRNA target sequence for DKFZp434C0328 (NM_017577.1,2068-2086).
ccgcctccaagaagagaaa

SEQ ID NO: 359334 - DNA, 19 bp, Homo sapiens
  siRNA target sequence for DKFZp434C0328 (NM_017577.1,2069-2087).
cgcctccaagaagagaaat

SEQ ID NO: 359335 - DNA, 19 bp, Homo sapiens
  siRNA target sequence for DKFZp434C0328 (NM_017577.1,2111-2129).
gtgtcaagagcagaaacta

SEQ ID NO: 359336 - DNA, 19 bp, Homo sapiens
  siRNA target sequence for DKFZp434C0328 (NM_017577.1,2115-2133).
caagagcagaaactattca

SEQ ID NO: 359337 - DNA, 19 bp, Homo sapiens
  siRNA target sequence for DKFZp434C0328 (NM_017577.1,2144-2162).
gatcaggcccatcgtttaa

SEQ ID NO: 359338 - DNA, 19 bp, Homo sapiens
  siRNA target sequence for DKFZp434C0328 (NM_017577.1,2171-2189).
ctccgagactccatagtga

SEQ ID NO: 359339 - DNA, 19 bp, Homo sapiens
  siRNA target sequence for DKFZp434C0328 (NM_017577.1,2181-2199).
ccatagtgatgcttgaaca

SEQ ID NO: 359340 - DNA, 19 bp, Homo sapiens
  siRNA target sequence for DKFZp434C0328 (NM_017577.1,2227-2245).
gaaaacgtttgatctacta

SEQ ID NO: 359341 - DNA, 19 bp, Homo sapiens
  siRNA target sequence for DKFZp434C0328 (NM_017577.1,2232-2250).
cgtttgatctactaaataa

SEQ ID NO: 359342 - DNA, 19 bp, Homo sapiens
  siRNA target sequence for ZRANB1 (NM_017580.1,392-410).
gtgggcttgtgaatattgt

SEQ ID NO: 359343 - DNA, 19 bp, Homo sapiens
  siRNA target sequence for ZRANB1 (NM_017580.1,402-420).
gaatattgtacgtatgaaa

SEQ ID NO: 359344 - DNA, 19 bp, Homo sapiens
  siRNA target sequence for ZRANB1 (NM_017580.1,426-444).
ccatctgcaatcaagtgta

SEQ ID NO: 359345 - DNA, 19 bp, Homo sapiens
  siRNA target sequence for ZRANB1 (NM_017580.1,430-448).
ctgcaatcaagtgtactat

SEQ ID NO: 359346 - DNA, 19 bp, Homo sapiens
  siRNA target sequence for ZRANB1 (NM_017580.1,463-481).
gacctagtggaacaattat

SEQ ID NO: 359347 - DNA, 19 bp, Homo sapiens
  siRNA target sequence for ZRANB1 (NM_017580.1,465-483).
cctagtggaacaattatta

SEQ ID NO: 359348 - DNA, 19 bp, Homo sapiens
  siRNA target sequence for ZRANB1 (NM_017580.1,597-615).
gtgaaatcttcgtatagca

SEQ ID NO: 359349 - DNA, 19 bp, Homo sapiens
  siRNA target sequence for ZRANB1 (NM_017580.1,604-622).
cttcgtatagcatggaaaa

SEQ ID NO: 359350 - DNA, 19 bp, Homo sapiens
  siRNA target sequence for ZRANB1 (NM_017580.1,863-881).
caaggctaaaagatgtgtt

SEQ ID NO: 359351 - DNA, 19 bp, Homo sapiens
  siRNA target sequence for ZRANB1 (NM_017580.1,888-906).
gatcatcccagacctaata

SEQ ID NO: 359352 - DNA, 19 bp, Homo sapiens
  siRNA target sequence for ZRANB1 (NM_017580.1,891-909).
catcccagacctaataaca

SEQ ID NO: 359353 - DNA, 19 bp, Homo sapiens
  siRNA target sequence for ZRANB1 (NM_017580.1,1035-1053).
cgggactctgaagtgaaaa

SEQ ID NO: 359354 - DNA, 19 bp, Homo sapiens
  siRNA target sequence for ZRANB1 (NM_017580.1,1036-1054).
gggactctgaagtgaaaat

SEQ ID NO: 359355 - DNA, 19 bp, Homo sapiens
  siRNA target sequence for ZRANB1 (NM_017580.1,1177-1195).
cttgtgtgggggttgtaga

SEQ ID NO: 359356 - DNA, 19 bp, Homo sapiens
  siRNA target sequence for ZRANB1 (NM_017580.1,1207-1225).
ctgccatagaagcatacaa

SEQ ID NO: 359357 - DNA, 19 bp, Homo sapiens
  siRNA target sequence for ZRANB1 (NM_017580.1,1209-1227).
gccatagaagcatacaagt

SEQ ID NO: 359358 - DNA, 19 bp, Homo sapiens
  siRNA target sequence for ZRANB1 (NM_017580.1,1306-1324).
gctatactcttgtacactt

SEQ ID NO: 359359 - DNA, 19 bp, Homo sapiens
  siRNA target sequence for ZRANB1 (NM_017580.1,1317-1335).
gtacacttggctatacgtt

SEQ ID NO: 359360 - DNA, 19 bp, Homo sapiens
  siRNA target sequence for ZRANB1 (NM_017580.1,1342-1360).
ggcaggatatgctagcaat

SEQ ID NO: 359361 - DNA, 19 bp, Homo sapiens
  siRNA target sequence for ZRANB1 (NM_017580.1,1343-1361).
gcaggatatgctagcaata

SEQ ID NO: 359362 - DNA, 19 bp, Homo sapiens
  siRNA target sequence for ZRANB1 (NM_017580.1,1344-1362).
caggatatgctagcaatat

SEQ ID NO: 359363 - DNA, 19 bp, Homo sapiens
  siRNA target sequence for ZRANB1 (NM_017580.1,1472-1490).
gggggattttgcttgctat

SEQ ID NO: 359364 - DNA, 19 bp, Homo sapiens
  siRNA target sequence for ZRANB1 (NM_017580.1,1542-1560).
cccccaacagtccaagaaa

SEQ ID NO: 359365 - DNA, 19 bp, Homo sapiens
  siRNA target sequence for ZRANB1 (NM_017580.1,1578-1596).
cttgatagagacgttcaaa

SEQ ID NO: 359366 - DNA, 19 bp, Homo sapiens
  siRNA target sequence for ZRANB1 (NM_017580.1,1585-1603).
gagacgttcaaaaagaatt

SEQ ID NO: 359367 - DNA, 19 bp, Homo sapiens
  siRNA target sequence for ZRANB1 (NM_017580.1,1608-1626).
gaagaatctccaattatta

SEQ ID NO: 359368 - DNA, 19 bp, Homo sapiens
  siRNA target sequence for ZRANB1 (NM_017580.1,1611-1629).
gaatctccaattattaact

SEQ ID NO: 359369 - DNA, 19 bp, Homo sapiens
  siRNA target sequence for ZRANB1 (NM_017580.1,1700-1718).
cctacttgattcagttcta

SEQ ID NO: 359370 - DNA, 19 bp, Homo sapiens
  siRNA target sequence for ZRANB1 (NM_017580.1,1778-1796).
cctgcatgactgttcacat

SEQ ID NO: 359371 - DNA, 19 bp, Homo sapiens
  siRNA target sequence for ZRANB1 (NM_017580.1,1779-1797).
ctgcatgactgttcacatt

SEQ ID NO: 359372 - DNA, 19 bp, Homo sapiens
  siRNA target sequence for ZRANB1 (NM_017580.1,1818-1836).
gattgggaatcatggtatt

SEQ ID NO: 359373 - DNA, 19 bp, Homo sapiens
  siRNA target sequence for ZRANB1 (NM_017580.1,1841-1859).
gagctttggtttacatttt

SEQ ID NO: 359374 - DNA, 19 bp, Homo sapiens
  siRNA target sequence for ZRANB1 (NM_017580.1,1934-1952).
ggagcagacgcacattttt

SEQ ID NO: 359375 - DNA, 19 bp, Homo sapiens
  siRNA target sequence for ZRANB1 (NM_017580.1,1937-1955).
gcagacgcacatttttgta

SEQ ID NO: 359376 - DNA, 19 bp, Homo sapiens
  siRNA target sequence for ZRANB1 (NM_017580.1,1953-1971).
gtactggcacatattctta

SEQ ID NO: 359377 - DNA, 19 bp, Homo sapiens
  siRNA target sequence for ZRANB1 (NM_017580.1,1972-1990).
gacgaccaattatagttta

SEQ ID NO: 359378 - DNA, 19 bp, Homo sapiens
  siRNA target sequence for ZRANB1 (NM_017580.1,2017-2035).
ggggagaaactttaggata

SEQ ID NO: 359379 - DNA, 19 bp, Homo sapiens
  siRNA target sequence for ZRANB1 (NM_017580.1,2038-2056).
ctcggtttcaaggtgttta

SEQ ID NO: 359380 - DNA, 19 bp, Homo sapiens
  siRNA target sequence for ZRANB1 (NM_017580.1,2078-2096).
gagtttttgttggaaaagt

SEQ ID NO: 359381 - DNA, 19 bp, Homo sapiens
  siRNA target sequence for ZRANB1 (NM_017580.1,2097-2115).
ccgattgctctgggttata

SEQ ID NO: 359382 - DNA, 19 bp, Homo sapiens
  siRNA target sequence for ZRANB1 (NM_017580.1,2172-2190).
ggtgctggtgctaatctca

SEQ ID NO: 359383 - DNA, 19 bp, Homo sapiens
  siRNA target sequence for ZRANB1 (NM_017580.1,2269-2287).
ctgctcaggagctaggtaa

SEQ ID NO: 359384 - DNA, 19 bp, Homo sapiens
  siRNA target sequence for ZRANB1 (NM_017580.1,2272-2290).
ctcaggagctaggtaatga

SEQ ID NO: 359385 - DNA, 19 bp, Homo sapiens
  siRNA target sequence for ZRANB1 (NM_017580.1,2355-2373).
gttgccatgcagaagagtt

SEQ ID NO: 359386 - DNA, 19 bp, Homo sapiens
  siRNA target sequence for C9orf7 (NM_017586.1,186-204).
cgatctctggcctcttcaa

SEQ ID NO: 359387 - DNA, 19 bp, Homo sapiens
  siRNA target sequence for C9orf7 (NM_017586.1,239-257).
ggcgtgtggatgatcatga

SEQ ID NO: 359388 - DNA, 19 bp, Homo sapiens
  siRNA target sequence for C9orf7 (NM_017586.1,241-259).
cgtgtggatgatcatgaat

SEQ ID NO: 359389 - DNA, 19 bp, Homo sapiens
  siRNA target sequence for C9orf7 (NM_017586.1,299-317).
cagttcatcgagtttgcaa

SEQ ID NO: 359390 - DNA, 19 bp, Homo sapiens
  siRNA target sequence for C9orf7 (NM_017586.1,354-372).
ggcagaaggctgtcttcta

SEQ ID NO: 359391 - DNA, 19 bp, Homo sapiens
  siRNA target sequence for DKFZp761A052 (NM_017602.2,572-590).
gtcggcgcaggctacaaca

SEQ ID NO: 359392 - DNA, 19 bp, Homo sapiens
  siRNA target sequence for DKFZp761A052 (NM_017602.2,652-670).
gcagcaggagcattggttt

SEQ ID NO: 359393 - DNA, 19 bp, Homo sapiens
  siRNA target sequence for DKFZp761A052 (NM_017602.2,801-819).
gcatggactatctgatgaa

SEQ ID NO: 359394 - DNA, 19 bp, Homo sapiens
  siRNA target sequence for DKFZp761A052 (NM_017602.2,826-844).
cgactacttctccaactat

SEQ ID NO: 359395 - DNA, 19 bp, Homo sapiens
  siRNA target sequence for DKFZp761A052 (NM_017602.2,983-1001).
gtggaacccatcaacacat

SEQ ID NO: 359396 - DNA, 19 bp, Homo sapiens
  siRNA target sequence for DKFZp761A052 (NM_017602.2,999-1017).
cattccatgggatacatca

SEQ ID NO: 359397 - DNA, 19 bp, Homo sapiens
  siRNA target sequence for DKFZp761A052 (NM_017602.2,1044-1062).
gctaccatcggaatatcca

SEQ ID NO: 359398 - DNA, 19 bp, Homo sapiens
  siRNA target sequence for DKFZp761A052 (NM_017602.2,1049-1067).
catcggaatatccactata

SEQ ID NO: 359399 - DNA, 19 bp, Homo sapiens
  siRNA target sequence for DKFZp761A052 (NM_017602.2,1052-1070).
cggaatatccactataatt

SEQ ID NO: 359400 - DNA, 19 bp, Homo sapiens
  siRNA target sequence for DKFZp761A052 (NM_017602.2,1071-1089).
cagtggtgaatcctaacaa

SEQ ID NO: 359401 - DNA, 19 bp, Homo sapiens
  siRNA target sequence for DKFZp761A052 (NM_017602.2,1109-1127).
ctgggcctgccatcattca

SEQ ID NO: 359402 - DNA, 19 bp, Homo sapiens
  siRNA target sequence for DKFZp761A052 (NM_017602.2,1647-1665).
ctgcctttggtctgaatga

SEQ ID NO: 359403 - DNA, 19 bp, Homo sapiens
  siRNA target sequence for DKFZp761A052 (NM_017602.2,1649-1667).
gcctttggtctgaatgact

SEQ ID NO: 359404 - DNA, 19 bp, Homo sapiens
  siRNA target sequence for DKFZp761A052 (NM_017602.2,1715-1733).
gaatacctagacagtatga

SEQ ID NO: 359405 - DNA, 19 bp, Homo sapiens
  siRNA target sequence for DKFZp434K1210 (NM_017606.2,843-861).
gatggcagggcatgtttct

SEQ ID NO: 359406 - DNA, 19 bp, Homo sapiens
  siRNA target sequence for DKFZp434K1210 (NM_017606.2,846-864).
ggcagggcatgtttctgtt

SEQ ID NO: 359407 - DNA, 19 bp, Homo sapiens
  siRNA target sequence for DKFZp434K1210 (NM_017606.2,880-898).
cctcccagcgtgacttatt

SEQ ID NO: 359408 - DNA, 19 bp, Homo sapiens
  siRNA target sequence for DKFZp434K1210 (NM_017606.2,881-899).
ctcccagcgtgacttattt

SEQ ID NO: 359409 - DNA, 19 bp, Homo sapiens
  siRNA target sequence for DKFZp434K1210 (NM_017606.2,1069-1087).
ccagtcctgggtgaagata

SEQ ID NO: 359410 - DNA, 19 bp, Homo sapiens
  siRNA target sequence for DKFZp434K1210 (NM_017606.2,1070-1088).
cagtcctgggtgaagatat

SEQ ID NO: 359411 - DNA, 19 bp, Homo sapiens
  siRNA target sequence for DKFZp434K1210 (NM_017606.2,1110-1128).
ggccccttcacgtaggaaa

SEQ ID NO: 359412 - DNA, 19 bp, Homo sapiens
  siRNA target sequence for PPP1R12C (NM_017607.1,1021-1039).
ccctctagcagcaaacaca

SEQ ID NO: 359413 - DNA, 19 bp, Homo sapiens
  siRNA target sequence for PPP1R12C (NM_017607.1,1062-1080).
gagcagtcgcgagaagatt

SEQ ID NO: 359414 - DNA, 19 bp, Homo sapiens
  siRNA target sequence for PPP1R12C (NM_017607.1,1414-1432).
ctccgtcttgccagaatta

SEQ ID NO: 359415 - DNA, 19 bp, Homo sapiens
  siRNA target sequence for DKFZp434A1721 (NM_017609.2,116-134).
cgtccagggcctattgtca

SEQ ID NO: 359416 - DNA, 19 bp, Homo sapiens
  siRNA target sequence for DKFZp434A1721 (NM_017609.2,122-140).
gggcctattgtcacttcaa

SEQ ID NO: 359417 - DNA, 19 bp, Homo sapiens
  siRNA target sequence for DKFZp434A1721 (NM_017609.2,322-340).
ccgtcggcctgcaatggtt

SEQ ID NO: 359418 - DNA, 19 bp, Homo sapiens
  siRNA target sequence for DKFZp434A1721 (NM_017609.2,1025-1043).
cgtcactgagcagcatttt

SEQ ID NO: 359419 - DNA, 19 bp, Homo sapiens
  siRNA target sequence for DKFZp434A1721 (NM_017609.2,1037-1055).
gcattttaacctcttgaat

SEQ ID NO: 359420 - DNA, 19 bp, Homo sapiens
  siRNA target sequence for DKFZp434A1721 (NM_017609.2,1196-1214).
gatgcgtctggccataagt

SEQ ID NO: 359421 - DNA, 19 bp, Homo sapiens
  siRNA target sequence for DKFZp434A1721 (NM_017609.2,1604-1622).
gttcgatgaagggacaatt

SEQ ID NO: 359422 - DNA, 19 bp, Homo sapiens
  siRNA target sequence for DKFZp434A1721 (NM_017609.2,1608-1626).
gatgaagggacaatttcct

SEQ ID NO: 359423 - DNA, 19 bp, Homo sapiens
  siRNA target sequence for DKFZp434A1721 (NM_017609.2,1624-1642).
cctctgtgtcacgagaatt

SEQ ID NO: 359424 - DNA, 19 bp, Homo sapiens
  siRNA target sequence for DKFZp434A1721 (NM_017609.2,1625-1643).
ctctgtgtcacgagaattt

SEQ ID NO: 359425 - DNA, 19 bp, Homo sapiens
  siRNA target sequence for DKFZp434A1721 (NM_017609.2,1631-1649).
gtcacgagaattttctctt

SEQ ID NO: 359426 - DNA, 19 bp, Homo sapiens
  siRNA target sequence for DKFZp434A1721 (NM_017609.2,1635-1653).
cgagaattttctcttcaaa

SEQ ID NO: 359427 - DNA, 19 bp, Homo sapiens
  siRNA target sequence for DKFZp434A1721 (NM_017609.2,1658-1676).
gtggaatcgcctccataaa

SEQ ID NO: 359428 - DNA, 19 bp, Homo sapiens
  siRNA target sequence for DKFZp434A1721 (NM_017609.2,1660-1678).
ggaatcgcctccataaaga

SEQ ID NO: 359429 - DNA, 19 bp, Homo sapiens
  siRNA target sequence for DKFZp434A1721 (NM_017609.2,1661-1679).
gaatcgcctccataaagaa

SEQ ID NO: 359430 - DNA, 19 bp, Homo sapiens
  siRNA target sequence for DKFZp434A1721 (NM_017609.2,1684-1702).
cagaaggtggcgtgaaaaa

SEQ ID NO: 359431 - DNA, 19 bp, Homo sapiens
  siRNA target sequence for DKFZp434A1721 (NM_017609.2,1780-1798).
cccctgactgcatcatagt

SEQ ID NO: 359432 - DNA, 19 bp, Homo sapiens
  siRNA target sequence for DKFZp434A1721 (NM_017609.2,1797-1815).
gtcgactcagacaacttca

SEQ ID NO: 359433 - DNA, 19 bp, Homo sapiens
  siRNA target sequence for DKFZp434A1721 (NM_017609.2,1800-1818).
gactcagacaacttcaagt

SEQ ID NO: 359434 - DNA, 19 bp, Homo sapiens
  siRNA target sequence for DKFZp434A1721 (NM_017609.2,1871-1889).
ctccatcacccaagacatt

SEQ ID NO: 359435 - DNA, 19 bp, Homo sapiens
  siRNA target sequence for DKFZp434A1721 (NM_017609.2,1886-1904).
cattttggaaagattccaa

SEQ ID NO: 359436 - DNA, 19 bp, Homo sapiens
  siRNA target sequence for DKFZp434A1721 (NM_017609.2,1987-2005).
gctgcagcggtttcttctt

SEQ ID NO: 359437 - DNA, 19 bp, Homo sapiens
  siRNA target sequence for DKFZp434A1721 (NM_017609.2,1990-2008).
gcagcggtttcttcttcta

SEQ ID NO: 359438 - DNA, 19 bp, Homo sapiens
  siRNA target sequence for DKFZp434A1721 (NM_017609.2,2018-2036).
gagcttcctgtcccatata

SEQ ID NO: 359439 - DNA, 19 bp, Homo sapiens
  siRNA target sequence for DKFZp434A1721 (NM_017609.2,2020-2038).
gcttcctgtcccatatatt

SEQ ID NO: 359440 - DNA, 19 bp, Homo sapiens
  siRNA target sequence for DKFZp434A1721 (NM_017609.2,2021-2039).
cttcctgtcccatatatta

SEQ ID NO: 359441 - DNA, 19 bp, Homo sapiens
  siRNA target sequence for DKFZp434A1721 (NM_017609.2,2047-2065).
gattggtcgccatgaactt

SEQ ID NO: 359442 - DNA, 19 bp, Homo sapiens
  siRNA target sequence for DKFZp434A1721 (NM_017609.2,2163-2181).
cgttgggaagccaattgga

SEQ ID NO: 359443 - DNA, 19 bp, Homo sapiens
  siRNA target sequence for DKFZp434A1721 (NM_017609.2,2671-2689).
gcttagaccagaagactat

SEQ ID NO: 359444 - DNA, 19 bp, Homo sapiens
  siRNA target sequence for DKFZp434A1721 (NM_017609.2,2672-2690).
cttagaccagaagactatt

SEQ ID NO: 359445 - DNA, 19 bp, Homo sapiens
  siRNA target sequence for DKFZp434A1721 (NM_017609.2,2691-2709).
cagaccgtgagcctgtttt

SEQ ID NO: 359446 - DNA, 19 bp, Homo sapiens
  siRNA target sequence for RNF111 (NM_017610.6,433-451).
ggactcctgaatataacga

SEQ ID NO: 359447 - DNA, 19 bp, Homo sapiens
  siRNA target sequence for RNF111 (NM_017610.6,449-467).
cgagctctacaccttaaaa

SEQ ID NO: 359448 - DNA, 19 bp, Homo sapiens
  siRNA target sequence for RNF111 (NM_017610.6,548-566).
cattggggcagccaaaagt

SEQ ID NO: 359449 - DNA, 19 bp, Homo sapiens
  siRNA target sequence for RNF111 (NM_017610.6,554-572).
ggcagccaaaagttttcct

SEQ ID NO: 359450 - DNA, 19 bp, Homo sapiens
  siRNA target sequence for RNF111 (NM_017610.6,576-594).
ggagttgagatgattaata

SEQ ID NO: 359451 - DNA, 19 bp, Homo sapiens
  siRNA target sequence for RNF111 (NM_017610.6,579-597).
gttgagatgattaatagta

SEQ ID NO: 359452 - DNA, 19 bp, Homo sapiens
  siRNA target sequence for RNF111 (NM_017610.6,716-734).
gcaggctggcccttcgtat

SEQ ID NO: 359453 - DNA, 19 bp, Homo sapiens
  siRNA target sequence for RNF111 (NM_017610.6,730-748).
cgtatgtgcagaattgtgt

SEQ ID NO: 359454 - DNA, 19 bp, Homo sapiens
  siRNA target sequence for RNF111 (NM_017610.6,785-803).
cctagggacaccaagtgat

SEQ ID NO: 359455 - DNA, 19 bp, Homo sapiens
  siRNA target sequence for RNF111 (NM_017610.6,793-811).
caccaagtgatgaagataa

SEQ ID NO: 359456 - DNA, 19 bp, Homo sapiens
  siRNA target sequence for RNF111 (NM_017610.6,818-836).
ctcttttagtgattgtctt

SEQ ID NO: 359457 - DNA, 19 bp, Homo sapiens
  siRNA target sequence for RNF111 (NM_017610.6,881-899).
gacttcagatgaggataaa

SEQ ID NO: 359458 - DNA, 19 bp, Homo sapiens
  siRNA target sequence for RNF111 (NM_017610.6,921-939).
cagaccattttgaatgcta

SEQ ID NO: 359459 - DNA, 19 bp, Homo sapiens
  siRNA target sequence for RNF111 (NM_017610.6,923-941).
gaccattttgaatgctaaa

SEQ ID NO: 359460 - DNA, 19 bp, Homo sapiens
  siRNA target sequence for RNF111 (NM_017610.6,951-969).
catagtgcacggtctcata

SEQ ID NO: 359461 - DNA, 19 bp, Homo sapiens
  siRNA target sequence for RNF111 (NM_017610.6,994-1012).
ctgtatcgggattgttaat

SEQ ID NO: 359462 - DNA, 19 bp, Homo sapiens
  siRNA target sequence for RNF111 (NM_017610.6,1143-1161).
gtgttagctcgaagaaaat

SEQ ID NO: 359463 - DNA, 19 bp, Homo sapiens
  siRNA target sequence for RNF111 (NM_017610.6,1169-1187).
gctacctagttctagtagt

SEQ ID NO: 359464 - DNA, 19 bp, Homo sapiens
  siRNA target sequence for RNF111 (NM_017610.6,1170-1188).
ctacctagttctagtagtt

SEQ ID NO: 359465 - DNA, 19 bp, Homo sapiens
  siRNA target sequence for RNF111 (NM_017610.6,1217-1235).
ctcttctagctcatcaact

SEQ ID NO: 359466 - DNA, 19 bp, Homo sapiens
  siRNA target sequence for RNF111 (NM_017610.6,1349-1367).
ccaggttactgccaatgaa

SEQ ID NO: 359467 - DNA, 19 bp, Homo sapiens
  siRNA target sequence for RNF111 (NM_017610.6,1352-1370).
ggttactgccaatgaagaa

SEQ ID NO: 359468 - DNA, 19 bp, Homo sapiens
  siRNA target sequence for RNF111 (NM_017610.6,1509-1527).
cggaaccgcagtaggattt

SEQ ID NO: 359469 - DNA, 19 bp, Homo sapiens
  siRNA target sequence for RNF111 (NM_017610.6,1511-1529).
gaaccgcagtaggatttct

SEQ ID NO: 359470 - DNA, 19 bp, Homo sapiens
  siRNA target sequence for RNF111 (NM_017610.6,1514-1532).
ccgcagtaggatttctact

SEQ ID NO: 359471 - DNA, 19 bp, Homo sapiens
  siRNA target sequence for RNF111 (NM_017610.6,1571-1589).
ggaccttaccgttgatgaa

SEQ ID NO: 359472 - DNA, 19 bp, Homo sapiens
  siRNA target sequence for RNF111 (NM_017610.6,1638-1656).
gctactagcgcttccatta

SEQ ID NO: 359473 - DNA, 19 bp, Homo sapiens
  siRNA target sequence for RNF111 (NM_017610.6,1639-1657).
ctactagcgcttccattaa

SEQ ID NO: 359474 - DNA, 19 bp, Homo sapiens
  siRNA target sequence for RNF111 (NM_017610.6,1642-1660).
ctagcgcttccattaacaa

SEQ ID NO: 359475 - DNA, 19 bp, Homo sapiens
  siRNA target sequence for RNF111 (NM_017610.6,1646-1664).
cgcttccattaacaattca

SEQ ID NO: 359476 - DNA, 19 bp, Homo sapiens
  siRNA target sequence for RNF111 (NM_017610.6,1739-1757).
gacttcagctactcttaca

SEQ ID NO: 359477 - DNA, 19 bp, Homo sapiens
  siRNA target sequence for RNF111 (NM_017610.6,1746-1764).
gctactcttacaagcaata

SEQ ID NO: 359478 - DNA, 19 bp, Homo sapiens
  siRNA target sequence for RNF111 (NM_017610.6,1788-1806).
gatgactcaaggagaacta

SEQ ID NO: 359479 - DNA, 19 bp, Homo sapiens
  siRNA target sequence for RNF111 (NM_017610.6,1839-1857).
gcaatgccaaggttacctt

SEQ ID NO: 359480 - DNA, 19 bp, Homo sapiens
  siRNA target sequence for RNF111 (NM_017610.6,1914-1932).
ggacatcctcatacaagtt

SEQ ID NO: 359481 - DNA, 19 bp, Homo sapiens
  siRNA target sequence for RNF111 (NM_017610.6,2086-2104).
ctggtaccagctatcatga

SEQ ID NO: 359482 - DNA, 19 bp, Homo sapiens
  siRNA target sequence for RNF111 (NM_017610.6,2135-2153).
cagtggtatcagaagtcat

SEQ ID NO: 359483 - DNA, 19 bp, Homo sapiens
  siRNA target sequence for RNF111 (NM_017610.6,2209-2227).
cctcccgagctgcaatctt

SEQ ID NO: 359484 - DNA, 19 bp, Homo sapiens
  siRNA target sequence for RNF111 (NM_017610.6,2248-2266).
ctgccccaagtcaaccttt

SEQ ID NO: 359485 - DNA, 19 bp, Homo sapiens
  siRNA target sequence for RNF111 (NM_017610.6,2252-2270).
cccaagtcaacctttatca

SEQ ID NO: 359486 - DNA, 19 bp, Homo sapiens
  siRNA target sequence for RNF111 (NM_017610.6,2253-2271).
ccaagtcaacctttatcat

SEQ ID NO: 359487 - DNA, 19 bp, Homo sapiens
  siRNA target sequence for RNF111 (NM_017610.6,2257-2275).
gtcaacctttatcatcaat

SEQ ID NO: 359488 - DNA, 19 bp, Homo sapiens
  siRNA target sequence for RNF111 (NM_017610.6,2341-2359).
catcatgtcgacattacat

SEQ ID NO: 359489 - DNA, 19 bp, Homo sapiens
  siRNA target sequence for RNF111 (NM_017610.6,2364-2382).
cccccttatgcctctttga

SEQ ID NO: 359490 - DNA, 19 bp, Homo sapiens
  siRNA target sequence for RNF111 (NM_017610.6,2381-2399).
gacaaggccacttcatcat

SEQ ID NO: 359491 - DNA, 19 bp, Homo sapiens
  siRNA target sequence for RNF111 (NM_017610.6,2383-2401).
caaggccacttcatcatca

SEQ ID NO: 359492 - DNA, 19 bp, Homo sapiens
  siRNA target sequence for RNF111 (NM_017610.6,2452-2470).
ctccgcctcaagtggatta

SEQ ID NO: 359493 - DNA, 19 bp, Homo sapiens
  siRNA target sequence for RNF111 (NM_017610.6,2455-2473).
cgcctcaagtggattatgt

SEQ ID NO: 359494 - DNA, 19 bp, Homo sapiens
  siRNA target sequence for RNF111 (NM_017610.6,2456-2474).
gcctcaagtggattatgtt

SEQ ID NO: 359495 - DNA, 19 bp, Homo sapiens
  siRNA target sequence for RNF111 (NM_017610.6,2457-2475).
cctcaagtggattatgtta

SEQ ID NO: 359496 - DNA, 19 bp, Homo sapiens
  siRNA target sequence for RNF111 (NM_017610.6,2484-2502).
cctgtacatgctttccatt

SEQ ID NO: 359497 - DNA, 19 bp, Homo sapiens
  siRNA target sequence for RNF111 (NM_017610.6,2609-2627).
gccaatttcgcaccatatt

SEQ ID NO: 359498 - DNA, 19 bp, Homo sapiens
  siRNA target sequence for RNF111 (NM_017610.6,2740-2758).
caccccatccacataggat

SEQ ID NO: 359499 - DNA, 19 bp, Homo sapiens
  siRNA target sequence for RNF111 (NM_017610.6,2773-2791).
gtcatgggcatcatattca

SEQ ID NO: 359500 - DNA, 19 bp, Homo sapiens
  siRNA target sequence for RNF111 (NM_017610.6,2790-2808).
catgtgcctcagactatgt

SEQ ID NO: 359501 - DNA, 19 bp, Homo sapiens
  siRNA target sequence for RNF111 (NM_017610.6,2868-2886).
gtgactgcagctacttata

SEQ ID NO: 359502 - DNA, 19 bp, Homo sapiens
  siRNA target sequence for RNF111 (NM_017610.6,2870-2888).
gactgcagctacttataca

SEQ ID NO: 359503 - DNA, 19 bp, Homo sapiens
  siRNA target sequence for RNF111 (NM_017610.6,2934-2952).
cgacttcatcacttacaat

SEQ ID NO: 359504 - DNA, 19 bp, Homo sapiens
  siRNA target sequence for RNF111 (NM_017610.6,3018-3036).
ggattggatggaacatcat

SEQ ID NO: 359505 - DNA, 19 bp, Homo sapiens
  siRNA target sequence for RNF111 (NM_017610.6,3019-3037).
gattggatggaacatcatt

SEQ ID NO: 359506 - DNA, 19 bp, Homo sapiens
  siRNA target sequence for RNF111 (NM_017610.6,3023-3041).
ggatggaacatcattcaga

SEQ ID NO: 359507 - DNA, 19 bp, Homo sapiens
  siRNA target sequence for RNF111 (NM_017610.6,3084-3102).
gaaagattaggcaatgtca

SEQ ID NO: 359508 - DNA, 19 bp, Homo sapiens
  siRNA target sequence for RNF111 (NM_017610.6,3116-3134).
ccaggggacaattgaaaga

SEQ ID NO: 359509 - DNA, 19 bp, Homo sapiens
  siRNA target sequence for RNF111 (NM_017610.6,3274-3292).
catgtatgcaccttttcca

SEQ ID NO: 359510 - DNA, 19 bp, Homo sapiens
  siRNA target sequence for RNF111 (NM_017610.6,3303-3321).
gttgaccaatggttgatta

SEQ ID NO: 359511 - DNA, 19 bp, Homo sapiens
  siRNA target sequence for RNF111 (NM_017610.6,3308-3326).
ccaatggttgattaccaat

SEQ ID NO: 359512 - DNA, 19 bp, Homo sapiens
  siRNA target sequence for RNF111 (NM_017610.6,3309-3327).
caatggttgattaccaata

SEQ ID NO: 359513 - DNA, 19 bp, Homo sapiens
  siRNA target sequence for EEG1 (NM_017611.2,369-387).
gctggccttcactagtgtt

SEQ ID NO: 359514 - DNA, 19 bp, Homo sapiens
  siRNA target sequence for EEG1 (NM_017611.2,374-392).
ccttcactagtgtttgtct

SEQ ID NO: 359515 - DNA, 19 bp, Homo sapiens
  siRNA target sequence for EEG1 (NM_017611.2,378-396).
cactagtgtttgtcttcaa

SEQ ID NO: 359516 - DNA, 19 bp, Homo sapiens
  siRNA target sequence for EEG1 (NM_017611.2,512-530).
gggtccttcatgaacaact

SEQ ID NO: 359517 - DNA, 19 bp, Homo sapiens
  siRNA target sequence for EEG1 (NM_017611.2,582-600).
cacgcctcatagccatatt

SEQ ID NO: 359518 - DNA, 19 bp, Homo sapiens
  siRNA target sequence for EEG1 (NM_017611.2,587-605).
ctcatagccatatttttct

SEQ ID NO: 359519 - DNA, 19 bp, Homo sapiens
  siRNA target sequence for EEG1 (NM_017611.2,610-628).
caccgccacactcatcata

SEQ ID NO: 359520 - DNA, 19 bp, Homo sapiens
  siRNA target sequence for EEG1 (NM_017611.2,743-761).
caccgttcgaccatcatca

SEQ ID NO: 359521 - DNA, 19 bp, Homo sapiens
  siRNA target sequence for EEG1 (NM_017611.2,803-821).
cttattattaagcttcttt

SEQ ID NO: 359522 - DNA, 19 bp, Homo sapiens
  siRNA target sequence for EEG1 (NM_017611.2,1294-1312).
gctcatggaccggcttaaa

SEQ ID NO: 359523 - DNA, 19 bp, Homo sapiens
  siRNA target sequence for EEG1 (NM_017611.2,1646-1664).
ccattttacgtgaatgtga

SEQ ID NO: 359524 - DNA, 19 bp, Homo sapiens
  siRNA target sequence for EEG1 (NM_017611.2,1647-1665).
cattttacgtgaatgtgat

SEQ ID NO: 359525 - DNA, 19 bp, Homo sapiens
  siRNA target sequence for EEG1 (NM_017611.2,1696-1714).
ccacccctttctggtatat

SEQ ID NO: 359526 - DNA, 19 bp, Homo sapiens
  siRNA target sequence for EEG1 (NM_017611.2,1717-1735).
ggaatgccgtacttggaaa

SEQ ID NO: 359527 - DNA, 19 bp, Homo sapiens
  siRNA target sequence for EEG1 (NM_017611.2,1723-1741).
ccgtacttggaaagaaagt

SEQ ID NO: 359528 - DNA, 19 bp, Homo sapiens
  siRNA target sequence for DKFZp434E2220 (NM_017612.2,134-152).
ggccgcagaggtgtatttt

SEQ ID NO: 359529 - DNA, 19 bp, Homo sapiens
  siRNA target sequence for DKFZp434E2220 (NM_017612.2,324-342).
gccgagaatcaagaactta

SEQ ID NO: 359530 - DNA, 19 bp, Homo sapiens
  siRNA target sequence for DKFZp434E2220 (NM_017612.2,326-344).
cgagaatcaagaacttaaa

SEQ ID NO: 359531 - DNA, 19 bp, Homo sapiens
  siRNA target sequence for DKFZp434E2220 (NM_017612.2,336-354).
gaacttaaacgaaaattga

SEQ ID NO: 359532 - DNA, 19 bp, Homo sapiens
  siRNA target sequence for DKFZp434E2220 (NM_017612.2,339-357).
cttaaacgaaaattgaaca

SEQ ID NO: 359533 - DNA, 19 bp, Homo sapiens
  siRNA target sequence for DKFZp434E2220 (NM_017612.2,345-363).
cgaaaattgaacattctga

SEQ ID NO: 359534 - DNA, 19 bp, Homo sapiens
  siRNA target sequence for DKFZp434E2220 (NM_017612.2,362-380).
gactcgaccgagtggaata

SEQ ID NO: 359535 - DNA, 19 bp, Homo sapiens
  siRNA target sequence for DKFZp434E2220 (NM_017612.2,364-382).
ctcgaccgagtggaatatt

SEQ ID NO: 359536 - DNA, 19 bp, Homo sapiens
  siRNA target sequence for DKFZp434E2220 (NM_017612.2,375-393).
ggaatattggtgaacgata

SEQ ID NO: 359537 - DNA, 19 bp, Homo sapiens
  siRNA target sequence for DKFZp434E2220 (NM_017612.2,383-401).
ggtgaacgatactaagtta

SEQ ID NO: 359538 - DNA, 19 bp, Homo sapiens
  siRNA target sequence for DKFZp434E2220 (NM_017612.2,386-404).
gaacgatactaagttagat

SEQ ID NO: 359539 - DNA, 19 bp, Homo sapiens
  siRNA target sequence for DKFZp434E2220 (NM_017612.2,398-416).
gttagatggacctatatta

SEQ ID NO: 359540 - DNA, 19 bp, Homo sapiens
  siRNA target sequence for DKFZp434E2220 (NM_017612.2,402-420).
gatggacctatattacaga

SEQ ID NO: 359541 - DNA, 19 bp, Homo sapiens
  siRNA target sequence for DKFZp434E2220 (NM_017612.2,408-426).
cctatattacagattctat

SEQ ID NO: 359542 - DNA, 19 bp, Homo sapiens
  siRNA target sequence for DKFZp434E2220 (NM_017612.2,409-427).
ctatattacagattctatt

SEQ ID NO: 359543 - DNA, 19 bp, Homo sapiens
  siRNA target sequence for DKFZp434E2220 (NM_017612.2,419-437).
gattctattcatgaacaat

SEQ ID NO: 359544 - DNA, 19 bp, Homo sapiens
  siRNA target sequence for DKFZp434E2220 (NM_017612.2,598-616).
cctgtgccattaaaaacaa

SEQ ID NO: 359545 - DNA, 19 bp, Homo sapiens
  siRNA target sequence for DKFZp434E2220 (NM_017612.2,636-654).
gtaggaagtgtcctgtatt

SEQ ID NO: 359546 - DNA, 19 bp, Homo sapiens
  siRNA target sequence for DKFZp434E2220 (NM_017612.2,658-676).
ctaatttttgccttgataa

SEQ ID NO: 359547 - DNA, 19 bp, Homo sapiens
  siRNA target sequence for DKFZp434E2220 (NM_017612.2,680-698).
ggggcaaccgcttctaaat

SEQ ID NO: 359548 - DNA, 19 bp, Homo sapiens
  siRNA target sequence for DKFZp434E2220 (NM_017612.2,682-700).
ggcaaccgcttctaaatga

SEQ ID NO: 359549 - DNA, 19 bp, Homo sapiens
  siRNA target sequence for DKFZp434E2220 (NM_017612.2,733-751).
ccaagtaccatcaagtctt

SEQ ID NO: 359550 - DNA, 19 bp, Homo sapiens
  siRNA target sequence for DKFZp434E2220 (NM_017612.2,802-820).
ggccaaagcctcactgttt

SEQ ID NO: 359551 - DNA, 19 bp, Homo sapiens
  siRNA target sequence for DKFZp434E2220 (NM_017612.2,804-822).
ccaaagcctcactgtttca

SEQ ID NO: 359552 - DNA, 19 bp, Homo sapiens
  siRNA target sequence for DKFZp434E2220 (NM_017612.2,805-823).
caaagcctcactgtttcaa

SEQ ID NO: 359553 - DNA, 19 bp, Homo sapiens
  siRNA target sequence for DKFZp434E2220 (NM_017612.2,829-847).
gttctgaagaacaccaaat

SEQ ID NO: 359554 - DNA, 19 bp, Homo sapiens
  siRNA target sequence for DKFZp434E2220 (NM_017612.2,867-885).
cggaatgctgctcgaataa

SEQ ID NO: 359555 - DNA, 19 bp, Homo sapiens
  siRNA target sequence for DKFZp434E2220 (NM_017612.2,869-887).
gaatgctgctcgaataagt

SEQ ID NO: 359556 - DNA, 19 bp, Homo sapiens
  siRNA target sequence for DKFZp434E2220 (NM_017612.2,985-1003).
gattcaagccaggagttat

SEQ ID NO: 359557 - DNA, 19 bp, Homo sapiens
  siRNA target sequence for DKFZp434E2220 (NM_017612.2,1045-1063).
gtcttccaccttttatcta

SEQ ID NO: 359558 - DNA, 19 bp, Homo sapiens
  siRNA target sequence for DKFZp434E2220 (NM_017612.2,1087-1105).
caccagggtggctcaaaga

SEQ ID NO: 359559 - DNA, 19 bp, Homo sapiens
  siRNA target sequence for DKFZp434E2220 (NM_017612.2,1123-1141).
cggggcttgcactctatga

SEQ ID NO: 359560 - DNA, 19 bp, Homo sapiens
  siRNA target sequence for DKFZp434E2220 (NM_017612.2,1124-1142).
ggggcttgcactctatgat

SEQ ID NO: 359561 - DNA, 19 bp, Homo sapiens
  siRNA target sequence for DKFZp434E2220 (NM_017612.2,1202-1220).
cacttacgatctctcaaaa

SEQ ID NO: 359562 - DNA, 19 bp, Homo sapiens
  siRNA target sequence for DKFZp434E2220 (NM_017612.2,1204-1222).
cttacgatctctcaaaatt

SEQ ID NO: 359563 - DNA, 19 bp, Homo sapiens
  siRNA target sequence for DKFZp434E2220 (NM_017612.2,1224-1242).
gtcaactatcctggtttta

SEQ ID NO: 359564 - DNA, 19 bp, Homo sapiens
  siRNA target sequence for DKFZp434E2220 (NM_017612.2,1233-1251).
cctggttttaatatatcta

SEQ ID NO: 359565 - DNA, 19 bp, Homo sapiens
  siRNA target sequence for DKFZp434E2220 (NM_017612.2,1376-1394).
caacaagaggtcttcatct

SEQ ID NO: 359566 - DNA, 19 bp, Homo sapiens
  siRNA target sequence for DKFZp434E2220 (NM_017612.2,1460-1478).
catggagctcgattcagat

SEQ ID NO: 359567 - DNA, 19 bp, Homo sapiens
  siRNA target sequence for DKFZp434E2220 (NM_017612.2,1498-1516).
ctcagagcagcgaaagttt

SEQ ID NO: 359568 - DNA, 19 bp, Homo sapiens
  siRNA target sequence for DKFZp434E2220 (NM_017612.2,1505-1523).
cagcgaaagttttcagttt

SEQ ID NO: 359569 - DNA, 19 bp, Homo sapiens
  siRNA target sequence for DKFZp434E2220 (NM_017612.2,1667-1685).
ggacgcactgactctagaa

SEQ ID NO: 359570 - DNA, 19 bp, Homo sapiens
  siRNA target sequence for DKFZp434E2220 (NM_017612.2,1761-1779).
cctgtggacacacctttaa

SEQ ID NO: 359571 - DNA, 19 bp, Homo sapiens
  siRNA target sequence for DKFZp434E2220 (NM_017612.2,1798-1816).
catcaccttgtccaaatga

SEQ ID NO: 359572 - DNA, 19 bp, Homo sapiens
  siRNA target sequence for DKFZp434E2220 (NM_017612.2,1832-1850).
cccggagggaaaaacatct

SEQ ID NO: 359573 - DNA, 19 bp, Homo sapiens
  siRNA target sequence for DKFZp434E2220 (NM_017612.2,1875-1893).
gaggtaccagagattttta

SEQ ID NO: 359574 - DNA, 19 bp, Homo sapiens
  siRNA target sequence for DKFZp434E2220 (NM_017612.2,1968-1986).
gagttggctccggtaaaca

SEQ ID NO: 359575 - DNA, 19 bp, Homo sapiens
  siRNA target sequence for DKFZp434E2220 (NM_017612.2,1970-1988).
gttggctccggtaaacact

SEQ ID NO: 359576 - DNA, 19 bp, Homo sapiens
  siRNA target sequence for DKFZp434E2220 (NM_017612.2,1989-2007).
gaaggtgcccttcttgata

SEQ ID NO: 359577 - DNA, 19 bp, Homo sapiens
  siRNA target sequence for DKFZp434E2220 (NM_017612.2,2012-2030).
cagtgtcgtaccaaactgt

SEQ ID NO: 359578 - DNA, 19 bp, Homo sapiens
  siRNA target sequence for DKFZp434E2220 (NM_017612.2,2079-2097).
ccttcaacggccactaaaa

SEQ ID NO: 359579 - DNA, 19 bp, Homo sapiens
  siRNA target sequence for DKFZp434E2220 (NM_017612.2,2083-2101).
caacggccactaaaattca

SEQ ID NO: 359580 - DNA, 19 bp, Homo sapiens
  siRNA target sequence for DKFZp434E2220 (NM_017612.2,2115-2133).
gacatgagcaaatttgcaa

SEQ ID NO: 359581 - DNA, 19 bp, Homo sapiens
  siRNA target sequence for DKFZp434E2220 (NM_017612.2,2134-2152).
ctggaatcacgccatttga

SEQ ID NO: 359582 - DNA, 19 bp, Homo sapiens
  siRNA target sequence for DKFZp434E2220 (NM_017612.2,2136-2154).
ggaatcacgccatttgaat

SEQ ID NO: 359583 - DNA, 19 bp, Homo sapiens
  siRNA target sequence for DKFZp434E2220 (NM_017612.2,2137-2155).
gaatcacgccatttgaatt

SEQ ID NO: 359584 - DNA, 19 bp, Homo sapiens
  siRNA target sequence for DKFZp434E2220 (NM_017612.2,2159-2177).
gaatatggcagaatctact

SEQ ID NO: 359585 - DNA, 19 bp, Homo sapiens
  siRNA target sequence for DKFZp434E2220 (NM_017612.2,2178-2196).
ggaatgtacctcaggataa

SEQ ID NO: 359586 - DNA, 19 bp, Homo sapiens
  siRNA target sequence for DKFZp434E2220 (NM_017612.2,2189-2207).
caggataagaagcttgtta

SEQ ID NO: 359587 - DNA, 19 bp, Homo sapiens
  siRNA target sequence for FLJ20003 (NM_017615.1,278-296).
gccagatccgccatcagta

SEQ ID NO: 359588 - DNA, 19 bp, Homo sapiens
  siRNA target sequence for FLJ20003 (NM_017615.1,327-345).
ccgtgaggacatactgaat

SEQ ID NO: 359589 - DNA, 19 bp, Homo sapiens
  siRNA target sequence for FLJ20003 (NM_017615.1,340-358).
ctgaatgccggtgacaaat

SEQ ID NO: 359590 - DNA, 19 bp, Homo sapiens
  siRNA target sequence for FLJ20003 (NM_017615.1,342-360).
gaatgccggtgacaaatta

SEQ ID NO: 359591 - DNA, 19 bp, Homo sapiens
  siRNA target sequence for FLJ20003 (NM_017615.1,347-365).
ccggtgacaaattaacaga

SEQ ID NO: 359592 - DNA, 19 bp, Homo sapiens
  siRNA target sequence for FLJ20003 (NM_017615.1,378-396).
ggctaacactctgtttaat

SEQ ID NO: 359593 - DNA, 19 bp, Homo sapiens
  siRNA target sequence for FLJ20003 (NM_017615.1,500-518).
cctttgacatgttaagata

SEQ ID NO: 359594 - DNA, 19 bp, Homo sapiens
  siRNA target sequence for FLJ20003 (NM_017615.1,573-591).
catccgtgatgaagatagt

SEQ ID NO: 359595 - DNA, 19 bp, Homo sapiens
  siRNA target sequence for FLJ20003 (NM_017615.1,612-630).
ctatgactcctggaagata

SEQ ID NO: 359596 - DNA, 19 bp, Homo sapiens
  siRNA target sequence for FLJ20003 (NM_017615.1,643-661).
gcagaaaacacctttaata

SEQ ID NO: 359597 - DNA, 19 bp, Homo sapiens
  siRNA target sequence for FLJ20003 (NM_017615.1,665-683).
cccatacattccactttct

SEQ ID NO: 359598 - DNA, 19 bp, Homo sapiens
  siRNA target sequence for FLJ20003 (NM_017615.1,714-732).
gccaaagccacgagttgat

SEQ ID NO: 359599 - DNA, 19 bp, Homo sapiens
  siRNA target sequence for FLJ20003 (NM_017615.1,740-758).
gaaaagttcctgtgataca

SEQ ID NO: 359600 - DNA, 19 bp, Homo sapiens
  siRNA target sequence for FLJ20003 (NM_017615.1,769-787).
gcaatgcctgcccagttaa

SEQ ID NO: 359601 - DNA, 19 bp, Homo sapiens
  siRNA target sequence for FLJ20003 (NM_017615.1,774-792).
gcctgcccagttaagaaga

SEQ ID NO: 359602 - DNA, 19 bp, Homo sapiens
  siRNA target sequence for FLJ20003 (NM_017615.1,776-794).
ctgcccagttaagaagaat

SEQ ID NO: 359603 - DNA, 19 bp, Homo sapiens
  siRNA target sequence for FLJ20003 (NM_017615.1,795-813).
ggaagaatctcatcaagaa

SEQ ID NO: 359604 - DNA, 19 bp, Homo sapiens
  siRNA target sequence for FLJ20003 (NM_017615.1,855-873).
gacatattttcgagaagat

SEQ ID NO: 359605 - DNA, 19 bp, Homo sapiens
  siRNA target sequence for FLJ20003 (NM_017615.1,883-901).
ccaatgtccttctttgact

SEQ ID NO: 359606 - DNA, 19 bp, Homo sapiens
  siRNA target sequence for FLJ20003 (NM_017615.1,884-902).
caatgtccttctttgactt

SEQ ID NO: 359607 - DNA, 19 bp, Homo sapiens
  siRNA target sequence for FLJ20003 (NM_017615.1,928-946).
cgtacagtggaaaacatct

SEQ ID NO: 359608 - DNA, 19 bp, Homo sapiens
  siRNA target sequence for FLJ20003 (NM_017615.1,960-978).
cattatacgggatggtttt

SEQ ID NO: 359609 - DNA, 19 bp, Homo sapiens
  siRNA target sequence for FLJ20003 (NM_017615.1,1012-1030).
gtaatagagcctgttagta

SEQ ID NO: 359610 - DNA, 19 bp, Homo sapiens
  siRNA target sequence for FLJ20003 (NM_017615.1,1020-1038).
gcctgttagtattaatgaa

SEQ ID NO: 359611 - DNA, 19 bp, Homo sapiens
  siRNA target sequence for FLJ20003 (NM_017615.1,1054-1072).
gaacataacacacaagtta

SEQ ID NO: 359612 - DNA, 19 bp, Homo sapiens
  siRNA target sequence for FLJ20003 (NM_017615.1,1057-1075).
cataacacacaagttagaa

SEQ ID NO: 359613 - DNA, 19 bp, Homo sapiens
  siRNA target sequence for FLJ20006 (NM_017618.1,902-920).
gagacccggtcgcatttca

SEQ ID NO: 359614 - DNA, 19 bp, Homo sapiens
  siRNA target sequence for FLJ20006 (NM_017618.1,998-1016).
gcagaacgcacccataact

SEQ ID NO: 359615 - DNA, 19 bp, Homo sapiens
  siRNA target sequence for FLJ20006 (NM_017618.1,999-1017).
cagaacgcacccataactt

SEQ ID NO: 359616 - DNA, 19 bp, Homo sapiens
  siRNA target sequence for FLJ20006 (NM_017618.1,1028-1046).
ggaggatggatggcaaata

SEQ ID NO: 359617 - DNA, 19 bp, Homo sapiens
  siRNA target sequence for FLJ20006 (NM_017618.1,1029-1047).
gaggatggatggcaaataa

SEQ ID NO: 359618 - DNA, 19 bp, Homo sapiens
  siRNA target sequence for FLJ20006 (NM_017618.1,1031-1049).
ggatggatggcaaataata

SEQ ID NO: 359619 - DNA, 19 bp, Homo sapiens
  siRNA target sequence for FLJ20006 (NM_017618.1,1053-1071).
gcgactgaagggttaatta

SEQ ID NO: 359620 - DNA, 19 bp, Homo sapiens
  siRNA target sequence for FLJ20006 (NM_017618.1,1054-1072).
cgactgaagggttaattaa

SEQ ID NO: 359621 - DNA, 19 bp, Homo sapiens
  siRNA target sequence for FLJ20006 (NM_017618.1,1055-1073).
gactgaagggttaattaat

SEQ ID NO: 359622 - DNA, 19 bp, Homo sapiens
  siRNA target sequence for FLJ25070 (NM_017619.2,109-127).
gcagccgcttgcgatatca

SEQ ID NO: 359623 - DNA, 19 bp, Homo sapiens
  siRNA target sequence for FLJ25070 (NM_017619.2,110-128).
cagccgcttgcgatatcaa

SEQ ID NO: 359624 - DNA, 19 bp, Homo sapiens
  siRNA target sequence for FLJ25070 (NM_017619.2,345-363).
gactccatcaactgaaact

SEQ ID NO: 359625 - DNA, 19 bp, Homo sapiens
  siRNA target sequence for FLJ25070 (NM_017619.2,347-365).
ctccatcaactgaaacttt

SEQ ID NO: 359626 - DNA, 19 bp, Homo sapiens
  siRNA target sequence for FLJ25070 (NM_017619.2,358-376).
gaaacttttaggtcatact

SEQ ID NO: 359627 - DNA, 19 bp, Homo sapiens
  siRNA target sequence for FLJ25070 (NM_017619.2,371-389).
catactttagtcgttgaat

SEQ ID NO: 359628 - DNA, 19 bp, Homo sapiens
  siRNA target sequence for FLJ25070 (NM_017619.2,461-479).
gaccctgtcgaagatgata

SEQ ID NO: 359629 - DNA, 19 bp, Homo sapiens
  siRNA target sequence for FLJ25070 (NM_017619.2,558-576).
catgcctcaagtatatgta

SEQ ID NO: 359630 - DNA, 19 bp, Homo sapiens
  siRNA target sequence for FLJ25070 (NM_017619.2,623-641).
gcaagcgtgcctaagttct

SEQ ID NO: 359631 - DNA, 19 bp, Homo sapiens
  siRNA target sequence for FLJ25070 (NM_017619.2,624-642).
caagcgtgcctaagttcta

SEQ ID NO: 359632 - DNA, 19 bp, Homo sapiens
  siRNA target sequence for FLJ25070 (NM_017619.2,627-645).
gcgtgcctaagttctatgt

SEQ ID NO: 359633 - DNA, 19 bp, Homo sapiens
  siRNA target sequence for FLJ25070 (NM_017619.2,628-646).
cgtgcctaagttctatgta

SEQ ID NO: 359634 - DNA, 19 bp, Homo sapiens
  siRNA target sequence for FLJ25070 (NM_017619.2,644-662).
gtacaggtccttcatctta

SEQ ID NO: 359635 - DNA, 19 bp, Homo sapiens
  siRNA target sequence for FLJ25070 (NM_017619.2,649-667).
ggtccttcatcttatgaat

SEQ ID NO: 359636 - DNA, 19 bp, Homo sapiens
  siRNA target sequence for FLJ25070 (NM_017619.2,650-668).
gtccttcatcttatgaata

SEQ ID NO: 359637 - DNA, 19 bp, Homo sapiens
  siRNA target sequence for FLJ25070 (NM_017619.2,705-723).
cgcgacctcccatgtatga

SEQ ID NO: 359638 - DNA, 19 bp, Homo sapiens
  siRNA target sequence for FLJ25070 (NM_017619.2,706-724).
gcgacctcccatgtatgaa

SEQ ID NO: 359639 - DNA, 19 bp, Homo sapiens
  siRNA target sequence for FLJ25070 (NM_017619.2,708-726).
gacctcccatgtatgaaga

SEQ ID NO: 359640 - DNA, 19 bp, Homo sapiens
  siRNA target sequence for FLJ25070 (NM_017619.2,796-814).
cgaggatgaggaattatct

SEQ ID NO: 359641 - DNA, 19 bp, Homo sapiens
  siRNA target sequence for FLJ25070 (NM_017619.2,893-911).
cagcccaaaagacctaaaa

SEQ ID NO: 359642 - DNA, 19 bp, Homo sapiens
  siRNA target sequence for FLJ25070 (NM_017619.2,895-913).
gcccaaaagacctaaaaca

SEQ ID NO: 359643 - DNA, 19 bp, Homo sapiens
  siRNA target sequence for FLJ25070 (NM_017619.2,919-937).
gcagcgccatgtgagaaaa

SEQ ID NO: 359644 - DNA, 19 bp, Homo sapiens
  siRNA target sequence for FLJ25070 (NM_017619.2,920-938).
cagcgccatgtgagaaaaa

SEQ ID NO: 359645 - DNA, 19 bp, Homo sapiens
  siRNA target sequence for FLJ25070 (NM_017619.2,1004-1022).
ctgttaccttcagatgtat

SEQ ID NO: 359646 - DNA, 19 bp, Homo sapiens
  siRNA target sequence for FLJ25070 (NM_017619.2,1037-1055).
cctgtaggtaacaaaagaa

SEQ ID NO: 359647 - DNA, 19 bp, Homo sapiens
  siRNA target sequence for FLJ25070 (NM_017619.2,1038-1056).
ctgtaggtaacaaaagaat

SEQ ID NO: 359648 - DNA, 19 bp, Homo sapiens
  siRNA target sequence for FLJ25070 (NM_017619.2,1167-1185).
ccaatataggatttggaaa

SEQ ID NO: 359649 - DNA, 19 bp, Homo sapiens
  siRNA target sequence for FLJ25070 (NM_017619.2,1337-1355).
ccgggtgaaccaaactgta

SEQ ID NO: 359650 - DNA, 19 bp, Homo sapiens
  siRNA target sequence for FLJ25070 (NM_017619.2,1353-1371).
gtagaatttatgtaaagaa

SEQ ID NO: 359651 - DNA, 19 bp, Homo sapiens
  siRNA target sequence for FLJ25070 (NM_017619.2,1369-1387).
gaatttagctaaacatgtt

SEQ ID NO: 359652 - DNA, 19 bp, Homo sapiens
  siRNA target sequence for FLJ25070 (NM_017619.2,1443-1461).
cacagcggatcatgtttga

SEQ ID NO: 359653 - DNA, 19 bp, Homo sapiens
  siRNA target sequence for FLJ25070 (NM_017619.2,1445-1463).
cagcggatcatgtttgata

SEQ ID NO: 359654 - DNA, 19 bp, Homo sapiens
  siRNA target sequence for FLJ25070 (NM_017619.2,1447-1465).
gcggatcatgtttgatata

SEQ ID NO: 359655 - DNA, 19 bp, Homo sapiens
  siRNA target sequence for FLJ25070 (NM_017619.2,1485-1503).
gtatgaaaggacaagcttt

SEQ ID NO: 359656 - DNA, 19 bp, Homo sapiens
  siRNA target sequence for FLJ25070 (NM_017619.2,1504-1522).
cattggacttcctaatgaa

SEQ ID NO: 359657 - DNA, 19 bp, Homo sapiens
  siRNA target sequence for FLJ25070 (NM_017619.2,1599-1617).
gatctgctagaccaaaaca

SEQ ID NO: 359658 - DNA, 19 bp, Homo sapiens
  siRNA target sequence for FLJ25070 (NM_017619.2,1602-1620).
ctgctagaccaaaacaaga

SEQ ID NO: 359659 - DNA, 19 bp, Homo sapiens
  siRNA target sequence for FLJ20013 (NM_017621.2,327-345).
gactatggccccaaagtca

SEQ ID NO: 359660 - DNA, 19 bp, Homo sapiens
  siRNA target sequence for CNNM3 (NM_017623.3,1464-1482).
gttcaaggtgtctgatgat

SEQ ID NO: 359661 - DNA, 19 bp, Homo sapiens
  siRNA target sequence for CNNM3 (NM_017623.3,1538-1556).
cccgagaagtggatgtatt

SEQ ID NO: 359662 - DNA, 19 bp, Homo sapiens
  siRNA target sequence for CNNM3 (NM_017623.3,1676-1694).
gcagccagccggtggatta

SEQ ID NO: 359663 - DNA, 19 bp, Homo sapiens
  siRNA target sequence for CNNM3 (NM_017623.3,1681-1699).
cagccggtggattacttca

SEQ ID NO: 359664 - DNA, 19 bp, Homo sapiens
  siRNA target sequence for CNNM3 (NM_017623.3,1683-1701).
gccggtggattacttcatt

SEQ ID NO: 359665 - DNA, 19 bp, Homo sapiens
  siRNA target sequence for CNNM3 (NM_017623.3,1781-1799).
gagtgtcggccctaactgt

SEQ ID NO: 359666 - DNA, 19 bp, Homo sapiens
  siRNA target sequence for CNNM3 (NM_017623.3,2019-2037).
cgacctgcaggttattcca

SEQ ID NO: 359667 - DNA, 19 bp, Homo sapiens
  siRNA target sequence for FLJ20032 (NM_017628.2,622-640).
cgtgtgagtcctgacttta

SEQ ID NO: 359668 - DNA, 19 bp, Homo sapiens
  siRNA target sequence for FLJ20032 (NM_017628.2,634-652).
gactttacacaagaaagta

SEQ ID NO: 359669 - DNA, 19 bp, Homo sapiens
  siRNA target sequence for FLJ20032 (NM_017628.2,653-671).
gagggtattccaagtgttt

SEQ ID NO: 359670 - DNA, 19 bp, Homo sapiens
  siRNA target sequence for FLJ20032 (NM_017628.2,682-700).
ggaataaaacgcacagtta

SEQ ID NO: 359671 - DNA, 19 bp, Homo sapiens
  siRNA target sequence for FLJ20032 (NM_017628.2,720-738).
gctccttcagatcaagaaa

SEQ ID NO: 359672 - DNA, 19 bp, Homo sapiens
  siRNA target sequence for FLJ20032 (NM_017628.2,820-838).
ccaaatgtctccgatttga

SEQ ID NO: 359673 - DNA, 19 bp, Homo sapiens
  siRNA target sequence for FLJ20032 (NM_017628.2,826-844).
gtctccgatttgagtgata

SEQ ID NO: 359674 - DNA, 19 bp, Homo sapiens
  siRNA target sequence for FLJ20032 (NM_017628.2,896-914).
ccagtttttcaacacataa

SEQ ID NO: 359675 - DNA, 19 bp, Homo sapiens
  siRNA target sequence for FLJ20032 (NM_017628.2,918-936).
cagtgggcctgaaaatcca

SEQ ID NO: 359676 - DNA, 19 bp, Homo sapiens
  siRNA target sequence for FLJ20032 (NM_017628.2,935-953).
cagagcttcagattctgaa

SEQ ID NO: 359677 - DNA, 19 bp, Homo sapiens
  siRNA target sequence for FLJ20032 (NM_017628.2,960-978).
ggaggggaaaagtgctaat

SEQ ID NO: 359678 - DNA, 19 bp, Homo sapiens
  siRNA target sequence for FLJ20032 (NM_017628.2,961-979).
gaggggaaaagtgctaatt

SEQ ID NO: 359679 - DNA, 19 bp, Homo sapiens
  siRNA target sequence for FLJ20032 (NM_017628.2,974-992).
ctaattaccatgacaagaa

SEQ ID NO: 359680 - DNA, 19 bp, Homo sapiens
  siRNA target sequence for FLJ20032 (NM_017628.2,990-1008).
gaacattgtattacttaaa

SEQ ID NO: 359681 - DNA, 19 bp, Homo sapiens
  siRNA target sequence for FLJ20032 (NM_017628.2,1026-1044).
gcctaatggtgctacagtt

SEQ ID NO: 359682 - DNA, 19 bp, Homo sapiens
  siRNA target sequence for FLJ20032 (NM_017628.2,1027-1045).
cctaatggtgctacagttt

SEQ ID NO: 359683 - DNA, 19 bp, Homo sapiens
  siRNA target sequence for FLJ20032 (NM_017628.2,1147-1165).
cacataaatgccattaaca

SEQ ID NO: 359684 - DNA, 19 bp, Homo sapiens
  siRNA target sequence for FLJ20032 (NM_017628.2,1166-1184).
gtcaggctactaatgagtt

SEQ ID NO: 359685 - DNA, 19 bp, Homo sapiens
  siRNA target sequence for FLJ20032 (NM_017628.2,1233-1251).
cgcacagacctctaactct

SEQ ID NO: 359686 - DNA, 19 bp, Homo sapiens
  siRNA target sequence for FLJ20032 (NM_017628.2,1440-1458).
gctagcgtctggtgaagaa

SEQ ID NO: 359687 - DNA, 19 bp, Homo sapiens
  siRNA target sequence for FLJ20032 (NM_017628.2,1441-1459).
ctagcgtctggtgaagaat

SEQ ID NO: 359688 - DNA, 19 bp, Homo sapiens
  siRNA target sequence for FLJ20032 (NM_017628.2,1444-1462).
gcgtctggtgaagaattct

SEQ ID NO: 359689 - DNA, 19 bp, Homo sapiens
  siRNA target sequence for FLJ20032 (NM_017628.2,1500-1518).
cagctctgaacggtattta

SEQ ID NO: 359690 - DNA, 19 bp, Homo sapiens
  siRNA target sequence for FLJ20032 (NM_017628.2,1537-1555).
ggtgcttacttcaagcaaa

SEQ ID NO: 359691 - DNA, 19 bp, Homo sapiens
  siRNA target sequence for FLJ20032 (NM_017628.2,1566-1584).
cactaaggattccttttct

SEQ ID NO: 359692 - DNA, 19 bp, Homo sapiens
  siRNA target sequence for FLJ20032 (NM_017628.2,1606-1624).
ccatcacaattgcttcttt

SEQ ID NO: 359693 - DNA, 19 bp, Homo sapiens
  siRNA target sequence for FLJ20032 (NM_017628.2,1708-1726).
caccactaccccaaccaaa

SEQ ID NO: 359694 - DNA, 19 bp, Homo sapiens
  siRNA target sequence for FLJ20032 (NM_017628.2,1736-1754).
cacttttaagggaagtgaa

SEQ ID NO: 359695 - DNA, 19 bp, Homo sapiens
  siRNA target sequence for FLJ20032 (NM_017628.2,1841-1859).
ggcctcagaataattgtgt

SEQ ID NO: 359696 - DNA, 19 bp, Homo sapiens
  siRNA target sequence for FLJ20032 (NM_017628.2,1941-1959).
caagcataacccaccaatt

SEQ ID NO: 359697 - DNA, 19 bp, Homo sapiens
  siRNA target sequence for FLJ20032 (NM_017628.2,2085-2103).
gaaaccaggatggattgaa

SEQ ID NO: 359698 - DNA, 19 bp, Homo sapiens
  siRNA target sequence for FLJ20032 (NM_017628.2,2090-2108).
caggatggattgaattgaa

SEQ ID NO: 359699 - DNA, 19 bp, Homo sapiens
  siRNA target sequence for FLJ20032 (NM_017628.2,2125-2143).
caagcggaatcccatctaa

SEQ ID NO: 359700 - DNA, 19 bp, Homo sapiens
  siRNA target sequence for FLJ20032 (NM_017628.2,2130-2148).
ggaatcccatctaaaacgt

SEQ ID NO: 359701 - DNA, 19 bp, Homo sapiens
  siRNA target sequence for FLJ20032 (NM_017628.2,2176-2194).
cagtatcaacccaatctct

SEQ ID NO: 359702 - DNA, 19 bp, Homo sapiens
  siRNA target sequence for FLJ20032 (NM_017628.2,2205-2223).
gacctccaaacaatacact

SEQ ID NO: 359703 - DNA, 19 bp, Homo sapiens
  siRNA target sequence for FLJ20032 (NM_017628.2,2287-2305).
gagcacaagtcacaaatgt

SEQ ID NO: 359704 - DNA, 19 bp, Homo sapiens
  siRNA target sequence for FLJ20032 (NM_017628.2,2433-2451).
gtgtggcactagatttcat

SEQ ID NO: 359705 - DNA, 19 bp, Homo sapiens
  siRNA target sequence for FLJ20032 (NM_017628.2,2435-2453).
gtggcactagatttcattt

SEQ ID NO: 359706 - DNA, 19 bp, Homo sapiens
  siRNA target sequence for FLJ20032 (NM_017628.2,2691-2709).
cccccaaagcaacaatgat

SEQ ID NO: 359707 - DNA, 19 bp, Homo sapiens
  siRNA target sequence for FLJ20032 (NM_017628.2,2764-2782).
ggtgaaaatcagtattcaa

SEQ ID NO: 359708 - DNA, 19 bp, Homo sapiens
  siRNA target sequence for FLJ20032 (NM_017628.2,2789-2807).
gcgagttcgagactcataa

SEQ ID NO: 359709 - DNA, 19 bp, Homo sapiens
  siRNA target sequence for FLJ20032 (NM_017628.2,2790-2808).
cgagttcgagactcataat

SEQ ID NO: 359710 - DNA, 19 bp, Homo sapiens
  siRNA target sequence for FLJ20032 (NM_017628.2,2845-2863).
cgtagaaattccccttata

SEQ ID NO: 359711 - DNA, 19 bp, Homo sapiens
  siRNA target sequence for FLJ20032 (NM_017628.2,2898-2916).
ggtttcttgttcaaacaat

SEQ ID NO: 359712 - DNA, 19 bp, Homo sapiens
  siRNA target sequence for FLJ20032 (NM_017628.2,2899-2917).
gtttcttgttcaaacaata

SEQ ID NO: 359713 - DNA, 19 bp, Homo sapiens
  siRNA target sequence for FLJ20032 (NM_017628.2,2903-2921).
cttgttcaaacaatacaca

SEQ ID NO: 359714 - DNA, 19 bp, Homo sapiens
  siRNA target sequence for FLJ20032 (NM_017628.2,2913-2931).
caatacacacctagtttca

SEQ ID NO: 359715 - DNA, 19 bp, Homo sapiens
  siRNA target sequence for FLJ20032 (NM_017628.2,2922-2940).
cctagtttcagagaataaa

SEQ ID NO: 359716 - DNA, 19 bp, Homo sapiens
  siRNA target sequence for FLJ20032 (NM_017628.2,2946-2964).
gactacacatcctgaactt

SEQ ID NO: 359717 - DNA, 19 bp, Homo sapiens
  siRNA target sequence for FLJ20032 (NM_017628.2,2948-2966).
ctacacatcctgaactttt

SEQ ID NO: 359718 - DNA, 19 bp, Homo sapiens
  siRNA target sequence for FLJ20032 (NM_017628.2,2981-2999).
cccaaaacttgcatcacat

SEQ ID NO: 359719 - DNA, 19 bp, Homo sapiens
  siRNA target sequence for FLJ20032 (NM_017628.2,3086-3104).
cagttctacagggatataa

SEQ ID NO: 359720 - DNA, 19 bp, Homo sapiens
  siRNA target sequence for FLJ20032 (NM_017628.2,3165-3183).
gatacataaccatgcaaat

SEQ ID NO: 359721 - DNA, 19 bp, Homo sapiens
  siRNA target sequence for FLJ20032 (NM_017628.2,3439-3457).
ccacctgcaagctgtgata

SEQ ID NO: 359722 - DNA, 19 bp, Homo sapiens
  siRNA target sequence for FLJ20032 (NM_017628.2,3462-3480).
gcagcaaaagagcatcatt

SEQ ID NO: 359723 - DNA, 19 bp, Homo sapiens
  siRNA target sequence for FLJ20032 (NM_017628.2,3537-3555).
ggctcttactctcaaatca

SEQ ID NO: 359724 - DNA, 19 bp, Homo sapiens
  siRNA target sequence for FLJ20032 (NM_017628.2,3585-3603).
gccagtcacagttttgact

SEQ ID NO: 359725 - DNA, 19 bp, Homo sapiens
  siRNA target sequence for FLJ20032 (NM_017628.2,3586-3604).
ccagtcacagttttgacta

SEQ ID NO: 359726 - DNA, 19 bp, Homo sapiens
  siRNA target sequence for FLJ20032 (NM_017628.2,3591-3609).
cacagttttgactagacaa

SEQ ID NO: 359727 - DNA, 19 bp, Homo sapiens
  siRNA target sequence for FLJ20032 (NM_017628.2,3632-3650).
gccacaccccagctttaga

SEQ ID NO: 359728 - DNA, 19 bp, Homo sapiens
  siRNA target sequence for FLJ20032 (NM_017628.2,3725-3743).
caccttccaaattactaga

SEQ ID NO: 359729 - DNA, 19 bp, Homo sapiens
  siRNA target sequence for FLJ20032 (NM_017628.2,3742-3760).
gatactcctataaaaaatt

SEQ ID NO: 359730 - DNA, 19 bp, Homo sapiens
  siRNA target sequence for FLJ20032 (NM_017628.2,3773-3791).
ctgtcaagactcaatatga

SEQ ID NO: 359731 - DNA, 19 bp, Homo sapiens
  siRNA target sequence for FLJ20032 (NM_017628.2,3800-3818).
cttgcagatgtgtaggtaa

SEQ ID NO: 359732 - DNA, 19 bp, Homo sapiens
  siRNA target sequence for FLJ20032 (NM_017628.2,3814-3832).
ggtaagtgccagaaatgta

SEQ ID NO: 359733 - DNA, 19 bp, Homo sapiens
  siRNA target sequence for FLJ20032 (NM_017628.2,3846-3864).
cgtttatccagaattagca

SEQ ID NO: 359734 - DNA, 19 bp, Homo sapiens
  siRNA target sequence for EIF2C4 (NM_017629.2,213-231).
ctccggctagcctgtttca

SEQ ID NO: 359735 - DNA, 19 bp, Homo sapiens
  siRNA target sequence for EIF2C4 (NM_017629.2,255-273).
gaactgttggaaaaccaat

SEQ ID NO: 359736 - DNA, 19 bp, Homo sapiens
  siRNA target sequence for EIF2C4 (NM_017629.2,275-293).
cgactgttagccaatcatt

SEQ ID NO: 359737 - DNA, 19 bp, Homo sapiens
  siRNA target sequence for EIF2C4 (NM_017629.2,309-327).
ctaaaatagatgtgtatca

SEQ ID NO: 359738 - DNA, 19 bp, Homo sapiens
  siRNA target sequence for EIF2C4 (NM_017629.2,370-388).
caacagggaggtagtagat

SEQ ID NO: 359739 - DNA, 19 bp, Homo sapiens
  siRNA target sequence for EIF2C4 (NM_017629.2,390-408).
caatggtgcggcacttcaa

SEQ ID NO: 359740 - DNA, 19 bp, Homo sapiens
  siRNA target sequence for EIF2C4 (NM_017629.2,398-416).
cggcacttcaagatgcaaa

SEQ ID NO: 359741 - DNA, 19 bp, Homo sapiens
  siRNA target sequence for EIF2C4 (NM_017629.2,399-417).
ggcacttcaagatgcaaat

SEQ ID NO: 359742 - DNA, 19 bp, Homo sapiens
  siRNA target sequence for EIF2C4 (NM_017629.2,485-503).
ggacgggatagggttgata

SEQ ID NO: 359743 - DNA, 19 bp, Homo sapiens
  siRNA target sequence for EIF2C4 (NM_017629.2,486-504).
gacgggatagggttgatat

SEQ ID NO: 359744 - DNA, 19 bp, Homo sapiens
  siRNA target sequence for EIF2C4 (NM_017629.2,524-542).
gagggtaaagaccaaacat

SEQ ID NO: 359745 - DNA, 19 bp, Homo sapiens
  siRNA target sequence for EIF2C4 (NM_017629.2,641-659).
gcacttgatgttatcacaa

SEQ ID NO: 359746 - DNA, 19 bp, Homo sapiens
  siRNA target sequence for EIF2C4 (NM_017629.2,835-853).
ccgggctcagcctatcatt

SEQ ID NO: 359747 - DNA, 19 bp, Homo sapiens
  siRNA target sequence for EIF2C4 (NM_017629.2,837-855).
gggctcagcctatcattga

SEQ ID NO: 359748 - DNA, 19 bp, Homo sapiens
  siRNA target sequence for EIF2C4 (NM_017629.2,839-857).
gctcagcctatcattgagt

SEQ ID NO: 359749 - DNA, 19 bp, Homo sapiens
  siRNA target sequence for EIF2C4 (NM_017629.2,840-858).
ctcagcctatcattgagtt

SEQ ID NO: 359750 - DNA, 19 bp, Homo sapiens
  siRNA target sequence for EIF2C4 (NM_017629.2,845-863).
cctatcattgagttcatgt

SEQ ID NO: 359751 - DNA, 19 bp, Homo sapiens
  siRNA target sequence for EIF2C4 (NM_017629.2,856-874).
gttcatgtgtgaggtttta

SEQ ID NO: 359752 - DNA, 19 bp, Homo sapiens
  siRNA target sequence for EIF2C4 (NM_017629.2,914-932).
gactcccagcgtgtcaaat

SEQ ID NO: 359753 - DNA, 19 bp, Homo sapiens
  siRNA target sequence for EIF2C4 (NM_017629.2,922-940).
gcgtgtcaaatttaccaaa

SEQ ID NO: 359754 - DNA, 19 bp, Homo sapiens
  siRNA target sequence for EIF2C4 (NM_017629.2,977-995).
ggacagatgaaacgaaaat

SEQ ID NO: 359755 - DNA, 19 bp, Homo sapiens
  siRNA target sequence for EIF2C4 (NM_017629.2,978-996).
gacagatgaaacgaaaata

SEQ ID NO: 359756 - DNA, 19 bp, Homo sapiens
  siRNA target sequence for EIF2C4 (NM_017629.2,1077-1095).
gtacagtagctcaatattt

SEQ ID NO: 359757 - DNA, 19 bp, Homo sapiens
  siRNA target sequence for EIF2C4 (NM_017629.2,1331-1349).
ggacctgatccatacctta

SEQ ID NO: 359758 - DNA, 19 bp, Homo sapiens
  siRNA target sequence for EIF2C4 (NM_017629.2,1337-1355).
gatccataccttaaagaat

SEQ ID NO: 359759 - DNA, 19 bp, Homo sapiens
  siRNA target sequence for EIF2C4 (NM_017629.2,1364-1382).
gttgtccacaatgaaatga

SEQ ID NO: 359760 - DNA, 19 bp, Homo sapiens
  siRNA target sequence for EIF2C4 (NM_017629.2,1535-1553).
gcacctcagaaacaatgta

SEQ ID NO: 359761 - DNA, 19 bp, Homo sapiens
  siRNA target sequence for EIF2C4 (NM_017629.2,1551-1569).
gtagggaagatttactaaa

SEQ ID NO: 359762 - DNA, 19 bp, Homo sapiens
  siRNA target sequence for EIF2C4 (NM_017629.2,2136-2154).
gagagctgctgattcagtt

SEQ ID NO: 359763 - DNA, 19 bp, Homo sapiens
  siRNA target sequence for EIF2C4 (NM_017629.2,2177-2195).
cccactcggatcatctatt

SEQ ID NO: 359764 - DNA, 19 bp, Homo sapiens
  siRNA target sequence for EIF2C4 (NM_017629.2,2205-2223).
gggtatctgagggacaaat

SEQ ID NO: 359765 - DNA, 19 bp, Homo sapiens
  siRNA target sequence for EIF2C4 (NM_017629.2,2207-2225).
gtatctgagggacaaatga

SEQ ID NO: 359766 - DNA, 19 bp, Homo sapiens
  siRNA target sequence for EIF2C4 (NM_017629.2,2238-2256).
ggccagaactaatagcaat

SEQ ID NO: 359767 - DNA, 19 bp, Homo sapiens
  siRNA target sequence for EIF2C4 (NM_017629.2,2239-2257).
gccagaactaatagcaatt

SEQ ID NO: 359768 - DNA, 19 bp, Homo sapiens
  siRNA target sequence for EIF2C4 (NM_017629.2,2253-2271).
caattcgaaaggcatgtat

SEQ ID NO: 359769 - DNA, 19 bp, Homo sapiens
  siRNA target sequence for EIF2C4 (NM_017629.2,2258-2276).
cgaaaggcatgtattagct

SEQ ID NO: 359770 - DNA, 19 bp, Homo sapiens
  siRNA target sequence for EIF2C4 (NM_017629.2,2259-2277).
gaaaggcatgtattagctt

SEQ ID NO: 359771 - DNA, 19 bp, Homo sapiens
  siRNA target sequence for EIF2C4 (NM_017629.2,2268-2286).
gtattagcttggaagaaga

SEQ ID NO: 359772 - DNA, 19 bp, Homo sapiens
  siRNA target sequence for EIF2C4 (NM_017629.2,2285-2303).
gattaccggccaggaataa

SEQ ID NO: 359773 - DNA, 19 bp, Homo sapiens
  siRNA target sequence for EIF2C4 (NM_017629.2,2393-2411).
ggcactacagtggatagta

SEQ ID NO: 359774 - DNA, 19 bp, Homo sapiens
  siRNA target sequence for EIF2C4 (NM_017629.2,2418-2436).
cacatccatctgagtttga

SEQ ID NO: 359775 - DNA, 19 bp, Homo sapiens
  siRNA target sequence for EIF2C4 (NM_017629.2,2446-2464).
ctgtagtcatgcaggaatt

SEQ ID NO: 359776 - DNA, 19 bp, Homo sapiens
  siRNA target sequence for EIF2C4 (NM_017629.2,2472-2490).
ccagccgtccctcacatta

SEQ ID NO: 359777 - DNA, 19 bp, Homo sapiens
  siRNA target sequence for C6orf37 (NM_017633.1,790-808).
ctgcctgttggacttctta

SEQ ID NO: 359778 - DNA, 19 bp, Homo sapiens
  siRNA target sequence for C6orf37 (NM_017633.1,846-864).
cgctcaaggaagcttatgt

SEQ ID NO: 359779 - DNA, 19 bp, Homo sapiens
  siRNA target sequence for C6orf37 (NM_017633.1,854-872).
gaagcttatgtgcagaaaa

SEQ ID NO: 359780 - DNA, 19 bp, Homo sapiens
  siRNA target sequence for C6orf37 (NM_017633.1,894-912).
ctgaccgatggagtcttat

SEQ ID NO: 359781 - DNA, 19 bp, Homo sapiens
  siRNA target sequence for C6orf37 (NM_017633.1,896-914).
gaccgatggagtcttatat

SEQ ID NO: 359782 - DNA, 19 bp, Homo sapiens
  siRNA target sequence for C6orf37 (NM_017633.1,965-983).
ctccggaggcagtttgaat

SEQ ID NO: 359783 - DNA, 19 bp, Homo sapiens
  siRNA target sequence for C6orf37 (NM_017633.1,968-986).
cggaggcagtttgaattca

SEQ ID NO: 359784 - DNA, 19 bp, Homo sapiens
  siRNA target sequence for C6orf37 (NM_017633.1,1060-1078).
gacatttcaccccacaata

SEQ ID NO: 359785 - DNA, 19 bp, Homo sapiens
  siRNA target sequence for C6orf37 (NM_017633.1,1089-1107).
gcgtctatggcgatttcca

SEQ ID NO: 359786 - DNA, 19 bp, Homo sapiens
  siRNA target sequence for C6orf37 (NM_017633.1,1121-1139).
cacctttgtaacaagatca

SEQ ID NO: 359787 - DNA, 19 bp, Homo sapiens
  siRNA target sequence for C6orf37 (NM_017633.1,1170-1188).
ggggaggcctgcttaagta

SEQ ID NO: 359788 - DNA, 19 bp, Homo sapiens
  siRNA target sequence for C6orf37 (NM_017633.1,1327-1345).
ccactttgtgggattggaa

SEQ ID NO: 359789 - DNA, 19 bp, Homo sapiens
  siRNA target sequence for C6orf37 (NM_017633.1,1343-1361).
gaagaccgcaagtatgagt

SEQ ID NO: 359790 - DNA, 19 bp, Homo sapiens
  siRNA target sequence for C6orf37 (NM_017633.1,1349-1367).
cgcaagtatgagtatctca

SEQ ID NO: 359791 - DNA, 19 bp, Homo sapiens
  siRNA target sequence for C6orf37 (NM_017633.1,1371-1389).
cccttcatggagtggtaaa

SEQ ID NO: 359792 - DNA, 19 bp, Homo sapiens
  siRNA target sequence for C6orf37 (NM_017633.1,1372-1390).
ccttcatggagtggtaaat

SEQ ID NO: 359793 - DNA, 19 bp, Homo sapiens
  siRNA target sequence for C6orf37 (NM_017633.1,1402-1420).
gtgcctgatgggacatgaa

SEQ ID NO: 359794 - DNA, 19 bp, Homo sapiens
  siRNA target sequence for C6orf37 (NM_017633.1,1405-1423).
cctgatgggacatgaaaga

SEQ ID NO: 359795 - DNA, 19 bp, Homo sapiens
  siRNA target sequence for C6orf37 (NM_017633.1,1425-1443).
gacagactttaaaccttat

SEQ ID NO: 359796 - DNA, 19 bp, Homo sapiens
  siRNA target sequence for C6orf37 (NM_017633.1,1461-1479).
gggtgttagctgaccaaaa

SEQ ID NO: 359797 - DNA, 19 bp, Homo sapiens
  siRNA target sequence for C6orf37 (NM_017633.1,1472-1490).
gaccaaaatgtcattccta

SEQ ID NO: 359798 - DNA, 19 bp, Homo sapiens
  siRNA target sequence for C6orf37 (NM_017633.1,1487-1505).
cctaatgtggctaatgtca

SEQ ID NO: 359799 - DNA, 19 bp, Homo sapiens
  siRNA target sequence for C6orf37 (NM_017633.1,1495-1513).
ggctaatgtcacttgctat

SEQ ID NO: 359800 - DNA, 19 bp, Homo sapiens
  siRNA target sequence for C6orf37 (NM_017633.1,1538-1556).
gatgccaactttagcaatt

SEQ ID NO: 359801 - DNA, 19 bp, Homo sapiens
  siRNA target sequence for C6orf37 (NM_017633.1,1541-1559).
gccaactttagcaattact

SEQ ID NO: 359802 - DNA, 19 bp, Homo sapiens
  siRNA target sequence for KCTD9 (NM_017634.2,740-758).
ggaggatcattcaccaata

SEQ ID NO: 359803 - DNA, 19 bp, Homo sapiens
  siRNA target sequence for KCTD9 (NM_017634.2,741-759).
gaggatcattcaccaatat

SEQ ID NO: 359804 - DNA, 19 bp, Homo sapiens
  siRNA target sequence for KCTD9 (NM_017634.2,754-772).
caatatcccgaaaggaatt

SEQ ID NO: 359805 - DNA, 19 bp, Homo sapiens
  siRNA target sequence for KCTD9 (NM_017634.2,813-831).
cgatgccagggtttgaact

SEQ ID NO: 359806 - DNA, 19 bp, Homo sapiens
  siRNA target sequence for KCTD9 (NM_017634.2,833-851).
cagtggtgctgatctttct

SEQ ID NO: 359807 - DNA, 19 bp, Homo sapiens
  siRNA target sequence for KCTD9 (NM_017634.2,850-868).
ctcgtttggaccttcgata

SEQ ID NO: 359808 - DNA, 19 bp, Homo sapiens
  siRNA target sequence for KCTD9 (NM_017634.2,858-876).
gaccttcgatacattaact

SEQ ID NO: 359809 - DNA, 19 bp, Homo sapiens
  siRNA target sequence for KCTD9 (NM_017634.2,861-879).
cttcgatacattaacttca

SEQ ID NO: 359810 - DNA, 19 bp, Homo sapiens
  siRNA target sequence for KCTD9 (NM_017634.2,887-905).
caatttaagccgctgtaat

SEQ ID NO: 359811 - DNA, 19 bp, Homo sapiens
  siRNA target sequence for KCTD9 (NM_017634.2,1057-1075).
gtcttaaagccaatttaga

SEQ ID NO: 359812 - DNA, 19 bp, Homo sapiens
  siRNA target sequence for KCTD9 (NM_017634.2,1088-1106).
gaaaggtgtggatatggaa

SEQ ID NO: 359813 - DNA, 19 bp, Homo sapiens
  siRNA target sequence for KCTD9 (NM_017634.2,1130-1148).
cctgagagtggctacctta

SEQ ID NO: 359814 - DNA, 19 bp, Homo sapiens
  siRNA target sequence for KCTD9 (NM_017634.2,1131-1149).
ctgagagtggctaccttaa

SEQ ID NO: 359815 - DNA, 19 bp, Homo sapiens
  siRNA target sequence for KCTD9 (NM_017634.2,1155-1173).
gcaaagttgaagaactgta

SEQ ID NO: 359816 - DNA, 19 bp, Homo sapiens
  siRNA target sequence for KCTD9 (NM_017634.2,1265-1283).
cgtgaagggagctatattt

SEQ ID NO: 359817 - DNA, 19 bp, Homo sapiens
  siRNA target sequence for CGI-85 (NM_017635.2,1374-1392).
gcaacttctaaccgaaaat

SEQ ID NO: 359818 - DNA, 19 bp, Homo sapiens
  siRNA target sequence for CGI-85 (NM_017635.2,1393-1411).
cttcagttggcgtaaaaaa

SEQ ID NO: 359819 - DNA, 19 bp, Homo sapiens
  siRNA target sequence for CGI-85 (NM_017635.2,1402-1420).
gcgtaaaaaagaatagcaa

SEQ ID NO: 359820 - DNA, 19 bp, Homo sapiens
  siRNA target sequence for CGI-85 (NM_017635.2,1429-1447).
cgttaacgaggcaatctat

SEQ ID NO: 359821 - DNA, 19 bp, Homo sapiens
  siRNA target sequence for CGI-85 (NM_017635.2,1438-1456).
ggcaatctatgtcaagaat

SEQ ID NO: 359822 - DNA, 19 bp, Homo sapiens
  siRNA target sequence for CGI-85 (NM_017635.2,1458-1476).
ccagcttcttccaactcta

SEQ ID NO: 359823 - DNA, 19 bp, Homo sapiens
  siRNA target sequence for CGI-85 (NM_017635.2,1478-1496).
ctcatctaagctaactcat

SEQ ID NO: 359824 - DNA, 19 bp, Homo sapiens
  siRNA target sequence for CGI-85 (NM_017635.2,1483-1501).
ctaagctaactcatataaa

SEQ ID NO: 359825 - DNA, 19 bp, Homo sapiens
  siRNA target sequence for CGI-85 (NM_017635.2,1510-1528).
gggtaccaaagaaactgaa

SEQ ID NO: 359826 - DNA, 19 bp, Homo sapiens
  siRNA target sequence for CGI-85 (NM_017635.2,1576-1594).
gcaagcggctggagcaaaa

SEQ ID NO: 359827 - DNA, 19 bp, Homo sapiens
  siRNA target sequence for CGI-85 (NM_017635.2,1580-1598).
gcggctggagcaaaagaat

SEQ ID NO: 359828 - DNA, 19 bp, Homo sapiens
  siRNA target sequence for CGI-85 (NM_017635.2,1619-1637).
gggaaacttagtactgaaa

SEQ ID NO: 359829 - DNA, 19 bp, Homo sapiens
  siRNA target sequence for CGI-85 (NM_017635.2,1716-1734).
gccagcgggtgcttgacta

SEQ ID NO: 359830 - DNA, 19 bp, Homo sapiens
  siRNA target sequence for CGI-85 (NM_017635.2,1796-1814).
ctcgccctgcacctacata

SEQ ID NO: 359831 - DNA, 19 bp, Homo sapiens
  siRNA target sequence for CGI-85 (NM_017635.2,1799-1817).
gccctgcacctacataact

SEQ ID NO: 359832 - DNA, 19 bp, Homo sapiens
  siRNA target sequence for CGI-85 (NM_017635.2,1831-1849).
ggacaagaacaaatctgaa

SEQ ID NO: 359833 - DNA, 19 bp, Homo sapiens
  siRNA target sequence for CGI-85 (NM_017635.2,1862-1880).
catcaagcttgaaccaaat

SEQ ID NO: 359834 - DNA, 19 bp, Homo sapiens
  siRNA target sequence for CGI-85 (NM_017635.2,1998-2016).
gaggcaaagtgtcataaga

SEQ ID NO: 359835 - DNA, 19 bp, Homo sapiens
  siRNA target sequence for CGI-85 (NM_017635.2,2025-2043).
ggcatgtccaaaaagaagt

SEQ ID NO: 359836 - DNA, 19 bp, Homo sapiens
  siRNA target sequence for CGI-85 (NM_017635.2,2042-2060).
gtcacgacaaggaaaactt

SEQ ID NO: 359837 - DNA, 19 bp, Homo sapiens
  siRNA target sequence for CGI-85 (NM_017635.2,2044-2062).
cacgacaaggaaaacttgt

SEQ ID NO: 359838 - DNA, 19 bp, Homo sapiens
  siRNA target sequence for CGI-85 (NM_017635.2,2063-2081).
gaaacagtttgcaaaaata

SEQ ID NO: 359839 - DNA, 19 bp, Homo sapiens
  siRNA target sequence for CGI-85 (NM_017635.2,2099-2117).
gcacgattctcctggaaaa

SEQ ID NO: 359840 - DNA, 19 bp, Homo sapiens
  siRNA target sequence for CGI-85 (NM_017635.2,2121-2139).
gacgcggtaccagatttga

SEQ ID NO: 359841 - DNA, 19 bp, Homo sapiens
  siRNA target sequence for CGI-85 (NM_017635.2,2264-2282).
cagctttagaactgcaaaa

SEQ ID NO: 359842 - DNA, 19 bp, Homo sapiens
  siRNA target sequence for CGI-85 (NM_017635.2,2294-2312).
gaggcgaatcacaaggtat

SEQ ID NO: 359843 - DNA, 19 bp, Homo sapiens
  siRNA target sequence for CGI-85 (NM_017635.2,2297-2315).
gcgaatcacaaggtatgat

SEQ ID NO: 359844 - DNA, 19 bp, Homo sapiens
  siRNA target sequence for CGI-85 (NM_017635.2,2361-2379).
cttcgtaggcgtcatgata

SEQ ID NO: 359845 - DNA, 19 bp, Homo sapiens
  siRNA target sequence for CGI-85 (NM_017635.2,2425-2443).
ccaaaataagcatcaagtt

SEQ ID NO: 359846 - DNA, 19 bp, Homo sapiens
  siRNA target sequence for CGI-85 (NM_017635.2,2457-2475).
gacaacgataacaatctct

SEQ ID NO: 359847 - DNA, 19 bp, Homo sapiens
  siRNA target sequence for CGI-85 (NM_017635.2,2459-2477).
caacgataacaatctctat

SEQ ID NO: 359848 - DNA, 19 bp, Homo sapiens
  siRNA target sequence for CGI-85 (NM_017635.2,2462-2480).
cgataacaatctctatgta

SEQ ID NO: 359849 - DNA, 19 bp, Homo sapiens
  siRNA target sequence for CGI-85 (NM_017635.2,2474-2492).
ctatgtagcaaagcttaat

SEQ ID NO: 359850 - DNA, 19 bp, Homo sapiens
  siRNA target sequence for CGI-85 (NM_017635.2,2481-2499).
gcaaagcttaataatggat

SEQ ID NO: 359851 - DNA, 19 bp, Homo sapiens
  siRNA target sequence for CGI-85 (NM_017635.2,2514-2532).
ggcagtagttctacaaaat

SEQ ID NO: 359852 - DNA, 19 bp, Homo sapiens
  siRNA target sequence for CGI-85 (NM_017635.2,2558-2576).
ggaaaatagggggtcttat

SEQ ID NO: 359853 - DNA, 19 bp, Homo sapiens
  siRNA target sequence for CGI-85 (NM_017635.2,2638-2656).
gaatggaggtggatgacta

SEQ ID NO: 359854 - DNA, 19 bp, Homo sapiens
  siRNA target sequence for CGI-85 (NM_017635.2,2733-2751).
gactttgaagacgatttta

SEQ ID NO: 359855 - DNA, 19 bp, Homo sapiens
  siRNA target sequence for CGI-85 (NM_017635.2,2766-2784).
gctaagcgcttgaggttaa

SEQ ID NO: 359856 - DNA, 19 bp, Homo sapiens
  siRNA target sequence for CGI-85 (NM_017635.2,2767-2785).
ctaagcgcttgaggttaat

SEQ ID NO: 359857 - DNA, 19 bp, Homo sapiens
  siRNA target sequence for CGI-85 (NM_017635.2,2771-2789).
gcgcttgaggttaatagtt

SEQ ID NO: 359858 - DNA, 19 bp, Homo sapiens
  siRNA target sequence for CGI-85 (NM_017635.2,2777-2795).
gaggttaatagttggaaaa

SEQ ID NO: 359859 - DNA, 19 bp, Homo sapiens
  siRNA target sequence for CGI-85 (NM_017635.2,2796-2814).
gactctatagatattgaca

SEQ ID NO: 359860 - DNA, 19 bp, Homo sapiens
  siRNA target sequence for FLJ20045 (NM_017638.1,244-262).
ctgggggcaccattaacat

SEQ ID NO: 359861 - DNA, 19 bp, Homo sapiens
  siRNA target sequence for FLJ20045 (NM_017638.1,246-264).
gggggcaccattaacatga

SEQ ID NO: 359862 - DNA, 19 bp, Homo sapiens
  siRNA target sequence for FLJ20045 (NM_017638.1,272-290).
cctgttgcagggaagtgtt

SEQ ID NO: 359863 - DNA, 19 bp, Homo sapiens
  siRNA target sequence for FLJ20045 (NM_017638.1,275-293).
gttgcagggaagtgtttta

SEQ ID NO: 359864 - DNA, 19 bp, Homo sapiens
  siRNA target sequence for FLJ20045 (NM_017638.1,320-338).
ccgccttcgtggtttgtgt

SEQ ID NO: 359865 - DNA, 19 bp, Homo sapiens
  siRNA target sequence for FLJ20045 (NM_017638.1,363-381).
cttgaccatgagatggtat

SEQ ID NO: 359866 - DNA, 19 bp, Homo sapiens
  siRNA target sequence for FLJ20045 (NM_017638.1,398-416).
gcaagccagcccatttgtt

SEQ ID NO: 359867 - DNA, 19 bp, Homo sapiens
  siRNA target sequence for FLJ20045 (NM_017638.1,578-596).
ccgcatggaccatgagttt

SEQ ID NO: 359868 - DNA, 19 bp, Homo sapiens
  siRNA target sequence for FLJ20045 (NM_017638.1,580-598).
gcatggaccatgagtttgt

SEQ ID NO: 359869 - DNA, 19 bp, Homo sapiens
  siRNA target sequence for FLJ20045 (NM_017638.1,618-636).
cgtaagggcatcatgaaga

SEQ ID NO: 359870 - DNA, 19 bp, Homo sapiens
  siRNA target sequence for FLJ20045 (NM_017638.1,704-722).
ctcctatctcgtggaatta

SEQ ID NO: 359871 - DNA, 19 bp, Homo sapiens
  siRNA target sequence for FLJ20045 (NM_017638.1,707-725).
ctatctcgtggaattaagt

SEQ ID NO: 359872 - DNA, 19 bp, Homo sapiens
  siRNA target sequence for FLJ20045 (NM_017638.1,776-794).
cgcagaacagctaaaacct

SEQ ID NO: 359873 - DNA, 19 bp, Homo sapiens
  siRNA target sequence for FLJ20045 (NM_017638.1,797-815).
ggttcacctagagaaaata

SEQ ID NO: 359874 - DNA, 19 bp, Homo sapiens
  siRNA target sequence for LRRC16 (NM_017640.2,200-218).
gtaatatgggacaagaaca

SEQ ID NO: 359875 - DNA, 19 bp, Homo sapiens
  siRNA target sequence for LRRC16 (NM_017640.2,228-246).
cacaaggctttcaggatat

SEQ ID NO: 359876 - DNA, 19 bp, Homo sapiens
  siRNA target sequence for LRRC16 (NM_017640.2,305-323).
gcttctcaagccctaaaaa

SEQ ID NO: 359877 - DNA, 19 bp, Homo sapiens
  siRNA target sequence for LRRC16 (NM_017640.2,341-359).
gaagacgctctgcaaaaga

SEQ ID NO: 359878 - DNA, 19 bp, Homo sapiens
  siRNA target sequence for LRRC16 (NM_017640.2,377-395).
cgaaatcacgagactagaa

SEQ ID NO: 359879 - DNA, 19 bp, Homo sapiens
  siRNA target sequence for LRRC16 (NM_017640.2,385-403).
cgagactagaaaatacctt

SEQ ID NO: 359880 - DNA, 19 bp, Homo sapiens
  siRNA target sequence for LRRC16 (NM_017640.2,422-440).
ctgcagcagggtattgtca

SEQ ID NO: 359881 - DNA, 19 bp, Homo sapiens
  siRNA target sequence for LRRC16 (NM_017640.2,494-512).
ctcaactccttacgaaatt

SEQ ID NO: 359882 - DNA, 19 bp, Homo sapiens
  siRNA target sequence for LRRC16 (NM_017640.2,496-514).
caactccttacgaaattgt

SEQ ID NO: 359883 - DNA, 19 bp, Homo sapiens
  siRNA target sequence for LRRC16 (NM_017640.2,521-539).
gacgctatccaggaagatt

SEQ ID NO: 359884 - DNA, 19 bp, Homo sapiens
  siRNA target sequence for LRRC16 (NM_017640.2,555-573).
ggctcatgcgtgatgctaa

SEQ ID NO: 359885 - DNA, 19 bp, Homo sapiens
  siRNA target sequence for LRRC16 (NM_017640.2,563-581).
cgtgatgctaagaactcta

SEQ ID NO: 359886 - DNA, 19 bp, Homo sapiens
  siRNA target sequence for LRRC16 (NM_017640.2,564-582).
gtgatgctaagaactctaa

SEQ ID NO: 359887 - DNA, 19 bp, Homo sapiens
  siRNA target sequence for LRRC16 (NM_017640.2,569-587).
gctaagaactctaaaacgt

SEQ ID NO: 359888 - DNA, 19 bp, Homo sapiens
  siRNA target sequence for LRRC16 (NM_017640.2,570-588).
ctaagaactctaaaacgtt

SEQ ID NO: 359889 - DNA, 19 bp, Homo sapiens
  siRNA target sequence for LRRC16 (NM_017640.2,574-592).
gaactctaaaacgttgtta

SEQ ID NO: 359890 - DNA, 19 bp, Homo sapiens
  siRNA target sequence for LRRC16 (NM_017640.2,585-603).
cgttgttaccaaatttata

SEQ ID NO: 359891 - DNA, 19 bp, Homo sapiens
  siRNA target sequence for LRRC16 (NM_017640.2,589-607).
gttaccaaatttataccat

SEQ ID NO: 359892 - DNA, 19 bp, Homo sapiens
  siRNA target sequence for LRRC16 (NM_017640.2,628-646).
gggagccagtggcttacta

SEQ ID NO: 359893 - DNA, 19 bp, Homo sapiens
  siRNA target sequence for LRRC16 (NM_017640.2,629-647).
ggagccagtggcttactat

SEQ ID NO: 359894 - DNA, 19 bp, Homo sapiens
  siRNA target sequence for LRRC16 (NM_017640.2,640-658).
cttactatccagtccaatt

SEQ ID NO: 359895 - DNA, 19 bp, Homo sapiens
  siRNA target sequence for LRRC16 (NM_017640.2,693-711).
caagagtagtagatgaaca

SEQ ID NO: 359896 - DNA, 19 bp, Homo sapiens
  siRNA target sequence for LRRC16 (NM_017640.2,696-714).
gagtagtagatgaacaact

SEQ ID NO: 359897 - DNA, 19 bp, Homo sapiens
  siRNA target sequence for LRRC16 (NM_017640.2,780-798).
cccacattcgacaagactt

SEQ ID NO: 359898 - DNA, 19 bp, Homo sapiens
  siRNA target sequence for LRRC16 (NM_017640.2,784-802).
cattcgacaagacttgatt

SEQ ID NO: 359899 - DNA, 19 bp, Homo sapiens
  siRNA target sequence for LRRC16 (NM_017640.2,803-821).
catgccagcaccgaaaaga

SEQ ID NO: 359900 - DNA, 19 bp, Homo sapiens
  siRNA target sequence for LRRC16 (NM_017640.2,806-824).
gccagcaccgaaaagattt

SEQ ID NO: 359901 - DNA, 19 bp, Homo sapiens
  siRNA target sequence for LRRC16 (NM_017640.2,810-828).
gcaccgaaaagatttctat

SEQ ID NO: 359902 - DNA, 19 bp, Homo sapiens
  siRNA target sequence for LRRC16 (NM_017640.2,811-829).
caccgaaaagatttctatt

SEQ ID NO: 359903 - DNA, 19 bp, Homo sapiens
  siRNA target sequence for LRRC16 (NM_017640.2,814-832).
cgaaaagatttctattcca

SEQ ID NO: 359904 - DNA, 19 bp, Homo sapiens
  siRNA target sequence for LRRC16 (NM_017640.2,830-848).
ccacgtacctttgttaaaa

SEQ ID NO: 359905 - DNA, 19 bp, Homo sapiens
  siRNA target sequence for LRRC16 (NM_017640.2,831-849).
cacgtacctttgttaaaaa

SEQ ID NO: 359906 - DNA, 19 bp, Homo sapiens
  siRNA target sequence for LRRC16 (NM_017640.2,856-874).
gttggagcagtctggaatt

SEQ ID NO: 359907 - DNA, 19 bp, Homo sapiens
  siRNA target sequence for LRRC16 (NM_017640.2,860-878).
gagcagtctggaattgata

SEQ ID NO: 359908 - DNA, 19 bp, Homo sapiens
  siRNA target sequence for LRRC16 (NM_017640.2,865-883).
gtctggaattgatatcctt

SEQ ID NO: 359909 - DNA, 19 bp, Homo sapiens
  siRNA target sequence for LRRC16 (NM_017640.2,880-898).
ccttaacaaaattagtgaa

SEQ ID NO: 359910 - DNA, 19 bp, Homo sapiens
  siRNA target sequence for LRRC16 (NM_017640.2,1019-1037).
caacaagaatccttagaga

SEQ ID NO: 359911 - DNA, 19 bp, Homo sapiens
  siRNA target sequence for LRRC16 (NM_017640.2,1061-1079).
gttaaacgttccatcatca

SEQ ID NO: 359912 - DNA, 19 bp, Homo sapiens
  siRNA target sequence for LRRC16 (NM_017640.2,1118-1136).
ctggatacctgtatgatga

SEQ ID NO: 359913 - DNA, 19 bp, Homo sapiens
  siRNA target sequence for LRRC16 (NM_017640.2,1184-1202).
gtttctagggcttttgaaa

SEQ ID NO: 359914 - DNA, 19 bp, Homo sapiens
  siRNA target sequence for LRRC16 (NM_017640.2,1204-1222).
ggagtttgatctagataaa

SEQ ID NO: 359915 - DNA, 19 bp, Homo sapiens
  siRNA target sequence for LRRC16 (NM_017640.2,1286-1304).
cggagctcgggatttatct

SEQ ID NO: 359916 - DNA, 19 bp, Homo sapiens
  siRNA target sequence for LRRC16 (NM_017640.2,1288-1306).
gagctcgggatttatctct

SEQ ID NO: 359917 - DNA, 19 bp, Homo sapiens
  siRNA target sequence for LRRC16 (NM_017640.2,1337-1355).
gaacactttaccaagttaa

SEQ ID NO: 359918 - DNA, 19 bp, Homo sapiens
  siRNA target sequence for LRRC16 (NM_017640.2,1396-1414).
ggtctgtgctgccaacata

SEQ ID NO: 359919 - DNA, 19 bp, Homo sapiens
  siRNA target sequence for LRRC16 (NM_017640.2,1419-1437).
cacaagatggtgaacagaa

SEQ ID NO: 359920 - DNA, 19 bp, Homo sapiens
  siRNA target sequence for LRRC16 (NM_017640.2,1466-1484).
gtagatgaattttttacca

SEQ ID NO: 359921 - DNA, 19 bp, Homo sapiens
  siRNA target sequence for LRRC16 (NM_017640.2,1534-1552).
gtcccatgagcttaatgaa

SEQ ID NO: 359922 - DNA, 19 bp, Homo sapiens
  siRNA target sequence for LRRC16 (NM_017640.2,1573-1591).
gcgagattctcggaaaagt

SEQ ID NO: 359923 - DNA, 19 bp, Homo sapiens
  siRNA target sequence for LRRC16 (NM_017640.2,1574-1592).
cgagattctcggaaaagta

SEQ ID NO: 359924 - DNA, 19 bp, Homo sapiens
  siRNA target sequence for LRRC16 (NM_017640.2,1595-1613).
ggctttctcaatttaatca

SEQ ID NO: 359925 - DNA, 19 bp, Homo sapiens
  siRNA target sequence for LRRC16 (NM_017640.2,1635-1653).
gaccaccaacgatcttgat

SEQ ID NO: 359926 - DNA, 19 bp, Homo sapiens
  siRNA target sequence for LRRC16 (NM_017640.2,1732-1750).
cgagcacaatggcaattct

SEQ ID NO: 359927 - DNA, 19 bp, Homo sapiens
  siRNA target sequence for LRRC16 (NM_017640.2,1751-1769).
gaacggatagaggagataa

SEQ ID NO: 359928 - DNA, 19 bp, Homo sapiens
  siRNA target sequence for LRRC16 (NM_017640.2,1913-1931).
caagagaaccgctttggtt

SEQ ID NO: 359929 - DNA, 19 bp, Homo sapiens
  siRNA target sequence for LRRC16 (NM_017640.2,1929-1947).
gtttgggaacaccagaaaa

SEQ ID NO: 359930 - DNA, 19 bp, Homo sapiens
  siRNA target sequence for LRRC16 (NM_017640.2,1933-1951).
gggaacaccagaaaagaat

SEQ ID NO: 359931 - DNA, 19 bp, Homo sapiens
  siRNA target sequence for LRRC16 (NM_017640.2,2066-2084).
gtcatcccgcagaaaccaa

SEQ ID NO: 359932 - DNA, 19 bp, Homo sapiens
  siRNA target sequence for LRRC16 (NM_017640.2,2206-2224).
gcccagccccaggacattt

SEQ ID NO: 359933 - DNA, 19 bp, Homo sapiens
  siRNA target sequence for LRRC16 (NM_017640.2,2207-2225).
cccagccccaggacatttt

SEQ ID NO: 359934 - DNA, 19 bp, Homo sapiens
  siRNA target sequence for LRRC16 (NM_017640.2,2264-2282).
caggagtatcaagaacaaa

SEQ ID NO: 359935 - DNA, 19 bp, Homo sapiens
  siRNA target sequence for LRRC16 (NM_017640.2,2284-2302).
gcaacggtcctccagtaaa

SEQ ID NO: 359936 - DNA, 19 bp, Homo sapiens
  siRNA target sequence for MBTD1 (NM_017643.1,173-191).
ggacctgctggggtgatat

SEQ ID NO: 359937 - DNA, 19 bp, Homo sapiens
  siRNA target sequence for MBTD1 (NM_017643.1,177-195).
ctgctggggtgatatctca

SEQ ID NO: 359938 - DNA, 19 bp, Homo sapiens
  siRNA target sequence for MBTD1 (NM_017643.1,182-200).
ggggtgatatctcagaaaa

SEQ ID NO: 359939 - DNA, 19 bp, Homo sapiens
  siRNA target sequence for MBTD1 (NM_017643.1,183-201).
gggtgatatctcagaaaat

SEQ ID NO: 359940 - DNA, 19 bp, Homo sapiens
  siRNA target sequence for MBTD1 (NM_017643.1,233-251).
gcctacctaccaaagtctt

SEQ ID NO: 359941 - DNA, 19 bp, Homo sapiens
  siRNA target sequence for MBTD1 (NM_017643.1,254-272).
ggattgctggaattgtaaa

SEQ ID NO: 359942 - DNA, 19 bp, Homo sapiens
  siRNA target sequence for MBTD1 (NM_017643.1,285-303).
caatgcccttttaagatat

SEQ ID NO: 359943 - DNA, 19 bp, Homo sapiens
  siRNA target sequence for MBTD1 (NM_017643.1,328-346).
ctggacttctggtgcaata

SEQ ID NO: 359944 - DNA, 19 bp, Homo sapiens
  siRNA target sequence for MBTD1 (NM_017643.1,330-348).
ggacttctggtgcaatata

SEQ ID NO: 359945 - DNA, 19 bp, Homo sapiens
  siRNA target sequence for MBTD1 (NM_017643.1,342-360).
caatatatgtggttctgat

SEQ ID NO: 359946 - DNA, 19 bp, Homo sapiens
  siRNA target sequence for MBTD1 (NM_017643.1,400-418).
cttgttcctcctagaacta

SEQ ID NO: 359947 - DNA, 19 bp, Homo sapiens
  siRNA target sequence for MBTD1 (NM_017643.1,490-508).
gatttctcccaaaaggttt

SEQ ID NO: 359948 - DNA, 19 bp, Homo sapiens
  siRNA target sequence for MBTD1 (NM_017643.1,511-529).
gagagtatgcagtatcctt

SEQ ID NO: 359949 - DNA, 19 bp, Homo sapiens
  siRNA target sequence for MBTD1 (NM_017643.1,536-554).
cttgcatgagagtagaagt

SEQ ID NO: 359950 - DNA, 19 bp, Homo sapiens
  siRNA target sequence for MBTD1 (NM_017643.1,594-612).
ggtggaaagtgtaattgga

SEQ ID NO: 359951 - DNA, 19 bp, Homo sapiens
  siRNA target sequence for MBTD1 (NM_017643.1,617-635).
gattaagactagtgtatga

SEQ ID NO: 359952 - DNA, 19 bp, Homo sapiens
  siRNA target sequence for MBTD1 (NM_017643.1,670-688).
catatgcacagcccattaa

SEQ ID NO: 359953 - DNA, 19 bp, Homo sapiens
  siRNA target sequence for MBTD1 (NM_017643.1,678-696).
cagcccattaatacatcat

SEQ ID NO: 359954 - DNA, 19 bp, Homo sapiens
  siRNA target sequence for MBTD1 (NM_017643.1,680-698).
gcccattaatacatcatat

SEQ ID NO: 359955 - DNA, 19 bp, Homo sapiens
  siRNA target sequence for MBTD1 (NM_017643.1,710-728).
gaagcataggtcatcgatt

SEQ ID NO: 359956 - DNA, 19 bp, Homo sapiens
  siRNA target sequence for MBTD1 (NM_017643.1,713-731).
gcataggtcatcgattcaa

SEQ ID NO: 359957 - DNA, 19 bp, Homo sapiens
  siRNA target sequence for MBTD1 (NM_017643.1,714-732).
cataggtcatcgattcaaa

SEQ ID NO: 359958 - DNA, 19 bp, Homo sapiens
  siRNA target sequence for MBTD1 (NM_017643.1,718-736).
ggtcatcgattcaaaagat

SEQ ID NO: 359959 - DNA, 19 bp, Homo sapiens
  siRNA target sequence for MBTD1 (NM_017643.1,724-742).
cgattcaaaagatctgata

SEQ ID NO: 359960 - DNA, 19 bp, Homo sapiens
  siRNA target sequence for MBTD1 (NM_017643.1,776-794).
caccacatttatttgctaa

SEQ ID NO: 359961 - DNA, 19 bp, Homo sapiens
  siRNA target sequence for MBTD1 (NM_017643.1,781-799).
catttatttgctaaggtaa

SEQ ID NO: 359962 - DNA, 19 bp, Homo sapiens
  siRNA target sequence for MBTD1 (NM_017643.1,851-869).
ctatagacccattaaatct

SEQ ID NO: 359963 - DNA, 19 bp, Homo sapiens
  siRNA target sequence for MBTD1 (NM_017643.1,979-997).
gcaacctctccttctattt

SEQ ID NO: 359964 - DNA, 19 bp, Homo sapiens
  siRNA target sequence for MBTD1 (NM_017643.1,980-998).
caacctctccttctatttt

SEQ ID NO: 359965 - DNA, 19 bp, Homo sapiens
  siRNA target sequence for MBTD1 (NM_017643.1,1000-1018).
cctgtcggtttctgtgaaa

SEQ ID NO: 359966 - DNA, 19 bp, Homo sapiens
  siRNA target sequence for MBTD1 (NM_017643.1,1001-1019).
ctgtcggtttctgtgaaat

SEQ ID NO: 359967 - DNA, 19 bp, Homo sapiens
  siRNA target sequence for MBTD1 (NM_017643.1,1003-1021).
gtcggtttctgtgaaatta

SEQ ID NO: 359968 - DNA, 19 bp, Homo sapiens
  siRNA target sequence for MBTD1 (NM_017643.1,1039-1057).
ccacccagaggttacacaa

SEQ ID NO: 359969 - DNA, 19 bp, Homo sapiens
  siRNA target sequence for MBTD1 (NM_017643.1,1108-1126).
gcaccagtaaaactattta

SEQ ID NO: 359970 - DNA, 19 bp, Homo sapiens
  siRNA target sequence for MBTD1 (NM_017643.1,1109-1127).
caccagtaaaactatttaa

SEQ ID NO: 359971 - DNA, 19 bp, Homo sapiens
  siRNA target sequence for MBTD1 (NM_017643.1,1148-1166).
gatttcgtgtaggaatgaa

SEQ ID NO: 359972 - DNA, 19 bp, Homo sapiens
  siRNA target sequence for MBTD1 (NM_017643.1,1188-1206).
ggagccacgtttaatatgt

SEQ ID NO: 359973 - DNA, 19 bp, Homo sapiens
  siRNA target sequence for MBTD1 (NM_017643.1,1191-1209).
gccacgtttaatatgtgta

SEQ ID NO: 359974 - DNA, 19 bp, Homo sapiens
  siRNA target sequence for MBTD1 (NM_017643.1,1210-1228).
gccacagtaactcgaatta

SEQ ID NO: 359975 - DNA, 19 bp, Homo sapiens
  siRNA target sequence for MBTD1 (NM_017643.1,1211-1229).
ccacagtaactcgaattat

SEQ ID NO: 359976 - DNA, 19 bp, Homo sapiens
  siRNA target sequence for MBTD1 (NM_017643.1,1212-1230).
cacagtaactcgaattatt

SEQ ID NO: 359977 - DNA, 19 bp, Homo sapiens
  siRNA target sequence for MBTD1 (NM_017643.1,1214-1232).
cagtaactcgaattattca

SEQ ID NO: 359978 - DNA, 19 bp, Homo sapiens
  siRNA target sequence for MBTD1 (NM_017643.1,1325-1343).
gtcagttaactggatatca

SEQ ID NO: 359979 - DNA, 19 bp, Homo sapiens
  siRNA target sequence for MBTD1 (NM_017643.1,1361-1379).
cacagtgtaagttggtata

SEQ ID NO: 359980 - DNA, 19 bp, Homo sapiens
  siRNA target sequence for MBTD1 (NM_017643.1,1363-1381).
cagtgtaagttggtataca

SEQ ID NO: 359981 - DNA, 19 bp, Homo sapiens
  siRNA target sequence for MBTD1 (NM_017643.1,1365-1383).
gtgtaagttggtatacaga

SEQ ID NO: 359982 - DNA, 19 bp, Homo sapiens
  siRNA target sequence for MBTD1 (NM_017643.1,1371-1389).
gttggtatacagaaaaggt

SEQ ID NO: 359983 - DNA, 19 bp, Homo sapiens
  siRNA target sequence for FAM29A (NM_017645.3,286-304).
ggagcatctctggatgtat

SEQ ID NO: 359984 - DNA, 19 bp, Homo sapiens
  siRNA target sequence for FAM29A (NM_017645.3,339-357).
ccattgcctgcggaaagat

SEQ ID NO: 359985 - DNA, 19 bp, Homo sapiens
  siRNA target sequence for FAM29A (NM_017645.3,369-387).
cgcacctcggagtgaacat

SEQ ID NO: 359986 - DNA, 19 bp, Homo sapiens
  siRNA target sequence for FAM29A (NM_017645.3,371-389).
cacctcggagtgaacatgt

SEQ ID NO: 359987 - DNA, 19 bp, Homo sapiens
  siRNA target sequence for FAM29A (NM_017645.3,373-391).
cctcggagtgaacatgttt

SEQ ID NO: 359988 - DNA, 19 bp, Homo sapiens
  siRNA target sequence for FAM29A (NM_017645.3,400-418).
gaaccgtgatgcctttcat

SEQ ID NO: 359989 - DNA, 19 bp, Homo sapiens
  siRNA target sequence for FAM29A (NM_017645.3,403-421).
ccgtgatgcctttcatata

SEQ ID NO: 359990 - DNA, 19 bp, Homo sapiens
  siRNA target sequence for FAM29A (NM_017645.3,404-422).
cgtgatgcctttcatataa

SEQ ID NO: 359991 - DNA, 19 bp, Homo sapiens
  siRNA target sequence for FAM29A (NM_017645.3,405-423).
gtgatgcctttcatataat

SEQ ID NO: 359992 - DNA, 19 bp, Homo sapiens
  siRNA target sequence for FAM29A (NM_017645.3,492-510).
catttgaccaaaaaagtga

SEQ ID NO: 359993 - DNA, 19 bp, Homo sapiens
  siRNA target sequence for FAM29A (NM_017645.3,521-539).
cgaaaacattgctgtgaat

SEQ ID NO: 359994 - DNA, 19 bp, Homo sapiens
  siRNA target sequence for FAM29A (NM_017645.3,570-588).
gtagctttcctcaagttgt

SEQ ID NO: 359995 - DNA, 19 bp, Homo sapiens
  siRNA target sequence for FAM29A (NM_017645.3,581-599).
caagttgttggttcactat

SEQ ID NO: 359996 - DNA, 19 bp, Homo sapiens
  siRNA target sequence for FAM29A (NM_017645.3,608-626).
cctggtggtcctaagttta

SEQ ID NO: 359997 - DNA, 19 bp, Homo sapiens
  siRNA target sequence for FAM29A (NM_017645.3,609-627).
ctggtggtcctaagtttat

SEQ ID NO: 359998 - DNA, 19 bp, Homo sapiens
  siRNA target sequence for FAM29A (NM_017645.3,618-636).
ctaagtttattcatctgat

SEQ ID NO: 359999 - DNA, 19 bp, Homo sapiens
  siRNA target sequence for FAM29A (NM_017645.3,622-640).
gtttattcatctgatgtat

SEQ ID NO: 360000 - DNA, 19 bp, Homo sapiens
  siRNA target sequence for FAM29A (NM_017645.3,637-655).
gtatcattttgcaagattt

SEQ ID NO: 360001 - DNA, 19 bp, Homo sapiens
  siRNA target sequence for FAM29A (NM_017645.3,728-746).
ccacaggacttgcacaaat

SEQ ID NO: 360002 - DNA, 19 bp, Homo sapiens
  siRNA target sequence for FAM29A (NM_017645.3,731-749).
caggacttgcacaaatgca

SEQ ID NO: 360003 - DNA, 19 bp, Homo sapiens
  siRNA target sequence for FAM29A (NM_017645.3,766-784).
cgcacgtagcagattttta

SEQ ID NO: 360004 - DNA, 19 bp, Homo sapiens
  siRNA target sequence for FAM29A (NM_017645.3,768-786).
cacgtagcagatttttaca

SEQ ID NO: 360005 - DNA, 19 bp, Homo sapiens
  siRNA target sequence for FAM29A (NM_017645.3,770-788).
cgtagcagatttttacaaa

SEQ ID NO: 360006 - DNA, 19 bp, Homo sapiens
  siRNA target sequence for FAM29A (NM_017645.3,803-821).
gattgtgttacccaaaaat

SEQ ID NO: 360007 - DNA, 19 bp, Homo sapiens
  siRNA target sequence for FAM29A (NM_017645.3,843-861).
cagttaagcaggtacgaaa

SEQ ID NO: 360008 - DNA, 19 bp, Homo sapiens
  siRNA target sequence for FAM29A (NM_017645.3,865-883).
gagatctgaatgtatagga

SEQ ID NO: 360009 - DNA, 19 bp, Homo sapiens
  siRNA target sequence for FAM29A (NM_017645.3,867-885).
gatctgaatgtataggatt

SEQ ID NO: 360010 - DNA, 19 bp, Homo sapiens
  siRNA target sequence for FAM29A (NM_017645.3,876-894).
gtataggattggaaaacca

SEQ ID NO: 360011 - DNA, 19 bp, Homo sapiens
  siRNA target sequence for FAM29A (NM_017645.3,947-965).
caaaaggttcggtctttgt

SEQ ID NO: 360012 - DNA, 19 bp, Homo sapiens
  siRNA target sequence for FAM29A (NM_017645.3,1599-1617).
ccttgggagcgctacatga

SEQ ID NO: 360013 - DNA, 19 bp, Homo sapiens
  siRNA target sequence for FAM29A (NM_017645.3,1600-1618).
cttgggagcgctacatgat

SEQ ID NO: 360014 - DNA, 19 bp, Homo sapiens
  siRNA target sequence for FAM29A (NM_017645.3,1603-1621).
gggagcgctacatgatcta

SEQ ID NO: 360015 - DNA, 19 bp, Homo sapiens
  siRNA target sequence for FAM29A (NM_017645.3,1642-1660).
cttgtcgcagtcagtttca

SEQ ID NO: 360016 - DNA, 19 bp, Homo sapiens
  siRNA target sequence for FAM29A (NM_017645.3,1645-1663).
gtcgcagtcagtttcatca

SEQ ID NO: 360017 - DNA, 19 bp, Homo sapiens
  siRNA target sequence for FAM29A (NM_017645.3,1820-1838).
gggtctttgccagctaaaa

SEQ ID NO: 360018 - DNA, 19 bp, Homo sapiens
  siRNA target sequence for FAM29A (NM_017645.3,1828-1846).
gccagctaaaaaaagtgat

SEQ ID NO: 360019 - DNA, 19 bp, Homo sapiens
  siRNA target sequence for FAM29A (NM_017645.3,1833-1851).
ctaaaaaaagtgatccatt

SEQ ID NO: 360020 - DNA, 19 bp, Homo sapiens
  siRNA target sequence for FAM29A (NM_017645.3,1964-1982).
ggttctaaccccttcttaa

SEQ ID NO: 360021 - DNA, 19 bp, Homo sapiens
  siRNA target sequence for FAM29A (NM_017645.3,2092-2110).
ggatgctgaacatagagaa

SEQ ID NO: 360022 - DNA, 19 bp, Homo sapiens
  siRNA target sequence for FAM29A (NM_017645.3,2177-2195).
gaaaccactgtatcagatt

SEQ ID NO: 360023 - DNA, 19 bp, Homo sapiens
  siRNA target sequence for FAM29A (NM_017645.3,2239-2257).
cgagtgtgtgcctcagaaa

SEQ ID NO: 360024 - DNA, 19 bp, Homo sapiens
  siRNA target sequence for FAM29A (NM_017645.3,2376-2394).
ctagccgaatggagacatt

SEQ ID NO: 360025 - DNA, 19 bp, Homo sapiens
  siRNA target sequence for FAM29A (NM_017645.3,2400-2418).
ctgctgtcggcaataggat

SEQ ID NO: 360026 - DNA, 19 bp, Homo sapiens
  siRNA target sequence for FAM29A (NM_017645.3,2436-2454).
gtgaagaggagtttatgaa

SEQ ID NO: 360027 - DNA, 19 bp, Homo sapiens
  siRNA target sequence for FAM29A (NM_017645.3,2461-2479).
ggaccacttagaagtttct

SEQ ID NO: 360028 - DNA, 19 bp, Homo sapiens
  siRNA target sequence for FAM29A (NM_017645.3,2462-2480).
gaccacttagaagtttctt

SEQ ID NO: 360029 - DNA, 19 bp, Homo sapiens
  siRNA target sequence for FAM29A (NM_017645.3,2464-2482).
ccacttagaagtttcttgt

SEQ ID NO: 360030 - DNA, 19 bp, Homo sapiens
  siRNA target sequence for FAM29A (NM_017645.3,2474-2492).
gtttcttgtaacaaacctt

SEQ ID NO: 360031 - DNA, 19 bp, Homo sapiens
  siRNA target sequence for FAM29A (NM_017645.3,2525-2543).
cagatatcaagtggaatta

SEQ ID NO: 360032 - DNA, 19 bp, Homo sapiens
  siRNA target sequence for FAM29A (NM_017645.3,2537-2555).
ggaattagttctaagagtt

SEQ ID NO: 360033 - DNA, 19 bp, Homo sapiens
  siRNA target sequence for FAM29A (NM_017645.3,2574-2592).
gcatattacacgaaactct

SEQ ID NO: 360034 - DNA, 19 bp, Homo sapiens
  siRNA target sequence for FAM29A (NM_017645.3,2596-2614).
ggaagaagttggtcatcta

SEQ ID NO: 360035 - DNA, 19 bp, Homo sapiens
  siRNA target sequence for FAM29A (NM_017645.3,2597-2615).
gaagaagttggtcatctaa

SEQ ID NO: 360036 - DNA, 19 bp, Homo sapiens
  siRNA target sequence for FAM29A (NM_017645.3,2600-2618).
gaagttggtcatctaagtt

SEQ ID NO: 360037 - DNA, 19 bp, Homo sapiens
  siRNA target sequence for FAM29A (NM_017645.3,2603-2621).
gttggtcatctaagtttta

SEQ ID NO: 360038 - DNA, 19 bp, Homo sapiens
  siRNA target sequence for FAM29A (NM_017645.3,2631-2649).
gtagttcagaggccaattt

SEQ ID NO: 360039 - DNA, 19 bp, Homo sapiens
  siRNA target sequence for FAM29A (NM_017645.3,2634-2652).
gttcagaggccaattttaa

SEQ ID NO: 360040 - DNA, 19 bp, Homo sapiens
  siRNA target sequence for FAM29A (NM_017645.3,2659-2677).
gccaaatagtcctatgcat

SEQ ID NO: 360041 - DNA, 19 bp, Homo sapiens
  siRNA target sequence for FAM29A (NM_017645.3,2683-2701).
cactcttctagaagatgtt

SEQ ID NO: 360042 - DNA, 19 bp, Homo sapiens
  siRNA target sequence for FAM29A (NM_017645.3,2760-2778).
gatacgaggctctgaagaa

SEQ ID NO: 360043 - DNA, 19 bp, Homo sapiens
  siRNA target sequence for FAM29A (NM_017645.3,2801-2819).
gaatcttacctctcgaatt

SEQ ID NO: 360044 - DNA, 19 bp, Homo sapiens
  siRNA target sequence for FAM29A (NM_017645.3,2820-2838).
cccaaacacccgaaagaca

SEQ ID NO: 360045 - DNA, 19 bp, Homo sapiens
  siRNA target sequence for FAM29A (NM_017645.3,2877-2895).
cagatgatacgcttaactt

SEQ ID NO: 360046 - DNA, 19 bp, Homo sapiens
  siRNA target sequence for FAM29A (NM_017645.3,2899-2917).
ggacacctgtgatttgcat

SEQ ID NO: 360047 - DNA, 19 bp, Homo sapiens
  siRNA target sequence for FAM29A (NM_017645.3,2900-2918).
gacacctgtgatttgcata

SEQ ID NO: 360048 - DNA, 19 bp, Homo sapiens
  siRNA target sequence for FAM29A (NM_017645.3,2923-2941).
gcatataaagccatcttta

SEQ ID NO: 360049 - DNA, 19 bp, Homo sapiens
  siRNA target sequence for FAM29A (NM_017645.3,2944-2962).
cacgtccatcggtgaaaga

SEQ ID NO: 360050 - DNA, 19 bp, Homo sapiens
  siRNA target sequence for FAM29A (NM_017645.3,2970-2988).
ctctttcaccactaattaa

SEQ ID NO: 360051 - DNA, 19 bp, Homo sapiens
  siRNA target sequence for FAM29A (NM_017645.3,2994-3012).
ctccagtggaacaaagatt

SEQ ID NO: 360052 - DNA, 19 bp, Homo sapiens
  siRNA target sequence for FAM29A (NM_017645.3,3019-3037).
cacaatagcatgtagtctt

SEQ ID NO: 360053 - DNA, 19 bp, Homo sapiens
  siRNA target sequence for FAM29A (NM_017645.3,3033-3051).
gtcttggagaactacctaa

SEQ ID NO: 360054 - DNA, 19 bp, Homo sapiens
  siRNA target sequence for FAM29A (NM_017645.3,3035-3053).
cttggagaactacctaatt

SEQ ID NO: 360055 - DNA, 19 bp, Homo sapiens
  siRNA target sequence for FAM29A (NM_017645.3,3062-3080).
gaagacattttgaataaga

SEQ ID NO: 360056 - DNA, 19 bp, Homo sapiens
  siRNA target sequence for FAM29A (NM_017645.3,3079-3097).
gagccttgatgcaaaagaa

SEQ ID NO: 360057 - DNA, 19 bp, Homo sapiens
  siRNA target sequence for FAM29A (NM_017645.3,3098-3116).
ccaccgtctgacttgacaa

SEQ ID NO: 360058 - DNA, 19 bp, Homo sapiens
  siRNA target sequence for FAM29A (NM_017645.3,3101-3119).
ccgtctgacttgacaagat

SEQ ID NO: 360059 - DNA, 19 bp, Homo sapiens
  siRNA target sequence for FTSJ3 (NM_017647.2,98-116).
gagccgacgagacaagttt

SEQ ID NO: 360060 - DNA, 19 bp, Homo sapiens
  siRNA target sequence for FTSJ3 (NM_017647.2,100-118).
gccgacgagacaagtttta

SEQ ID NO: 360061 - DNA, 19 bp, Homo sapiens
  siRNA target sequence for FTSJ3 (NM_017647.2,101-119).
ccgacgagacaagttttat

SEQ ID NO: 360062 - DNA, 19 bp, Homo sapiens
  siRNA target sequence for FTSJ3 (NM_017647.2,103-121).
gacgagacaagttttatca

SEQ ID NO: 360063 - DNA, 19 bp, Homo sapiens
  siRNA target sequence for FTSJ3 (NM_017647.2,105-123).
cgagacaagttttatcact

SEQ ID NO: 360064 - DNA, 19 bp, Homo sapiens
  siRNA target sequence for FTSJ3 (NM_017647.2,106-124).
gagacaagttttatcactt

SEQ ID NO: 360065 - DNA, 19 bp, Homo sapiens
  siRNA target sequence for FTSJ3 (NM_017647.2,145-163).
gttcccgatctgctttcaa

SEQ ID NO: 360066 - DNA, 19 bp, Homo sapiens
  siRNA target sequence for FTSJ3 (NM_017647.2,174-192).
ctcaatcgccgctttcagt

SEQ ID NO: 360067 - DNA, 19 bp, Homo sapiens
  siRNA target sequence for FTSJ3 (NM_017647.2,248-266).
gcaggtagctgccaagttt

SEQ ID NO: 360068 - DNA, 19 bp, Homo sapiens
  siRNA target sequence for FTSJ3 (NM_017647.2,269-287).
gcctgtatccagccttatt

SEQ ID NO: 360069 - DNA, 19 bp, Homo sapiens
  siRNA target sequence for FTSJ3 (NM_017647.2,271-289).
ctgtatccagccttattgt

SEQ ID NO: 360070 - DNA, 19 bp, Homo sapiens
  siRNA target sequence for FTSJ3 (NM_017647.2,449-467).
ggtccatgatgcttactca

SEQ ID NO: 360071 - DNA, 19 bp, Homo sapiens
  siRNA target sequence for FTSJ3 (NM_017647.2,495-513).
cgtttggcttgtgactttt

SEQ ID NO: 360072 - DNA, 19 bp, Homo sapiens
  siRNA target sequence for FTSJ3 (NM_017647.2,527-545).
cagcttcatcacaaaggtt

SEQ ID NO: 360073 - DNA, 19 bp, Homo sapiens
  siRNA target sequence for FTSJ3 (NM_017647.2,621-639).
caagcctctcgccatgaat

SEQ ID NO: 360074 - DNA, 19 bp, Homo sapiens
  siRNA target sequence for FTSJ3 (NM_017647.2,740-758).
ggctaagaccgttactgaa

SEQ ID NO: 360075 - DNA, 19 bp, Homo sapiens
  siRNA target sequence for FTSJ3 (NM_017647.2,746-764).
gaccgttactgaattggtt

SEQ ID NO: 360076 - DNA, 19 bp, Homo sapiens
  siRNA target sequence for FTSJ3 (NM_017647.2,850-868).
ctgccaaccctgttgactt

SEQ ID NO: 360077 - DNA, 19 bp, Homo sapiens
  siRNA target sequence for FTSJ3 (NM_017647.2,883-901).
gcgaaatcatggtagatga

SEQ ID NO: 360078 - DNA, 19 bp, Homo sapiens
  siRNA target sequence for FTSJ3 (NM_017647.2,884-902).
cgaaatcatggtagatgat

SEQ ID NO: 360079 - DNA, 19 bp, Homo sapiens
  siRNA target sequence for FTSJ3 (NM_017647.2,981-999).
gagctcaggtcgctactaa

SEQ ID NO: 360080 - DNA, 19 bp, Homo sapiens
  siRNA target sequence for FTSJ3 (NM_017647.2,1009-1027).
caaaacttcggcgatatgt

SEQ ID NO: 360081 - DNA, 19 bp, Homo sapiens
  siRNA target sequence for FTSJ3 (NM_017647.2,1317-1335).
ggggagactggcatgttct

SEQ ID NO: 360082 - DNA, 19 bp, Homo sapiens
  siRNA target sequence for FTSJ3 (NM_017647.2,1349-1367).
ccggggtcaccagttatta

SEQ ID NO: 360083 - DNA, 19 bp, Homo sapiens
  siRNA target sequence for FTSJ3 (NM_017647.2,1351-1369).
ggggtcaccagttattaga

SEQ ID NO: 360084 - DNA, 19 bp, Homo sapiens
  siRNA target sequence for FTSJ3 (NM_017647.2,1391-1409).
gagtgcagcagacacattt

SEQ ID NO: 360085 - DNA, 19 bp, Homo sapiens
  siRNA target sequence for FTSJ3 (NM_017647.2,1416-1434).
gatctgccaagggatgata

SEQ ID NO: 360086 - DNA, 19 bp, Homo sapiens
  siRNA target sequence for FTSJ3 (NM_017647.2,1421-1439).
gccaagggatgatatctat

SEQ ID NO: 360087 - DNA, 19 bp, Homo sapiens
  siRNA target sequence for FTSJ3 (NM_017647.2,1423-1441).
caagggatgatatctatgt

SEQ ID NO: 360088 - DNA, 19 bp, Homo sapiens
  siRNA target sequence for FTSJ3 (NM_017647.2,1558-1576).
ctgaagtgcaagatgataa

SEQ ID NO: 360089 - DNA, 19 bp, Homo sapiens
  siRNA target sequence for FTSJ3 (NM_017647.2,1648-1666).
ccaacctgtggttctcaaa

SEQ ID NO: 360090 - DNA, 19 bp, Homo sapiens
  siRNA target sequence for FTSJ3 (NM_017647.2,1717-1735).
gtcaggcccagctgttatt

SEQ ID NO: 360091 - DNA, 19 bp, Homo sapiens
  siRNA target sequence for FTSJ3 (NM_017647.2,1911-1929).
ggcatctcagacagtgata

SEQ ID NO: 360092 - DNA, 19 bp, Homo sapiens
  siRNA target sequence for FTSJ3 (NM_017647.2,2134-2152).
ccttcaaccggtacacatt

SEQ ID NO: 360093 - DNA, 19 bp, Homo sapiens
  siRNA target sequence for FTSJ3 (NM_017647.2,2135-2153).
cttcaaccggtacacattt

SEQ ID NO: 360094 - DNA, 19 bp, Homo sapiens
  siRNA target sequence for FTSJ3 (NM_017647.2,2138-2156).
caaccggtacacatttaat

SEQ ID NO: 360095 - DNA, 19 bp, Homo sapiens
  siRNA target sequence for FTSJ3 (NM_017647.2,2215-2233).
gacagttgcctgttggtaa

SEQ ID NO: 360096 - DNA, 19 bp, Homo sapiens
  siRNA target sequence for FTSJ3 (NM_017647.2,2415-2433).
ctgcgaagtctctacaaga

SEQ ID NO: 360097 - DNA, 19 bp, Homo sapiens
  siRNA target sequence for FTSJ3 (NM_017647.2,2467-2485).
cctacgttgtagccaaaaa

SEQ ID NO: 360098 - DNA, 19 bp, Homo sapiens
  siRNA target sequence for FTSJ3 (NM_017647.2,2471-2489).
cgttgtagccaaaaaaggt

SEQ ID NO: 360099 - DNA, 19 bp, Homo sapiens
  siRNA target sequence for CNNM2 (NM_017649.3,139-157).
cgcttgtgaacccaaagta

SEQ ID NO: 360100 - DNA, 19 bp, Homo sapiens
  siRNA target sequence for CNNM2 (NM_017649.3,315-333).
cagcggtgggcgagaatga

SEQ ID NO: 360101 - DNA, 19 bp, Homo sapiens
  siRNA target sequence for CNNM2 (NM_017649.3,437-455).
gtgtacgggcagaacatca

SEQ ID NO: 360102 - DNA, 19 bp, Homo sapiens
  siRNA target sequence for CNNM2 (NM_017649.3,439-457).
gtacgggcagaacatcaat

SEQ ID NO: 360103 - DNA, 19 bp, Homo sapiens
  siRNA target sequence for CNNM2 (NM_017649.3,809-827).
gccgagaccacctggattt

SEQ ID NO: 360104 - DNA, 19 bp, Homo sapiens
  siRNA target sequence for CNNM2 (NM_017649.3,1170-1188).
ccatcggtatcgtcatctt

SEQ ID NO: 360105 - DNA, 19 bp, Homo sapiens
  siRNA target sequence for CNNM2 (NM_017649.3,1256-1274).
ctcaccaagtttttcatga

SEQ ID NO: 360106 - DNA, 19 bp, Homo sapiens
  siRNA target sequence for CNNM2 (NM_017649.3,1334-1352).
gagataggcaccgtctata

SEQ ID NO: 360107 - DNA, 19 bp, Homo sapiens
  siRNA target sequence for CNNM2 (NM_017649.3,1558-1576).
cacccgcattccagtgttt

SEQ ID NO: 360108 - DNA, 19 bp, Homo sapiens
  siRNA target sequence for CNNM2 (NM_017649.3,1643-1661).
gactgtacccccctgaaaa

SEQ ID NO: 360109 - DNA, 19 bp, Homo sapiens
  siRNA target sequence for CNNM2 (NM_017649.3,1647-1665).
gtacccccctgaaaaccat

SEQ ID NO: 360110 - DNA, 19 bp, Homo sapiens
  siRNA target sequence for CNNM2 (NM_017649.3,1662-1680).
ccatcaccaaattttataa

SEQ ID NO: 360111 - DNA, 19 bp, Homo sapiens
  siRNA target sequence for CNNM2 (NM_017649.3,1718-1736).
gacgctatgctggaagaat

SEQ ID NO: 360112 - DNA, 19 bp, Homo sapiens
  siRNA target sequence for CNNM2 (NM_017649.3,1720-1738).
cgctatgctggaagaattt

SEQ ID NO: 360113 - DNA, 19 bp, Homo sapiens
  siRNA target sequence for CNNM2 (NM_017649.3,1721-1739).
gctatgctggaagaattta

SEQ ID NO: 360114 - DNA, 19 bp, Homo sapiens
  siRNA target sequence for CNNM2 (NM_017649.3,1765-1783).
cgtgcagcgggtaaacaat

SEQ ID NO: 360115 - DNA, 19 bp, Homo sapiens
  siRNA target sequence for CNNM2 (NM_017649.3,1855-1873).
caaatctgagattcttgat

SEQ ID NO: 360116 - DNA, 19 bp, Homo sapiens
  siRNA target sequence for CNNM2 (NM_017649.3,1922-1940).
cgggaacgaaagcaagatt

SEQ ID NO: 360117 - DNA, 19 bp, Homo sapiens
  siRNA target sequence for CNNM2 (NM_017649.3,1923-1941).
gggaacgaaagcaagattt

SEQ ID NO: 360118 - DNA, 19 bp, Homo sapiens
  siRNA target sequence for CNNM2 (NM_017649.3,1969-1987).
gatgaaggttaaaatatca

SEQ ID NO: 360119 - DNA, 19 bp, Homo sapiens
  siRNA target sequence for CNNM2 (NM_017649.3,2002-2020).
ggccatgcaccgtttccta

SEQ ID NO: 360120 - DNA, 19 bp, Homo sapiens
  siRNA target sequence for CNNM2 (NM_017649.3,2011-2029).
ccgtttcctagcaacagaa

SEQ ID NO: 360121 - DNA, 19 bp, Homo sapiens
  siRNA target sequence for CNNM2 (NM_017649.3,2017-2035).
cctagcaacagaagtagaa

SEQ ID NO: 360122 - DNA, 19 bp, Homo sapiens
  siRNA target sequence for CNNM2 (NM_017649.3,2098-2116).
catccaggaactgaaatat

SEQ ID NO: 360123 - DNA, 19 bp, Homo sapiens
  siRNA target sequence for CNNM2 (NM_017649.3,2160-2178).
gcaacaagccagtagacta

SEQ ID NO: 360124 - DNA, 19 bp, Homo sapiens
  siRNA target sequence for CNNM2 (NM_017649.3,2240-2258).
gaagcgagcgccttctcat

SEQ ID NO: 360125 - DNA, 19 bp, Homo sapiens
  siRNA target sequence for CNNM2 (NM_017649.3,2243-2261).
gcgagcgccttctcatact

SEQ ID NO: 360126 - DNA, 19 bp, Homo sapiens
  siRNA target sequence for CNNM2 (NM_017649.3,2323-2341).
cagcagaacagagttgtta

SEQ ID NO: 360127 - DNA, 19 bp, Homo sapiens
  siRNA target sequence for CNNM2 (NM_017649.3,2475-2493).
cttcgctcctccaagtcta

SEQ ID NO: 360128 - DNA, 19 bp, Homo sapiens
  siRNA target sequence for CNNM2 (NM_017649.3,2523-2541).
cggatctgcagtttgttaa

SEQ ID NO: 360129 - DNA, 19 bp, Homo sapiens
  siRNA target sequence for CNNM2 (NM_017649.3,2528-2546).
ctgcagtttgttaagatct

SEQ ID NO: 360130 - DNA, 19 bp, Homo sapiens
  siRNA target sequence for CNNM2 (NM_017649.3,2576-2594).
gcatcccggatggacaaaa

SEQ ID NO: 360131 - DNA, 19 bp, Homo sapiens
  siRNA target sequence for CNNM2 (NM_017649.3,2615-2633).
gaaaacactaaaatcgaat

SEQ ID NO: 360132 - DNA, 19 bp, Homo sapiens
  siRNA target sequence for CNNM2 (NM_017649.3,2620-2638).
cactaaaatcgaattgact

SEQ ID NO: 360133 - DNA, 19 bp, Homo sapiens
  siRNA target sequence for AHI1 (NM_017651.3,350-368).
gtgatctaatgcgtgaaaa

SEQ ID NO: 360134 - DNA, 19 bp, Homo sapiens
  siRNA target sequence for AHI1 (NM_017651.3,352-370).
gatctaatgcgtgaaaaga

SEQ ID NO: 360135 - DNA, 19 bp, Homo sapiens
  siRNA target sequence for AHI1 (NM_017651.3,411-429).
ctcacctgacactattaga

SEQ ID NO: 360136 - DNA, 19 bp, Homo sapiens
  siRNA target sequence for AHI1 (NM_017651.3,431-449).
gcaatcttcactatatgaa

SEQ ID NO: 360137 - DNA, 19 bp, Homo sapiens
  siRNA target sequence for AHI1 (NM_017651.3,432-450).
caatcttcactatatgaaa

SEQ ID NO: 360138 - DNA, 19 bp, Homo sapiens
  siRNA target sequence for AHI1 (NM_017651.3,461-479).
gtgatgatcccgacactat

SEQ ID NO: 360139 - DNA, 19 bp, Homo sapiens
  siRNA target sequence for AHI1 (NM_017651.3,463-481).
gatgatcccgacactatta

SEQ ID NO: 360140 - DNA, 19 bp, Homo sapiens
  siRNA target sequence for AHI1 (NM_017651.3,485-503).
gcaatcttccccatattaa

SEQ ID NO: 360141 - DNA, 19 bp, Homo sapiens
  siRNA target sequence for AHI1 (NM_017651.3,486-504).
caatcttccccatattaaa

SEQ ID NO: 360142 - DNA, 19 bp, Homo sapiens
  siRNA target sequence for AHI1 (NM_017651.3,555-573).
gagcacgagagtcactaaa

SEQ ID NO: 360143 - DNA, 19 bp, Homo sapiens
  siRNA target sequence for AHI1 (NM_017651.3,557-575).
gcacgagagtcactaaaaa

SEQ ID NO: 360144 - DNA, 19 bp, Homo sapiens
  siRNA target sequence for AHI1 (NM_017651.3,590-608).
cacagttagcaactgaaaa

SEQ ID NO: 360145 - DNA, 19 bp, Homo sapiens
  siRNA target sequence for AHI1 (NM_017651.3,678-696).
gccccagttgactacacaa

SEQ ID NO: 360146 - DNA, 19 bp, Homo sapiens
  siRNA target sequence for AHI1 (NM_017651.3,707-725).
cggaaactcctgagaataa

SEQ ID NO: 360147 - DNA, 19 bp, Homo sapiens
  siRNA target sequence for AHI1 (NM_017651.3,720-738).
gaataaggttgattctaca

SEQ ID NO: 360148 - DNA, 19 bp, Homo sapiens
  siRNA target sequence for AHI1 (NM_017651.3,761-779).
cacagccaggcgttgatca

SEQ ID NO: 360149 - DNA, 19 bp, Homo sapiens
  siRNA target sequence for AHI1 (NM_017651.3,769-787).
ggcgttgatcatcagaaaa

SEQ ID NO: 360150 - DNA, 19 bp, Homo sapiens
  siRNA target sequence for AHI1 (NM_017651.3,771-789).
cgttgatcatcagaaaagt

SEQ ID NO: 360151 - DNA, 19 bp, Homo sapiens
  siRNA target sequence for AHI1 (NM_017651.3,850-868).
gcatatcagtgccatgtaa

SEQ ID NO: 360152 - DNA, 19 bp, Homo sapiens
  siRNA target sequence for AHI1 (NM_017651.3,885-903).
ggagattaagaggaaaata

SEQ ID NO: 360153 - DNA, 19 bp, Homo sapiens
  siRNA target sequence for AHI1 (NM_017651.3,938-956).
cctcagatactttattcca

SEQ ID NO: 360154 - DNA, 19 bp, Homo sapiens
  siRNA target sequence for AHI1 (NM_017651.3,939-957).
ctcagatactttattccat

SEQ ID NO: 360155 - DNA, 19 bp, Homo sapiens
  siRNA target sequence for AHI1 (NM_017651.3,1011-1029).
ctctaaagctgaaacaagt

SEQ ID NO: 360156 - DNA, 19 bp, Homo sapiens
  siRNA target sequence for AHI1 (NM_017651.3,1050-1068).
cacagttgaaggtgaacaa

SEQ ID NO: 360157 - DNA, 19 bp, Homo sapiens
  siRNA target sequence for AHI1 (NM_017651.3,1150-1168).
gacagcatgcaagatgata

SEQ ID NO: 360158 - DNA, 19 bp, Homo sapiens
  siRNA target sequence for AHI1 (NM_017651.3,1158-1176).
gcaagatgatacaaaacct

SEQ ID NO: 360159 - DNA, 19 bp, Homo sapiens
  siRNA target sequence for AHI1 (NM_017651.3,1159-1177).
caagatgatacaaaaccta

SEQ ID NO: 360160 - DNA, 19 bp, Homo sapiens
  siRNA target sequence for AHI1 (NM_017651.3,1165-1183).
gatacaaaacctaaaccaa

SEQ ID NO: 360161 - DNA, 19 bp, Homo sapiens
  siRNA target sequence for AHI1 (NM_017651.3,1202-1220).
ctaaagcagttgcagataa

SEQ ID NO: 360162 - DNA, 19 bp, Homo sapiens
  siRNA target sequence for AHI1 (NM_017651.3,1263-1281).
ccgagatagcccggtttat

SEQ ID NO: 360163 - DNA, 19 bp, Homo sapiens
  siRNA target sequence for AHI1 (NM_017651.3,1272-1290).
cccggtttatcccaaatgt

SEQ ID NO: 360164 - DNA, 19 bp, Homo sapiens
  siRNA target sequence for AHI1 (NM_017651.3,1273-1291).
ccggtttatcccaaatgtt

SEQ ID NO: 360165 - DNA, 19 bp, Homo sapiens
  siRNA target sequence for AHI1 (NM_017651.3,1323-1341).
cattcaccgaactgataga

SEQ ID NO: 360166 - DNA, 19 bp, Homo sapiens
  siRNA target sequence for AHI1 (NM_017651.3,1327-1345).
caccgaactgatagactta

SEQ ID NO: 360167 - DNA, 19 bp, Homo sapiens
  siRNA target sequence for AHI1 (NM_017651.3,1330-1348).
cgaactgatagacttaagt

SEQ ID NO: 360168 - DNA, 19 bp, Homo sapiens
  siRNA target sequence for AHI1 (NM_017651.3,1359-1377).
gatttctcacccaatggta

SEQ ID NO: 360169 - DNA, 19 bp, Homo sapiens
  siRNA target sequence for AHI1 (NM_017651.3,1364-1382).
ctcacccaatggtaaaaat

SEQ ID NO: 360170 - DNA, 19 bp, Homo sapiens
  siRNA target sequence for AHI1 (NM_017651.3,1432-1450).
ggacggcctgtttcatctt

SEQ ID NO: 360171 - DNA, 19 bp, Homo sapiens
  siRNA target sequence for AHI1 (NM_017651.3,1435-1453).
cggcctgtttcatcttact

SEQ ID NO: 360172 - DNA, 19 bp, Homo sapiens
  siRNA target sequence for AHI1 (NM_017651.3,1493-1511).
cccagccatatgattttaa

SEQ ID NO: 360173 - DNA, 19 bp, Homo sapiens
  siRNA target sequence for AHI1 (NM_017651.3,1589-1607).
ctgatgagagtcctaaagt

SEQ ID NO: 360174 - DNA, 19 bp, Homo sapiens
  siRNA target sequence for AHI1 (NM_017651.3,1591-1609).
gatgagagtcctaaagtca

SEQ ID NO: 360175 - DNA, 19 bp, Homo sapiens
  siRNA target sequence for AHI1 (NM_017651.3,1640-1658).
gcgtggatgaaattaagaa

SEQ ID NO: 360176 - DNA, 19 bp, Homo sapiens
  siRNA target sequence for AHI1 (NM_017651.3,1759-1777).
cttcgcttgcagctatatt

SEQ ID NO: 360177 - DNA, 19 bp, Homo sapiens
  siRNA target sequence for AHI1 (NM_017651.3,1793-1811).
ctcgatccccattaagtgt

SEQ ID NO: 360178 - DNA, 19 bp, Homo sapiens
  siRNA target sequence for AHI1 (NM_017651.3,1810-1828).
gttgttgaggcatttgaat

SEQ ID NO: 360179 - DNA, 19 bp, Homo sapiens
  siRNA target sequence for AHI1 (NM_017651.3,1912-1930).
ccatcttaccgctctatga

SEQ ID NO: 360180 - DNA, 19 bp, Homo sapiens
  siRNA target sequence for AHI1 (NM_017651.3,1913-1931).
catcttaccgctctatgat

SEQ ID NO: 360181 - DNA, 19 bp, Homo sapiens
  siRNA target sequence for AHI1 (NM_017651.3,1998-2016).
cacagaacctggattagaa

SEQ ID NO: 360182 - DNA, 19 bp, Homo sapiens
  siRNA target sequence for AHI1 (NM_017651.3,2060-2078).
cttgccgtatcccaaacaa

SEQ ID NO: 360183 - DNA, 19 bp, Homo sapiens
  siRNA target sequence for AHI1 (NM_017651.3,2063-2081).
gccgtatcccaaacaaaca

SEQ ID NO: 360184 - DNA, 19 bp, Homo sapiens
  siRNA target sequence for AHI1 (NM_017651.3,2166-2184).
cagccgggatggatatcca

SEQ ID NO: 360185 - DNA, 19 bp, Homo sapiens
  siRNA target sequence for AHI1 (NM_017651.3,2168-2186).
gccgggatggatatccaat

SEQ ID NO: 360186 - DNA, 19 bp, Homo sapiens
  siRNA target sequence for AHI1 (NM_017651.3,2169-2187).
ccgggatggatatccaatt

SEQ ID NO: 360187 - DNA, 19 bp, Homo sapiens
  siRNA target sequence for AHI1 (NM_017651.3,2231-2249).
gtggccacctcaatatcat

SEQ ID NO: 360188 - DNA, 19 bp, Homo sapiens
  siRNA target sequence for AHI1 (NM_017651.3,2233-2251).
ggccacctcaatatcattt

SEQ ID NO: 360189 - DNA, 19 bp, Homo sapiens
  siRNA target sequence for AHI1 (NM_017651.3,2234-2252).
gccacctcaatatcattta

SEQ ID NO: 360190 - DNA, 19 bp, Homo sapiens
  siRNA target sequence for AHI1 (NM_017651.3,2264-2282).
ggtcaaaagatgatcacta

SEQ ID NO: 360191 - DNA, 19 bp, Homo sapiens
  siRNA target sequence for AHI1 (NM_017651.3,2267-2285).
caaaagatgatcactacat

SEQ ID NO: 360192 - DNA, 19 bp, Homo sapiens
  siRNA target sequence for AHI1 (NM_017651.3,2275-2293).
gatcactacatccttactt

SEQ ID NO: 360193 - DNA, 19 bp, Homo sapiens
  siRNA target sequence for AHI1 (NM_017651.3,2302-2320).
gatggcactgccaggatat

SEQ ID NO: 360194 - DNA, 19 bp, Homo sapiens
  siRNA target sequence for AHI1 (NM_017651.3,2402-2420).
ctgtaagagagctagtagt

SEQ ID NO: 360195 - DNA, 19 bp, Homo sapiens
  siRNA target sequence for AHI1 (NM_017651.3,2404-2422).
gtaagagagctagtagtta

SEQ ID NO: 360196 - DNA, 19 bp, Homo sapiens
  siRNA target sequence for AHI1 (NM_017651.3,2423-2441).
caggatgctatgattccat

SEQ ID NO: 360197 - DNA, 19 bp, Homo sapiens
  siRNA target sequence for AHI1 (NM_017651.3,2438-2456).
ccatgatacggatatggaa

SEQ ID NO: 360198 - DNA, 19 bp, Homo sapiens
  siRNA target sequence for AHI1 (NM_017651.3,2439-2457).
catgatacggatatggaaa

SEQ ID NO: 360199 - DNA, 19 bp, Homo sapiens
  siRNA target sequence for AHI1 (NM_017651.3,2442-2460).
gatacggatatggaaagtt

SEQ ID NO: 360200 - DNA, 19 bp, Homo sapiens
  siRNA target sequence for AHI1 (NM_017651.3,2481-2499).
catattggtccgacagttt

SEQ ID NO: 360201 - DNA, 19 bp, Homo sapiens
  siRNA target sequence for AHI1 (NM_017651.3,2492-2510).
gacagtttgatgttcacaa

SEQ ID NO: 360202 - DNA, 19 bp, Homo sapiens
  siRNA target sequence for AHI1 (NM_017651.3,2496-2514).
gtttgatgttcacaaaagt

SEQ ID NO: 360203 - DNA, 19 bp, Homo sapiens
  siRNA target sequence for AHI1 (NM_017651.3,2503-2521).
gttcacaaaagttttatca

SEQ ID NO: 360204 - DNA, 19 bp, Homo sapiens
  siRNA target sequence for AHI1 (NM_017651.3,2540-2558).
ctgaaggtcatcatatgta

SEQ ID NO: 360205 - DNA, 19 bp, Homo sapiens
  siRNA target sequence for AHI1 (NM_017651.3,2556-2574).
gtattcaggagattgtaca

SEQ ID NO: 360206 - DNA, 19 bp, Homo sapiens
  siRNA target sequence for AHI1 (NM_017651.3,2570-2588).
gtacaggggtgattgttgt

SEQ ID NO: 360207 - DNA, 19 bp, Homo sapiens
  siRNA target sequence for AHI1 (NM_017651.3,2587-2605).
gtttggaatacctatgtca

SEQ ID NO: 360208 - DNA, 19 bp, Homo sapiens
  siRNA target sequence for AHI1 (NM_017651.3,2592-2610).
gaatacctatgtcaagatt

SEQ ID NO: 360209 - DNA, 19 bp, Homo sapiens
  siRNA target sequence for AHI1 (NM_017651.3,2597-2615).
cctatgtcaagattaatga

SEQ ID NO: 360210 - DNA, 19 bp, Homo sapiens
  siRNA target sequence for AHI1 (NM_017651.3,2637-2655).
ctggactataaataaggaa

SEQ ID NO: 360211 - DNA, 19 bp, Homo sapiens
  siRNA target sequence for AHI1 (NM_017651.3,2639-2657).
ggactataaataaggaaat

SEQ ID NO: 360212 - DNA, 19 bp, Homo sapiens
  siRNA target sequence for AHI1 (NM_017651.3,2668-2686).
gagtttaagggaattccaa

SEQ ID NO: 360213 - DNA, 19 bp, Homo sapiens
  siRNA target sequence for AHI1 (NM_017651.3,2670-2688).
gtttaagggaattccaata

SEQ ID NO: 360214 - DNA, 19 bp, Homo sapiens
  siRNA target sequence for AHI1 (NM_017651.3,2676-2694).
gggaattccaataagttat

SEQ ID NO: 360215 - DNA, 19 bp, Homo sapiens
  siRNA target sequence for AHI1 (NM_017651.3,2677-2695).
ggaattccaataagttatt

SEQ ID NO: 360216 - DNA, 19 bp, Homo sapiens
  siRNA target sequence for AHI1 (NM_017651.3,2704-2722).
catcccaatggaaaacgtt

SEQ ID NO: 360217 - DNA, 19 bp, Homo sapiens
  siRNA target sequence for AHI1 (NM_017651.3,2708-2726).
ccaatggaaaacgtttgtt

SEQ ID NO: 360218 - DNA, 19 bp, Homo sapiens
  siRNA target sequence for AHI1 (NM_017651.3,2720-2738).
gtttgttaatccataccaa

SEQ ID NO: 360219 - DNA, 19 bp, Homo sapiens
  siRNA target sequence for AHI1 (NM_017651.3,2760-2778).
ggatctccggatattagta

SEQ ID NO: 360220 - DNA, 19 bp, Homo sapiens
  siRNA target sequence for AHI1 (NM_017651.3,2809-2827).
cgggagaagattcatagta

SEQ ID NO: 360221 - DNA, 19 bp, Homo sapiens
  siRNA target sequence for AHI1 (NM_017651.3,2817-2835).
gattcatagtactttgact

SEQ ID NO: 360222 - DNA, 19 bp, Homo sapiens
  siRNA target sequence for AHI1 (NM_017651.3,2832-2850).
gactccatgtgggactttt

SEQ ID NO: 360223 - DNA, 19 bp, Homo sapiens
  siRNA target sequence for AHI1 (NM_017651.3,2864-2882).
gtgaggatggtatagtgta

SEQ ID NO: 360224 - DNA, 19 bp, Homo sapiens
  siRNA target sequence for AHI1 (NM_017651.3,2940-2958).
gtcacccattcgagacatt

SEQ ID NO: 360225 - DNA, 19 bp, Homo sapiens
  siRNA target sequence for AHI1 (NM_017651.3,2960-2978).
cttatcatccatttgaaaa

SEQ ID NO: 360226 - DNA, 19 bp, Homo sapiens
  siRNA target sequence for AHI1 (NM_017651.3,2991-3009).
ctgtgcatttgggcaaaat

SEQ ID NO: 360227 - DNA, 19 bp, Homo sapiens
  siRNA target sequence for AHI1 (NM_017651.3,3002-3020).
ggcaaaatgagccaattct

SEQ ID NO: 360228 - DNA, 19 bp, Homo sapiens
  siRNA target sequence for AHI1 (NM_017651.3,3024-3042).
gtatatttacgatttccat

SEQ ID NO: 360229 - DNA, 19 bp, Homo sapiens
  siRNA target sequence for AHI1 (NM_017651.3,3123-3141).
cctatgtacctgtccaaaa

SEQ ID NO: 360230 - DNA, 19 bp, Homo sapiens
  siRNA target sequence for AHI1 (NM_017651.3,3178-3196).
gtccacactgaaagttctt

SEQ ID NO: 360231 - DNA, 19 bp, Homo sapiens
  siRNA target sequence for AHI1 (NM_017651.3,3181-3199).
cacactgaaagttcttcaa

SEQ ID NO: 360232 - DNA, 19 bp, Homo sapiens
  siRNA target sequence for AHI1 (NM_017651.3,3200-3218).
cgaagatgcagctagtaaa

SEQ ID NO: 360233 - DNA, 19 bp, Homo sapiens
  siRNA target sequence for AHI1 (NM_017651.3,3235-3253).
gtcacagaggtgatacgtt

SEQ ID NO: 360234 - DNA, 19 bp, Homo sapiens
  siRNA target sequence for AHI1 (NM_017651.3,3308-3326).
cctcacaacagtctaagtt

SEQ ID NO: 360235 - DNA, 19 bp, Homo sapiens
  siRNA target sequence for AHI1 (NM_017651.3,3347-3365).
ccgctcaagagattctaca

SEQ ID NO: 360236 - DNA, 19 bp, Homo sapiens
  siRNA target sequence for AHI1 (NM_017651.3,3387-3405).
cgggattatcagcatagaa

SEQ ID NO: 360237 - DNA, 19 bp, Homo sapiens
  siRNA target sequence for AHI1 (NM_017651.3,3388-3406).
gggattatcagcatagaaa

SEQ ID NO: 360238 - DNA, 19 bp, Homo sapiens
  siRNA target sequence for AHI1 (NM_017651.3,3440-3458).
caacggtagtggctcttta

SEQ ID NO: 360239 - DNA, 19 bp, Homo sapiens
  siRNA target sequence for AHI1 (NM_017651.3,3443-3461).
cggtagtggctctttatga

SEQ ID NO: 360240 - DNA, 19 bp, Homo sapiens
  siRNA target sequence for AHI1 (NM_017651.3,3471-3489).
gaatcgatcagatgaacta

SEQ ID NO: 360241 - DNA, 19 bp, Homo sapiens
  siRNA target sequence for AHI1 (NM_017651.3,3476-3494).
gatcagatgaactaaccat

SEQ ID NO: 360242 - DNA, 19 bp, Homo sapiens
  siRNA target sequence for AHI1 (NM_017651.3,3505-3523).
gacattatccgagtgtttt

SEQ ID NO: 360243 - DNA, 19 bp, Homo sapiens
  siRNA target sequence for AHI1 (NM_017651.3,3545-3563).
ggtatggcagcataggaaa

SEQ ID NO: 360244 - DNA, 19 bp, Homo sapiens
  siRNA target sequence for AHI1 (NM_017651.3,3639-3657).
ggagcgatcccctccttta

SEQ ID NO: 360245 - DNA, 19 bp, Homo sapiens
  siRNA target sequence for AHI1 (NM_017651.3,3640-3658).
gagcgatcccctcctttaa

SEQ ID NO: 360246 - DNA, 19 bp, Homo sapiens
  siRNA target sequence for AHI1 (NM_017651.3,3740-3758).
gactaggctcagaatctat

SEQ ID NO: 360247 - DNA, 19 bp, Homo sapiens
  siRNA target sequence for AHI1 (NM_017651.3,3759-3777).
gacacattctgaaatgaga

SEQ ID NO: 360248 - DNA, 19 bp, Homo sapiens
  siRNA target sequence for AHI1 (NM_017651.3,3845-3863).
gcagaaaagtcactctaat

SEQ ID NO: 360249 - DNA, 19 bp, Homo sapiens
  siRNA target sequence for AHI1 (NM_017651.3,3846-3864).
cagaaaagtcactctaata

SEQ ID NO: 360250 - DNA, 19 bp, Homo sapiens
  siRNA target sequence for FLJ20071 (NM_017653.2,385-403).
gaatcggcgatcttcctaa

SEQ ID NO: 360251 - DNA, 19 bp, Homo sapiens
  siRNA target sequence for FLJ20071 (NM_017653.2,389-407).
cggcgatcttcctaaaaat

SEQ ID NO: 360252 - DNA, 19 bp, Homo sapiens
  siRNA target sequence for FLJ20071 (NM_017653.2,502-520).
gcagtagtgagttgaaact

SEQ ID NO: 360253 - DNA, 19 bp, Homo sapiens
  siRNA target sequence for FLJ20071 (NM_017653.2,505-523).
gtagtgagttgaaactctt

SEQ ID NO: 360254 - DNA, 19 bp, Homo sapiens
  siRNA target sequence for FLJ20071 (NM_017653.2,521-539).
cttggaggaagcaaccatt

SEQ ID NO: 360255 - DNA, 19 bp, Homo sapiens
  siRNA target sequence for FLJ20071 (NM_017653.2,646-664).
gtcagaaccacatcttcat

SEQ ID NO: 360256 - DNA, 19 bp, Homo sapiens
  siRNA target sequence for FLJ20071 (NM_017653.2,667-685).
ggcagacacacaatgcttt

SEQ ID NO: 360257 - DNA, 19 bp, Homo sapiens
  siRNA target sequence for FLJ20071 (NM_017653.2,673-691).
cacacaatgctttgtttat

SEQ ID NO: 360258 - DNA, 19 bp, Homo sapiens
  siRNA target sequence for FLJ20071 (NM_017653.2,675-693).
cacaatgctttgtttatta

SEQ ID NO: 360259 - DNA, 19 bp, Homo sapiens
  siRNA target sequence for FLJ20071 (NM_017653.2,697-715).
gctgtttgctgaaagtgtt

SEQ ID NO: 360260 - DNA, 19 bp, Homo sapiens
  siRNA target sequence for FLJ20071 (NM_017653.2,728-746).
gtcagaggaggaattacaa

SEQ ID NO: 360261 - DNA, 19 bp, Homo sapiens
  siRNA target sequence for FLJ20071 (NM_017653.2,836-854).
gttgatcactgatattcca

SEQ ID NO: 360262 - DNA, 19 bp, Homo sapiens
  siRNA target sequence for FLJ20071 (NM_017653.2,842-860).
cactgatattccactctta

SEQ ID NO: 360263 - DNA, 19 bp, Homo sapiens
  siRNA target sequence for FLJ20071 (NM_017653.2,852-870).
ccactcttagatattacat

SEQ ID NO: 360264 - DNA, 19 bp, Homo sapiens
  siRNA target sequence for FLJ20071 (NM_017653.2,882-900).
gtagaagctatatcaacaa

SEQ ID NO: 360265 - DNA, 19 bp, Homo sapiens
  siRNA target sequence for FLJ20071 (NM_017653.2,1005-1023).
cttgtgaagaccttattat

SEQ ID NO: 360266 - DNA, 19 bp, Homo sapiens
  siRNA target sequence for FLJ20071 (NM_017653.2,1230-1248).
ctggtgttggccaatctga

SEQ ID NO: 360267 - DNA, 19 bp, Homo sapiens
  siRNA target sequence for FLJ20071 (NM_017653.2,1273-1291).
cctacagacaagccattat

SEQ ID NO: 360268 - DNA, 19 bp, Homo sapiens
  siRNA target sequence for FLJ20071 (NM_017653.2,1341-1359).
catgccttccagatcaact

SEQ ID NO: 360269 - DNA, 19 bp, Homo sapiens
  siRNA target sequence for FLJ20071 (NM_017653.2,1349-1367).
ccagatcaactttaatagt

SEQ ID NO: 360270 - DNA, 19 bp, Homo sapiens
  siRNA target sequence for FLJ20071 (NM_017653.2,1370-1388).
gtacacagctctttgtgaa

SEQ ID NO: 360271 - DNA, 19 bp, Homo sapiens
  siRNA target sequence for FLJ20071 (NM_017653.2,1407-1425).
gcaactctcctcttgtata

SEQ ID NO: 360272 - DNA, 19 bp, Homo sapiens
  siRNA target sequence for FLJ20071 (NM_017653.2,1411-1429).
ctctcctcttgtatacctt

SEQ ID NO: 360273 - DNA, 19 bp, Homo sapiens
  siRNA target sequence for FLJ20071 (NM_017653.2,1430-1448).
gctccatcaaaatagtaat

SEQ ID NO: 360274 - DNA, 19 bp, Homo sapiens
  siRNA target sequence for FLJ20071 (NM_017653.2,1431-1449).
ctccatcaaaatagtaata

SEQ ID NO: 360275 - DNA, 19 bp, Homo sapiens
  siRNA target sequence for FLJ20071 (NM_017653.2,1466-1484).
ggctcgcacagatatggaa

SEQ ID NO: 360276 - DNA, 19 bp, Homo sapiens
  siRNA target sequence for FLJ20071 (NM_017653.2,1467-1485).
gctcgcacagatatggaaa

SEQ ID NO: 360277 - DNA, 19 bp, Homo sapiens
  siRNA target sequence for FLJ20071 (NM_017653.2,1474-1492).
cagatatggaaaatcttgt

SEQ ID NO: 360278 - DNA, 19 bp, Homo sapiens
  siRNA target sequence for FLJ20071 (NM_017653.2,1498-1516).
caattcttgagattctgta

SEQ ID NO: 360279 - DNA, 19 bp, Homo sapiens
  siRNA target sequence for FLJ20071 (NM_017653.2,1545-1563).
gtgtatatggcccttataa

SEQ ID NO: 360280 - DNA, 19 bp, Homo sapiens
  siRNA target sequence for FLJ20071 (NM_017653.2,1547-1565).
gtatatggcccttataata

SEQ ID NO: 360281 - DNA, 19 bp, Homo sapiens
  siRNA target sequence for FLJ20071 (NM_017653.2,1571-1589).
gatccttacggaagatgat

SEQ ID NO: 360282 - DNA, 19 bp, Homo sapiens
  siRNA target sequence for FLJ20071 (NM_017653.2,1600-1618).
gatccattcatgaagtgat

SEQ ID NO: 360283 - DNA, 19 bp, Homo sapiens
  siRNA target sequence for FLJ20071 (NM_017653.2,1636-1654).
ggtattcagaacgagtttt

SEQ ID NO: 360284 - DNA, 19 bp, Homo sapiens
  siRNA target sequence for FLJ20071 (NM_017653.2,1642-1660).
cagaacgagttttaactga

SEQ ID NO: 360285 - DNA, 19 bp, Homo sapiens
  siRNA target sequence for FLJ20071 (NM_017653.2,1644-1662).
gaacgagttttaactgaaa

SEQ ID NO: 360286 - DNA, 19 bp, Homo sapiens
  siRNA target sequence for FLJ20071 (NM_017653.2,1647-1665).
cgagttttaactgaaatct

SEQ ID NO: 360287 - DNA, 19 bp, Homo sapiens
  siRNA target sequence for FLJ20071 (NM_017653.2,1679-1697).
cctgatcctggtggtaata

SEQ ID NO: 360288 - DNA, 19 bp, Homo sapiens
  siRNA target sequence for FLJ20071 (NM_017653.2,1680-1698).
ctgatcctggtggtaataa

SEQ ID NO: 360289 - DNA, 19 bp, Homo sapiens
  siRNA target sequence for FLJ20071 (NM_017653.2,1682-1700).
gatcctggtggtaataaga

SEQ ID NO: 360290 - DNA, 19 bp, Homo sapiens
  siRNA target sequence for FLJ20071 (NM_017653.2,1688-1706).
ggtggtaataagaaccatt

SEQ ID NO: 360291 - DNA, 19 bp, Homo sapiens
  siRNA target sequence for FLJ20071 (NM_017653.2,1691-1709).
ggtaataagaaccattcaa

SEQ ID NO: 360292 - DNA, 19 bp, Homo sapiens
  siRNA target sequence for FLJ20071 (NM_017653.2,1692-1710).
gtaataagaaccattcaat

SEQ ID NO: 360293 - DNA, 19 bp, Homo sapiens
  siRNA target sequence for FLJ20071 (NM_017653.2,1720-1738).
ctaggacacgagacaagta

SEQ ID NO: 360294 - DNA, 19 bp, Homo sapiens
  siRNA target sequence for FLJ20071 (NM_017653.2,1753-1771).
gtttggcagctttagcaaa

SEQ ID NO: 360295 - DNA, 19 bp, Homo sapiens
  siRNA target sequence for FLJ20071 (NM_017653.2,1806-1824).
gctgcccagaggatcatca

SEQ ID NO: 360296 - DNA, 19 bp, Homo sapiens
  siRNA target sequence for FLJ20071 (NM_017653.2,1809-1827).
gcccagaggatcatcagtt

SEQ ID NO: 360297 - DNA, 19 bp, Homo sapiens
  siRNA target sequence for FLJ20071 (NM_017653.2,1888-1906).
gaggttcgctgagttctaa

SEQ ID NO: 360298 - DNA, 19 bp, Homo sapiens
  siRNA target sequence for FLJ20071 (NM_017653.2,1891-1909).
gttcgctgagttctaatga

SEQ ID NO: 360299 - DNA, 19 bp, Homo sapiens
  siRNA target sequence for FLJ20071 (NM_017653.2,1894-1912).
cgctgagttctaatgatgt

SEQ ID NO: 360300 - DNA, 19 bp, Homo sapiens
  siRNA target sequence for FLJ20071 (NM_017653.2,1895-1913).
gctgagttctaatgatgtt

SEQ ID NO: 360301 - DNA, 19 bp, Homo sapiens
  siRNA target sequence for FLJ20071 (NM_017653.2,1929-1947).
gcacaagacctaaatgtca

SEQ ID NO: 360302 - DNA, 19 bp, Homo sapiens
  siRNA target sequence for FLJ20071 (NM_017653.2,1930-1948).
cacaagacctaaatgtcat

SEQ ID NO: 360303 - DNA, 19 bp, Homo sapiens
  siRNA target sequence for FLJ20071 (NM_017653.2,1953-1971).
gaagtgattcgaatgatgt

SEQ ID NO: 360304 - DNA, 19 bp, Homo sapiens
  siRNA target sequence for FLJ20071 (NM_017653.2,2025-2043).
gtatacgccctgctttaca

SEQ ID NO: 360305 - DNA, 19 bp, Homo sapiens
  siRNA target sequence for FLJ20071 (NM_017653.2,2042-2060).
caaacgcgatctctttgaa

SEQ ID NO: 360306 - DNA, 19 bp, Homo sapiens
  siRNA target sequence for FLJ20071 (NM_017653.2,2052-2070).
ctctttgaacaatttcgaa

SEQ ID NO: 360307 - DNA, 19 bp, Homo sapiens
  siRNA target sequence for FLJ20071 (NM_017653.2,2068-2086).
gaactcatccttcatttca

SEQ ID NO: 360308 - DNA, 19 bp, Homo sapiens
  siRNA target sequence for FLJ20071 (NM_017653.2,2112-2130).
gtgatctccttctttagct

SEQ ID NO: 360309 - DNA, 19 bp, Homo sapiens
  siRNA target sequence for FLJ20071 (NM_017653.2,2166-2184).
gaacgggtcctggaaatca

SEQ ID NO: 360310 - DNA, 19 bp, Homo sapiens
  siRNA target sequence for FLJ20071 (NM_017653.2,2169-2187).
cgggtcctggaaatcatta

SEQ ID NO: 360311 - DNA, 19 bp, Homo sapiens
  siRNA target sequence for FLJ20071 (NM_017653.2,2170-2188).
gggtcctggaaatcattaa

SEQ ID NO: 360312 - DNA, 19 bp, Homo sapiens
  siRNA target sequence for FLJ20071 (NM_017653.2,2199-2217).
gttgcgctgcccaaagaca

SEQ ID NO: 360313 - DNA, 19 bp, Homo sapiens
  siRNA target sequence for FLJ20073 (NM_017654.2,259-277).
ggcaaagcaacttaacctt

SEQ ID NO: 360314 - DNA, 19 bp, Homo sapiens
  siRNA target sequence for FLJ20073 (NM_017654.2,297-315).
ggacaaaagaggatgtaaa

SEQ ID NO: 360315 - DNA, 19 bp, Homo sapiens
  siRNA target sequence for FLJ20073 (NM_017654.2,311-329).
gtaaatcagtggttagaaa

SEQ ID NO: 360316 - DNA, 19 bp, Homo sapiens
  siRNA target sequence for FLJ20073 (NM_017654.2,321-339).
ggttagaaagtcataagat

SEQ ID NO: 360317 - DNA, 19 bp, Homo sapiens
  siRNA target sequence for FLJ20073 (NM_017654.2,322-340).
gttagaaagtcataagatt

SEQ ID NO: 360318 - DNA, 19 bp, Homo sapiens
  siRNA target sequence for FLJ20073 (NM_017654.2,330-348).
gtcataagattgaccaaaa

SEQ ID NO: 360319 - DNA, 19 bp, Homo sapiens
  siRNA target sequence for FLJ20073 (NM_017654.2,386-404).
gcagtcttgaagtggttaa

SEQ ID NO: 360320 - DNA, 19 bp, Homo sapiens
  siRNA target sequence for FLJ20073 (NM_017654.2,447-465).
ctattcaaatagaagaact

SEQ ID NO: 360321 - DNA, 19 bp, Homo sapiens
  siRNA target sequence for FLJ20073 (NM_017654.2,486-504).
cagccattgaagattcgat

SEQ ID NO: 360322 - DNA, 19 bp, Homo sapiens
  siRNA target sequence for FLJ20073 (NM_017654.2,497-515).
gattcgattcagacatcta

SEQ ID NO: 360323 - DNA, 19 bp, Homo sapiens
  siRNA target sequence for FLJ20073 (NM_017654.2,501-519).
cgattcagacatctaagat

SEQ ID NO: 360324 - DNA, 19 bp, Homo sapiens
  siRNA target sequence for FLJ20073 (NM_017654.2,520-538).
gggaaagcccagtaaaaat

SEQ ID NO: 360325 - DNA, 19 bp, Homo sapiens
  siRNA target sequence for FLJ20073 (NM_017654.2,568-586).
ggaacgtagagaaacttca

SEQ ID NO: 360326 - DNA, 19 bp, Homo sapiens
  siRNA target sequence for FLJ20073 (NM_017654.2,569-587).
gaacgtagagaaacttcaa

SEQ ID NO: 360327 - DNA, 19 bp, Homo sapiens
  siRNA target sequence for FLJ20073 (NM_017654.2,629-647).
ccgtctgcaatgagtacaa

SEQ ID NO: 360328 - DNA, 19 bp, Homo sapiens
  siRNA target sequence for FLJ20073 (NM_017654.2,640-658).
gagtacaactgctaaaggt

SEQ ID NO: 360329 - DNA, 19 bp, Homo sapiens
  siRNA target sequence for FLJ20073 (NM_017654.2,645-663).
caactgctaaaggttctaa

SEQ ID NO: 360330 - DNA, 19 bp, Homo sapiens
  siRNA target sequence for FLJ20073 (NM_017654.2,657-675).
gttctaagtcactaaaagt

SEQ ID NO: 360331 - DNA, 19 bp, Homo sapiens
  siRNA target sequence for FLJ20073 (NM_017654.2,679-697).
gctcatagaagataaaata

SEQ ID NO: 360332 - DNA, 19 bp, Homo sapiens
  siRNA target sequence for FLJ20073 (NM_017654.2,776-794).
cgttacaagttggatttta

SEQ ID NO: 360333 - DNA, 19 bp, Homo sapiens
  siRNA target sequence for FLJ20073 (NM_017654.2,781-799).
caagttggattttagtcta

SEQ ID NO: 360334 - DNA, 19 bp, Homo sapiens
  siRNA target sequence for FLJ20073 (NM_017654.2,810-828).
caggaccaggcaatctcat

SEQ ID NO: 360335 - DNA, 19 bp, Homo sapiens
  siRNA target sequence for FLJ20073 (NM_017654.2,813-831).
gaccaggcaatctcattga

SEQ ID NO: 360336 - DNA, 19 bp, Homo sapiens
  siRNA target sequence for FLJ20073 (NM_017654.2,876-894).
cagaagaggatgtcaagat

SEQ ID NO: 360337 - DNA, 19 bp, Homo sapiens
  siRNA target sequence for FLJ20073 (NM_017654.2,908-926).
gaggttttccgatttgctt

SEQ ID NO: 360338 - DNA, 19 bp, Homo sapiens
  siRNA target sequence for FLJ20073 (NM_017654.2,1052-1070).
ctgatgataaacaagtatt

SEQ ID NO: 360339 - DNA, 19 bp, Homo sapiens
  siRNA target sequence for FLJ20073 (NM_017654.2,1136-1154).
ctgccaaatagtactctat

SEQ ID NO: 360340 - DNA, 19 bp, Homo sapiens
  siRNA target sequence for FLJ20073 (NM_017654.2,1138-1156).
gccaaatagtactctatct

SEQ ID NO: 360341 - DNA, 19 bp, Homo sapiens
  siRNA target sequence for FLJ20073 (NM_017654.2,1140-1158).
caaatagtactctatctga

SEQ ID NO: 360342 - DNA, 19 bp, Homo sapiens
  siRNA target sequence for FLJ20073 (NM_017654.2,1146-1164).
gtactctatctgacagatt

SEQ ID NO: 360343 - DNA, 19 bp, Homo sapiens
  siRNA target sequence for FLJ20073 (NM_017654.2,1166-1184).
gttattgaagtggacatta

SEQ ID NO: 360344 - DNA, 19 bp, Homo sapiens
  siRNA target sequence for FLJ20073 (NM_017654.2,1195-1213).
ctctgaatgccaatatgat

SEQ ID NO: 360345 - DNA, 19 bp, Homo sapiens
  siRNA target sequence for FLJ20073 (NM_017654.2,1263-1281).
gtaaaaaattctcactatt

SEQ ID NO: 360346 - DNA, 19 bp, Homo sapiens
  siRNA target sequence for FLJ20073 (NM_017654.2,1300-1318).
ctctaaggacattacgaaa

SEQ ID NO: 360347 - DNA, 19 bp, Homo sapiens
  siRNA target sequence for FLJ20073 (NM_017654.2,1302-1320).
ctaaggacattacgaaaaa

SEQ ID NO: 360348 - DNA, 19 bp, Homo sapiens
  siRNA target sequence for FLJ20073 (NM_017654.2,1431-1449).
caaagttggttaaattatt

SEQ ID NO: 360349 - DNA, 19 bp, Homo sapiens
  siRNA target sequence for FLJ20073 (NM_017654.2,1435-1453).
gttggttaaattattgaca

SEQ ID NO: 360350 - DNA, 19 bp, Homo sapiens
  siRNA target sequence for FLJ20073 (NM_017654.2,1468-1486).
gttagataattcatactat

SEQ ID NO: 360351 - DNA, 19 bp, Homo sapiens
  siRNA target sequence for FLJ20073 (NM_017654.2,1516-1534).
ccacccagatcaaacaaaa

SEQ ID NO: 360352 - DNA, 19 bp, Homo sapiens
  siRNA target sequence for FLJ20073 (NM_017654.2,1530-1548).
caaaacacttagatttcct

SEQ ID NO: 360353 - DNA, 19 bp, Homo sapiens
  siRNA target sequence for FLJ20073 (NM_017654.2,1682-1700).
ccaaatgagacgatttcta

SEQ ID NO: 360354 - DNA, 19 bp, Homo sapiens
  siRNA target sequence for FLJ20073 (NM_017654.2,1785-1803).
caagttcctggcaaagaga

SEQ ID NO: 360355 - DNA, 19 bp, Homo sapiens
  siRNA target sequence for FLJ20073 (NM_017654.2,1877-1895).
gtggtatttctattactgt

SEQ ID NO: 360356 - DNA, 19 bp, Homo sapiens
  siRNA target sequence for FLJ20073 (NM_017654.2,1941-1959).
ctttctaccaggatctcaa

SEQ ID NO: 360357 - DNA, 19 bp, Homo sapiens
  siRNA target sequence for FLJ20073 (NM_017654.2,2008-2026).
gggatggaaagatctactt

SEQ ID NO: 360358 - DNA, 19 bp, Homo sapiens
  siRNA target sequence for FLJ20073 (NM_017654.2,2021-2039).
ctacttgaagcaagattaa

SEQ ID NO: 360359 - DNA, 19 bp, Homo sapiens
  siRNA target sequence for FLJ20073 (NM_017654.2,2054-2072).
gaaatttcaagccaatgta

SEQ ID NO: 360360 - DNA, 19 bp, Homo sapiens
  siRNA target sequence for FLJ20073 (NM_017654.2,2065-2083).
ccaatgtatttctgcttta

SEQ ID NO: 360361 - DNA, 19 bp, Homo sapiens
  siRNA target sequence for FLJ20073 (NM_017654.2,2146-2164).
gcttttgccatctattggt

SEQ ID NO: 360362 - DNA, 19 bp, Homo sapiens
  siRNA target sequence for FLJ20073 (NM_017654.2,2147-2165).
cttttgccatctattggtt

SEQ ID NO: 360363 - DNA, 19 bp, Homo sapiens
  siRNA target sequence for FLJ20073 (NM_017654.2,2153-2171).
ccatctattggtttatcga

SEQ ID NO: 360364 - DNA, 19 bp, Homo sapiens
  siRNA target sequence for FLJ20073 (NM_017654.2,2169-2187).
cgactgtccttctgaaaaa

SEQ ID NO: 360365 - DNA, 19 bp, Homo sapiens
  siRNA target sequence for FLJ20073 (NM_017654.2,2237-2255).
gagggtacactgttagaga

SEQ ID NO: 360366 - DNA, 19 bp, Homo sapiens
  siRNA target sequence for FLJ20073 (NM_017654.2,2394-2412).
gacttgaagcaatgattca

SEQ ID NO: 360367 - DNA, 19 bp, Homo sapiens
  siRNA target sequence for FLJ20073 (NM_017654.2,2501-2519).
cacattctctgggaactaa

SEQ ID NO: 360368 - DNA, 19 bp, Homo sapiens
  siRNA target sequence for FLJ20073 (NM_017654.2,2582-2600).
caggtaaccagtttaatca

SEQ ID NO: 360369 - DNA, 19 bp, Homo sapiens
  siRNA target sequence for FLJ20073 (NM_017654.2,2610-2628).
caatgaaccgtcaggaata

SEQ ID NO: 360370 - DNA, 19 bp, Homo sapiens
  siRNA target sequence for FLJ20073 (NM_017654.2,2614-2632).
gaaccgtcaggaatacgta

SEQ ID NO: 360371 - DNA, 19 bp, Homo sapiens
  siRNA target sequence for FLJ20073 (NM_017654.2,2623-2641).
ggaatacgtacctgtacta

SEQ ID NO: 360372 - DNA, 19 bp, Homo sapiens
  siRNA target sequence for FLJ20073 (NM_017654.2,2634-2652).
ctgtactactccttgttga

SEQ ID NO: 360373 - DNA, 19 bp, Homo sapiens
  siRNA target sequence for FLJ20073 (NM_017654.2,2684-2702).
ctgcagtactctattcaaa

SEQ ID NO: 360374 - DNA, 19 bp, Homo sapiens
  siRNA target sequence for FLJ20073 (NM_017654.2,2692-2710).
ctctattcaaacagctata

SEQ ID NO: 360375 - DNA, 19 bp, Homo sapiens
  siRNA target sequence for FLJ20073 (NM_017654.2,2699-2717).
caaacagctatagctaaaa

SEQ ID NO: 360376 - DNA, 19 bp, Homo sapiens
  siRNA target sequence for FLJ20073 (NM_017654.2,2703-2721).
cagctatagctaaaaagta

SEQ ID NO: 360377 - DNA, 19 bp, Homo sapiens
  siRNA target sequence for FLJ20073 (NM_017654.2,2712-2730).
ctaaaaagtacattcgata

SEQ ID NO: 360378 - DNA, 19 bp, Homo sapiens
  siRNA target sequence for FLJ20073 (NM_017654.2,2738-2756).
cctctggtgattatcctaa

SEQ ID NO: 360379 - DNA, 19 bp, Homo sapiens
  siRNA target sequence for FLJ20073 (NM_017654.2,2741-2759).
ctggtgattatcctaaatt

SEQ ID NO: 360380 - DNA, 19 bp, Homo sapiens
  siRNA target sequence for FLJ20073 (NM_017654.2,2846-2864).
gcttttgagcttaaattga

SEQ ID NO: 360381 - DNA, 19 bp, Homo sapiens
  siRNA target sequence for FLJ20073 (NM_017654.2,3019-3037).
ggctcttcttaattcatat

SEQ ID NO: 360382 - DNA, 19 bp, Homo sapiens
  siRNA target sequence for FLJ20073 (NM_017654.2,3048-3066).
ccaccatttcactatcaca

SEQ ID NO: 360383 - DNA, 19 bp, Homo sapiens
  siRNA target sequence for FLJ20073 (NM_017654.2,3136-3154).
gggcacctactctacaatt

SEQ ID NO: 360384 - DNA, 19 bp, Homo sapiens
  siRNA target sequence for FLJ20073 (NM_017654.2,3141-3159).
cctactctacaattctgat

SEQ ID NO: 360385 - DNA, 19 bp, Homo sapiens
  siRNA target sequence for FLJ20073 (NM_017654.2,3142-3160).
ctactctacaattctgata

SEQ ID NO: 360386 - DNA, 19 bp, Homo sapiens
  siRNA target sequence for FLJ20073 (NM_017654.2,3190-3208).
ctgtggagtacgcatcatt

SEQ ID NO: 360387 - DNA, 19 bp, Homo sapiens
  siRNA target sequence for FLJ20073 (NM_017654.2,3192-3210).
gtggagtacgcatcattca

SEQ ID NO: 360388 - DNA, 19 bp, Homo sapiens
  siRNA target sequence for FLJ20073 (NM_017654.2,3194-3212).
ggagtacgcatcattcact

SEQ ID NO: 360389 - DNA, 19 bp, Homo sapiens
  siRNA target sequence for FLJ20073 (NM_017654.2,3253-3271).
ctatcacctgaataaaagt

SEQ ID NO: 360390 - DNA, 19 bp, Homo sapiens
  siRNA target sequence for FLJ20073 (NM_017654.2,3366-3384).
caagacaccgcgatgaaca

SEQ ID NO: 360391 - DNA, 19 bp, Homo sapiens
  siRNA target sequence for FLJ20073 (NM_017654.2,3369-3387).
gacaccgcgatgaacatga

SEQ ID NO: 360392 - DNA, 19 bp, Homo sapiens
  siRNA target sequence for FLJ20073 (NM_017654.2,3405-3423).
ggttttccccatttattga

SEQ ID NO: 360393 - DNA, 19 bp, Homo sapiens
  siRNA target sequence for FLJ20073 (NM_017654.2,3453-3471).
cagttgaagctgtattgct

SEQ ID NO: 360394 - DNA, 19 bp, Homo sapiens
  siRNA target sequence for FLJ20073 (NM_017654.2,3485-3503).
cggttcaacccaaatgcat

SEQ ID NO: 360395 - DNA, 19 bp, Homo sapiens
  siRNA target sequence for FLJ20073 (NM_017654.2,3589-3607).
catagaacctgacaattct

SEQ ID NO: 360396 - DNA, 19 bp, Homo sapiens
  siRNA target sequence for FLJ20073 (NM_017654.2,3593-3611).
gaacctgacaattcttata

SEQ ID NO: 360397 - DNA, 19 bp, Homo sapiens
  siRNA target sequence for FLJ20073 (NM_017654.2,3682-3700).
gaacatttcagttgatgat

SEQ ID NO: 360398 - DNA, 19 bp, Homo sapiens
  siRNA target sequence for FLJ20073 (NM_017654.2,3701-3719).
ctaattgctcttttggatt

SEQ ID NO: 360399 - DNA, 19 bp, Homo sapiens
  siRNA target sequence for FLJ20073 (NM_017654.2,3795-3813).
gattgtatccgaagtcaaa

SEQ ID NO: 360400 - DNA, 19 bp, Homo sapiens
  siRNA target sequence for FLJ20073 (NM_017654.2,3808-3826).
gtcaaaaaggcggtatgat

SEQ ID NO: 360401 - DNA, 19 bp, Homo sapiens
  siRNA target sequence for FLJ20073 (NM_017654.2,3816-3834).
ggcggtatgatacttacaa

SEQ ID NO: 360402 - DNA, 19 bp, Homo sapiens
  siRNA target sequence for FLJ20073 (NM_017654.2,3817-3835).
gcggtatgatacttacaat

SEQ ID NO: 360403 - DNA, 19 bp, Homo sapiens
  siRNA target sequence for FLJ20073 (NM_017654.2,3818-3836).
cggtatgatacttacaata

SEQ ID NO: 360404 - DNA, 19 bp, Homo sapiens
  siRNA target sequence for FLJ20073 (NM_017654.2,3820-3838).
gtatgatacttacaatata

SEQ ID NO: 360405 - DNA, 19 bp, Homo sapiens
  siRNA target sequence for FLJ20073 (NM_017654.2,3866-3884).
gggctttacacaatccaaa

SEQ ID NO: 360406 - DNA, 19 bp, Homo sapiens
  siRNA target sequence for FLJ20073 (NM_017654.2,3867-3885).
ggctttacacaatccaaat

SEQ ID NO: 360407 - DNA, 19 bp, Homo sapiens
  siRNA target sequence for FLJ20073 (NM_017654.2,3920-3938).
gagctatctaaaagatata

SEQ ID NO: 360408 - DNA, 19 bp, Homo sapiens
  siRNA target sequence for FLJ20073 (NM_017654.2,3950-3968).
gtatcaggaagtagtgata

SEQ ID NO: 360409 - DNA, 19 bp, Homo sapiens
  siRNA target sequence for FLJ20073 (NM_017654.2,3974-3992).
ggggatccaaacaatgaat

SEQ ID NO: 360410 - DNA, 19 bp, Homo sapiens
  siRNA target sequence for FLJ20073 (NM_017654.2,3975-3993).
gggatccaaacaatgaata

SEQ ID NO: 360411 - DNA, 19 bp, Homo sapiens
  siRNA target sequence for FLJ20073 (NM_017654.2,4004-4022).
ctcaaaaactatattcctt

SEQ ID NO: 360412 - DNA, 19 bp, Homo sapiens
  siRNA target sequence for FLJ20073 (NM_017654.2,4096-4114).
caggaacaatattaagcaa

SEQ ID NO: 360413 - DNA, 19 bp, Homo sapiens
  siRNA target sequence for FLJ20073 (NM_017654.2,4179-4197).
gtctcttagaagaatcaca

SEQ ID NO: 360414 - DNA, 19 bp, Homo sapiens
  siRNA target sequence for FLJ20073 (NM_017654.2,4225-4243).
cagtgagccacttcaagta

SEQ ID NO: 360415 - DNA, 19 bp, Homo sapiens
  siRNA target sequence for FLJ20073 (NM_017654.2,4246-4264).
gagatgcaggagaaaccta

SEQ ID NO: 360416 - DNA, 19 bp, Homo sapiens
  siRNA target sequence for FLJ20073 (NM_017654.2,4255-4273).
gagaaacctagtagcttta

SEQ ID NO: 360417 - DNA, 19 bp, Homo sapiens
  siRNA target sequence for FLJ20073 (NM_017654.2,4261-4279).
cctagtagctttaaaagca

SEQ ID NO: 360418 - DNA, 19 bp, Homo sapiens
  siRNA target sequence for FLJ20073 (NM_017654.2,4319-4337).
caagaggatgctataagca

SEQ ID NO: 360419 - DNA, 19 bp, Homo sapiens
  siRNA target sequence for FLJ20073 (NM_017654.2,4325-4343).
gatgctataagcactatga

SEQ ID NO: 360420 - DNA, 19 bp, Homo sapiens
  siRNA target sequence for FLJ20073 (NM_017654.2,4357-4375).
cgaatatacttttctctta

SEQ ID NO: 360421 - DNA, 19 bp, Homo sapiens
  siRNA target sequence for FLJ20073 (NM_017654.2,4399-4417).
gtcaaaagaaaagctaaat

SEQ ID NO: 360422 - DNA, 19 bp, Homo sapiens
  siRNA target sequence for FLJ20073 (NM_017654.2,4454-4472).
cctacctccagattagtaa

SEQ ID NO: 360423 - DNA, 19 bp, Homo sapiens
  siRNA target sequence for FLJ20073 (NM_017654.2,4455-4473).
ctacctccagattagtaaa

SEQ ID NO: 360424 - DNA, 19 bp, Homo sapiens
  siRNA target sequence for FLJ20073 (NM_017654.2,4518-4536).
caataggactgacttatca

SEQ ID NO: 360425 - DNA, 19 bp, Homo sapiens
  siRNA target sequence for FLJ20073 (NM_017654.2,4523-4541).
ggactgacttatcagtttt

SEQ ID NO: 360426 - DNA, 19 bp, Homo sapiens
  siRNA target sequence for FLJ20073 (NM_017654.2,4528-4546).
gacttatcagttttcagaa

SEQ ID NO: 360427 - DNA, 19 bp, Homo sapiens
  siRNA target sequence for FLJ20073 (NM_017654.2,4537-4555).
gttttcagaaccgtatttt

SEQ ID NO: 360428 - DNA, 19 bp, Homo sapiens
  siRNA target sequence for FLJ20073 (NM_017654.2,4556-4574).
ctagcttccctcttattct

SEQ ID NO: 360429 - DNA, 19 bp, Homo sapiens
  siRNA target sequence for FLJ20073 (NM_017654.2,4621-4639).
gtatgctcaagcactaaaa

SEQ ID NO: 360430 - DNA, 19 bp, Homo sapiens
  siRNA target sequence for FLJ20073 (NM_017654.2,4628-4646).
caagcactaaaaaattctt

SEQ ID NO: 360431 - DNA, 19 bp, Homo sapiens
  siRNA target sequence for FLJ20073 (NM_017654.2,4677-4695).
caaagcaaccaattgcata

SEQ ID NO: 360432 - DNA, 19 bp, Homo sapiens
  siRNA target sequence for FLJ20073 (NM_017654.2,4713-4731).
gtaaaagactggaaagact

SEQ ID NO: 360433 - DNA, 19 bp, Homo sapiens
  siRNA target sequence for FLJ20073 (NM_017654.2,4719-4737).
gactggaaagacttgttca

SEQ ID NO: 360434 - DNA, 19 bp, Homo sapiens
  siRNA target sequence for FLJ20073 (NM_017654.2,4765-4783).
gaagacaccagatattaat

SEQ ID NO: 360435 - DNA, 19 bp, Homo sapiens
  siRNA target sequence for FLJ20073 (NM_017654.2,4853-4871).
cgagctgaaaacaattgtt

SEQ ID NO: 360436 - DNA, 19 bp, Homo sapiens
  siRNA target sequence for FLJ20073 (NM_017654.2,4864-4882).
caattgtttatatatagaa

SEQ ID NO: 360437 - DNA, 19 bp, Homo sapiens
  siRNA target sequence for FLJ20073 (NM_017654.2,4880-4898).
gaatatggaatcaatgaaa

SEQ ID NO: 360438 - DNA, 19 bp, Homo sapiens
  siRNA target sequence for FLJ20073 (NM_017654.2,4910-4928).
cccatcactcccgcttttt

SEQ ID NO: 360439 - DNA, 19 bp, Homo sapiens
  siRNA target sequence for FLJ20073 (NM_017654.2,4911-4929).
ccatcactcccgctttttt

SEQ ID NO: 360440 - DNA, 19 bp, Homo sapiens
  siRNA target sequence for FLJ20073 (NM_017654.2,4912-4930).
catcactcccgctttttta

SEQ ID NO: 360441 - DNA, 19 bp, Homo sapiens
  siRNA target sequence for FLJ20073 (NM_017654.2,4921-4939).
cgcttttttaggtcaactt

SEQ ID NO: 360442 - DNA, 19 bp, Homo sapiens
  siRNA target sequence for FLJ20073 (NM_017654.2,4922-4940).
gcttttttaggtcaactta

SEQ ID NO: 360443 - DNA, 19 bp, Homo sapiens
  siRNA target sequence for FLJ20073 (NM_017654.2,4953-4971).
gcatagagaaggtgtcttt

SEQ ID NO: 360444 - DNA, 19 bp, Homo sapiens
  siRNA target sequence for FLJ20073 (NM_017654.2,4992-5010).
gaggcccacttgcttatga

SEQ ID NO: 360445 - DNA, 19 bp, Homo sapiens
  siRNA target sequence for FLJ20073 (NM_017654.2,4994-5012).
ggcccacttgcttatgaca

SEQ ID NO: 360446 - DNA, 19 bp, Homo sapiens
  siRNA target sequence for FLJ20084 (NM_017659.1,160-178).
gtgggctcggcgttctaca

SEQ ID NO: 360447 - DNA, 19 bp, Homo sapiens
  siRNA target sequence for FLJ20084 (NM_017659.1,169-187).
gcgttctacaccatttgga

SEQ ID NO: 360448 - DNA, 19 bp, Homo sapiens
  siRNA target sequence for FLJ20084 (NM_017659.1,303-321).
gcgtctctggagcacttat

SEQ ID NO: 360449 - DNA, 19 bp, Homo sapiens
  siRNA target sequence for FLJ20084 (NM_017659.1,305-323).
gtctctggagcacttatct

SEQ ID NO: 360450 - DNA, 19 bp, Homo sapiens
  siRNA target sequence for FLJ20084 (NM_017659.1,519-537).
cacccttgcctgccattat

SEQ ID NO: 360451 - DNA, 19 bp, Homo sapiens
  siRNA target sequence for FLJ20084 (NM_017659.1,558-576).
cggatcgaccccctttgta

SEQ ID NO: 360452 - DNA, 19 bp, Homo sapiens
  siRNA target sequence for FLJ20084 (NM_017659.1,761-779).
cccagctcatggagtctat

SEQ ID NO: 360453 - DNA, 19 bp, Homo sapiens
  siRNA target sequence for FLJ20084 (NM_017659.1,762-780).
ccagctcatggagtctata

SEQ ID NO: 360454 - DNA, 19 bp, Homo sapiens
  siRNA target sequence for FLJ20084 (NM_017659.1,765-783).
gctcatggagtctatacct

SEQ ID NO: 360455 - DNA, 19 bp, Homo sapiens
  siRNA target sequence for FLJ20084 (NM_017659.1,901-919).
cggctgaggagcattgaga

SEQ ID NO: 360456 - DNA, 19 bp, Homo sapiens
  siRNA target sequence for FLJ20084 (NM_017659.1,902-920).
ggctgaggagcattgagaa

SEQ ID NO: 360457 - DNA, 19 bp, Homo sapiens
  siRNA target sequence for FLJ20084 (NM_017659.1,956-974).
cccaggaagtgatgtactt

SEQ ID NO: 360458 - DNA, 19 bp, Homo sapiens
  siRNA target sequence for FLJ20084 (NM_017659.1,1115-1133).
cacccacggtacacaactt

SEQ ID NO: 360459 - DNA, 19 bp, Homo sapiens
  siRNA target sequence for FLJ20084 (NM_017659.1,1117-1135).
cccacggtacacaacttgt

SEQ ID NO: 360460 - DNA, 19 bp, Homo sapiens
  siRNA target sequence for FLJ20084 (NM_017659.1,1148-1166).
ctgtgttcctggctgaata

SEQ ID NO: 360461 - DNA, 19 bp, Homo sapiens
  siRNA target sequence for ANKRD10 (NM_017664.1,456-474).
cctggtctggctgattcaa

SEQ ID NO: 360462 - DNA, 19 bp, Homo sapiens
  siRNA target sequence for ANKRD10 (NM_017664.1,472-490).
caagcaggagccaacatta

SEQ ID NO: 360463 - DNA, 19 bp, Homo sapiens
  siRNA target sequence for ANKRD10 (NM_017664.1,581-599).
ctcacgtcgacctgagaaa

SEQ ID NO: 360464 - DNA, 19 bp, Homo sapiens
  siRNA target sequence for ANKRD10 (NM_017664.1,664-682).
ctcttgaacctccagaatt

SEQ ID NO: 360465 - DNA, 19 bp, Homo sapiens
  siRNA target sequence for ANKRD10 (NM_017664.1,669-687).
gaacctccagaattgtcat

SEQ ID NO: 360466 - DNA, 19 bp, Homo sapiens
  siRNA target sequence for ANKRD10 (NM_017664.1,699-717).
ctataacaatggcatctta

SEQ ID NO: 360467 - DNA, 19 bp, Homo sapiens
  siRNA target sequence for ANKRD10 (NM_017664.1,722-740).
ggggtcatcagaatgtatt

SEQ ID NO: 360468 - DNA, 19 bp, Homo sapiens
  siRNA target sequence for ANKRD10 (NM_017664.1,723-741).
gggtcatcagaatgtattt

SEQ ID NO: 360469 - DNA, 19 bp, Homo sapiens
  siRNA target sequence for ANKRD10 (NM_017664.1,732-750).
gaatgtatttcctaatcat

SEQ ID NO: 360470 - DNA, 19 bp, Homo sapiens
  siRNA target sequence for ANKRD10 (NM_017664.1,736-754).
gtatttcctaatcatatta

SEQ ID NO: 360471 - DNA, 19 bp, Homo sapiens
  siRNA target sequence for ANKRD10 (NM_017664.1,933-951).
cagtagctccgtatcgaat

SEQ ID NO: 360472 - DNA, 19 bp, Homo sapiens
  siRNA target sequence for ANKRD10 (NM_017664.1,938-956).
gctccgtatcgaatacatt

SEQ ID NO: 360473 - DNA, 19 bp, Homo sapiens
  siRNA target sequence for ANKRD10 (NM_017664.1,942-960).
cgtatcgaatacattgaca

SEQ ID NO: 360474 - DNA, 19 bp, Homo sapiens
  siRNA target sequence for ANKRD10 (NM_017664.1,943-961).
gtatcgaatacattgacaa

SEQ ID NO: 360475 - DNA, 19 bp, Homo sapiens
  siRNA target sequence for ANKRD10 (NM_017664.1,959-977).
caaatggatgtgtcatcaa

SEQ ID NO: 360476 - DNA, 19 bp, Homo sapiens
  siRNA target sequence for ANKRD10 (NM_017664.1,1048-1066).
ggaactaacggaattagca

SEQ ID NO: 360477 - DNA, 19 bp, Homo sapiens
  siRNA target sequence for ANKRD10 (NM_017664.1,1310-1328).
gtgtggtcgagcattccaa

SEQ ID NO: 360478 - DNA, 19 bp, Homo sapiens
  siRNA target sequence for NDE1 (NM_017668.1,95-113).
gaggactccggaaagactt

SEQ ID NO: 360479 - DNA, 19 bp, Homo sapiens
  siRNA target sequence for NDE1 (NM_017668.1,98-116).
gactccggaaagactttca

SEQ ID NO: 360480 - DNA, 19 bp, Homo sapiens
  siRNA target sequence for NDE1 (NM_017668.1,128-146).
gaagaagctaactattgga

SEQ ID NO: 360481 - DNA, 19 bp, Homo sapiens
  siRNA target sequence for NDE1 (NM_017668.1,135-153).
ctaactattggaaagatct

SEQ ID NO: 360482 - DNA, 19 bp, Homo sapiens
  siRNA target sequence for NDE1 (NM_017668.1,155-173).
gcgatgacctacaaacaga

SEQ ID NO: 360483 - DNA, 19 bp, Homo sapiens
  siRNA target sequence for NDE1 (NM_017668.1,214-232).
gggaagccgagaatatgaa

SEQ ID NO: 360484 - DNA, 19 bp, Homo sapiens
  siRNA target sequence for NDE1 (NM_017668.1,246-264).
cgcagctgcaacaaattga

SEQ ID NO: 360485 - DNA, 19 bp, Homo sapiens
  siRNA target sequence for NDE1 (NM_017668.1,247-265).
gcagctgcaacaaattgaa

SEQ ID NO: 360486 - DNA, 19 bp, Homo sapiens
  siRNA target sequence for NDE1 (NM_017668.1,405-423).
ccattaaagaccaattgca

SEQ ID NO: 360487 - DNA, 19 bp, Homo sapiens
  siRNA target sequence for NDE1 (NM_017668.1,487-505).
catgtctctcgaagacttt

SEQ ID NO: 360488 - DNA, 19 bp, Homo sapiens
  siRNA target sequence for NDE1 (NM_017668.1,749-767).
cgaggacccagctcaagtt

SEQ ID NO: 360489 - DNA, 19 bp, Homo sapiens
  siRNA target sequence for NDE1 (NM_017668.1,750-768).
gaggacccagctcaagttt

SEQ ID NO: 360490 - DNA, 19 bp, Homo sapiens
  siRNA target sequence for NDE1 (NM_017668.1,752-770).
ggacccagctcaagtttaa

SEQ ID NO: 360491 - DNA, 19 bp, Homo sapiens
  siRNA target sequence for NDE1 (NM_017668.1,753-771).
gacccagctcaagtttaaa

SEQ ID NO: 360492 - DNA, 19 bp, Homo sapiens
  siRNA target sequence for NDE1 (NM_017668.1,965-983).
gggcggagcagcaagaaca

SEQ ID NO: 360493 - DNA, 19 bp, Homo sapiens
  siRNA target sequence for NDE1 (NM_017668.1,1017-1035).
gcgtgcctttgggtgataa

SEQ ID NO: 360494 - DNA, 19 bp, Homo sapiens
  siRNA target sequence for NDE1 (NM_017668.1,1054-1072).
ccgctggttgtccaaatca

SEQ ID NO: 360495 - DNA, 19 bp, Homo sapiens
  siRNA target sequence for NDE1 (NM_017668.1,1055-1073).
cgctggttgtccaaatcaa

SEQ ID NO: 360496 - DNA, 19 bp, Homo sapiens
  siRNA target sequence for C1orf26 (NM_017673.4,223-241).
ccacctcatcacccaattt

SEQ ID NO: 360497 - DNA, 19 bp, Homo sapiens
  siRNA target sequence for C1orf26 (NM_017673.4,224-242).
cacctcatcacccaatttt

SEQ ID NO: 360498 - DNA, 19 bp, Homo sapiens
  siRNA target sequence for C1orf26 (NM_017673.4,227-245).
ctcatcacccaattttggt

SEQ ID NO: 360499 - DNA, 19 bp, Homo sapiens
  siRNA target sequence for C1orf26 (NM_017673.4,273-291).
ccagcaagttctactagtt

SEQ ID NO: 360500 - DNA, 19 bp, Homo sapiens
  siRNA target sequence for C1orf26 (NM_017673.4,337-355).
cagatcatacagatgttct

SEQ ID NO: 360501 - DNA, 19 bp, Homo sapiens
  siRNA target sequence for C1orf26 (NM_017673.4,351-369).
gttctgtactataatataa

SEQ ID NO: 360502 - DNA, 19 bp, Homo sapiens
  siRNA target sequence for C1orf26 (NM_017673.4,503-521).
gcagagtccttcttcaaat

SEQ ID NO: 360503 - DNA, 19 bp, Homo sapiens
  siRNA target sequence for C1orf26 (NM_017673.4,561-579).
cctaaagatatcaaattga

SEQ ID NO: 360504 - DNA, 19 bp, Homo sapiens
  siRNA target sequence for C1orf26 (NM_017673.4,617-635).
ccttagtagtcctaagatt

SEQ ID NO: 360505 - DNA, 19 bp, Homo sapiens
  siRNA target sequence for C1orf26 (NM_017673.4,636-654).
gccagtgatgtgaaaccta

SEQ ID NO: 360506 - DNA, 19 bp, Homo sapiens
  siRNA target sequence for C1orf26 (NM_017673.4,637-655).
ccagtgatgtgaaacctaa

SEQ ID NO: 360507 - DNA, 19 bp, Homo sapiens
  siRNA target sequence for C1orf26 (NM_017673.4,926-944).
caacatagattctaataat

SEQ ID NO: 360508 - DNA, 19 bp, Homo sapiens
  siRNA target sequence for C1orf26 (NM_017673.4,937-955).
ctaataattcgaagactaa

SEQ ID NO: 360509 - DNA, 19 bp, Homo sapiens
  siRNA target sequence for C1orf26 (NM_017673.4,982-1000).
gctcccaggtttcattaaa

SEQ ID NO: 360510 - DNA, 19 bp, Homo sapiens
  siRNA target sequence for C1orf26 (NM_017673.4,985-1003).
cccaggtttcattaaatgt

SEQ ID NO: 360511 - DNA, 19 bp, Homo sapiens
  siRNA target sequence for C1orf26 (NM_017673.4,1004-1022).
gactaggcagaaaactgaa

SEQ ID NO: 360512 - DNA, 19 bp, Homo sapiens
  siRNA target sequence for C1orf26 (NM_017673.4,1056-1074).
gttcatgagtggaaacgaa

SEQ ID NO: 360513 - DNA, 19 bp, Homo sapiens
  siRNA target sequence for C1orf26 (NM_017673.4,1108-1126).
cacattctagggaaaacct

SEQ ID NO: 360514 - DNA, 19 bp, Homo sapiens
  siRNA target sequence for C1orf26 (NM_017673.4,1222-1240).
cacgtgtgggaaaaagtgt

SEQ ID NO: 360515 - DNA, 19 bp, Homo sapiens
  siRNA target sequence for C1orf26 (NM_017673.4,1398-1416).
gaagtaccaggttttgaca

SEQ ID NO: 360516 - DNA, 19 bp, Homo sapiens
  siRNA target sequence for C1orf26 (NM_017673.4,1503-1521).
gctatacctgcagttcatt

SEQ ID NO: 360517 - DNA, 19 bp, Homo sapiens
  siRNA target sequence for C1orf26 (NM_017673.4,1504-1522).
ctatacctgcagttcattt

SEQ ID NO: 360518 - DNA, 19 bp, Homo sapiens
  siRNA target sequence for C1orf26 (NM_017673.4,1509-1527).
cctgcagttcatttcatca

SEQ ID NO: 360519 - DNA, 19 bp, Homo sapiens
  siRNA target sequence for C1orf26 (NM_017673.4,1523-1541).
catcaacgacagtctcaaa

SEQ ID NO: 360520 - DNA, 19 bp, Homo sapiens
  siRNA target sequence for C1orf26 (NM_017673.4,1556-1574).
gctatggggtcagtcaata

SEQ ID NO: 360521 - DNA, 19 bp, Homo sapiens
  siRNA target sequence for C1orf26 (NM_017673.4,1561-1579).
ggggtcagtcaatacaact

SEQ ID NO: 360522 - DNA, 19 bp, Homo sapiens
  siRNA target sequence for C1orf26 (NM_017673.4,1616-1634).
caatgatgatcgagtacta

SEQ ID NO: 360523 - DNA, 19 bp, Homo sapiens
  siRNA target sequence for C1orf26 (NM_017673.4,1620-1638).
gatgatcgagtactaaaat

SEQ ID NO: 360524 - DNA, 19 bp, Homo sapiens
  siRNA target sequence for C1orf26 (NM_017673.4,1687-1705).
gcacggatgatagaaactt

SEQ ID NO: 360525 - DNA, 19 bp, Homo sapiens
  siRNA target sequence for C1orf26 (NM_017673.4,1688-1706).
cacggatgatagaaactta

SEQ ID NO: 360526 - DNA, 19 bp, Homo sapiens
  siRNA target sequence for C1orf26 (NM_017673.4,1729-1747).
gtgtgaagtcactcagtaa

SEQ ID NO: 360527 - DNA, 19 bp, Homo sapiens
  siRNA target sequence for C1orf26 (NM_017673.4,1738-1756).
cactcagtaaagaagaatt

SEQ ID NO: 360528 - DNA, 19 bp, Homo sapiens
  siRNA target sequence for C1orf26 (NM_017673.4,1796-1814).
gtgtcatcagccttgtatt

SEQ ID NO: 360529 - DNA, 19 bp, Homo sapiens
  siRNA target sequence for C1orf26 (NM_017673.4,1805-1823).
gccttgtattcctaagcaa

SEQ ID NO: 360530 - DNA, 19 bp, Homo sapiens
  siRNA target sequence for C1orf26 (NM_017673.4,1810-1828).
gtattcctaagcaacagtt

SEQ ID NO: 360531 - DNA, 19 bp, Homo sapiens
  siRNA target sequence for C1orf26 (NM_017673.4,1859-1877).
ctataaggaggaatctaca

SEQ ID NO: 360532 - DNA, 19 bp, Homo sapiens
  siRNA target sequence for C1orf26 (NM_017673.4,1904-1922).
gagcattgtatctgatctt

SEQ ID NO: 360533 - DNA, 19 bp, Homo sapiens
  siRNA target sequence for C1orf26 (NM_017673.4,1936-1954).
gaacaggtttatcttcaat

SEQ ID NO: 360534 - DNA, 19 bp, Homo sapiens
  siRNA target sequence for C1orf26 (NM_017673.4,2023-2041).
ggactctactacatttact

SEQ ID NO: 360535 - DNA, 19 bp, Homo sapiens
  siRNA target sequence for C1orf26 (NM_017673.4,2024-2042).
gactctactacatttacta

SEQ ID NO: 360536 - DNA, 19 bp, Homo sapiens
  siRNA target sequence for C1orf26 (NM_017673.4,2034-2052).
catttactacagtgcttta

SEQ ID NO: 360537 - DNA, 19 bp, Homo sapiens
  siRNA target sequence for C1orf26 (NM_017673.4,2093-2111).
gaacttgcttttaactatt

SEQ ID NO: 360538 - DNA, 19 bp, Homo sapiens
  siRNA target sequence for C1orf26 (NM_017673.4,2107-2125).
ctattgagagcctatacaa

SEQ ID NO: 360539 - DNA, 19 bp, Homo sapiens
  siRNA target sequence for C1orf26 (NM_017673.4,2123-2141).
caaaaatctccgtaaagct

SEQ ID NO: 360540 - DNA, 19 bp, Homo sapiens
  siRNA target sequence for C1orf26 (NM_017673.4,2153-2171).
ggattttacaacagtcaaa

SEQ ID NO: 360541 - DNA, 19 bp, Homo sapiens
  siRNA target sequence for C1orf26 (NM_017673.4,2177-2195).
gcttcaggattctagaagt

SEQ ID NO: 360542 - DNA, 19 bp, Homo sapiens
  siRNA target sequence for C1orf26 (NM_017673.4,2212-2230).
gtacaaggtcaaattatga

SEQ ID NO: 360543 - DNA, 19 bp, Homo sapiens
  siRNA target sequence for C1orf26 (NM_017673.4,2244-2262).
cagacctttgctcaagtaa

SEQ ID NO: 360544 - DNA, 19 bp, Homo sapiens
  siRNA target sequence for C1orf26 (NM_017673.4,2286-2304).
gaggtcaagacaaaactta

SEQ ID NO: 360545 - DNA, 19 bp, Homo sapiens
  siRNA target sequence for C1orf26 (NM_017673.4,2340-2358).
caggaaggtacttcattga

SEQ ID NO: 360546 - DNA, 19 bp, Homo sapiens
  siRNA target sequence for C1orf26 (NM_017673.4,2441-2459).
cctagagagtgtttggatt

SEQ ID NO: 360547 - DNA, 19 bp, Homo sapiens
  siRNA target sequence for C1orf26 (NM_017673.4,2442-2460).
ctagagagtgtttggatta

SEQ ID NO: 360548 - DNA, 19 bp, Homo sapiens
  siRNA target sequence for C1orf26 (NM_017673.4,2447-2465).
gagtgtttggattacaata

SEQ ID NO: 360549 - DNA, 19 bp, Homo sapiens
  siRNA target sequence for C1orf26 (NM_017673.4,2455-2473).
ggattacaatatatcagaa

SEQ ID NO: 360550 - DNA, 19 bp, Homo sapiens
  siRNA target sequence for C1orf26 (NM_017673.4,2469-2487).
cagaacagcacggatgtat

SEQ ID NO: 360551 - DNA, 19 bp, Homo sapiens
  siRNA target sequence for C1orf26 (NM_017673.4,2471-2489).
gaacagcacggatgtattt

SEQ ID NO: 360552 - DNA, 19 bp, Homo sapiens
  siRNA target sequence for C1orf26 (NM_017673.4,2474-2492).
cagcacggatgtatttcaa

SEQ ID NO: 360553 - DNA, 19 bp, Homo sapiens
  siRNA target sequence for C1orf26 (NM_017673.4,2477-2495).
cacggatgtatttcaaaga

SEQ ID NO: 360554 - DNA, 19 bp, Homo sapiens
  siRNA target sequence for C1orf26 (NM_017673.4,2479-2497).
cggatgtatttcaaagatt

SEQ ID NO: 360555 - DNA, 19 bp, Homo sapiens
  siRNA target sequence for C1orf26 (NM_017673.4,2516-2534).
gactacttcaaatatagca

SEQ ID NO: 360556 - DNA, 19 bp, Homo sapiens
  siRNA target sequence for C1orf26 (NM_017673.4,2533-2551).
catcatttgaagaagcatt

SEQ ID NO: 360557 - DNA, 19 bp, Homo sapiens
  siRNA target sequence for C1orf26 (NM_017673.4,2575-2593).
cagctgtgagggatattct

SEQ ID NO: 360558 - DNA, 19 bp, Homo sapiens
  siRNA target sequence for C1orf26 (NM_017673.4,2578-2596).
ctgtgagggatattcttga

SEQ ID NO: 360559 - DNA, 19 bp, Homo sapiens
  siRNA target sequence for C1orf26 (NM_017673.4,2640-2658).
gttgagaccctctataact

SEQ ID NO: 360560 - DNA, 19 bp, Homo sapiens
  siRNA target sequence for C1orf26 (NM_017673.4,2647-2665).
ccctctataacttcctaat

SEQ ID NO: 360561 - DNA, 19 bp, Homo sapiens
  siRNA target sequence for C1orf26 (NM_017673.4,2649-2667).
ctctataacttcctaatca

SEQ ID NO: 360562 - DNA, 19 bp, Homo sapiens
  siRNA target sequence for C1orf26 (NM_017673.4,2698-2716).
ctgcccaggaaatttatga

SEQ ID NO: 360563 - DNA, 19 bp, Homo sapiens
  siRNA target sequence for C1orf26 (NM_017673.4,2700-2718).
gcccaggaaatttatgatt

SEQ ID NO: 360564 - DNA, 19 bp, Homo sapiens
  siRNA target sequence for C1orf26 (NM_017673.4,2731-2749).
ctgagtatagggaaaagtt

SEQ ID NO: 360565 - DNA, 19 bp, Homo sapiens
  siRNA target sequence for C1orf26 (NM_017673.4,2772-2790).
gttgagatggaatatacca

SEQ ID NO: 360566 - DNA, 19 bp, Homo sapiens
  siRNA target sequence for C1orf26 (NM_017673.4,2796-2814).
cagtgcaatgcatctgttt

SEQ ID NO: 360567 - DNA, 19 bp, Homo sapiens
  siRNA target sequence for C1orf26 (NM_017673.4,2798-2816).
gtgcaatgcatctgtttat

SEQ ID NO: 360568 - DNA, 19 bp, Homo sapiens
  siRNA target sequence for C1orf26 (NM_017673.4,2800-2818).
gcaatgcatctgtttatat

SEQ ID NO: 360569 - DNA, 19 bp, Homo sapiens
  siRNA target sequence for C1orf26 (NM_017673.4,2847-2865).
gacatgctcaactatagga

SEQ ID NO: 360570 - DNA, 19 bp, Homo sapiens
  siRNA target sequence for C1orf26 (NM_017673.4,2849-2867).
catgctcaactataggata

SEQ ID NO: 360571 - DNA, 19 bp, Homo sapiens
  siRNA target sequence for C11orf33 (NM_017678.1,697-715).
gtttggctacagtcaaaat

SEQ ID NO: 360572 - DNA, 19 bp, Homo sapiens
  siRNA target sequence for C11orf33 (NM_017678.1,730-748).
gaggaaaactcatatacct

SEQ ID NO: 360573 - DNA, 19 bp, Homo sapiens
  siRNA target sequence for C11orf33 (NM_017678.1,732-750).
ggaaaactcatatacctaa

SEQ ID NO: 360574 - DNA, 19 bp, Homo sapiens
  siRNA target sequence for C11orf33 (NM_017678.1,768-786).
cgccagtggatggaatact

SEQ ID NO: 360575 - DNA, 19 bp, Homo sapiens
  siRNA target sequence for C11orf33 (NM_017678.1,852-870).
cttgctgtggatttggata

SEQ ID NO: 360576 - DNA, 19 bp, Homo sapiens
  siRNA target sequence for C11orf33 (NM_017678.1,906-924).
cccttgataggatcaatga

SEQ ID NO: 360577 - DNA, 19 bp, Homo sapiens
  siRNA target sequence for C11orf33 (NM_017678.1,916-934).
gatcaatgacctattcagt

SEQ ID NO: 360578 - DNA, 19 bp, Homo sapiens
  siRNA target sequence for FLJ20136 (NM_017684.2,40-58).
cttagcagcagcatggtat

SEQ ID NO: 360579 - DNA, 19 bp, Homo sapiens
  siRNA target sequence for FLJ20136 (NM_017684.2,216-234).
gagtgagaaaagttgatgt

SEQ ID NO: 360580 - DNA, 19 bp, Homo sapiens
  siRNA target sequence for FLJ20136 (NM_017684.2,278-296).
gactcaaagctctctatga

SEQ ID NO: 360581 - DNA, 19 bp, Homo sapiens
  siRNA target sequence for FLJ20136 (NM_017684.2,301-319).
gattgtcagtctccaattt

SEQ ID NO: 360582 - DNA, 19 bp, Homo sapiens
  siRNA target sequence for FLJ20136 (NM_017684.2,414-432).
gtgaactcagactacatct

SEQ ID NO: 360583 - DNA, 19 bp, Homo sapiens
  siRNA target sequence for FLJ20136 (NM_017684.2,472-490).
gaatgtcagcgttaaactt

SEQ ID NO: 360584 - DNA, 19 bp, Homo sapiens
  siRNA target sequence for FLJ20136 (NM_017684.2,478-496).
cagcgttaaacttaagaca

SEQ ID NO: 360585 - DNA, 19 bp, Homo sapiens
  siRNA target sequence for FLJ20136 (NM_017684.2,495-513).
catgcacccttgatgatct

SEQ ID NO: 360586 - DNA, 19 bp, Homo sapiens
  siRNA target sequence for FLJ20136 (NM_017684.2,531-549).
gagcaacatcgagaatgat

SEQ ID NO: 360587 - DNA, 19 bp, Homo sapiens
  siRNA target sequence for FLJ20136 (NM_017684.2,563-581).
gaccaagataacaacagtt

SEQ ID NO: 360588 - DNA, 19 bp, Homo sapiens
  siRNA target sequence for FLJ20136 (NM_017684.2,569-587).
gataacaacagttctatga

SEQ ID NO: 360589 - DNA, 19 bp, Homo sapiens
  siRNA target sequence for FLJ20136 (NM_017684.2,574-592).
caacagttctatgattgat

SEQ ID NO: 360590 - DNA, 19 bp, Homo sapiens
  siRNA target sequence for FLJ20136 (NM_017684.2,577-595).
cagttctatgattgatata

SEQ ID NO: 360591 - DNA, 19 bp, Homo sapiens
  siRNA target sequence for FLJ20136 (NM_017684.2,582-600).
ctatgattgatataagtta

SEQ ID NO: 360592 - DNA, 19 bp, Homo sapiens
  siRNA target sequence for FLJ20136 (NM_017684.2,586-604).
gattgatataagttacaaa

SEQ ID NO: 360593 - DNA, 19 bp, Homo sapiens
  siRNA target sequence for FLJ20136 (NM_017684.2,638-656).
cttgacaagctgtatgtat

SEQ ID NO: 360594 - DNA, 19 bp, Homo sapiens
  siRNA target sequence for FLJ20136 (NM_017684.2,657-675).
gtgccagtgtggaatttct

SEQ ID NO: 360595 - DNA, 19 bp, Homo sapiens
  siRNA target sequence for FLJ20136 (NM_017684.2,768-786).
cagggaaggtcaagataga

SEQ ID NO: 360596 - DNA, 19 bp, Homo sapiens
  siRNA target sequence for FLJ20136 (NM_017684.2,794-812).
gactctgttagaccaaata

SEQ ID NO: 360597 - DNA, 19 bp, Homo sapiens
  siRNA target sequence for FLJ20136 (NM_017684.2,800-818).
gttagaccaaatatgactt

SEQ ID NO: 360598 - DNA, 19 bp, Homo sapiens
  siRNA target sequence for FLJ20136 (NM_017684.2,924-942).
catccaaactcgaacagat

SEQ ID NO: 360599 - DNA, 19 bp, Homo sapiens
  siRNA target sequence for FLJ20136 (NM_017684.2,927-945).
ccaaactcgaacagatgat

SEQ ID NO: 360600 - DNA, 19 bp, Homo sapiens
  siRNA target sequence for FLJ20136 (NM_017684.2,974-992).
ctcgcttgcccttttctca

SEQ ID NO: 360601 - DNA, 19 bp, Homo sapiens
  siRNA target sequence for FLJ20136 (NM_017684.2,1178-1196).
gaagatggatccaaagata

SEQ ID NO: 360602 - DNA, 19 bp, Homo sapiens
  siRNA target sequence for FLJ20136 (NM_017684.2,1189-1207).
caaagatacgtctaaggaa

SEQ ID NO: 360603 - DNA, 19 bp, Homo sapiens
  siRNA target sequence for FLJ20136 (NM_017684.2,1221-1239).
ggggtatcaaatcgattaa

SEQ ID NO: 360604 - DNA, 19 bp, Homo sapiens
  siRNA target sequence for FLJ20136 (NM_017684.2,1222-1240).
gggtatcaaatcgattaat

SEQ ID NO: 360605 - DNA, 19 bp, Homo sapiens
  siRNA target sequence for FLJ20136 (NM_017684.2,1224-1242).
gtatcaaatcgattaatga

SEQ ID NO: 360606 - DNA, 19 bp, Homo sapiens
  siRNA target sequence for FLJ20136 (NM_017684.2,1228-1246).
caaatcgattaatgattat

SEQ ID NO: 360607 - DNA, 19 bp, Homo sapiens
  siRNA target sequence for FLJ20136 (NM_017684.2,1265-1283).
gttgacacggcaacagaaa

SEQ ID NO: 360608 - DNA, 19 bp, Homo sapiens
  siRNA target sequence for FLJ20136 (NM_017684.2,1335-1353).
gtgttgttgtagaatccat

SEQ ID NO: 360609 - DNA, 19 bp, Homo sapiens
  siRNA target sequence for FLJ20136 (NM_017684.2,1343-1361).
gtagaatccattcaagtta

SEQ ID NO: 360610 - DNA, 19 bp, Homo sapiens
  siRNA target sequence for FLJ20136 (NM_017684.2,1351-1369).
cattcaagttaccttagaa

SEQ ID NO: 360611 - DNA, 19 bp, Homo sapiens
  siRNA target sequence for FLJ20136 (NM_017684.2,1375-1393).
ccttggacatcgaactgta

SEQ ID NO: 360612 - DNA, 19 bp, Homo sapiens
  siRNA target sequence for FLJ20136 (NM_017684.2,1380-1398).
gacatcgaactgtaccttt

SEQ ID NO: 360613 - DNA, 19 bp, Homo sapiens
  siRNA target sequence for FLJ20136 (NM_017684.2,1382-1400).
catcgaactgtacctttat

SEQ ID NO: 360614 - DNA, 19 bp, Homo sapiens
  siRNA target sequence for FLJ20136 (NM_017684.2,1385-1403).
cgaactgtacctttattat

SEQ ID NO: 360615 - DNA, 19 bp, Homo sapiens
  siRNA target sequence for FLJ20136 (NM_017684.2,1473-1491).
cactacaggtgcactatta

SEQ ID NO: 360616 - DNA, 19 bp, Homo sapiens
  siRNA target sequence for FLJ20136 (NM_017684.2,1475-1493).
ctacaggtgcactattaca

SEQ ID NO: 360617 - DNA, 19 bp, Homo sapiens
  siRNA target sequence for FLJ20136 (NM_017684.2,1560-1578).
ggcttgatgtaaagaagaa

SEQ ID NO: 360618 - DNA, 19 bp, Homo sapiens
  siRNA target sequence for FLJ20136 (NM_017684.2,1576-1594).
gaacccagttcaggataaa

SEQ ID NO: 360619 - DNA, 19 bp, Homo sapiens
  siRNA target sequence for FLJ20136 (NM_017684.2,1579-1597).
cccagttcaggataaaagt

SEQ ID NO: 360620 - DNA, 19 bp, Homo sapiens
  siRNA target sequence for FLJ20136 (NM_017684.2,1580-1598).
ccagttcaggataaaagtt

SEQ ID NO: 360621 - DNA, 19 bp, Homo sapiens
  siRNA target sequence for FLJ20136 (NM_017684.2,1603-1621).
gccaggagatgattttatt

SEQ ID NO: 360622 - DNA, 19 bp, Homo sapiens
  siRNA target sequence for FLJ20136 (NM_017684.2,1627-1645).
gccacaaatggcaattcat

SEQ ID NO: 360623 - DNA, 19 bp, Homo sapiens
  siRNA target sequence for FLJ20136 (NM_017684.2,1628-1646).
ccacaaatggcaattcata

SEQ ID NO: 360624 - DNA, 19 bp, Homo sapiens
  siRNA target sequence for FLJ20136 (NM_017684.2,1629-1647).
cacaaatggcaattcatat

SEQ ID NO: 360625 - DNA, 19 bp, Homo sapiens
  siRNA target sequence for FLJ20136 (NM_017684.2,1686-1704).
gttgtcttaatgttttcaa

SEQ ID NO: 360626 - DNA, 19 bp, Homo sapiens
  siRNA target sequence for FLJ20136 (NM_017684.2,1727-1745).
gagggcactgcttctactt

SEQ ID NO: 360627 - DNA, 19 bp, Homo sapiens
  siRNA target sequence for FLJ20136 (NM_017684.2,1729-1747).
gggcactgcttctactttt

SEQ ID NO: 360628 - DNA, 19 bp, Homo sapiens
  siRNA target sequence for FLJ20136 (NM_017684.2,1731-1749).
gcactgcttctacttttga

SEQ ID NO: 360629 - DNA, 19 bp, Homo sapiens
  siRNA target sequence for FLJ20136 (NM_017684.2,1769-1787).
gctccttttacggtaaaaa

SEQ ID NO: 360630 - DNA, 19 bp, Homo sapiens
  siRNA target sequence for FLJ20136 (NM_017684.2,1770-1788).
ctccttttacggtaaaaaa

SEQ ID NO: 360631 - DNA, 19 bp, Homo sapiens
  siRNA target sequence for FLJ20136 (NM_017684.2,1791-1809).
ctgtaggtgttcccattaa

SEQ ID NO: 360632 - DNA, 19 bp, Homo sapiens
  siRNA target sequence for FLJ20136 (NM_017684.2,1810-1828).
ggtgaagcccaattgtaat

SEQ ID NO: 360633 - DNA, 19 bp, Homo sapiens
  siRNA target sequence for FLJ20136 (NM_017684.2,1906-1924).
cagcatggtaccttcaagt

SEQ ID NO: 360634 - DNA, 19 bp, Homo sapiens
  siRNA target sequence for FLJ20136 (NM_017684.2,1909-1927).
catggtaccttcaagtcaa

SEQ ID NO: 360635 - DNA, 19 bp, Homo sapiens
  siRNA target sequence for FLJ20136 (NM_017684.2,1923-1941).
gtcaagggaacctatctat

SEQ ID NO: 360636 - DNA, 19 bp, Homo sapiens
  siRNA target sequence for FLJ20136 (NM_017684.2,1966-1984).
cttcactctgaccattgta

SEQ ID NO: 360637 - DNA, 19 bp, Homo sapiens
  siRNA target sequence for FLJ20136 (NM_017684.2,2025-2043).
gacctggacggcgattgta

SEQ ID NO: 360638 - DNA, 19 bp, Homo sapiens
  siRNA target sequence for FLJ20136 (NM_017684.2,2027-2045).
cctggacggcgattgtata

SEQ ID NO: 360639 - DNA, 19 bp, Homo sapiens
  siRNA target sequence for FLJ20136 (NM_017684.2,2028-2046).
ctggacggcgattgtataa

SEQ ID NO: 360640 - DNA, 19 bp, Homo sapiens
  siRNA target sequence for FLJ20136 (NM_017684.2,2031-2049).
gacggcgattgtataatgt

SEQ ID NO: 360641 - DNA, 19 bp, Homo sapiens
  siRNA target sequence for FLJ20136 (NM_017684.2,2079-2097).
ctgtcttggtacaaattga

SEQ ID NO: 360642 - DNA, 19 bp, Homo sapiens
  siRNA target sequence for FLJ20136 (NM_017684.2,2130-2148).
gctctcctctacagatcaa

SEQ ID NO: 360643 - DNA, 19 bp, Homo sapiens
  siRNA target sequence for FLJ20136 (NM_017684.2,2131-2149).
ctctcctctacagatcaaa

SEQ ID NO: 360644 - DNA, 19 bp, Homo sapiens
  siRNA target sequence for FLJ20136 (NM_017684.2,2161-2179).
cattgcatttatcatctat

SEQ ID NO: 360645 - DNA, 19 bp, Homo sapiens
  siRNA target sequence for FLJ20136 (NM_017684.2,2236-2254).
ggagttccatgttccttta

SEQ ID NO: 360646 - DNA, 19 bp, Homo sapiens
  siRNA target sequence for FLJ20136 (NM_017684.2,2243-2261).
catgttcctttagattcat

SEQ ID NO: 360647 - DNA, 19 bp, Homo sapiens
  siRNA target sequence for FLJ20136 (NM_017684.2,2259-2277).
catatagatgtcaattgtt

SEQ ID NO: 360648 - DNA, 19 bp, Homo sapiens
  siRNA target sequence for FLJ20136 (NM_017684.2,2292-2310).
gaatcttagagcatcagta

SEQ ID NO: 360649 - DNA, 19 bp, Homo sapiens
  siRNA target sequence for FLJ20136 (NM_017684.2,2296-2314).
cttagagcatcagtacaaa

SEQ ID NO: 360650 - DNA, 19 bp, Homo sapiens
  siRNA target sequence for FLJ20136 (NM_017684.2,2315-2333).
gaatctaccacttatattt

SEQ ID NO: 360651 - DNA, 19 bp, Homo sapiens
  siRNA target sequence for FLJ20136 (NM_017684.2,2401-2419).
cagcttcttacctctcata

SEQ ID NO: 360652 - DNA, 19 bp, Homo sapiens
  siRNA target sequence for FLJ20136 (NM_017684.2,2407-2425).
cttacctctcatagtgaat

SEQ ID NO: 360653 - DNA, 19 bp, Homo sapiens
  siRNA target sequence for FLJ20136 (NM_017684.2,2412-2430).
ctctcatagtgaatacagt

SEQ ID NO: 360654 - DNA, 19 bp, Homo sapiens
  siRNA target sequence for FLJ20136 (NM_017684.2,2444-2462).
gaattgagctacatatgta

SEQ ID NO: 360655 - DNA, 19 bp, Homo sapiens
  siRNA target sequence for FLJ20136 (NM_017684.2,2476-2494).
ctgggatgtagcttacatt

SEQ ID NO: 360656 - DNA, 19 bp, Homo sapiens
  siRNA target sequence for FLJ20136 (NM_017684.2,2478-2496).
gggatgtagcttacattat

SEQ ID NO: 360657 - DNA, 19 bp, Homo sapiens
  siRNA target sequence for FLJ20136 (NM_017684.2,2479-2497).
ggatgtagcttacattatt

SEQ ID NO: 360658 - DNA, 19 bp, Homo sapiens
  siRNA target sequence for FLJ20136 (NM_017684.2,2491-2509).
cattattcatctttatcct

SEQ ID NO: 360659 - DNA, 19 bp, Homo sapiens
  siRNA target sequence for FLJ20136 (NM_017684.2,2531-2549).
ctcccatattccctaagat

SEQ ID NO: 360660 - DNA, 19 bp, Homo sapiens
  siRNA target sequence for FLJ20136 (NM_017684.2,2533-2551).
cccatattccctaagatat

SEQ ID NO: 360661 - DNA, 19 bp, Homo sapiens
  siRNA target sequence for FLJ20136 (NM_017684.2,2534-2552).
ccatattccctaagatatt

SEQ ID NO: 360662 - DNA, 19 bp, Homo sapiens
  siRNA target sequence for FLJ20136 (NM_017684.2,2592-2610).
gcagtactgctgatgttct

SEQ ID NO: 360663 - DNA, 19 bp, Homo sapiens
  siRNA target sequence for FLJ20136 (NM_017684.2,2616-2634).
cgagaatcagtggtgaaat

SEQ ID NO: 360664 - DNA, 19 bp, Homo sapiens
  siRNA target sequence for FLJ20136 (NM_017684.2,2617-2635).
gagaatcagtggtgaaata

SEQ ID NO: 360665 - DNA, 19 bp, Homo sapiens
  siRNA target sequence for FLJ20136 (NM_017684.2,2639-2657).
gaattagtcctggtgaaat

SEQ ID NO: 360666 - DNA, 19 bp, Homo sapiens
  siRNA target sequence for FLJ20136 (NM_017684.2,2686-2704).
ccgcatacgtgatacacta

SEQ ID NO: 360667 - DNA, 19 bp, Homo sapiens
  siRNA target sequence for FLJ20136 (NM_017684.2,2694-2712).
gtgatacactaccagaatt

SEQ ID NO: 360668 - DNA, 19 bp, Homo sapiens
  siRNA target sequence for FLJ20136 (NM_017684.2,2696-2714).
gatacactaccagaattct

SEQ ID NO: 360669 - DNA, 19 bp, Homo sapiens
  siRNA target sequence for FLJ20136 (NM_017684.2,2797-2815).
ggtgctgtctgtctttagt

SEQ ID NO: 360670 - DNA, 19 bp, Homo sapiens
  siRNA target sequence for FLJ20136 (NM_017684.2,2807-2825).
gtctttagtccctattggt

SEQ ID NO: 360671 - DNA, 19 bp, Homo sapiens
  siRNA target sequence for FLJ20136 (NM_017684.2,2814-2832).
gtccctattggttaatcaa

SEQ ID NO: 360672 - DNA, 19 bp, Homo sapiens
  siRNA target sequence for FLJ20136 (NM_017684.2,2816-2834).
ccctattggttaatcaaca

SEQ ID NO: 360673 - DNA, 19 bp, Homo sapiens
  siRNA target sequence for FLJ20136 (NM_017684.2,2851-2869).
ccagtatcgttcagaagat

SEQ ID NO: 360674 - DNA, 19 bp, Homo sapiens
  siRNA target sequence for FLJ20136 (NM_017684.2,2888-2906).
gctgatttcagggatatta

SEQ ID NO: 360675 - DNA, 19 bp, Homo sapiens
  siRNA target sequence for FLJ20136 (NM_017684.2,2950-2968).
ggtacaattaaaaatttca

SEQ ID NO: 360676 - DNA, 19 bp, Homo sapiens
  siRNA target sequence for FLJ20136 (NM_017684.2,2973-2991).
gtgcctggtccagtagttt

SEQ ID NO: 360677 - DNA, 19 bp, Homo sapiens
  siRNA target sequence for FLJ20136 (NM_017684.2,2975-2993).
gcctggtccagtagtttct

SEQ ID NO: 360678 - DNA, 19 bp, Homo sapiens
  siRNA target sequence for FLJ20136 (NM_017684.2,2979-2997).
ggtccagtagtttctcatt

SEQ ID NO: 360679 - DNA, 19 bp, Homo sapiens
  siRNA target sequence for FLJ20136 (NM_017684.2,2983-3001).
cagtagtttctcattggat

SEQ ID NO: 360680 - DNA, 19 bp, Homo sapiens
  siRNA target sequence for FLJ20136 (NM_017684.2,2988-3006).
gtttctcattggatacagt

SEQ ID NO: 360681 - DNA, 19 bp, Homo sapiens
  siRNA target sequence for FLJ20136 (NM_017684.2,3025-3043).
gaagtgtcctgccaacaat

SEQ ID NO: 360682 - DNA, 19 bp, Homo sapiens
  siRNA target sequence for FLJ20136 (NM_017684.2,3085-3103).
caacctttcacgaatagtt

SEQ ID NO: 360683 - DNA, 19 bp, Homo sapiens
  siRNA target sequence for FLJ20136 (NM_017684.2,3109-3127).
gactcccttttgtaccatt

SEQ ID NO: 360684 - DNA, 19 bp, Homo sapiens
  siRNA target sequence for FLJ20136 (NM_017684.2,3138-3156).
catcattagaactagaagt

SEQ ID NO: 360685 - DNA, 19 bp, Homo sapiens
  siRNA target sequence for FLJ20136 (NM_017684.2,3152-3170).
gaagttggcgagattgcat

SEQ ID NO: 360686 - DNA, 19 bp, Homo sapiens
  siRNA target sequence for FLJ20136 (NM_017684.2,3176-3194).
ggctcaatgccaactaata

SEQ ID NO: 360687 - DNA, 19 bp, Homo sapiens
  siRNA target sequence for FLJ20136 (NM_017684.2,3177-3195).
gctcaatgccaactaataa

SEQ ID NO: 360688 - DNA, 19 bp, Homo sapiens
  siRNA target sequence for FLJ20136 (NM_017684.2,3189-3207).
ctaataaatggaactatat

SEQ ID NO: 360689 - DNA, 19 bp, Homo sapiens
  siRNA target sequence for FLJ20136 (NM_017684.2,3334-3352).
gagcttagaagatctgaat

SEQ ID NO: 360690 - DNA, 19 bp, Homo sapiens
  siRNA target sequence for FLJ20136 (NM_017684.2,3356-3374).
ggtatcttggtggatgtaa

SEQ ID NO: 360691 - DNA, 19 bp, Homo sapiens
  siRNA target sequence for FLJ20136 (NM_017684.2,3357-3375).
gtatcttggtggatgtaaa

SEQ ID NO: 360692 - DNA, 19 bp, Homo sapiens
  siRNA target sequence for FLJ20136 (NM_017684.2,3371-3389).
gtaaacactgccgaacatt

SEQ ID NO: 360693 - DNA, 19 bp, Homo sapiens
  siRNA target sequence for FLJ20136 (NM_017684.2,3376-3394).
cactgccgaacattcaact

SEQ ID NO: 360694 - DNA, 19 bp, Homo sapiens
  siRNA target sequence for FLJ20136 (NM_017684.2,3382-3400).
cgaacattcaactgtcata

SEQ ID NO: 360695 - DNA, 19 bp, Homo sapiens
  siRNA target sequence for FLJ20136 (NM_017684.2,3395-3413).
gtcataactttttctgatt

SEQ ID NO: 360696 - DNA, 19 bp, Homo sapiens
  siRNA target sequence for FLJ20136 (NM_017684.2,3481-3499).
gagtgggtcaccagaagaa

SEQ ID NO: 360697 - DNA, 19 bp, Homo sapiens
  siRNA target sequence for FLJ20136 (NM_017684.2,3483-3501).
gtgggtcaccagaagaaat

SEQ ID NO: 360698 - DNA, 19 bp, Homo sapiens
  siRNA target sequence for FLJ20136 (NM_017684.2,3513-3531).
caagacaggctcgactttt

SEQ ID NO: 360699 - DNA, 19 bp, Homo sapiens
  siRNA target sequence for FLJ20136 (NM_017684.2,3546-3564).
ctactggtaccagaaaact

SEQ ID NO: 360700 - DNA, 19 bp, Homo sapiens
  siRNA target sequence for FLJ20136 (NM_017684.2,3570-3588).
ggacatatgcagcaaatgt

SEQ ID NO: 360701 - DNA, 19 bp, Homo sapiens
  siRNA target sequence for FLJ20136 (NM_017684.2,3610-3628).
ggatggatgtggacagttt

SEQ ID NO: 360702 - DNA, 19 bp, Homo sapiens
  siRNA target sequence for FLJ20136 (NM_017684.2,3615-3633).
gatgtggacagtttccata

SEQ ID NO: 360703 - DNA, 19 bp, Homo sapiens
  siRNA target sequence for FLJ20136 (NM_017684.2,3647-3665).
cagatacactgggtatcat

SEQ ID NO: 360704 - DNA, 19 bp, Homo sapiens
  siRNA target sequence for FLJ20136 (NM_017684.2,3649-3667).
gatacactgggtatcattt

SEQ ID NO: 360705 - DNA, 19 bp, Homo sapiens
  siRNA target sequence for FLJ20136 (NM_017684.2,3752-3770).
gctgattatgaaataacct

SEQ ID NO: 360706 - DNA, 19 bp, Homo sapiens
  siRNA target sequence for FLJ20136 (NM_017684.2,3753-3771).
ctgattatgaaataacctt

SEQ ID NO: 360707 - DNA, 19 bp, Homo sapiens
  siRNA target sequence for FLJ20136 (NM_017684.2,3788-3806).
gggctttcactggttaaca

SEQ ID NO: 360708 - DNA, 19 bp, Homo sapiens
  siRNA target sequence for FLJ20136 (NM_017684.2,3897-3915).
gtcaaaagcagataatctt

SEQ ID NO: 360709 - DNA, 19 bp, Homo sapiens
  siRNA target sequence for FLJ20136 (NM_017684.2,3904-3922).
gcagataatcttattggaa

SEQ ID NO: 360710 - DNA, 19 bp, Homo sapiens
  siRNA target sequence for FLJ20136 (NM_017684.2,3913-3931).
cttattggaacaatcctat

SEQ ID NO: 360711 - DNA, 19 bp, Homo sapiens
  siRNA target sequence for FLJ20136 (NM_017684.2,3955-3973).
ccatggctggattaagcta

SEQ ID NO: 360712 - DNA, 19 bp, Homo sapiens
  siRNA target sequence for FLJ20136 (NM_017684.2,3960-3978).
gctggattaagctagataa

SEQ ID NO: 360713 - DNA, 19 bp, Homo sapiens
  siRNA target sequence for FLJ20136 (NM_017684.2,3961-3979).
ctggattaagctagataat

SEQ ID NO: 360714 - DNA, 19 bp, Homo sapiens
  siRNA target sequence for FLJ20136 (NM_017684.2,3988-4006).
ggtcaattttgataaagat

SEQ ID NO: 360715 - DNA, 19 bp, Homo sapiens
  siRNA target sequence for FLJ20136 (NM_017684.2,4025-4043).
cctattcgtagccctatta

SEQ ID NO: 360716 - DNA, 19 bp, Homo sapiens
  siRNA target sequence for FLJ20136 (NM_017684.2,4026-4044).
ctattcgtagccctattaa

SEQ ID NO: 360717 - DNA, 19 bp, Homo sapiens
  siRNA target sequence for FLJ20136 (NM_017684.2,4037-4055).
cctattaaacgagactttt

SEQ ID NO: 360718 - DNA, 19 bp, Homo sapiens
  siRNA target sequence for FLJ20136 (NM_017684.2,4038-4056).
ctattaaacgagacttttt

SEQ ID NO: 360719 - DNA, 19 bp, Homo sapiens
  siRNA target sequence for FLJ20136 (NM_017684.2,4151-4169).
gcaatgttccctgttgtat

SEQ ID NO: 360720 - DNA, 19 bp, Homo sapiens
  siRNA target sequence for FLJ20136 (NM_017684.2,4178-4196).
gttgcccctccaaaatcta

SEQ ID NO: 360721 - DNA, 19 bp, Homo sapiens
  siRNA target sequence for FLJ20136 (NM_017684.2,4188-4206).
caaaatctattgctttaga

SEQ ID NO: 360722 - DNA, 19 bp, Homo sapiens
  siRNA target sequence for FLJ20136 (NM_017684.2,4213-4231).
gcccaagcctttcattgat

SEQ ID NO: 360723 - DNA, 19 bp, Homo sapiens
  siRNA target sequence for FLJ20136 (NM_017684.2,4229-4247).
gatgtgagtgtcatcacaa

SEQ ID NO: 360724 - DNA, 19 bp, Homo sapiens
  siRNA target sequence for FLJ20136 (NM_017684.2,4232-4250).
gtgagtgtcatcacaagat

SEQ ID NO: 360725 - DNA, 19 bp, Homo sapiens
  siRNA target sequence for FLJ20136 (NM_017684.2,4234-4252).
gagtgtcatcacaagattt

SEQ ID NO: 360726 - DNA, 19 bp, Homo sapiens
  siRNA target sequence for FLJ20136 (NM_017684.2,4329-4347).
ggtttctaggagctattat

SEQ ID NO: 360727 - DNA, 19 bp, Homo sapiens
  siRNA target sequence for FLJ20136 (NM_017684.2,4330-4348).
gtttctaggagctattatt

SEQ ID NO: 360728 - DNA, 19 bp, Homo sapiens
  siRNA target sequence for FLJ20136 (NM_017684.2,4340-4358).
gctattattgcactgttta

SEQ ID NO: 360729 - DNA, 19 bp, Homo sapiens
  siRNA target sequence for FLJ20136 (NM_017684.2,4386-4404).
gaagacggacaaagttaat

SEQ ID NO: 360730 - DNA, 19 bp, Homo sapiens
  siRNA target sequence for FLJ20136 (NM_017684.2,4389-4407).
gacggacaaagttaatcca

SEQ ID NO: 360731 - DNA, 19 bp, Homo sapiens
  siRNA target sequence for FLJ20136 (NM_017684.2,4421-4439).
gctctaaatgcagaattaa

SEQ ID NO: 360732 - DNA, 19 bp, Homo sapiens
  siRNA target sequence for FLJ20136 (NM_017684.2,4449-4467).
caatgactgatatgtcaat

SEQ ID NO: 360733 - DNA, 19 bp, Homo sapiens
  siRNA target sequence for FLJ20136 (NM_017684.2,4453-4471).
gactgatatgtcaattctt

SEQ ID NO: 360734 - DNA, 19 bp, Homo sapiens
  siRNA target sequence for FLJ20136 (NM_017684.2,4464-4482).
caattcttagtttctttga

SEQ ID NO: 360735 - DNA, 19 bp, Homo sapiens
  siRNA target sequence for FLJ20136 (NM_017684.2,4528-4546).
gggttccggaggtgaagaa

SEQ ID NO: 360736 - DNA, 19 bp, Homo sapiens
  siRNA target sequence for FLJ20136 (NM_017684.2,4529-4547).
ggttccggaggtgaagaat

SEQ ID NO: 360737 - DNA, 19 bp, Homo sapiens
  siRNA target sequence for FLJ20136 (NM_017684.2,4533-4551).
ccggaggtgaagaatcaga

SEQ ID NO: 360738 - DNA, 19 bp, Homo sapiens
  siRNA target sequence for FLJ20136 (NM_017684.2,4625-4643).
gatgtggatgaccttatat

SEQ ID NO: 360739 - DNA, 19 bp, Homo sapiens
  siRNA target sequence for FLJ20136 (NM_017684.2,4652-4670).
gcttattatgaaattcgat

SEQ ID NO: 360740 - DNA, 19 bp, Homo sapiens
  siRNA target sequence for FLJ20136 (NM_017684.2,4653-4671).
cttattatgaaattcgata

SEQ ID NO: 360741 - DNA, 19 bp, Homo sapiens
  siRNA target sequence for FLJ20136 (NM_017684.2,4667-4685).
cgatatcagttctacaaga

SEQ ID NO: 360742 - DNA, 19 bp, Homo sapiens
  siRNA target sequence for FLJ20136 (NM_017684.2,4693-4711).
gcttatatggagtgttgtt

SEQ ID NO: 360743 - DNA, 19 bp, Homo sapiens
  siRNA target sequence for FLJ20136 (NM_017684.2,4713-4731).
ggcattacagtgaacagtt

SEQ ID NO: 360744 - DNA, 19 bp, Homo sapiens
  siRNA target sequence for FLJ20136 (NM_017684.2,4720-4738).
cagtgaacagttcttgaaa

SEQ ID NO: 360745 - DNA, 19 bp, Homo sapiens
  siRNA target sequence for FLJ20136 (NM_017684.2,4722-4740).
gtgaacagttcttgaaaca

SEQ ID NO: 360746 - DNA, 19 bp, Homo sapiens
  siRNA target sequence for FLJ20136 (NM_017684.2,4750-4768).
ccttgtattggggttagat

SEQ ID NO: 360747 - DNA, 19 bp, Homo sapiens
  siRNA target sequence for FLJ20136 (NM_017684.2,4812-4830).
gagttgaagctttattcta

SEQ ID NO: 360748 - DNA, 19 bp, Homo sapiens
  siRNA target sequence for FLJ20136 (NM_017684.2,5074-5092).
ctttctgcgaggagttgtt

SEQ ID NO: 360749 - DNA, 19 bp, Homo sapiens
  siRNA target sequence for FLJ20136 (NM_017684.2,5096-5114).
ggagtgactggaataataa

SEQ ID NO: 360750 - DNA, 19 bp, Homo sapiens
  siRNA target sequence for FLJ20136 (NM_017684.2,5150-5168).
gctggattctttaaaggaa

SEQ ID NO: 360751 - DNA, 19 bp, Homo sapiens
  siRNA target sequence for FLJ20136 (NM_017684.2,5216-5234).
gtagatatggccagtagta

SEQ ID NO: 360752 - DNA, 19 bp, Homo sapiens
  siRNA target sequence for FLJ20136 (NM_017684.2,5251-5269).
gagggcagcagaatcaact

SEQ ID NO: 360753 - DNA, 19 bp, Homo sapiens
  siRNA target sequence for FLJ20136 (NM_017684.2,5295-5313).
ctcgcctgatccatgaaga

SEQ ID NO: 360754 - DNA, 19 bp, Homo sapiens
  siRNA target sequence for FLJ20136 (NM_017684.2,5316-5334).
gcatcattcgtccttatga

SEQ ID NO: 360755 - DNA, 19 bp, Homo sapiens
  siRNA target sequence for FLJ20136 (NM_017684.2,5346-5364).
ctgagggctctgacttact

SEQ ID NO: 360756 - DNA, 19 bp, Homo sapiens
  siRNA target sequence for FLJ20136 (NM_017684.2,5352-5370).
gctctgacttacttgagaa

SEQ ID NO: 360757 - DNA, 19 bp, Homo sapiens
  siRNA target sequence for FLJ20136 (NM_017684.2,5355-5373).
ctgacttacttgagaatca

SEQ ID NO: 360758 - DNA, 19 bp, Homo sapiens
  siRNA target sequence for FLJ20136 (NM_017684.2,5357-5375).
gacttacttgagaatcata

SEQ ID NO: 360759 - DNA, 19 bp, Homo sapiens
  siRNA target sequence for FLJ20136 (NM_017684.2,5401-5419).
ccgataccactgtgctatt

SEQ ID NO: 360760 - DNA, 19 bp, Homo sapiens
  siRNA target sequence for FLJ20136 (NM_017684.2,5509-5527).
ctggcaatgtccatttgaa

SEQ ID NO: 360761 - DNA, 19 bp, Homo sapiens
  siRNA target sequence for FLJ20136 (NM_017684.2,5541-5559).
ctcctagtgtcagtgaaaa

SEQ ID NO: 360762 - DNA, 19 bp, Homo sapiens
  siRNA target sequence for FLJ20136 (NM_017684.2,5544-5562).
ctagtgtcagtgaaaatgt

SEQ ID NO: 360763 - DNA, 19 bp, Homo sapiens
  siRNA target sequence for FLJ20136 (NM_017684.2,5553-5571).
gtgaaaatgtgctaaaaat

SEQ ID NO: 360764 - DNA, 19 bp, Homo sapiens
  siRNA target sequence for FLJ20136 (NM_017684.2,5561-5579).
gtgctaaaaatttcagtta

SEQ ID NO: 360765 - DNA, 19 bp, Homo sapiens
  siRNA target sequence for FLJ20136 (NM_017684.2,5621-5639).
ggctgtgttcgaaaagttt

SEQ ID NO: 360766 - DNA, 19 bp, Homo sapiens
  siRNA target sequence for FLJ20136 (NM_017684.2,5622-5640).
gctgtgttcgaaaagttta

SEQ ID NO: 360767 - DNA, 19 bp, Homo sapiens
  siRNA target sequence for FLJ20136 (NM_017684.2,5625-5643).
gtgttcgaaaagtttacct

SEQ ID NO: 360768 - DNA, 19 bp, Homo sapiens
  siRNA target sequence for GDAP2 (NM_017686.1,216-234).
gtgcaccttcccagtttgt

SEQ ID NO: 360769 - DNA, 19 bp, Homo sapiens
  siRNA target sequence for GDAP2 (NM_017686.1,261-279).
gtgactcatgccaagatga

SEQ ID NO: 360770 - DNA, 19 bp, Homo sapiens
  siRNA target sequence for GDAP2 (NM_017686.1,263-281).
gactcatgccaagatgaat

SEQ ID NO: 360771 - DNA, 19 bp, Homo sapiens
  siRNA target sequence for GDAP2 (NM_017686.1,265-283).
ctcatgccaagatgaatta

SEQ ID NO: 360772 - DNA, 19 bp, Homo sapiens
  siRNA target sequence for GDAP2 (NM_017686.1,291-309).
ctgatactacagctgaaat

SEQ ID NO: 360773 - DNA, 19 bp, Homo sapiens
  siRNA target sequence for GDAP2 (NM_017686.1,322-340).
cactgttcgatcacctttt

SEQ ID NO: 360774 - DNA, 19 bp, Homo sapiens
  siRNA target sequence for GDAP2 (NM_017686.1,324-342).
ctgttcgatcaccttttct

SEQ ID NO: 360775 - DNA, 19 bp, Homo sapiens
  siRNA target sequence for GDAP2 (NM_017686.1,329-347).
cgatcaccttttctttata

SEQ ID NO: 360776 - DNA, 19 bp, Homo sapiens
  siRNA target sequence for GDAP2 (NM_017686.1,403-421).
ctgtacagccattgtgaat

SEQ ID NO: 360777 - DNA, 19 bp, Homo sapiens
  siRNA target sequence for GDAP2 (NM_017686.1,418-436).
gaataccagcaatgaaagt

SEQ ID NO: 360778 - DNA, 19 bp, Homo sapiens
  siRNA target sequence for GDAP2 (NM_017686.1,530-548).
ggtgaagcaaaattgacaa

SEQ ID NO: 360779 - DNA, 19 bp, Homo sapiens
  siRNA target sequence for GDAP2 (NM_017686.1,623-641).
gctgagagttccctttata

SEQ ID NO: 360780 - DNA, 19 bp, Homo sapiens
  siRNA target sequence for GDAP2 (NM_017686.1,645-663).
gctacagaaacgtacttca

SEQ ID NO: 360781 - DNA, 19 bp, Homo sapiens
  siRNA target sequence for GDAP2 (NM_017686.1,646-664).
ctacagaaacgtacttcaa

SEQ ID NO: 360782 - DNA, 19 bp, Homo sapiens
  siRNA target sequence for GDAP2 (NM_017686.1,655-673).
cgtacttcaactagcaaaa

SEQ ID NO: 360783 - DNA, 19 bp, Homo sapiens
  siRNA target sequence for GDAP2 (NM_017686.1,668-686).
gcaaaagagcagtcaatgt

SEQ ID NO: 360784 - DNA, 19 bp, Homo sapiens
  siRNA target sequence for GDAP2 (NM_017686.1,697-715).
cttctgtgtcatcaattct

SEQ ID NO: 360785 - DNA, 19 bp, Homo sapiens
  siRNA target sequence for GDAP2 (NM_017686.1,755-773).
gcacttcgcactgtaagaa

SEQ ID NO: 360786 - DNA, 19 bp, Homo sapiens
  siRNA target sequence for GDAP2 (NM_017686.1,758-776).
cttcgcactgtaagaagat

SEQ ID NO: 360787 - DNA, 19 bp, Homo sapiens
  siRNA target sequence for GDAP2 (NM_017686.1,784-802).
gattcatggggaaaccatt

SEQ ID NO: 360788 - DNA, 19 bp, Homo sapiens
  siRNA target sequence for GDAP2 (NM_017686.1,833-851).
gaagagggtacttaccaaa

SEQ ID NO: 360789 - DNA, 19 bp, Homo sapiens
  siRNA target sequence for GDAP2 (NM_017686.1,865-883).
ctacttcccaaggtcatta

SEQ ID NO: 360790 - DNA, 19 bp, Homo sapiens
  siRNA target sequence for GDAP2 (NM_017686.1,906-924).
cctacctacctgcagatat

SEQ ID NO: 360791 - DNA, 19 bp, Homo sapiens
  siRNA target sequence for GDAP2 (NM_017686.1,949-967).
ggtacctgaacgacagatt

SEQ ID NO: 360792 - DNA, 19 bp, Homo sapiens
  siRNA target sequence for GDAP2 (NM_017686.1,950-968).
gtacctgaacgacagatta

SEQ ID NO: 360793 - DNA, 19 bp, Homo sapiens
  siRNA target sequence for GDAP2 (NM_017686.1,953-971).
cctgaacgacagattagaa

SEQ ID NO: 360794 - DNA, 19 bp, Homo sapiens
  siRNA target sequence for GDAP2 (NM_017686.1,954-972).
ctgaacgacagattagaat

SEQ ID NO: 360795 - DNA, 19 bp, Homo sapiens
  siRNA target sequence for GDAP2 (NM_017686.1,956-974).
gaacgacagattagaataa

SEQ ID NO: 360796 - DNA, 19 bp, Homo sapiens
  siRNA target sequence for GDAP2 (NM_017686.1,964-982).
gattagaataagtgagaaa

SEQ ID NO: 360797 - DNA, 19 bp, Homo sapiens
  siRNA target sequence for GDAP2 (NM_017686.1,984-1002).
ctggtgctccagaagataa

SEQ ID NO: 360798 - DNA, 19 bp, Homo sapiens
  siRNA target sequence for GDAP2 (NM_017686.1,987-1005).
gtgctccagaagataacca

SEQ ID NO: 360799 - DNA, 19 bp, Homo sapiens
  siRNA target sequence for GDAP2 (NM_017686.1,1045-1063).
cattggctctcatgctttt

SEQ ID NO: 360800 - DNA, 19 bp, Homo sapiens
  siRNA target sequence for GDAP2 (NM_017686.1,1168-1186).
gttatgtcaagcaagatct

SEQ ID NO: 360801 - DNA, 19 bp, Homo sapiens
  siRNA target sequence for GDAP2 (NM_017686.1,1189-1207).
ggatctgtctgatattgct

SEQ ID NO: 360802 - DNA, 19 bp, Homo sapiens
  siRNA target sequence for GDAP2 (NM_017686.1,1211-1229).
ctaaaagccttataccaaa

SEQ ID NO: 360803 - DNA, 19 bp, Homo sapiens
  siRNA target sequence for GDAP2 (NM_017686.1,1283-1301).
cctgtaacattaatagata

SEQ ID NO: 360804 - DNA, 19 bp, Homo sapiens
  siRNA target sequence for GDAP2 (NM_017686.1,1284-1302).
ctgtaacattaatagatat

SEQ ID NO: 360805 - DNA, 19 bp, Homo sapiens
  siRNA target sequence for GDAP2 (NM_017686.1,1303-1321).
ggacaaggctctcttatat

SEQ ID NO: 360806 - DNA, 19 bp, Homo sapiens
  siRNA target sequence for GDAP2 (NM_017686.1,1309-1327).
ggctctcttatatttcatt

SEQ ID NO: 360807 - DNA, 19 bp, Homo sapiens
  siRNA target sequence for GDAP2 (NM_017686.1,1380-1398).
ccctgaccagcgaatacaa

SEQ ID NO: 360808 - DNA, 19 bp, Homo sapiens
  siRNA target sequence for GDAP2 (NM_017686.1,1423-1441).
gaaactctacgatgttgtt

SEQ ID NO: 360809 - DNA, 19 bp, Homo sapiens
  siRNA target sequence for GDAP2 (NM_017686.1,1481-1499).
gtacatcccacatttcgtt

SEQ ID NO: 360810 - DNA, 19 bp, Homo sapiens
  siRNA target sequence for GDAP2 (NM_017686.1,1496-1514).
cgttcaaaggtgtcaacat

SEQ ID NO: 360811 - DNA, 19 bp, Homo sapiens
  siRNA target sequence for GDAP2 (NM_017686.1,1648-1666).
ggaaaacgggccttactat

SEQ ID NO: 360812 - DNA, 19 bp, Homo sapiens
  siRNA target sequence for GDAP2 (NM_017686.1,1649-1667).
gaaaacgggccttactata

SEQ ID NO: 360813 - DNA, 19 bp, Homo sapiens
  siRNA target sequence for GDAP2 (NM_017686.1,1655-1673).
gggccttactatacatcat

SEQ ID NO: 360814 - DNA, 19 bp, Homo sapiens
  siRNA target sequence for FLJ20147 (NM_017687.2,20-38).
ccctccccatgactcaaat

SEQ ID NO: 360815 - DNA, 19 bp, Homo sapiens
  siRNA target sequence for FLJ20147 (NM_017687.2,21-39).
cctccccatgactcaaata

SEQ ID NO: 360816 - DNA, 19 bp, Homo sapiens
  siRNA target sequence for FLJ20147 (NM_017687.2,22-40).
ctccccatgactcaaatat

SEQ ID NO: 360817 - DNA, 19 bp, Homo sapiens
  siRNA target sequence for FLJ20147 (NM_017687.2,75-93).
ccatggtcaacctattcca

SEQ ID NO: 360818 - DNA, 19 bp, Homo sapiens
  siRNA target sequence for FLJ20147 (NM_017687.2,85-103).
cctattccagcattaggta

SEQ ID NO: 360819 - DNA, 19 bp, Homo sapiens
  siRNA target sequence for FLJ20147 (NM_017687.2,421-439).
cccagcctagcattaggta

SEQ ID NO: 360820 - DNA, 19 bp, Homo sapiens
  siRNA target sequence for FLJ20147 (NM_017687.2,425-443).
gcctagcattaggtacttt

SEQ ID NO: 360821 - DNA, 19 bp, Homo sapiens
  siRNA target sequence for FLJ20151 (NM_017689.1,5-23).
gacgaagcaacatgaatta

SEQ ID NO: 360822 - DNA, 19 bp, Homo sapiens
  siRNA target sequence for FLJ20151 (NM_017689.1,35-53).
ggccttggtccaaaattgt

SEQ ID NO: 360823 - DNA, 19 bp, Homo sapiens
  siRNA target sequence for FLJ20151 (NM_017689.1,41-59).
ggtccaaaattgtcaatca

SEQ ID NO: 360824 - DNA, 19 bp, Homo sapiens
  siRNA target sequence for FLJ20151 (NM_017689.1,87-105).
gtgggactgtctgtcaaaa

SEQ ID NO: 360825 - DNA, 19 bp, Homo sapiens
  siRNA target sequence for FLJ20151 (NM_017689.1,89-107).
gggactgtctgtcaaaaga

SEQ ID NO: 360826 - DNA, 19 bp, Homo sapiens
  siRNA target sequence for FLJ20151 (NM_017689.1,91-109).
gactgtctgtcaaaagact

SEQ ID NO: 360827 - DNA, 19 bp, Homo sapiens
  siRNA target sequence for FLJ20151 (NM_017689.1,106-124).
gactctgtatatcttttgt

SEQ ID NO: 360828 - DNA, 19 bp, Homo sapiens
  siRNA target sequence for FLJ20151 (NM_017689.1,312-330).
gaaccaacactatcaatgt

SEQ ID NO: 360829 - DNA, 19 bp, Homo sapiens
  siRNA target sequence for FLJ20151 (NM_017689.1,325-343).
caatgtctttgcaaatcct

SEQ ID NO: 360830 - DNA, 19 bp, Homo sapiens
  siRNA target sequence for FLJ20151 (NM_017689.1,387-405).
cttcggatccgcactcatt

SEQ ID NO: 360831 - DNA, 19 bp, Homo sapiens
  siRNA target sequence for FLJ20156 (NM_017691.1,257-275).
gggaaatatcgctctgttt

SEQ ID NO: 360832 - DNA, 19 bp, Homo sapiens
  siRNA target sequence for FLJ20156 (NM_017691.1,303-321).
gcgggcttcatctggttat

SEQ ID NO: 360833 - DNA, 19 bp, Homo sapiens
  siRNA target sequence for FLJ20156 (NM_017691.1,304-322).
cgggcttcatctggttatt

SEQ ID NO: 360834 - DNA, 19 bp, Homo sapiens
  siRNA target sequence for FLJ20156 (NM_017691.1,327-345).
catcatcgcttcctgaaaa

SEQ ID NO: 360835 - DNA, 19 bp, Homo sapiens
  siRNA target sequence for FLJ20156 (NM_017691.1,353-371).
gttgaattcaagctaaata

SEQ ID NO: 360836 - DNA, 19 bp, Homo sapiens
  siRNA target sequence for FLJ20156 (NM_017691.1,382-400).
gtcattccccggtagactt

SEQ ID NO: 360837 - DNA, 19 bp, Homo sapiens
  siRNA target sequence for FLJ20156 (NM_017691.1,384-402).
cattccccggtagactttt

SEQ ID NO: 360838 - DNA, 19 bp, Homo sapiens
  siRNA target sequence for FLJ20156 (NM_017691.1,388-406).
ccccggtagacttttacaa

SEQ ID NO: 360839 - DNA, 19 bp, Homo sapiens
  siRNA target sequence for FLJ20156 (NM_017691.1,390-408).
ccggtagacttttacaaca

SEQ ID NO: 360840 - DNA, 19 bp, Homo sapiens
  siRNA target sequence for FLJ20156 (NM_017691.1,391-409).
cggtagacttttacaacat

SEQ ID NO: 360841 - DNA, 19 bp, Homo sapiens
  siRNA target sequence for FLJ20156 (NM_017691.1,416-434).
gaaagaaactactcaagta

SEQ ID NO: 360842 - DNA, 19 bp, Homo sapiens
  siRNA target sequence for FLJ20156 (NM_017691.1,432-450).
gtaggcaaggtgatcatat

SEQ ID NO: 360843 - DNA, 19 bp, Homo sapiens
  siRNA target sequence for FLJ20156 (NM_017691.1,435-453).
ggcaaggtgatcatattaa

SEQ ID NO: 360844 - DNA, 19 bp, Homo sapiens
  siRNA target sequence for FLJ20156 (NM_017691.1,457-475).
ggtgagctcatcattgtca

SEQ ID NO: 360845 - DNA, 19 bp, Homo sapiens
  siRNA target sequence for FLJ20156 (NM_017691.1,458-476).
gtgagctcatcattgtcat

SEQ ID NO: 360846 - DNA, 19 bp, Homo sapiens
  siRNA target sequence for FLJ20156 (NM_017691.1,472-490).
gtcatcatttcctattctt

SEQ ID NO: 360847 - DNA, 19 bp, Homo sapiens
  siRNA target sequence for FLJ20156 (NM_017691.1,555-573).
ccgtatgtcctatcatcaa

SEQ ID NO: 360848 - DNA, 19 bp, Homo sapiens
  siRNA target sequence for FLJ20156 (NM_017691.1,556-574).
cgtatgtcctatcatcaat

SEQ ID NO: 360849 - DNA, 19 bp, Homo sapiens
  siRNA target sequence for FLJ20156 (NM_017691.1,576-594).
gggaagaccaccttcgttt

SEQ ID NO: 360850 - DNA, 19 bp, Homo sapiens
  siRNA target sequence for FLJ20156 (NM_017691.1,586-604).
ccttcgtttgttgaacttt

SEQ ID NO: 360851 - DNA, 19 bp, Homo sapiens
  siRNA target sequence for FLJ20156 (NM_017691.1,591-609).
gtttgttgaactttcaaca

SEQ ID NO: 360852 - DNA, 19 bp, Homo sapiens
  siRNA target sequence for FLJ20156 (NM_017691.1,644-662).
ctacagaagttaatatcgt

SEQ ID NO: 360853 - DNA, 19 bp, Homo sapiens
  siRNA target sequence for FLJ20156 (NM_017691.1,660-678).
cgttggatttatatgataa

SEQ ID NO: 360854 - DNA, 19 bp, Homo sapiens
  siRNA target sequence for FLJ20156 (NM_017691.1,846-864).
gtgagttgagagttttaaa

SEQ ID NO: 360855 - DNA, 19 bp, Homo sapiens
  siRNA target sequence for FLJ20156 (NM_017691.1,870-888).
ccaggaactttttaagtca

SEQ ID NO: 360856 - DNA, 19 bp, Homo sapiens
  siRNA target sequence for FLJ20156 (NM_017691.1,915-933).
cactaactgaacttaactt

SEQ ID NO: 360857 - DNA, 19 bp, Homo sapiens
  siRNA target sequence for FLJ20156 (NM_017691.1,934-952).
gcgacacaatcaaatcact

SEQ ID NO: 360858 - DNA, 19 bp, Homo sapiens
  siRNA target sequence for FLJ20156 (NM_017691.1,935-953).
cgacacaatcaaatcactt

SEQ ID NO: 360859 - DNA, 19 bp, Homo sapiens
  siRNA target sequence for FLJ20156 (NM_017691.1,955-973).
cgtgagagatgtggataat

SEQ ID NO: 360860 - DNA, 19 bp, Homo sapiens
  siRNA target sequence for FLJ20156 (NM_017691.1,956-974).
gtgagagatgtggataatt

SEQ ID NO: 360861 - DNA, 19 bp, Homo sapiens
  siRNA target sequence for FLJ20156 (NM_017691.1,1000-1018).
cagctttaacaatatatct

SEQ ID NO: 360862 - DNA, 19 bp, Homo sapiens
  siRNA target sequence for FLJ20156 (NM_017691.1,1003-1021).
ctttaacaatatatctagt

SEQ ID NO: 360863 - DNA, 19 bp, Homo sapiens
  siRNA target sequence for FLJ20156 (NM_017691.1,1139-1157).
ctgcgccagctagatatga

SEQ ID NO: 360864 - DNA, 19 bp, Homo sapiens
  siRNA target sequence for FLJ20156 (NM_017691.1,1142-1160).
cgccagctagatatgaaga

SEQ ID NO: 360865 - DNA, 19 bp, Homo sapiens
  siRNA target sequence for FLJ20156 (NM_017691.1,1148-1166).
ctagatatgaagagaatca

SEQ ID NO: 360866 - DNA, 19 bp, Homo sapiens
  siRNA target sequence for FLJ20156 (NM_017691.1,1179-1197).
ggcgtatggcatctgtttt

SEQ ID NO: 360867 - DNA, 19 bp, Homo sapiens
  siRNA target sequence for FLJ20156 (NM_017691.1,1180-1198).
gcgtatggcatctgtttta

SEQ ID NO: 360868 - DNA, 19 bp, Homo sapiens
  siRNA target sequence for FLJ20156 (NM_017691.1,1188-1206).
catctgttttagccaaaaa

SEQ ID NO: 360869 - DNA, 19 bp, Homo sapiens
  siRNA target sequence for FLJ20156 (NM_017691.1,1222-1240).
gcgggaaagtcataaacaa

SEQ ID NO: 360870 - DNA, 19 bp, Homo sapiens
  siRNA target sequence for FLJ20156 (NM_017691.1,1223-1241).
cgggaaagtcataaacaat

SEQ ID NO: 360871 - DNA, 19 bp, Homo sapiens
  siRNA target sequence for FLJ20156 (NM_017691.1,1225-1243).
ggaaagtcataaacaatct

SEQ ID NO: 360872 - DNA, 19 bp, Homo sapiens
  siRNA target sequence for FLJ20156 (NM_017691.1,1226-1244).
gaaagtcataaacaatctt

SEQ ID NO: 360873 - DNA, 19 bp, Homo sapiens
  siRNA target sequence for FLJ20156 (NM_017691.1,1307-1325).
cgagtagccaatattgcta

SEQ ID NO: 360874 - DNA, 19 bp, Homo sapiens
  siRNA target sequence for FLJ20156 (NM_017691.1,1360-1378).
ggacccctgtcagattgat

SEQ ID NO: 360875 - DNA, 19 bp, Homo sapiens
  siRNA target sequence for FLJ20156 (NM_017691.1,1428-1446).
gactcaacaatgctttaca

SEQ ID NO: 360876 - DNA, 19 bp, Homo sapiens
  siRNA target sequence for FLJ20156 (NM_017691.1,1435-1453).
caatgctttacaaggttta

SEQ ID NO: 360877 - DNA, 19 bp, Homo sapiens
  siRNA target sequence for FLJ20156 (NM_017691.1,1440-1458).
ctttacaaggtttatctgt

SEQ ID NO: 360878 - DNA, 19 bp, Homo sapiens
  siRNA target sequence for FLJ20156 (NM_017691.1,1481-1499).
gtggacggggatacacttt

SEQ ID NO: 360879 - DNA, 19 bp, Homo sapiens
  siRNA target sequence for FLJ20156 (NM_017691.1,1523-1541).
gaatctctggataggaatt

SEQ ID NO: 360880 - DNA, 19 bp, Homo sapiens
  siRNA target sequence for FLJ20156 (NM_017691.1,1576-1594).
ctccttcactttcatagaa

SEQ ID NO: 360881 - DNA, 19 bp, Homo sapiens
  siRNA target sequence for FLJ20156 (NM_017691.1,1619-1637).
cctaaactgaagattaagt

SEQ ID NO: 360882 - DNA, 19 bp, Homo sapiens
  siRNA target sequence for FLJ20156 (NM_017691.1,1679-1697).
gtaatgctgcagcaattta

SEQ ID NO: 360883 - DNA, 19 bp, Homo sapiens
  siRNA target sequence for FLJ20156 (NM_017691.1,1707-1725).
cccaactccgtcgtattga

SEQ ID NO: 360884 - DNA, 19 bp, Homo sapiens
  siRNA target sequence for FLJ20156 (NM_017691.1,1719-1737).
gtattgaccagttgacaat

SEQ ID NO: 360885 - DNA, 19 bp, Homo sapiens
  siRNA target sequence for FLJ20156 (NM_017691.1,1797-1815).
ggctaagccatttcagtat

SEQ ID NO: 360886 - DNA, 19 bp, Homo sapiens
  siRNA target sequence for FLJ20156 (NM_017691.1,1805-1823).
catttcagtatgcagaaaa

SEQ ID NO: 360887 - DNA, 19 bp, Homo sapiens
  siRNA target sequence for FLJ20156 (NM_017691.1,1863-1881).
ctgaaaggctctttggaat

SEQ ID NO: 360888 - DNA, 19 bp, Homo sapiens
  siRNA target sequence for FLJ20156 (NM_017691.1,1913-1931).
cagtatcgtctgatttcca

SEQ ID NO: 360889 - DNA, 19 bp, Homo sapiens
  siRNA target sequence for FLJ20156 (NM_017691.1,1915-1933).
gtatcgtctgatttccatt

SEQ ID NO: 360890 - DNA, 19 bp, Homo sapiens
  siRNA target sequence for FLJ20156 (NM_017691.1,1954-1972).
gcaatttcggtatctacta

SEQ ID NO: 360891 - DNA, 19 bp, Homo sapiens
  siRNA target sequence for FLJ20156 (NM_017691.1,1962-1980).
ggtatctactagaatccaa

SEQ ID NO: 360892 - DNA, 19 bp, Homo sapiens
  siRNA target sequence for FLJ20156 (NM_017691.1,1995-2013).
gtattatcaacgaagaaaa

SEQ ID NO: 360893 - DNA, 19 bp, Homo sapiens
  siRNA target sequence for FLJ20156 (NM_017691.1,2044-2062).
cacaaatcgtgctacatta

SEQ ID NO: 360894 - DNA, 19 bp, Homo sapiens
  siRNA target sequence for FLJ20156 (NM_017691.1,2046-2064).
caaatcgtgctacattaaa

SEQ ID NO: 360895 - DNA, 19 bp, Homo sapiens
  siRNA target sequence for FLJ20156 (NM_017691.1,2051-2069).
cgtgctacattaaattata

SEQ ID NO: 360896 - DNA, 19 bp, Homo sapiens
  siRNA target sequence for FLJ20156 (NM_017691.1,2070-2088).
ctacaagagacttttataa

SEQ ID NO: 360897 - DNA, 19 bp, Homo sapiens
  siRNA target sequence for FLJ20156 (NM_017691.1,2230-2248).
ggatgcagtcatagaaatt

SEQ ID NO: 360898 - DNA, 19 bp, Homo sapiens
  siRNA target sequence for FLJ20156 (NM_017691.1,2273-2291).
ctctgcctacagcagataa

SEQ ID NO: 360899 - DNA, 19 bp, Homo sapiens
  siRNA target sequence for FLJ20156 (NM_017691.1,2275-2293).
ctgcctacagcagataaca

SEQ ID NO: 360900 - DNA, 19 bp, Homo sapiens
  siRNA target sequence for APTX (NM_017692.2,668-686).
ccaaaggcccgttaccatt

SEQ ID NO: 360901 - DNA, 19 bp, Homo sapiens
  siRNA target sequence for APTX (NM_017692.2,742-760).
ccttgaactccttaagcat

SEQ ID NO: 360902 - DNA, 19 bp, Homo sapiens
  siRNA target sequence for APTX (NM_017692.2,743-761).
cttgaactccttaagcata

SEQ ID NO: 360903 - DNA, 19 bp, Homo sapiens
  siRNA target sequence for APTX (NM_017692.2,833-851).
cacgccattccgagtatga

SEQ ID NO: 360904 - DNA, 19 bp, Homo sapiens
  siRNA target sequence for APTX (NM_017692.2,843-861).
cgagtatgagccatgtaca

SEQ ID NO: 360905 - DNA, 19 bp, Homo sapiens
  siRNA target sequence for APTX (NM_017692.2,844-862).
gagtatgagccatgtacat

SEQ ID NO: 360906 - DNA, 19 bp, Homo sapiens
  siRNA target sequence for APTX (NM_017692.2,974-992).
caagaggctggtagagtaa

SEQ ID NO: 360907 - DNA, 19 bp, Homo sapiens
  siRNA target sequence for APTX (NM_017692.2,1005-1023).
ggatgcctgagctcttgaa

SEQ ID NO: 360908 - DNA, 19 bp, Homo sapiens
  siRNA target sequence for BIVM (NM_017693.2,682-700).
gcctaacgttgcagaaaca

SEQ ID NO: 360909 - DNA, 19 bp, Homo sapiens
  siRNA target sequence for BIVM (NM_017693.2,767-785).
caaggtgctgtaaaatctt

SEQ ID NO: 360910 - DNA, 19 bp, Homo sapiens
  siRNA target sequence for BIVM (NM_017693.2,820-838).
caaaggagatggtcattat

SEQ ID NO: 360911 - DNA, 19 bp, Homo sapiens
  siRNA target sequence for BIVM (NM_017693.2,824-842).
ggagatggtcattatccat

SEQ ID NO: 360912 - DNA, 19 bp, Homo sapiens
  siRNA target sequence for BIVM (NM_017693.2,858-876).
ctcatacacgggaaaaaat

SEQ ID NO: 360913 - DNA, 19 bp, Homo sapiens
  siRNA target sequence for BIVM (NM_017693.2,910-928).
ccaggcgacctcaatctat

SEQ ID NO: 360914 - DNA, 19 bp, Homo sapiens
  siRNA target sequence for BIVM (NM_017693.2,911-929).
caggcgacctcaatctata

SEQ ID NO: 360915 - DNA, 19 bp, Homo sapiens
  siRNA target sequence for BIVM (NM_017693.2,913-931).
ggcgacctcaatctataaa

SEQ ID NO: 360916 - DNA, 19 bp, Homo sapiens
  siRNA target sequence for BIVM (NM_017693.2,953-971).
ccttgcctccctgatagta

SEQ ID NO: 360917 - DNA, 19 bp, Homo sapiens
  siRNA target sequence for BIVM (NM_017693.2,961-979).
ccctgatagtacctcttta

SEQ ID NO: 360918 - DNA, 19 bp, Homo sapiens
  siRNA target sequence for BIVM (NM_017693.2,962-980).
cctgatagtacctctttat

SEQ ID NO: 360919 - DNA, 19 bp, Homo sapiens
  siRNA target sequence for BIVM (NM_017693.2,996-1014).
catcaagatacattggtat

SEQ ID NO: 360920 - DNA, 19 bp, Homo sapiens
  siRNA target sequence for BIVM (NM_017693.2,1010-1028).
ggtatcccgactagtacat

SEQ ID NO: 360921 - DNA, 19 bp, Homo sapiens
  siRNA target sequence for BIVM (NM_017693.2,1018-1036).
gactagtacatcggaaatt

SEQ ID NO: 360922 - DNA, 19 bp, Homo sapiens
  siRNA target sequence for BIVM (NM_017693.2,1020-1038).
ctagtacatcggaaattat

SEQ ID NO: 360923 - DNA, 19 bp, Homo sapiens
  siRNA target sequence for BIVM (NM_017693.2,1023-1041).
gtacatcggaaattatcta

SEQ ID NO: 360924 - DNA, 19 bp, Homo sapiens
  siRNA target sequence for BIVM (NM_017693.2,1092-1110).
ctctcgcatgggaaattga

SEQ ID NO: 360925 - DNA, 19 bp, Homo sapiens
  siRNA target sequence for BIVM (NM_017693.2,1094-1112).
ctcgcatgggaaattgata

SEQ ID NO: 360926 - DNA, 19 bp, Homo sapiens
  siRNA target sequence for BIVM (NM_017693.2,1124-1142).
gatggggtgaccacaaatt

SEQ ID NO: 360927 - DNA, 19 bp, Homo sapiens
  siRNA target sequence for BIVM (NM_017693.2,1127-1145).
ggggtgaccacaaattcga

SEQ ID NO: 360928 - DNA, 19 bp, Homo sapiens
  siRNA target sequence for BIVM (NM_017693.2,1128-1146).
gggtgaccacaaattcgaa

SEQ ID NO: 360929 - DNA, 19 bp, Homo sapiens
  siRNA target sequence for BIVM (NM_017693.2,1129-1147).
ggtgaccacaaattcgaaa

SEQ ID NO: 360930 - DNA, 19 bp, Homo sapiens
  siRNA target sequence for BIVM (NM_017693.2,1291-1309).
cataagccgaccacagtat

SEQ ID NO: 360931 - DNA, 19 bp, Homo sapiens
  siRNA target sequence for BIVM (NM_017693.2,1297-1315).
ccgaccacagtataagact

SEQ ID NO: 360932 - DNA, 19 bp, Homo sapiens
  siRNA target sequence for BIVM (NM_017693.2,1298-1316).
cgaccacagtataagactt

SEQ ID NO: 360933 - DNA, 19 bp, Homo sapiens
  siRNA target sequence for BIVM (NM_017693.2,1457-1475).
cctttcacggggaatacaa

SEQ ID NO: 360934 - DNA, 19 bp, Homo sapiens
  siRNA target sequence for BIVM (NM_017693.2,1483-1501).
gaggtggtttagacaaatt

SEQ ID NO: 360935 - DNA, 19 bp, Homo sapiens
  siRNA target sequence for BIVM (NM_017693.2,1486-1504).
gtggtttagacaaattaat

SEQ ID NO: 360936 - DNA, 19 bp, Homo sapiens
  siRNA target sequence for BIVM (NM_017693.2,1488-1506).
ggtttagacaaattaatga

SEQ ID NO: 360937 - DNA, 19 bp, Homo sapiens
  siRNA target sequence for BIVM (NM_017693.2,1507-1525).
ccacttccatgtaaaagga

SEQ ID NO: 360938 - DNA, 19 bp, Homo sapiens
  siRNA target sequence for BIVM (NM_017693.2,1508-1526).
cacttccatgtaaaaggat

SEQ ID NO: 360939 - DNA, 19 bp, Homo sapiens
  siRNA target sequence for BIVM (NM_017693.2,1523-1541).
ggatgctcttatgttctat

SEQ ID NO: 360940 - DNA, 19 bp, Homo sapiens
  siRNA target sequence for BIVM (NM_017693.2,1524-1542).
gatgctcttatgttctata

SEQ ID NO: 360941 - DNA, 19 bp, Homo sapiens
  siRNA target sequence for BIVM (NM_017693.2,1527-1545).
gctcttatgttctatataa

SEQ ID NO: 360942 - DNA, 19 bp, Homo sapiens
  siRNA target sequence for BIVM (NM_017693.2,1605-1623).
cccgtggattgaaagatga

SEQ ID NO: 360943 - DNA, 19 bp, Homo sapiens
  siRNA target sequence for BIVM (NM_017693.2,1606-1624).
ccgtggattgaaagatgaa

SEQ ID NO: 360944 - DNA, 19 bp, Homo sapiens
  siRNA target sequence for BIVM (NM_017693.2,1607-1625).
cgtggattgaaagatgaat

SEQ ID NO: 360945 - DNA, 19 bp, Homo sapiens
  siRNA target sequence for BIVM (NM_017693.2,1619-1637).
gatgaatcgctggcttata

SEQ ID NO: 360946 - DNA, 19 bp, Homo sapiens
  siRNA target sequence for BIVM (NM_017693.2,1622-1640).
gaatcgctggcttatatct

SEQ ID NO: 360947 - DNA, 19 bp, Homo sapiens
  siRNA target sequence for BIVM (NM_017693.2,1739-1757).
gttgaatattggatcttaa

SEQ ID NO: 360948 - DNA, 19 bp, Homo sapiens
  siRNA target sequence for BIVM (NM_017693.2,1753-1771).
cttaattggagaatcaagt

SEQ ID NO: 360949 - DNA, 19 bp, Homo sapiens
  siRNA target sequence for BIVM (NM_017693.2,1850-1868).
gatatccggcacttagaga

SEQ ID NO: 360950 - DNA, 19 bp, Homo sapiens
  siRNA target sequence for BIVM (NM_017693.2,1867-1885).
gaggggactgcagtataga

SEQ ID NO: 360951 - DNA, 19 bp, Homo sapiens
  siRNA target sequence for BIVM (NM_017693.2,1869-1887).
ggggactgcagtatagaaa

SEQ ID NO: 360952 - DNA, 19 bp, Homo sapiens
  siRNA target sequence for BIVM (NM_017693.2,1935-1953).
gacttaactggcaaagatt

SEQ ID NO: 360953 - DNA, 19 bp, Homo sapiens
  siRNA target sequence for BIVM (NM_017693.2,2079-2097).
ggtctttcagtgctagttt

SEQ ID NO: 360954 - DNA, 19 bp, Homo sapiens
  siRNA target sequence for BIVM (NM_017693.2,2102-2120).
caggactcggcatggaaaa

SEQ ID NO: 360955 - DNA, 19 bp, Homo sapiens
  siRNA target sequence for BIVM (NM_017693.2,2111-2129).
gcatggaaaaagatgtcta

SEQ ID NO: 360956 - DNA, 19 bp, Homo sapiens
  siRNA target sequence for BIVM (NM_017693.2,2115-2133).
ggaaaaagatgtctagtat

SEQ ID NO: 360957 - DNA, 19 bp, Homo sapiens
  siRNA target sequence for FLJ20160 (NM_017694.2,120-138).
gcttgcagatccctttaat

SEQ ID NO: 360958 - DNA, 19 bp, Homo sapiens
  siRNA target sequence for FLJ20160 (NM_017694.2,124-142).
gcagatccctttaatggta

SEQ ID NO: 360959 - DNA, 19 bp, Homo sapiens
  siRNA target sequence for FLJ20160 (NM_017694.2,125-143).
cagatccctttaatggtat

SEQ ID NO: 360960 - DNA, 19 bp, Homo sapiens
  siRNA target sequence for FLJ20160 (NM_017694.2,127-145).
gatccctttaatggtattt

SEQ ID NO: 360961 - DNA, 19 bp, Homo sapiens
  siRNA target sequence for FLJ20160 (NM_017694.2,130-148).
ccctttaatggtatttcca

SEQ ID NO: 360962 - DNA, 19 bp, Homo sapiens
  siRNA target sequence for FLJ20160 (NM_017694.2,157-175).
gaaccaccttcgaatgaaa

SEQ ID NO: 360963 - DNA, 19 bp, Homo sapiens
  siRNA target sequence for FLJ20160 (NM_017694.2,222-240).
ctggatagagaaacattgt

SEQ ID NO: 360964 - DNA, 19 bp, Homo sapiens
  siRNA target sequence for FLJ20160 (NM_017694.2,224-242).
ggatagagaaacattgtgt

SEQ ID NO: 360965 - DNA, 19 bp, Homo sapiens
  siRNA target sequence for FLJ20160 (NM_017694.2,319-337).
cttttgcctgtgtattaca

SEQ ID NO: 360966 - DNA, 19 bp, Homo sapiens
  siRNA target sequence for FLJ20160 (NM_017694.2,359-377).
gccagagtggactactagt

SEQ ID NO: 360967 - DNA, 19 bp, Homo sapiens
  siRNA target sequence for FLJ20160 (NM_017694.2,360-378).
ccagagtggactactagta

SEQ ID NO: 360968 - DNA, 19 bp, Homo sapiens
  siRNA target sequence for FLJ20160 (NM_017694.2,365-383).
gtggactactagtaggtat

SEQ ID NO: 360969 - DNA, 19 bp, Homo sapiens
  siRNA target sequence for FLJ20160 (NM_017694.2,376-394).
gtaggtattcgttacttca

SEQ ID NO: 360970 - DNA, 19 bp, Homo sapiens
  siRNA target sequence for FLJ20160 (NM_017694.2,385-403).
cgttacttcattgaattct

SEQ ID NO: 360971 - DNA, 19 bp, Homo sapiens
  siRNA target sequence for FLJ20160 (NM_017694.2,524-542).
ccttgagatgtgtaccaaa

SEQ ID NO: 360972 - DNA, 19 bp, Homo sapiens
  siRNA target sequence for FLJ20160 (NM_017694.2,528-546).
gagatgtgtaccaaagatt

SEQ ID NO: 360973 - DNA, 19 bp, Homo sapiens
  siRNA target sequence for FLJ20160 (NM_017694.2,571-589).
gcaagtcaccagttaacta

SEQ ID NO: 360974 - DNA, 19 bp, Homo sapiens
  siRNA target sequence for FLJ20160 (NM_017694.2,622-640).
ctcaccatatcaccaaaaa

SEQ ID NO: 360975 - DNA, 19 bp, Homo sapiens
  siRNA target sequence for FLJ20160 (NM_017694.2,642-660).
gcgtgagaaaagaaacctt

SEQ ID NO: 360976 - DNA, 19 bp, Homo sapiens
  siRNA target sequence for FLJ20160 (NM_017694.2,700-718).
ccaacagctccaaacatga

SEQ ID NO: 360977 - DNA, 19 bp, Homo sapiens
  siRNA target sequence for FLJ20160 (NM_017694.2,763-781).
cgtatgatggacttgactt

SEQ ID NO: 360978 - DNA, 19 bp, Homo sapiens
  siRNA target sequence for FLJ20160 (NM_017694.2,809-827).
ccccaggaagcgtaaccaa

SEQ ID NO: 360979 - DNA, 19 bp, Homo sapiens
  siRNA target sequence for FLJ20160 (NM_017694.2,828-846).
ggagacaaccactgttatt

SEQ ID NO: 360980 - DNA, 19 bp, Homo sapiens
  siRNA target sequence for FLJ20160 (NM_017694.2,847-865).
gttaccaccaccaaatctt

SEQ ID NO: 360981 - DNA, 19 bp, Homo sapiens
  siRNA target sequence for FLJ20160 (NM_017694.2,874-892).
gaccaagtcatgcttgttt

SEQ ID NO: 360982 - DNA, 19 bp, Homo sapiens
  siRNA target sequence for FLJ20160 (NM_017694.2,876-894).
ccaagtcatgcttgtttat

SEQ ID NO: 360983 - DNA, 19 bp, Homo sapiens
  siRNA target sequence for FLJ20160 (NM_017694.2,933-951).
ggtagttgtcataatagga

SEQ ID NO: 360984 - DNA, 19 bp, Homo sapiens
  siRNA target sequence for FLJ20160 (NM_017694.2,940-958).
gtcataataggagaatttt

SEQ ID NO: 360985 - DNA, 19 bp, Homo sapiens
  siRNA target sequence for FLJ20160 (NM_017694.2,962-980).
gtgcctcttctgtcacaat

SEQ ID NO: 360986 - DNA, 19 bp, Homo sapiens
  siRNA target sequence for FLJ20160 (NM_017694.2,966-984).
ctcttctgtcacaatcgta

SEQ ID NO: 360987 - DNA, 19 bp, Homo sapiens
  siRNA target sequence for FLJ20160 (NM_017694.2,1288-1306).
gtggaaaggaacaactcta

SEQ ID NO: 360988 - DNA, 19 bp, Homo sapiens
  siRNA target sequence for FLJ20160 (NM_017694.2,1421-1439).
ggttcatgggttttggata

SEQ ID NO: 360989 - DNA, 19 bp, Homo sapiens
  siRNA target sequence for FLJ20160 (NM_017694.2,1477-1495).
gacctcaatggaactacaa

SEQ ID NO: 360990 - DNA, 19 bp, Homo sapiens
  siRNA target sequence for FLJ20160 (NM_017694.2,1534-1552).
gagctgacagcatattttt

SEQ ID NO: 360991 - DNA, 19 bp, Homo sapiens
  siRNA target sequence for FLJ20160 (NM_017694.2,1536-1554).
gctgacagcatattttttt

SEQ ID NO: 360992 - DNA, 19 bp, Homo sapiens
  siRNA target sequence for FLJ20160 (NM_017694.2,1539-1557).
gacagcatatttttttagt

SEQ ID NO: 360993 - DNA, 19 bp, Homo sapiens
  siRNA target sequence for FLJ20160 (NM_017694.2,1556-1574).
gtcacaagcttattgaatt

SEQ ID NO: 360994 - DNA, 19 bp, Homo sapiens
  siRNA target sequence for FLJ20160 (NM_017694.2,1558-1576).
cacaagcttattgaattga

SEQ ID NO: 360995 - DNA, 19 bp, Homo sapiens
  siRNA target sequence for FLJ20160 (NM_017694.2,1580-1598).
gccacatcagggttctgta

SEQ ID NO: 360996 - DNA, 19 bp, Homo sapiens
  siRNA target sequence for FLJ20160 (NM_017694.2,1584-1602).
catcagggttctgtacatt

SEQ ID NO: 360997 - DNA, 19 bp, Homo sapiens
  siRNA target sequence for FLJ20160 (NM_017694.2,1613-1631).
gcaatacggctcgctatat

SEQ ID NO: 360998 - DNA, 19 bp, Homo sapiens
  siRNA target sequence for FLJ20160 (NM_017694.2,1614-1632).
caatacggctcgctatatt

SEQ ID NO: 360999 - DNA, 19 bp, Homo sapiens
  siRNA target sequence for FLJ20160 (NM_017694.2,1619-1637).
cggctcgctatatttatat

SEQ ID NO: 361000 - DNA, 19 bp, Homo sapiens
  siRNA target sequence for FLJ20160 (NM_017694.2,1620-1638).
ggctcgctatatttatatt

SEQ ID NO: 361001 - DNA, 19 bp, Homo sapiens
  siRNA target sequence for FLJ20160 (NM_017694.2,1624-1642).
cgctatatttatatttcct

SEQ ID NO: 361002 - DNA, 19 bp, Homo sapiens
  siRNA target sequence for FLJ20160 (NM_017694.2,1709-1727).
gggcagcatgcatttctta

SEQ ID NO: 361003 - DNA, 19 bp, Homo sapiens
  siRNA target sequence for FLJ20160 (NM_017694.2,1824-1842).
cggaggcgtgttagtcaat

SEQ ID NO: 361004 - DNA, 19 bp, Homo sapiens
  siRNA target sequence for FLJ20160 (NM_017694.2,1825-1843).
ggaggcgtgttagtcaatt

SEQ ID NO: 361005 - DNA, 19 bp, Homo sapiens
  siRNA target sequence for FLJ20160 (NM_017694.2,1826-1844).
gaggcgtgttagtcaatta

SEQ ID NO: 361006 - DNA, 19 bp, Homo sapiens
  siRNA target sequence for FLJ20160 (NM_017694.2,1828-1846).
ggcgtgttagtcaattatt

SEQ ID NO: 361007 - DNA, 19 bp, Homo sapiens
  siRNA target sequence for FLJ20160 (NM_017694.2,1829-1847).
gcgtgttagtcaattattt

SEQ ID NO: 361008 - DNA, 19 bp, Homo sapiens
  siRNA target sequence for FLJ20160 (NM_017694.2,1953-1971).
gacaatgttggcagaaaga

SEQ ID NO: 361009 - DNA, 19 bp, Homo sapiens
  siRNA target sequence for FLJ20160 (NM_017694.2,2152-2170).
gtctatgcactctaccaaa

SEQ ID NO: 361010 - DNA, 19 bp, Homo sapiens
  siRNA target sequence for FLJ20160 (NM_017694.2,2199-2217).
caaccgtgcttctgagata

SEQ ID NO: 361011 - DNA, 19 bp, Homo sapiens
  siRNA target sequence for FLJ20160 (NM_017694.2,2293-2311).
cactctgacccatctagaa

SEQ ID NO: 361012 - DNA, 19 bp, Homo sapiens
  siRNA target sequence for FLJ20174 (NM_017699.1,513-531).
ccgatttcgatcatgtcta

SEQ ID NO: 361013 - DNA, 19 bp, Homo sapiens
  siRNA target sequence for FLJ20174 (NM_017699.1,603-621).
cagccgtgagggtgtatgt

SEQ ID NO: 361014 - DNA, 19 bp, Homo sapiens
  siRNA target sequence for FLJ20174 (NM_017699.1,605-623).
gccgtgagggtgtatgtga

SEQ ID NO: 361015 - DNA, 19 bp, Homo sapiens
  siRNA target sequence for FLJ20174 (NM_017699.1,622-640).
gaacagttcctctgagaat

SEQ ID NO: 361016 - DNA, 19 bp, Homo sapiens
  siRNA target sequence for FLJ20174 (NM_017699.1,792-810).
gacccttgcagcaactgat

SEQ ID NO: 361017 - DNA, 19 bp, Homo sapiens
  siRNA target sequence for FLJ20174 (NM_017699.1,794-812).
cccttgcagcaactgatat

SEQ ID NO: 361018 - DNA, 19 bp, Homo sapiens
  siRNA target sequence for FLJ20174 (NM_017699.1,795-813).
ccttgcagcaactgatatt

SEQ ID NO: 361019 - DNA, 19 bp, Homo sapiens
  siRNA target sequence for FLJ20174 (NM_017699.1,796-814).
cttgcagcaactgatattt

SEQ ID NO: 361020 - DNA, 19 bp, Homo sapiens
  siRNA target sequence for FLJ20174 (NM_017699.1,848-866).
cagtacaaactgctagtta

SEQ ID NO: 361021 - DNA, 19 bp, Homo sapiens
  siRNA target sequence for FLJ20174 (NM_017699.1,880-898).
cttccagctccggacaaat

SEQ ID NO: 361022 - DNA, 19 bp, Homo sapiens
  siRNA target sequence for FLJ20174 (NM_017699.1,933-951).
ctcagtattttctatacaa

SEQ ID NO: 361023 - DNA, 19 bp, Homo sapiens
  siRNA target sequence for FLJ20174 (NM_017699.1,964-982).
cgtggactcagttatcatt

SEQ ID NO: 361024 - DNA, 19 bp, Homo sapiens
  siRNA target sequence for FLJ20174 (NM_017699.1,965-983).
gtggactcagttatcatta

SEQ ID NO: 361025 - DNA, 19 bp, Homo sapiens
  siRNA target sequence for FLJ20174 (NM_017699.1,967-985).
ggactcagttatcattaaa

SEQ ID NO: 361026 - DNA, 19 bp, Homo sapiens
  siRNA target sequence for FLJ20174 (NM_017699.1,1036-1054).
catgtgcccggtgtatgat

SEQ ID NO: 361027 - DNA, 19 bp, Homo sapiens
  siRNA target sequence for FLJ20174 (NM_017699.1,1069-1087).
ggaatttaatggtgtctat

SEQ ID NO: 361028 - DNA, 19 bp, Homo sapiens
  siRNA target sequence for FLJ20174 (NM_017699.1,1107-1125).
ctgccatcacgctacagaa

SEQ ID NO: 361029 - DNA, 19 bp, Homo sapiens
  siRNA target sequence for FLJ20174 (NM_017699.1,1144-1162).
gcagttcttcgtggtattt

SEQ ID NO: 361030 - DNA, 19 bp, Homo sapiens
  siRNA target sequence for FLJ20174 (NM_017699.1,1150-1168).
cttcgtggtatttgtgata

SEQ ID NO: 361031 - DNA, 19 bp, Homo sapiens
  siRNA target sequence for FLJ20174 (NM_017699.1,1165-1183).
gataaagcctgaagattat

SEQ ID NO: 361032 - DNA, 19 bp, Homo sapiens
  siRNA target sequence for FLJ20174 (NM_017699.1,1272-1290).
cttccattaaagaatctgt

SEQ ID NO: 361033 - DNA, 19 bp, Homo sapiens
  siRNA target sequence for FLJ20174 (NM_017699.1,1275-1293).
ccattaaagaatctgttta

SEQ ID NO: 361034 - DNA, 19 bp, Homo sapiens
  siRNA target sequence for FLJ20174 (NM_017699.1,1348-1366).
ccttcttgttgggtttgtt

SEQ ID NO: 361035 - DNA, 19 bp, Homo sapiens
  siRNA target sequence for FLJ20174 (NM_017699.1,1352-1370).
cttgttgggtttgttcatt

SEQ ID NO: 361036 - DNA, 19 bp, Homo sapiens
  siRNA target sequence for FLJ20174 (NM_017699.1,1377-1395).
ggtttcagagaaaatccat

SEQ ID NO: 361037 - DNA, 19 bp, Homo sapiens
  siRNA target sequence for FLJ20174 (NM_017699.1,1464-1482).
cacccgaagggagcaatta

SEQ ID NO: 361038 - DNA, 19 bp, Homo sapiens
  siRNA target sequence for FLJ20174 (NM_017699.1,1601-1619).
ccagacattgagagtgata

SEQ ID NO: 361039 - DNA, 19 bp, Homo sapiens
  siRNA target sequence for FLJ20174 (NM_017699.1,1631-1649).
cggaccaagatgttccttt

SEQ ID NO: 361040 - DNA, 19 bp, Homo sapiens
  siRNA target sequence for FLJ20174 (NM_017699.1,1751-1769).
gtgatccagctggtcatta

SEQ ID NO: 361041 - DNA, 19 bp, Homo sapiens
  siRNA target sequence for FLJ20174 (NM_017699.1,1756-1774).
ccagctggtcattacctat

SEQ ID NO: 361042 - DNA, 19 bp, Homo sapiens
  siRNA target sequence for FLJ20174 (NM_017699.1,1760-1778).
ctggtcattacctatcaga

SEQ ID NO: 361043 - DNA, 19 bp, Homo sapiens
  siRNA target sequence for FLJ20174 (NM_017699.1,1770-1788).
cctatcagacagtggtaaa

SEQ ID NO: 361044 - DNA, 19 bp, Homo sapiens
  siRNA target sequence for FLJ20174 (NM_017699.1,1847-1865).
gtcctgagtgccttcaaca

SEQ ID NO: 361045 - DNA, 19 bp, Homo sapiens
  siRNA target sequence for FLJ20174 (NM_017699.1,1852-1870).
gagtgccttcaacaacatt

SEQ ID NO: 361046 - DNA, 19 bp, Homo sapiens
  siRNA target sequence for FLJ20174 (NM_017699.1,1954-1972).
ggaagccaaggacatcttt

SEQ ID NO: 361047 - DNA, 19 bp, Homo sapiens
  siRNA target sequence for FLJ20174 (NM_017699.1,2063-2081).
catgtctgccctaattatt

SEQ ID NO: 361048 - DNA, 19 bp, Homo sapiens
  siRNA target sequence for FLJ20174 (NM_017699.1,2066-2084).
gtctgccctaattattcca

SEQ ID NO: 361049 - DNA, 19 bp, Homo sapiens
  siRNA target sequence for FLJ20174 (NM_017699.1,2152-2170).
ccgccacccagacatcaat

SEQ ID NO: 361050 - DNA, 19 bp, Homo sapiens
  siRNA target sequence for FLJ20174 (NM_017699.1,2196-2214).
cctttgctgtggtcatcat

SEQ ID NO: 361051 - DNA, 19 bp, Homo sapiens
  siRNA target sequence for FLJ20174 (NM_017699.1,2301-2319).
ccctcagcacccagatata

SEQ ID NO: 361052 - DNA, 19 bp, Homo sapiens
  siRNA target sequence for FLJ20174 (NM_017699.1,2302-2320).
cctcagcacccagatatat

SEQ ID NO: 361053 - DNA, 19 bp, Homo sapiens
  siRNA target sequence for FLJ20174 (NM_017699.1,2303-2321).
ctcagcacccagatatatt

SEQ ID NO: 361054 - DNA, 19 bp, Homo sapiens
  siRNA target sequence for FLJ20174 (NM_017699.1,2305-2323).
cagcacccagatatattat

SEQ ID NO: 361055 - DNA, 19 bp, Homo sapiens
  siRNA target sequence for FLJ20174 (NM_017699.1,2326-2344).
gggtcgtttcaagatagat

SEQ ID NO: 361056 - DNA, 19 bp, Homo sapiens
  siRNA target sequence for FLJ20174 (NM_017699.1,2327-2345).
ggtcgtttcaagatagatt

SEQ ID NO: 361057 - DNA, 19 bp, Homo sapiens
  siRNA target sequence for FLJ20174 (NM_017699.1,2328-2346).
gtcgtttcaagatagattt

SEQ ID NO: 361058 - DNA, 19 bp, Homo sapiens
  siRNA target sequence for FLJ20174 (NM_017699.1,2400-2418).
gtagccgacctctatatat

SEQ ID NO: 361059 - DNA, 19 bp, Homo sapiens
  siRNA target sequence for FLJ20174 (NM_017699.1,2403-2421).
gccgacctctatatatgga

SEQ ID NO: 361060 - DNA, 19 bp, Homo sapiens
  siRNA target sequence for FLJ20174 (NM_017699.1,2467-2485).
cgccctctttggattgata

SEQ ID NO: 361061 - DNA, 19 bp, Homo sapiens
  siRNA target sequence for FLJ20174 (NM_017699.1,2468-2486).
gccctctttggattgatat

SEQ ID NO: 361062 - DNA, 19 bp, Homo sapiens
  siRNA target sequence for FLJ20174 (NM_017699.1,2469-2487).
ccctctttggattgatata

SEQ ID NO: 361063 - DNA, 19 bp, Homo sapiens
  siRNA target sequence for FLJ20184 (NM_017700.1,214-232).
ggtctagactctatatgct

SEQ ID NO: 361064 - DNA, 19 bp, Homo sapiens
  siRNA target sequence for FLJ20184 (NM_017700.1,423-441).
gcaaagcgggaaaagatca

SEQ ID NO: 361065 - DNA, 19 bp, Homo sapiens
  siRNA target sequence for FLJ20184 (NM_017700.1,424-442).
caaagcgggaaaagatcat

SEQ ID NO: 361066 - DNA, 19 bp, Homo sapiens
  siRNA target sequence for FLJ20184 (NM_017700.1,480-498).
gatctagagctgtgtgtta

SEQ ID NO: 361067 - DNA, 19 bp, Homo sapiens
  siRNA target sequence for FLJ20184 (NM_017700.1,506-524).
ggttcagcccctgagaaat

SEQ ID NO: 361068 - DNA, 19 bp, Homo sapiens
  siRNA target sequence for FLJ20184 (NM_017700.1,507-525).
gttcagcccctgagaaata

SEQ ID NO: 361069 - DNA, 19 bp, Homo sapiens
  siRNA target sequence for FLJ20184 (NM_017700.1,543-561).
gatgtggatagcttgttta

SEQ ID NO: 361070 - DNA, 19 bp, Homo sapiens
  siRNA target sequence for FLJ20184 (NM_017700.1,546-564).
gtggatagcttgtttagca

SEQ ID NO: 361071 - DNA, 19 bp, Homo sapiens
  siRNA target sequence for FLJ20184 (NM_017700.1,570-588).
gagtccgtgcatcagatat

SEQ ID NO: 361072 - DNA, 19 bp, Homo sapiens
  siRNA target sequence for FLJ20184 (NM_017700.1,572-590).
gtccgtgcatcagatatca

SEQ ID NO: 361073 - DNA, 19 bp, Homo sapiens
  siRNA target sequence for FLJ20184 (NM_017700.1,633-651).
gaaccggccatgcaagtaa

SEQ ID NO: 361074 - DNA, 19 bp, Homo sapiens
  siRNA target sequence for FLJ20184 (NM_017700.1,638-656).
ggccatgcaagtaattgga

SEQ ID NO: 361075 - DNA, 19 bp, Homo sapiens
  siRNA target sequence for FLJ20184 (NM_017700.1,657-675).
gaagtattcttgcagatta

SEQ ID NO: 361076 - DNA, 19 bp, Homo sapiens
  siRNA target sequence for FLJ20186 (NM_017702.1,536-554).
cttgagcaccgcttttaca

SEQ ID NO: 361077 - DNA, 19 bp, Homo sapiens
  siRNA target sequence for FLJ20186 (NM_017702.1,699-717).
gctgggctcacattcagat

SEQ ID NO: 361078 - DNA, 19 bp, Homo sapiens
  siRNA target sequence for FBXL12 (NM_017703.1,271-289).
cggtcctgctcgagatctt

SEQ ID NO: 361079 - DNA, 19 bp, Homo sapiens
  siRNA target sequence for FBXL12 (NM_017703.1,273-291).
gtcctgctcgagatcttct

SEQ ID NO: 361080 - DNA, 19 bp, Homo sapiens
  siRNA target sequence for FBXL12 (NM_017703.1,395-413).
ctacacgatgcgacctaaa

SEQ ID NO: 361081 - DNA, 19 bp, Homo sapiens
  siRNA target sequence for FBXL12 (NM_017703.1,400-418).
cgatgcgacctaaagtcat

SEQ ID NO: 361082 - DNA, 19 bp, Homo sapiens
  siRNA target sequence for FBXL12 (NM_017703.1,1138-1156).
cggagaagatcctgtgtaa

SEQ ID NO: 361083 - DNA, 19 bp, Homo sapiens
  siRNA target sequence for FBXL12 (NM_017703.1,1189-1207).
cttgccccaaagagtctat

SEQ ID NO: 361084 - DNA, 19 bp, Homo sapiens
  siRNA target sequence for FGIF (NM_017704.1,151-169).
gaataccagaccaagagaa

SEQ ID NO: 361085 - DNA, 19 bp, Homo sapiens
  siRNA target sequence for FGIF (NM_017704.1,156-174).
ccagaccaagagaattcct

SEQ ID NO: 361086 - DNA, 19 bp, Homo sapiens
  siRNA target sequence for FGIF (NM_017704.1,157-175).
cagaccaagagaattcctt

SEQ ID NO: 361087 - DNA, 19 bp, Homo sapiens
  siRNA target sequence for FGIF (NM_017704.1,219-237).
catggacaccttattccta

SEQ ID NO: 361088 - DNA, 19 bp, Homo sapiens
  siRNA target sequence for FGIF (NM_017704.1,257-275).
ggtaggcaattctgatgaa

SEQ ID NO: 361089 - DNA, 19 bp, Homo sapiens
  siRNA target sequence for FGIF (NM_017704.1,307-325).
ggtatcgattgcaagaaaa

SEQ ID NO: 361090 - DNA, 19 bp, Homo sapiens
  siRNA target sequence for FGIF (NM_017704.1,342-360).
ccaagcagattgcttcttt

SEQ ID NO: 361091 - DNA, 19 bp, Homo sapiens
  siRNA target sequence for FGIF (NM_017704.1,392-410).
gcggagactcctttctgaa

SEQ ID NO: 361092 - DNA, 19 bp, Homo sapiens
  siRNA target sequence for FGIF (NM_017704.1,414-432).
gccactcacgtgaacacta

SEQ ID NO: 361093 - DNA, 19 bp, Homo sapiens
  siRNA target sequence for FGIF (NM_017704.1,562-580).
gtgcttgtaagtggaataa

SEQ ID NO: 361094 - DNA, 19 bp, Homo sapiens
  siRNA target sequence for FGIF (NM_017704.1,586-604).
gagtggcttctttcttact

SEQ ID NO: 361095 - DNA, 19 bp, Homo sapiens
  siRNA target sequence for FGIF (NM_017704.1,682-700).
gcaaggataccctagaact

SEQ ID NO: 361096 - DNA, 19 bp, Homo sapiens
  siRNA target sequence for FLJ20195 (NM_017706.3,162-180).
gggacactccggaagacat

SEQ ID NO: 361097 - DNA, 19 bp, Homo sapiens
  siRNA target sequence for FLJ20195 (NM_017706.3,312-330).
catcaggtcaccatctcaa

SEQ ID NO: 361098 - DNA, 19 bp, Homo sapiens
  siRNA target sequence for FLJ20195 (NM_017706.3,452-470).
catggtgcccccatcaata

SEQ ID NO: 361099 - DNA, 19 bp, Homo sapiens
  siRNA target sequence for FLJ20195 (NM_017706.3,825-843).
ccctgagagctgaatctat

SEQ ID NO: 361100 - DNA, 19 bp, Homo sapiens
  siRNA target sequence for FLJ20195 (NM_017706.3,1078-1096).
ctaccgtcggcgcaaaaaa

SEQ ID NO: 361101 - DNA, 19 bp, Homo sapiens
  siRNA target sequence for FLJ20195 (NM_017706.3,1134-1152).
ggagcaccgatgacttctt

SEQ ID NO: 361102 - DNA, 19 bp, Homo sapiens
  siRNA target sequence for FLJ20200 (NM_017708.1,889-907).
gcaccgtgcgggagaagtt

SEQ ID NO: 361103 - DNA, 19 bp, Homo sapiens
  siRNA target sequence for FLJ20200 (NM_017708.1,890-908).
caccgtgcgggagaagttt

SEQ ID NO: 361104 - DNA, 19 bp, Homo sapiens
  siRNA target sequence for FLJ20200 (NM_017708.1,1234-1252).
cggcactcagtgacattct

SEQ ID NO: 361105 - DNA, 19 bp, Homo sapiens
  siRNA target sequence for FLJ20200 (NM_017708.1,1236-1254).
gcactcagtgacattctaa

SEQ ID NO: 361106 - DNA, 19 bp, Homo sapiens
  siRNA target sequence for FLJ20200 (NM_017708.1,1539-1557).
ggtggggatgctacattca

SEQ ID NO: 361107 - DNA, 19 bp, Homo sapiens
  siRNA target sequence for FLJ20200 (NM_017708.1,1540-1558).
gtggggatgctacattcaa

SEQ ID NO: 361108 - DNA, 19 bp, Homo sapiens
  siRNA target sequence for FLJ20200 (NM_017708.1,1544-1562).
ggatgctacattcaaactt

SEQ ID NO: 361109 - DNA, 19 bp, Homo sapiens
  siRNA target sequence for FLJ20202 (NM_017709.2,216-234).
gctgtaccagggattgcat

SEQ ID NO: 361110 - DNA, 19 bp, Homo sapiens
  siRNA target sequence for FLJ20202 (NM_017709.2,280-298).
ggtcctcactgaagttgta

SEQ ID NO: 361111 - DNA, 19 bp, Homo sapiens
  siRNA target sequence for FLJ20202 (NM_017709.2,324-342).
caaccttggagataactct

SEQ ID NO: 361112 - DNA, 19 bp, Homo sapiens
  siRNA target sequence for FLJ20202 (NM_017709.2,420-438).
ccgcagctggccacgtttt

SEQ ID NO: 361113 - DNA, 19 bp, Homo sapiens
  siRNA target sequence for FLJ20202 (NM_017709.2,429-447).
gccacgttttggtcaaaga

SEQ ID NO: 361114 - DNA, 19 bp, Homo sapiens
  siRNA target sequence for FLJ20202 (NM_017709.2,431-449).
cacgttttggtcaaagaca

SEQ ID NO: 361115 - DNA, 19 bp, Homo sapiens
  siRNA target sequence for FLJ20202 (NM_017709.2,433-451).
cgttttggtcaaagacaat

SEQ ID NO: 361116 - DNA, 19 bp, Homo sapiens
  siRNA target sequence for FLJ20202 (NM_017709.2,462-480).
gcaaagacctggacctaat

SEQ ID NO: 361117 - DNA, 19 bp, Homo sapiens
  siRNA target sequence for FLJ20202 (NM_017709.2,498-516).
caacagaggcagaatttca

SEQ ID NO: 361118 - DNA, 19 bp, Homo sapiens
  siRNA target sequence for FLJ20202 (NM_017709.2,712-730).
ctccattcggcgtcagttt

SEQ ID NO: 361119 - DNA, 19 bp, Homo sapiens
  siRNA target sequence for FLJ20202 (NM_017709.2,736-754).
cagtgtggactctttccaa

SEQ ID NO: 361120 - DNA, 19 bp, Homo sapiens
  siRNA target sequence for FLJ20202 (NM_017709.2,740-758).
gtggactctttccaaatca

SEQ ID NO: 361121 - DNA, 19 bp, Homo sapiens
  siRNA target sequence for FLJ20202 (NM_017709.2,781-799).
ctatgactgttccaataat

SEQ ID NO: 361122 - DNA, 19 bp, Homo sapiens
  siRNA target sequence for FLJ20202 (NM_017709.2,1214-1232).
cgtgtgctggcggaacaaa

SEQ ID NO: 361123 - DNA, 19 bp, Homo sapiens
  siRNA target sequence for FLJ20202 (NM_017709.2,1215-1233).
gtgtgctggcggaacaaaa

SEQ ID NO: 361124 - DNA, 19 bp, Homo sapiens
  siRNA target sequence for FLJ20202 (NM_017709.2,1220-1238).
ctggcggaacaaaacatca

SEQ ID NO: 361125 - DNA, 19 bp, Homo sapiens
  siRNA target sequence for FLJ20211 (NM_017713.1,150-168).
gcggagcaggggaaactga

SEQ ID NO: 361126 - DNA, 19 bp, Homo sapiens
  siRNA target sequence for FLJ20211 (NM_017713.1,188-206).
gacagatgggagtttcctt

SEQ ID NO: 361127 - DNA, 19 bp, Homo sapiens
  siRNA target sequence for FLJ20211 (NM_017713.1,204-222).
cttgtacaccactttctct

SEQ ID NO: 361128 - DNA, 19 bp, Homo sapiens
  siRNA target sequence for FLJ20211 (NM_017713.1,432-450).
gctaatgctgggaacttga

SEQ ID NO: 361129 - DNA, 19 bp, Homo sapiens
  siRNA target sequence for FLJ20211 (NM_017713.1,571-589).
cggtggctgtgctagactt

SEQ ID NO: 361130 - DNA, 19 bp, Homo sapiens
  siRNA target sequence for FLJ20211 (NM_017713.1,577-595).
ctgtgctagacttcattca

SEQ ID NO: 361131 - DNA, 19 bp, Homo sapiens
  siRNA target sequence for FLJ20211 (NM_017713.1,610-628).
ccgtgtgctgggaactaaa

SEQ ID NO: 361132 - DNA, 19 bp, Homo sapiens
  siRNA target sequence for FLJ20211 (NM_017713.1,814-832).
gtgtacctgtgattcttga

SEQ ID NO: 361133 - DNA, 19 bp, Homo sapiens
  siRNA target sequence for FLJ20211 (NM_017713.1,820-838).
ctgtgattcttgactacat

SEQ ID NO: 361134 - DNA, 19 bp, Homo sapiens
  siRNA target sequence for MS4A12 (NM_017716.1,205-223).
cagccctacggcatcacat

SEQ ID NO: 361135 - DNA, 19 bp, Homo sapiens
  siRNA target sequence for MS4A12 (NM_017716.1,245-263).
gtcaaccgggtcaaggaaa

SEQ ID NO: 361136 - DNA, 19 bp, Homo sapiens
  siRNA target sequence for MS4A12 (NM_017716.1,357-375).
gatgcacattggttttgga

SEQ ID NO: 361137 - DNA, 19 bp, Homo sapiens
  siRNA target sequence for MS4A12 (NM_017716.1,537-555).
cagcctgggaatgaacatt

SEQ ID NO: 361138 - DNA, 19 bp, Homo sapiens
  siRNA target sequence for MS4A12 (NM_017716.1,543-561).
gggaatgaacattgttagt

SEQ ID NO: 361139 - DNA, 19 bp, Homo sapiens
  siRNA target sequence for MS4A12 (NM_017716.1,544-562).
ggaatgaacattgttagtt

SEQ ID NO: 361140 - DNA, 19 bp, Homo sapiens
  siRNA target sequence for MS4A12 (NM_017716.1,570-588).
ggccttcattggagtgatt

SEQ ID NO: 361141 - DNA, 19 bp, Homo sapiens
  siRNA target sequence for MS4A12 (NM_017716.1,597-615).
ggtggatatgtgcatcaat

SEQ ID NO: 361142 - DNA, 19 bp, Homo sapiens
  siRNA target sequence for MS4A12 (NM_017716.1,639-657).
ggccgtgctttctggaaaa

SEQ ID NO: 361143 - DNA, 19 bp, Homo sapiens
  siRNA target sequence for MS4A12 (NM_017716.1,741-759).
caccacaaccaatatgtct

SEQ ID NO: 361144 - DNA, 19 bp, Homo sapiens
  siRNA target sequence for MS4A12 (NM_017716.1,756-774).
gtctgtcctggttattcca

SEQ ID NO: 361145 - DNA, 19 bp, Homo sapiens
  siRNA target sequence for MS4A12 (NM_017716.1,763-781).
ctggttattccaaatatgt

SEQ ID NO: 361146 - DNA, 19 bp, Homo sapiens
  siRNA target sequence for FLJ20241 (NM_017721.2,465-483).
gggctaacgatgaagaact

SEQ ID NO: 361147 - DNA, 19 bp, Homo sapiens
  siRNA target sequence for FLJ20241 (NM_017721.2,557-575).
ccgatggaggccattgaga

SEQ ID NO: 361148 - DNA, 19 bp, Homo sapiens
  siRNA target sequence for FLJ20241 (NM_017721.2,787-805).
gctctatcagacagcaatt

SEQ ID NO: 361149 - DNA, 19 bp, Homo sapiens
  siRNA target sequence for FLJ20241 (NM_017721.2,1137-1155).
gccgccagcgcgactacaa

SEQ ID NO: 361150 - DNA, 19 bp, Homo sapiens
  siRNA target sequence for FLJ20241 (NM_017721.2,1216-1234).
cgtggctaagagctttgat

SEQ ID NO: 361151 - DNA, 19 bp, Homo sapiens
  siRNA target sequence for FLJ20241 (NM_017721.2,1491-1509).
gcatcgtcaagcaatacca

SEQ ID NO: 361152 - DNA, 19 bp, Homo sapiens
  siRNA target sequence for FLJ20241 (NM_017721.2,1492-1510).
catcgtcaagcaataccaa

SEQ ID NO: 361153 - DNA, 19 bp, Homo sapiens
  siRNA target sequence for FLJ20241 (NM_017721.2,1542-1560).
ccgtggatgtcgctgaatt

SEQ ID NO: 361154 - DNA, 19 bp, Homo sapiens
  siRNA target sequence for FLJ20241 (NM_017721.2,2122-2140).
cctgaaccactcaaaccaa

SEQ ID NO: 361155 - DNA, 19 bp, Homo sapiens
  siRNA target sequence for FLJ20241 (NM_017721.2,2123-2141).
ctgaaccactcaaaccaat

SEQ ID NO: 361156 - DNA, 19 bp, Homo sapiens
  siRNA target sequence for FLJ20241 (NM_017721.2,2204-2222).
cggagcatggacattctga

SEQ ID NO: 361157 - DNA, 19 bp, Homo sapiens
  siRNA target sequence for FLJ20241 (NM_017721.2,2379-2397).
gcgatctggatgtctttgt

SEQ ID NO: 361158 - DNA, 19 bp, Homo sapiens
  siRNA target sequence for FLJ20241 (NM_017721.2,2380-2398).
cgatctggatgtctttgtt

SEQ ID NO: 361159 - DNA, 19 bp, Homo sapiens
  siRNA target sequence for FLJ20241 (NM_017721.2,2390-2408).
gtctttgttcggtttgact

SEQ ID NO: 361160 - DNA, 19 bp, Homo sapiens
  siRNA target sequence for PPP1R14D (NM_017726.6,142-160).
ggggagaacccatgtaaga

SEQ ID NO: 361161 - DNA, 19 bp, Homo sapiens
  siRNA target sequence for PPP1R14D (NM_017726.6,222-240).
cccggactcctccaagata

SEQ ID NO: 361162 - DNA, 19 bp, Homo sapiens
  siRNA target sequence for PPP1R14D (NM_017726.6,263-281).
gcctgacagtgaagtatga

SEQ ID NO: 361163 - DNA, 19 bp, Homo sapiens
  siRNA target sequence for PPP1R14D (NM_017726.6,486-504).
gctcagtcaactcaagaaa

SEQ ID NO: 361164 - DNA, 19 bp, Homo sapiens
  siRNA target sequence for FLJ20255 (NM_017728.2,131-149).
cagagaccggggaactcta

SEQ ID NO: 361165 - DNA, 19 bp, Homo sapiens
  siRNA target sequence for FLJ20255 (NM_017728.2,160-178).
gttgggctggtgtacatgt

SEQ ID NO: 361166 - DNA, 19 bp, Homo sapiens
  siRNA target sequence for FLJ20255 (NM_017728.2,473-491).
ctcccaacccgtttgaaat

SEQ ID NO: 361167 - DNA, 19 bp, Homo sapiens
  siRNA target sequence for FLJ20255 (NM_017728.2,475-493).
cccaacccgtttgaaatca

SEQ ID NO: 361168 - DNA, 19 bp, Homo sapiens
  siRNA target sequence for FLJ20255 (NM_017728.2,477-495).
caacccgtttgaaatcaca

SEQ ID NO: 361169 - DNA, 19 bp, Homo sapiens
  siRNA target sequence for FLJ20255 (NM_017728.2,500-518).
gggtggaaatgggacaaat

SEQ ID NO: 361170 - DNA, 19 bp, Homo sapiens
  siRNA target sequence for FLJ20255 (NM_017728.2,519-537).
ggcctccatgttcttcaat

SEQ ID NO: 361171 - DNA, 19 bp, Homo sapiens
  siRNA target sequence for FLJ20255 (NM_017728.2,520-538).
gcctccatgttcttcaata

SEQ ID NO: 361172 - DNA, 19 bp, Homo sapiens
  siRNA target sequence for FLJ20255 (NM_017728.2,543-561).
gggggtcaacttgttctat

SEQ ID NO: 361173 - DNA, 19 bp, Homo sapiens
  siRNA target sequence for FLJ20255 (NM_017728.2,544-562).
ggggtcaacttgttctatt

SEQ ID NO: 361174 - DNA, 19 bp, Homo sapiens
  siRNA target sequence for FLJ20255 (NM_017728.2,679-697).
gacaccaaatacaatgaca

SEQ ID NO: 361175 - DNA, 19 bp, Homo sapiens
  siRNA target sequence for FLJ20255 (NM_017728.2,771-789).
cggaccgttcaccttcttt

SEQ ID NO: 361176 - DNA, 19 bp, Homo sapiens
  siRNA target sequence for FLJ20255 (NM_017728.2,773-791).
gaccgttcaccttctttga

SEQ ID NO: 361177 - DNA, 19 bp, Homo sapiens
  siRNA target sequence for FLJ20255 (NM_017728.2,843-861).
cgctttcgccgtcatgatt

SEQ ID NO: 361178 - DNA, 19 bp, Homo sapiens
  siRNA target sequence for FLJ20255 (NM_017728.2,845-863).
ctttcgccgtcatgattgt

SEQ ID NO: 361179 - DNA, 19 bp, Homo sapiens
  siRNA target sequence for FLJ20255 (NM_017728.2,1166-1184).
ccgctgtgcgctttttcct

SEQ ID NO: 361180 - DNA, 19 bp, Homo sapiens
  siRNA target sequence for FLJ20259 (NM_017730.2,413-431).
ggtgggaactgcatataca

SEQ ID NO: 361181 - DNA, 19 bp, Homo sapiens
  siRNA target sequence for FLJ20259 (NM_017730.2,861-879).
gtggtcagcagatccaaat

SEQ ID NO: 361182 - DNA, 19 bp, Homo sapiens
  siRNA target sequence for FLJ20259 (NM_017730.2,1060-1078).
gggccagcagcagagttat

SEQ ID NO: 361183 - DNA, 19 bp, Homo sapiens
  siRNA target sequence for FLJ20259 (NM_017730.2,1284-1302).
ccctggcagctgttaagct

SEQ ID NO: 361184 - DNA, 19 bp, Homo sapiens
  siRNA target sequence for FLJ20259 (NM_017730.2,1324-1342).
ggtgggcaccacatctgta

SEQ ID NO: 361185 - DNA, 19 bp, Homo sapiens
  siRNA target sequence for FLJ20259 (NM_017730.2,1369-1387).
gcagacccttgcaaactct

SEQ ID NO: 361186 - DNA, 19 bp, Homo sapiens
  siRNA target sequence for FLJ20259 (NM_017730.2,1448-1466).
gcaggcacgtaccagaata

SEQ ID NO: 361187 - DNA, 19 bp, Homo sapiens
  siRNA target sequence for FLJ20259 (NM_017730.2,1459-1477).
ccagaatacggctcaaact

SEQ ID NO: 361188 - DNA, 19 bp, Homo sapiens
  siRNA target sequence for FLJ20259 (NM_017730.2,1467-1485).
cggctcaaactgtccatat

SEQ ID NO: 361189 - DNA, 19 bp, Homo sapiens
  siRNA target sequence for FLJ20259 (NM_017730.2,1468-1486).
ggctcaaactgtccatata

SEQ ID NO: 361190 - DNA, 19 bp, Homo sapiens
  siRNA target sequence for FLJ20259 (NM_017730.2,1469-1487).
gctcaaactgtccatatat

SEQ ID NO: 361191 - DNA, 19 bp, Homo sapiens
  siRNA target sequence for FLJ20259 (NM_017730.2,1702-1720).
gaccaagaatgctgaacta

SEQ ID NO: 361192 - DNA, 19 bp, Homo sapiens
  siRNA target sequence for FLJ20259 (NM_017730.2,1834-1852).
gacacgggaagctcgaaat

SEQ ID NO: 361193 - DNA, 19 bp, Homo sapiens
  siRNA target sequence for FLJ20259 (NM_017730.2,1873-1891).
cccagatgtgctctactat

SEQ ID NO: 361194 - DNA, 19 bp, Homo sapiens
  siRNA target sequence for FLJ20259 (NM_017730.2,1874-1892).
ccagatgtgctctactata

SEQ ID NO: 361195 - DNA, 19 bp, Homo sapiens
  siRNA target sequence for FLJ20259 (NM_017730.2,1875-1893).
cagatgtgctctactatat

SEQ ID NO: 361196 - DNA, 19 bp, Homo sapiens
  siRNA target sequence for FLJ20259 (NM_017730.2,1897-1915).
cctgtgtattcaaaagtat

SEQ ID NO: 361197 - DNA, 19 bp, Homo sapiens
  siRNA target sequence for FLJ20259 (NM_017730.2,1900-1918).
gtgtattcaaaagtatctt

SEQ ID NO: 361198 - DNA, 19 bp, Homo sapiens
  siRNA target sequence for FLJ20259 (NM_017730.2,1974-1992).
cggagtggctacatgaagt

SEQ ID NO: 361199 - DNA, 19 bp, Homo sapiens
  siRNA target sequence for FLJ20259 (NM_017730.2,1975-1993).
ggagtggctacatgaagtt

SEQ ID NO: 361200 - DNA, 19 bp, Homo sapiens
  siRNA target sequence for FLJ20259 (NM_017730.2,2117-2135).
ctcatgttctttaatacca

SEQ ID NO: 361201 - DNA, 19 bp, Homo sapiens
  siRNA target sequence for FLJ20259 (NM_017730.2,2133-2151).
ccaagtacttcctattgaa

SEQ ID NO: 361202 - DNA, 19 bp, Homo sapiens
  siRNA target sequence for FLJ20259 (NM_017730.2,2189-2207).
gtcttgcgacagacaaaga

SEQ ID NO: 361203 - DNA, 19 bp, Homo sapiens
  siRNA target sequence for FLJ20259 (NM_017730.2,2213-2231).
ccctctaatcccaaggata

SEQ ID NO: 361204 - DNA, 19 bp, Homo sapiens
  siRNA target sequence for FLJ20259 (NM_017730.2,2214-2232).
cctctaatcccaaggataa

SEQ ID NO: 361205 - DNA, 19 bp, Homo sapiens
  siRNA target sequence for FLJ20259 (NM_017730.2,2238-2256).
cgagtatccggtacttgaa

SEQ ID NO: 361206 - DNA, 19 bp, Homo sapiens
  siRNA target sequence for FLJ20259 (NM_017730.2,2314-2332).
gacggaaaatccagagaat

SEQ ID NO: 361207 - DNA, 19 bp, Homo sapiens
  siRNA target sequence for FLJ20259 (NM_017730.2,2345-2363).
cccatcaagctctatgatt

SEQ ID NO: 361208 - DNA, 19 bp, Homo sapiens
  siRNA target sequence for FLJ20259 (NM_017730.2,2346-2364).
ccatcaagctctatgattt

SEQ ID NO: 361209 - DNA, 19 bp, Homo sapiens
  siRNA target sequence for FLJ20259 (NM_017730.2,2506-2524).
gcggatcctggtgataaga

SEQ ID NO: 361210 - DNA, 19 bp, Homo sapiens
  siRNA target sequence for FLJ20265 (NM_017733.2,264-282).
cggctggagccagttctaa

SEQ ID NO: 361211 - DNA, 19 bp, Homo sapiens
  siRNA target sequence for FLJ20265 (NM_017733.2,296-314).
ccaccacctctcttcagta

SEQ ID NO: 361212 - DNA, 19 bp, Homo sapiens
  siRNA target sequence for FLJ20265 (NM_017733.2,300-318).
cacctctcttcagtaaagt

SEQ ID NO: 361213 - DNA, 19 bp, Homo sapiens
  siRNA target sequence for FLJ20265 (NM_017733.2,305-323).
ctcttcagtaaagttgtta

SEQ ID NO: 361214 - DNA, 19 bp, Homo sapiens
  siRNA target sequence for FLJ20265 (NM_017733.2,307-325).
cttcagtaaagttgttatt

SEQ ID NO: 361215 - DNA, 19 bp, Homo sapiens
  siRNA target sequence for FLJ20265 (NM_017733.2,310-328).
cagtaaagttgttattgtt

SEQ ID NO: 361216 - DNA, 19 bp, Homo sapiens
  siRNA target sequence for FLJ20265 (NM_017733.2,364-382).
gtcaaagggtgtgaaattt

SEQ ID NO: 361217 - DNA, 19 bp, Homo sapiens
  siRNA target sequence for FLJ20265 (NM_017733.2,366-384).
caaagggtgtgaaatttat

SEQ ID NO: 361218 - DNA, 19 bp, Homo sapiens
  siRNA target sequence for FLJ20265 (NM_017733.2,385-403).
gccctacacaacttacctt

SEQ ID NO: 361219 - DNA, 19 bp, Homo sapiens
  siRNA target sequence for FLJ20265 (NM_017733.2,414-432).
gagcatctcacagttttgt

SEQ ID NO: 361220 - DNA, 19 bp, Homo sapiens
  siRNA target sequence for FLJ20265 (NM_017733.2,465-483).
ctcgaatcaaggcattgat

SEQ ID NO: 361221 - DNA, 19 bp, Homo sapiens
  siRNA target sequence for FLJ20265 (NM_017733.2,467-485).
cgaatcaaggcattgatga

SEQ ID NO: 361222 - DNA, 19 bp, Homo sapiens
  siRNA target sequence for FLJ20265 (NM_017733.2,512-530).
gtcatcaggaacctcaatt

SEQ ID NO: 361223 - DNA, 19 bp, Homo sapiens
  siRNA target sequence for FLJ20265 (NM_017733.2,647-665).
gatggaacaacctcatttt

SEQ ID NO: 361224 - DNA, 19 bp, Homo sapiens
  siRNA target sequence for FLJ20265 (NM_017733.2,681-699).
cagaggtggataataatgt

SEQ ID NO: 361225 - DNA, 19 bp, Homo sapiens
  siRNA target sequence for FLJ20265 (NM_017733.2,683-701).
gaggtggataataatgtca

SEQ ID NO: 361226 - DNA, 19 bp, Homo sapiens
  siRNA target sequence for FLJ20265 (NM_017733.2,698-716).
gtcacgaggcatttggata

SEQ ID NO: 361227 - DNA, 19 bp, Homo sapiens
  siRNA target sequence for FLJ20265 (NM_017733.2,703-721).
gaggcatttggataaagta

SEQ ID NO: 361228 - DNA, 19 bp, Homo sapiens
  siRNA target sequence for FLJ20265 (NM_017733.2,705-723).
ggcatttggataaagtatt

SEQ ID NO: 361229 - DNA, 19 bp, Homo sapiens
  siRNA target sequence for FLJ20265 (NM_017733.2,833-851).
gacagcgtgctgatgaaga

SEQ ID NO: 361230 - DNA, 19 bp, Homo sapiens
  siRNA target sequence for FLJ20265 (NM_017733.2,893-911).
cccaatttgctggttcttt

SEQ ID NO: 361231 - DNA, 19 bp, Homo sapiens
  siRNA target sequence for FLJ20265 (NM_017733.2,1017-1035).
gtgatatccgacatccaaa

SEQ ID NO: 361232 - DNA, 19 bp, Homo sapiens
  siRNA target sequence for FLJ20265 (NM_017733.2,1079-1097).
cttggcttaccgattccaa

SEQ ID NO: 361233 - DNA, 19 bp, Homo sapiens
  siRNA target sequence for FLJ20265 (NM_017733.2,1083-1101).
gcttaccgattccaaaaga

SEQ ID NO: 361234 - DNA, 19 bp, Homo sapiens
  siRNA target sequence for FLJ20265 (NM_017733.2,1207-1225).
gaatgtgccgtcatatgaa

SEQ ID NO: 361235 - DNA, 19 bp, Homo sapiens
  siRNA target sequence for FLJ20265 (NM_017733.2,1213-1231).
gccgtcatatgaaaaagat

SEQ ID NO: 361236 - DNA, 19 bp, Homo sapiens
  siRNA target sequence for FLJ20265 (NM_017733.2,1284-1302).
gactgtacttggaggaaaa

SEQ ID NO: 361237 - DNA, 19 bp, Homo sapiens
  siRNA target sequence for FLJ20265 (NM_017733.2,1400-1418).
cagtacgacatctattcga

SEQ ID NO: 361238 - DNA, 19 bp, Homo sapiens
  siRNA target sequence for FLJ20265 (NM_017733.2,1542-1560).
cggccgttcacgtcattgt

SEQ ID NO: 361239 - DNA, 19 bp, Homo sapiens
  siRNA target sequence for FLJ20265 (NM_017733.2,1544-1562).
gccgttcacgtcattgtgt

SEQ ID NO: 361240 - DNA, 19 bp, Homo sapiens
  siRNA target sequence for FLJ20265 (NM_017733.2,1561-1579).
gtgcacctcagctgaaagt

SEQ ID NO: 361241 - DNA, 19 bp, Homo sapiens
  siRNA target sequence for FLJ20265 (NM_017733.2,1574-1592).
gaaagttcgtgctacttct

SEQ ID NO: 361242 - DNA, 19 bp, Homo sapiens
  siRNA target sequence for FLJ20265 (NM_017733.2,2404-2422).
cacgggcaccaaagactta

SEQ ID NO: 361243 - DNA, 19 bp, Homo sapiens
  siRNA target sequence for FLJ20265 (NM_017733.2,2406-2424).
cgggcaccaaagacttact

SEQ ID NO: 361244 - DNA, 19 bp, Homo sapiens
  siRNA target sequence for FLJ20265 (NM_017733.2,2407-2425).
gggcaccaaagacttactt

SEQ ID NO: 361245 - DNA, 19 bp, Homo sapiens
  siRNA target sequence for FLJ20265 (NM_017733.2,2408-2426).
ggcaccaaagacttactta

SEQ ID NO: 361246 - DNA, 19 bp, Homo sapiens
  siRNA target sequence for FLJ20265 (NM_017733.2,2456-2474).
ctcaagactgtaggtttat

SEQ ID NO: 361247 - DNA, 19 bp, Homo sapiens
  siRNA target sequence for FLJ20265 (NM_017733.2,2515-2533).
ctttagaccacataatctt

SEQ ID NO: 361248 - DNA, 19 bp, Homo sapiens
  siRNA target sequence for FLJ20265 (NM_017733.2,2531-2549).
cttccggtcttagcattta

SEQ ID NO: 361249 - DNA, 19 bp, Homo sapiens
  siRNA target sequence for FLJ20265 (NM_017733.2,2544-2562).
catttagcctcttgattca

SEQ ID NO: 361250 - DNA, 19 bp, Homo sapiens
  siRNA target sequence for FLJ20265 (NM_017733.2,2552-2570).
ctcttgattcagactctaa

SEQ ID NO: 361251 - DNA, 19 bp, Homo sapiens
  siRNA target sequence for FLJ20265 (NM_017733.2,2557-2575).
gattcagactctaatgact

SEQ ID NO: 361252 - DNA, 19 bp, Homo sapiens
  siRNA target sequence for FLJ20265 (NM_017733.2,2561-2579).
cagactctaatgactaaat

SEQ ID NO: 361253 - DNA, 19 bp, Homo sapiens
  siRNA target sequence for FLJ20265 (NM_017733.2,2600-2618).
cacgatgcagctgagatta

SEQ ID NO: 361254 - DNA, 19 bp, Homo sapiens
  siRNA target sequence for FLJ20265 (NM_017733.2,2602-2620).
cgatgcagctgagattact

SEQ ID NO: 361255 - DNA, 19 bp, Homo sapiens
  siRNA target sequence for FLJ20265 (NM_017733.2,2614-2632).
gattactgtgatgcattat

SEQ ID NO: 361256 - DNA, 19 bp, Homo sapiens
  siRNA target sequence for FLJ20265 (NM_017733.2,2619-2637).
ctgtgatgcattattggtt

SEQ ID NO: 361257 - DNA, 19 bp, Homo sapiens
  siRNA target sequence for FLJ20265 (NM_017733.2,2634-2652).
ggtttggtcaagcattctt

SEQ ID NO: 361258 - DNA, 19 bp, Homo sapiens
  siRNA target sequence for FLJ20265 (NM_017733.2,2639-2657).
ggtcaagcattcttctatt

SEQ ID NO: 361259 - DNA, 19 bp, Homo sapiens
  siRNA target sequence for FLJ20265 (NM_017733.2,2851-2869).
cttctgctacgcactgatt

SEQ ID NO: 361260 - DNA, 19 bp, Homo sapiens
  siRNA target sequence for FLJ20265 (NM_017733.2,2860-2878).
cgcactgatttgttctatt

SEQ ID NO: 361261 - DNA, 19 bp, Homo sapiens
  siRNA target sequence for FLJ20265 (NM_017733.2,2905-2923).
gacatctctgcgttatcat

SEQ ID NO: 361262 - DNA, 19 bp, Homo sapiens
  siRNA target sequence for FLJ20265 (NM_017733.2,2907-2925).
catctctgcgttatcattt

SEQ ID NO: 361263 - DNA, 19 bp, Homo sapiens
  siRNA target sequence for FLJ20265 (NM_017733.2,2910-2928).
ctctgcgttatcatttatt

SEQ ID NO: 361264 - DNA, 19 bp, Homo sapiens
  siRNA target sequence for FLJ20265 (NM_017733.2,2912-2930).
ctgcgttatcatttattta

SEQ ID NO: 361265 - DNA, 19 bp, Homo sapiens
  siRNA target sequence for FLJ20265 (NM_017733.2,2966-2984).
ggaatgcacctgctcatta

SEQ ID NO: 361266 - DNA, 19 bp, Homo sapiens
  siRNA target sequence for PALMD (NM_017734.2,425-443).
gggagaaatggcttctaga

SEQ ID NO: 361267 - DNA, 19 bp, Homo sapiens
  siRNA target sequence for PALMD (NM_017734.2,426-444).
ggagaaatggcttctagat

SEQ ID NO: 361268 - DNA, 19 bp, Homo sapiens
  siRNA target sequence for PALMD (NM_017734.2,568-586).
gctgaactgcaaatctcaa

SEQ ID NO: 361269 - DNA, 19 bp, Homo sapiens
  siRNA target sequence for PALMD (NM_017734.2,687-705).
gtcaattgaggacatctat

SEQ ID NO: 361270 - DNA, 19 bp, Homo sapiens
  siRNA target sequence for PALMD (NM_017734.2,778-796).
gatgatgaacaaaatagga

SEQ ID NO: 361271 - DNA, 19 bp, Homo sapiens
  siRNA target sequence for PALMD (NM_017734.2,784-802).
gaacaaaataggaaagctt

SEQ ID NO: 361272 - DNA, 19 bp, Homo sapiens
  siRNA target sequence for PALMD (NM_017734.2,799-817).
gctttatatgccatggaaa

SEQ ID NO: 361273 - DNA, 19 bp, Homo sapiens
  siRNA target sequence for PALMD (NM_017734.2,837-855).
gaagactggagaaagtaca

SEQ ID NO: 361274 - DNA, 19 bp, Homo sapiens
  siRNA target sequence for PALMD (NM_017734.2,851-869).
gtacagttctgtcttcaat

SEQ ID NO: 361275 - DNA, 19 bp, Homo sapiens
  siRNA target sequence for PALMD (NM_017734.2,876-894).
gccatcagatgactttaaa

SEQ ID NO: 361276 - DNA, 19 bp, Homo sapiens
  siRNA target sequence for PALMD (NM_017734.2,895-913).
ggtacaggaataaaagttt

SEQ ID NO: 361277 - DNA, 19 bp, Homo sapiens
  siRNA target sequence for PALMD (NM_017734.2,936-954).
gtatgcagtaagttctaat

SEQ ID NO: 361278 - DNA, 19 bp, Homo sapiens
  siRNA target sequence for PALMD (NM_017734.2,940-958).
gcagtaagttctaatcaca

SEQ ID NO: 361279 - DNA, 19 bp, Homo sapiens
  siRNA target sequence for PALMD (NM_017734.2,983-1001).
gcctggcaccagttgaagt

SEQ ID NO: 361280 - DNA, 19 bp, Homo sapiens
  siRNA target sequence for PALMD (NM_017734.2,984-1002).
cctggcaccagttgaagta

SEQ ID NO: 361281 - DNA, 19 bp, Homo sapiens
  siRNA target sequence for PALMD (NM_017734.2,1023-1041).
ctcagagagaaactctaaa

SEQ ID NO: 361282 - DNA, 19 bp, Homo sapiens
  siRNA target sequence for PALMD (NM_017734.2,1116-1134).
gacccctggaccaaacttt

SEQ ID NO: 361283 - DNA, 19 bp, Homo sapiens
  siRNA target sequence for PALMD (NM_017734.2,1121-1139).
ctggaccaaactttcaaga

SEQ ID NO: 361284 - DNA, 19 bp, Homo sapiens
  siRNA target sequence for PALMD (NM_017734.2,1123-1141).
ggaccaaactttcaagaaa

SEQ ID NO: 361285 - DNA, 19 bp, Homo sapiens
  siRNA target sequence for PALMD (NM_017734.2,1163-1181).
gactgggtattggtgtaaa

SEQ ID NO: 361286 - DNA, 19 bp, Homo sapiens
  siRNA target sequence for PALMD (NM_017734.2,1167-1185).
gggtattggtgtaaatgaa

SEQ ID NO: 361287 - DNA, 19 bp, Homo sapiens
  siRNA target sequence for PALMD (NM_017734.2,1168-1186).
ggtattggtgtaaatgaat

SEQ ID NO: 361288 - DNA, 19 bp, Homo sapiens
  siRNA target sequence for PALMD (NM_017734.2,1223-1241).
ggggaaacaacttcaatca

SEQ ID NO: 361289 - DNA, 19 bp, Homo sapiens
  siRNA target sequence for PALMD (NM_017734.2,1271-1289).
cccgatcagtgattcaaca

SEQ ID NO: 361290 - DNA, 19 bp, Homo sapiens
  siRNA target sequence for PALMD (NM_017734.2,1272-1290).
ccgatcagtgattcaacaa

SEQ ID NO: 361291 - DNA, 19 bp, Homo sapiens
  siRNA target sequence for PALMD (NM_017734.2,1302-1320).
gcttcacaccccgcaaaaa

SEQ ID NO: 361292 - DNA, 19 bp, Homo sapiens
  siRNA target sequence for PALMD (NM_017734.2,1312-1330).
ccgcaaaaaaggctaatga

SEQ ID NO: 361293 - DNA, 19 bp, Homo sapiens
  siRNA target sequence for PALMD (NM_017734.2,1331-1349).
ctccttgggaagaatcgaa

SEQ ID NO: 361294 - DNA, 19 bp, Homo sapiens
  siRNA target sequence for PALMD (NM_017734.2,1337-1355).
gggaagaatcgaatgtcat

SEQ ID NO: 361295 - DNA, 19 bp, Homo sapiens
  siRNA target sequence for PALMD (NM_017734.2,1394-1412).
gccccagagagacaatatt

SEQ ID NO: 361296 - DNA, 19 bp, Homo sapiens
  siRNA target sequence for PALMD (NM_017734.2,1395-1413).
ccccagagagacaatattt

SEQ ID NO: 361297 - DNA, 19 bp, Homo sapiens
  siRNA target sequence for PALMD (NM_017734.2,1461-1479).
ggaagatgtcagatataat

SEQ ID NO: 361298 - DNA, 19 bp, Homo sapiens
  siRNA target sequence for PALMD (NM_017734.2,1495-1513).
cctccagacataaatgata

SEQ ID NO: 361299 - DNA, 19 bp, Homo sapiens
  siRNA target sequence for PALMD (NM_017734.2,1514-1532).
cagaaccggtgacaatgat

SEQ ID NO: 361300 - DNA, 19 bp, Homo sapiens
  siRNA target sequence for PALMD (NM_017734.2,1516-1534).
gaaccggtgacaatgattt

SEQ ID NO: 361301 - DNA, 19 bp, Homo sapiens
  siRNA target sequence for PALMD (NM_017734.2,1578-1596).
gtttctgacaggatatgat

SEQ ID NO: 361302 - DNA, 19 bp, Homo sapiens
  siRNA target sequence for PALMD (NM_017734.2,1679-1697).
ccatagctccccatagtca

SEQ ID NO: 361303 - DNA, 19 bp, Homo sapiens
  siRNA target sequence for PALMD (NM_017734.2,1744-1762).
gaagctagtcctcatgaaa

SEQ ID NO: 361304 - DNA, 19 bp, Homo sapiens
  siRNA target sequence for PALMD (NM_017734.2,1747-1765).
gctagtcctcatgaaaaca

SEQ ID NO: 361305 - DNA, 19 bp, Homo sapiens
  siRNA target sequence for PALMD (NM_017734.2,1875-1893).
gactgaggatccatcctta

SEQ ID NO: 361306 - DNA, 19 bp, Homo sapiens
  siRNA target sequence for PALMD (NM_017734.2,1885-1903).
ccatccttaacagctttaa

SEQ ID NO: 361307 - DNA, 19 bp, Homo sapiens
  siRNA target sequence for PALMD (NM_017734.2,1889-1907).
ccttaacagctttaaggat

SEQ ID NO: 361308 - DNA, 19 bp, Homo sapiens
  siRNA target sequence for FLJ20272 (NM_017735.2,274-292).
gtggatctttcctacaatt

SEQ ID NO: 361309 - DNA, 19 bp, Homo sapiens
  siRNA target sequence for FLJ20272 (NM_017735.2,358-376).
caacaaccgctgaagaaaa

SEQ ID NO: 361310 - DNA, 19 bp, Homo sapiens
  siRNA target sequence for FLJ20272 (NM_017735.2,365-383).
cgctgaagaaaagattgat

SEQ ID NO: 361311 - DNA, 19 bp, Homo sapiens
  siRNA target sequence for FLJ20272 (NM_017735.2,390-408).
ctggagaagcaggtagtaa

SEQ ID NO: 361312 - DNA, 19 bp, Homo sapiens
  siRNA target sequence for FLJ20272 (NM_017735.2,405-423).
gtaacattcctggattact

SEQ ID NO: 361313 - DNA, 19 bp, Homo sapiens
  siRNA target sequence for FLJ20272 (NM_017735.2,413-431).
cctggattactcaacagat

SEQ ID NO: 361314 - DNA, 19 bp, Homo sapiens
  siRNA target sequence for FLJ20272 (NM_017735.2,434-452).
ggacacaacggaaagacaa

SEQ ID NO: 361315 - DNA, 19 bp, Homo sapiens
  siRNA target sequence for FLJ20272 (NM_017735.2,439-457).
caacggaaagacaacagtt

SEQ ID NO: 361316 - DNA, 19 bp, Homo sapiens
  siRNA target sequence for FLJ20272 (NM_017735.2,448-466).
gacaacagttgatatttct

SEQ ID NO: 361317 - DNA, 19 bp, Homo sapiens
  siRNA target sequence for FLJ20272 (NM_017735.2,533-551).
ccctcaggactttttgtca

SEQ ID NO: 361318 - DNA, 19 bp, Homo sapiens
  siRNA target sequence for FLJ20272 (NM_017735.2,534-552).
cctcaggactttttgtcat

SEQ ID NO: 361319 - DNA, 19 bp, Homo sapiens
  siRNA target sequence for FLJ20272 (NM_017735.2,605-623).
gagcctgctcactctagat

SEQ ID NO: 361320 - DNA, 19 bp, Homo sapiens
  siRNA target sequence for FLJ20272 (NM_017735.2,616-634).
ctctagatggtgaatcaat

SEQ ID NO: 361321 - DNA, 19 bp, Homo sapiens
  siRNA target sequence for FLJ20272 (NM_017735.2,618-636).
ctagatggtgaatcaatct

SEQ ID NO: 361322 - DNA, 19 bp, Homo sapiens
  siRNA target sequence for FLJ20272 (NM_017735.2,646-664).
cctcgaagcctatactact

SEQ ID NO: 361323 - DNA, 19 bp, Homo sapiens
  siRNA target sequence for FLJ20272 (NM_017735.2,649-667).
cgaagcctatactactgtt

SEQ ID NO: 361324 - DNA, 19 bp, Homo sapiens
  siRNA target sequence for FLJ20272 (NM_017735.2,673-691).
cacgcattatcctagtgaa

SEQ ID NO: 361325 - DNA, 19 bp, Homo sapiens
  siRNA target sequence for FLJ20272 (NM_017735.2,676-694).
gcattatcctagtgaatgt

SEQ ID NO: 361326 - DNA, 19 bp, Homo sapiens
  siRNA target sequence for FLJ20272 (NM_017735.2,777-795).
cgctcacctctgcttttta

SEQ ID NO: 361327 - DNA, 19 bp, Homo sapiens
  siRNA target sequence for FLJ20272 (NM_017735.2,796-814).
ctcttgccgaaaactgtat

SEQ ID NO: 361328 - DNA, 19 bp, Homo sapiens
  siRNA target sequence for FLJ20272 (NM_017735.2,803-821).
cgaaaactgtattgatcaa

SEQ ID NO: 361329 - DNA, 19 bp, Homo sapiens
  siRNA target sequence for FLJ20272 (NM_017735.2,849-867).
gatgattcaggtcgatatt

SEQ ID NO: 361330 - DNA, 19 bp, Homo sapiens
  siRNA target sequence for FLJ20272 (NM_017735.2,861-879).
cgatatttggctattcaat

SEQ ID NO: 361331 - DNA, 19 bp, Homo sapiens
  siRNA target sequence for FLJ20272 (NM_017735.2,881-899).
ccatctggaatgtgcatat

SEQ ID NO: 361332 - DNA, 19 bp, Homo sapiens
  siRNA target sequence for FLJ20272 (NM_017735.2,887-905).
ggaatgtgcatatgtgttt

SEQ ID NO: 361333 - DNA, 19 bp, Homo sapiens
  siRNA target sequence for FLJ20272 (NM_017735.2,964-982).
gccaattacaaattgattt

SEQ ID NO: 361334 - DNA, 19 bp, Homo sapiens
  siRNA target sequence for FLJ20272 (NM_017735.2,1003-1021).
gaacacggttccaggaaaa

SEQ ID NO: 361335 - DNA, 19 bp, Homo sapiens
  siRNA target sequence for FLJ20272 (NM_017735.2,1006-1024).
cacggttccaggaaaatta

SEQ ID NO: 361336 - DNA, 19 bp, Homo sapiens
  siRNA target sequence for FLJ20272 (NM_017735.2,1028-1046).
ggcacaactgattctagat

SEQ ID NO: 361337 - DNA, 19 bp, Homo sapiens
  siRNA target sequence for FLJ20272 (NM_017735.2,1030-1048).
cacaactgattctagatgt

SEQ ID NO: 361338 - DNA, 19 bp, Homo sapiens
  siRNA target sequence for FLJ20272 (NM_017735.2,1032-1050).
caactgattctagatgtaa

SEQ ID NO: 361339 - DNA, 19 bp, Homo sapiens
  siRNA target sequence for FLJ20272 (NM_017735.2,1056-1074).
gaaggggatgtcctttcaa

SEQ ID NO: 361340 - DNA, 19 bp, Homo sapiens
  siRNA target sequence for FLJ20272 (NM_017735.2,1059-1077).
ggggatgtcctttcaaatt

SEQ ID NO: 361341 - DNA, 19 bp, Homo sapiens
  siRNA target sequence for FLJ20272 (NM_017735.2,1061-1079).
ggatgtcctttcaaattgt

SEQ ID NO: 361342 - DNA, 19 bp, Homo sapiens
  siRNA target sequence for FLJ20272 (NM_017735.2,1101-1119).
cctcaggaacatttaacca

SEQ ID NO: 361343 - DNA, 19 bp, Homo sapiens
  siRNA target sequence for FLJ20272 (NM_017735.2,1121-1139).
gaatcttgagctcaatgat

SEQ ID NO: 361344 - DNA, 19 bp, Homo sapiens
  siRNA target sequence for FLJ20272 (NM_017735.2,1157-1175).
cataaagttagcagattgt

SEQ ID NO: 361345 - DNA, 19 bp, Homo sapiens
  siRNA target sequence for FLJ20272 (NM_017735.2,1203-1221).
gctgaagagatcgctatta

SEQ ID NO: 361346 - DNA, 19 bp, Homo sapiens
  siRNA target sequence for FLJ20272 (NM_017735.2,1204-1222).
ctgaagagatcgctattat

SEQ ID NO: 361347 - DNA, 19 bp, Homo sapiens
  siRNA target sequence for FLJ20272 (NM_017735.2,1346-1364).
cttgatcctccggacaaaa

SEQ ID NO: 361348 - DNA, 19 bp, Homo sapiens
  siRNA target sequence for FLJ20272 (NM_017735.2,1422-1440).
gcagaccaatttgaagata

SEQ ID NO: 361349 - DNA, 19 bp, Homo sapiens
  siRNA target sequence for FLJ20272 (NM_017735.2,1423-1441).
cagaccaatttgaagataa

SEQ ID NO: 361350 - DNA, 19 bp, Homo sapiens
  siRNA target sequence for FLJ20272 (NM_017735.2,1461-1479).
cgcctgaagattttctatt

SEQ ID NO: 361351 - DNA, 19 bp, Homo sapiens
  siRNA target sequence for FLJ20272 (NM_017735.2,1521-1539).
gcaagtttgctctttgagt

SEQ ID NO: 361352 - DNA, 19 bp, Homo sapiens
  siRNA target sequence for FLJ20272 (NM_017735.2,1586-1604).
gtgggaagatgttgtcatt

SEQ ID NO: 361353 - DNA, 19 bp, Homo sapiens
  siRNA target sequence for FLJ20272 (NM_017735.2,1625-1643).
gcacggaaaggcagaagaa

SEQ ID NO: 361354 - DNA, 19 bp, Homo sapiens
  siRNA target sequence for FLJ20272 (NM_017735.2,1636-1654).
cagaagaaatccttagaca

SEQ ID NO: 361355 - DNA, 19 bp, Homo sapiens
  siRNA target sequence for FLJ20272 (NM_017735.2,1671-1689).
gaaacgcctagtttatact

SEQ ID NO: 361356 - DNA, 19 bp, Homo sapiens
  siRNA target sequence for FLJ20272 (NM_017735.2,1704-1722).
gtcctcggagaccattctt

SEQ ID NO: 361357 - DNA, 19 bp, Homo sapiens
  siRNA target sequence for FLJ20272 (NM_017735.2,1709-1727).
cggagaccattcttgctat

SEQ ID NO: 361358 - DNA, 19 bp, Homo sapiens
  siRNA target sequence for FLJ20272 (NM_017735.2,1832-1850).
cgaacgctcggttaagatt

SEQ ID NO: 361359 - DNA, 19 bp, Homo sapiens
  siRNA target sequence for FLJ20272 (NM_017735.2,1833-1851).
gaacgctcggttaagatta

SEQ ID NO: 361360 - DNA, 19 bp, Homo sapiens
  siRNA target sequence for FLJ20272 (NM_017735.2,1860-1878).
cagctcggggtgtggtttt

SEQ ID NO: 361361 - DNA, 19 bp, Homo sapiens
  siRNA target sequence for FLJ20272 (NM_017735.2,1862-1880).
gctcggggtgtggttttct

SEQ ID NO: 361362 - DNA, 19 bp, Homo sapiens
  siRNA target sequence for FLJ20272 (NM_017735.2,1879-1897).
ctctcggttgtgcctattt

SEQ ID NO: 361363 - DNA, 19 bp, Homo sapiens
  siRNA target sequence for FLJ20272 (NM_017735.2,1946-1964).
gactctagaacccgataat

SEQ ID NO: 361364 - DNA, 19 bp, Homo sapiens
  siRNA target sequence for FLJ20272 (NM_017735.2,1965-1983).
gctgaagcttggaacaatt

SEQ ID NO: 361365 - DNA, 19 bp, Homo sapiens
  siRNA target sequence for FLJ20272 (NM_017735.2,1968-1986).
gaagcttggaacaatttgt

SEQ ID NO: 361366 - DNA, 19 bp, Homo sapiens
  siRNA target sequence for FLJ20272 (NM_017735.2,1971-1989).
gcttggaacaatttgtcaa

SEQ ID NO: 361367 - DNA, 19 bp, Homo sapiens
  siRNA target sequence for FLJ20272 (NM_017735.2,1990-2008).
cttcctatatccgattaaa

SEQ ID NO: 361368 - DNA, 19 bp, Homo sapiens
  siRNA target sequence for FLJ20272 (NM_017735.2,1993-2011).
cctatatccgattaaaaca

SEQ ID NO: 361369 - DNA, 19 bp, Homo sapiens
  siRNA target sequence for FLJ20272 (NM_017735.2,2099-2117).
cactgacgttggggaattt

SEQ ID NO: 361370 - DNA, 19 bp, Homo sapiens
  siRNA target sequence for FLJ20272 (NM_017735.2,2105-2123).
cgttggggaattttcagaa

SEQ ID NO: 361371 - DNA, 19 bp, Homo sapiens
  siRNA target sequence for FLJ20272 (NM_017735.2,2147-2165).
cttggacttacgtgacaaa

SEQ ID NO: 361372 - DNA, 19 bp, Homo sapiens
  siRNA target sequence for FLJ20272 (NM_017735.2,2153-2171).
cttacgtgacaaatacaaa

SEQ ID NO: 361373 - DNA, 19 bp, Homo sapiens
  siRNA target sequence for FLJ20272 (NM_017735.2,2320-2338).
ggctgtatgcccacgtata

SEQ ID NO: 361374 - DNA, 19 bp, Homo sapiens
  siRNA target sequence for FLJ20272 (NM_017735.2,2321-2339).
gctgtatgcccacgtatat

SEQ ID NO: 361375 - DNA, 19 bp, Homo sapiens
  siRNA target sequence for FLJ20272 (NM_017735.2,2324-2342).
gtatgcccacgtatatgga

SEQ ID NO: 361376 - DNA, 19 bp, Homo sapiens
  siRNA target sequence for FLJ20272 (NM_017735.2,2389-2407).
gcctctcaaaggcatacaa

SEQ ID NO: 361377 - DNA, 19 bp, Homo sapiens
  siRNA target sequence for FLJ20272 (NM_017735.2,2487-2505).
catgtggccataaaatgca

SEQ ID NO: 361378 - DNA, 19 bp, Homo sapiens
  siRNA target sequence for FLJ20272 (NM_017735.2,2561-2579).
caatttacggggcttgtta

SEQ ID NO: 361379 - DNA, 19 bp, Homo sapiens
  siRNA target sequence for FLJ20272 (NM_017735.2,2570-2588).
gggcttgttatctaaagca

SEQ ID NO: 361380 - DNA, 19 bp, Homo sapiens
  siRNA target sequence for FLJ20272 (NM_017735.2,2571-2589).
ggcttgttatctaaagcaa

SEQ ID NO: 361381 - DNA, 19 bp, Homo sapiens
  siRNA target sequence for FLJ20272 (NM_017735.2,2572-2590).
gcttgttatctaaagcaaa

SEQ ID NO: 361382 - DNA, 19 bp, Homo sapiens
  siRNA target sequence for FLJ20272 (NM_017735.2,2631-2649).
gaattagctgatgacataa

SEQ ID NO: 361383 - DNA, 19 bp, Homo sapiens
  siRNA target sequence for FLJ20272 (NM_017735.2,2652-2670).
gctatggacaccttagtga

SEQ ID NO: 361384 - DNA, 19 bp, Homo sapiens
  siRNA target sequence for FLJ20272 (NM_017735.2,2685-2703).
ctaagcaaccagtttcgaa

SEQ ID NO: 361385 - DNA, 19 bp, Homo sapiens
  siRNA target sequence for FLJ20274 (NM_017736.1,447-465).
gagcaaataacgttgtctt

SEQ ID NO: 361386 - DNA, 19 bp, Homo sapiens
  siRNA target sequence for FLJ20274 (NM_017736.1,479-497).
gggatagagcctgagaaat

SEQ ID NO: 361387 - DNA, 19 bp, Homo sapiens
  siRNA target sequence for FLJ20274 (NM_017736.1,506-524).
catattctccaggatatgt

SEQ ID NO: 361388 - DNA, 19 bp, Homo sapiens
  siRNA target sequence for FLJ20274 (NM_017736.1,549-567).
gagttattttgcgaatgtt

SEQ ID NO: 361389 - DNA, 19 bp, Homo sapiens
  siRNA target sequence for FLJ20274 (NM_017736.1,579-597).
gcacatgcaaggctttttt

SEQ ID NO: 361390 - DNA, 19 bp, Homo sapiens
  siRNA target sequence for FLJ20274 (NM_017736.1,585-603).
gcaaggcttttttagaaga

SEQ ID NO: 361391 - DNA, 19 bp, Homo sapiens
  siRNA target sequence for FLJ20274 (NM_017736.1,631-649).
ggaaccctggtttaaagct

SEQ ID NO: 361392 - DNA, 19 bp, Homo sapiens
  siRNA target sequence for FLJ20274 (NM_017736.1,639-657).
ggtttaaagctccaaacaa

SEQ ID NO: 361393 - DNA, 19 bp, Homo sapiens
  siRNA target sequence for FLJ20274 (NM_017736.1,640-658).
gtttaaagctccaaacaaa

SEQ ID NO: 361394 - DNA, 19 bp, Homo sapiens
  siRNA target sequence for FLJ20274 (NM_017736.1,660-678).
ggacatttcagattgtgta

SEQ ID NO: 361395 - DNA, 19 bp, Homo sapiens
  siRNA target sequence for FLJ20274 (NM_017736.1,679-697).
caaatctcgaaataacagt

SEQ ID NO: 361396 - DNA, 19 bp, Homo sapiens
  siRNA target sequence for FLJ20274 (NM_017736.1,723-741).
gagaattggcaggaatagt

SEQ ID NO: 361397 - DNA, 19 bp, Homo sapiens
  siRNA target sequence for FLJ20274 (NM_017736.1,742-760).
gtgcaccctcaattcagaa

SEQ ID NO: 361398 - DNA, 19 bp, Homo sapiens
  siRNA target sequence for FLJ20274 (NM_017736.1,744-762).
gcaccctcaattcagaaaa

SEQ ID NO: 361399 - DNA, 19 bp, Homo sapiens
  siRNA target sequence for FLJ20274 (NM_017736.1,787-805).
gtacacagtggtagtagaa

SEQ ID NO: 361400 - DNA, 19 bp, Homo sapiens
  siRNA target sequence for FLJ20274 (NM_017736.1,792-810).
cagtggtagtagaaatcat

SEQ ID NO: 361401 - DNA, 19 bp, Homo sapiens
  siRNA target sequence for FLJ20274 (NM_017736.1,822-840).
gttgcctgagtgttgtgaa

SEQ ID NO: 361402 - DNA, 19 bp, Homo sapiens
  siRNA target sequence for FLJ20274 (NM_017736.1,880-898).
ggtgaagagccctaaggat

SEQ ID NO: 361403 - DNA, 19 bp, Homo sapiens
  siRNA target sequence for FLJ20274 (NM_017736.1,896-914).
gatccgtcacagcttaact

SEQ ID NO: 361404 - DNA, 19 bp, Homo sapiens
  siRNA target sequence for FLJ20274 (NM_017736.1,899-917).
ccgtcacagcttaactcaa

SEQ ID NO: 361405 - DNA, 19 bp, Homo sapiens
  siRNA target sequence for FLJ20274 (NM_017736.1,944-962).
ctggaatctgcggacaaat

SEQ ID NO: 361406 - DNA, 19 bp, Homo sapiens
  siRNA target sequence for FLJ20274 (NM_017736.1,946-964).
ggaatctgcggacaaatca

SEQ ID NO: 361407 - DNA, 19 bp, Homo sapiens
  siRNA target sequence for FLJ20274 (NM_017736.1,997-1015).
ccagcaggtaccagagaat

SEQ ID NO: 361408 - DNA, 19 bp, Homo sapiens
  siRNA target sequence for FLJ20274 (NM_017736.1,998-1016).
cagcaggtaccagagaata

SEQ ID NO: 361409 - DNA, 19 bp, Homo sapiens
  siRNA target sequence for FLJ20274 (NM_017736.1,1000-1018).
gcaggtaccagagaatact

SEQ ID NO: 361410 - DNA, 19 bp, Homo sapiens
  siRNA target sequence for FLJ20274 (NM_017736.1,1033-1051).
gacaaaaccaacgtctaat

SEQ ID NO: 361411 - DNA, 19 bp, Homo sapiens
  siRNA target sequence for FLJ20275 (NM_017737.1,57-75).
ggacgaacgaaggactatt

SEQ ID NO: 361412 - DNA, 19 bp, Homo sapiens
  siRNA target sequence for FLJ20275 (NM_017737.1,58-76).
gacgaacgaaggactatta

SEQ ID NO: 361413 - DNA, 19 bp, Homo sapiens
  siRNA target sequence for FLJ20275 (NM_017737.1,64-82).
cgaaggactattaaactca

SEQ ID NO: 361414 - DNA, 19 bp, Homo sapiens
  siRNA target sequence for FLJ20275 (NM_017737.1,106-124).
gactcagaacgcaaagtta

SEQ ID NO: 361415 - DNA, 19 bp, Homo sapiens
  siRNA target sequence for FLJ20275 (NM_017737.1,121-139).
gttattcccatcatttcaa

SEQ ID NO: 361416 - DNA, 19 bp, Homo sapiens
  siRNA target sequence for FLJ20275 (NM_017737.1,201-219).
ggtggtagactccttcaaa

SEQ ID NO: 361417 - DNA, 19 bp, Homo sapiens
  siRNA target sequence for FLJ20275 (NM_017737.1,210-228).
ctccttcaaatctggtttt

SEQ ID NO: 361418 - DNA, 19 bp, Homo sapiens
  siRNA target sequence for FLJ20275 (NM_017737.1,261-279).
cagtcaacatatatataga

SEQ ID NO: 361419 - DNA, 19 bp, Homo sapiens
  siRNA target sequence for FLJ20275 (NM_017737.1,428-446).
cagaacagagacgtaaaaa

SEQ ID NO: 361420 - DNA, 19 bp, Homo sapiens
  siRNA target sequence for FLJ20275 (NM_017737.1,454-472).
cagcgcattgatgaactta

SEQ ID NO: 361421 - DNA, 19 bp, Homo sapiens
  siRNA target sequence for FLJ20275 (NM_017737.1,457-475).
cgcattgatgaacttaaca

SEQ ID NO: 361422 - DNA, 19 bp, Homo sapiens
  siRNA target sequence for FLJ20275 (NM_017737.1,604-622).
gaccgcctacgaatggaaa

SEQ ID NO: 361423 - DNA, 19 bp, Homo sapiens
  siRNA target sequence for FLJ20275 (NM_017737.1,608-626).
gcctacgaatggaaatcca

SEQ ID NO: 361424 - DNA, 19 bp, Homo sapiens
  siRNA target sequence for FLJ20275 (NM_017737.1,610-628).
ctacgaatggaaatccata

SEQ ID NO: 361425 - DNA, 19 bp, Homo sapiens
  siRNA target sequence for FLJ20275 (NM_017737.1,695-713).
gtgacataaatcatcttgt

SEQ ID NO: 361426 - DNA, 19 bp, Homo sapiens
  siRNA target sequence for FLJ20275 (NM_017737.1,738-756).
gggaagttacactgatgat

SEQ ID NO: 361427 - DNA, 19 bp, Homo sapiens
  siRNA target sequence for FLJ20275 (NM_017737.1,794-812).
gtcaccacaatgagtttga

SEQ ID NO: 361428 - DNA, 19 bp, Homo sapiens
  siRNA target sequence for FLJ20275 (NM_017737.1,913-931).
ggtgaagttctctacatta

SEQ ID NO: 361429 - DNA, 19 bp, Homo sapiens
  siRNA target sequence for FLJ20275 (NM_017737.1,993-1011).
cgttcccacgtcatacata

SEQ ID NO: 361430 - DNA, 19 bp, Homo sapiens
  siRNA target sequence for FLJ20275 (NM_017737.1,998-1016).
ccacgtcatacatagatgt

SEQ ID NO: 361431 - DNA, 19 bp, Homo sapiens
  siRNA target sequence for FLJ20280 (NM_017741.1,542-560).
gagtcccaccttttcaaaa

SEQ ID NO: 361432 - DNA, 19 bp, Homo sapiens
  siRNA target sequence for FLJ20280 (NM_017741.1,579-597).
ccggctctctagagatcat

SEQ ID NO: 361433 - DNA, 19 bp, Homo sapiens
  siRNA target sequence for FLJ20280 (NM_017741.1,590-608).
gagatcatgccactctaaa

SEQ ID NO: 361434 - DNA, 19 bp, Homo sapiens
  siRNA target sequence for FLJ20280 (NM_017741.1,636-654).
gctaagccgaacattgagt

SEQ ID NO: 361435 - DNA, 19 bp, Homo sapiens
  siRNA target sequence for FLJ20280 (NM_017741.1,637-655).
ctaagccgaacattgagta

SEQ ID NO: 361436 - DNA, 19 bp, Homo sapiens
  siRNA target sequence for FLJ20280 (NM_017741.1,659-677).
ccactcccatacctgaata

SEQ ID NO: 361437 - DNA, 19 bp, Homo sapiens
  siRNA target sequence for FLJ20280 (NM_017741.1,664-682).
cccatacctgaatacctaa

SEQ ID NO: 361438 - DNA, 19 bp, Homo sapiens
  siRNA target sequence for FLJ20280 (NM_017741.1,665-683).
ccatacctgaatacctaaa

SEQ ID NO: 361439 - DNA, 19 bp, Homo sapiens
  siRNA target sequence for FLJ20280 (NM_017741.1,666-684).
catacctgaatacctaaaa

SEQ ID NO: 361440 - DNA, 19 bp, Homo sapiens
  siRNA target sequence for FLJ20280 (NM_017741.1,670-688).
cctgaatacctaaaacaga

SEQ ID NO: 361441 - DNA, 19 bp, Homo sapiens
  siRNA target sequence for FLJ20280 (NM_017741.1,671-689).
ctgaatacctaaaacagat

SEQ ID NO: 361442 - DNA, 19 bp, Homo sapiens
  siRNA target sequence for FLJ20280 (NM_017741.1,679-697).
ctaaaacagatccctaatt

SEQ ID NO: 361443 - DNA, 19 bp, Homo sapiens
  siRNA target sequence for FLJ20280 (NM_017741.1,717-735).
ctgtggctggctgactaaa

SEQ ID NO: 361444 - DNA, 19 bp, Homo sapiens
  siRNA target sequence for FLJ20280 (NM_017741.1,725-743).
ggctgactaaaacagttaa

SEQ ID NO: 361445 - DNA, 19 bp, Homo sapiens
  siRNA target sequence for FLJ20280 (NM_017741.1,744-762).
ggaaacaactcgtactgaa

SEQ ID NO: 361446 - DNA, 19 bp, Homo sapiens
  siRNA target sequence for FLJ20280 (NM_017741.1,754-772).
cgtactgaacccatcaaca

SEQ ID NO: 361447 - DNA, 19 bp, Homo sapiens
  siRNA target sequence for FLJ20280 (NM_017741.1,760-778).
gaacccatcaacactactt

SEQ ID NO: 361448 - DNA, 19 bp, Homo sapiens
  siRNA target sequence for FLJ20280 (NM_017741.1,765-783).
catcaacactacttattct

SEQ ID NO: 361449 - DNA, 19 bp, Homo sapiens
  siRNA target sequence for ST7L (NM_017744.4,503-521).
ggcagcggtgactgtattt

SEQ ID NO: 361450 - DNA, 19 bp, Homo sapiens
  siRNA target sequence for ST7L (NM_017744.4,504-522).
gcagcggtgactgtatttt

SEQ ID NO: 361451 - DNA, 19 bp, Homo sapiens
  siRNA target sequence for ST7L (NM_017744.4,505-523).
cagcggtgactgtattttt

SEQ ID NO: 361452 - DNA, 19 bp, Homo sapiens
  siRNA target sequence for ST7L (NM_017744.4,600-618).
gaatggtggtacttccata

SEQ ID NO: 361453 - DNA, 19 bp, Homo sapiens
  siRNA target sequence for ST7L (NM_017744.4,604-622).
ggtggtacttccataagca

SEQ ID NO: 361454 - DNA, 19 bp, Homo sapiens
  siRNA target sequence for ST7L (NM_017744.4,615-633).
cataagcatggcacatctt

SEQ ID NO: 361455 - DNA, 19 bp, Homo sapiens
  siRNA target sequence for ST7L (NM_017744.4,711-729).
ccttcgaggaacagagaaa

SEQ ID NO: 361456 - DNA, 19 bp, Homo sapiens
  siRNA target sequence for ST7L (NM_017744.4,801-819).
gaatataggagatacactt

SEQ ID NO: 361457 - DNA, 19 bp, Homo sapiens
  siRNA target sequence for ST7L (NM_017744.4,828-846).
ggtaaagagccacttacat

SEQ ID NO: 361458 - DNA, 19 bp, Homo sapiens
  siRNA target sequence for ST7L (NM_017744.4,912-930).
cgtccttcagacacagtta

SEQ ID NO: 361459 - DNA, 19 bp, Homo sapiens
  siRNA target sequence for ST7L (NM_017744.4,976-994).
cagcctatcaagctttaga

SEQ ID NO: 361460 - DNA, 19 bp, Homo sapiens
  siRNA target sequence for ST7L (NM_017744.4,1007-1025).
ctgtgccactgcatatgtt

SEQ ID NO: 361461 - DNA, 19 bp, Homo sapiens
  siRNA target sequence for ST7L (NM_017744.4,1162-1180).
ggagagataccaatgtact

SEQ ID NO: 361462 - DNA, 19 bp, Homo sapiens
  siRNA target sequence for ST7L (NM_017744.4,1171-1189).
ccaatgtactggtatatat

SEQ ID NO: 361463 - DNA, 19 bp, Homo sapiens
  siRNA target sequence for ST7L (NM_017744.4,1203-1221).
gcaatgtgtgcaagaaaat

SEQ ID NO: 361464 - DNA, 19 bp, Homo sapiens
  siRNA target sequence for ST7L (NM_017744.4,1204-1222).
caatgtgtgcaagaaaatt

SEQ ID NO: 361465 - DNA, 19 bp, Homo sapiens
  siRNA target sequence for ST7L (NM_017744.4,1275-1293).
cctcctcttaccatgttga

SEQ ID NO: 361466 - DNA, 19 bp, Homo sapiens
  siRNA target sequence for ST7L (NM_017744.4,1276-1294).
ctcctcttaccatgttgaa

SEQ ID NO: 361467 - DNA, 19 bp, Homo sapiens
  siRNA target sequence for ST7L (NM_017744.4,1295-1313).
catccatgaaaatctctta

SEQ ID NO: 361468 - DNA, 19 bp, Homo sapiens
  siRNA target sequence for ST7L (NM_017744.4,1464-1482).
gcctccagaagaggattaa

SEQ ID NO: 361469 - DNA, 19 bp, Homo sapiens
  siRNA target sequence for ST7L (NM_017744.4,1502-1520).
cgtggaagcaattcataga

SEQ ID NO: 361470 - DNA, 19 bp, Homo sapiens
  siRNA target sequence for ST7L (NM_017744.4,1536-1554).
cctcatgttccaaaatatt

SEQ ID NO: 361471 - DNA, 19 bp, Homo sapiens
  siRNA target sequence for ST7L (NM_017744.4,1581-1599).
cctccagaacacattctga

SEQ ID NO: 361472 - DNA, 19 bp, Homo sapiens
  siRNA target sequence for ST7L (NM_017744.4,1598-1616).
gaaacggggtgatagtgaa

SEQ ID NO: 361473 - DNA, 19 bp, Homo sapiens
  siRNA target sequence for ST7L (NM_017744.4,1603-1621).
ggggtgatagtgaagcaat

SEQ ID NO: 361474 - DNA, 19 bp, Homo sapiens
  siRNA target sequence for ST7L (NM_017744.4,1646-1664).
gcactggaaacgaatagaa

SEQ ID NO: 361475 - DNA, 19 bp, Homo sapiens
  siRNA target sequence for ST7L (NM_017744.4,1657-1675).
gaatagaaggtgctcttaa

SEQ ID NO: 361476 - DNA, 19 bp, Homo sapiens
  siRNA target sequence for ST7L (NM_017744.4,1666-1684).
gtgctcttaatctgttaca

SEQ ID NO: 361477 - DNA, 19 bp, Homo sapiens
  siRNA target sequence for ST7L (NM_017744.4,1668-1686).
gctcttaatctgttacagt

SEQ ID NO: 361478 - DNA, 19 bp, Homo sapiens
  siRNA target sequence for ST7L (NM_017744.4,1771-1789).
cggctgatagagagctatt

SEQ ID NO: 361479 - DNA, 19 bp, Homo sapiens
  siRNA target sequence for ST7L (NM_017744.4,1772-1790).
ggctgatagagagctatta

SEQ ID NO: 361480 - DNA, 19 bp, Homo sapiens
  siRNA target sequence for ST7L (NM_017744.4,1865-1883).
ctcttctacagcaatgata

SEQ ID NO: 361481 - DNA, 19 bp, Homo sapiens
  siRNA target sequence for ST7L (NM_017744.4,1875-1893).
gcaatgatagccattctca

SEQ ID NO: 361482 - DNA, 19 bp, Homo sapiens
  siRNA target sequence for BCOR (NM_017745.4,328-346).
gcgaagacaggaaaatcct

SEQ ID NO: 361483 - DNA, 19 bp, Homo sapiens
  siRNA target sequence for BCOR (NM_017745.4,329-347).
cgaagacaggaaaatcctt

SEQ ID NO: 361484 - DNA, 19 bp, Homo sapiens
  siRNA target sequence for BCOR (NM_017745.4,424-442).
cgagcacggcccataggat

SEQ ID NO: 361485 - DNA, 19 bp, Homo sapiens
  siRNA target sequence for BCOR (NM_017745.4,504-522).
ccgggaaacatcgtctatt

SEQ ID NO: 361486 - DNA, 19 bp, Homo sapiens
  siRNA target sequence for BCOR (NM_017745.4,617-635).
gcagttcaaaccgaataca

SEQ ID NO: 361487 - DNA, 19 bp, Homo sapiens
  siRNA target sequence for BCOR (NM_017745.4,681-699).
ggcttcagtgctatataca

SEQ ID NO: 361488 - DNA, 19 bp, Homo sapiens
  siRNA target sequence for BCOR (NM_017745.4,682-700).
gcttcagtgctatatacaa

SEQ ID NO: 361489 - DNA, 19 bp, Homo sapiens
  siRNA target sequence for BCOR (NM_017745.4,686-704).
cagtgctatatacaaaaca

SEQ ID NO: 361490 - DNA, 19 bp, Homo sapiens
  siRNA target sequence for BCOR (NM_017745.4,698-716).
caaaacaccgcctggaata

SEQ ID NO: 361491 - DNA, 19 bp, Homo sapiens
  siRNA target sequence for BCOR (NM_017745.4,779-797).
gagccctctcaacatcaat

SEQ ID NO: 361492 - DNA, 19 bp, Homo sapiens
  siRNA target sequence for BCOR (NM_017745.4,820-838).
cctgggtcaatccttacat

SEQ ID NO: 361493 - DNA, 19 bp, Homo sapiens
  siRNA target sequence for BCOR (NM_017745.4,870-888).
ctcgactcgccaaataagt

SEQ ID NO: 361494 - DNA, 19 bp, Homo sapiens
  siRNA target sequence for BCOR (NM_017745.4,872-890).
cgactcgccaaataagtat

SEQ ID NO: 361495 - DNA, 19 bp, Homo sapiens
  siRNA target sequence for BCOR (NM_017745.4,873-891).
gactcgccaaataagtatt

SEQ ID NO: 361496 - DNA, 19 bp, Homo sapiens
  siRNA target sequence for BCOR (NM_017745.4,875-893).
ctcgccaaataagtattca

SEQ ID NO: 361497 - DNA, 19 bp, Homo sapiens
  siRNA target sequence for BCOR (NM_017745.4,877-895).
cgccaaataagtattcact

SEQ ID NO: 361498 - DNA, 19 bp, Homo sapiens
  siRNA target sequence for BCOR (NM_017745.4,1088-1106).
cgtccattgcgcagacaaa

SEQ ID NO: 361499 - DNA, 19 bp, Homo sapiens
  siRNA target sequence for BCOR (NM_017745.4,1089-1107).
gtccattgcgcagacaaaa

SEQ ID NO: 361500 - DNA, 19 bp, Homo sapiens
  siRNA target sequence for BCOR (NM_017745.4,1363-1381).
ccctgtcaaagccatacat

SEQ ID NO: 361501 - DNA, 19 bp, Homo sapiens
  siRNA target sequence for BCOR (NM_017745.4,1365-1383).
ctgtcaaagccatacatga

SEQ ID NO: 361502 - DNA, 19 bp, Homo sapiens
  siRNA target sequence for BCOR (NM_017745.4,1489-1507).
cagcggttcaagacagaaa

SEQ ID NO: 361503 - DNA, 19 bp, Homo sapiens
  siRNA target sequence for BCOR (NM_017745.4,1561-1579).
cagataagccactagactt

SEQ ID NO: 361504 - DNA, 19 bp, Homo sapiens
  siRNA target sequence for BCOR (NM_017745.4,1570-1588).
cactagacttgtcttctaa

SEQ ID NO: 361505 - DNA, 19 bp, Homo sapiens
  siRNA target sequence for BCOR (NM_017745.4,1585-1603).
ctaaagtggtggatgtaga

SEQ ID NO: 361506 - DNA, 19 bp, Homo sapiens
  siRNA target sequence for BCOR (NM_017745.4,1609-1627).
ccaaagctgaccacatgaa

SEQ ID NO: 361507 - DNA, 19 bp, Homo sapiens
  siRNA target sequence for BCOR (NM_017745.4,1679-1697).
gctctccggaagtgagatt

SEQ ID NO: 361508 - DNA, 19 bp, Homo sapiens
  siRNA target sequence for BCOR (NM_017745.4,1694-1712).
gattccgaaagaaacacta

SEQ ID NO: 361509 - DNA, 19 bp, Homo sapiens
  siRNA target sequence for BCOR (NM_017745.4,1723-1741).
gaaatggttgtgctatcta

SEQ ID NO: 361510 - DNA, 19 bp, Homo sapiens
  siRNA target sequence for BCOR (NM_017745.4,1734-1752).
gctatctatagatctgaaa

SEQ ID NO: 361511 - DNA, 19 bp, Homo sapiens
  siRNA target sequence for BCOR (NM_017745.4,1735-1753).
ctatctatagatctgaaat

SEQ ID NO: 361512 - DNA, 19 bp, Homo sapiens
  siRNA target sequence for BCOR (NM_017745.4,1792-1810).
caagtcctaacgaagagaa

SEQ ID NO: 361513 - DNA, 19 bp, Homo sapiens
  siRNA target sequence for BCOR (NM_017745.4,1795-1813).
gtcctaacgaagagaacaa

SEQ ID NO: 361514 - DNA, 19 bp, Homo sapiens
  siRNA target sequence for BCOR (NM_017745.4,1860-1878).
ccacagcagcggagttcat

SEQ ID NO: 361515 - DNA, 19 bp, Homo sapiens
  siRNA target sequence for BCOR (NM_017745.4,1863-1881).
cagcagcggagttcatcat

SEQ ID NO: 361516 - DNA, 19 bp, Homo sapiens
  siRNA target sequence for BCOR (NM_017745.4,2118-2136).
gaaccgagtttcaaagcaa

SEQ ID NO: 361517 - DNA, 19 bp, Homo sapiens
  siRNA target sequence for BCOR (NM_017745.4,2147-2165).
ccttccaccaagctctata

SEQ ID NO: 361518 - DNA, 19 bp, Homo sapiens
  siRNA target sequence for BCOR (NM_017745.4,2152-2170).
caccaagctctatatttct

SEQ ID NO: 361519 - DNA, 19 bp, Homo sapiens
  siRNA target sequence for BCOR (NM_017745.4,2154-2172).
ccaagctctatatttctgt

SEQ ID NO: 361520 - DNA, 19 bp, Homo sapiens
  siRNA target sequence for BCOR (NM_017745.4,2443-2461).
cacacacgcccatagagat

SEQ ID NO: 361521 - DNA, 19 bp, Homo sapiens
  siRNA target sequence for BCOR (NM_017745.4,2445-2463).
cacacgcccatagagatta

SEQ ID NO: 361522 - DNA, 19 bp, Homo sapiens
  siRNA target sequence for BCOR (NM_017745.4,2447-2465).
cacgcccatagagattact

SEQ ID NO: 361523 - DNA, 19 bp, Homo sapiens
  siRNA target sequence for BCOR (NM_017745.4,2449-2467).
cgcccatagagattactaa

SEQ ID NO: 361524 - DNA, 19 bp, Homo sapiens
  siRNA target sequence for BCOR (NM_017745.4,2450-2468).
gcccatagagattactaaa

SEQ ID NO: 361525 - DNA, 19 bp, Homo sapiens
  siRNA target sequence for BCOR (NM_017745.4,2452-2470).
ccatagagattactaaaga

SEQ ID NO: 361526 - DNA, 19 bp, Homo sapiens
  siRNA target sequence for BCOR (NM_017745.4,2539-2557).
ggttttccgagattttgga

SEQ ID NO: 361527 - DNA, 19 bp, Homo sapiens
  siRNA target sequence for BCOR (NM_017745.4,2540-2558).
gttttccgagattttggaa

SEQ ID NO: 361528 - DNA, 19 bp, Homo sapiens
  siRNA target sequence for BCOR (NM_017745.4,2560-2578).
ctagcagcaccaagttaca

SEQ ID NO: 361529 - DNA, 19 bp, Homo sapiens
  siRNA target sequence for BCOR (NM_017745.4,2590-2608).
ccaccgacaagaacctaaa

SEQ ID NO: 361530 - DNA, 19 bp, Homo sapiens
  siRNA target sequence for BCOR (NM_017745.4,2839-2857).
gtgacttccacgaaactta

SEQ ID NO: 361531 - DNA, 19 bp, Homo sapiens
  siRNA target sequence for BCOR (NM_017745.4,2841-2859).
gacttccacgaaacttata

SEQ ID NO: 361532 - DNA, 19 bp, Homo sapiens
  siRNA target sequence for BCOR (NM_017745.4,2847-2865).
cacgaaacttatactttca

SEQ ID NO: 361533 - DNA, 19 bp, Homo sapiens
  siRNA target sequence for BCOR (NM_017745.4,2849-2867).
cgaaacttatactttcaaa

SEQ ID NO: 361534 - DNA, 19 bp, Homo sapiens
  siRNA target sequence for BCOR (NM_017745.4,2872-2890).
cagtcttcaccgtaagcaa

SEQ ID NO: 361535 - DNA, 19 bp, Homo sapiens
  siRNA target sequence for BCOR (NM_017745.4,3168-3186).
gtgggtgaccgattcaaat

SEQ ID NO: 361536 - DNA, 19 bp, Homo sapiens
  siRNA target sequence for BCOR (NM_017745.4,3170-3188).
gggtgaccgattcaaatgt

SEQ ID NO: 361537 - DNA, 19 bp, Homo sapiens
  siRNA target sequence for BCOR (NM_017745.4,3187-3205).
gtgtcactaccgaactgta

SEQ ID NO: 361538 - DNA, 19 bp, Homo sapiens
  siRNA target sequence for BCOR (NM_017745.4,3241-3259).
cattgcagatggaaggatt

SEQ ID NO: 361539 - DNA, 19 bp, Homo sapiens
  siRNA target sequence for BCOR (NM_017745.4,3394-3412).
cagccgactgggaaaggtt

SEQ ID NO: 361540 - DNA, 19 bp, Homo sapiens
  siRNA target sequence for BCOR (NM_017745.4,3485-3503).
gagatgcgagtatagtgtt

SEQ ID NO: 361541 - DNA, 19 bp, Homo sapiens
  siRNA target sequence for BCOR (NM_017745.4,3512-3530).
gcaccgtgatccctttgaa

SEQ ID NO: 361542 - DNA, 19 bp, Homo sapiens
  siRNA target sequence for BCOR (NM_017745.4,3532-3550).
ccccagaggacaaagatct

SEQ ID NO: 361543 - DNA, 19 bp, Homo sapiens
  siRNA target sequence for BCOR (NM_017745.4,3553-3571).
ctgtggagaagtactttgt

SEQ ID NO: 361544 - DNA, 19 bp, Homo sapiens
  siRNA target sequence for BCOR (NM_017745.4,3748-3766).
ctaaagggctccatcctaa

SEQ ID NO: 361545 - DNA, 19 bp, Homo sapiens
  siRNA target sequence for BCOR (NM_017745.4,3959-3977).
gtcggaagagtctcttaaa

SEQ ID NO: 361546 - DNA, 19 bp, Homo sapiens
  siRNA target sequence for BCOR (NM_017745.4,4014-4032).
ggctctccgcccatgaaga

SEQ ID NO: 361547 - DNA, 19 bp, Homo sapiens
  siRNA target sequence for BCOR (NM_017745.4,4023-4041).
cccatgaagagtctttcat

SEQ ID NO: 361548 - DNA, 19 bp, Homo sapiens
  siRNA target sequence for BCOR (NM_017745.4,4281-4299).
ccactgacaggggaatact

SEQ ID NO: 361549 - DNA, 19 bp, Homo sapiens
  siRNA target sequence for BCOR (NM_017745.4,4282-4300).
cactgacaggggaatacta

SEQ ID NO: 361550 - DNA, 19 bp, Homo sapiens
  siRNA target sequence for BCOR (NM_017745.4,4323-4341).
gtgactgtccggagattca

SEQ ID NO: 361551 - DNA, 19 bp, Homo sapiens
  siRNA target sequence for BCOR (NM_017745.4,4355-4373).
gcccagttcggactatgat

SEQ ID NO: 361552 - DNA, 19 bp, Homo sapiens
  siRNA target sequence for BCOR (NM_017745.4,4501-4519).
cggaagcacggagacttat

SEQ ID NO: 361553 - DNA, 19 bp, Homo sapiens
  siRNA target sequence for BCOR (NM_017745.4,4509-4527).
cggagacttattgtcaata

SEQ ID NO: 361554 - DNA, 19 bp, Homo sapiens
  siRNA target sequence for BCOR (NM_017745.4,4584-4602).
gtcctgtactgcttagaga

SEQ ID NO: 361555 - DNA, 19 bp, Homo sapiens
  siRNA target sequence for BCOR (NM_017745.4,4666-4684).
ctaggggctggctcaacat

SEQ ID NO: 361556 - DNA, 19 bp, Homo sapiens
  siRNA target sequence for BCOR (NM_017745.4,4669-4687).
ggggctggctcaacattgt

SEQ ID NO: 361557 - DNA, 19 bp, Homo sapiens
  siRNA target sequence for BCOR (NM_017745.4,4686-4704).
gtgcgacacctccttgaat

SEQ ID NO: 361558 - DNA, 19 bp, Homo sapiens
  siRNA target sequence for BCOR (NM_017745.4,4688-4706).
gcgacacctccttgaatat

SEQ ID NO: 361559 - DNA, 19 bp, Homo sapiens
  siRNA target sequence for BCOR (NM_017745.4,4707-4725).
ggcgctgatgtcaactgta

SEQ ID NO: 361560 - DNA, 19 bp, Homo sapiens
  siRNA target sequence for BCOR (NM_017745.4,4764-4782).
gagaacgatcacttggaaa

SEQ ID NO: 361561 - DNA, 19 bp, Homo sapiens
  siRNA target sequence for BCOR (NM_017745.4,4778-4796).
ggaaattgtccgactactt

SEQ ID NO: 361562 - DNA, 19 bp, Homo sapiens
  siRNA target sequence for BCOR (NM_017745.4,4787-4805).
ccgactacttctctcttat

SEQ ID NO: 361563 - DNA, 19 bp, Homo sapiens
  siRNA target sequence for BCOR (NM_017745.4,4880-4898).
gttcttaacagattattta

SEQ ID NO: 361564 - DNA, 19 bp, Homo sapiens
  siRNA target sequence for BCOR (NM_017745.4,4904-4922).
cctccagggtcgcaatgat

SEQ ID NO: 361565 - DNA, 19 bp, Homo sapiens
  siRNA target sequence for BCOR (NM_017745.4,4907-4925).
ccagggtcgcaatgatgat

SEQ ID NO: 361566 - DNA, 19 bp, Homo sapiens
  siRNA target sequence for BCOR (NM_017745.4,4933-4951).
gtggcacttgggacttcta

SEQ ID NO: 361567 - DNA, 19 bp, Homo sapiens
  siRNA target sequence for BCOR (NM_017745.4,5044-5062).
cctatagcgatgtgtttga

SEQ ID NO: 361568 - DNA, 19 bp, Homo sapiens
  siRNA target sequence for BCOR (NM_017745.4,5045-5063).
ctatagcgatgtgtttgaa

SEQ ID NO: 361569 - DNA, 19 bp, Homo sapiens
  siRNA target sequence for BCOR (NM_017745.4,5149-5167).
cggatgtccttaagaaatt

SEQ ID NO: 361570 - DNA, 19 bp, Homo sapiens
  siRNA target sequence for BCOR (NM_017745.4,5181-5199).
cgcatatttcgctgcaatt

SEQ ID NO: 361571 - DNA, 19 bp, Homo sapiens
  siRNA target sequence for BCOR (NM_017745.4,5292-5310).
gccttcaaccctgaaagta

SEQ ID NO: 361572 - DNA, 19 bp, Homo sapiens
  siRNA target sequence for BCOR (NM_017745.4,5308-5326).
gtaaggagctgttagatct

SEQ ID NO: 361573 - DNA, 19 bp, Homo sapiens
  siRNA target sequence for BCOR (NM_017745.4,5328-5346).
gtggaattcacgaacgaaa

SEQ ID NO: 361574 - DNA, 19 bp, Homo sapiens
  siRNA target sequence for BCOR (NM_017745.4,5330-5348).
ggaattcacgaacgaaatt

SEQ ID NO: 361575 - DNA, 19 bp, Homo sapiens
  siRNA target sequence for FLJ20287 (NM_017746.1,151-169).
gccaacatgattttcaaaa

SEQ ID NO: 361576 - DNA, 19 bp, Homo sapiens
  siRNA target sequence for FLJ20287 (NM_017746.1,194-212).
gaagcccaagttacaaaat

SEQ ID NO: 361577 - DNA, 19 bp, Homo sapiens
  siRNA target sequence for FLJ20287 (NM_017746.1,197-215).
gcccaagttacaaaatgct

SEQ ID NO: 361578 - DNA, 19 bp, Homo sapiens
  siRNA target sequence for FLJ20287 (NM_017746.1,213-231).
gctactcctacaaacttta

SEQ ID NO: 361579 - DNA, 19 bp, Homo sapiens
  siRNA target sequence for FLJ20287 (NM_017746.1,214-232).
ctactcctacaaactttaa

SEQ ID NO: 361580 - DNA, 19 bp, Homo sapiens
  siRNA target sequence for FLJ20287 (NM_017746.1,273-291).
ggaacacttccaacaaaca

SEQ ID NO: 361581 - DNA, 19 bp, Homo sapiens
  siRNA target sequence for FLJ20287 (NM_017746.1,274-292).
gaacacttccaacaaacaa

SEQ ID NO: 361582 - DNA, 19 bp, Homo sapiens
  siRNA target sequence for FLJ20287 (NM_017746.1,290-308).
caatagaaaacttaacata

SEQ ID NO: 361583 - DNA, 19 bp, Homo sapiens
  siRNA target sequence for FLJ20287 (NM_017746.1,335-353).
ctacaatgctggggttaaa

SEQ ID NO: 361584 - DNA, 19 bp, Homo sapiens
  siRNA target sequence for FLJ20287 (NM_017746.1,338-356).
caatgctggggttaaacaa

SEQ ID NO: 361585 - DNA, 19 bp, Homo sapiens
  siRNA target sequence for FLJ20287 (NM_017746.1,369-387).
ggacttaaagaccttttgt

SEQ ID NO: 361586 - DNA, 19 bp, Homo sapiens
  siRNA target sequence for FLJ20287 (NM_017746.1,414-432).
cacctttcaaacatattaa

SEQ ID NO: 361587 - DNA, 19 bp, Homo sapiens
  siRNA target sequence for FLJ20287 (NM_017746.1,483-501).
gcagttcaacttcttcaat

SEQ ID NO: 361588 - DNA, 19 bp, Homo sapiens
  siRNA target sequence for FLJ20287 (NM_017746.1,484-502).
cagttcaacttcttcaatt

SEQ ID NO: 361589 - DNA, 19 bp, Homo sapiens
  siRNA target sequence for FLJ20287 (NM_017746.1,512-530).
caaaatacgagctgaacaa

SEQ ID NO: 361590 - DNA, 19 bp, Homo sapiens
  siRNA target sequence for FLJ20287 (NM_017746.1,575-593).
catgactcacattactgaa

SEQ ID NO: 361591 - DNA, 19 bp, Homo sapiens
  siRNA target sequence for FLJ20287 (NM_017746.1,580-598).
ctcacattactgaaggaat

SEQ ID NO: 361592 - DNA, 19 bp, Homo sapiens
  siRNA target sequence for FLJ20287 (NM_017746.1,602-620).
ggaggactctttaaaagtt

SEQ ID NO: 361593 - DNA, 19 bp, Homo sapiens
  siRNA target sequence for FLJ20287 (NM_017746.1,658-676).
ctggccgtagcagcatatt

SEQ ID NO: 361594 - DNA, 19 bp, Homo sapiens
  siRNA target sequence for FLJ20287 (NM_017746.1,661-679).
gccgtagcagcatattgct

SEQ ID NO: 361595 - DNA, 19 bp, Homo sapiens
  siRNA target sequence for FLJ20287 (NM_017746.1,662-680).
ccgtagcagcatattgctt

SEQ ID NO: 361596 - DNA, 19 bp, Homo sapiens
  siRNA target sequence for FLJ20287 (NM_017746.1,663-681).
cgtagcagcatattgctta

SEQ ID NO: 361597 - DNA, 19 bp, Homo sapiens
  siRNA target sequence for FLJ20287 (NM_017746.1,713-731).
gctgtccaaaggactgata

SEQ ID NO: 361598 - DNA, 19 bp, Homo sapiens
  siRNA target sequence for FLJ20287 (NM_017746.1,818-836).
gagactcagtaaattcctt

SEQ ID NO: 361599 - DNA, 19 bp, Homo sapiens
  siRNA target sequence for FLJ20287 (NM_017746.1,857-875).
cagtaggttgagagaaagt

SEQ ID NO: 361600 - DNA, 19 bp, Homo sapiens
  siRNA target sequence for FLJ20287 (NM_017746.1,909-927).
gccactagcaactccattt

SEQ ID NO: 361601 - DNA, 19 bp, Homo sapiens
  siRNA target sequence for FLJ20287 (NM_017746.1,1053-1071).
gatgaaggcctgtcatcta

SEQ ID NO: 361602 - DNA, 19 bp, Homo sapiens
  siRNA target sequence for FLJ20287 (NM_017746.1,1074-1092).
gaaaacctgaaaggattta

SEQ ID NO: 361603 - DNA, 19 bp, Homo sapiens
  siRNA target sequence for FLJ20287 (NM_017746.1,1097-1115).
gataataattccattgcta

SEQ ID NO: 361604 - DNA, 19 bp, Homo sapiens
  siRNA target sequence for FLJ20287 (NM_017746.1,1156-1174).
ctcctgttgggaatggtat

SEQ ID NO: 361605 - DNA, 19 bp, Homo sapiens
  siRNA target sequence for FLJ20287 (NM_017746.1,1229-1247).
gtggaaactctctaaacaa

SEQ ID NO: 361606 - DNA, 19 bp, Homo sapiens
  siRNA target sequence for FLJ20287 (NM_017746.1,1231-1249).
ggaaactctctaaacaaca

SEQ ID NO: 361607 - DNA, 19 bp, Homo sapiens
  siRNA target sequence for FLJ20287 (NM_017746.1,1273-1291).
catggcttcgaaagaacta

SEQ ID NO: 361608 - DNA, 19 bp, Homo sapiens
  siRNA target sequence for FLJ20287 (NM_017746.1,1278-1296).
cttcgaaagaactacctta

SEQ ID NO: 361609 - DNA, 19 bp, Homo sapiens
  siRNA target sequence for FLJ20287 (NM_017746.1,1282-1300).
gaaagaactaccttattga

SEQ ID NO: 361610 - DNA, 19 bp, Homo sapiens
  siRNA target sequence for FLJ20287 (NM_017746.1,1289-1307).
ctaccttattgattttaaa

SEQ ID NO: 361611 - DNA, 19 bp, Homo sapiens
  siRNA target sequence for FLJ20287 (NM_017746.1,1321-1339).
gtcgttttccatatgtctt

SEQ ID NO: 361612 - DNA, 19 bp, Homo sapiens
  siRNA target sequence for FLJ20287 (NM_017746.1,1323-1341).
cgttttccatatgtcttaa

SEQ ID NO: 361613 - DNA, 19 bp, Homo sapiens
  siRNA target sequence for FLJ20287 (NM_017746.1,1484-1502).
gaaggattgcagttggata

SEQ ID NO: 361614 - DNA, 19 bp, Homo sapiens
  siRNA target sequence for FLJ20287 (NM_017746.1,1493-1511).
cagttggatagaaatgata

SEQ ID NO: 361615 - DNA, 19 bp, Homo sapiens
  siRNA target sequence for FLJ20287 (NM_017746.1,1508-1526).
gataaggaaatttgtaaca

SEQ ID NO: 361616 - DNA, 19 bp, Homo sapiens
  siRNA target sequence for FLJ20287 (NM_017746.1,1542-1560).
ggctctaggctaaatagta

SEQ ID NO: 361617 - DNA, 19 bp, Homo sapiens
  siRNA target sequence for FLJ20287 (NM_017746.1,1543-1561).
gctctaggctaaatagtaa

SEQ ID NO: 361618 - DNA, 19 bp, Homo sapiens
  siRNA target sequence for FLJ20287 (NM_017746.1,1558-1576).
gtaagcaactgaacagatt

SEQ ID NO: 361619 - DNA, 19 bp, Homo sapiens
  siRNA target sequence for FLJ20287 (NM_017746.1,1582-1600).
gagtatcctggaggttaat

SEQ ID NO: 361620 - DNA, 19 bp, Homo sapiens
  siRNA target sequence for FLJ20287 (NM_017746.1,1588-1606).
cctggaggttaatgcaaat

SEQ ID NO: 361621 - DNA, 19 bp, Homo sapiens
  siRNA target sequence for FLJ20287 (NM_017746.1,1622-1640).
ggacacagagactcttatt

SEQ ID NO: 361622 - DNA, 19 bp, Homo sapiens
  siRNA target sequence for FLJ20287 (NM_017746.1,1643-1661).
ggcagtttatacattatat

SEQ ID NO: 361623 - DNA, 19 bp, Homo sapiens
  siRNA target sequence for FLJ20287 (NM_017746.1,1683-1701).
ccagttcggactttgttat

SEQ ID NO: 361624 - DNA, 19 bp, Homo sapiens
  siRNA target sequence for FLJ20287 (NM_017746.1,1684-1702).
cagttcggactttgttatt

SEQ ID NO: 361625 - DNA, 19 bp, Homo sapiens
  siRNA target sequence for FLJ20287 (NM_017746.1,1686-1704).
gttcggactttgttattga

SEQ ID NO: 361626 - DNA, 19 bp, Homo sapiens
  siRNA target sequence for FLJ20287 (NM_017746.1,1734-1752).
gaactgagatcttgtagat

SEQ ID NO: 361627 - DNA, 19 bp, Homo sapiens
  siRNA target sequence for FLJ20287 (NM_017746.1,1750-1768).
gattcagatatcgtagtaa

SEQ ID NO: 361628 - DNA, 19 bp, Homo sapiens
  siRNA target sequence for FLJ20287 (NM_017746.1,1756-1774).
gatatcgtagtaaagtgtt

SEQ ID NO: 361629 - DNA, 19 bp, Homo sapiens
  siRNA target sequence for FLJ20287 (NM_017746.1,1838-1856).
ctctacacagcttatcgat

SEQ ID NO: 361630 - DNA, 19 bp, Homo sapiens
  siRNA target sequence for FLJ20287 (NM_017746.1,1840-1858).
ctacacagcttatcgatat

SEQ ID NO: 361631 - DNA, 19 bp, Homo sapiens
  siRNA target sequence for FLJ20287 (NM_017746.1,1843-1861).
cacagcttatcgatatcat

SEQ ID NO: 361632 - DNA, 19 bp, Homo sapiens
  siRNA target sequence for FLJ20287 (NM_017746.1,1847-1865).
gcttatcgatatcattcat

SEQ ID NO: 361633 - DNA, 19 bp, Homo sapiens
  siRNA target sequence for FLJ20287 (NM_017746.1,1848-1866).
cttatcgatatcattcata

SEQ ID NO: 361634 - DNA, 19 bp, Homo sapiens
  siRNA target sequence for FLJ20287 (NM_017746.1,1870-1888).
ctgcagcacgagcaaataa

SEQ ID NO: 361635 - DNA, 19 bp, Homo sapiens
  siRNA target sequence for FLJ20287 (NM_017746.1,1881-1899).
gcaaataaagaattactaa

SEQ ID NO: 361636 - DNA, 19 bp, Homo sapiens
  siRNA target sequence for FLJ20287 (NM_017746.1,1911-1929).
gctactgccctccgaattt

SEQ ID NO: 361637 - DNA, 19 bp, Homo sapiens
  siRNA target sequence for FLJ20287 (NM_017746.1,1912-1930).
ctactgccctccgaattta

SEQ ID NO: 361638 - DNA, 19 bp, Homo sapiens
  siRNA target sequence for FLJ20287 (NM_017746.1,1915-1933).
ctgccctccgaatttatga

SEQ ID NO: 361639 - DNA, 19 bp, Homo sapiens
  siRNA target sequence for FLJ20287 (NM_017746.1,2008-2026).
ccagtctgccggctgattt

SEQ ID NO: 361640 - DNA, 19 bp, Homo sapiens
  siRNA target sequence for FLJ20287 (NM_017746.1,2011-2029).
gtctgccggctgatttgct

SEQ ID NO: 361641 - DNA, 19 bp, Homo sapiens
  siRNA target sequence for FLJ20287 (NM_017746.1,2013-2031).
ctgccggctgatttgcttt

SEQ ID NO: 361642 - DNA, 19 bp, Homo sapiens
  siRNA target sequence for FLJ20287 (NM_017746.1,2036-2054).
gttaagtcgttgctgtatt

SEQ ID NO: 361643 - DNA, 19 bp, Homo sapiens
  siRNA target sequence for FLJ20287 (NM_017746.1,2058-2076).
ggaagactcagttcaagtt

SEQ ID NO: 361644 - DNA, 19 bp, Homo sapiens
  siRNA target sequence for FLJ20287 (NM_017746.1,2074-2092).
gtttggctgccatgcttat

SEQ ID NO: 361645 - DNA, 19 bp, Homo sapiens
  siRNA target sequence for FLJ20287 (NM_017746.1,2100-2118).
ctgcacatgagatcatcat

SEQ ID NO: 361646 - DNA, 19 bp, Homo sapiens
  siRNA target sequence for FLJ20287 (NM_017746.1,2103-2121).
cacatgagatcatcatttt

SEQ ID NO: 361647 - DNA, 19 bp, Homo sapiens
  siRNA target sequence for FLJ20287 (NM_017746.1,2147-2165).
ctggttgatgagtgatgta

SEQ ID NO: 361648 - DNA, 19 bp, Homo sapiens
  siRNA target sequence for FLJ20287 (NM_017746.1,2166-2184).
gactatttcagcttcttat

SEQ ID NO: 361649 - DNA, 19 bp, Homo sapiens
  siRNA target sequence for FLJ20287 (NM_017746.1,2191-2209).
cacttacagggttttcgaa

SEQ ID NO: 361650 - DNA, 19 bp, Homo sapiens
  siRNA target sequence for FLJ20287 (NM_017746.1,2345-2363).
cagtttattggttattcct

SEQ ID NO: 361651 - DNA, 19 bp, Homo sapiens
  siRNA target sequence for FLJ20287 (NM_017746.1,2362-2380).
ctgcccgaagtcagaactt

SEQ ID NO: 361652 - DNA, 19 bp, Homo sapiens
  siRNA target sequence for FLJ20287 (NM_017746.1,2395-2413).
gtgccatcagtaagcattt

SEQ ID NO: 361653 - DNA, 19 bp, Homo sapiens
  siRNA target sequence for FLJ20287 (NM_017746.1,2398-2416).
ccatcagtaagcatttggt

SEQ ID NO: 361654 - DNA, 19 bp, Homo sapiens
  siRNA target sequence for FLJ20287 (NM_017746.1,2414-2432).
ggttgggttgactgtaatt

SEQ ID NO: 361655 - DNA, 19 bp, Homo sapiens
  siRNA target sequence for FLJ20287 (NM_017746.1,2477-2495).
cctggatcatacttgtgta

SEQ ID NO: 361656 - DNA, 19 bp, Homo sapiens
  siRNA target sequence for FLJ20287 (NM_017746.1,2571-2589).
ggggaagcagaacatctaa

SEQ ID NO: 361657 - DNA, 19 bp, Homo sapiens
  siRNA target sequence for FLJ20287 (NM_017746.1,2742-2760).
gcacccctcaggactcata

SEQ ID NO: 361658 - DNA, 19 bp, Homo sapiens
  siRNA target sequence for FLJ20287 (NM_017746.1,2743-2761).
cacccctcaggactcatat

SEQ ID NO: 361659 - DNA, 19 bp, Homo sapiens
  siRNA target sequence for FLJ20287 (NM_017746.1,2745-2763).
cccctcaggactcatatgt

SEQ ID NO: 361660 - DNA, 19 bp, Homo sapiens
  siRNA target sequence for FLJ20287 (NM_017746.1,2748-2766).
ctcaggactcatatgttga

SEQ ID NO: 361661 - DNA, 19 bp, Homo sapiens
  siRNA target sequence for FLJ20287 (NM_017746.1,2839-2857).
ggctcacagacttacatta

SEQ ID NO: 361662 - DNA, 19 bp, Homo sapiens
  siRNA target sequence for FLJ20291 (NM_017748.3,161-179).
gcggagacctgaatctgaa

SEQ ID NO: 361663 - DNA, 19 bp, Homo sapiens
  siRNA target sequence for FLJ20291 (NM_017748.3,524-542).
ccaattcccttcttgacat

SEQ ID NO: 361664 - DNA, 19 bp, Homo sapiens
  siRNA target sequence for FLJ20291 (NM_017748.3,597-615).
gaaaaaacgagaggtatta

SEQ ID NO: 361665 - DNA, 19 bp, Homo sapiens
  siRNA target sequence for FLJ20291 (NM_017748.3,726-744).
cagaagctcgagtagtgat

SEQ ID NO: 361666 - DNA, 19 bp, Homo sapiens
  siRNA target sequence for FLJ20291 (NM_017748.3,816-834).
gtccaaagtccctggatat

SEQ ID NO: 361667 - DNA, 19 bp, Homo sapiens
  siRNA target sequence for FLJ20291 (NM_017748.3,1361-1379).
gggtgaagcggaatatcta

SEQ ID NO: 361668 - DNA, 19 bp, Homo sapiens
  siRNA target sequence for FLJ20291 (NM_017748.3,1363-1381).
gtgaagcggaatatctact

SEQ ID NO: 361669 - DNA, 19 bp, Homo sapiens
  siRNA target sequence for FLJ20291 (NM_017748.3,1397-1415).
cggtagctctggagaagaa

SEQ ID NO: 361670 - DNA, 19 bp, Homo sapiens
  siRNA target sequence for FLJ20297 (NM_017751.1,632-650).
cctccacgtccgtacttca

SEQ ID NO: 361671 - DNA, 19 bp, Homo sapiens
  siRNA target sequence for FLJ20297 (NM_017751.1,646-664).
cttcagactgtgcctattt

SEQ ID NO: 361672 - DNA, 19 bp, Homo sapiens
  siRNA target sequence for FLJ20297 (NM_017751.1,892-910).
ctctgctccaggtttttgt

SEQ ID NO: 361673 - DNA, 19 bp, Homo sapiens
  siRNA target sequence for FLJ20297 (NM_017751.1,919-937).
ggcttcatcactattcctt

SEQ ID NO: 361674 - DNA, 19 bp, Homo sapiens
  siRNA target sequence for FLJ20297 (NM_017751.1,929-947).
ctattccttggagatgtat

SEQ ID NO: 361675 - DNA, 19 bp, Homo sapiens
  siRNA target sequence for FLJ20297 (NM_017751.1,2132-2150).
cttggtccgcacactcttt

SEQ ID NO: 361676 - DNA, 19 bp, Homo sapiens
  siRNA target sequence for FLJ20300 (NM_017753.1,286-304).
ctcaacgaagttattccat

SEQ ID NO: 361677 - DNA, 19 bp, Homo sapiens
  siRNA target sequence for FLJ20300 (NM_017753.1,301-319).
ccatcatcccgtgttttat

SEQ ID NO: 361678 - DNA, 19 bp, Homo sapiens
  siRNA target sequence for FLJ20300 (NM_017753.1,302-320).
catcatcccgtgttttata

SEQ ID NO: 361679 - DNA, 19 bp, Homo sapiens
  siRNA target sequence for FLJ20300 (NM_017753.1,308-326).
cccgtgttttatatttgtt

SEQ ID NO: 361680 - DNA, 19 bp, Homo sapiens
  siRNA target sequence for FLJ20300 (NM_017753.1,310-328).
cgtgttttatatttgttga

SEQ ID NO: 361681 - DNA, 19 bp, Homo sapiens
  siRNA target sequence for FLJ20300 (NM_017753.1,357-375).
cttgcctactacttcgaat

SEQ ID NO: 361682 - DNA, 19 bp, Homo sapiens
  siRNA target sequence for FLJ20300 (NM_017753.1,371-389).
cgaatgcactgacactttt

SEQ ID NO: 361683 - DNA, 19 bp, Homo sapiens
  siRNA target sequence for FLJ20300 (NM_017753.1,396-414).
catatccaaggattcttct

SEQ ID NO: 361684 - DNA, 19 bp, Homo sapiens
  siRNA target sequence for FLJ20300 (NM_017753.1,413-431).
ctgtcaggacggagactta

SEQ ID NO: 361685 - DNA, 19 bp, Homo sapiens
  siRNA target sequence for FLJ20300 (NM_017753.1,415-433).
gtcaggacggagacttaat

SEQ ID NO: 361686 - DNA, 19 bp, Homo sapiens
  siRNA target sequence for FLJ20300 (NM_017753.1,417-435).
caggacggagacttaatga

SEQ ID NO: 361687 - DNA, 19 bp, Homo sapiens
  siRNA target sequence for FLJ20300 (NM_017753.1,623-641).
cttacttcgaaggatcata

SEQ ID NO: 361688 - DNA, 19 bp, Homo sapiens
  siRNA target sequence for FLJ20300 (NM_017753.1,627-645).
cttcgaaggatcataagat

SEQ ID NO: 361689 - DNA, 19 bp, Homo sapiens
  siRNA target sequence for FLJ20300 (NM_017753.1,630-648).
cgaaggatcataagattca

SEQ ID NO: 361690 - DNA, 19 bp, Homo sapiens
  siRNA target sequence for FLJ20300 (NM_017753.1,647-665).
cacaggggtgtttgcattt

SEQ ID NO: 361691 - DNA, 19 bp, Homo sapiens
  siRNA target sequence for FLJ20300 (NM_017753.1,675-693).
gctactgacatttttgtaa

SEQ ID NO: 361692 - DNA, 19 bp, Homo sapiens
  siRNA target sequence for FLJ20300 (NM_017753.1,676-694).
ctactgacatttttgtaaa

SEQ ID NO: 361693 - DNA, 19 bp, Homo sapiens
  siRNA target sequence for FLJ20300 (NM_017753.1,715-733).
ggcacttaacgccatactt

SEQ ID NO: 361694 - DNA, 19 bp, Homo sapiens
  siRNA target sequence for FLJ20300 (NM_017753.1,877-895).
gcatttactccgccttata

SEQ ID NO: 361695 - DNA, 19 bp, Homo sapiens
  siRNA target sequence for FLJ20300 (NM_017753.1,878-896).
catttactccgccttatat

SEQ ID NO: 361696 - DNA, 19 bp, Homo sapiens
  siRNA target sequence for FLJ20300 (NM_017753.1,890-908).
cttatatgccacgatgtat

SEQ ID NO: 361697 - DNA, 19 bp, Homo sapiens
  siRNA target sequence for FLJ20300 (NM_017753.1,897-915).
gccacgatgtatattacaa

SEQ ID NO: 361698 - DNA, 19 bp, Homo sapiens
  siRNA target sequence for FLJ20300 (NM_017753.1,1080-1098).
ggaatgtgtgtggttcata

SEQ ID NO: 361699 - DNA, 19 bp, Homo sapiens
  siRNA target sequence for FLJ20300 (NM_017753.1,1087-1105).
gtgtggttcataactttaa

SEQ ID NO: 361700 - DNA, 19 bp, Homo sapiens
  siRNA target sequence for FLJ20300 (NM_017753.1,1166-1184).
ggctttcccaaggatagaa

SEQ ID NO: 361701 - DNA, 19 bp, Homo sapiens
  siRNA target sequence for FLJ20300 (NM_017753.1,1198-1216).
ccttaagtgcacagaatca

SEQ ID NO: 361702 - DNA, 19 bp, Homo sapiens
  siRNA target sequence for FLJ20300 (NM_017753.1,1221-1239).
gcgtccatgaccgaagtta

SEQ ID NO: 361703 - DNA, 19 bp, Homo sapiens
  siRNA target sequence for C6orf107 (NM_017754.2,267-285).
cacctgtcccggttcacta

SEQ ID NO: 361704 - DNA, 19 bp, Homo sapiens
  siRNA target sequence for C6orf107 (NM_017754.2,272-290).
gtcccggttcactaagaat

SEQ ID NO: 361705 - DNA, 19 bp, Homo sapiens
  siRNA target sequence for C6orf107 (NM_017754.2,274-292).
cccggttcactaagaatct

SEQ ID NO: 361706 - DNA, 19 bp, Homo sapiens
  siRNA target sequence for C6orf107 (NM_017754.2,275-293).
ccggttcactaagaatctt

SEQ ID NO: 361707 - DNA, 19 bp, Homo sapiens
  siRNA target sequence for C6orf107 (NM_017754.2,276-294).
cggttcactaagaatcttt

SEQ ID NO: 361708 - DNA, 19 bp, Homo sapiens
  siRNA target sequence for C6orf107 (NM_017754.2,657-675).
cacgcttcttttgaattgt

SEQ ID NO: 361709 - DNA, 19 bp, Homo sapiens
  siRNA target sequence for C6orf107 (NM_017754.2,677-695).
gcagctccagggctatagt

SEQ ID NO: 361710 - DNA, 19 bp, Homo sapiens
  siRNA target sequence for C6orf107 (NM_017754.2,749-767).
ctgccgaggagaggtttta

SEQ ID NO: 361711 - DNA, 19 bp, Homo sapiens
  siRNA target sequence for C6orf107 (NM_017754.2,849-867).
ccattgaggcttattacga

SEQ ID NO: 361712 - DNA, 19 bp, Homo sapiens
  siRNA target sequence for C6orf107 (NM_017754.2,905-923).
caaagattgcaatgtgata

SEQ ID NO: 361713 - DNA, 19 bp, Homo sapiens
  siRNA target sequence for C6orf107 (NM_017754.2,909-927).
gattgcaatgtgatatcct

SEQ ID NO: 361714 - DNA, 19 bp, Homo sapiens
  siRNA target sequence for C6orf107 (NM_017754.2,978-996).
cagctcaaggctatgatga

SEQ ID NO: 361715 - DNA, 19 bp, Homo sapiens
  siRNA target sequence for C6orf107 (NM_017754.2,1106-1124).
ctgggcccaggcatttggt

SEQ ID NO: 361716 - DNA, 19 bp, Homo sapiens
  siRNA target sequence for C6orf107 (NM_017754.2,1156-1174).
gccgcctcagccagtactt

SEQ ID NO: 361717 - DNA, 19 bp, Homo sapiens
  siRNA target sequence for C6orf107 (NM_017754.2,1165-1183).
gccagtactttgagaaatt

SEQ ID NO: 361718 - DNA, 19 bp, Homo sapiens
  siRNA target sequence for C6orf107 (NM_017754.2,1221-1239).
cgcctggacctgcacattt

SEQ ID NO: 361719 - DNA, 19 bp, Homo sapiens
  siRNA target sequence for C6orf107 (NM_017754.2,1223-1241).
cctggacctgcacatttgt

SEQ ID NO: 361720 - DNA, 19 bp, Homo sapiens
  siRNA target sequence for C6orf107 (NM_017754.2,1226-1244).
ggacctgcacatttgtgat

SEQ ID NO: 361721 - DNA, 19 bp, Homo sapiens
  siRNA target sequence for C6orf107 (NM_017754.2,1229-1247).
cctgcacatttgtgatgat

SEQ ID NO: 361722 - DNA, 19 bp, Homo sapiens
  siRNA target sequence for C6orf107 (NM_017754.2,1230-1248).
ctgcacatttgtgatgata

SEQ ID NO: 361723 - DNA, 19 bp, Homo sapiens
  siRNA target sequence for C6orf107 (NM_017754.2,1314-1332).
cgcaagatggcgtttgact

SEQ ID NO: 361724 - DNA, 19 bp, Homo sapiens
  siRNA target sequence for C6orf107 (NM_017754.2,1315-1333).
gcaagatggcgtttgacta

SEQ ID NO: 361725 - DNA, 19 bp, Homo sapiens
  siRNA target sequence for C6orf107 (NM_017754.2,1316-1334).
caagatggcgtttgactat

SEQ ID NO: 361726 - DNA, 19 bp, Homo sapiens
  siRNA target sequence for C6orf107 (NM_017754.2,1353-1371).
ggtgatagctgcaaacatt

SEQ ID NO: 361727 - DNA, 19 bp, Homo sapiens
  siRNA target sequence for C6orf107 (NM_017754.2,1672-1690).
ccgctggacagccaagtaa

SEQ ID NO: 361728 - DNA, 19 bp, Homo sapiens
  siRNA target sequence for C6orf107 (NM_017754.2,1673-1691).
cgctggacagccaagtaaa

SEQ ID NO: 361729 - DNA, 19 bp, Homo sapiens
  siRNA target sequence for C6orf107 (NM_017754.2,1711-1729).
cctgcagtcggaaacttca

SEQ ID NO: 361730 - DNA, 19 bp, Homo sapiens
  siRNA target sequence for C6orf107 (NM_017754.2,1750-1768).
ctgccattcatattgagtt

SEQ ID NO: 361731 - DNA, 19 bp, Homo sapiens
  siRNA target sequence for C6orf107 (NM_017754.2,1810-1828).
cttgtcctaatctctacat

SEQ ID NO: 361732 - DNA, 19 bp, Homo sapiens
  siRNA target sequence for C6orf107 (NM_017754.2,1823-1841).
ctacattcagttaaatggt

SEQ ID NO: 361733 - DNA, 19 bp, Homo sapiens
  siRNA target sequence for C6orf107 (NM_017754.2,1852-1870).
ctatggatcctgtcagttt

SEQ ID NO: 361734 - DNA, 19 bp, Homo sapiens
  siRNA target sequence for C6orf107 (NM_017754.2,1872-1890).
ctctggggaaacctctttt

SEQ ID NO: 361735 - DNA, 19 bp, Homo sapiens
  siRNA target sequence for C6orf107 (NM_017754.2,1883-1901).
cctcttttgcctggattta

SEQ ID NO: 361736 - DNA, 19 bp, Homo sapiens
  siRNA target sequence for C6orf107 (NM_017754.2,1917-1935).
cagttcaaagctatctaca

SEQ ID NO: 361737 - DNA, 19 bp, Homo sapiens
  siRNA target sequence for C6orf107 (NM_017754.2,1948-1966).
caagtcagaaagatgaaca

SEQ ID NO: 361738 - DNA, 19 bp, Homo sapiens
  siRNA target sequence for C6orf107 (NM_017754.2,1967-1985).
cttggacatccgactagat

SEQ ID NO: 361739 - DNA, 19 bp, Homo sapiens
  siRNA target sequence for C6orf107 (NM_017754.2,2094-2112).
cgtcatgctccacattgta

SEQ ID NO: 361740 - DNA, 19 bp, Homo sapiens
  siRNA target sequence for C6orf107 (NM_017754.2,2162-2180).
ctttcattccaattatgat

SEQ ID NO: 361741 - DNA, 19 bp, Homo sapiens
  siRNA target sequence for C6orf107 (NM_017754.2,2372-2390).
ccataccttgaattttgta

SEQ ID NO: 361742 - DNA, 19 bp, Homo sapiens
  siRNA target sequence for C6orf107 (NM_017754.2,2546-2564).
ccatccgcggtcaaagact

SEQ ID NO: 361743 - DNA, 19 bp, Homo sapiens
  siRNA target sequence for C6orf107 (NM_017754.2,2552-2570).
gcggtcaaagactgaacat

SEQ ID NO: 361744 - DNA, 19 bp, Homo sapiens
  siRNA target sequence for C6orf107 (NM_017754.2,2626-2644).
gtagtggtatggacaacaa

SEQ ID NO: 361745 - DNA, 19 bp, Homo sapiens
  siRNA target sequence for C6orf107 (NM_017754.2,2667-2685).
gatgtagcagatgttcata

SEQ ID NO: 361746 - DNA, 19 bp, Homo sapiens
  siRNA target sequence for C6orf107 (NM_017754.2,2795-2813).
ggatacagagtcaatgact

SEQ ID NO: 361747 - DNA, 19 bp, Homo sapiens
  siRNA target sequence for C6orf107 (NM_017754.2,2839-2857).
cttgcattggagttctctt

SEQ ID NO: 361748 - DNA, 19 bp, Homo sapiens
  siRNA target sequence for C6orf107 (NM_017754.2,2933-2951).
cactagcctcgtagattca

SEQ ID NO: 361749 - DNA, 19 bp, Homo sapiens
  siRNA target sequence for C6orf107 (NM_017754.2,2935-2953).
ctagcctcgtagattcaga

SEQ ID NO: 361750 - DNA, 19 bp, Homo sapiens
  siRNA target sequence for C6orf107 (NM_017754.2,2965-2983).
cagaggatcgggaactgaa

SEQ ID NO: 361751 - DNA, 19 bp, Homo sapiens
  siRNA target sequence for C6orf107 (NM_017754.2,3068-3086).
ggagaggccacatagcaat

SEQ ID NO: 361752 - DNA, 19 bp, Homo sapiens
  siRNA target sequence for C6orf107 (NM_017754.2,3156-3174).
ctacaggccaagaaactga

SEQ ID NO: 361753 - DNA, 19 bp, Homo sapiens
  siRNA target sequence for C6orf107 (NM_017754.2,3193-3211).
gctcaccagctgcattgaa

SEQ ID NO: 361754 - DNA, 19 bp, Homo sapiens
  siRNA target sequence for C6orf107 (NM_017754.2,3272-3290).
cattgagggagaattgtca

SEQ ID NO: 361755 - DNA, 19 bp, Homo sapiens
  siRNA target sequence for C6orf107 (NM_017754.2,3317-3335).
caccaaggaggctctacat

SEQ ID NO: 361756 - DNA, 19 bp, Homo sapiens
  siRNA target sequence for C6orf107 (NM_017754.2,3412-3430).
ccaccatgcacaagatgtt

SEQ ID NO: 361757 - DNA, 19 bp, Homo sapiens
  siRNA target sequence for C6orf107 (NM_017754.2,3501-3519).
gctgcacgactccgatttt

SEQ ID NO: 361758 - DNA, 19 bp, Homo sapiens
  siRNA target sequence for C6orf107 (NM_017754.2,3502-3520).
ctgcacgactccgattttt

SEQ ID NO: 361759 - DNA, 19 bp, Homo sapiens
  siRNA target sequence for C6orf107 (NM_017754.2,3504-3522).
gcacgactccgatttttct

SEQ ID NO: 361760 - DNA, 19 bp, Homo sapiens
  siRNA target sequence for C6orf107 (NM_017754.2,3527-3545).
gaagaggacggtatctcaa

SEQ ID NO: 361761 - DNA, 19 bp, Homo sapiens
  siRNA target sequence for C6orf107 (NM_017754.2,3535-3553).
cggtatctcaacagtcatt

SEQ ID NO: 361762 - DNA, 19 bp, Homo sapiens
  siRNA target sequence for C6orf107 (NM_017754.2,3536-3554).
ggtatctcaacagtcattt

SEQ ID NO: 361763 - DNA, 19 bp, Homo sapiens
  siRNA target sequence for C6orf107 (NM_017754.2,3555-3573).
gatggtgtctcattggata

SEQ ID NO: 361764 - DNA, 19 bp, Homo sapiens
  siRNA target sequence for C6orf107 (NM_017754.2,3581-3599).
ccctgaagaccggatttca

SEQ ID NO: 361765 - DNA, 19 bp, Homo sapiens
  siRNA target sequence for C6orf107 (NM_017754.2,3607-3625).
gtgatggcagtgatagctt

SEQ ID NO: 361766 - DNA, 19 bp, Homo sapiens
  siRNA target sequence for C6orf107 (NM_017754.2,3672-3690).
ggatctctttcaaatgtct

SEQ ID NO: 361767 - DNA, 19 bp, Homo sapiens
  siRNA target sequence for C6orf107 (NM_017754.2,3711-3729).
gggagccctcttgtgaata

SEQ ID NO: 361768 - DNA, 19 bp, Homo sapiens
  siRNA target sequence for C6orf107 (NM_017754.2,3712-3730).
ggagccctcttgtgaataa

SEQ ID NO: 361769 - DNA, 19 bp, Homo sapiens
  siRNA target sequence for C6orf107 (NM_017754.2,3713-3731).
gagccctcttgtgaataat

SEQ ID NO: 361770 - DNA, 19 bp, Homo sapiens
  siRNA target sequence for C6orf107 (NM_017754.2,3750-3768).
gcagccaacagttcagttt

SEQ ID NO: 361771 - DNA, 19 bp, Homo sapiens
  siRNA target sequence for C6orf107 (NM_017754.2,3821-3839).
ggtgaatgaggtgtctttt

SEQ ID NO: 361772 - DNA, 19 bp, Homo sapiens
  siRNA target sequence for C6orf107 (NM_017754.2,3944-3962).
gtgcccaggtacatgcttt

SEQ ID NO: 361773 - DNA, 19 bp, Homo sapiens
  siRNA target sequence for C6orf107 (NM_017754.2,4062-4080).
caaaatggcttcctacatt

SEQ ID NO: 361774 - DNA, 19 bp, Homo sapiens
  siRNA target sequence for C6orf107 (NM_017754.2,4337-4355).
caaaccatcagctgaagta

SEQ ID NO: 361775 - DNA, 19 bp, Homo sapiens
  siRNA target sequence for C6orf107 (NM_017754.2,4403-4421).
gcccacaggagaggttttt

SEQ ID NO: 361776 - DNA, 19 bp, Homo sapiens
  siRNA target sequence for C6orf107 (NM_017754.2,4405-4423).
ccacaggagaggtttttga

SEQ ID NO: 361777 - DNA, 19 bp, Homo sapiens
  siRNA target sequence for FLJ20303 (NM_017755.4,319-337).
gccacgcaaaagagattct

SEQ ID NO: 361778 - DNA, 19 bp, Homo sapiens
  siRNA target sequence for FLJ20303 (NM_017755.4,330-348).
gagattctccattgcttaa

SEQ ID NO: 361779 - DNA, 19 bp, Homo sapiens
  siRNA target sequence for FLJ20303 (NM_017755.4,380-398).
ggaggtggacggtcagaaa

SEQ ID NO: 361780 - DNA, 19 bp, Homo sapiens
  siRNA target sequence for FLJ20303 (NM_017755.4,389-407).
cggtcagaaagttgaagtt

SEQ ID NO: 361781 - DNA, 19 bp, Homo sapiens
  siRNA target sequence for FLJ20303 (NM_017755.4,449-467).
cacaaatttaagtcgaaaa

SEQ ID NO: 361782 - DNA, 19 bp, Homo sapiens
  siRNA target sequence for FLJ20303 (NM_017755.4,460-478).
gtcgaaaaatcttgagaaa

SEQ ID NO: 361783 - DNA, 19 bp, Homo sapiens
  siRNA target sequence for FLJ20303 (NM_017755.4,481-499).
cgccacacttggaaaagtt

SEQ ID NO: 361784 - DNA, 19 bp, Homo sapiens
  siRNA target sequence for FLJ20303 (NM_017755.4,581-599).
caacgtgcggcctcatcat

SEQ ID NO: 361785 - DNA, 19 bp, Homo sapiens
  siRNA target sequence for FLJ20303 (NM_017755.4,585-603).
gtgcggcctcatcataaga

SEQ ID NO: 361786 - DNA, 19 bp, Homo sapiens
  siRNA target sequence for FLJ20303 (NM_017755.4,588-606).
cggcctcatcataagatct

SEQ ID NO: 361787 - DNA, 19 bp, Homo sapiens
  siRNA target sequence for FLJ20303 (NM_017755.4,589-607).
ggcctcatcataagatctt

SEQ ID NO: 361788 - DNA, 19 bp, Homo sapiens
  siRNA target sequence for FLJ20303 (NM_017755.4,590-608).
gcctcatcataagatctta

SEQ ID NO: 361789 - DNA, 19 bp, Homo sapiens
  siRNA target sequence for FLJ20303 (NM_017755.4,597-615).
cataagatcttagatatgt

SEQ ID NO: 361790 - DNA, 19 bp, Homo sapiens
  siRNA target sequence for FLJ20303 (NM_017755.4,635-653).
gaccacacagttaattgaa

SEQ ID NO: 361791 - DNA, 19 bp, Homo sapiens
  siRNA target sequence for FLJ20303 (NM_017755.4,640-658).
cacagttaattgaaatgct

SEQ ID NO: 361792 - DNA, 19 bp, Homo sapiens
  siRNA target sequence for FLJ20303 (NM_017755.4,656-674).
gctacatgccgacatgaat

SEQ ID NO: 361793 - DNA, 19 bp, Homo sapiens
  siRNA target sequence for FLJ20303 (NM_017755.4,703-721).
cgaatgatgtggacaacaa

SEQ ID NO: 361794 - DNA, 19 bp, Homo sapiens
  siRNA target sequence for FLJ20303 (NM_017755.4,842-860).
cctcttctatgatcgaatt

SEQ ID NO: 361795 - DNA, 19 bp, Homo sapiens
  siRNA target sequence for FLJ20303 (NM_017755.4,843-861).
ctcttctatgatcgaattt

SEQ ID NO: 361796 - DNA, 19 bp, Homo sapiens
  siRNA target sequence for FLJ20303 (NM_017755.4,845-863).
cttctatgatcgaatttta

SEQ ID NO: 361797 - DNA, 19 bp, Homo sapiens
  siRNA target sequence for FLJ20303 (NM_017755.4,883-901).
gagacggcactatgagaaa

SEQ ID NO: 361798 - DNA, 19 bp, Homo sapiens
  siRNA target sequence for FLJ20303 (NM_017755.4,885-903).
gacggcactatgagaaaaa

SEQ ID NO: 361799 - DNA, 19 bp, Homo sapiens
  siRNA target sequence for FLJ20303 (NM_017755.4,925-943).
ggaccaccttaaatagctt

SEQ ID NO: 361800 - DNA, 19 bp, Homo sapiens
  siRNA target sequence for FLJ20303 (NM_017755.4,1016-1034).
gtattccacgtgttcacta

SEQ ID NO: 361801 - DNA, 19 bp, Homo sapiens
  siRNA target sequence for FLJ20303 (NM_017755.4,1027-1045).
gttcactaaaccctattga

SEQ ID NO: 361802 - DNA, 19 bp, Homo sapiens
  siRNA target sequence for FLJ20303 (NM_017755.4,1097-1115).
gcttgctgatgtgtctaat

SEQ ID NO: 361803 - DNA, 19 bp, Homo sapiens
  siRNA target sequence for FLJ20303 (NM_017755.4,1102-1120).
ctgatgtgtctaatgaact

SEQ ID NO: 361804 - DNA, 19 bp, Homo sapiens
  siRNA target sequence for FLJ20303 (NM_017755.4,1246-1264).
ctccgaaggacccagaaaa

SEQ ID NO: 361805 - DNA, 19 bp, Homo sapiens
  siRNA target sequence for FLJ20303 (NM_017755.4,1283-1301).
ggagcgatgccttaggata

SEQ ID NO: 361806 - DNA, 19 bp, Homo sapiens
  siRNA target sequence for FLJ20303 (NM_017755.4,1284-1302).
gagcgatgccttaggatat

SEQ ID NO: 361807 - DNA, 19 bp, Homo sapiens
  siRNA target sequence for FLJ20303 (NM_017755.4,1286-1304).
gcgatgccttaggatatta

SEQ ID NO: 361808 - DNA, 19 bp, Homo sapiens
  siRNA target sequence for FLJ20303 (NM_017755.4,1297-1315).
ggatattaccccatcatca

SEQ ID NO: 361809 - DNA, 19 bp, Homo sapiens
  siRNA target sequence for FLJ20303 (NM_017755.4,1335-1353).
gtggcagtattggtgaaaa

SEQ ID NO: 361810 - DNA, 19 bp, Homo sapiens
  siRNA target sequence for FLJ20303 (NM_017755.4,1338-1356).
gcagtattggtgaaaaaat

SEQ ID NO: 361811 - DNA, 19 bp, Homo sapiens
  siRNA target sequence for FLJ20303 (NM_017755.4,1357-1375).
cttcaatgccgtggaataa

SEQ ID NO: 361812 - DNA, 19 bp, Homo sapiens
  siRNA target sequence for FLJ20303 (NM_017755.4,1476-1494).
ctggaaagtccgtcattca

SEQ ID NO: 361813 - DNA, 19 bp, Homo sapiens
  siRNA target sequence for FLJ20303 (NM_017755.4,1478-1496).
ggaaagtccgtcattcaca

SEQ ID NO: 361814 - DNA, 19 bp, Homo sapiens
  siRNA target sequence for FLJ20303 (NM_017755.4,1519-1537).
ctcatgcaactgaggattt

SEQ ID NO: 361815 - DNA, 19 bp, Homo sapiens
  siRNA target sequence for FLJ20303 (NM_017755.4,1539-1557).
gagaataatggcagtaaga

SEQ ID NO: 361816 - DNA, 19 bp, Homo sapiens
  siRNA target sequence for FLJ20303 (NM_017755.4,1690-1708).
cattcccaaggatgaattt

SEQ ID NO: 361817 - DNA, 19 bp, Homo sapiens
  siRNA target sequence for FLJ20303 (NM_017755.4,1767-1785).
cggaatgtgctgctgaata

SEQ ID NO: 361818 - DNA, 19 bp, Homo sapiens
  siRNA target sequence for FLJ20303 (NM_017755.4,1768-1786).
ggaatgtgctgctgaataa

SEQ ID NO: 361819 - DNA, 19 bp, Homo sapiens
  siRNA target sequence for FLJ20303 (NM_017755.4,1872-1890).
ctggcacaggagggaatat

SEQ ID NO: 361820 - DNA, 19 bp, Homo sapiens
  siRNA target sequence for FLJ20303 (NM_017755.4,1918-1936).
gaattattactgtatcaat

SEQ ID NO: 361821 - DNA, 19 bp, Homo sapiens
  siRNA target sequence for FLJ20303 (NM_017755.4,1938-1956).
gaagatgttaagatactgt

SEQ ID NO: 361822 - DNA, 19 bp, Homo sapiens
  siRNA target sequence for FLJ20303 (NM_017755.4,2029-2047).
gaagcatcgtgctgaagta

SEQ ID NO: 361823 - DNA, 19 bp, Homo sapiens
  siRNA target sequence for FLJ20303 (NM_017755.4,2042-2060).
gaagtatgaaccagattct

SEQ ID NO: 361824 - DNA, 19 bp, Homo sapiens
  siRNA target sequence for FLJ20303 (NM_017755.4,2109-2127).
ggaaaggcctccattcgaa

SEQ ID NO: 361825 - DNA, 19 bp, Homo sapiens
  siRNA target sequence for FLJ20303 (NM_017755.4,2114-2132).
ggcctccattcgaactttt

SEQ ID NO: 361826 - DNA, 19 bp, Homo sapiens
  siRNA target sequence for FLJ20303 (NM_017755.4,2208-2226).
gttatcctcacaaatgaga

SEQ ID NO: 361827 - DNA, 19 bp, Homo sapiens
  siRNA target sequence for FLJ20303 (NM_017755.4,2237-2255).
caccggacagccagacaat

SEQ ID NO: 361828 - DNA, 19 bp, Homo sapiens
  siRNA target sequence for ZNF407 (NM_017757.1,156-174).
gtggtagcaccaaagatga

SEQ ID NO: 361829 - DNA, 19 bp, Homo sapiens
  siRNA target sequence for ZNF407 (NM_017757.1,204-222).
gagggagacctaaaggtaa

SEQ ID NO: 361830 - DNA, 19 bp, Homo sapiens
  siRNA target sequence for ZNF407 (NM_017757.1,257-275).
gcctctagtattacaaact

SEQ ID NO: 361831 - DNA, 19 bp, Homo sapiens
  siRNA target sequence for ZNF407 (NM_017757.1,258-276).
cctctagtattacaaactt

SEQ ID NO: 361832 - DNA, 19 bp, Homo sapiens
  siRNA target sequence for ZNF407 (NM_017757.1,301-319).
cagtcaccagtatagttat

SEQ ID NO: 361833 - DNA, 19 bp, Homo sapiens
  siRNA target sequence for ZNF407 (NM_017757.1,310-328).
gtatagttatttatgcaaa

SEQ ID NO: 361834 - DNA, 19 bp, Homo sapiens
  siRNA target sequence for ZNF407 (NM_017757.1,345-363).
ctgtaactaagggagatat

SEQ ID NO: 361835 - DNA, 19 bp, Homo sapiens
  siRNA target sequence for ZNF407 (NM_017757.1,462-480).
gccttgaagctggtaaaaa

SEQ ID NO: 361836 - DNA, 19 bp, Homo sapiens
  siRNA target sequence for ZNF407 (NM_017757.1,507-525).
cagatgaacatgctaacaa

SEQ ID NO: 361837 - DNA, 19 bp, Homo sapiens
  siRNA target sequence for ZNF407 (NM_017757.1,539-557).
cccacctccgttttagaga

SEQ ID NO: 361838 - DNA, 19 bp, Homo sapiens
  siRNA target sequence for ZNF407 (NM_017757.1,540-558).
ccacctccgttttagagaa

SEQ ID NO: 361839 - DNA, 19 bp, Homo sapiens
  siRNA target sequence for ZNF407 (NM_017757.1,559-577).
gccagatcgtggaaactca

SEQ ID NO: 361840 - DNA, 19 bp, Homo sapiens
  siRNA target sequence for ZNF407 (NM_017757.1,574-592).
ctcaattgaagctgaagtt

SEQ ID NO: 361841 - DNA, 19 bp, Homo sapiens
  siRNA target sequence for ZNF407 (NM_017757.1,576-594).
caattgaagctgaagttga

SEQ ID NO: 361842 - DNA, 19 bp, Homo sapiens
  siRNA target sequence for ZNF407 (NM_017757.1,609-627).
ctctagatggagaagttaa

SEQ ID NO: 361843 - DNA, 19 bp, Homo sapiens
  siRNA target sequence for ZNF407 (NM_017757.1,700-718).
ctcccagagagatgttaca

SEQ ID NO: 361844 - DNA, 19 bp, Homo sapiens
  siRNA target sequence for ZNF407 (NM_017757.1,721-739).
cacaggtgagaataagtgt

SEQ ID NO: 361845 - DNA, 19 bp, Homo sapiens
  siRNA target sequence for ZNF407 (NM_017757.1,784-802).
gcatgtaaaacggaaacat

SEQ ID NO: 361846 - DNA, 19 bp, Homo sapiens
  siRNA target sequence for ZNF407 (NM_017757.1,788-806).
gtaaaacggaaacatacaa

SEQ ID NO: 361847 - DNA, 19 bp, Homo sapiens
  siRNA target sequence for ZNF407 (NM_017757.1,794-812).
cggaaacatacaaaagagt

SEQ ID NO: 361848 - DNA, 19 bp, Homo sapiens
  siRNA target sequence for ZNF407 (NM_017757.1,796-814).
gaaacatacaaaagagttt

SEQ ID NO: 361849 - DNA, 19 bp, Homo sapiens
  siRNA target sequence for ZNF407 (NM_017757.1,825-843).
gcatggcatgcgattacta

SEQ ID NO: 361850 - DNA, 19 bp, Homo sapiens
  siRNA target sequence for ZNF407 (NM_017757.1,949-967).
catgtccaaaaacatcatt

SEQ ID NO: 361851 - DNA, 19 bp, Homo sapiens
  siRNA target sequence for ZNF407 (NM_017757.1,1052-1070).
gctgcagattgctctattt

SEQ ID NO: 361852 - DNA, 19 bp, Homo sapiens
  siRNA target sequence for ZNF407 (NM_017757.1,1113-1131).
ctgctgactctgtagaagt

SEQ ID NO: 361853 - DNA, 19 bp, Homo sapiens
  siRNA target sequence for ZNF407 (NM_017757.1,1192-1210).
ggctcctgtcaaggataaa

SEQ ID NO: 361854 - DNA, 19 bp, Homo sapiens
  siRNA target sequence for ZNF407 (NM_017757.1,1238-1256).
cttactatgtcctcaaact

SEQ ID NO: 361855 - DNA, 19 bp, Homo sapiens
  siRNA target sequence for ZNF407 (NM_017757.1,1330-1348).
ccatgagatatcgaatgat

SEQ ID NO: 361856 - DNA, 19 bp, Homo sapiens
  siRNA target sequence for ZNF407 (NM_017757.1,1475-1493).
ctcgttgtgacaagaataa

SEQ ID NO: 361857 - DNA, 19 bp, Homo sapiens
  siRNA target sequence for ZNF407 (NM_017757.1,1584-1602).
ccgttctggggaataagga

SEQ ID NO: 361858 - DNA, 19 bp, Homo sapiens
  siRNA target sequence for ZNF407 (NM_017757.1,1649-1667).
gatggcccagcttctgata

SEQ ID NO: 361859 - DNA, 19 bp, Homo sapiens
  siRNA target sequence for ZNF407 (NM_017757.1,1664-1682).
gatagcacagttgaaagta

SEQ ID NO: 361860 - DNA, 19 bp, Homo sapiens
  siRNA target sequence for ZNF407 (NM_017757.1,1745-1763).
cgatttgactcctccataa

SEQ ID NO: 361861 - DNA, 19 bp, Homo sapiens
  siRNA target sequence for ZNF407 (NM_017757.1,1746-1764).
gatttgactcctccataat

SEQ ID NO: 361862 - DNA, 19 bp, Homo sapiens
  siRNA target sequence for ZNF407 (NM_017757.1,1751-1769).
gactcctccataataagaa

SEQ ID NO: 361863 - DNA, 19 bp, Homo sapiens
  siRNA target sequence for ZNF407 (NM_017757.1,1827-1845).
cgggagtgagaattagtga

SEQ ID NO: 361864 - DNA, 19 bp, Homo sapiens
  siRNA target sequence for ZNF407 (NM_017757.1,1861-1879).
ctgtgctcaaggtgtgaaa

SEQ ID NO: 361865 - DNA, 19 bp, Homo sapiens
  siRNA target sequence for ZNF407 (NM_017757.1,1863-1881).
gtgctcaaggtgtgaaaaa

SEQ ID NO: 361866 - DNA, 19 bp, Homo sapiens
  siRNA target sequence for ZNF407 (NM_017757.1,1962-1980).
gtggactgaatgttcacat

SEQ ID NO: 361867 - DNA, 19 bp, Homo sapiens
  siRNA target sequence for ZNF407 (NM_017757.1,2009-2027).
cacttccattgtttactct

SEQ ID NO: 361868 - DNA, 19 bp, Homo sapiens
  siRNA target sequence for ZNF407 (NM_017757.1,2026-2044).
ctgtggaaagtcgttctat

SEQ ID NO: 361869 - DNA, 19 bp, Homo sapiens
  siRNA target sequence for ZNF407 (NM_017757.1,2037-2055).
cgttctataccgaaagcaa

SEQ ID NO: 361870 - DNA, 19 bp, Homo sapiens
  siRNA target sequence for ZNF407 (NM_017757.1,2130-2148).
gggccacctttaaatgtgt

SEQ ID NO: 361871 - DNA, 19 bp, Homo sapiens
  siRNA target sequence for ZNF407 (NM_017757.1,2168-2186).
gattctgaacagaatttat

SEQ ID NO: 361872 - DNA, 19 bp, Homo sapiens
  siRNA target sequence for ZNF407 (NM_017757.1,2202-2220).
gacagcatgaggaattgct

SEQ ID NO: 361873 - DNA, 19 bp, Homo sapiens
  siRNA target sequence for ZNF407 (NM_017757.1,2221-2239).
gcgggaggtgaataagtat

SEQ ID NO: 361874 - DNA, 19 bp, Homo sapiens
  siRNA target sequence for ZNF407 (NM_017757.1,2287-2305).
gggaaacgtctgcaagtat

SEQ ID NO: 361875 - DNA, 19 bp, Homo sapiens
  siRNA target sequence for ZNF407 (NM_017757.1,2288-2306).
ggaaacgtctgcaagtatt

SEQ ID NO: 361876 - DNA, 19 bp, Homo sapiens
  siRNA target sequence for ZNF407 (NM_017757.1,2367-2385).
caggatcaaaaccattcaa

SEQ ID NO: 361877 - DNA, 19 bp, Homo sapiens
  siRNA target sequence for ZNF407 (NM_017757.1,2453-2471).
gggatgagggaatacaagt

SEQ ID NO: 361878 - DNA, 19 bp, Homo sapiens
  siRNA target sequence for ZNF407 (NM_017757.1,2503-2521).
gaagcacttaaatactcat

SEQ ID NO: 361879 - DNA, 19 bp, Homo sapiens
  siRNA target sequence for ZNF407 (NM_017757.1,2506-2524).
gcacttaaatactcatcta

SEQ ID NO: 361880 - DNA, 19 bp, Homo sapiens
  siRNA target sequence for ZNF407 (NM_017757.1,2509-2527).
cttaaatactcatctacta

SEQ ID NO: 361881 - DNA, 19 bp, Homo sapiens
  siRNA target sequence for ZNF407 (NM_017757.1,2572-2590).
ccacttatgtgatagaagt

SEQ ID NO: 361882 - DNA, 19 bp, Homo sapiens
  siRNA target sequence for ZNF407 (NM_017757.1,2663-2681).
cccacgtgccattactcat

SEQ ID NO: 361883 - DNA, 19 bp, Homo sapiens
  siRNA target sequence for ZNF407 (NM_017757.1,2827-2845).
gtgcgatgagtgtaacttt

SEQ ID NO: 361884 - DNA, 19 bp, Homo sapiens
  siRNA target sequence for ZNF407 (NM_017757.1,2984-3002).
gaaggagtcaagatgtaca

SEQ ID NO: 361885 - DNA, 19 bp, Homo sapiens
  siRNA target sequence for ZNF407 (NM_017757.1,3041-3059).
gagttccggaaccatttga

SEQ ID NO: 361886 - DNA, 19 bp, Homo sapiens
  siRNA target sequence for ZNF407 (NM_017757.1,3065-3083).
cagcatcctgacatcgaaa

SEQ ID NO: 361887 - DNA, 19 bp, Homo sapiens
  siRNA target sequence for ZNF407 (NM_017757.1,3108-3126).
ctggtaagggacagaaact

SEQ ID NO: 361888 - DNA, 19 bp, Homo sapiens
  siRNA target sequence for ZNF407 (NM_017757.1,3110-3128).
ggtaagggacagaaactgt

SEQ ID NO: 361889 - DNA, 19 bp, Homo sapiens
  siRNA target sequence for FLJ20308 (NM_017758.2,320-338).
gacgtcccgggacaactat

SEQ ID NO: 361890 - DNA, 19 bp, Homo sapiens
  siRNA target sequence for FLJ20308 (NM_017758.2,322-340).
cgtcccgggacaactataa

SEQ ID NO: 361891 - DNA, 19 bp, Homo sapiens
  siRNA target sequence for FLJ20308 (NM_017758.2,610-628).
ctgagaagggcctgtacaa

SEQ ID NO: 361892 - DNA, 19 bp, Homo sapiens
  siRNA target sequence for FLJ20308 (NM_017758.2,649-667).
ccccactgcgcaacaagta

SEQ ID NO: 361893 - DNA, 19 bp, Homo sapiens
  siRNA target sequence for FLJ20308 (NM_017758.2,651-669).
ccactgcgcaacaagtact

SEQ ID NO: 361894 - DNA, 19 bp, Homo sapiens
  siRNA target sequence for FLJ20308 (NM_017758.2,652-670).
cactgcgcaacaagtactt

SEQ ID NO: 361895 - DNA, 19 bp, Homo sapiens
  siRNA target sequence for FLJ20308 (NM_017758.2,1028-1046).
gactgtgctcagtggatat

SEQ ID NO: 361896 - DNA, 19 bp, Homo sapiens
  siRNA target sequence for FLJ20308 (NM_017758.2,1131-1149).
gatgcaccccggttggaaa

SEQ ID NO: 361897 - DNA, 19 bp, Homo sapiens
  siRNA target sequence for FLJ20308 (NM_017758.2,1197-1215).
cgcctgtcaggaaacaaca

SEQ ID NO: 361898 - DNA, 19 bp, Homo sapiens
  siRNA target sequence for FLJ20308 (NM_017758.2,1427-1445).
gaactctggctcatcctta

SEQ ID NO: 361899 - DNA, 19 bp, Homo sapiens
  siRNA target sequence for FLJ20308 (NM_017758.2,1446-1464).
cgtagttgcccctcctttt

SEQ ID NO: 361900 - DNA, 19 bp, Homo sapiens
  siRNA target sequence for FLJ20308 (NM_017758.2,1583-1601).
ccaggacctaggttctcat

SEQ ID NO: 361901 - DNA, 19 bp, Homo sapiens
  siRNA target sequence for FLJ20308 (NM_017758.2,1594-1612).
gttctcatattcttggtat

SEQ ID NO: 361902 - DNA, 19 bp, Homo sapiens
  siRNA target sequence for FLJ20309 (NM_017759.2,500-518).
ggctacgccttctgtatca

SEQ ID NO: 361903 - DNA, 19 bp, Homo sapiens
  siRNA target sequence for FLJ20309 (NM_017759.2,543-561).
cccccttcaagcaatgtga

SEQ ID NO: 361904 - DNA, 19 bp, Homo sapiens
  siRNA target sequence for FLJ20309 (NM_017759.2,545-563).
cccttcaagcaatgtgaat

SEQ ID NO: 361905 - DNA, 19 bp, Homo sapiens
  siRNA target sequence for FLJ20309 (NM_017759.2,547-565).
cttcaagcaatgtgaatat

SEQ ID NO: 361906 - DNA, 19 bp, Homo sapiens
  siRNA target sequence for FLJ20309 (NM_017759.2,560-578).
gaatatgtggccaagtata

SEQ ID NO: 361907 - DNA, 19 bp, Homo sapiens
  siRNA target sequence for FLJ20309 (NM_017759.2,654-672).
gctttatcccgaaaaaaga

SEQ ID NO: 361908 - DNA, 19 bp, Homo sapiens
  siRNA target sequence for FLJ20309 (NM_017759.2,774-792).
ccaacggactggatggaat

SEQ ID NO: 361909 - DNA, 19 bp, Homo sapiens
  siRNA target sequence for FLJ20309 (NM_017759.2,893-911).
ggggcaactgtgagaaaga

SEQ ID NO: 361910 - DNA, 19 bp, Homo sapiens
  siRNA target sequence for FLJ20309 (NM_017759.2,1042-1060).
gtcacctttatctacttct

SEQ ID NO: 361911 - DNA, 19 bp, Homo sapiens
  siRNA target sequence for FLJ20309 (NM_017759.2,1278-1296).
ctccacacttctcatgtat

SEQ ID NO: 361912 - DNA, 19 bp, Homo sapiens
  siRNA target sequence for FLJ20309 (NM_017759.2,1280-1298).
ccacacttctcatgtataa

SEQ ID NO: 361913 - DNA, 19 bp, Homo sapiens
  siRNA target sequence for FLJ20309 (NM_017759.2,1342-1360).
gttggacactgatctgttt

SEQ ID NO: 361914 - DNA, 19 bp, Homo sapiens
  siRNA target sequence for FLJ20309 (NM_017759.2,1450-1468).
ccgggaaaccctcagatat

SEQ ID NO: 361915 - DNA, 19 bp, Homo sapiens
  siRNA target sequence for FLJ20309 (NM_017759.2,1458-1476).
ccctcagatatcaaagaca

SEQ ID NO: 361916 - DNA, 19 bp, Homo sapiens
  siRNA target sequence for FLJ20309 (NM_017759.2,1575-1593).
gggcagaatctcgtcaaaa

SEQ ID NO: 361917 - DNA, 19 bp, Homo sapiens
  siRNA target sequence for FLJ20309 (NM_017759.2,1577-1595).
gcagaatctcgtcaaaaga

SEQ ID NO: 361918 - DNA, 19 bp, Homo sapiens
  siRNA target sequence for FLJ20309 (NM_017759.2,1594-1612).
gaaatgccggcatacgttt

SEQ ID NO: 361919 - DNA, 19 bp, Homo sapiens
  siRNA target sequence for FLJ20309 (NM_017759.2,1599-1617).
gccggcatacgtttaggaa

SEQ ID NO: 361920 - DNA, 19 bp, Homo sapiens
  siRNA target sequence for FLJ20309 (NM_017759.2,1600-1618).
ccggcatacgtttaggaaa

SEQ ID NO: 361921 - DNA, 19 bp, Homo sapiens
  siRNA target sequence for FLJ20309 (NM_017759.2,1649-1667).
gaatgcactggtcagttaa

SEQ ID NO: 361922 - DNA, 19 bp, Homo sapiens
  siRNA target sequence for FLJ20309 (NM_017759.2,1653-1671).
gcactggtcagttaataca

SEQ ID NO: 361923 - DNA, 19 bp, Homo sapiens
  siRNA target sequence for FLJ20309 (NM_017759.2,1764-1782).
gtgaacagtgcgctaacaa

SEQ ID NO: 361924 - DNA, 19 bp, Homo sapiens
  siRNA target sequence for FLJ20309 (NM_017759.2,1790-1808).
ccattcaccagacattgtt

SEQ ID NO: 361925 - DNA, 19 bp, Homo sapiens
  siRNA target sequence for FLJ20309 (NM_017759.2,1791-1809).
cattcaccagacattgttt

SEQ ID NO: 361926 - DNA, 19 bp, Homo sapiens
  siRNA target sequence for FLJ20309 (NM_017759.2,1800-1818).
gacattgtttccaacatat

SEQ ID NO: 361927 - DNA, 19 bp, Homo sapiens
  siRNA target sequence for FLJ20309 (NM_017759.2,1884-1902).
gctctgtgccagtttttga

SEQ ID NO: 361928 - DNA, 19 bp, Homo sapiens
  siRNA target sequence for FLJ20309 (NM_017759.2,1893-1911).
cagtttttgacattacaca

SEQ ID NO: 361929 - DNA, 19 bp, Homo sapiens
  siRNA target sequence for FLJ20309 (NM_017759.2,1937-1955).
gccaaaaaaatggataatt

SEQ ID NO: 361930 - DNA, 19 bp, Homo sapiens
  siRNA target sequence for FLJ20309 (NM_017759.2,1965-1983).
gagataactcccgtaaagt

SEQ ID NO: 361931 - DNA, 19 bp, Homo sapiens
  siRNA target sequence for FLJ20309 (NM_017759.2,2023-2041).
gcctcctgcactaaccaaa

SEQ ID NO: 361932 - DNA, 19 bp, Homo sapiens
  siRNA target sequence for FLJ20309 (NM_017759.2,2028-2046).
ctgcactaaccaaaaaaca

SEQ ID NO: 361933 - DNA, 19 bp, Homo sapiens
  siRNA target sequence for FLJ20309 (NM_017759.2,2286-2304).
ggctacctgatgacttaca

SEQ ID NO: 361934 - DNA, 19 bp, Homo sapiens
  siRNA target sequence for FLJ20309 (NM_017759.2,2377-2395).
ggccttgcaggctgtaact

SEQ ID NO: 361935 - DNA, 19 bp, Homo sapiens
  siRNA target sequence for FLJ20309 (NM_017759.2,2378-2396).
gccttgcaggctgtaactt

SEQ ID NO: 361936 - DNA, 19 bp, Homo sapiens
  siRNA target sequence for FLJ20309 (NM_017759.2,2380-2398).
cttgcaggctgtaacttct

SEQ ID NO: 361937 - DNA, 19 bp, Homo sapiens
  siRNA target sequence for FLJ20309 (NM_017759.2,2401-2419).
cgagtgcctgagtaccatt

SEQ ID NO: 361938 - DNA, 19 bp, Homo sapiens
  siRNA target sequence for FLJ20309 (NM_017759.2,2452-2470).
ccaggagttgtcagataga

SEQ ID NO: 361939 - DNA, 19 bp, Homo sapiens
  siRNA target sequence for FLJ20309 (NM_017759.2,2458-2476).
gttgtcagatagaggaata

SEQ ID NO: 361940 - DNA, 19 bp, Homo sapiens
  siRNA target sequence for FLJ20309 (NM_017759.2,2502-2520).
cttcaggaatacaatcctt

SEQ ID NO: 361941 - DNA, 19 bp, Homo sapiens
  siRNA target sequence for FLJ20309 (NM_017759.2,2542-2560).
cctaggggagctattgaat

SEQ ID NO: 361942 - DNA, 19 bp, Homo sapiens
  siRNA target sequence for FLJ20309 (NM_017759.2,2561-2579).
gggcgtatagtacatgata

SEQ ID NO: 361943 - DNA, 19 bp, Homo sapiens
  siRNA target sequence for FLJ20309 (NM_017759.2,2615-2633).
cgttctgctaccttgtcaa

SEQ ID NO: 361944 - DNA, 19 bp, Homo sapiens
  siRNA target sequence for FLJ20309 (NM_017759.2,2616-2634).
gttctgctaccttgtcaaa

SEQ ID NO: 361945 - DNA, 19 bp, Homo sapiens
  siRNA target sequence for FLJ20309 (NM_017759.2,2684-2702).
gccaacgttggccttactt

SEQ ID NO: 361946 - DNA, 19 bp, Homo sapiens
  siRNA target sequence for FLJ20309 (NM_017759.2,2686-2704).
caacgttggccttacttct

SEQ ID NO: 361947 - DNA, 19 bp, Homo sapiens
  siRNA target sequence for FLJ20309 (NM_017759.2,2743-2761).
cttcccaggacagtttcat

SEQ ID NO: 361948 - DNA, 19 bp, Homo sapiens
  siRNA target sequence for FLJ20309 (NM_017759.2,2916-2934).
ctccctacagtgaccatat

SEQ ID NO: 361949 - DNA, 19 bp, Homo sapiens
  siRNA target sequence for FLJ20309 (NM_017759.2,2952-2970).
catcgtactctggtgataa

SEQ ID NO: 361950 - DNA, 19 bp, Homo sapiens
  siRNA target sequence for FLJ20311 (NM_017760.4,174-192).
gcaatttgttcaacttgat

SEQ ID NO: 361951 - DNA, 19 bp, Homo sapiens
  siRNA target sequence for FLJ20311 (NM_017760.4,208-226).
cctttcagcctaaatgaat

SEQ ID NO: 361952 - DNA, 19 bp, Homo sapiens
  siRNA target sequence for FLJ20311 (NM_017760.4,215-233).
gcctaaatgaattactaga

SEQ ID NO: 361953 - DNA, 19 bp, Homo sapiens
  siRNA target sequence for FLJ20311 (NM_017760.4,362-380).
ccgaacatggctcaaaaat

SEQ ID NO: 361954 - DNA, 19 bp, Homo sapiens
  siRNA target sequence for FLJ20311 (NM_017760.4,515-533).
ctgagtctgaacgaaaact

SEQ ID NO: 361955 - DNA, 19 bp, Homo sapiens
  siRNA target sequence for FLJ20311 (NM_017760.4,526-544).
cgaaaactacagagttcta

SEQ ID NO: 361956 - DNA, 19 bp, Homo sapiens
  siRNA target sequence for FLJ20311 (NM_017760.4,527-545).
gaaaactacagagttctat

SEQ ID NO: 361957 - DNA, 19 bp, Homo sapiens
  siRNA target sequence for FLJ20311 (NM_017760.4,674-692).
ggcgtatccatcaagcttt

SEQ ID NO: 361958 - DNA, 19 bp, Homo sapiens
  siRNA target sequence for FLJ20311 (NM_017760.4,675-693).
gcgtatccatcaagcttta

SEQ ID NO: 361959 - DNA, 19 bp, Homo sapiens
  siRNA target sequence for FLJ20311 (NM_017760.4,676-694).
cgtatccatcaagctttat

SEQ ID NO: 361960 - DNA, 19 bp, Homo sapiens
  siRNA target sequence for FLJ20311 (NM_017760.4,741-759).
gttacttgagtgcttcata

SEQ ID NO: 361961 - DNA, 19 bp, Homo sapiens
  siRNA target sequence for FLJ20311 (NM_017760.4,786-804).
gggaagaagatttcttagt

SEQ ID NO: 361962 - DNA, 19 bp, Homo sapiens
  siRNA target sequence for FLJ20311 (NM_017760.4,799-817).
cttagttgtctcttcaact

SEQ ID NO: 361963 - DNA, 19 bp, Homo sapiens
  siRNA target sequence for FLJ20311 (NM_017760.4,818-836).
ggaatatcaacttcatcaa

SEQ ID NO: 361964 - DNA, 19 bp, Homo sapiens
  siRNA target sequence for FLJ20311 (NM_017760.4,840-858).
gatccacgggaccattaaa

SEQ ID NO: 361965 - DNA, 19 bp, Homo sapiens
  siRNA target sequence for FLJ20311 (NM_017760.4,868-886).
cagggattacaaaagtctt

SEQ ID NO: 361966 - DNA, 19 bp, Homo sapiens
  siRNA target sequence for FLJ20311 (NM_017760.4,871-889).
ggattacaaaagtctttga

SEQ ID NO: 361967 - DNA, 19 bp, Homo sapiens
  siRNA target sequence for FLJ20311 (NM_017760.4,877-895).
caaaagtctttgatggtat

SEQ ID NO: 361968 - DNA, 19 bp, Homo sapiens
  siRNA target sequence for FLJ20311 (NM_017760.4,891-909).
ggtatacattgcagaaatt

SEQ ID NO: 361969 - DNA, 19 bp, Homo sapiens
  siRNA target sequence for FLJ20311 (NM_017760.4,953-971).
cgattgaaaatgattgcat

SEQ ID NO: 361970 - DNA, 19 bp, Homo sapiens
  siRNA target sequence for FLJ20311 (NM_017760.4,1033-1051).
cgggaggttctgagttact

SEQ ID NO: 361971 - DNA, 19 bp, Homo sapiens
  siRNA target sequence for FLJ20311 (NM_017760.4,1328-1346).
ctaagtactgggaaatgat

SEQ ID NO: 361972 - DNA, 19 bp, Homo sapiens
  siRNA target sequence for FLJ20311 (NM_017760.4,1404-1422).
cacgagctcagctgatgtt

SEQ ID NO: 361973 - DNA, 19 bp, Homo sapiens
  siRNA target sequence for FLJ20311 (NM_017760.4,1533-1551).
gaaagtgagggtagctttt

SEQ ID NO: 361974 - DNA, 19 bp, Homo sapiens
  siRNA target sequence for FLJ20311 (NM_017760.4,1577-1595).
ctgtgagggctgctaagtt

SEQ ID NO: 361975 - DNA, 19 bp, Homo sapiens
  siRNA target sequence for FLJ20311 (NM_017760.4,1579-1597).
gtgagggctgctaagtttt

SEQ ID NO: 361976 - DNA, 19 bp, Homo sapiens
  siRNA target sequence for FLJ20311 (NM_017760.4,1583-1601).
gggctgctaagttttggaa

SEQ ID NO: 361977 - DNA, 19 bp, Homo sapiens
  siRNA target sequence for FLJ20311 (NM_017760.4,1626-1644).
ggttcgtctggaaactgat

SEQ ID NO: 361978 - DNA, 19 bp, Homo sapiens
  siRNA target sequence for FLJ20311 (NM_017760.4,1668-1686).
ggtgagcctcatctttaat

SEQ ID NO: 361979 - DNA, 19 bp, Homo sapiens
  siRNA target sequence for FLJ20311 (NM_017760.4,1761-1779).
cgctgccaggaggttctat

SEQ ID NO: 361980 - DNA, 19 bp, Homo sapiens
  siRNA target sequence for FLJ20311 (NM_017760.4,1817-1835).
caaagctgattcacgttat

SEQ ID NO: 361981 - DNA, 19 bp, Homo sapiens
  siRNA target sequence for FLJ20311 (NM_017760.4,1821-1839).
gctgattcacgttattcgt

SEQ ID NO: 361982 - DNA, 19 bp, Homo sapiens
  siRNA target sequence for FLJ20311 (NM_017760.4,1830-1848).
cgttattcgtcattgctta

SEQ ID NO: 361983 - DNA, 19 bp, Homo sapiens
  siRNA target sequence for FLJ20311 (NM_017760.4,1831-1849).
gttattcgtcattgcttaa

SEQ ID NO: 361984 - DNA, 19 bp, Homo sapiens
  siRNA target sequence for FLJ20311 (NM_017760.4,1936-1954).
gacaaaacactgtcagtaa

SEQ ID NO: 361985 - DNA, 19 bp, Homo sapiens
  siRNA target sequence for FLJ20311 (NM_017760.4,1964-1982).
catgcatggcaggtttact

SEQ ID NO: 361986 - DNA, 19 bp, Homo sapiens
  siRNA target sequence for FLJ20311 (NM_017760.4,1967-1985).
gcatggcaggtttactaga

SEQ ID NO: 361987 - DNA, 19 bp, Homo sapiens
  siRNA target sequence for FLJ20311 (NM_017760.4,1968-1986).
catggcaggtttactagaa

SEQ ID NO: 361988 - DNA, 19 bp, Homo sapiens
  siRNA target sequence for FLJ20311 (NM_017760.4,1973-1991).
caggtttactagaaatcat

SEQ ID NO: 361989 - DNA, 19 bp, Homo sapiens
  siRNA target sequence for FLJ20311 (NM_017760.4,1976-1994).
gtttactagaaatcattgt

SEQ ID NO: 361990 - DNA, 19 bp, Homo sapiens
  siRNA target sequence for FLJ20311 (NM_017760.4,2041-2059).
gccaaactttacacgatta

SEQ ID NO: 361991 - DNA, 19 bp, Homo sapiens
  siRNA target sequence for FLJ20311 (NM_017760.4,2042-2060).
ccaaactttacacgattaa

SEQ ID NO: 361992 - DNA, 19 bp, Homo sapiens
  siRNA target sequence for FLJ20311 (NM_017760.4,2047-2065).
ctttacacgattaacaagt

SEQ ID NO: 361993 - DNA, 19 bp, Homo sapiens
  siRNA target sequence for FLJ20311 (NM_017760.4,2110-2128).
cgctgcaagatccctttat

SEQ ID NO: 361994 - DNA, 19 bp, Homo sapiens
  siRNA target sequence for FLJ20311 (NM_017760.4,2111-2129).
gctgcaagatccctttatt

SEQ ID NO: 361995 - DNA, 19 bp, Homo sapiens
  siRNA target sequence for FLJ20311 (NM_017760.4,2328-2346).
gagcaacacagcttctaaa

SEQ ID NO: 361996 - DNA, 19 bp, Homo sapiens
  siRNA target sequence for FLJ20311 (NM_017760.4,2392-2410).
gcattggtctacattgagt

SEQ ID NO: 361997 - DNA, 19 bp, Homo sapiens
  siRNA target sequence for FLJ20311 (NM_017760.4,2452-2470).
gctcctcggaagaaactta

SEQ ID NO: 361998 - DNA, 19 bp, Homo sapiens
  siRNA target sequence for FLJ20311 (NM_017760.4,2605-2623).
catcttcagcacaagttct

SEQ ID NO: 361999 - DNA, 19 bp, Homo sapiens
  siRNA target sequence for FLJ20311 (NM_017760.4,2656-2674).
gaagacactggcttttggt

SEQ ID NO: 362000 - DNA, 19 bp, Homo sapiens
  siRNA target sequence for FLJ20311 (NM_017760.4,2661-2679).
cactggcttttggttagaa

SEQ ID NO: 362001 - DNA, 19 bp, Homo sapiens
  siRNA target sequence for FLJ20311 (NM_017760.4,2716-2734).
gactacctgaagcttcata

SEQ ID NO: 362002 - DNA, 19 bp, Homo sapiens
  siRNA target sequence for FLJ20311 (NM_017760.4,2771-2789).
ctgtgtgtaaagatgttgt

SEQ ID NO: 362003 - DNA, 19 bp, Homo sapiens
  siRNA target sequence for FLJ20311 (NM_017760.4,2804-2822).
gtgaccatcagtttcagat

SEQ ID NO: 362004 - DNA, 19 bp, Homo sapiens
  siRNA target sequence for FLJ20311 (NM_017760.4,2814-2832).
gtttcagatgcaactctta

SEQ ID NO: 362005 - DNA, 19 bp, Homo sapiens
  siRNA target sequence for FLJ20311 (NM_017760.4,2914-2932).
ggaagttccttgattcaga

SEQ ID NO: 362006 - DNA, 19 bp, Homo sapiens
  siRNA target sequence for FLJ20311 (NM_017760.4,2968-2986).
gacacagtccagaaagtat

SEQ ID NO: 362007 - DNA, 19 bp, Homo sapiens
  siRNA target sequence for FLJ20311 (NM_017760.4,2974-2992).
gtccagaaagtatttcaga

SEQ ID NO: 362008 - DNA, 19 bp, Homo sapiens
  siRNA target sequence for FLJ20311 (NM_017760.4,3068-3086).
ggcctcttcatgagttcat

SEQ ID NO: 362009 - DNA, 19 bp, Homo sapiens
  siRNA target sequence for FLJ20311 (NM_017760.4,3121-3139).
gtgcaccggggtgtacttt

SEQ ID NO: 362010 - DNA, 19 bp, Homo sapiens
  siRNA target sequence for FLJ20311 (NM_017760.4,3124-3142).
caccggggtgtactttcta

SEQ ID NO: 362011 - DNA, 19 bp, Homo sapiens
  siRNA target sequence for FLJ20311 (NM_017760.4,3126-3144).
ccggggtgtactttctact

SEQ ID NO: 362012 - DNA, 19 bp, Homo sapiens
  siRNA target sequence for FLJ20311 (NM_017760.4,3154-3172).
gggcctgtggttgagataa

SEQ ID NO: 362013 - DNA, 19 bp, Homo sapiens
  siRNA target sequence for FLJ20311 (NM_017760.4,3158-3176).
ctgtggttgagataagtca

SEQ ID NO: 362014 - DNA, 19 bp, Homo sapiens
  siRNA target sequence for FLJ20311 (NM_017760.4,3213-3231).
ccctccagagcatctttct

SEQ ID NO: 362015 - DNA, 19 bp, Homo sapiens
  siRNA target sequence for FLJ20311 (NM_017760.4,3251-3269).
ggtgtttaataggaataat

SEQ ID NO: 362016 - DNA, 19 bp, Homo sapiens
  siRNA target sequence for FLJ20311 (NM_017760.4,3282-3300).
gaatgtggtcaggtcattt

SEQ ID NO: 362017 - DNA, 19 bp, Homo sapiens
  siRNA target sequence for FLJ20311 (NM_017760.4,3288-3306).
ggtcaggtcatttttggat

SEQ ID NO: 362018 - DNA, 19 bp, Homo sapiens
  siRNA target sequence for FLJ20311 (NM_017760.4,3315-3333).
ggcatgtgtggcttctaat

SEQ ID NO: 362019 - DNA, 19 bp, Homo sapiens
  siRNA target sequence for FLJ20311 (NM_017760.4,3357-3375).
cacggctgctgtgcatatt

SEQ ID NO: 362020 - DNA, 19 bp, Homo sapiens
  siRNA target sequence for FLJ20311 (NM_017760.4,3359-3377).
cggctgctgtgcatattat

SEQ ID NO: 362021 - DNA, 19 bp, Homo sapiens
  siRNA target sequence for FLJ20311 (NM_017760.4,3370-3388).
catattatcctggttatta

SEQ ID NO: 362022 - DNA, 19 bp, Homo sapiens
  siRNA target sequence for FLJ20311 (NM_017760.4,3381-3399).
ggttattaatgcaggtaaa

SEQ ID NO: 362023 - DNA, 19 bp, Homo sapiens
  siRNA target sequence for FLJ20311 (NM_017760.4,3400-3418).
cataaaagctcaaaagtga

SEQ ID NO: 362024 - DNA, 19 bp, Homo sapiens
  siRNA target sequence for FLJ20311 (NM_017760.4,3478-3496).
gaggatagcattgaaagat

SEQ ID NO: 362025 - DNA, 19 bp, Homo sapiens
  siRNA target sequence for FLJ20313 (NM_017762.1,354-372).
cagaaattccattacagaa

SEQ ID NO: 362026 - DNA, 19 bp, Homo sapiens
  siRNA target sequence for FLJ20313 (NM_017762.1,387-405).
gaacacgatgtccctttaa

SEQ ID NO: 362027 - DNA, 19 bp, Homo sapiens
  siRNA target sequence for FLJ20313 (NM_017762.1,390-408).
cacgatgtccctttaacat

SEQ ID NO: 362028 - DNA, 19 bp, Homo sapiens
  siRNA target sequence for FLJ20313 (NM_017762.1,392-410).
cgatgtccctttaacatgt

SEQ ID NO: 362029 - DNA, 19 bp, Homo sapiens
  siRNA target sequence for FLJ20313 (NM_017762.1,393-411).
gatgtccctttaacatgta

SEQ ID NO: 362030 - DNA, 19 bp, Homo sapiens
  siRNA target sequence for FLJ20313 (NM_017762.1,406-424).
catgtattgagcaaattgt

SEQ ID NO: 362031 - DNA, 19 bp, Homo sapiens
  siRNA target sequence for FLJ20313 (NM_017762.1,557-575).
cgaaagtgctaaaaaggta

SEQ ID NO: 362032 - DNA, 19 bp, Homo sapiens
  siRNA target sequence for FLJ20313 (NM_017762.1,558-576).
gaaagtgctaaaaaggtat

SEQ ID NO: 362033 - DNA, 19 bp, Homo sapiens
  siRNA target sequence for FLJ20313 (NM_017762.1,572-590).
ggtatgccttgcaatagct

SEQ ID NO: 362034 - DNA, 19 bp, Homo sapiens
  siRNA target sequence for FLJ20313 (NM_017762.1,577-595).
gccttgcaatagctcatta

SEQ ID NO: 362035 - DNA, 19 bp, Homo sapiens
  siRNA target sequence for FLJ20313 (NM_017762.1,612-630).
ctccagctactctttgcat

SEQ ID NO: 362036 - DNA, 19 bp, Homo sapiens
  siRNA target sequence for FLJ20313 (NM_017762.1,751-769).
ctccactctttgaaactta

SEQ ID NO: 362037 - DNA, 19 bp, Homo sapiens
  siRNA target sequence for FLJ20313 (NM_017762.1,804-822).
gcttccgggtggagagttt

SEQ ID NO: 362038 - DNA, 19 bp, Homo sapiens
  siRNA target sequence for FLJ20313 (NM_017762.1,809-827).
cgggtggagagtttgttct

SEQ ID NO: 362039 - DNA, 19 bp, Homo sapiens
  siRNA target sequence for FLJ20313 (NM_017762.1,814-832).
ggagagtttgttctattaa

SEQ ID NO: 362040 - DNA, 19 bp, Homo sapiens
  siRNA target sequence for FLJ20313 (NM_017762.1,817-835).
gagtttgttctattaacga

SEQ ID NO: 362041 - DNA, 19 bp, Homo sapiens
  siRNA target sequence for FLJ20313 (NM_017762.1,826-844).
ctattaacgagggttacat

SEQ ID NO: 362042 - DNA, 19 bp, Homo sapiens
  siRNA target sequence for FLJ20313 (NM_017762.1,834-852).
gagggttacatgatatcca

SEQ ID NO: 362043 - DNA, 19 bp, Homo sapiens
  siRNA target sequence for FLJ20313 (NM_017762.1,886-904).
ctttagcagaccaagatct

SEQ ID NO: 362044 - DNA, 19 bp, Homo sapiens
  siRNA target sequence for FLJ20313 (NM_017762.1,983-1001).
gcgaatggccctcatcaaa

SEQ ID NO: 362045 - DNA, 19 bp, Homo sapiens
  siRNA target sequence for FLJ20313 (NM_017762.1,985-1003).
gaatggccctcatcaaaga

SEQ ID NO: 362046 - DNA, 19 bp, Homo sapiens
  siRNA target sequence for FLJ20313 (NM_017762.1,1022-1040).
gattgaccagaggatttgt

SEQ ID NO: 362047 - DNA, 19 bp, Homo sapiens
  siRNA target sequence for FLJ20313 (NM_017762.1,1028-1046).
ccagaggatttgtaatgca

SEQ ID NO: 362048 - DNA, 19 bp, Homo sapiens
  siRNA target sequence for FLJ20313 (NM_017762.1,1031-1049).
gaggatttgtaatgcaata

SEQ ID NO: 362049 - DNA, 19 bp, Homo sapiens
  siRNA target sequence for FLJ20313 (NM_017762.1,1095-1113).
gataagaccttgcctaata

SEQ ID NO: 362050 - DNA, 19 bp, Homo sapiens
  siRNA target sequence for FLJ20313 (NM_017762.1,1100-1118).
gaccttgcctaatattcaa

SEQ ID NO: 362051 - DNA, 19 bp, Homo sapiens
  siRNA target sequence for FLJ20313 (NM_017762.1,1145-1163).
gaagcagctatgcgttaat

SEQ ID NO: 362052 - DNA, 19 bp, Homo sapiens
  siRNA target sequence for FLJ20313 (NM_017762.1,1156-1174).
gcgttaatgagccttttga

SEQ ID NO: 362053 - DNA, 19 bp, Homo sapiens
  siRNA target sequence for FLJ20313 (NM_017762.1,1157-1175).
cgttaatgagccttttgaa

SEQ ID NO: 362054 - DNA, 19 bp, Homo sapiens
  siRNA target sequence for FLJ20313 (NM_017762.1,1213-1231).
ctcgatggttagaatatgt

SEQ ID NO: 362055 - DNA, 19 bp, Homo sapiens
  siRNA target sequence for FLJ20313 (NM_017762.1,1215-1233).
cgatggttagaatatgtaa

SEQ ID NO: 362056 - DNA, 19 bp, Homo sapiens
  siRNA target sequence for FLJ20313 (NM_017762.1,1359-1377).
ctggatccctattttagga

SEQ ID NO: 362057 - DNA, 19 bp, Homo sapiens
  siRNA target sequence for FLJ20313 (NM_017762.1,1365-1383).
ccctattttaggacaatta

SEQ ID NO: 362058 - DNA, 19 bp, Homo sapiens
  siRNA target sequence for FLJ20313 (NM_017762.1,1375-1393).
ggacaattactggatttca

SEQ ID NO: 362059 - DNA, 19 bp, Homo sapiens
  siRNA target sequence for FLJ20313 (NM_017762.1,1412-1430).
gtgggtcatggcaggatat

SEQ ID NO: 362060 - DNA, 19 bp, Homo sapiens
  siRNA target sequence for FLJ20313 (NM_017762.1,1421-1439).
ggcaggatatcagtttcta

SEQ ID NO: 362061 - DNA, 19 bp, Homo sapiens
  siRNA target sequence for FLJ20313 (NM_017762.1,1440-1458).
gacagatgcaaccatctaa

SEQ ID NO: 362062 - DNA, 19 bp, Homo sapiens
  siRNA target sequence for FLJ20313 (NM_017762.1,1510-1528).
ggcagctgttagaacaata

SEQ ID NO: 362063 - DNA, 19 bp, Homo sapiens
  siRNA target sequence for FLJ20313 (NM_017762.1,1511-1529).
gcagctgttagaacaatat

SEQ ID NO: 362064 - DNA, 19 bp, Homo sapiens
  siRNA target sequence for FLJ20313 (NM_017762.1,1555-1573).
cctacctggcagtgttgta

SEQ ID NO: 362065 - DNA, 19 bp, Homo sapiens
  siRNA target sequence for FLJ20313 (NM_017762.1,1556-1574).
ctacctggcagtgttgtat

SEQ ID NO: 362066 - DNA, 19 bp, Homo sapiens
  siRNA target sequence for FLJ20313 (NM_017762.1,1580-1598).
cacccggatctcactgttt

SEQ ID NO: 362067 - DNA, 19 bp, Homo sapiens
  siRNA target sequence for FLJ20313 (NM_017762.1,1599-1617).
ggcaccttcctgttcaact

SEQ ID NO: 362068 - DNA, 19 bp, Homo sapiens
  siRNA target sequence for FLJ20313 (NM_017762.1,1642-1660).
gcacggtcagtaggataaa

SEQ ID NO: 362069 - DNA, 19 bp, Homo sapiens
  siRNA target sequence for FLJ20313 (NM_017762.1,1663-1681).
gttgtacaaaacaagatta

SEQ ID NO: 362070 - DNA, 19 bp, Homo sapiens
  siRNA target sequence for FLJ20315 (NM_017763.1,273-291).
ggtggagtctgaaagatca

SEQ ID NO: 362071 - DNA, 19 bp, Homo sapiens
  siRNA target sequence for FLJ20315 (NM_017763.1,312-330).
cagagtgatccccttgaaa

SEQ ID NO: 362072 - DNA, 19 bp, Homo sapiens
  siRNA target sequence for FLJ20315 (NM_017763.1,314-332).
gagtgatccccttgaaaat

SEQ ID NO: 362073 - DNA, 19 bp, Homo sapiens
  siRNA target sequence for FLJ20315 (NM_017763.1,463-481).
ctggagcctggattcatca

SEQ ID NO: 362074 - DNA, 19 bp, Homo sapiens
  siRNA target sequence for FLJ20315 (NM_017763.1,1018-1036).
gagctacgggtcatttcct

SEQ ID NO: 362075 - DNA, 19 bp, Homo sapiens
  siRNA target sequence for FLJ20315 (NM_017763.1,1667-1685).
ccctaagcagtgactttga

SEQ ID NO: 362076 - DNA, 19 bp, Homo sapiens
  siRNA target sequence for FLJ20315 (NM_017763.1,2075-2093).
ccagcagtctgttcaactt

SEQ ID NO: 362077 - DNA, 19 bp, Homo sapiens
  siRNA target sequence for FLJ20315 (NM_017763.1,2251-2269).
gaggcacaccccttgatct

SEQ ID NO: 362078 - DNA, 19 bp, Homo sapiens
  siRNA target sequence for FLJ20315 (NM_017763.1,2312-2330).
caggcccctgttactcaaa

SEQ ID NO: 362079 - DNA, 19 bp, Homo sapiens
  siRNA target sequence for FLJ20315 (NM_017763.1,2314-2332).
ggcccctgttactcaaatt

SEQ ID NO: 362080 - DNA, 19 bp, Homo sapiens
  siRNA target sequence for FLJ20315 (NM_017763.1,2318-2336).
cctgttactcaaattcaca

SEQ ID NO: 362081 - DNA, 19 bp, Homo sapiens
  siRNA target sequence for FLJ20320 (NM_017765.1,567-585).
gacctacacggctgtgtat

SEQ ID NO: 362082 - DNA, 19 bp, Homo sapiens
  siRNA target sequence for FLJ20320 (NM_017765.1,606-624).
gatgctgacgctgtacttt

SEQ ID NO: 362083 - DNA, 19 bp, Homo sapiens
  siRNA target sequence for FLJ20320 (NM_017765.1,610-628).
ctgacgctgtacttttact

SEQ ID NO: 362084 - DNA, 19 bp, Homo sapiens
  siRNA target sequence for FLJ20320 (NM_017765.1,614-632).
cgctgtacttttactacaa

SEQ ID NO: 362085 - DNA, 19 bp, Homo sapiens
  siRNA target sequence for FLJ20320 (NM_017765.1,1063-1081).
ctgctcgacaccatcatct

SEQ ID NO: 362086 - DNA, 19 bp, Homo sapiens
  siRNA target sequence for FLJ20321 (NM_017766.2,565-583).
cgagttcctcggcatgttt

SEQ ID NO: 362087 - DNA, 19 bp, Homo sapiens
  siRNA target sequence for FLJ20321 (NM_017766.2,574-592).
cggcatgtttggctatgat

SEQ ID NO: 362088 - DNA, 19 bp, Homo sapiens
  siRNA target sequence for FLJ20321 (NM_017766.2,945-963).
ccaagtacgacttcttcat

SEQ ID NO: 362089 - DNA, 19 bp, Homo sapiens
  siRNA target sequence for FLJ20321 (NM_017766.2,952-970).
cgacttcttcatccaaaaa

SEQ ID NO: 362090 - DNA, 19 bp, Homo sapiens
  siRNA target sequence for FLJ20321 (NM_017766.2,1289-1307).
cccgagtacctgaagtcaa

SEQ ID NO: 362091 - DNA, 19 bp, Homo sapiens
  siRNA target sequence for FLJ20321 (NM_017766.2,1305-1323).
caaccttctccaaaacaga

SEQ ID NO: 362092 - DNA, 19 bp, Homo sapiens
  siRNA target sequence for FLJ20321 (NM_017766.2,1341-1359).
ccgtctccactgtcaagaa

SEQ ID NO: 362093 - DNA, 19 bp, Homo sapiens
  siRNA target sequence for FLJ20321 (NM_017766.2,1360-1378).
cggactgcccacagataaa

SEQ ID NO: 362094 - DNA, 19 bp, Homo sapiens
  siRNA target sequence for FLJ20321 (NM_017766.2,1382-1400).
gccgtcactgaagatgtaa

SEQ ID NO: 362095 - DNA, 19 bp, Homo sapiens
  siRNA target sequence for FLJ20321 (NM_017766.2,1383-1401).
ccgtcactgaagatgtaaa

SEQ ID NO: 362096 - DNA, 19 bp, Homo sapiens
  siRNA target sequence for FLJ20321 (NM_017766.2,1491-1509).
gccttgaccctgagtgtaa

SEQ ID NO: 362097 - DNA, 19 bp, Homo sapiens
  siRNA target sequence for FLJ20321 (NM_017766.2,1493-1511).
cttgaccctgagtgtaact

SEQ ID NO: 362098 - DNA, 19 bp, Homo sapiens
  siRNA target sequence for FLJ20321 (NM_017766.2,1806-1824).
cagccgactgccagttcta

SEQ ID NO: 362099 - DNA, 19 bp, Homo sapiens
  siRNA target sequence for FLJ20321 (NM_017766.2,1862-1880).
ggctgcacattcactttca

SEQ ID NO: 362100 - DNA, 19 bp, Homo sapiens
  siRNA target sequence for FLJ20321 (NM_017766.2,1863-1881).
gctgcacattcactttcaa

SEQ ID NO: 362101 - DNA, 19 bp, Homo sapiens
  siRNA target sequence for FLJ20321 (NM_017766.2,2178-2196).
gcaacgacgaccttgttga

SEQ ID NO: 362102 - DNA, 19 bp, Homo sapiens
  siRNA target sequence for FLJ20321 (NM_017766.2,2315-2333).
cctcccaacagcaagatct

SEQ ID NO: 362103 - DNA, 19 bp, Homo sapiens
  siRNA target sequence for FLJ20321 (NM_017766.2,2827-2845).
gcccagcaacgaatcaaat

SEQ ID NO: 362104 - DNA, 19 bp, Homo sapiens
  siRNA target sequence for FLJ20321 (NM_017766.2,2849-2867).
cacgcagtcccggcaaatt

SEQ ID NO: 362105 - DNA, 19 bp, Homo sapiens
  siRNA target sequence for FLJ20321 (NM_017766.2,2851-2869).
cgcagtcccggcaaattca

SEQ ID NO: 362106 - DNA, 19 bp, Homo sapiens
  siRNA target sequence for FLJ20321 (NM_017766.2,2852-2870).
gcagtcccggcaaattcat

SEQ ID NO: 362107 - DNA, 19 bp, Homo sapiens
  siRNA target sequence for FLJ20321 (NM_017766.2,2857-2875).
cccggcaaattcatctctt

SEQ ID NO: 362108 - DNA, 19 bp, Homo sapiens
  siRNA target sequence for FLJ20321 (NM_017766.2,2858-2876).
ccggcaaattcatctcttt

SEQ ID NO: 362109 - DNA, 19 bp, Homo sapiens
  siRNA target sequence for FLJ20321 (NM_017766.2,2873-2891).
cttttatcctcgcttatga

SEQ ID NO: 362110 - DNA, 19 bp, Homo sapiens
  siRNA target sequence for FLJ20321 (NM_017766.2,2922-2940).
gcagcctgctgaacatcaa

SEQ ID NO: 362111 - DNA, 19 bp, Homo sapiens
  siRNA target sequence for FLJ20321 (NM_017766.2,3003-3021).
cgctggttcaggagaagtt

SEQ ID NO: 362112 - DNA, 19 bp, Homo sapiens
  siRNA target sequence for ELOVL2 (NM_017770.2,188-206).
gtcagagggtggttcatgt

SEQ ID NO: 362113 - DNA, 19 bp, Homo sapiens
  siRNA target sequence for ELOVL2 (NM_017770.2,198-216).
ggttcatgttggactctta

SEQ ID NO: 362114 - DNA, 19 bp, Homo sapiens
  siRNA target sequence for ELOVL2 (NM_017770.2,241-259).
catgtatctgctctcaata

SEQ ID NO: 362115 - DNA, 19 bp, Homo sapiens
  siRNA target sequence for ELOVL2 (NM_017770.2,261-279).
ggctgggtaacaagtatat

SEQ ID NO: 362116 - DNA, 19 bp, Homo sapiens
  siRNA target sequence for ELOVL2 (NM_017770.2,263-281).
ctgggtaacaagtatatga

SEQ ID NO: 362117 - DNA, 19 bp, Homo sapiens
  siRNA target sequence for ELOVL2 (NM_017770.2,307-325).
gggtatcctcaccttgtat

SEQ ID NO: 362118 - DNA, 19 bp, Homo sapiens
  siRNA target sequence for ELOVL2 (NM_017770.2,308-326).
ggtatcctcaccttgtata

SEQ ID NO: 362119 - DNA, 19 bp, Homo sapiens
  siRNA target sequence for ELOVL2 (NM_017770.2,309-327).
gtatcctcaccttgtataa

SEQ ID NO: 362120 - DNA, 19 bp, Homo sapiens
  siRNA target sequence for ELOVL2 (NM_017770.2,359-377).
ctggcagagctcattctct

SEQ ID NO: 362121 - DNA, 19 bp, Homo sapiens
  siRNA target sequence for ELOVL2 (NM_017770.2,384-402).
gggaaggaggctacaactt

SEQ ID NO: 362122 - DNA, 19 bp, Homo sapiens
  siRNA target sequence for ELOVL2 (NM_017770.2,400-418).
cttacagtgtcaagatctt

SEQ ID NO: 362123 - DNA, 19 bp, Homo sapiens
  siRNA target sequence for ELOVL2 (NM_017770.2,454-472).
ggtgctttggtggtactat

SEQ ID NO: 362124 - DNA, 19 bp, Homo sapiens
  siRNA target sequence for ELOVL2 (NM_017770.2,497-515).
gacacaattttcttcgttt

SEQ ID NO: 362125 - DNA, 19 bp, Homo sapiens
  siRNA target sequence for ELOVL2 (NM_017770.2,520-538).
gaaaaaaacgagtcagatt

SEQ ID NO: 362126 - DNA, 19 bp, Homo sapiens
  siRNA target sequence for ELOVL2 (NM_017770.2,601-619).
gataccttgtggacaaagt

SEQ ID NO: 362127 - DNA, 19 bp, Homo sapiens
  siRNA target sequence for ELOVL2 (NM_017770.2,626-644).
ggaccaacactgaacagtt

SEQ ID NO: 362128 - DNA, 19 bp, Homo sapiens
  siRNA target sequence for ELOVL2 (NM_017770.2,633-651).
cactgaacagttttatcca

SEQ ID NO: 362129 - DNA, 19 bp, Homo sapiens
  siRNA target sequence for ELOVL2 (NM_017770.2,642-660).
gttttatccacattcttat

SEQ ID NO: 362130 - DNA, 19 bp, Homo sapiens
  siRNA target sequence for ELOVL2 (NM_017770.2,674-692).
ggactttctgtgtttccat

SEQ ID NO: 362131 - DNA, 19 bp, Homo sapiens
  siRNA target sequence for ELOVL2 (NM_017770.2,804-822).
ccttcggttgtctcatctt

SEQ ID NO: 362132 - DNA, 19 bp, Homo sapiens
  siRNA target sequence for ELOVL2 (NM_017770.2,823-841).
ccagtcatcttatatgcta

SEQ ID NO: 362133 - DNA, 19 bp, Homo sapiens
  siRNA target sequence for ELOVL2 (NM_017770.2,824-842).
cagtcatcttatatgctaa

SEQ ID NO: 362134 - DNA, 19 bp, Homo sapiens
  siRNA target sequence for ELOVL2 (NM_017770.2,828-846).
catcttatatgctaacgtt

SEQ ID NO: 362135 - DNA, 19 bp, Homo sapiens
  siRNA target sequence for ELOVL2 (NM_017770.2,916-934).
gccacctgcagggaaagaa

SEQ ID NO: 362136 - DNA, 19 bp, Homo sapiens
  siRNA target sequence for C6orf197 (NM_017772.2,199-217).
ggagcattcagcctgtata

SEQ ID NO: 362137 - DNA, 19 bp, Homo sapiens
  siRNA target sequence for C6orf197 (NM_017772.2,203-221).
cattcagcctgtatatgga

SEQ ID NO: 362138 - DNA, 19 bp, Homo sapiens
  siRNA target sequence for C6orf197 (NM_017772.2,240-258).
gacccacggctcaccaaaa

SEQ ID NO: 362139 - DNA, 19 bp, Homo sapiens
  siRNA target sequence for C6orf197 (NM_017772.2,242-260).
cccacggctcaccaaaaat

SEQ ID NO: 362140 - DNA, 19 bp, Homo sapiens
  siRNA target sequence for C6orf197 (NM_017772.2,243-261).
ccacggctcaccaaaaatt

SEQ ID NO: 362141 - DNA, 19 bp, Homo sapiens
  siRNA target sequence for C6orf197 (NM_017772.2,244-262).
cacggctcaccaaaaattt

SEQ ID NO: 362142 - DNA, 19 bp, Homo sapiens
  siRNA target sequence for C6orf197 (NM_017772.2,246-264).
cggctcaccaaaaatttca

SEQ ID NO: 362143 - DNA, 19 bp, Homo sapiens
  siRNA target sequence for C6orf197 (NM_017772.2,313-331).
cctccagttttcatgagtt

SEQ ID NO: 362144 - DNA, 19 bp, Homo sapiens
  siRNA target sequence for C6orf197 (NM_017772.2,327-345).
gagtttgcacggaatacca

SEQ ID NO: 362145 - DNA, 19 bp, Homo sapiens
  siRNA target sequence for C6orf197 (NM_017772.2,433-451).
ctgcagcccaagttctaga

SEQ ID NO: 362146 - DNA, 19 bp, Homo sapiens
  siRNA target sequence for C6orf197 (NM_017772.2,456-474).
cacagcaagctgagagtaa

SEQ ID NO: 362147 - DNA, 19 bp, Homo sapiens
  siRNA target sequence for C6orf197 (NM_017772.2,504-522).
gacgtccctgccaactaca

SEQ ID NO: 362148 - DNA, 19 bp, Homo sapiens
  siRNA target sequence for C6orf197 (NM_017772.2,513-531).
gccaactacaaggtcataa

SEQ ID NO: 362149 - DNA, 19 bp, Homo sapiens
  siRNA target sequence for C6orf197 (NM_017772.2,514-532).
ccaactacaaggtcataaa

SEQ ID NO: 362150 - DNA, 19 bp, Homo sapiens
  siRNA target sequence for C6orf197 (NM_017772.2,554-572).
gtccagaaactctagtgat

SEQ ID NO: 362151 - DNA, 19 bp, Homo sapiens
  siRNA target sequence for C6orf197 (NM_017772.2,557-575).
cagaaactctagtgataca

SEQ ID NO: 362152 - DNA, 19 bp, Homo sapiens
  siRNA target sequence for C6orf197 (NM_017772.2,583-601).
ggaacccactccacaaaca

SEQ ID NO: 362153 - DNA, 19 bp, Homo sapiens
  siRNA target sequence for C6orf197 (NM_017772.2,640-658).
cccggatctcggatcagaa

SEQ ID NO: 362154 - DNA, 19 bp, Homo sapiens
  siRNA target sequence for C6orf197 (NM_017772.2,690-708).
gagaaaacccgcctagaaa

SEQ ID NO: 362155 - DNA, 19 bp, Homo sapiens
  siRNA target sequence for C6orf197 (NM_017772.2,728-746).
cagccagaacactgactta

SEQ ID NO: 362156 - DNA, 19 bp, Homo sapiens
  siRNA target sequence for C6orf197 (NM_017772.2,730-748).
gccagaacactgacttaga

SEQ ID NO: 362157 - DNA, 19 bp, Homo sapiens
  siRNA target sequence for C6orf197 (NM_017772.2,731-749).
ccagaacactgacttagat

SEQ ID NO: 362158 - DNA, 19 bp, Homo sapiens
  siRNA target sequence for C6orf197 (NM_017772.2,747-765).
gatgaactgaggaagtgta

SEQ ID NO: 362159 - DNA, 19 bp, Homo sapiens
  siRNA target sequence for C6orf197 (NM_017772.2,782-800).
cagggaggttcgacctata

SEQ ID NO: 362160 - DNA, 19 bp, Homo sapiens
  siRNA target sequence for C6orf197 (NM_017772.2,786-804).
gaggttcgacctataacct

SEQ ID NO: 362161 - DNA, 19 bp, Homo sapiens
  siRNA target sequence for C6orf197 (NM_017772.2,821-839).
ctatctcccagcaaacact

SEQ ID NO: 362162 - DNA, 19 bp, Homo sapiens
  siRNA target sequence for C6orf197 (NM_017772.2,910-928).
ctcgaaacgaggaacatca

SEQ ID NO: 362163 - DNA, 19 bp, Homo sapiens
  siRNA target sequence for C6orf197 (NM_017772.2,932-950).
ggatacctacagacagatt

SEQ ID NO: 362164 - DNA, 19 bp, Homo sapiens
  siRNA target sequence for C6orf197 (NM_017772.2,1104-1122).
gtcgtcttcctctcagaat

SEQ ID NO: 362165 - DNA, 19 bp, Homo sapiens
  siRNA target sequence for C6orf197 (NM_017772.2,1106-1124).
cgtcttcctctcagaatat

SEQ ID NO: 362166 - DNA, 19 bp, Homo sapiens
  siRNA target sequence for C6orf197 (NM_017772.2,1224-1242).
gatggaatccaggataact

SEQ ID NO: 362167 - DNA, 19 bp, Homo sapiens
  siRNA target sequence for C6orf197 (NM_017772.2,1292-1310).
gcttgtcagccggattgat

SEQ ID NO: 362168 - DNA, 19 bp, Homo sapiens
  siRNA target sequence for C6orf197 (NM_017772.2,1333-1351).
ggaggtacgaggtagaata

SEQ ID NO: 362169 - DNA, 19 bp, Homo sapiens
  siRNA target sequence for C6orf197 (NM_017772.2,1336-1354).
ggtacgaggtagaatacct

SEQ ID NO: 362170 - DNA, 19 bp, Homo sapiens
  siRNA target sequence for C6orf197 (NM_017772.2,1480-1498).
gtgcagccttcttgatcaa

SEQ ID NO: 362171 - DNA, 19 bp, Homo sapiens
  siRNA target sequence for C6orf197 (NM_017772.2,1611-1629).
gcatacagactcaagtaca

SEQ ID NO: 362172 - DNA, 19 bp, Homo sapiens
  siRNA target sequence for C6orf197 (NM_017772.2,1616-1634).
cagactcaagtacatgttt

SEQ ID NO: 362173 - DNA, 19 bp, Homo sapiens
  siRNA target sequence for LAX (NM_017773.1,295-313).
cgaggagtatgcgcatttt

SEQ ID NO: 362174 - DNA, 19 bp, Homo sapiens
  siRNA target sequence for LAX (NM_017773.1,299-317).
gagtatgcgcattttcagt

SEQ ID NO: 362175 - DNA, 19 bp, Homo sapiens
  siRNA target sequence for LAX (NM_017773.1,481-499).
cggcacactgcatcaatgt

SEQ ID NO: 362176 - DNA, 19 bp, Homo sapiens
  siRNA target sequence for LAX (NM_017773.1,537-555).
gattcgcatgattatgtca

SEQ ID NO: 362177 - DNA, 19 bp, Homo sapiens
  siRNA target sequence for LAX (NM_017773.1,541-559).
cgcatgattatgtcaatgt

SEQ ID NO: 362178 - DNA, 19 bp, Homo sapiens
  siRNA target sequence for LAX (NM_017773.1,690-708).
gactgcaccagtttgtatt

SEQ ID NO: 362179 - DNA, 19 bp, Homo sapiens
  siRNA target sequence for LAX (NM_017773.1,718-736).
ctgaggacagtgattcact

SEQ ID NO: 362180 - DNA, 19 bp, Homo sapiens
  siRNA target sequence for LAX (NM_017773.1,740-758).
caatggagaaggttcttct

SEQ ID NO: 362181 - DNA, 19 bp, Homo sapiens
  siRNA target sequence for LAX (NM_017773.1,766-784).
caaatgactatgtcaacat

SEQ ID NO: 362182 - DNA, 19 bp, Homo sapiens
  siRNA target sequence for LAX (NM_017773.1,822-840).
ctctgggtggcttttcagt

SEQ ID NO: 362183 - DNA, 19 bp, Homo sapiens
  siRNA target sequence for LAX (NM_017773.1,962-980).
ccatgtccaatgtgtcaaa

SEQ ID NO: 362184 - DNA, 19 bp, Homo sapiens
  siRNA target sequence for LAX (NM_017773.1,963-981).
catgtccaatgtgtcaaaa

SEQ ID NO: 362185 - DNA, 19 bp, Homo sapiens
  siRNA target sequence for LAX (NM_017773.1,1076-1094).
ggactccagtgactatgaa

SEQ ID NO: 362186 - DNA, 19 bp, Homo sapiens
  siRNA target sequence for FLJ20343 (NM_017775.2,685-703).
cgagccaagttgagcatta

SEQ ID NO: 362187 - DNA, 19 bp, Homo sapiens
  siRNA target sequence for FLJ20343 (NM_017775.2,686-704).
gagccaagttgagcattat

SEQ ID NO: 362188 - DNA, 19 bp, Homo sapiens
  siRNA target sequence for FLJ20343 (NM_017775.2,688-706).
gccaagttgagcattatga

SEQ ID NO: 362189 - DNA, 19 bp, Homo sapiens
  siRNA target sequence for FLJ20343 (NM_017775.2,689-707).
ccaagttgagcattatgaa

SEQ ID NO: 362190 - DNA, 19 bp, Homo sapiens
  siRNA target sequence for FLJ20343 (NM_017775.2,693-711).
gttgagcattatgaaagat

SEQ ID NO: 362191 - DNA, 19 bp, Homo sapiens
  siRNA target sequence for FLJ20343 (NM_017775.2,716-734).
cagaagaggctgagttaat

SEQ ID NO: 362192 - DNA, 19 bp, Homo sapiens
  siRNA target sequence for FLJ20343 (NM_017775.2,748-766).
cttcgtctcgcctatcaga

SEQ ID NO: 362193 - DNA, 19 bp, Homo sapiens
  siRNA target sequence for FLJ20343 (NM_017775.2,754-772).
ctcgcctatcagactgata

SEQ ID NO: 362194 - DNA, 19 bp, Homo sapiens
  siRNA target sequence for FLJ20343 (NM_017775.2,777-795).
gaaggccatcacttacact

SEQ ID NO: 362195 - DNA, 19 bp, Homo sapiens
  siRNA target sequence for FLJ20343 (NM_017775.2,780-798).
ggccatcacttacacttat

SEQ ID NO: 362196 - DNA, 19 bp, Homo sapiens
  siRNA target sequence for FLJ20343 (NM_017775.2,788-806).
cttacacttatgatttgat

SEQ ID NO: 362197 - DNA, 19 bp, Homo sapiens
  siRNA target sequence for FLJ20343 (NM_017775.2,804-822).
gatggccaacttagcattt

SEQ ID NO: 362198 - DNA, 19 bp, Homo sapiens
  siRNA target sequence for FLJ20343 (NM_017775.2,807-825).
ggccaacttagcatttata

SEQ ID NO: 362199 - DNA, 19 bp, Homo sapiens
  siRNA target sequence for FLJ20343 (NM_017775.2,828-846).
gggtcagcttgaaaatgct

SEQ ID NO: 362200 - DNA, 19 bp, Homo sapiens
  siRNA target sequence for FLJ20343 (NM_017775.2,928-946).
ctaaagctggccagtatct

SEQ ID NO: 362201 - DNA, 19 bp, Homo sapiens
  siRNA target sequence for FLJ20343 (NM_017775.2,953-971).
cgcagaacagacaggaatt

SEQ ID NO: 362202 - DNA, 19 bp, Homo sapiens
  siRNA target sequence for FLJ20343 (NM_017775.2,973-991).
gctgttgctggctatgaat

SEQ ID NO: 362203 - DNA, 19 bp, Homo sapiens
  siRNA target sequence for FLJ20343 (NM_017775.2,974-992).
ctgttgctggctatgaatt

SEQ ID NO: 362204 - DNA, 19 bp, Homo sapiens
  siRNA target sequence for FLJ20343 (NM_017775.2,1109-1127).
gtgctcgctaccttctgtt

SEQ ID NO: 362205 - DNA, 19 bp, Homo sapiens
  siRNA target sequence for FLJ20343 (NM_017775.2,1146-1164).
ggcacaaaggatgtatgaa

SEQ ID NO: 362206 - DNA, 19 bp, Homo sapiens
  siRNA target sequence for FLJ20343 (NM_017775.2,1267-1285).
gatgaggcctatatttata

SEQ ID NO: 362207 - DNA, 19 bp, Homo sapiens
  siRNA target sequence for FLJ20343 (NM_017775.2,1272-1290).
ggcctatatttatatgcaa

SEQ ID NO: 362208 - DNA, 19 bp, Homo sapiens
  siRNA target sequence for FLJ20343 (NM_017775.2,1305-1323).
ggcaagacagataaatcat

SEQ ID NO: 362209 - DNA, 19 bp, Homo sapiens
  siRNA target sequence for FLJ20343 (NM_017775.2,1335-1353).
catggtactcagtaatcta

SEQ ID NO: 362210 - DNA, 19 bp, Homo sapiens
  siRNA target sequence for FLJ20343 (NM_017775.2,1368-1386).
gcacagagaacgatataca

SEQ ID NO: 362211 - DNA, 19 bp, Homo sapiens
  siRNA target sequence for FLJ20343 (NM_017775.2,1488-1506).
gaaaagtagacctttgaca

SEQ ID NO: 362212 - DNA, 19 bp, Homo sapiens
  siRNA target sequence for FLJ20345 (NM_017777.1,188-206).
ccagcgaggtgccttcatt

SEQ ID NO: 362213 - DNA, 19 bp, Homo sapiens
  siRNA target sequence for FLJ20345 (NM_017777.1,191-209).
gcgaggtgccttcattctt

SEQ ID NO: 362214 - DNA, 19 bp, Homo sapiens
  siRNA target sequence for FLJ20345 (NM_017777.1,214-232).
gagcgaatggcaaatgtca

SEQ ID NO: 362215 - DNA, 19 bp, Homo sapiens
  siRNA target sequence for FLJ20345 (NM_017777.1,296-314).
gggagccctcagaagagtt

SEQ ID NO: 362216 - DNA, 19 bp, Homo sapiens
  siRNA target sequence for FLJ20345 (NM_017777.1,320-338).
ggaacaaccacgtcattaa

SEQ ID NO: 362217 - DNA, 19 bp, Homo sapiens
  siRNA target sequence for FLJ20345 (NM_017777.1,396-414).
ctataagaagtatgaacat

SEQ ID NO: 362218 - DNA, 19 bp, Homo sapiens
  siRNA target sequence for FLJ20345 (NM_017777.1,484-502).
ggaccctacaggattgaga

SEQ ID NO: 362219 - DNA, 19 bp, Homo sapiens
  siRNA target sequence for FLJ20345 (NM_017777.1,581-599).
gggaacggcgagtgttcaa

SEQ ID NO: 362220 - DNA, 19 bp, Homo sapiens
  siRNA target sequence for FLJ20345 (NM_017777.1,675-693).
cctccggctctttgtaaat

SEQ ID NO: 362221 - DNA, 19 bp, Homo sapiens
  siRNA target sequence for FLJ20345 (NM_017777.1,735-753).
ctacgtccacttctttgta

SEQ ID NO: 362222 - DNA, 19 bp, Homo sapiens
  siRNA target sequence for FLJ20345 (NM_017777.1,792-810).
gcagctctcaggagtaaca

SEQ ID NO: 362223 - DNA, 19 bp, Homo sapiens
  siRNA target sequence for FLJ20345 (NM_017777.1,861-879).
ctacccattcacgtttgaa

SEQ ID NO: 362224 - DNA, 19 bp, Homo sapiens
  siRNA target sequence for FLJ20345 (NM_017777.1,891-909).
ccatgaggatgaatcttct

SEQ ID NO: 362225 - DNA, 19 bp, Homo sapiens
  siRNA target sequence for FLJ20360 (NM_017782.2,329-347).
cttcccgaaaggttgtaga

SEQ ID NO: 362226 - DNA, 19 bp, Homo sapiens
  siRNA target sequence for FLJ20360 (NM_017782.2,332-350).
cccgaaaggttgtagaaca

SEQ ID NO: 362227 - DNA, 19 bp, Homo sapiens
  siRNA target sequence for FLJ20360 (NM_017782.2,351-369).
cagcaacccagcaaaatat

SEQ ID NO: 362228 - DNA, 19 bp, Homo sapiens
  siRNA target sequence for FLJ20360 (NM_017782.2,418-436).
gagtcccttggtttggaaa

SEQ ID NO: 362229 - DNA, 19 bp, Homo sapiens
  siRNA target sequence for FLJ20360 (NM_017782.2,420-438).
gtcccttggtttggaaaaa

SEQ ID NO: 362230 - DNA, 19 bp, Homo sapiens
  siRNA target sequence for FLJ20360 (NM_017782.2,454-472).
ctgttggagactaacgaaa

SEQ ID NO: 362231 - DNA, 19 bp, Homo sapiens
  siRNA target sequence for FLJ20360 (NM_017782.2,460-478).
gagactaacgaaatttcca

SEQ ID NO: 362232 - DNA, 19 bp, Homo sapiens
  siRNA target sequence for FLJ20360 (NM_017782.2,481-499).
gctcatgctgctgaagtat

SEQ ID NO: 362233 - DNA, 19 bp, Homo sapiens
  siRNA target sequence for FLJ20360 (NM_017782.2,558-576).
ggaactctgtgtacaaaat

SEQ ID NO: 362234 - DNA, 19 bp, Homo sapiens
  siRNA target sequence for FLJ20360 (NM_017782.2,628-646).
cagaatttcatctgttctt

SEQ ID NO: 362235 - DNA, 19 bp, Homo sapiens
  siRNA target sequence for FLJ20360 (NM_017782.2,706-724).
gtgctttcgggtattggaa

SEQ ID NO: 362236 - DNA, 19 bp, Homo sapiens
  siRNA target sequence for FLJ20360 (NM_017782.2,714-732).
gggtattggaagtacacaa

SEQ ID NO: 362237 - DNA, 19 bp, Homo sapiens
  siRNA target sequence for FLJ20360 (NM_017782.2,715-733).
ggtattggaagtacacaaa

SEQ ID NO: 362238 - DNA, 19 bp, Homo sapiens
  siRNA target sequence for FLJ20360 (NM_017782.2,804-822).
cagtggcactgttactcaa

SEQ ID NO: 362239 - DNA, 19 bp, Homo sapiens
  siRNA target sequence for FLJ20360 (NM_017782.2,853-871).
ggcagtcagccagtgatat

SEQ ID NO: 362240 - DNA, 19 bp, Homo sapiens
  siRNA target sequence for FLJ20360 (NM_017782.2,883-901).
gtgtacggcacccttgaaa

SEQ ID NO: 362241 - DNA, 19 bp, Homo sapiens
  siRNA target sequence for FLJ20360 (NM_017782.2,888-906).
cggcacccttgaaaacaaa

SEQ ID NO: 362242 - DNA, 19 bp, Homo sapiens
  siRNA target sequence for FLJ20360 (NM_017782.2,944-962).
gtactttacaggaccttat

SEQ ID NO: 362243 - DNA, 19 bp, Homo sapiens
  siRNA target sequence for FLJ20360 (NM_017782.2,947-965).
ctttacaggaccttatcca

SEQ ID NO: 362244 - DNA, 19 bp, Homo sapiens
  siRNA target sequence for FLJ20360 (NM_017782.2,1038-1056).
gattaacccggaaccaatt

SEQ ID NO: 362245 - DNA, 19 bp, Homo sapiens
  siRNA target sequence for FLJ20360 (NM_017782.2,1131-1149).
ctttaagaaggagttgatt

SEQ ID NO: 362246 - DNA, 19 bp, Homo sapiens
  siRNA target sequence for FLJ20360 (NM_017782.2,1143-1161).
gttgattaagcaagtatca

SEQ ID NO: 362247 - DNA, 19 bp, Homo sapiens
  siRNA target sequence for FLJ20360 (NM_017782.2,1224-1242).
ggacattccctctctagta

SEQ ID NO: 362248 - DNA, 19 bp, Homo sapiens
  siRNA target sequence for FLJ20360 (NM_017782.2,1288-1306).
ggtggagagacacttgata

SEQ ID NO: 362249 - DNA, 19 bp, Homo sapiens
  siRNA target sequence for FLJ20360 (NM_017782.2,1309-1327).
gcagtgtgttcattacaga

SEQ ID NO: 362250 - DNA, 19 bp, Homo sapiens
  siRNA target sequence for FLJ20360 (NM_017782.2,1372-1390).
gtcatggaggcactatcat

SEQ ID NO: 362251 - DNA, 19 bp, Homo sapiens
  siRNA target sequence for FLJ20360 (NM_017782.2,1374-1392).
catggaggcactatcatta

SEQ ID NO: 362252 - DNA, 19 bp, Homo sapiens
  siRNA target sequence for FLJ20360 (NM_017782.2,1378-1396).
gaggcactatcattagcta

SEQ ID NO: 362253 - DNA, 19 bp, Homo sapiens
  siRNA target sequence for FLJ20360 (NM_017782.2,1380-1398).
ggcactatcattagctaaa

SEQ ID NO: 362254 - DNA, 19 bp, Homo sapiens
  siRNA target sequence for FLJ20360 (NM_017782.2,1381-1399).
gcactatcattagctaaaa

SEQ ID NO: 362255 - DNA, 19 bp, Homo sapiens
  siRNA target sequence for FLJ20360 (NM_017782.2,1484-1502).
cagaagggcttctagaact

SEQ ID NO: 362256 - DNA, 19 bp, Homo sapiens
  siRNA target sequence for FLJ20360 (NM_017782.2,1546-1564).
ggaaggcagtgttcactta

SEQ ID NO: 362257 - DNA, 19 bp, Homo sapiens
  siRNA target sequence for FLJ20360 (NM_017782.2,1589-1607).
catcaggtgactctttaga

SEQ ID NO: 362258 - DNA, 19 bp, Homo sapiens
  siRNA target sequence for FLJ20360 (NM_017782.2,1650-1668).
gaatttggaagcgtttgat

SEQ ID NO: 362259 - DNA, 19 bp, Homo sapiens
  siRNA target sequence for FLJ20360 (NM_017782.2,1656-1674).
ggaagcgtttgattcagta

SEQ ID NO: 362260 - DNA, 19 bp, Homo sapiens
  siRNA target sequence for FLJ20360 (NM_017782.2,1657-1675).
gaagcgtttgattcagtat

SEQ ID NO: 362261 - DNA, 19 bp, Homo sapiens
  siRNA target sequence for FLJ20360 (NM_017782.2,1661-1679).
cgtttgattcagtatttat

SEQ ID NO: 362262 - DNA, 19 bp, Homo sapiens
  siRNA target sequence for FLJ20360 (NM_017782.2,1706-1724).
gagaggtcagcctagagtt

SEQ ID NO: 362263 - DNA, 19 bp, Homo sapiens
  siRNA target sequence for FLJ20360 (NM_017782.2,1708-1726).
gaggtcagcctagagttat

SEQ ID NO: 362264 - DNA, 19 bp, Homo sapiens
  siRNA target sequence for FLJ20360 (NM_017782.2,1710-1728).
ggtcagcctagagttatca

SEQ ID NO: 362265 - DNA, 19 bp, Homo sapiens
  siRNA target sequence for FLJ20360 (NM_017782.2,1743-1761).
cattgacttagctctaaca

SEQ ID NO: 362266 - DNA, 19 bp, Homo sapiens
  siRNA target sequence for FLJ20360 (NM_017782.2,1747-1765).
gacttagctctaacaatat

SEQ ID NO: 362267 - DNA, 19 bp, Homo sapiens
  siRNA target sequence for FLJ20360 (NM_017782.2,1749-1767).
cttagctctaacaatatca

SEQ ID NO: 362268 - DNA, 19 bp, Homo sapiens
  siRNA target sequence for FLJ20360 (NM_017782.2,1799-1817).
ctggtgaaatagagcaatt

SEQ ID NO: 362269 - DNA, 19 bp, Homo sapiens
  siRNA target sequence for FLJ20360 (NM_017782.2,1882-1900).
gaggtggctctcacagaaa

SEQ ID NO: 362270 - DNA, 19 bp, Homo sapiens
  siRNA target sequence for FLJ20360 (NM_017782.2,1918-1936).
gctgacaatgtgtcagtat

SEQ ID NO: 362271 - DNA, 19 bp, Homo sapiens
  siRNA target sequence for FLJ20360 (NM_017782.2,2154-2172).
ggctgtgactccatgcatt

SEQ ID NO: 362272 - DNA, 19 bp, Homo sapiens
  siRNA target sequence for FLJ20360 (NM_017782.2,2278-2296).
catccagtggggcaagata

SEQ ID NO: 362273 - DNA, 19 bp, Homo sapiens
  siRNA target sequence for FLJ20360 (NM_017782.2,2284-2302).
gtggggcaagataacttta

SEQ ID NO: 362274 - DNA, 19 bp, Homo sapiens
  siRNA target sequence for FLJ20360 (NM_017782.2,2298-2316).
ctttacccaggtacaacaa

SEQ ID NO: 362275 - DNA, 19 bp, Homo sapiens
  siRNA target sequence for FLJ20360 (NM_017782.2,2329-2347).
gccgaaatgcctctaatat

SEQ ID NO: 362276 - DNA, 19 bp, Homo sapiens
  siRNA target sequence for FLJ20360 (NM_017782.2,2330-2348).
ccgaaatgcctctaatatt

SEQ ID NO: 362277 - DNA, 19 bp, Homo sapiens
  siRNA target sequence for FLJ20360 (NM_017782.2,2331-2349).
cgaaatgcctctaatatta

SEQ ID NO: 362278 - DNA, 19 bp, Homo sapiens
  siRNA target sequence for FLJ20360 (NM_017782.2,2337-2355).
gcctctaatattaactgat

SEQ ID NO: 362279 - DNA, 19 bp, Homo sapiens
  siRNA target sequence for FLJ20360 (NM_017782.2,2378-2396).
caacccttcctggtaaagt

SEQ ID NO: 362280 - DNA, 19 bp, Homo sapiens
  siRNA target sequence for FLJ20360 (NM_017782.2,2421-2439).
gcatgatgagggtttatct

SEQ ID NO: 362281 - DNA, 19 bp, Homo sapiens
  siRNA target sequence for FLJ20360 (NM_017782.2,2422-2440).
catgatgagggtttatctt

SEQ ID NO: 362282 - DNA, 19 bp, Homo sapiens
  siRNA target sequence for FLJ20360 (NM_017782.2,2522-2540).
ctcctgaaaaactggtaaa

SEQ ID NO: 362283 - DNA, 19 bp, Homo sapiens
  siRNA target sequence for FLJ20360 (NM_017782.2,2535-2553).
ggtaaaatcaggaaatcca

SEQ ID NO: 362284 - DNA, 19 bp, Homo sapiens
  siRNA target sequence for FLJ20360 (NM_017782.2,2557-2575).
cagccagttagtatagaga

SEQ ID NO: 362285 - DNA, 19 bp, Homo sapiens
  siRNA target sequence for FLJ20360 (NM_017782.2,2567-2585).
gtatagagaatagaaattt

SEQ ID NO: 362286 - DNA, 19 bp, Homo sapiens
  siRNA target sequence for FLJ20360 (NM_017782.2,2610-2628).
gtccagtgaacctccattt

SEQ ID NO: 362287 - DNA, 19 bp, Homo sapiens
  siRNA target sequence for FLJ20360 (NM_017782.2,2624-2642).
catttggtcctagaaatgt

SEQ ID NO: 362288 - DNA, 19 bp, Homo sapiens
  siRNA target sequence for FLJ20360 (NM_017782.2,2686-2704).
gcaccaagtggtatagtga

SEQ ID NO: 362289 - DNA, 19 bp, Homo sapiens
  siRNA target sequence for FLJ20360 (NM_017782.2,2687-2705).
caccaagtggtatagtgaa

SEQ ID NO: 362290 - DNA, 19 bp, Homo sapiens
  siRNA target sequence for FLJ20360 (NM_017782.2,2719-2737).
cagcagactagccctaaaa

SEQ ID NO: 362291 - DNA, 19 bp, Homo sapiens
  siRNA target sequence for FLJ20360 (NM_017782.2,2754-2772).
ctttcccggtgatttgaaa

SEQ ID NO: 362292 - DNA, 19 bp, Homo sapiens
  siRNA target sequence for FLJ20360 (NM_017782.2,2760-2778).
cggtgatttgaaaacagat

SEQ ID NO: 362293 - DNA, 19 bp, Homo sapiens
  siRNA target sequence for FLJ20360 (NM_017782.2,2817-2835).
ctcggttgatggagcttat

SEQ ID NO: 362294 - DNA, 19 bp, Homo sapiens
  siRNA target sequence for FLJ20360 (NM_017782.2,2820-2838).
ggttgatggagcttattct

SEQ ID NO: 362295 - DNA, 19 bp, Homo sapiens
  siRNA target sequence for FLJ20360 (NM_017782.2,2821-2839).
gttgatggagcttattcta

SEQ ID NO: 362296 - DNA, 19 bp, Homo sapiens
  siRNA target sequence for FLJ20360 (NM_017782.2,2860-2878).
gtggtccccacgctttgtt

SEQ ID NO: 362297 - DNA, 19 bp, Homo sapiens
  siRNA target sequence for FLJ20360 (NM_017782.2,2863-2881).
gtccccacgctttgttctt

SEQ ID NO: 362298 - DNA, 19 bp, Homo sapiens
  siRNA target sequence for FLJ20360 (NM_017782.2,2904-2922).
ccattatgtaagaccaata

SEQ ID NO: 362299 - DNA, 19 bp, Homo sapiens
  siRNA target sequence for FLJ20360 (NM_017782.2,2905-2923).
cattatgtaagaccaataa

SEQ ID NO: 362300 - DNA, 19 bp, Homo sapiens
  siRNA target sequence for FLJ20360 (NM_017782.2,2964-2982).
cagaatggccagtttgctt

SEQ ID NO: 362301 - DNA, 19 bp, Homo sapiens
  siRNA target sequence for FLJ20360 (NM_017782.2,2994-3012).
gcctgaagctgagttacat

SEQ ID NO: 362302 - DNA, 19 bp, Homo sapiens
  siRNA target sequence for FLJ20360 (NM_017782.2,3046-3064).
cagtccaacaccacatctt

SEQ ID NO: 362303 - DNA, 19 bp, Homo sapiens
  siRNA target sequence for FLJ20360 (NM_017782.2,3048-3066).
gtccaacaccacatcttct

SEQ ID NO: 362304 - DNA, 19 bp, Homo sapiens
  siRNA target sequence for FLJ20360 (NM_017782.2,3054-3072).
caccacatcttctctaaaa

SEQ ID NO: 362305 - DNA, 19 bp, Homo sapiens
  siRNA target sequence for FLJ20360 (NM_017782.2,3057-3075).
cacatcttctctaaaaggt

SEQ ID NO: 362306 - DNA, 19 bp, Homo sapiens
  siRNA target sequence for FLJ20360 (NM_017782.2,3099-3117).
gcaagatgtgtcaacatgt

SEQ ID NO: 362307 - DNA, 19 bp, Homo sapiens
  siRNA target sequence for FLJ20360 (NM_017782.2,3116-3134).
gtgaaacaaaggagctatt

SEQ ID NO: 362308 - DNA, 19 bp, Homo sapiens
  siRNA target sequence for FLJ20360 (NM_017782.2,3118-3136).
gaaacaaaggagctattga

SEQ ID NO: 362309 - DNA, 19 bp, Homo sapiens
  siRNA target sequence for FLJ20360 (NM_017782.2,3158-3176).
gtgctggtccctaccaaaa

SEQ ID NO: 362310 - DNA, 19 bp, Homo sapiens
  siRNA target sequence for FLJ20360 (NM_017782.2,3160-3178).
gctggtccctaccaaaata

SEQ ID NO: 362311 - DNA, 19 bp, Homo sapiens
  siRNA target sequence for FLJ20360 (NM_017782.2,3263-3281).
ccacagagcacgtagaaat

SEQ ID NO: 362312 - DNA, 19 bp, Homo sapiens
  siRNA target sequence for FLJ20360 (NM_017782.2,3264-3282).
cacagagcacgtagaaatt

SEQ ID NO: 362313 - DNA, 19 bp, Homo sapiens
  siRNA target sequence for FLJ20360 (NM_017782.2,3266-3284).
cagagcacgtagaaattga

SEQ ID NO: 362314 - DNA, 19 bp, Homo sapiens
  siRNA target sequence for FLJ20360 (NM_017782.2,3340-3358).
ggagaggtcggtgtgaatt

SEQ ID NO: 362315 - DNA, 19 bp, Homo sapiens
  siRNA target sequence for FLJ20360 (NM_017782.2,3359-3377).
ccgacatgcactatgaact

SEQ ID NO: 362316 - DNA, 19 bp, Homo sapiens
  siRNA target sequence for FLJ20360 (NM_017782.2,3397-3415).
gacctgcttggtgattgta

SEQ ID NO: 362317 - DNA, 19 bp, Homo sapiens
  siRNA target sequence for FLJ20360 (NM_017782.2,3399-3417).
cctgcttggtgattgtaga

SEQ ID NO: 362318 - DNA, 19 bp, Homo sapiens
  siRNA target sequence for FLJ20360 (NM_017782.2,3427-3445).
ctggatttggaggattctt

SEQ ID NO: 362319 - DNA, 19 bp, Homo sapiens
  siRNA target sequence for FLJ20360 (NM_017782.2,3458-3476).
gtagttacaccaggaaaaa

SEQ ID NO: 362320 - DNA, 19 bp, Homo sapiens
  siRNA target sequence for FLJ20360 (NM_017782.2,3506-3524).
cgttgaacttccacaacaa

SEQ ID NO: 362321 - DNA, 19 bp, Homo sapiens
  siRNA target sequence for FLJ20360 (NM_017782.2,3594-3612).
gactgctgcggtaaagaaa

SEQ ID NO: 362322 - DNA, 19 bp, Homo sapiens
  siRNA target sequence for FLJ20360 (NM_017782.2,3596-3614).
ctgctgcggtaaagaaaga

SEQ ID NO: 362323 - DNA, 19 bp, Homo sapiens
  siRNA target sequence for FLJ20360 (NM_017782.2,3671-3689).
cttacgccaacttctctat

SEQ ID NO: 362324 - DNA, 19 bp, Homo sapiens
  siRNA target sequence for FLJ20360 (NM_017782.2,3675-3693).
cgccaacttctctataaca

SEQ ID NO: 362325 - DNA, 19 bp, Homo sapiens
  siRNA target sequence for FLJ20360 (NM_017782.2,3676-3694).
gccaacttctctataacaa

SEQ ID NO: 362326 - DNA, 19 bp, Homo sapiens
  siRNA target sequence for FLJ20360 (NM_017782.2,3735-3753).
gaggcacccgagtttcagt

SEQ ID NO: 362327 - DNA, 19 bp, Homo sapiens
  siRNA target sequence for FLJ20360 (NM_017782.2,3821-3839).
ctttagacctggagtatct

SEQ ID NO: 362328 - DNA, 19 bp, Homo sapiens
  siRNA target sequence for FLJ20360 (NM_017782.2,3840-3858).
gcgttttgcacataaacta

SEQ ID NO: 362329 - DNA, 19 bp, Homo sapiens
  siRNA target sequence for FLJ20360 (NM_017782.2,3841-3859).
cgttttgcacataaactaa

SEQ ID NO: 362330 - DNA, 19 bp, Homo sapiens
  siRNA target sequence for FLJ20360 (NM_017782.2,3842-3860).
gttttgcacataaactaaa

SEQ ID NO: 362331 - DNA, 19 bp, Homo sapiens
  siRNA target sequence for FLJ20360 (NM_017782.2,3847-3865).
gcacataaactaaaacaga

SEQ ID NO: 362332 - DNA, 19 bp, Homo sapiens
  siRNA target sequence for FLJ20360 (NM_017782.2,3856-3874).
ctaaaacagaccataaaga

SEQ ID NO: 362333 - DNA, 19 bp, Homo sapiens
  siRNA target sequence for FLJ20360 (NM_017782.2,3949-3967).
gctttcccttcgacaaaaa

SEQ ID NO: 362334 - DNA, 19 bp, Homo sapiens
  siRNA target sequence for FLJ20360 (NM_017782.2,3950-3968).
ctttcccttcgacaaaaat

SEQ ID NO: 362335 - DNA, 19 bp, Homo sapiens
  siRNA target sequence for FLJ20360 (NM_017782.2,4115-4133).
gatgtagtcataatagaga

SEQ ID NO: 362336 - DNA, 19 bp, Homo sapiens
  siRNA target sequence for FLJ20360 (NM_017782.2,4203-4221).
gaaggaatctcggaatgat

SEQ ID NO: 362337 - DNA, 19 bp, Homo sapiens
  siRNA target sequence for FLJ20360 (NM_017782.2,4206-4224).
ggaatctcggaatgatatt

SEQ ID NO: 362338 - DNA, 19 bp, Homo sapiens
  siRNA target sequence for FLJ20360 (NM_017782.2,4207-4225).
gaatctcggaatgatattt

SEQ ID NO: 362339 - DNA, 19 bp, Homo sapiens
  siRNA target sequence for FLJ20360 (NM_017782.2,4213-4231).
cggaatgatatttcactta

SEQ ID NO: 362340 - DNA, 19 bp, Homo sapiens
  siRNA target sequence for FLJ20360 (NM_017782.2,4226-4244).
cacttattctcaatgagta

SEQ ID NO: 362341 - DNA, 19 bp, Homo sapiens
  siRNA target sequence for FLJ20360 (NM_017782.2,4240-4258).
gagtatgctgaattcaaca

SEQ ID NO: 362342 - DNA, 19 bp, Homo sapiens
  siRNA target sequence for FLJ20360 (NM_017782.2,4325-4343).
ccactgctcaagagatgta

SEQ ID NO: 362343 - DNA, 19 bp, Homo sapiens
  siRNA target sequence for FLJ20360 (NM_017782.2,4328-4346).
ctgctcaagagatgtatct

SEQ ID NO: 362344 - DNA, 19 bp, Homo sapiens
  siRNA target sequence for FLJ20360 (NM_017782.2,4366-4384).
gcctcctatgaagacataa

SEQ ID NO: 362345 - DNA, 19 bp, Homo sapiens
  siRNA target sequence for FLJ20360 (NM_017782.2,4367-4385).
cctcctatgaagacataat

SEQ ID NO: 362346 - DNA, 19 bp, Homo sapiens
  siRNA target sequence for FLJ20360 (NM_017782.2,4371-4389).
ctatgaagacataatcata

SEQ ID NO: 362347 - DNA, 19 bp, Homo sapiens
  siRNA target sequence for FLJ20360 (NM_017782.2,4400-4418).
ccaatttgcacgtcaaact

SEQ ID NO: 362348 - DNA, 19 bp, Homo sapiens
  siRNA target sequence for FLJ20360 (NM_017782.2,4401-4419).
caatttgcacgtcaaacta

SEQ ID NO: 362349 - DNA, 19 bp, Homo sapiens
  siRNA target sequence for FLJ20360 (NM_017782.2,4410-4428).
cgtcaaactaagaagtgtt

SEQ ID NO: 362350 - DNA, 19 bp, Homo sapiens
  siRNA target sequence for FLJ20360 (NM_017782.2,4429-4447).
gtgaaagaggcttgtaaaa

SEQ ID NO: 362351 - DNA, 19 bp, Homo sapiens
  siRNA target sequence for FLJ20360 (NM_017782.2,4461-4479).
ctaccttgtcgaaacagaa

SEQ ID NO: 362352 - DNA, 19 bp, Homo sapiens
  siRNA target sequence for FLJ20360 (NM_017782.2,4482-4500).
caaatcattctttgtaaga

SEQ ID NO: 362353 - DNA, 19 bp, Homo sapiens
  siRNA target sequence for FLJ20360 (NM_017782.2,4518-4536).
gaaaggaggccatacagaa

SEQ ID NO: 362354 - DNA, 19 bp, Homo sapiens
  siRNA target sequence for FLJ20360 (NM_017782.2,4523-4541).
gaggccatacagaaattga

SEQ ID NO: 362355 - DNA, 19 bp, Homo sapiens
  siRNA target sequence for FLJ20360 (NM_017782.2,4569-4587).
cagagagaatgatacacta

SEQ ID NO: 362356 - DNA, 19 bp, Homo sapiens
  siRNA target sequence for FLJ20360 (NM_017782.2,4571-4589).
gagagaatgatacactaat

SEQ ID NO: 362357 - DNA, 19 bp, Homo sapiens
  siRNA target sequence for FLJ20360 (NM_017782.2,4579-4597).
gatacactaatcatcatca

SEQ ID NO: 362358 - DNA, 19 bp, Homo sapiens
  siRNA target sequence for FLJ20360 (NM_017782.2,4606-4624).
gaagatatatcatcacatt

SEQ ID NO: 362359 - DNA, 19 bp, Homo sapiens
  siRNA target sequence for FLJ20360 (NM_017782.2,4689-4707).
cagccctggagatgttctt

SEQ ID NO: 362360 - DNA, 19 bp, Homo sapiens
  siRNA target sequence for FLJ20360 (NM_017782.2,4754-4772).
cagatgacaagatactaga

SEQ ID NO: 362361 - DNA, 19 bp, Homo sapiens
  siRNA target sequence for FLJ20360 (NM_017782.2,4897-4915).
gattcaactgcacataaga

SEQ ID NO: 362362 - DNA, 19 bp, Homo sapiens
  siRNA target sequence for FLJ20360 (NM_017782.2,4941-4959).
gagtgcaaatatcattgaa

SEQ ID NO: 362363 - DNA, 19 bp, Homo sapiens
  siRNA target sequence for FLJ20360 (NM_017782.2,4977-4995).
gtgtgactctcgatcatca

SEQ ID NO: 362364 - DNA, 19 bp, Homo sapiens
  siRNA target sequence for FLJ20360 (NM_017782.2,4981-4999).
gactctcgatcatcaacaa

SEQ ID NO: 362365 - DNA, 19 bp, Homo sapiens
  siRNA target sequence for FLJ20360 (NM_017782.2,4983-5001).
ctctcgatcatcaacaaaa

SEQ ID NO: 362366 - DNA, 19 bp, Homo sapiens
  siRNA target sequence for FLJ20360 (NM_017782.2,5031-5049).
gcaaattcagcatattgat

SEQ ID NO: 362367 - DNA, 19 bp, Homo sapiens
  siRNA target sequence for FLJ20360 (NM_017782.2,5170-5188).
ccatttaggagtagctatt

SEQ ID NO: 362368 - DNA, 19 bp, Homo sapiens
  siRNA target sequence for FLJ20364 (NM_017785.2,216-234).
cacagtatggtttacaact

SEQ ID NO: 362369 - DNA, 19 bp, Homo sapiens
  siRNA target sequence for FLJ20364 (NM_017785.2,298-316).
gactgagagttatgaacaa

SEQ ID NO: 362370 - DNA, 19 bp, Homo sapiens
  siRNA target sequence for FLJ20364 (NM_017785.2,349-367).
caagagtcgaatgttagaa

SEQ ID NO: 362371 - DNA, 19 bp, Homo sapiens
  siRNA target sequence for FLJ20364 (NM_017785.2,352-370).
gagtcgaatgttagaaagt

SEQ ID NO: 362372 - DNA, 19 bp, Homo sapiens
  siRNA target sequence for FLJ20364 (NM_017785.2,356-374).
cgaatgttagaaagtttga

SEQ ID NO: 362373 - DNA, 19 bp, Homo sapiens
  siRNA target sequence for FLJ20364 (NM_017785.2,369-387).
gtttgagctgcgaatgtga

SEQ ID NO: 362374 - DNA, 19 bp, Homo sapiens
  siRNA target sequence for FLJ20364 (NM_017785.2,375-393).
gctgcgaatgtgaagctat

SEQ ID NO: 362375 - DNA, 19 bp, Homo sapiens
  siRNA target sequence for FLJ20364 (NM_017785.2,376-394).
ctgcgaatgtgaagctatt

SEQ ID NO: 362376 - DNA, 19 bp, Homo sapiens
  siRNA target sequence for FLJ20364 (NM_017785.2,378-396).
gcgaatgtgaagctattaa

SEQ ID NO: 362377 - DNA, 19 bp, Homo sapiens
  siRNA target sequence for FLJ20364 (NM_017785.2,384-402).
gtgaagctattaaacaaca

SEQ ID NO: 362378 - DNA, 19 bp, Homo sapiens
  siRNA target sequence for FLJ20364 (NM_017785.2,532-550).
gctgaagcaccaagtagat

SEQ ID NO: 362379 - DNA, 19 bp, Homo sapiens
  siRNA target sequence for FLJ20364 (NM_017785.2,535-553).
gaagcaccaagtagatcat

SEQ ID NO: 362380 - DNA, 19 bp, Homo sapiens
  siRNA target sequence for FLJ20364 (NM_017785.2,581-599).
gaggaactgcgcgtaatgt

SEQ ID NO: 362381 - DNA, 19 bp, Homo sapiens
  siRNA target sequence for FLJ20364 (NM_017785.2,583-601).
ggaactgcgcgtaatgtct

SEQ ID NO: 362382 - DNA, 19 bp, Homo sapiens
  siRNA target sequence for FLJ20364 (NM_017785.2,722-740).
cagctagaacttcttatta

SEQ ID NO: 362383 - DNA, 19 bp, Homo sapiens
  siRNA target sequence for FLJ20364 (NM_017785.2,724-742).
gctagaacttcttattact

SEQ ID NO: 362384 - DNA, 19 bp, Homo sapiens
  siRNA target sequence for FLJ20364 (NM_017785.2,725-743).
ctagaacttcttattacta

SEQ ID NO: 362385 - DNA, 19 bp, Homo sapiens
  siRNA target sequence for FLJ20364 (NM_017785.2,754-772).
ccaggtagaccggcttaaa

SEQ ID NO: 362386 - DNA, 19 bp, Homo sapiens
  siRNA target sequence for FLJ20364 (NM_017785.2,831-849).
ctcgtgtagcaaatcaaga

SEQ ID NO: 362387 - DNA, 19 bp, Homo sapiens
  siRNA target sequence for FLJ20364 (NM_017785.2,834-852).
gtgtagcaaatcaagatct

SEQ ID NO: 362388 - DNA, 19 bp, Homo sapiens
  siRNA target sequence for FLJ20364 (NM_017785.2,884-902).
gccttggatcccaatagta

SEQ ID NO: 362389 - DNA, 19 bp, Homo sapiens
  siRNA target sequence for FLJ20364 (NM_017785.2,964-982).
cagtatgaaagtcaagtat

SEQ ID NO: 362390 - DNA, 19 bp, Homo sapiens
  siRNA target sequence for FLJ20364 (NM_017785.2,966-984).
gtatgaaagtcaagtatca

SEQ ID NO: 362391 - DNA, 19 bp, Homo sapiens
  siRNA target sequence for FLJ20364 (NM_017785.2,974-992).
gtcaagtatcagtcactaa

SEQ ID NO: 362392 - DNA, 19 bp, Homo sapiens
  siRNA target sequence for FLJ20364 (NM_017785.2,1047-1065).
ccacgttgctacagatgaa

SEQ ID NO: 362393 - DNA, 19 bp, Homo sapiens
  siRNA target sequence for FLJ20364 (NM_017785.2,1058-1076).
cagatgaaagggtctcaaa

SEQ ID NO: 362394 - DNA, 19 bp, Homo sapiens
  siRNA target sequence for FLJ20364 (NM_017785.2,1220-1238).
ggtactctggaagataaca

SEQ ID NO: 362395 - DNA, 19 bp, Homo sapiens
  siRNA target sequence for FLJ20364 (NM_017785.2,1312-1330).
gtccatacagcgaatgaaa

SEQ ID NO: 362396 - DNA, 19 bp, Homo sapiens
  siRNA target sequence for FLJ20364 (NM_017785.2,1319-1337).
cagcgaatgaaagcattat

SEQ ID NO: 362397 - DNA, 19 bp, Homo sapiens
  siRNA target sequence for FLJ20364 (NM_017785.2,1321-1339).
gcgaatgaaagcattattt

SEQ ID NO: 362398 - DNA, 19 bp, Homo sapiens
  siRNA target sequence for FLJ20364 (NM_017785.2,1342-1360).
gagccagcgggctctagat

SEQ ID NO: 362399 - DNA, 19 bp, Homo sapiens
  siRNA target sequence for FLJ20364 (NM_017785.2,1344-1362).
gccagcgggctctagatat

SEQ ID NO: 362400 - DNA, 19 bp, Homo sapiens
  siRNA target sequence for FLJ20364 (NM_017785.2,1345-1363).
ccagcgggctctagatatt

SEQ ID NO: 362401 - DNA, 19 bp, Homo sapiens
  siRNA target sequence for FLJ20364 (NM_017785.2,1358-1376).
gatattgagcgaaaacttt

SEQ ID NO: 362402 - DNA, 19 bp, Homo sapiens
  siRNA target sequence for FLJ20364 (NM_017785.2,1366-1384).
gcgaaaactttttgcaaat

SEQ ID NO: 362403 - DNA, 19 bp, Homo sapiens
  siRNA target sequence for FLJ20364 (NM_017785.2,1389-1407).
gatgcctccagctttcaga

SEQ ID NO: 362404 - DNA, 19 bp, Homo sapiens
  siRNA target sequence for FLJ20364 (NM_017785.2,1426-1444).
gagagctaaactagatgaa

SEQ ID NO: 362405 - DNA, 19 bp, Homo sapiens
  siRNA target sequence for FLJ20364 (NM_017785.2,1481-1499).
gtgcctgtactgaaaaaga

SEQ ID NO: 362406 - DNA, 19 bp, Homo sapiens
  siRNA target sequence for FLJ20364 (NM_017785.2,1508-1526).
gtgctccctgtggatataa

SEQ ID NO: 362407 - DNA, 19 bp, Homo sapiens
  siRNA target sequence for FLJ20364 (NM_017785.2,1511-1529).
ctccctgtggatataacca

SEQ ID NO: 362408 - DNA, 19 bp, Homo sapiens
  siRNA target sequence for FLJ20364 (NM_017785.2,1559-1577).
gctctcgggggagaagttt

SEQ ID NO: 362409 - DNA, 19 bp, Homo sapiens
  siRNA target sequence for FLJ20364 (NM_017785.2,1560-1578).
ctctcgggggagaagttta

SEQ ID NO: 362410 - DNA, 19 bp, Homo sapiens
  siRNA target sequence for FLJ20364 (NM_017785.2,1564-1582).
cgggggagaagtttatcga

SEQ ID NO: 362411 - DNA, 19 bp, Homo sapiens
  siRNA target sequence for FLJ20364 (NM_017785.2,1565-1583).
gggggagaagtttatcgat

SEQ ID NO: 362412 - DNA, 19 bp, Homo sapiens
  siRNA target sequence for FLJ20364 (NM_017785.2,1566-1584).
ggggagaagtttatcgatt

SEQ ID NO: 362413 - DNA, 19 bp, Homo sapiens
  siRNA target sequence for FLJ20364 (NM_017785.2,1567-1585).
gggagaagtttatcgatta

SEQ ID NO: 362414 - DNA, 19 bp, Homo sapiens
  siRNA target sequence for FLJ20364 (NM_017785.2,1581-1599).
gattaccgcctcagaaaga

SEQ ID NO: 362415 - DNA, 19 bp, Homo sapiens
  siRNA target sequence for FLJ20364 (NM_017785.2,1607-1625).
cagtcctgccctaacagtt

SEQ ID NO: 362416 - DNA, 19 bp, Homo sapiens
  siRNA target sequence for FLJ20364 (NM_017785.2,1612-1630).
ctgccctaacagtttagaa

SEQ ID NO: 362417 - DNA, 19 bp, Homo sapiens
  siRNA target sequence for FLJ20364 (NM_017785.2,1614-1632).
gccctaacagtttagaaga

SEQ ID NO: 362418 - DNA, 19 bp, Homo sapiens
  siRNA target sequence for FLJ20364 (NM_017785.2,1616-1634).
cctaacagtttagaagata

SEQ ID NO: 362419 - DNA, 19 bp, Homo sapiens
  siRNA target sequence for FLJ20364 (NM_017785.2,1813-1831).
caggttagctgctgaatca

SEQ ID NO: 362420 - DNA, 19 bp, Homo sapiens
  siRNA target sequence for FLJ20364 (NM_017785.2,1815-1833).
ggttagctgctgaatcaaa

SEQ ID NO: 362421 - DNA, 19 bp, Homo sapiens
  siRNA target sequence for FLJ20364 (NM_017785.2,1834-1852).
gcttcaaacagaagttaaa

SEQ ID NO: 362422 - DNA, 19 bp, Homo sapiens
  siRNA target sequence for FLJ20364 (NM_017785.2,1904-1922).
caccctattctatatgtgt

SEQ ID NO: 362423 - DNA, 19 bp, Homo sapiens
  siRNA target sequence for FLJ20364 (NM_017785.2,1913-1931).
ctatatgtgtcttctaaat

SEQ ID NO: 362424 - DNA, 19 bp, Homo sapiens
  siRNA target sequence for C14orf58 (NM_017791.1,583-601).
gtggtcctggtgtttagct

SEQ ID NO: 362425 - DNA, 19 bp, Homo sapiens
  siRNA target sequence for C14orf58 (NM_017791.1,640-658).
ggctccatcaataacatct

SEQ ID NO: 362426 - DNA, 19 bp, Homo sapiens
  siRNA target sequence for C14orf58 (NM_017791.1,641-659).
gctccatcaataacatctt

SEQ ID NO: 362427 - DNA, 19 bp, Homo sapiens
  siRNA target sequence for C14orf58 (NM_017791.1,710-728).
gctacatgctgacttacat

SEQ ID NO: 362428 - DNA, 19 bp, Homo sapiens
  siRNA target sequence for C14orf58 (NM_017791.1,1135-1153).
gtgttcaaggagaaaccta

SEQ ID NO: 362429 - DNA, 19 bp, Homo sapiens
  siRNA target sequence for C14orf58 (NM_017791.1,1204-1222).
gatgcctcatacttaggtt

SEQ ID NO: 362430 - DNA, 19 bp, Homo sapiens
  siRNA target sequence for C14orf58 (NM_017791.1,1383-1401).
cgtcattgcaggaatgctt

SEQ ID NO: 362431 - DNA, 19 bp, Homo sapiens
  siRNA target sequence for C14orf58 (NM_017791.1,1426-1444).
ctggataggtccaaaacct

SEQ ID NO: 362432 - DNA, 19 bp, Homo sapiens
  siRNA target sequence for C14orf58 (NM_017791.1,1454-1472).
caaccctggtagtctatat

SEQ ID NO: 362433 - DNA, 19 bp, Homo sapiens
  siRNA target sequence for C14orf58 (NM_017791.1,1457-1475).
ccctggtagtctatatcat

SEQ ID NO: 362434 - DNA, 19 bp, Homo sapiens
  siRNA target sequence for C14orf58 (NM_017791.1,1459-1477).
ctggtagtctatatcatga

SEQ ID NO: 362435 - DNA, 19 bp, Homo sapiens
  siRNA target sequence for C14orf58 (NM_017791.1,1492-1510).
gtggtgtacacgtttacct

SEQ ID NO: 362436 - DNA, 19 bp, Homo sapiens
  siRNA target sequence for C14orf58 (NM_017791.1,1520-1538).
gacacctgtgggtagtgtt

SEQ ID NO: 362437 - DNA, 19 bp, Homo sapiens
  siRNA target sequence for C14orf58 (NM_017791.1,1550-1568).
gcacaatgggcttctttat

SEQ ID NO: 362438 - DNA, 19 bp, Homo sapiens
  siRNA target sequence for C14orf58 (NM_017791.1,1608-1626).
gctcacgtacccagaatca

SEQ ID NO: 362439 - DNA, 19 bp, Homo sapiens
  siRNA target sequence for C14orf58 (NM_017791.1,1641-1659).
cggcctcctcaacatatct

SEQ ID NO: 362440 - DNA, 19 bp, Homo sapiens
  siRNA target sequence for C14orf58 (NM_017791.1,1653-1671).
catatctgcacaggtattt

SEQ ID NO: 362441 - DNA, 19 bp, Homo sapiens
  siRNA target sequence for C14orf58 (NM_017791.1,1697-1715).
gccagattattgacaacta

SEQ ID NO: 362442 - DNA, 19 bp, Homo sapiens
  siRNA target sequence for C14orf58 (NM_017791.1,1768-1786).
gccctcactgcattcatta

SEQ ID NO: 362443 - DNA, 19 bp, Homo sapiens
  siRNA target sequence for FLJ20373 (NM_017792.1,339-357).
ctcaagctcccgtaaggat

SEQ ID NO: 362444 - DNA, 19 bp, Homo sapiens
  siRNA target sequence for FLJ20373 (NM_017792.1,341-359).
caagctcccgtaaggatat

SEQ ID NO: 362445 - DNA, 19 bp, Homo sapiens
  siRNA target sequence for FLJ20373 (NM_017792.1,422-440).
cgagttctgagtggaaata

SEQ ID NO: 362446 - DNA, 19 bp, Homo sapiens
  siRNA target sequence for FLJ20373 (NM_017792.1,442-460).
ctgcattatggctgcttta

SEQ ID NO: 362447 - DNA, 19 bp, Homo sapiens
  siRNA target sequence for FLJ20373 (NM_017792.1,456-474).
ctttaacctcagtcatcaa

SEQ ID NO: 362448 - DNA, 19 bp, Homo sapiens
  siRNA target sequence for FLJ20373 (NM_017792.1,465-483).
cagtcatcaaaagaaactt

SEQ ID NO: 362449 - DNA, 19 bp, Homo sapiens
  siRNA target sequence for FLJ20373 (NM_017792.1,487-505).
gttttttaggcttgatctt

SEQ ID NO: 362450 - DNA, 19 bp, Homo sapiens
  siRNA target sequence for FLJ20373 (NM_017792.1,560-578).
gctcccacccacctaaaca

SEQ ID NO: 362451 - DNA, 19 bp, Homo sapiens
  siRNA target sequence for FLJ20373 (NM_017792.1,738-756).
cagctggtggttttgtgta

SEQ ID NO: 362452 - DNA, 19 bp, Homo sapiens
  siRNA target sequence for FLJ20373 (NM_017792.1,752-770).
gtgtatacctgtaaagaca

SEQ ID NO: 362453 - DNA, 19 bp, Homo sapiens
  siRNA target sequence for Rpp25 (NM_017793.1,1220-1238).
gctagtctcagcgtactta

SEQ ID NO: 362454 - DNA, 19 bp, Homo sapiens
  siRNA target sequence for Rpp25 (NM_017793.1,1221-1239).
ctagtctcagcgtacttaa

SEQ ID NO: 362455 - DNA, 19 bp, Homo sapiens
  siRNA target sequence for Rpp25 (NM_017793.1,1224-1242).
gtctcagcgtacttaagaa

SEQ ID NO: 362456 - DNA, 19 bp, Homo sapiens
  siRNA target sequence for Rpp25 (NM_017793.1,1250-1268).
ggcctcgccatcctacttt

SEQ ID NO: 362457 - DNA, 19 bp, Homo sapiens
  siRNA target sequence for KIAA1797 (NM_017794.2,378-396).
caggaaaaggtttgaattt

SEQ ID NO: 362458 - DNA, 19 bp, Homo sapiens
  siRNA target sequence for KIAA1797 (NM_017794.2,474-492).
gattcaccaatctacaaat

SEQ ID NO: 362459 - DNA, 19 bp, Homo sapiens
  siRNA target sequence for KIAA1797 (NM_017794.2,599-617).
cagagttcagctatgttct

SEQ ID NO: 362460 - DNA, 19 bp, Homo sapiens
  siRNA target sequence for KIAA1797 (NM_017794.2,603-621).
gttcagctatgttctcaat

SEQ ID NO: 362461 - DNA, 19 bp, Homo sapiens
  siRNA target sequence for KIAA1797 (NM_017794.2,681-699).
gcacttactacaaatgcaa

SEQ ID NO: 362462 - DNA, 19 bp, Homo sapiens
  siRNA target sequence for KIAA1797 (NM_017794.2,740-758).
gtatatataccattagaaa

SEQ ID NO: 362463 - DNA, 19 bp, Homo sapiens
  siRNA target sequence for KIAA1797 (NM_017794.2,848-866).
gccctgaaaggttagaagt

SEQ ID NO: 362464 - DNA, 19 bp, Homo sapiens
  siRNA target sequence for KIAA1797 (NM_017794.2,853-871).
gaaaggttagaagtttcat

SEQ ID NO: 362465 - DNA, 19 bp, Homo sapiens
  siRNA target sequence for KIAA1797 (NM_017794.2,916-934).
ccatctcagttacaagaat

SEQ ID NO: 362466 - DNA, 19 bp, Homo sapiens
  siRNA target sequence for KIAA1797 (NM_017794.2,922-940).
cagttacaagaatatgcta

SEQ ID NO: 362467 - DNA, 19 bp, Homo sapiens
  siRNA target sequence for KIAA1797 (NM_017794.2,924-942).
gttacaagaatatgctaaa

SEQ ID NO: 362468 - DNA, 19 bp, Homo sapiens
  siRNA target sequence for KIAA1797 (NM_017794.2,949-967).
ctagccctgctgaaagtct

SEQ ID NO: 362469 - DNA, 19 bp, Homo sapiens
  siRNA target sequence for KIAA1797 (NM_017794.2,953-971).
ccctgctgaaagtcttact

SEQ ID NO: 362470 - DNA, 19 bp, Homo sapiens
  siRNA target sequence for KIAA1797 (NM_017794.2,1186-1204).
gtcagtgaagtcagcttaa

SEQ ID NO: 362471 - DNA, 19 bp, Homo sapiens
  siRNA target sequence for KIAA1797 (NM_017794.2,1190-1208).
gtgaagtcagcttaaagat

SEQ ID NO: 362472 - DNA, 19 bp, Homo sapiens
  siRNA target sequence for KIAA1797 (NM_017794.2,1206-1224).
gataactggtgaatgttca

SEQ ID NO: 362473 - DNA, 19 bp, Homo sapiens
  siRNA target sequence for KIAA1797 (NM_017794.2,1214-1232).
gtgaatgttcatcttcaat

SEQ ID NO: 362474 - DNA, 19 bp, Homo sapiens
  siRNA target sequence for KIAA1797 (NM_017794.2,1276-1294).
cctgttgaactggtcataa

SEQ ID NO: 362475 - DNA, 19 bp, Homo sapiens
  siRNA target sequence for KIAA1797 (NM_017794.2,1287-1305).
ggtcataattggaatagct

SEQ ID NO: 362476 - DNA, 19 bp, Homo sapiens
  siRNA target sequence for KIAA1797 (NM_017794.2,1288-1306).
gtcataattggaatagctt

SEQ ID NO: 362477 - DNA, 19 bp, Homo sapiens
  siRNA target sequence for KIAA1797 (NM_017794.2,1333-1351).
cagcagaagccaatcttaa

SEQ ID NO: 362478 - DNA, 19 bp, Homo sapiens
  siRNA target sequence for KIAA1797 (NM_017794.2,1338-1356).
gaagccaatcttaaatcta

SEQ ID NO: 362479 - DNA, 19 bp, Homo sapiens
  siRNA target sequence for KIAA1797 (NM_017794.2,1423-1441).
ccaattctgcagatactat

SEQ ID NO: 362480 - DNA, 19 bp, Homo sapiens
  siRNA target sequence for KIAA1797 (NM_017794.2,1452-1470).
cttggaagactgtatatct

SEQ ID NO: 362481 - DNA, 19 bp, Homo sapiens
  siRNA target sequence for KIAA1797 (NM_017794.2,1580-1598).
gccctgtaaccagtatgta

SEQ ID NO: 362482 - DNA, 19 bp, Homo sapiens
  siRNA target sequence for KIAA1797 (NM_017794.2,1585-1603).
gtaaccagtatgtatggta

SEQ ID NO: 362483 - DNA, 19 bp, Homo sapiens
  siRNA target sequence for KIAA1797 (NM_017794.2,1590-1608).
cagtatgtatggtacaata

SEQ ID NO: 362484 - DNA, 19 bp, Homo sapiens
  siRNA target sequence for KIAA1797 (NM_017794.2,1623-1641).
gattcttgaagtaatgaca

SEQ ID NO: 362485 - DNA, 19 bp, Homo sapiens
  siRNA target sequence for KIAA1797 (NM_017794.2,1678-1696).
gagtcattgcttcctatta

SEQ ID NO: 362486 - DNA, 19 bp, Homo sapiens
  siRNA target sequence for KIAA1797 (NM_017794.2,1680-1698).
gtcattgcttcctattact

SEQ ID NO: 362487 - DNA, 19 bp, Homo sapiens
  siRNA target sequence for KIAA1797 (NM_017794.2,1777-1795).
ctcaaggtcactacagaat

SEQ ID NO: 362488 - DNA, 19 bp, Homo sapiens
  siRNA target sequence for KIAA1797 (NM_017794.2,1779-1797).
caaggtcactacagaatta

SEQ ID NO: 362489 - DNA, 19 bp, Homo sapiens
  siRNA target sequence for KIAA1797 (NM_017794.2,1856-1874).
gaagaccactggaacctat

SEQ ID NO: 362490 - DNA, 19 bp, Homo sapiens
  siRNA target sequence for KIAA1797 (NM_017794.2,1870-1888).
cctatattatataatgata

SEQ ID NO: 362491 - DNA, 19 bp, Homo sapiens
  siRNA target sequence for KIAA1797 (NM_017794.2,1893-1911).
gtatactttacctaagctt

SEQ ID NO: 362492 - DNA, 19 bp, Homo sapiens
  siRNA target sequence for KIAA1797 (NM_017794.2,1904-1922).
ctaagcttggtgttcacaa

SEQ ID NO: 362493 - DNA, 19 bp, Homo sapiens
  siRNA target sequence for KIAA1797 (NM_017794.2,1923-1941).
ggtgtgtataggacaaatt

SEQ ID NO: 362494 - DNA, 19 bp, Homo sapiens
  siRNA target sequence for KIAA1797 (NM_017794.2,1934-1952).
gacaaattctacgaataat

SEQ ID NO: 362495 - DNA, 19 bp, Homo sapiens
  siRNA target sequence for KIAA1797 (NM_017794.2,1976-1994).
gactaagagctgtcacttt

SEQ ID NO: 362496 - DNA, 19 bp, Homo sapiens
  siRNA target sequence for KIAA1797 (NM_017794.2,1996-2014).
cgcttgctgacatctttgt

SEQ ID NO: 362497 - DNA, 19 bp, Homo sapiens
  siRNA target sequence for KIAA1797 (NM_017794.2,2100-2118).
ccaatgggagaaactgatt

SEQ ID NO: 362498 - DNA, 19 bp, Homo sapiens
  siRNA target sequence for KIAA1797 (NM_017794.2,2109-2127).
gaaactgattgcaaaagca

SEQ ID NO: 362499 - DNA, 19 bp, Homo sapiens
  siRNA target sequence for KIAA1797 (NM_017794.2,2119-2137).
gcaaaagcagcatcaatca

SEQ ID NO: 362500 - DNA, 19 bp, Homo sapiens
  siRNA target sequence for KIAA1797 (NM_017794.2,2126-2144).
cagcatcaatcagagatat

SEQ ID NO: 362501 - DNA, 19 bp, Homo sapiens
  siRNA target sequence for KIAA1797 (NM_017794.2,2132-2150).
caatcagagatatatgtaa

SEQ ID NO: 362502 - DNA, 19 bp, Homo sapiens
  siRNA target sequence for KIAA1797 (NM_017794.2,2181-2199).
gttggcagctatttctcaa

SEQ ID NO: 362503 - DNA, 19 bp, Homo sapiens
  siRNA target sequence for KIAA1797 (NM_017794.2,2247-2265).
ggtattacagggtcttcat

SEQ ID NO: 362504 - DNA, 19 bp, Homo sapiens
  siRNA target sequence for KIAA1797 (NM_017794.2,2292-2310).
cattcgctccacttggaat

SEQ ID NO: 362505 - DNA, 19 bp, Homo sapiens
  siRNA target sequence for KIAA1797 (NM_017794.2,2355-2373).
gaagacactgagtgaacta

SEQ ID NO: 362506 - DNA, 19 bp, Homo sapiens
  siRNA target sequence for KIAA1797 (NM_017794.2,2358-2376).
gacactgagtgaactattt

SEQ ID NO: 362507 - DNA, 19 bp, Homo sapiens
  siRNA target sequence for KIAA1797 (NM_017794.2,2386-2404).
ccttccttaacggtcaata

SEQ ID NO: 362508 - DNA, 19 bp, Homo sapiens
  siRNA target sequence for KIAA1797 (NM_017794.2,2391-2409).
cttaacggtcaatacaact

SEQ ID NO: 362509 - DNA, 19 bp, Homo sapiens
  siRNA target sequence for KIAA1797 (NM_017794.2,2396-2414).
cggtcaatacaactgaata

SEQ ID NO: 362510 - DNA, 19 bp, Homo sapiens
  siRNA target sequence for KIAA1797 (NM_017794.2,2445-2463).
cctctggactcatactcaa

SEQ ID NO: 362511 - DNA, 19 bp, Homo sapiens
  siRNA target sequence for KIAA1797 (NM_017794.2,2469-2487).
ggacccaattgtagcaaat

SEQ ID NO: 362512 - DNA, 19 bp, Homo sapiens
  siRNA target sequence for KIAA1797 (NM_017794.2,2472-2490).
cccaattgtagcaaatgct

SEQ ID NO: 362513 - DNA, 19 bp, Homo sapiens
  siRNA target sequence for KIAA1797 (NM_017794.2,2522-2540).
gagaacacaccattcttca

SEQ ID NO: 362514 - DNA, 19 bp, Homo sapiens
  siRNA target sequence for KIAA1797 (NM_017794.2,2626-2644).
cctggctcttgctatctca

SEQ ID NO: 362515 - DNA, 19 bp, Homo sapiens
  siRNA target sequence for KIAA1797 (NM_017794.2,2627-2645).
ctggctcttgctatctcaa

SEQ ID NO: 362516 - DNA, 19 bp, Homo sapiens
  siRNA target sequence for KIAA1797 (NM_017794.2,2630-2648).
gctcttgctatctcaaact

SEQ ID NO: 362517 - DNA, 19 bp, Homo sapiens
  siRNA target sequence for KIAA1797 (NM_017794.2,2633-2651).
cttgctatctcaaactgtt

SEQ ID NO: 362518 - DNA, 19 bp, Homo sapiens
  siRNA target sequence for KIAA1797 (NM_017794.2,2685-2703).
ggaggaattttttacatca

SEQ ID NO: 362519 - DNA, 19 bp, Homo sapiens
  siRNA target sequence for KIAA1797 (NM_017794.2,2731-2749).
cctcgtgggatatatcact

SEQ ID NO: 362520 - DNA, 19 bp, Homo sapiens
  siRNA target sequence for KIAA1797 (NM_017794.2,2794-2812).
gcaggaatccccaatttta

SEQ ID NO: 362521 - DNA, 19 bp, Homo sapiens
  siRNA target sequence for KIAA1797 (NM_017794.2,2797-2815).
ggaatccccaattttatat

SEQ ID NO: 362522 - DNA, 19 bp, Homo sapiens
  siRNA target sequence for KIAA1797 (NM_017794.2,2867-2885).
gtggtatgttattttgcta

SEQ ID NO: 362523 - DNA, 19 bp, Homo sapiens
  siRNA target sequence for KIAA1797 (NM_017794.2,2887-2905).
gatgtttccatgtatcaga

SEQ ID NO: 362524 - DNA, 19 bp, Homo sapiens
  siRNA target sequence for KIAA1797 (NM_017794.2,2911-2929).
gatggaaaaccattgaaca

SEQ ID NO: 362525 - DNA, 19 bp, Homo sapiens
  siRNA target sequence for KIAA1797 (NM_017794.2,2942-2960).
gcagagggcgaagtttcaa

SEQ ID NO: 362526 - DNA, 19 bp, Homo sapiens
  siRNA target sequence for KIAA1797 (NM_017794.2,2969-2987).
cacttgctcttgtacatga

SEQ ID NO: 362527 - DNA, 19 bp, Homo sapiens
  siRNA target sequence for KIAA1797 (NM_017794.2,2977-2995).
cttgtacatgaggttcata

SEQ ID NO: 362528 - DNA, 19 bp, Homo sapiens
  siRNA target sequence for KIAA1797 (NM_017794.2,3007-3025).
gagtggcaccgtgcaattt

SEQ ID NO: 362529 - DNA, 19 bp, Homo sapiens
  siRNA target sequence for KIAA1797 (NM_017794.2,3009-3027).
gtggcaccgtgcaattttt

SEQ ID NO: 362530 - DNA, 19 bp, Homo sapiens
  siRNA target sequence for KIAA1797 (NM_017794.2,3012-3030).
gcaccgtgcaatttttctt

SEQ ID NO: 362531 - DNA, 19 bp, Homo sapiens
  siRNA target sequence for KIAA1797 (NM_017794.2,3032-3050).
cacaggcctggcttgcata

SEQ ID NO: 362532 - DNA, 19 bp, Homo sapiens
  siRNA target sequence for KIAA1797 (NM_017794.2,3037-3055).
gcctggcttgcatacatga

SEQ ID NO: 362533 - DNA, 19 bp, Homo sapiens
  siRNA target sequence for KIAA1797 (NM_017794.2,3038-3056).
cctggcttgcatacatgaa

SEQ ID NO: 362534 - DNA, 19 bp, Homo sapiens
  siRNA target sequence for KIAA1797 (NM_017794.2,3039-3057).
ctggcttgcatacatgaat

SEQ ID NO: 362535 - DNA, 19 bp, Homo sapiens
  siRNA target sequence for KIAA1797 (NM_017794.2,3062-3080).
cttatcatgccattttaca

SEQ ID NO: 362536 - DNA, 19 bp, Homo sapiens
  siRNA target sequence for KIAA1797 (NM_017794.2,3094-3112).
gagctggagttgcagttaa

SEQ ID NO: 362537 - DNA, 19 bp, Homo sapiens
  siRNA target sequence for KIAA1797 (NM_017794.2,3135-3153).
ggaggtgcagtacaaaaaa

SEQ ID NO: 362538 - DNA, 19 bp, Homo sapiens
  siRNA target sequence for KIAA1797 (NM_017794.2,3216-3234).
ggagagtccggtagtgaaa

SEQ ID NO: 362539 - DNA, 19 bp, Homo sapiens
  siRNA target sequence for KIAA1797 (NM_017794.2,3262-3280).
cttgctgtcgtcgtatcta

SEQ ID NO: 362540 - DNA, 19 bp, Homo sapiens
  siRNA target sequence for KIAA1797 (NM_017794.2,3270-3288).
cgtcgtatctagacatgaa

SEQ ID NO: 362541 - DNA, 19 bp, Homo sapiens
  siRNA target sequence for KIAA1797 (NM_017794.2,3318-3336).
cctggaggttcaacctaat

SEQ ID NO: 362542 - DNA, 19 bp, Homo sapiens
  siRNA target sequence for KIAA1797 (NM_017794.2,3324-3342).
ggttcaacctaatttcctt

SEQ ID NO: 362543 - DNA, 19 bp, Homo sapiens
  siRNA target sequence for KIAA1797 (NM_017794.2,3325-3343).
gttcaacctaatttccttt

SEQ ID NO: 362544 - DNA, 19 bp, Homo sapiens
  siRNA target sequence for KIAA1797 (NM_017794.2,3362-3380).
ccatggtacttgatacact

SEQ ID NO: 362545 - DNA, 19 bp, Homo sapiens
  siRNA target sequence for KIAA1797 (NM_017794.2,3447-3465).
ctattctggtgaaaacaca

SEQ ID NO: 362546 - DNA, 19 bp, Homo sapiens
  siRNA target sequence for KIAA1797 (NM_017794.2,3608-3626).
ctcaagccgtgcaaatcca

SEQ ID NO: 362547 - DNA, 19 bp, Homo sapiens
  siRNA target sequence for KIAA1797 (NM_017794.2,3633-3651).
ccttgctttagggatgttt

SEQ ID NO: 362548 - DNA, 19 bp, Homo sapiens
  siRNA target sequence for KIAA1797 (NM_017794.2,3637-3655).
gctttagggatgtttctct

SEQ ID NO: 362549 - DNA, 19 bp, Homo sapiens
  siRNA target sequence for KIAA1797 (NM_017794.2,3722-3740).
cgttggatgccctggaaaa

SEQ ID NO: 362550 - DNA, 19 bp, Homo sapiens
  siRNA target sequence for KIAA1797 (NM_017794.2,3723-3741).
gttggatgccctggaaaat

SEQ ID NO: 362551 - DNA, 19 bp, Homo sapiens
  siRNA target sequence for KIAA1797 (NM_017794.2,3894-3912).
gagccagagcagaacgttt

SEQ ID NO: 362552 - DNA, 19 bp, Homo sapiens
  siRNA target sequence for KIAA1797 (NM_017794.2,3919-3937).
gtccttgcctacacactta

SEQ ID NO: 362553 - DNA, 19 bp, Homo sapiens
  siRNA target sequence for KIAA1797 (NM_017794.2,3955-3973).
gcgttcagtgctggaatta

SEQ ID NO: 362554 - DNA, 19 bp, Homo sapiens
  siRNA target sequence for KIAA1797 (NM_017794.2,3956-3974).
cgttcagtgctggaattat

SEQ ID NO: 362555 - DNA, 19 bp, Homo sapiens
  siRNA target sequence for KIAA1797 (NM_017794.2,4002-4020).
gaacaagcttcgactgtta

SEQ ID NO: 362556 - DNA, 19 bp, Homo sapiens
  siRNA target sequence for KIAA1797 (NM_017794.2,4012-4030).
cgactgttagtggagaata

SEQ ID NO: 362557 - DNA, 19 bp, Homo sapiens
  siRNA target sequence for KIAA1797 (NM_017794.2,4052-4070).
ccctggctttaggaaacat

SEQ ID NO: 362558 - DNA, 19 bp, Homo sapiens
  siRNA target sequence for KIAA1797 (NM_017794.2,4089-4107).
gtgtggacatggaaaagct

SEQ ID NO: 362559 - DNA, 19 bp, Homo sapiens
  siRNA target sequence for KIAA1797 (NM_017794.2,4131-4149).
ccctgcctggatcagaatt

SEQ ID NO: 362560 - DNA, 19 bp, Homo sapiens
  siRNA target sequence for KIAA1797 (NM_017794.2,4217-4235).
gctctgaaggggatgtaat

SEQ ID NO: 362561 - DNA, 19 bp, Homo sapiens
  siRNA target sequence for KIAA1797 (NM_017794.2,4252-4270).
gccatccagacctctcatt

SEQ ID NO: 362562 - DNA, 19 bp, Homo sapiens
  siRNA target sequence for KIAA1797 (NM_017794.2,4282-4300).
cttaatgaagtcattagaa

SEQ ID NO: 362563 - DNA, 19 bp, Homo sapiens
  siRNA target sequence for KIAA1797 (NM_017794.2,4288-4306).
gaagtcattagaaccttaa

SEQ ID NO: 362564 - DNA, 19 bp, Homo sapiens
  siRNA target sequence for KIAA1797 (NM_017794.2,4366-4384).
ggacatcttcatctatcta

SEQ ID NO: 362565 - DNA, 19 bp, Homo sapiens
  siRNA target sequence for KIAA1797 (NM_017794.2,4517-4535).
cccttcttaaagtagtgat

SEQ ID NO: 362566 - DNA, 19 bp, Homo sapiens
  siRNA target sequence for KIAA1797 (NM_017794.2,4603-4621).
ccacttatgaggctaaatt

SEQ ID NO: 362567 - DNA, 19 bp, Homo sapiens
  siRNA target sequence for KIAA1797 (NM_017794.2,4604-4622).
cacttatgaggctaaattt

SEQ ID NO: 362568 - DNA, 19 bp, Homo sapiens
  siRNA target sequence for KIAA1797 (NM_017794.2,4638-4656).
gcaactgtgccttgaaatt

SEQ ID NO: 362569 - DNA, 19 bp, Homo sapiens
  siRNA target sequence for KIAA1797 (NM_017794.2,4639-4657).
caactgtgccttgaaatta

SEQ ID NO: 362570 - DNA, 19 bp, Homo sapiens
  siRNA target sequence for KIAA1797 (NM_017794.2,4728-4746).
ccacagtctgagtctgaat

SEQ ID NO: 362571 - DNA, 19 bp, Homo sapiens
  siRNA target sequence for KIAA1797 (NM_017794.2,4729-4747).
cacagtctgagtctgaata

SEQ ID NO: 362572 - DNA, 19 bp, Homo sapiens
  siRNA target sequence for KIAA1797 (NM_017794.2,4752-4770).
gagatatctcctgatatct

SEQ ID NO: 362573 - DNA, 19 bp, Homo sapiens
  siRNA target sequence for KIAA1797 (NM_017794.2,4769-4787).
ctgcacctctgtggataaa

SEQ ID NO: 362574 - DNA, 19 bp, Homo sapiens
  siRNA target sequence for KIAA1797 (NM_017794.2,4806-4824).
gatcctgggttttgttgaa

SEQ ID NO: 362575 - DNA, 19 bp, Homo sapiens
  siRNA target sequence for KIAA1797 (NM_017794.2,5071-5089).
cggatcgcccaggttacta

SEQ ID NO: 362576 - DNA, 19 bp, Homo sapiens
  siRNA target sequence for KIAA1797 (NM_017794.2,5072-5090).
ggatcgcccaggttactaa

SEQ ID NO: 362577 - DNA, 19 bp, Homo sapiens
  siRNA target sequence for KIAA1797 (NM_017794.2,5087-5105).
ctaagagcaacatagaaaa

SEQ ID NO: 362578 - DNA, 19 bp, Homo sapiens
  siRNA target sequence for KIAA1797 (NM_017794.2,5107-5125).
gctgcctttgtcaaactgt

SEQ ID NO: 362579 - DNA, 19 bp, Homo sapiens
  siRNA target sequence for KIAA1797 (NM_017794.2,5108-5126).
ctgcctttgtcaaactgta

SEQ ID NO: 362580 - DNA, 19 bp, Homo sapiens
  siRNA target sequence for KIAA1797 (NM_017794.2,5260-5278).
gccaatacgggcgttttga

SEQ ID NO: 362581 - DNA, 19 bp, Homo sapiens
  siRNA target sequence for KIAA1797 (NM_017794.2,5261-5279).
ccaatacgggcgttttgaa

SEQ ID NO: 362582 - DNA, 19 bp, Homo sapiens
  siRNA target sequence for KIAA1797 (NM_017794.2,5267-5285).
cgggcgttttgaagagaat

SEQ ID NO: 362583 - DNA, 19 bp, Homo sapiens
  siRNA target sequence for KIAA1797 (NM_017794.2,5298-5316).
ggaactgatgggttatatt

SEQ ID NO: 362584 - DNA, 19 bp, Homo sapiens
  siRNA target sequence for KIAA1797 (NM_017794.2,5716-5734).
gttctcccagagtttaaga

SEQ ID NO: 362585 - DNA, 19 bp, Homo sapiens
  siRNA target sequence for C20orf21 (NM_017798.2,312-330).
ggacacccagagaacaaaa

SEQ ID NO: 362586 - DNA, 19 bp, Homo sapiens
  siRNA target sequence for C20orf21 (NM_017798.2,391-409).
gactttgagccctacctta

SEQ ID NO: 362587 - DNA, 19 bp, Homo sapiens
  siRNA target sequence for C20orf21 (NM_017798.2,405-423).
ccttactggacagtcaaat

SEQ ID NO: 362588 - DNA, 19 bp, Homo sapiens
  siRNA target sequence for C20orf21 (NM_017798.2,477-495).
gccgtccattggatttcct

SEQ ID NO: 362589 - DNA, 19 bp, Homo sapiens
  siRNA target sequence for C20orf21 (NM_017798.2,529-547).
ggggaccctccgattccat

SEQ ID NO: 362590 - DNA, 19 bp, Homo sapiens
  siRNA target sequence for C20orf21 (NM_017798.2,530-548).
gggaccctccgattccata

SEQ ID NO: 362591 - DNA, 19 bp, Homo sapiens
  siRNA target sequence for C20orf21 (NM_017798.2,557-575).
cctacggacagctcagtaa

SEQ ID NO: 362592 - DNA, 19 bp, Homo sapiens
  siRNA target sequence for C20orf21 (NM_017798.2,572-590).
gtaacggagaccatcattt

SEQ ID NO: 362593 - DNA, 19 bp, Homo sapiens
  siRNA target sequence for C20orf21 (NM_017798.2,624-642).
cctggggaacaacatctat

SEQ ID NO: 362594 - DNA, 19 bp, Homo sapiens
  siRNA target sequence for C20orf21 (NM_017798.2,639-657).
ctatcagcacaggttcaat

SEQ ID NO: 362595 - DNA, 19 bp, Homo sapiens
  siRNA target sequence for C20orf21 (NM_017798.2,1078-1096).
cctccacccataaagcata

SEQ ID NO: 362596 - DNA, 19 bp, Homo sapiens
  siRNA target sequence for C20orf21 (NM_017798.2,1079-1097).
ctccacccataaagcataa

SEQ ID NO: 362597 - DNA, 19 bp, Homo sapiens
  siRNA target sequence for C20orf21 (NM_017798.2,1231-1249).
gctcaaccgcagtatcaga

SEQ ID NO: 362598 - DNA, 19 bp, Homo sapiens
  siRNA target sequence for C20orf21 (NM_017798.2,1279-1297).
gttgccccacgcaacagaa

SEQ ID NO: 362599 - DNA, 19 bp, Homo sapiens
  siRNA target sequence for C20orf21 (NM_017798.2,1322-1340).
gggctggcagcgatagcaa

SEQ ID NO: 362600 - DNA, 19 bp, Homo sapiens
  siRNA target sequence for C20orf21 (NM_017798.2,1348-1366).
ggaaacgtccagcctaatt

SEQ ID NO: 362601 - DNA, 19 bp, Homo sapiens
  siRNA target sequence for C20orf21 (NM_017798.2,1390-1408).
cccgtccttgaaaaactga

SEQ ID NO: 362602 - DNA, 19 bp, Homo sapiens
  siRNA target sequence for C20orf21 (NM_017798.2,1501-1519).
caccgctccattaagtact

SEQ ID NO: 362603 - DNA, 19 bp, Homo sapiens
  siRNA target sequence for C20orf21 (NM_017798.2,1636-1654).
ggggtggccgagatgaagt

SEQ ID NO: 362604 - DNA, 19 bp, Homo sapiens
  siRNA target sequence for C20orf21 (NM_017798.2,1821-1839).
ggaggtgcccttagaaaaa

SEQ ID NO: 362605 - DNA, 19 bp, Homo sapiens
  siRNA target sequence for C14orf101 (NM_017799.2,295-313).
cctggctatcctttgttca

SEQ ID NO: 362606 - DNA, 19 bp, Homo sapiens
  siRNA target sequence for C14orf101 (NM_017799.2,321-339).
ggctaaactggcaattaca

SEQ ID NO: 362607 - DNA, 19 bp, Homo sapiens
  siRNA target sequence for C14orf101 (NM_017799.2,331-349).
gcaattacactgtttcctt

SEQ ID NO: 362608 - DNA, 19 bp, Homo sapiens
  siRNA target sequence for C14orf101 (NM_017799.2,342-360).
gtttccttttggttcaatt

SEQ ID NO: 362609 - DNA, 19 bp, Homo sapiens
  siRNA target sequence for C14orf101 (NM_017799.2,362-380).
cctaccgcgtcaatcttct

SEQ ID NO: 362610 - DNA, 19 bp, Homo sapiens
  siRNA target sequence for C14orf101 (NM_017799.2,395-413).
gagcagtagctgcatcatt

SEQ ID NO: 362611 - DNA, 19 bp, Homo sapiens
  siRNA target sequence for C14orf101 (NM_017799.2,398-416).
cagtagctgcatcattact

SEQ ID NO: 362612 - DNA, 19 bp, Homo sapiens
  siRNA target sequence for C14orf101 (NM_017799.2,415-433).
ctttttttcaccgttttca

SEQ ID NO: 362613 - DNA, 19 bp, Homo sapiens
  siRNA target sequence for C14orf101 (NM_017799.2,515-533).
cagcagaggtttttagctt

SEQ ID NO: 362614 - DNA, 19 bp, Homo sapiens
  siRNA target sequence for C14orf101 (NM_017799.2,517-535).
gcagaggtttttagcttaa

SEQ ID NO: 362615 - DNA, 19 bp, Homo sapiens
  siRNA target sequence for C14orf101 (NM_017799.2,518-536).
cagaggtttttagcttaaa

SEQ ID NO: 362616 - DNA, 19 bp, Homo sapiens
  siRNA target sequence for C14orf101 (NM_017799.2,552-570).
gctgcttatggctcttact

SEQ ID NO: 362617 - DNA, 19 bp, Homo sapiens
  siRNA target sequence for C14orf101 (NM_017799.2,555-573).
gcttatggctcttactgta

SEQ ID NO: 362618 - DNA, 19 bp, Homo sapiens
  siRNA target sequence for C14orf101 (NM_017799.2,563-581).
ctcttactgtacattttga

SEQ ID NO: 362619 - DNA, 19 bp, Homo sapiens
  siRNA target sequence for C14orf101 (NM_017799.2,603-621).
gagatcaaaggtagctaaa

SEQ ID NO: 362620 - DNA, 19 bp, Homo sapiens
  siRNA target sequence for C14orf101 (NM_017799.2,658-676).
cagcacacaataatactct

SEQ ID NO: 362621 - DNA, 19 bp, Homo sapiens
  siRNA target sequence for C14orf101 (NM_017799.2,675-693).
ctatgttttgtgcataata

SEQ ID NO: 362622 - DNA, 19 bp, Homo sapiens
  siRNA target sequence for C14orf101 (NM_017799.2,684-702).
gtgcataataccttggatt

SEQ ID NO: 362623 - DNA, 19 bp, Homo sapiens
  siRNA target sequence for C14orf101 (NM_017799.2,906-924).
ggccaaatctgaaatagga

SEQ ID NO: 362624 - DNA, 19 bp, Homo sapiens
  siRNA target sequence for C14orf101 (NM_017799.2,907-925).
gccaaatctgaaataggat

SEQ ID NO: 362625 - DNA, 19 bp, Homo sapiens
  siRNA target sequence for C14orf101 (NM_017799.2,946-964).
ctttctcaagtaacaaata

SEQ ID NO: 362626 - DNA, 19 bp, Homo sapiens
  siRNA target sequence for C14orf101 (NM_017799.2,968-986).
ggaccgaactctcattcaa

SEQ ID NO: 362627 - DNA, 19 bp, Homo sapiens
  siRNA target sequence for C14orf101 (NM_017799.2,1024-1042).
gcaacaaagtggaacgatt

SEQ ID NO: 362628 - DNA, 19 bp, Homo sapiens
  siRNA target sequence for FLJ20397 (NM_017802.2,712-730).
caggcgcagtgatccattt

SEQ ID NO: 362629 - DNA, 19 bp, Homo sapiens
  siRNA target sequence for FLJ20397 (NM_017802.2,752-770).
cgacgtgctttcccatttt

SEQ ID NO: 362630 - DNA, 19 bp, Homo sapiens
  siRNA target sequence for FLJ20397 (NM_017802.2,1296-1314).
ctcgtcgggacgtttgtca

SEQ ID NO: 362631 - DNA, 19 bp, Homo sapiens
  siRNA target sequence for FLJ20397 (NM_017802.2,1315-1333).
gccctgaggtgtttctgaa

SEQ ID NO: 362632 - DNA, 19 bp, Homo sapiens
  siRNA target sequence for FLJ20397 (NM_017802.2,1329-1347).
ctgaagctgatcttatcga

SEQ ID NO: 362633 - DNA, 19 bp, Homo sapiens
  siRNA target sequence for FLJ20397 (NM_017802.2,1469-1487).
catctgccaggcatctgaa

SEQ ID NO: 362634 - DNA, 19 bp, Homo sapiens
  siRNA target sequence for FLJ20397 (NM_017802.2,1474-1492).
gccaggcatctgaaaacga

SEQ ID NO: 362635 - DNA, 19 bp, Homo sapiens
  siRNA target sequence for FLJ20397 (NM_017802.2,1580-1598).
ggacgtgctgctgacaata

SEQ ID NO: 362636 - DNA, 19 bp, Homo sapiens
  siRNA target sequence for FLJ20397 (NM_017802.2,2429-2447).
ggccatccaggatgcaatt

SEQ ID NO: 362637 - DNA, 19 bp, Homo sapiens
  siRNA target sequence for FLJ20397 (NM_017802.2,2430-2448).
gccatccaggatgcaattt

SEQ ID NO: 362638 - DNA, 19 bp, Homo sapiens
  siRNA target sequence for FLJ20397 (NM_017802.2,2432-2450).
catccaggatgcaatttta

SEQ ID NO: 362639 - DNA, 19 bp, Homo sapiens
  siRNA target sequence for RAIN (NM_017805.2,1225-1243).
gacagcaggcacttagcat

SEQ ID NO: 362640 - DNA, 19 bp, Homo sapiens
  siRNA target sequence for RAIN (NM_017805.2,1636-1654).
gcgagcacttcctgttcat

SEQ ID NO: 362641 - DNA, 19 bp, Homo sapiens
  siRNA target sequence for RAIN (NM_017805.2,2021-2039).
ggccgtctgggaaaagatt

SEQ ID NO: 362642 - DNA, 19 bp, Homo sapiens
  siRNA target sequence for RAIN (NM_017805.2,2022-2040).
gccgtctgggaaaagatta

SEQ ID NO: 362643 - DNA, 19 bp, Homo sapiens
  siRNA target sequence for RAIN (NM_017805.2,2023-2041).
ccgtctgggaaaagattaa

SEQ ID NO: 362644 - DNA, 19 bp, Homo sapiens
  siRNA target sequence for RAIN (NM_017805.2,2156-2174).
cacggagctgcttagcttt

SEQ ID NO: 362645 - DNA, 19 bp, Homo sapiens
  siRNA target sequence for RAIN (NM_017805.2,2231-2249).
ctgcaatgacttggaatta

SEQ ID NO: 362646 - DNA, 19 bp, Homo sapiens
  siRNA target sequence for RAIN (NM_017805.2,2274-2292).
gatgaggtcatcatgtgta

SEQ ID NO: 362647 - DNA, 19 bp, Homo sapiens
  siRNA target sequence for RAIN (NM_017805.2,2343-2361).
cctgctctcctggatagta

SEQ ID NO: 362648 - DNA, 19 bp, Homo sapiens
  siRNA target sequence for RAIN (NM_017805.2,2344-2362).
ctgctctcctggatagtaa

SEQ ID NO: 362649 - DNA, 19 bp, Homo sapiens
  siRNA target sequence for RAIN (NM_017805.2,2354-2372).
ggatagtaaccctttcaca

SEQ ID NO: 362650 - DNA, 19 bp, Homo sapiens
  siRNA target sequence for RAIN (NM_017805.2,2495-2513).
cctcgtgtctcagactttt

SEQ ID NO: 362651 - DNA, 19 bp, Homo sapiens
  siRNA target sequence for RAIN (NM_017805.2,2593-2611).
ggtcccgagctgttcaaat

SEQ ID NO: 362652 - DNA, 19 bp, Homo sapiens
  siRNA target sequence for RAIN (NM_017805.2,2676-2694).
gagttcttccggaaactct

SEQ ID NO: 362653 - DNA, 19 bp, Homo sapiens
  siRNA target sequence for RAIN (NM_017805.2,2890-2908).
gggacatcttcgaaagctt

SEQ ID NO: 362654 - DNA, 19 bp, Homo sapiens
  siRNA target sequence for FLJ20420 (NM_017812.1,178-196).
cggacgagaatgagaacat

SEQ ID NO: 362655 - DNA, 19 bp, Homo sapiens
  siRNA target sequence for FLJ20420 (NM_017812.1,180-198).
gacgagaatgagaacatca

SEQ ID NO: 362656 - DNA, 19 bp, Homo sapiens
  siRNA target sequence for FLJ20420 (NM_017812.1,212-230).
catccggctttcggaaaat

SEQ ID NO: 362657 - DNA, 19 bp, Homo sapiens
  siRNA target sequence for FLJ20420 (NM_017812.1,218-236).
gctttcggaaaatgtgatt

SEQ ID NO: 362658 - DNA, 19 bp, Homo sapiens
  siRNA target sequence for FLJ20420 (NM_017812.1,269-287).
gaagtctcagcggtattct

SEQ ID NO: 362659 - DNA, 19 bp, Homo sapiens
  siRNA target sequence for FLJ20420 (NM_017812.1,278-296).
gcggtattctggtgcttat

SEQ ID NO: 362660 - DNA, 19 bp, Homo sapiens
  siRNA target sequence for FLJ20420 (NM_017812.1,426-444).
gctgccaatgagcagttaa

SEQ ID NO: 362661 - DNA, 19 bp, Homo sapiens
  siRNA target sequence for FLJ20420 (NM_017812.1,429-447).
gccaatgagcagttaacca

SEQ ID NO: 362662 - DNA, 19 bp, Homo sapiens
  siRNA target sequence for FLJ20420 (NM_017812.1,455-473).
ccttcgggagaggatatgt

SEQ ID NO: 362663 - DNA, 19 bp, Homo sapiens
  siRNA target sequence for FLJ20420 (NM_017812.1,456-474).
cttcgggagaggatatgta

SEQ ID NO: 362664 - DNA, 19 bp, Homo sapiens
  siRNA target sequence for FLJ20420 (NM_017812.1,548-566).
ggatgcattctacaaagaa

SEQ ID NO: 362665 - DNA, 19 bp, Homo sapiens
  siRNA target sequence for FLJ20420 (NM_017812.1,700-718).
ccaaaattcttcagtgtta

SEQ ID NO: 362666 - DNA, 19 bp, Homo sapiens
  siRNA target sequence for FLJ20420 (NM_017812.1,767-785).
gtatatgcactgtgtcaat

SEQ ID NO: 362667 - DNA, 19 bp, Homo sapiens
  siRNA target sequence for FLJ20422 (NM_017814.1,134-152).
gcagtttgttccgatacaa

SEQ ID NO: 362668 - DNA, 19 bp, Homo sapiens
  siRNA target sequence for FLJ20422 (NM_017814.1,221-239).
gggccaatggccttagtga

SEQ ID NO: 362669 - DNA, 19 bp, Homo sapiens
  siRNA target sequence for FLJ20422 (NM_017814.1,413-431).
gaccagccaaggagactaa

SEQ ID NO: 362670 - DNA, 19 bp, Homo sapiens
  siRNA target sequence for FLJ20422 (NM_017814.1,490-508).
gtgacacggctgtacttca

SEQ ID NO: 362671 - DNA, 19 bp, Homo sapiens
  siRNA target sequence for FLJ20422 (NM_017814.1,632-650).
ccagcatgacccagaactt

SEQ ID NO: 362672 - DNA, 19 bp, Homo sapiens
  siRNA target sequence for FLJ20422 (NM_017814.1,1091-1109).
gcatcgaagcccgtgaaat

SEQ ID NO: 362673 - DNA, 19 bp, Homo sapiens
  siRNA target sequence for FLJ20422 (NM_017814.1,1126-1144).
cgagtctactgctatgtga

SEQ ID NO: 362674 - DNA, 19 bp, Homo sapiens
  siRNA target sequence for FLJ20422 (NM_017814.1,1427-1445).
gccttttcggcctctactt

SEQ ID NO: 362675 - DNA, 19 bp, Homo sapiens
  siRNA target sequence for C14orf94 (NM_017815.1,418-436).
gaagttcgactgcataaga

SEQ ID NO: 362676 - DNA, 19 bp, Homo sapiens
  siRNA target sequence for C14orf94 (NM_017815.1,480-498).
gttgcttgtggactactat

SEQ ID NO: 362677 - DNA, 19 bp, Homo sapiens
  siRNA target sequence for C14orf94 (NM_017815.1,561-579).
gcggctgcttgtaactgaa

SEQ ID NO: 362678 - DNA, 19 bp, Homo sapiens
  siRNA target sequence for C14orf94 (NM_017815.1,644-662).
cggaccttctggaactcat

SEQ ID NO: 362679 - DNA, 19 bp, Homo sapiens
  siRNA target sequence for C14orf94 (NM_017815.1,695-713).
ctcggctacagcaagaagt

SEQ ID NO: 362680 - DNA, 19 bp, Homo sapiens
  siRNA target sequence for C14orf94 (NM_017815.1,1004-1022).
cccagtacctggaagtcaa

SEQ ID NO: 362681 - DNA, 19 bp, Homo sapiens
  siRNA target sequence for C14orf94 (NM_017815.1,1025-1043).
gcggtgctatgatccttaa

SEQ ID NO: 362682 - DNA, 19 bp, Homo sapiens
  siRNA target sequence for C14orf94 (NM_017815.1,1028-1046).
gtgctatgatccttaagct

SEQ ID NO: 362683 - DNA, 19 bp, Homo sapiens
  siRNA target sequence for C14orf94 (NM_017815.1,1098-1116).
ggaagttcatcgtctgatt

SEQ ID NO: 362684 - DNA, 19 bp, Homo sapiens
  siRNA target sequence for C14orf94 (NM_017815.1,1099-1117).
gaagttcatcgtctgatta

SEQ ID NO: 362685 - DNA, 19 bp, Homo sapiens
  siRNA target sequence for LYAR (NM_017816.1,252-270).
gtgtctgtttgcagaaact

SEQ ID NO: 362686 - DNA, 19 bp, Homo sapiens
  siRNA target sequence for LYAR (NM_017816.1,286-304).
gcattgactgcggtaaaga

SEQ ID NO: 362687 - DNA, 19 bp, Homo sapiens
  siRNA target sequence for LYAR (NM_017816.1,287-305).
cattgactgcggtaaagat

SEQ ID NO: 362688 - DNA, 19 bp, Homo sapiens
  siRNA target sequence for LYAR (NM_017816.1,291-309).
gactgcggtaaagatttct

SEQ ID NO: 362689 - DNA, 19 bp, Homo sapiens
  siRNA target sequence for LYAR (NM_017816.1,308-326).
ctggggcgatgactataaa

SEQ ID NO: 362690 - DNA, 19 bp, Homo sapiens
  siRNA target sequence for LYAR (NM_017816.1,313-331).
gcgatgactataaaaacca

SEQ ID NO: 362691 - DNA, 19 bp, Homo sapiens
  siRNA target sequence for LYAR (NM_017816.1,329-347).
ccacgtgaaatgcataagt

SEQ ID NO: 362692 - DNA, 19 bp, Homo sapiens
  siRNA target sequence for LYAR (NM_017816.1,332-350).
cgtgaaatgcataagtgaa

SEQ ID NO: 362693 - DNA, 19 bp, Homo sapiens
  siRNA target sequence for LYAR (NM_017816.1,388-406).
cccacaaaggcgacatcaa

SEQ ID NO: 362694 - DNA, 19 bp, Homo sapiens
  siRNA target sequence for LYAR (NM_017816.1,389-407).
ccacaaaggcgacatcaaa

SEQ ID NO: 362695 - DNA, 19 bp, Homo sapiens
  siRNA target sequence for LYAR (NM_017816.1,411-429).
caggcgtggattcagaaaa

SEQ ID NO: 362696 - DNA, 19 bp, Homo sapiens
  siRNA target sequence for LYAR (NM_017816.1,418-436).
ggattcagaaaattagtga

SEQ ID NO: 362697 - DNA, 19 bp, Homo sapiens
  siRNA target sequence for LYAR (NM_017816.1,419-437).
gattcagaaaattagtgaa

SEQ ID NO: 362698 - DNA, 19 bp, Homo sapiens
  siRNA target sequence for LYAR (NM_017816.1,462-480).
cccaaagtgagagaacttt

SEQ ID NO: 362699 - DNA, 19 bp, Homo sapiens
  siRNA target sequence for LYAR (NM_017816.1,472-490).
gagaacttttagagcaaat

SEQ ID NO: 362700 - DNA, 19 bp, Homo sapiens
  siRNA target sequence for LYAR (NM_017816.1,579-597).
gaccaggtgtggaatatct

SEQ ID NO: 362701 - DNA, 19 bp, Homo sapiens
  siRNA target sequence for LYAR (NM_017816.1,611-629).
caacagcgaaccagtcaat

SEQ ID NO: 362702 - DNA, 19 bp, Homo sapiens
  siRNA target sequence for LYAR (NM_017816.1,616-634).
gcgaaccagtcaataagga

SEQ ID NO: 362703 - DNA, 19 bp, Homo sapiens
  siRNA target sequence for LYAR (NM_017816.1,1007-1025).
gaggcactcggaagttgaa

SEQ ID NO: 362704 - DNA, 19 bp, Homo sapiens
  siRNA target sequence for LYAR (NM_017816.1,1010-1028).
gcactcggaagttgaaaca

SEQ ID NO: 362705 - DNA, 19 bp, Homo sapiens
  siRNA target sequence for LYAR (NM_017816.1,1088-1106).
cgatgaggctcctgcaaaa

SEQ ID NO: 362706 - DNA, 19 bp, Homo sapiens
  siRNA target sequence for LYAR (NM_017816.1,1092-1110).
gaggctcctgcaaaaggta

SEQ ID NO: 362707 - DNA, 19 bp, Homo sapiens
  siRNA target sequence for LYAR (NM_017816.1,1094-1112).
ggctcctgcaaaaggtaaa

SEQ ID NO: 362708 - DNA, 19 bp, Homo sapiens
  siRNA target sequence for LYAR (NM_017816.1,1124-1142).
gggaactattaaagcaatt

SEQ ID NO: 362709 - DNA, 19 bp, Homo sapiens
  siRNA target sequence for LYAR (NM_017816.1,1151-1169).
ggccccagacaatgaaata

SEQ ID NO: 362710 - DNA, 19 bp, Homo sapiens
  siRNA target sequence for LYAR (NM_017816.1,1152-1170).
gccccagacaatgaaataa

SEQ ID NO: 362711 - DNA, 19 bp, Homo sapiens
  siRNA target sequence for LYAR (NM_017816.1,1244-1262).
ggaactcctggtcatcttt

SEQ ID NO: 362712 - DNA, 19 bp, Homo sapiens
  siRNA target sequence for LYAR (NM_017816.1,1245-1263).
gaactcctggtcatcttta

SEQ ID NO: 362713 - DNA, 19 bp, Homo sapiens
  siRNA target sequence for LYAR (NM_017816.1,1253-1271).
ggtcatctttaacaagaaa

SEQ ID NO: 362714 - DNA, 19 bp, Homo sapiens
  siRNA target sequence for LYAR (NM_017816.1,1274-1292).
cagcaagaaccctaccttt

SEQ ID NO: 362715 - DNA, 19 bp, Homo sapiens
  siRNA target sequence for LYAR (NM_017816.1,1280-1298).
gaaccctacctttaagtta

SEQ ID NO: 362716 - DNA, 19 bp, Homo sapiens
  siRNA target sequence for LYAR (NM_017816.1,1283-1301).
ccctacctttaagttatta

SEQ ID NO: 362717 - DNA, 19 bp, Homo sapiens
  siRNA target sequence for WDR8 (NM_017818.2,244-262).
cggcagactcgctcttcat

SEQ ID NO: 362718 - DNA, 19 bp, Homo sapiens
  siRNA target sequence for WDR8 (NM_017818.2,317-335).
cgaatggcactgcaaaata

SEQ ID NO: 362719 - DNA, 19 bp, Homo sapiens
  siRNA target sequence for WDR8 (NM_017818.2,439-457).
gcacaaaatccgtgtctta

SEQ ID NO: 362720 - DNA, 19 bp, Homo sapiens
  siRNA target sequence for WDR8 (NM_017818.2,448-466).
ccgtgtcttacatcaaata

SEQ ID NO: 362721 - DNA, 19 bp, Homo sapiens
  siRNA target sequence for WDR8 (NM_017818.2,535-553).
gcgactgcaaagattacgt

SEQ ID NO: 362722 - DNA, 19 bp, Homo sapiens
  siRNA target sequence for WDR8 (NM_017818.2,581-599).
gctcctgcggcattttgat

SEQ ID NO: 362723 - DNA, 19 bp, Homo sapiens
  siRNA target sequence for WDR8 (NM_017818.2,582-600).
ctcctgcggcattttgata

SEQ ID NO: 362724 - DNA, 19 bp, Homo sapiens
  siRNA target sequence for WDR8 (NM_017818.2,670-688).
gcttggagtacaagattct

SEQ ID NO: 362725 - DNA, 19 bp, Homo sapiens
  siRNA target sequence for WDR8 (NM_017818.2,807-825).
ggaaaggtgcgcatcctta

SEQ ID NO: 362726 - DNA, 19 bp, Homo sapiens
  siRNA target sequence for WDR8 (NM_017818.2,808-826).
gaaaggtgcgcatccttaa

SEQ ID NO: 362727 - DNA, 19 bp, Homo sapiens
  siRNA target sequence for WDR8 (NM_017818.2,979-997).
cgagctcagagagtaaata

SEQ ID NO: 362728 - DNA, 19 bp, Homo sapiens
  siRNA target sequence for WDR8 (NM_017818.2,1011-1029).
gtcccagtctccttacaga

SEQ ID NO: 362729 - DNA, 19 bp, Homo sapiens
  siRNA target sequence for WDR8 (NM_017818.2,1112-1130).
gacaaggaacgacaacatt

SEQ ID NO: 362730 - DNA, 19 bp, Homo sapiens
  siRNA target sequence for FLJ20432 (NM_017819.1,703-721).
ggaatatggacatagcaat

SEQ ID NO: 362731 - DNA, 19 bp, Homo sapiens
  siRNA target sequence for FLJ20432 (NM_017819.1,773-791).
catggcttacgaaaattat

SEQ ID NO: 362732 - DNA, 19 bp, Homo sapiens
  siRNA target sequence for FLJ20432 (NM_017819.1,777-795).
gcttacgaaaattatatga

SEQ ID NO: 362733 - DNA, 19 bp, Homo sapiens
  siRNA target sequence for FLJ20432 (NM_017819.1,911-929).
gcacagagagttagttaaa

SEQ ID NO: 362734 - DNA, 19 bp, Homo sapiens
  siRNA target sequence for FLJ20432 (NM_017819.1,920-938).
gttagttaaacggtatcaa

SEQ ID NO: 362735 - DNA, 19 bp, Homo sapiens
  siRNA target sequence for FLJ20432 (NM_017819.1,948-966).
gacaaattgcttttaacat

SEQ ID NO: 362736 - DNA, 19 bp, Homo sapiens
  siRNA target sequence for FLJ20432 (NM_017819.1,1004-1022).
cagtattatctatttaact

SEQ ID NO: 362737 - DNA, 19 bp, Homo sapiens
  siRNA target sequence for FLJ20432 (NM_017819.1,1048-1066).
ctttcaggcatgacaaagt

SEQ ID NO: 362738 - DNA, 19 bp, Homo sapiens
  siRNA target sequence for FLJ20432 (NM_017819.1,1052-1070).
caggcatgacaaagtttat

SEQ ID NO: 362739 - DNA, 19 bp, Homo sapiens
  siRNA target sequence for FLJ20432 (NM_017819.1,1055-1073).
gcatgacaaagtttatgta

SEQ ID NO: 362740 - DNA, 19 bp, Homo sapiens
  siRNA target sequence for FLJ20432 (NM_017819.1,1133-1151).
gctgaacctggcaactgaa

SEQ ID NO: 362741 - DNA, 19 bp, Homo sapiens
  siRNA target sequence for FLJ20432 (NM_017819.1,1147-1165).
ctgaatgccttccattaga

SEQ ID NO: 362742 - DNA, 19 bp, Homo sapiens
  siRNA target sequence for FLJ20432 (NM_017819.1,1149-1167).
gaatgccttccattagata

SEQ ID NO: 362743 - DNA, 19 bp, Homo sapiens
  siRNA target sequence for FLJ20432 (NM_017819.1,1209-1227).
gatcaaatgatacgtattt

SEQ ID NO: 362744 - DNA, 19 bp, Homo sapiens
  siRNA target sequence for FLJ20432 (NM_017819.1,1212-1230).
caaatgatacgtattttgt

SEQ ID NO: 362745 - DNA, 19 bp, Homo sapiens
  siRNA target sequence for FLJ20432 (NM_017819.1,1234-1252).
gtctgaaaaacaatggtaa

SEQ ID NO: 362746 - DNA, 19 bp, Homo sapiens
  siRNA target sequence for FLJ20432 (NM_017819.1,1255-1273).
ggcaagaggctctgcaatt

SEQ ID NO: 362747 - DNA, 19 bp, Homo sapiens
  siRNA target sequence for FLJ20432 (NM_017819.1,1269-1287).
caattcgttcccaagagaa

SEQ ID NO: 362748 - DNA, 19 bp, Homo sapiens
  siRNA target sequence for FLJ20436 (NM_017822.1,507-525).
gcgtgaaaagctaattcgt

SEQ ID NO: 362749 - DNA, 19 bp, Homo sapiens
  siRNA target sequence for FLJ20436 (NM_017822.1,508-526).
cgtgaaaagctaattcgtt

SEQ ID NO: 362750 - DNA, 19 bp, Homo sapiens
  siRNA target sequence for FLJ20436 (NM_017822.1,509-527).
gtgaaaagctaattcgttt

SEQ ID NO: 362751 - DNA, 19 bp, Homo sapiens
  siRNA target sequence for FLJ20436 (NM_017822.1,523-541).
cgtttgcagtcgttgtata

SEQ ID NO: 362752 - DNA, 19 bp, Homo sapiens
  siRNA target sequence for FLJ20436 (NM_017822.1,579-597).
gaagaagcgccgatactta

SEQ ID NO: 362753 - DNA, 19 bp, Homo sapiens
  siRNA target sequence for FLJ20436 (NM_017822.1,582-600).
gaagcgccgatacttacat

SEQ ID NO: 362754 - DNA, 19 bp, Homo sapiens
  siRNA target sequence for FLJ20436 (NM_017822.1,585-603).
gcgccgatacttacataat

SEQ ID NO: 362755 - DNA, 19 bp, Homo sapiens
  siRNA target sequence for FLJ20436 (NM_017822.1,665-683).
ccaaagaacgagagaactt

SEQ ID NO: 362756 - DNA, 19 bp, Homo sapiens
  siRNA target sequence for FLJ20436 (NM_017822.1,676-694).
gagaacttaaagcgattaa

SEQ ID NO: 362757 - DNA, 19 bp, Homo sapiens
  siRNA target sequence for FLJ20436 (NM_017822.1,907-925).
gccattggtgacctgttaa

SEQ ID NO: 362758 - DNA, 19 bp, Homo sapiens
  siRNA target sequence for FLJ20445 (NM_017824.2,493-511).
gtgcaatgctgaataccta

SEQ ID NO: 362759 - DNA, 19 bp, Homo sapiens
  siRNA target sequence for FLJ20445 (NM_017824.2,495-513).
gcaatgctgaatacctaat

SEQ ID NO: 362760 - DNA, 19 bp, Homo sapiens
  siRNA target sequence for FLJ20445 (NM_017824.2,501-519).
ctgaatacctaatagtttt

SEQ ID NO: 362761 - DNA, 19 bp, Homo sapiens
  siRNA target sequence for FLJ20445 (NM_017824.2,557-575).
gcagatagactgatctcaa

SEQ ID NO: 362762 - DNA, 19 bp, Homo sapiens
  siRNA target sequence for FLJ20445 (NM_017824.2,558-576).
cagatagactgatctcaaa

SEQ ID NO: 362763 - DNA, 19 bp, Homo sapiens
  siRNA target sequence for FLJ20445 (NM_017824.2,608-626).
gtcggctctatctattgga

SEQ ID NO: 362764 - DNA, 19 bp, Homo sapiens
  siRNA target sequence for FLJ20445 (NM_017824.2,658-676).
gcaggttgtaggtcataaa

SEQ ID NO: 362765 - DNA, 19 bp, Homo sapiens
  siRNA target sequence for FLJ20445 (NM_017824.2,661-679).
ggttgtaggtcataaagaa

SEQ ID NO: 362766 - DNA, 19 bp, Homo sapiens
  siRNA target sequence for FLJ20445 (NM_017824.2,695-713).
gagagagctgatcctttat

SEQ ID NO: 362767 - DNA, 19 bp, Homo sapiens
  siRNA target sequence for FLJ20445 (NM_017824.2,749-767).
ctgatattaggcaagatga

SEQ ID NO: 362768 - DNA, 19 bp, Homo sapiens
  siRNA target sequence for FLJ20445 (NM_017824.2,798-816).
ggcgcaaatactcgaataa

SEQ ID NO: 362769 - DNA, 19 bp, Homo sapiens
  siRNA target sequence for FLJ20445 (NM_017824.2,799-817).
gcgcaaatactcgaataaa

SEQ ID NO: 362770 - DNA, 19 bp, Homo sapiens
  siRNA target sequence for FLJ20445 (NM_017824.2,802-820).
caaatactcgaataaacta

SEQ ID NO: 362771 - DNA, 19 bp, Homo sapiens
  siRNA target sequence for FLJ20445 (NM_017824.2,930-948).
cccttgtctttcctactat

SEQ ID NO: 362772 - DNA, 19 bp, Homo sapiens
  siRNA target sequence for FLJ20445 (NM_017824.2,942-960).
ctactattgctacaatagt

SEQ ID NO: 362773 - DNA, 19 bp, Homo sapiens
  siRNA target sequence for FLJ20445 (NM_017824.2,973-991).
gttcagtagtgttaactct

SEQ ID NO: 362774 - DNA, 19 bp, Homo sapiens
  siRNA target sequence for FLJ20445 (NM_017824.2,981-999).
gtgttaactctaatttaca

SEQ ID NO: 362775 - DNA, 19 bp, Homo sapiens
  siRNA target sequence for FLJ20445 (NM_017824.2,1060-1078).
caaacagcagcaatattta

SEQ ID NO: 362776 - DNA, 19 bp, Homo sapiens
  siRNA target sequence for FLJ20445 (NM_017824.2,1088-1106).
caccgcaaaattctgaatt

SEQ ID NO: 362777 - DNA, 19 bp, Homo sapiens
  siRNA target sequence for FLJ20445 (NM_017824.2,1093-1111).
caaaattctgaattatcca

SEQ ID NO: 362778 - DNA, 19 bp, Homo sapiens
  siRNA target sequence for FLJ20449 (NM_017826.1,52-70).
ctcgggccaggcaaaaata

SEQ ID NO: 362779 - DNA, 19 bp, Homo sapiens
  siRNA target sequence for FLJ20449 (NM_017826.1,100-118).
gggctacctggctgatact

SEQ ID NO: 362780 - DNA, 19 bp, Homo sapiens
  siRNA target sequence for FLJ20449 (NM_017826.1,178-196).
ggcagcagcgcttttggat

SEQ ID NO: 362781 - DNA, 19 bp, Homo sapiens
  siRNA target sequence for FLJ20449 (NM_017826.1,182-200).
gcagcgcttttggatgatt

SEQ ID NO: 362782 - DNA, 19 bp, Homo sapiens
  siRNA target sequence for FLJ20449 (NM_017826.1,186-204).
cgcttttggatgattgcat

SEQ ID NO: 362783 - DNA, 19 bp, Homo sapiens
  siRNA target sequence for FLJ20449 (NM_017826.1,187-205).
gcttttggatgattgcata

SEQ ID NO: 362784 - DNA, 19 bp, Homo sapiens
  siRNA target sequence for FLJ20449 (NM_017826.1,223-241).
gaaggtgccttcttcacta

SEQ ID NO: 362785 - DNA, 19 bp, Homo sapiens
  siRNA target sequence for FLJ20449 (NM_017826.1,226-244).
ggtgccttcttcactaagt

SEQ ID NO: 362786 - DNA, 19 bp, Homo sapiens
  siRNA target sequence for FLJ20449 (NM_017826.1,256-274).
ggaagccatcaagttaatt

SEQ ID NO: 362787 - DNA, 19 bp, Homo sapiens
  siRNA target sequence for FLJ20449 (NM_017826.1,257-275).
gaagccatcaagttaatta

SEQ ID NO: 362788 - DNA, 19 bp, Homo sapiens
  siRNA target sequence for FLJ20449 (NM_017826.1,342-360).
gtatttcagggcatggaat

SEQ ID NO: 362789 - DNA, 19 bp, Homo sapiens
  siRNA target sequence for FLJ20449 (NM_017826.1,352-370).
gcatggaatggatattgct

SEQ ID NO: 362790 - DNA, 19 bp, Homo sapiens
  siRNA target sequence for FLJ20449 (NM_017826.1,361-379).
ggatattgctttaactgaa

SEQ ID NO: 362791 - DNA, 19 bp, Homo sapiens
  siRNA target sequence for FLJ20449 (NM_017826.1,385-403).
gacaatggaaaaaatgagt

SEQ ID NO: 362792 - DNA, 19 bp, Homo sapiens
  siRNA target sequence for FLJ20449 (NM_017826.1,429-447).
gtccctcaaacactgttaa

SEQ ID NO: 362793 - DNA, 19 bp, Homo sapiens
  siRNA target sequence for FLJ20449 (NM_017826.1,431-449).
ccctcaaacactgttaaga

SEQ ID NO: 362794 - DNA, 19 bp, Homo sapiens
  siRNA target sequence for FLJ20449 (NM_017826.1,433-451).
ctcaaacactgttaagact

SEQ ID NO: 362795 - DNA, 19 bp, Homo sapiens
  siRNA target sequence for FLJ20449 (NM_017826.1,504-522).
gcgaacacctgggatattt

SEQ ID NO: 362796 - DNA, 19 bp, Homo sapiens
  siRNA target sequence for FLJ20449 (NM_017826.1,505-523).
cgaacacctgggatatttt

SEQ ID NO: 362797 - DNA, 19 bp, Homo sapiens
  siRNA target sequence for FLJ20449 (NM_017826.1,509-527).
cacctgggatattttccta

SEQ ID NO: 362798 - DNA, 19 bp, Homo sapiens
  siRNA target sequence for FLJ20449 (NM_017826.1,563-581).
ggcaatgggcttgaattaa

SEQ ID NO: 362799 - DNA, 19 bp, Homo sapiens
  siRNA target sequence for FLJ20449 (NM_017826.1,569-587).
gggcttgaattaaatgctt

SEQ ID NO: 362800 - DNA, 19 bp, Homo sapiens
  siRNA target sequence for FLJ20449 (NM_017826.1,596-614).
gagttcgagaaaaacaaaa

SEQ ID NO: 362801 - DNA, 19 bp, Homo sapiens
  siRNA target sequence for FLJ20449 (NM_017826.1,647-665).
ctaagaagggaaagaatca

SEQ ID NO: 362802 - DNA, 19 bp, Homo sapiens
  siRNA target sequence for FLJ20449 (NM_017826.1,690-708).
ctctcttgccgtatgtaaa

SEQ ID NO: 362803 - DNA, 19 bp, Homo sapiens
  siRNA target sequence for FLJ20449 (NM_017826.1,737-755).
cttgaggcaacagttgatt

SEQ ID NO: 362804 - DNA, 19 bp, Homo sapiens
  siRNA target sequence for FLJ20449 (NM_017826.1,788-806).
gccgttatggcccagatta

SEQ ID NO: 362805 - DNA, 19 bp, Homo sapiens
  siRNA target sequence for FLJ20449 (NM_017826.1,790-808).
cgttatggcccagattaca

SEQ ID NO: 362806 - DNA, 19 bp, Homo sapiens
  siRNA target sequence for FLJ20449 (NM_017826.1,812-830).
gcacttcagagcaacatga

SEQ ID NO: 362807 - DNA, 19 bp, Homo sapiens
  siRNA target sequence for FLJ20449 (NM_017826.1,822-840).
gcaacatgaggttttgtaa

SEQ ID NO: 362808 - DNA, 19 bp, Homo sapiens
  siRNA target sequence for FLJ20449 (NM_017826.1,1027-1045).
cgcctcagagaatgctatt

SEQ ID NO: 362809 - DNA, 19 bp, Homo sapiens
  siRNA target sequence for FLJ20449 (NM_017826.1,1030-1048).
ctcagagaatgctattggt

SEQ ID NO: 362810 - DNA, 19 bp, Homo sapiens
  siRNA target sequence for FLJ20449 (NM_017826.1,1040-1058).
gctattggtgatccatata

SEQ ID NO: 362811 - DNA, 19 bp, Homo sapiens
  siRNA target sequence for FLJ20449 (NM_017826.1,1041-1059).
ctattggtgatccatataa

SEQ ID NO: 362812 - DNA, 19 bp, Homo sapiens
  siRNA target sequence for FLJ20449 (NM_017826.1,1047-1065).
gtgatccatataaaactca

SEQ ID NO: 362813 - DNA, 19 bp, Homo sapiens
  siRNA target sequence for FLJ20449 (NM_017826.1,1079-1097).
gcgctgtctctgaattcct

SEQ ID NO: 362814 - DNA, 19 bp, Homo sapiens
  siRNA target sequence for FLJ20449 (NM_017826.1,1138-1156).
cgatgcaactgctgtaaca

SEQ ID NO: 362815 - DNA, 19 bp, Homo sapiens
  siRNA target sequence for FLJ20449 (NM_017826.1,1160-1178).
cagaacatttcaattcatt

SEQ ID NO: 362816 - DNA, 19 bp, Homo sapiens
  siRNA target sequence for FLJ20449 (NM_017826.1,1240-1258).
ccagacgtgcactacacat

SEQ ID NO: 362817 - DNA, 19 bp, Homo sapiens
  siRNA target sequence for FLJ20449 (NM_017826.1,1260-1278).
ccaactgtctgcaacagtt

SEQ ID NO: 362818 - DNA, 19 bp, Homo sapiens
  siRNA target sequence for FLJ20452 (NM_017828.2,111-129).
ctctgcagccaggtactaa

SEQ ID NO: 362819 - DNA, 19 bp, Homo sapiens
  siRNA target sequence for FLJ20452 (NM_017828.2,137-155).
gctgggacaggggattgat

SEQ ID NO: 362820 - DNA, 19 bp, Homo sapiens
  siRNA target sequence for FLJ20452 (NM_017828.2,142-160).
gacaggggattgattatga

SEQ ID NO: 362821 - DNA, 19 bp, Homo sapiens
  siRNA target sequence for FLJ20452 (NM_017828.2,144-162).
caggggattgattatgaga

SEQ ID NO: 362822 - DNA, 19 bp, Homo sapiens
  siRNA target sequence for FLJ20452 (NM_017828.2,148-166).
ggattgattatgagaagat

SEQ ID NO: 362823 - DNA, 19 bp, Homo sapiens
  siRNA target sequence for FLJ20452 (NM_017828.2,383-401).
ctgcagcctacgcatgaat

SEQ ID NO: 362824 - DNA, 19 bp, Homo sapiens
  siRNA target sequence for FLJ20452 (NM_017828.2,388-406).
gcctacgcatgaataggtt

SEQ ID NO: 362825 - DNA, 19 bp, Homo sapiens
  siRNA target sequence for FLJ20452 (NM_017828.2,538-556).
ccctctcagcagacaagtt

SEQ ID NO: 362826 - DNA, 19 bp, Homo sapiens
  siRNA target sequence for CECR5 (NM_017829.4,46-64).
gtatgcttggttctttctt

SEQ ID NO: 362827 - DNA, 19 bp, Homo sapiens
  siRNA target sequence for CECR5 (NM_017829.4,196-214).
gcgggtgcccgtggttttt

SEQ ID NO: 362828 - DNA, 19 bp, Homo sapiens
  siRNA target sequence for CECR5 (NM_017829.4,200-218).
gtgcccgtggtttttgtta

SEQ ID NO: 362829 - DNA, 19 bp, Homo sapiens
  siRNA target sequence for CECR5 (NM_017829.4,203-221).
cccgtggtttttgttacaa

SEQ ID NO: 362830 - DNA, 19 bp, Homo sapiens
  siRNA target sequence for CECR5 (NM_017829.4,205-223).
cgtggtttttgttacaaat

SEQ ID NO: 362831 - DNA, 19 bp, Homo sapiens
  siRNA target sequence for CECR5 (NM_017829.4,225-243).
ctgggaacatcttacaaca

SEQ ID NO: 362832 - DNA, 19 bp, Homo sapiens
  siRNA target sequence for CECR5 (NM_017829.4,284-302).
gtggatgcagaccaagtta

SEQ ID NO: 362833 - DNA, 19 bp, Homo sapiens
  siRNA target sequence for CECR5 (NM_017829.4,396-414).
gactgggcttccgaaatgt

SEQ ID NO: 362834 - DNA, 19 bp, Homo sapiens
  siRNA target sequence for CECR5 (NM_017829.4,491-509).
cccctcccgaggaatgact

SEQ ID NO: 362835 - DNA, 19 bp, Homo sapiens
  siRNA target sequence for CECR5 (NM_017829.4,492-510).
ccctcccgaggaatgactt

SEQ ID NO: 362836 - DNA, 19 bp, Homo sapiens
  siRNA target sequence for CECR5 (NM_017829.4,886-904).
gggtgataaccctatgtct

SEQ ID NO: 362837 - DNA, 19 bp, Homo sapiens
  siRNA target sequence for CECR5 (NM_017829.4,1036-1054).
gtgtacaggcgtctacaat

SEQ ID NO: 362838 - DNA, 19 bp, Homo sapiens
  siRNA target sequence for CECR5 (NM_017829.4,1109-1127).
cacgggcaccgagacttat

SEQ ID NO: 362839 - DNA, 19 bp, Homo sapiens
  siRNA target sequence for CECR5 (NM_017829.4,1152-1170).
cctcccacgtggtgaatga

SEQ ID NO: 362840 - DNA, 19 bp, Homo sapiens
  siRNA target sequence for OCIA (NM_017830.1,170-188).
gaatgggagggctgatttt

SEQ ID NO: 362841 - DNA, 19 bp, Homo sapiens
  siRNA target sequence for OCIA (NM_017830.1,223-241).
cccacatagggcctgatta

SEQ ID NO: 362842 - DNA, 19 bp, Homo sapiens
  siRNA target sequence for OCIA (NM_017830.1,225-243).
cacatagggcctgattaca

SEQ ID NO: 362843 - DNA, 19 bp, Homo sapiens
  siRNA target sequence for OCIA (NM_017830.1,227-245).
catagggcctgattacatt

SEQ ID NO: 362844 - DNA, 19 bp, Homo sapiens
  siRNA target sequence for OCIA (NM_017830.1,265-283).
gagtcttcgcagaatgcaa

SEQ ID NO: 362845 - DNA, 19 bp, Homo sapiens
  siRNA target sequence for OCIA (NM_017830.1,318-336).
gctgcaacaagtatgttga

SEQ ID NO: 362846 - DNA, 19 bp, Homo sapiens
  siRNA target sequence for OCIA (NM_017830.1,319-337).
ctgcaacaagtatgttgat

SEQ ID NO: 362847 - DNA, 19 bp, Homo sapiens
  siRNA target sequence for OCIA (NM_017830.1,321-339).
gcaacaagtatgttgatta

SEQ ID NO: 362848 - DNA, 19 bp, Homo sapiens
  siRNA target sequence for OCIA (NM_017830.1,325-343).
caagtatgttgattactca

SEQ ID NO: 362849 - DNA, 19 bp, Homo sapiens
  siRNA target sequence for OCIA (NM_017830.1,332-350).
gttgattactcaaggatta

SEQ ID NO: 362850 - DNA, 19 bp, Homo sapiens
  siRNA target sequence for OCIA (NM_017830.1,335-353).
gattactcaaggattaatt

SEQ ID NO: 362851 - DNA, 19 bp, Homo sapiens
  siRNA target sequence for OCIA (NM_017830.1,387-405).
ggttccatccctaaactta

SEQ ID NO: 362852 - DNA, 19 bp, Homo sapiens
  siRNA target sequence for OCIA (NM_017830.1,412-430).
cttgtatcatgggatactt

SEQ ID NO: 362853 - DNA, 19 bp, Homo sapiens
  siRNA target sequence for OCIA (NM_017830.1,491-509).
cccccttggagaagcttta

SEQ ID NO: 362854 - DNA, 19 bp, Homo sapiens
  siRNA target sequence for OCIA (NM_017830.1,494-512).
ccttggagaagctttacga

SEQ ID NO: 362855 - DNA, 19 bp, Homo sapiens
  siRNA target sequence for OCIA (NM_017830.1,535-553).
caccacctgggcactatta

SEQ ID NO: 362856 - DNA, 19 bp, Homo sapiens
  siRNA target sequence for OCIA (NM_017830.1,538-556).
cacctgggcactattatca

SEQ ID NO: 362857 - DNA, 19 bp, Homo sapiens
  siRNA target sequence for OCIA (NM_017830.1,543-561).
gggcactattatcaaaagt

SEQ ID NO: 362858 - DNA, 19 bp, Homo sapiens
  siRNA target sequence for OCIA (NM_017830.1,581-599).
gagtggtcaatcatctttt

SEQ ID NO: 362859 - DNA, 19 bp, Homo sapiens
  siRNA target sequence for OCIA (NM_017830.1,585-603).
ggtcaatcatcttttgtga

SEQ ID NO: 362860 - DNA, 19 bp, Homo sapiens
  siRNA target sequence for OCIA (NM_017830.1,654-672).
ccattcagttcttctatga

SEQ ID NO: 362861 - DNA, 19 bp, Homo sapiens
  siRNA target sequence for OCIA (NM_017830.1,691-709).
gtattactgatcatattgt

SEQ ID NO: 362862 - DNA, 19 bp, Homo sapiens
  siRNA target sequence for OCIA (NM_017830.1,728-746).
ccttgaagaaagtcctaaa

SEQ ID NO: 362863 - DNA, 19 bp, Homo sapiens
  siRNA target sequence for OCIA (NM_017830.1,729-747).
cttgaagaaagtcctaaaa

SEQ ID NO: 362864 - DNA, 19 bp, Homo sapiens
  siRNA target sequence for OCIA (NM_017830.1,782-800).
gaacagagagtcatatgaa

SEQ ID NO: 362865 - DNA, 19 bp, Homo sapiens
  siRNA target sequence for OCIA (NM_017830.1,827-845).
ctcagtcaggcctatgcat

SEQ ID NO: 362866 - DNA, 19 bp, Homo sapiens
  siRNA target sequence for OCIA (NM_017830.1,831-849).
gtcaggcctatgcatgaaa

SEQ ID NO: 362867 - DNA, 19 bp, Homo sapiens
  siRNA target sequence for OCIA (NM_017830.1,835-853).
ggcctatgcatgaaagagt

SEQ ID NO: 362868 - DNA, 19 bp, Homo sapiens
  siRNA target sequence for RNF125 (NM_017831.2,531-549).
cccgctgtggccacgtatt

SEQ ID NO: 362869 - DNA, 19 bp, Homo sapiens
  siRNA target sequence for RNF125 (NM_017831.2,533-551).
cgctgtggccacgtattct

SEQ ID NO: 362870 - DNA, 19 bp, Homo sapiens
  siRNA target sequence for RNF125 (NM_017831.2,550-568).
ctgccgttcctgtattgct

SEQ ID NO: 362871 - DNA, 19 bp, Homo sapiens
  siRNA target sequence for RNF125 (NM_017831.2,566-584).
gctaccagtctaaagaaca

SEQ ID NO: 362872 - DNA, 19 bp, Homo sapiens
  siRNA target sequence for RNF125 (NM_017831.2,567-585).
ctaccagtctaaagaacaa

SEQ ID NO: 362873 - DNA, 19 bp, Homo sapiens
  siRNA target sequence for RNF125 (NM_017831.2,698-716).
ctggtttgcctcagtgaaa

SEQ ID NO: 362874 - DNA, 19 bp, Homo sapiens
  siRNA target sequence for RNF125 (NM_017831.2,738-756).
gtcagaagtacatagataa

SEQ ID NO: 362875 - DNA, 19 bp, Homo sapiens
  siRNA target sequence for RNF125 (NM_017831.2,740-758).
cagaagtacatagataagt

SEQ ID NO: 362876 - DNA, 19 bp, Homo sapiens
  siRNA target sequence for RNF125 (NM_017831.2,813-831).
gtcagagggaactgtatga

SEQ ID NO: 362877 - DNA, 19 bp, Homo sapiens
  siRNA target sequence for RNF125 (NM_017831.2,837-855).
gcttgctggatcattgtat

SEQ ID NO: 362878 - DNA, 19 bp, Homo sapiens
  siRNA target sequence for RNF125 (NM_017831.2,838-856).
cttgctggatcattgtatt

SEQ ID NO: 362879 - DNA, 19 bp, Homo sapiens
  siRNA target sequence for RNF125 (NM_017831.2,841-859).
gctggatcattgtattact

SEQ ID NO: 362880 - DNA, 19 bp, Homo sapiens
  siRNA target sequence for RNF125 (NM_017831.2,903-921).
gtttaatacccgatgagaa

SEQ ID NO: 362881 - DNA, 19 bp, Homo sapiens
  siRNA target sequence for RNF125 (NM_017831.2,930-948).
gcttcagtggcagtttaat

SEQ ID NO: 362882 - DNA, 19 bp, Homo sapiens
  siRNA target sequence for RNF125 (NM_017831.2,934-952).
cagtggcagtttaataaga

SEQ ID NO: 362883 - DNA, 19 bp, Homo sapiens
  siRNA target sequence for RNF125 (NM_017831.2,951-969).
gacatctgcaagttagtca

SEQ ID NO: 362884 - DNA, 19 bp, Homo sapiens
  siRNA target sequence for RNF125 (NM_017831.2,959-977).
caagttagtcacactttgt

SEQ ID NO: 362885 - DNA, 19 bp, Homo sapiens
  siRNA target sequence for RNF125 (NM_017831.2,1037-1055).
gaccggtcacttcttgaat

SEQ ID NO: 362886 - DNA, 19 bp, Homo sapiens
  siRNA target sequence for RNF125 (NM_017831.2,1039-1057).
ccggtcacttcttgaatat

SEQ ID NO: 362887 - DNA, 19 bp, Homo sapiens
  siRNA target sequence for FLJ20457 (NM_017832.2,344-362).
cttcgctcgtggatcgata

SEQ ID NO: 362888 - DNA, 19 bp, Homo sapiens
  siRNA target sequence for FLJ20457 (NM_017832.2,347-365).
cgctcgtggatcgatactt

SEQ ID NO: 362889 - DNA, 19 bp, Homo sapiens
  siRNA target sequence for FLJ20457 (NM_017832.2,349-367).
ctcgtggatcgatacttca

SEQ ID NO: 362890 - DNA, 19 bp, Homo sapiens
  siRNA target sequence for FLJ20457 (NM_017832.2,363-381).
cttcactcgctggtacaaa

SEQ ID NO: 362891 - DNA, 19 bp, Homo sapiens
  siRNA target sequence for FLJ20457 (NM_017832.2,374-392).
ggtacaaaccggatgtcaa

SEQ ID NO: 362892 - DNA, 19 bp, Homo sapiens
  siRNA target sequence for FLJ20457 (NM_017832.2,375-393).
gtacaaaccggatgtcaaa

SEQ ID NO: 362893 - DNA, 19 bp, Homo sapiens
  siRNA target sequence for FLJ20457 (NM_017832.2,382-400).
ccggatgtcaaaggaaaat

SEQ ID NO: 362894 - DNA, 19 bp, Homo sapiens
  siRNA target sequence for FLJ20457 (NM_017832.2,383-401).
cggatgtcaaaggaaaatt

SEQ ID NO: 362895 - DNA, 19 bp, Homo sapiens
  siRNA target sequence for FLJ20457 (NM_017832.2,384-402).
ggatgtcaaaggaaaattt

SEQ ID NO: 362896 - DNA, 19 bp, Homo sapiens
  siRNA target sequence for FLJ20457 (NM_017832.2,404-422).
gtgaggaccactgtatact

SEQ ID NO: 362897 - DNA, 19 bp, Homo sapiens
  siRNA target sequence for FLJ20457 (NM_017832.2,416-434).
gtatactacagcactctaa

SEQ ID NO: 362898 - DNA, 19 bp, Homo sapiens
  siRNA target sequence for FLJ20457 (NM_017832.2,424-442).
cagcactctaaccgaatat

SEQ ID NO: 362899 - DNA, 19 bp, Homo sapiens
  siRNA target sequence for FLJ20457 (NM_017832.2,426-444).
gcactctaaccgaatatgt

SEQ ID NO: 362900 - DNA, 19 bp, Homo sapiens
  siRNA target sequence for FLJ20457 (NM_017832.2,450-468).
cacattggcagaatctcat

SEQ ID NO: 362901 - DNA, 19 bp, Homo sapiens
  siRNA target sequence for FLJ20457 (NM_017832.2,511-529).
cagatcagtaccaactgta

SEQ ID NO: 362902 - DNA, 19 bp, Homo sapiens
  siRNA target sequence for FLJ20457 (NM_017832.2,647-665).
gtgttagaggacgtttgat

SEQ ID NO: 362903 - DNA, 19 bp, Homo sapiens
  siRNA target sequence for FLJ20457 (NM_017832.2,687-705).
ccataagccatctattctt

SEQ ID NO: 362904 - DNA, 19 bp, Homo sapiens
  siRNA target sequence for FLJ20457 (NM_017832.2,729-747).
ctacattgcagttgtgtta

SEQ ID NO: 362905 - DNA, 19 bp, Homo sapiens
  siRNA target sequence for C21orf55 (NM_017833.2,460-478).
gatggctcagatcttaaga

SEQ ID NO: 362906 - DNA, 19 bp, Homo sapiens
  siRNA target sequence for C21orf55 (NM_017833.2,493-511).
ggctacagtgattcctaat

SEQ ID NO: 362907 - DNA, 19 bp, Homo sapiens
  siRNA target sequence for C21orf55 (NM_017833.2,507-525).
ctaatcgagtgaaaatgct

SEQ ID NO: 362908 - DNA, 19 bp, Homo sapiens
  siRNA target sequence for C21orf55 (NM_017833.2,513-531).
gagtgaaaatgcttccata

SEQ ID NO: 362909 - DNA, 19 bp, Homo sapiens
  siRNA target sequence for C21orf55 (NM_017833.2,515-533).
gtgaaaatgcttccatatt

SEQ ID NO: 362910 - DNA, 19 bp, Homo sapiens
  siRNA target sequence for C21orf55 (NM_017833.2,527-545).
ccatattttggtatcatta

SEQ ID NO: 362911 - DNA, 19 bp, Homo sapiens
  siRNA target sequence for C21orf55 (NM_017833.2,583-601).
gatcagagaatattataga

SEQ ID NO: 362912 - DNA, 19 bp, Homo sapiens
  siRNA target sequence for C21orf55 (NM_017833.2,653-671).
cataagcttgccaagcaat

SEQ ID NO: 362913 - DNA, 19 bp, Homo sapiens
  siRNA target sequence for C21orf55 (NM_017833.2,677-695).
cctgacagtggctctaata

SEQ ID NO: 362914 - DNA, 19 bp, Homo sapiens
  siRNA target sequence for C21orf55 (NM_017833.2,721-739).
gattgaaaaagcttataga

SEQ ID NO: 362915 - DNA, 19 bp, Homo sapiens
  siRNA target sequence for C21orf55 (NM_017833.2,742-760).
ggtgctctcccatgtgata

SEQ ID NO: 362916 - DNA, 19 bp, Homo sapiens
  siRNA target sequence for C21orf55 (NM_017833.2,831-849).
cccaacaccgacattattt

SEQ ID NO: 362917 - DNA, 19 bp, Homo sapiens
  siRNA target sequence for C21orf55 (NM_017833.2,832-850).
ccaacaccgacattattta

SEQ ID NO: 362918 - DNA, 19 bp, Homo sapiens
  siRNA target sequence for C21orf55 (NM_017833.2,836-854).
caccgacattatttaagtt

SEQ ID NO: 362919 - DNA, 19 bp, Homo sapiens
  siRNA target sequence for C21orf55 (NM_017833.2,838-856).
ccgacattatttaagtttt

SEQ ID NO: 362920 - DNA, 19 bp, Homo sapiens
  siRNA target sequence for C21orf55 (NM_017833.2,882-900).
ctcaacgagagaagcatta

SEQ ID NO: 362921 - DNA, 19 bp, Homo sapiens
  siRNA target sequence for C21orf55 (NM_017833.2,884-902).
caacgagagaagcattata

SEQ ID NO: 362922 - DNA, 19 bp, Homo sapiens
  siRNA target sequence for C21orf55 (NM_017833.2,926-944).
gctgaacaagtgatggaat

SEQ ID NO: 362923 - DNA, 19 bp, Homo sapiens
  siRNA target sequence for C21orf55 (NM_017833.2,927-945).
ctgaacaagtgatggaata

SEQ ID NO: 362924 - DNA, 19 bp, Homo sapiens
  siRNA target sequence for C21orf55 (NM_017833.2,970-988).
gtattttcctgatagtgta

SEQ ID NO: 362925 - DNA, 19 bp, Homo sapiens
  siRNA target sequence for C21orf55 (NM_017833.2,1024-1042).
gataacgcaagctatagaa

SEQ ID NO: 362926 - DNA, 19 bp, Homo sapiens
  siRNA target sequence for C21orf55 (NM_017833.2,1029-1047).
cgcaagctatagaacgttt

SEQ ID NO: 362927 - DNA, 19 bp, Homo sapiens
  siRNA target sequence for C21orf55 (NM_017833.2,1082-1100).
ggagactttgacaatctca

SEQ ID NO: 362928 - DNA, 19 bp, Homo sapiens
  siRNA target sequence for C21orf55 (NM_017833.2,1171-1189).
ccgaatactgatcgataat

SEQ ID NO: 362929 - DNA, 19 bp, Homo sapiens
  siRNA target sequence for C21orf55 (NM_017833.2,1180-1198).
gatcgataatggataccaa

SEQ ID NO: 362930 - DNA, 19 bp, Homo sapiens
  siRNA target sequence for C21orf55 (NM_017833.2,1191-1209).
gataccaaccagaatggat

SEQ ID NO: 362931 - DNA, 19 bp, Homo sapiens
  siRNA target sequence for C21orf55 (NM_017833.2,1196-1214).
caaccagaatggatcctta

SEQ ID NO: 362932 - DNA, 19 bp, Homo sapiens
  siRNA target sequence for C21orf55 (NM_017833.2,1202-1220).
gaatggatccttaagcaaa

SEQ ID NO: 362933 - DNA, 19 bp, Homo sapiens
  siRNA target sequence for C21orf55 (NM_017833.2,1289-1307).
ccaatgacaccaactgaaa

SEQ ID NO: 362934 - DNA, 19 bp, Homo sapiens
  siRNA target sequence for C21orf55 (NM_017833.2,1363-1381).
caagcgaattaatgatttt

SEQ ID NO: 362935 - DNA, 19 bp, Homo sapiens
  siRNA target sequence for C21orf55 (NM_017833.2,1366-1384).
gcgaattaatgattttaat

SEQ ID NO: 362936 - DNA, 19 bp, Homo sapiens
  siRNA target sequence for C21orf55 (NM_017833.2,1404-1422).
ccaggcaaaaagtccattt

SEQ ID NO: 362937 - DNA, 19 bp, Homo sapiens
  siRNA target sequence for C21orf55 (NM_017833.2,1566-1584).
ggatgaatctgtggaaatt

SEQ ID NO: 362938 - DNA, 19 bp, Homo sapiens
  siRNA target sequence for C21orf55 (NM_017833.2,1570-1588).
gaatctgtggaaatttatt

SEQ ID NO: 362939 - DNA, 19 bp, Homo sapiens
  siRNA target sequence for FLJ20464 (NM_017834.1,506-524).
ctaccacgctagagttgta

SEQ ID NO: 362940 - DNA, 19 bp, Homo sapiens
  siRNA target sequence for FLJ20464 (NM_017834.1,633-651).
caaagaggcagcgaagtat

SEQ ID NO: 362941 - DNA, 19 bp, Homo sapiens
  siRNA target sequence for FLJ20464 (NM_017834.1,637-655).
gaggcagcgaagtatgtgt

SEQ ID NO: 362942 - DNA, 19 bp, Homo sapiens
  siRNA target sequence for FLJ20464 (NM_017834.1,643-661).
gcgaagtatgtgttccaaa

SEQ ID NO: 362943 - DNA, 19 bp, Homo sapiens
  siRNA target sequence for FLJ20464 (NM_017834.1,681-699).
gagcgcttccattaagaga

SEQ ID NO: 362944 - DNA, 19 bp, Homo sapiens
  siRNA target sequence for FLJ20464 (NM_017834.1,727-745).
ggtattagcatgcaaatga

SEQ ID NO: 362945 - DNA, 19 bp, Homo sapiens
  siRNA target sequence for FLJ20464 (NM_017834.1,728-746).
gtattagcatgcaaatgaa

SEQ ID NO: 362946 - DNA, 19 bp, Homo sapiens
  siRNA target sequence for FLJ20477 (NM_017837.2,530-548).
gatgctgaacacttcttgt

SEQ ID NO: 362947 - DNA, 19 bp, Homo sapiens
  siRNA target sequence for FLJ20477 (NM_017837.2,534-552).
ctgaacacttcttgttcat

SEQ ID NO: 362948 - DNA, 19 bp, Homo sapiens
  siRNA target sequence for FLJ20477 (NM_017837.2,568-586).
cctgtatgagcacaacttt

SEQ ID NO: 362949 - DNA, 19 bp, Homo sapiens
  siRNA target sequence for FLJ20477 (NM_017837.2,641-659).
cccttacgggggttactga

SEQ ID NO: 362950 - DNA, 19 bp, Homo sapiens
  siRNA target sequence for FLJ20477 (NM_017837.2,665-683).
cgcagttgcctgctgattt

SEQ ID NO: 362951 - DNA, 19 bp, Homo sapiens
  siRNA target sequence for FLJ20477 (NM_017837.2,684-702).
cggtagcatcactcaattt

SEQ ID NO: 362952 - DNA, 19 bp, Homo sapiens
  siRNA target sequence for FLJ20477 (NM_017837.2,689-707).
gcatcactcaatttcttgt

SEQ ID NO: 362953 - DNA, 19 bp, Homo sapiens
  siRNA target sequence for FLJ20477 (NM_017837.2,828-846).
ctggttactcagaagcttt

SEQ ID NO: 362954 - DNA, 19 bp, Homo sapiens
  siRNA target sequence for FLJ20477 (NM_017837.2,892-910).
ccgagtctggactagtgta

SEQ ID NO: 362955 - DNA, 19 bp, Homo sapiens
  siRNA target sequence for FLJ20477 (NM_017837.2,959-977).
gttggcttcctcatgcatt

SEQ ID NO: 362956 - DNA, 19 bp, Homo sapiens
  siRNA target sequence for FLJ20477 (NM_017837.2,989-1007).
ggctttttctcttctctaa

SEQ ID NO: 362957 - DNA, 19 bp, Homo sapiens
  siRNA target sequence for FLJ20477 (NM_017837.2,1222-1240).
ctgggatgttccactaata

SEQ ID NO: 362958 - DNA, 19 bp, Homo sapiens
  siRNA target sequence for FLJ20477 (NM_017837.2,1224-1242).
gggatgttccactaatata

SEQ ID NO: 362959 - DNA, 19 bp, Homo sapiens
  siRNA target sequence for FLJ20477 (NM_017837.2,1226-1244).
gatgttccactaatataca

SEQ ID NO: 362960 - DNA, 19 bp, Homo sapiens
  siRNA target sequence for FLJ20477 (NM_017837.2,1255-1273).
ggatgtctactggaatgtt

SEQ ID NO: 362961 - DNA, 19 bp, Homo sapiens
  siRNA target sequence for FLJ20477 (NM_017837.2,1297-1315).
caagcaggtgcccaatttt

SEQ ID NO: 362962 - DNA, 19 bp, Homo sapiens
  siRNA target sequence for FLJ20477 (NM_017837.2,1380-1398).
cttggctctgccttacact

SEQ ID NO: 362963 - DNA, 19 bp, Homo sapiens
  siRNA target sequence for FLJ20477 (NM_017837.2,1405-1423).
gcaaaggagcaagaacaat

SEQ ID NO: 362964 - DNA, 19 bp, Homo sapiens
  siRNA target sequence for FLJ20477 (NM_017837.2,1551-1569).
gctcctccactcctattat

SEQ ID NO: 362965 - DNA, 19 bp, Homo sapiens
  siRNA target sequence for FLJ20477 (NM_017837.2,1606-1624).
gccgctgttgagatcctta

SEQ ID NO: 362966 - DNA, 19 bp, Homo sapiens
  siRNA target sequence for FLJ20477 (NM_017837.2,1607-1625).
ccgctgttgagatccttaa

SEQ ID NO: 362967 - DNA, 19 bp, Homo sapiens
  siRNA target sequence for FLJ20477 (NM_017837.2,1608-1626).
cgctgttgagatccttaaa

SEQ ID NO: 362968 - DNA, 19 bp, Homo sapiens
  siRNA target sequence for FLJ20477 (NM_017837.2,1612-1630).
gttgagatccttaaagact

SEQ ID NO: 362969 - DNA, 19 bp, Homo sapiens
  siRNA target sequence for FLJ20477 (NM_017837.2,1689-1707).
ctatcatgggacttttgta

SEQ ID NO: 362970 - DNA, 19 bp, Homo sapiens
  siRNA target sequence for FLJ20477 (NM_017837.2,1725-1743).
ctccagtcacacgatacat

SEQ ID NO: 362971 - DNA, 19 bp, Homo sapiens
  siRNA target sequence for FLJ20477 (NM_017837.2,1728-1746).
cagtcacacgatacattct

SEQ ID NO: 362972 - DNA, 19 bp, Homo sapiens
  siRNA target sequence for FLJ20477 (NM_017837.2,1776-1794).
gactactcctacattgcaa

SEQ ID NO: 362973 - DNA, 19 bp, Homo sapiens
  siRNA target sequence for FLJ20481 (NM_017839.1,465-483).
cttttcaatgggatttata

SEQ ID NO: 362974 - DNA, 19 bp, Homo sapiens
  siRNA target sequence for FLJ20481 (NM_017839.1,574-592).
gttgtagctgggttacctt

SEQ ID NO: 362975 - DNA, 19 bp, Homo sapiens
  siRNA target sequence for FLJ20481 (NM_017839.1,583-601).
gggttaccttctatggtat

SEQ ID NO: 362976 - DNA, 19 bp, Homo sapiens
  siRNA target sequence for FLJ20481 (NM_017839.1,597-615).
ggtatctcgaaatgagaat

SEQ ID NO: 362977 - DNA, 19 bp, Homo sapiens
  siRNA target sequence for FLJ20481 (NM_017839.1,647-665).
gggctgtgcaaccagtttt

SEQ ID NO: 362978 - DNA, 19 bp, Homo sapiens
  siRNA target sequence for FLJ20481 (NM_017839.1,679-697).
gatccggattcccgaaaaa

SEQ ID NO: 362979 - DNA, 19 bp, Homo sapiens
  siRNA target sequence for FLJ20481 (NM_017839.1,685-703).
gattcccgaaaaaacacaa

SEQ ID NO: 362980 - DNA, 19 bp, Homo sapiens
  siRNA target sequence for FLJ20481 (NM_017839.1,737-755).
gagaatggccccagatact

SEQ ID NO: 362981 - DNA, 19 bp, Homo sapiens
  siRNA target sequence for FLJ20481 (NM_017839.1,743-761).
ggccccagatactagtttt

SEQ ID NO: 362982 - DNA, 19 bp, Homo sapiens
  siRNA target sequence for FLJ20481 (NM_017839.1,762-780).
cccagaaggtacttgtact

SEQ ID NO: 362983 - DNA, 19 bp, Homo sapiens
  siRNA target sequence for FLJ20481 (NM_017839.1,769-787).
ggtacttgtactaatcgtt

SEQ ID NO: 362984 - DNA, 19 bp, Homo sapiens
  siRNA target sequence for FLJ20481 (NM_017839.1,779-797).
ctaatcgttcctgtttgat

SEQ ID NO: 362985 - DNA, 19 bp, Homo sapiens
  siRNA target sequence for FLJ20481 (NM_017839.1,885-903).
gacatggcaaggatataca

SEQ ID NO: 362986 - DNA, 19 bp, Homo sapiens
  siRNA target sequence for FLJ20481 (NM_017839.1,891-909).
gcaaggatatacattcatt

SEQ ID NO: 362987 - DNA, 19 bp, Homo sapiens
  siRNA target sequence for FLJ20481 (NM_017839.1,910-928).
cagctttgtatgcttactt

SEQ ID NO: 362988 - DNA, 19 bp, Homo sapiens
  siRNA target sequence for FLJ20481 (NM_017839.1,933-951).
ccagctcttcacaaaggta

SEQ ID NO: 362989 - DNA, 19 bp, Homo sapiens
  siRNA target sequence for FLJ20481 (NM_017839.1,960-978).
gtttatgccagttcaagta

SEQ ID NO: 362990 - DNA, 19 bp, Homo sapiens
  siRNA target sequence for FLJ20481 (NM_017839.1,1016-1034).
ccaataaagtccggaattt

SEQ ID NO: 362991 - DNA, 19 bp, Homo sapiens
  siRNA target sequence for FLJ20481 (NM_017839.1,1017-1035).
caataaagtccggaattta

SEQ ID NO: 362992 - DNA, 19 bp, Homo sapiens
  siRNA target sequence for FLJ20481 (NM_017839.1,1058-1076).
cagtaacagatcataccta

SEQ ID NO: 362993 - DNA, 19 bp, Homo sapiens
  siRNA target sequence for FLJ20481 (NM_017839.1,1100-1118).
cagcaggacagctaacatt

SEQ ID NO: 362994 - DNA, 19 bp, Homo sapiens
  siRNA target sequence for FLJ20481 (NM_017839.1,1132-1150).
gggctggtggaatttacta

SEQ ID NO: 362995 - DNA, 19 bp, Homo sapiens
  siRNA target sequence for FLJ20481 (NM_017839.1,1180-1198).
gatggtgttcgtaagcatt

SEQ ID NO: 362996 - DNA, 19 bp, Homo sapiens
  siRNA target sequence for FLJ20481 (NM_017839.1,1184-1202).
gtgttcgtaagcatttgga

SEQ ID NO: 362997 - DNA, 19 bp, Homo sapiens
  siRNA target sequence for FLJ20481 (NM_017839.1,1189-1207).
cgtaagcatttggatgaat

SEQ ID NO: 362998 - DNA, 19 bp, Homo sapiens
  siRNA target sequence for FLJ20481 (NM_017839.1,1493-1511).
gagtgcctgaccttgatgt

SEQ ID NO: 362999 - DNA, 19 bp, Homo sapiens
  siRNA target sequence for FLJ20481 (NM_017839.1,1495-1513).
gtgcctgaccttgatgttt

SEQ ID NO: 363000 - DNA, 19 bp, Homo sapiens
  siRNA target sequence for FLJ20481 (NM_017839.1,1598-1616).
ctaagatatttacaacata

SEQ ID NO: 363001 - DNA, 19 bp, Homo sapiens
  siRNA target sequence for FLJ20481 (NM_017839.1,1629-1647).
gacgtgccatgtgttttca

SEQ ID NO: 363002 - DNA, 19 bp, Homo sapiens
  siRNA target sequence for FLJ20481 (NM_017839.1,1635-1653).
ccatgtgttttcattacca

SEQ ID NO: 363003 - DNA, 19 bp, Homo sapiens
  siRNA target sequence for FLJ20481 (NM_017839.1,1676-1694).
ccaccgccagtaataaagt

SEQ ID NO: 363004 - DNA, 19 bp, Homo sapiens
  siRNA target sequence for FLJ20481 (NM_017839.1,1718-1736).
gtacctcagacaaaaaaga

SEQ ID NO: 363005 - DNA, 19 bp, Homo sapiens
  siRNA target sequence for FLJ20487 (NM_017841.1,275-293).
cttcttagtctttttgcta

SEQ ID NO: 363006 - DNA, 19 bp, Homo sapiens
  siRNA target sequence for FLJ20487 (NM_017841.1,282-300).
gtctttttgctaaagaaca

SEQ ID NO: 363007 - DNA, 19 bp, Homo sapiens
  siRNA target sequence for FLJ20487 (NM_017841.1,332-350).
ctctatgaccgcctgatta

SEQ ID NO: 363008 - DNA, 19 bp, Homo sapiens
  siRNA target sequence for FLJ20487 (NM_017841.1,346-364).
gattaacgagcctagtaat

SEQ ID NO: 363009 - DNA, 19 bp, Homo sapiens
  siRNA target sequence for FLJ20487 (NM_017841.1,365-383).
gactgggatatttactact

SEQ ID NO: 363010 - DNA, 19 bp, Homo sapiens
  siRNA target sequence for FLJ20487 (NM_017841.1,437-455).
ctgctgagagactttgcta

SEQ ID NO: 363011 - DNA, 19 bp, Homo sapiens
  siRNA target sequence for FLJ20487 (NM_017841.1,483-501).
gtgccccagatcttgagta

SEQ ID NO: 363012 - DNA, 19 bp, Homo sapiens
  siRNA target sequence for FLJ20489 (NM_017842.1,770-788).
gggcagctttagacctttt

SEQ ID NO: 363013 - DNA, 19 bp, Homo sapiens
  siRNA target sequence for FLJ20489 (NM_017842.1,772-790).
gcagctttagaccttttca

SEQ ID NO: 363014 - DNA, 19 bp, Homo sapiens
  siRNA target sequence for FLJ20489 (NM_017842.1,1140-1158).
gcacgcagtgaggaatctt

SEQ ID NO: 363015 - DNA, 19 bp, Homo sapiens
  siRNA target sequence for FLJ20489 (NM_017842.1,1147-1165).
gtgaggaatctttgtactt

SEQ ID NO: 363016 - DNA, 19 bp, Homo sapiens
  siRNA target sequence for ANKMY1 (NM_017844.1,137-155).
ccatgcctcccttagctta

SEQ ID NO: 363017 - DNA, 19 bp, Homo sapiens
  siRNA target sequence for ANKMY1 (NM_017844.1,263-281).
cgccacaagggatgtttca

SEQ ID NO: 363018 - DNA, 19 bp, Homo sapiens
  siRNA target sequence for FLJ20502 (NM_017845.2,73-91).
ccgcagcttcttcacaaaa

SEQ ID NO: 363019 - DNA, 19 bp, Homo sapiens
  siRNA target sequence for FLJ20502 (NM_017845.2,74-92).
cgcagcttcttcacaaaat

SEQ ID NO: 363020 - DNA, 19 bp, Homo sapiens
  siRNA target sequence for FLJ20502 (NM_017845.2,122-140).
ctgtgtaccaagattatca

SEQ ID NO: 363021 - DNA, 19 bp, Homo sapiens
  siRNA target sequence for FLJ20502 (NM_017845.2,124-142).
gtgtaccaagattatcaca

SEQ ID NO: 363022 - DNA, 19 bp, Homo sapiens
  siRNA target sequence for FLJ20502 (NM_017845.2,168-186).
gcacgttttagaagatatt

SEQ ID NO: 363023 - DNA, 19 bp, Homo sapiens
  siRNA target sequence for FLJ20502 (NM_017845.2,202-220).
gccatagttggtaaaaact

SEQ ID NO: 363024 - DNA, 19 bp, Homo sapiens
  siRNA target sequence for FLJ20502 (NM_017845.2,203-221).
ccatagttggtaaaaactt

SEQ ID NO: 363025 - DNA, 19 bp, Homo sapiens
  siRNA target sequence for FLJ20502 (NM_017845.2,204-222).
catagttggtaaaaactta

SEQ ID NO: 363026 - DNA, 19 bp, Homo sapiens
  siRNA target sequence for FLJ20502 (NM_017845.2,243-261).
gcagttgaatcagttgaat

SEQ ID NO: 363027 - DNA, 19 bp, Homo sapiens
  siRNA target sequence for FLJ20502 (NM_017845.2,255-273).
gttgaattcacttcatcaa

SEQ ID NO: 363028 - DNA, 19 bp, Homo sapiens
  siRNA target sequence for FLJ20502 (NM_017845.2,268-286).
catcaagaaactatcatga

SEQ ID NO: 363029 - DNA, 19 bp, Homo sapiens
  siRNA target sequence for FLJ20502 (NM_017845.2,282-300).
catgaaatgcgtgaaaagt

SEQ ID NO: 363030 - DNA, 19 bp, Homo sapiens
  siRNA target sequence for FLJ20502 (NM_017845.2,321-339).
ggctctgtcaagagaaata

SEQ ID NO: 363031 - DNA, 19 bp, Homo sapiens
  siRNA target sequence for FLJ20502 (NM_017845.2,323-341).
ctctgtcaagagaaatagt

SEQ ID NO: 363032 - DNA, 19 bp, Homo sapiens
  siRNA target sequence for FLJ20502 (NM_017845.2,358-376).
cagctacaggattttgatt

SEQ ID NO: 363033 - DNA, 19 bp, Homo sapiens
  siRNA target sequence for FLJ20502 (NM_017845.2,405-423).
caagattgctgcattacga

SEQ ID NO: 363034 - DNA, 19 bp, Homo sapiens
  siRNA target sequence for FLJ20502 (NM_017845.2,416-434).
cattacgaatgccactttt

SEQ ID NO: 363035 - DNA, 19 bp, Homo sapiens
  siRNA target sequence for FLJ20502 (NM_017845.2,524-542).
ccttggaagcagcgaataa

SEQ ID NO: 363036 - DNA, 19 bp, Homo sapiens
  siRNA target sequence for C1orf27 (NM_017847.2,388-406).
gccctgcgtagactaatgt

SEQ ID NO: 363037 - DNA, 19 bp, Homo sapiens
  siRNA target sequence for C1orf27 (NM_017847.2,389-407).
ccctgcgtagactaatgtt

SEQ ID NO: 363038 - DNA, 19 bp, Homo sapiens
  siRNA target sequence for C1orf27 (NM_017847.2,390-408).
cctgcgtagactaatgttt

SEQ ID NO: 363039 - DNA, 19 bp, Homo sapiens
  siRNA target sequence for C1orf27 (NM_017847.2,472-490).
cgagtgacacttcacattt

SEQ ID NO: 363040 - DNA, 19 bp, Homo sapiens
  siRNA target sequence for C1orf27 (NM_017847.2,515-533).
gtcgaacttatgatatcca

SEQ ID NO: 363041 - DNA, 19 bp, Homo sapiens
  siRNA target sequence for C1orf27 (NM_017847.2,567-585).
gaagtatcaaagtggatta

SEQ ID NO: 363042 - DNA, 19 bp, Homo sapiens
  siRNA target sequence for C1orf27 (NM_017847.2,570-588).
gtatcaaagtggattatca

SEQ ID NO: 363043 - DNA, 19 bp, Homo sapiens
  siRNA target sequence for C1orf27 (NM_017847.2,590-608).
cctcatggctttctttaga

SEQ ID NO: 363044 - DNA, 19 bp, Homo sapiens
  siRNA target sequence for C1orf27 (NM_017847.2,607-625).
gagtgtacagttcacatta

SEQ ID NO: 363045 - DNA, 19 bp, Homo sapiens
  siRNA target sequence for C1orf27 (NM_017847.2,636-654).
cccactttctgctacttct

SEQ ID NO: 363046 - DNA, 19 bp, Homo sapiens
  siRNA target sequence for C1orf27 (NM_017847.2,732-750).
gattaatggacaagttaaa

SEQ ID NO: 363047 - DNA, 19 bp, Homo sapiens
  siRNA target sequence for C1orf27 (NM_017847.2,809-827).
caactagtcattcttttga

SEQ ID NO: 363048 - DNA, 19 bp, Homo sapiens
  siRNA target sequence for C1orf27 (NM_017847.2,877-895).
gccacagtccagatatgta

SEQ ID NO: 363049 - DNA, 19 bp, Homo sapiens
  siRNA target sequence for C1orf27 (NM_017847.2,888-906).
gatatgtagcggttctgta

SEQ ID NO: 363050 - DNA, 19 bp, Homo sapiens
  siRNA target sequence for C1orf27 (NM_017847.2,893-911).
gtagcggttctgtaaacct

SEQ ID NO: 363051 - DNA, 19 bp, Homo sapiens
  siRNA target sequence for C1orf27 (NM_017847.2,896-914).
gcggttctgtaaaccttaa

SEQ ID NO: 363052 - DNA, 19 bp, Homo sapiens
  siRNA target sequence for C1orf27 (NM_017847.2,947-965).
gcagtaaacccaaagttaa

SEQ ID NO: 363053 - DNA, 19 bp, Homo sapiens
  siRNA target sequence for C1orf27 (NM_017847.2,978-996).
ggcagtaaagagggatata

SEQ ID NO: 363054 - DNA, 19 bp, Homo sapiens
  siRNA target sequence for C1orf27 (NM_017847.2,979-997).
gcagtaaagagggatatat

SEQ ID NO: 363055 - DNA, 19 bp, Homo sapiens
  siRNA target sequence for C1orf27 (NM_017847.2,980-998).
cagtaaagagggatatatt

SEQ ID NO: 363056 - DNA, 19 bp, Homo sapiens
  siRNA target sequence for C1orf27 (NM_017847.2,982-1000).
gtaaagagggatatattga

SEQ ID NO: 363057 - DNA, 19 bp, Homo sapiens
  siRNA target sequence for C1orf27 (NM_017847.2,1086-1104).
ccacgtcctcccttatcga

SEQ ID NO: 363058 - DNA, 19 bp, Homo sapiens
  siRNA target sequence for C1orf27 (NM_017847.2,1092-1110).
cctcccttatcgagtcttt

SEQ ID NO: 363059 - DNA, 19 bp, Homo sapiens
  siRNA target sequence for C1orf27 (NM_017847.2,1120-1138).
cctggatccactgtaatgt

SEQ ID NO: 363060 - DNA, 19 bp, Homo sapiens
  siRNA target sequence for C1orf27 (NM_017847.2,1121-1139).
ctggatccactgtaatgtt

SEQ ID NO: 363061 - DNA, 19 bp, Homo sapiens
  siRNA target sequence for C1orf27 (NM_017847.2,1265-1283).
gttcttctatgaatagtca

SEQ ID NO: 363062 - DNA, 19 bp, Homo sapiens
  siRNA target sequence for C1orf27 (NM_017847.2,1406-1424).
gtatctcctttcattactt

SEQ ID NO: 363063 - DNA, 19 bp, Homo sapiens
  siRNA target sequence for FLJ20506 (NM_017848.3,117-135).
gcccgtggacctcctaaaa

SEQ ID NO: 363064 - DNA, 19 bp, Homo sapiens
  siRNA target sequence for FLJ20506 (NM_017848.3,632-650).
ggcagacagcgcaactgat

SEQ ID NO: 363065 - DNA, 19 bp, Homo sapiens
  siRNA target sequence for FLJ20506 (NM_017848.3,751-769).
cgggtcaaggtctttcaga

SEQ ID NO: 363066 - DNA, 19 bp, Homo sapiens
  siRNA target sequence for FLJ20506 (NM_017848.3,790-808).
gaagtggtggcgtttttca

SEQ ID NO: 363067 - DNA, 19 bp, Homo sapiens
  siRNA target sequence for FLJ20506 (NM_017848.3,845-863).
ccgagtatgctctctacaa

SEQ ID NO: 363068 - DNA, 19 bp, Homo sapiens
  siRNA target sequence for FLJ20506 (NM_017848.3,846-864).
cgagtatgctctctacaat

SEQ ID NO: 363069 - DNA, 19 bp, Homo sapiens
  siRNA target sequence for FLJ20506 (NM_017848.3,847-865).
gagtatgctctctacaata

SEQ ID NO: 363070 - DNA, 19 bp, Homo sapiens
  siRNA target sequence for FLJ20506 (NM_017848.3,849-867).
gtatgctctctacaatatt

SEQ ID NO: 363071 - DNA, 19 bp, Homo sapiens
  siRNA target sequence for FLJ20506 (NM_017848.3,881-899).
gttcccatgctctgaaact

SEQ ID NO: 363072 - DNA, 19 bp, Homo sapiens
  siRNA target sequence for FLJ20506 (NM_017848.3,933-951).
gttcctgatgcaagaagta

SEQ ID NO: 363073 - DNA, 19 bp, Homo sapiens
  siRNA target sequence for FLJ20506 (NM_017848.3,965-983).
gcctgaagaggatgaattt

SEQ ID NO: 363074 - DNA, 19 bp, Homo sapiens
  siRNA target sequence for FLJ20506 (NM_017848.3,1053-1071).
cctcttgggaccagaacat

SEQ ID NO: 363075 - DNA, 19 bp, Homo sapiens
  siRNA target sequence for FLJ20506 (NM_017848.3,1172-1190).
cctcaaacctggatgtagt

SEQ ID NO: 363076 - DNA, 19 bp, Homo sapiens
  siRNA target sequence for FLJ20506 (NM_017848.3,1186-1204).
gtagttgggaaggatgttt

SEQ ID NO: 363077 - DNA, 19 bp, Homo sapiens
  siRNA target sequence for FLJ20506 (NM_017848.3,1251-1269).
gaaagcagttgagtattat

SEQ ID NO: 363078 - DNA, 19 bp, Homo sapiens
  siRNA target sequence for FLJ20506 (NM_017848.3,1304-1322).
gtccctcctttctaggttt

SEQ ID NO: 363079 - DNA, 19 bp, Homo sapiens
  siRNA target sequence for FLJ20506 (NM_017848.3,1346-1364).
ctccccttccacgaaatca

SEQ ID NO: 363080 - DNA, 19 bp, Homo sapiens
  siRNA target sequence for FLJ20506 (NM_017848.3,1349-1367).
cccttccacgaaatcaagt

SEQ ID NO: 363081 - DNA, 19 bp, Homo sapiens
  siRNA target sequence for FLJ20506 (NM_017848.3,1389-1407).
gccaatgttttctcatcaa

SEQ ID NO: 363082 - DNA, 19 bp, Homo sapiens
  siRNA target sequence for FLJ20506 (NM_017848.3,1410-1428).
gccccagaaagtgaaatat

SEQ ID NO: 363083 - DNA, 19 bp, Homo sapiens
  siRNA target sequence for FLJ20506 (NM_017848.3,1446-1464).
gggacccaactcatctctt

SEQ ID NO: 363084 - DNA, 19 bp, Homo sapiens
  siRNA target sequence for FLJ20506 (NM_017848.3,1486-1504).
ggggaatcccatgcttttt

SEQ ID NO: 363085 - DNA, 19 bp, Homo sapiens
  siRNA target sequence for FLJ20506 (NM_017848.3,1571-1589).
cccagtttcccaattacct

SEQ ID NO: 363086 - DNA, 19 bp, Homo sapiens
  siRNA target sequence for FLJ20506 (NM_017848.3,1663-1681).
ggagctagctctgatcata

SEQ ID NO: 363087 - DNA, 19 bp, Homo sapiens
  siRNA target sequence for FLJ20506 (NM_017848.3,1666-1684).
gctagctctgatcatatca

SEQ ID NO: 363088 - DNA, 19 bp, Homo sapiens
  siRNA target sequence for FLJ20506 (NM_017848.3,1743-1761).
ggcacagcctgttgatact

SEQ ID NO: 363089 - DNA, 19 bp, Homo sapiens
  siRNA target sequence for FLJ20506 (NM_017848.3,1903-1921).
caccggaggggtcttatgt

SEQ ID NO: 363090 - DNA, 19 bp, Homo sapiens
  siRNA target sequence for FLJ20506 (NM_017848.3,1912-1930).
ggtcttatgtacccatata

SEQ ID NO: 363091 - DNA, 19 bp, Homo sapiens
  siRNA target sequence for FLJ20506 (NM_017848.3,1913-1931).
gtcttatgtacccatatat

SEQ ID NO: 363092 - DNA, 19 bp, Homo sapiens
  siRNA target sequence for FLJ20506 (NM_017848.3,1941-1959).
cctcactaagggtgaaatt

SEQ ID NO: 363093 - DNA, 19 bp, Homo sapiens
  siRNA target sequence for FLJ20506 (NM_017848.3,1942-1960).
ctcactaagggtgaaatta

SEQ ID NO: 363094 - DNA, 19 bp, Homo sapiens
  siRNA target sequence for FLJ20506 (NM_017848.3,1946-1964).
ctaagggtgaaattaagat

SEQ ID NO: 363095 - DNA, 19 bp, Homo sapiens
  siRNA target sequence for FLJ20506 (NM_017848.3,2022-2040).
ccggtcagctcgtcaatat

SEQ ID NO: 363096 - DNA, 19 bp, Homo sapiens
  siRNA target sequence for FLJ20506 (NM_017848.3,2024-2042).
ggtcagctcgtcaatatgt

SEQ ID NO: 363097 - DNA, 19 bp, Homo sapiens
  siRNA target sequence for FLJ20506 (NM_017848.3,2025-2043).
gtcagctcgtcaatatgta

SEQ ID NO: 363098 - DNA, 19 bp, Homo sapiens
  siRNA target sequence for FLJ20506 (NM_017848.3,2027-2045).
cagctcgtcaatatgtata

SEQ ID NO: 363099 - DNA, 19 bp, Homo sapiens
  siRNA target sequence for FLJ20506 (NM_017848.3,2216-2234).
cttgcccaaacctcaagaa

SEQ ID NO: 363100 - DNA, 19 bp, Homo sapiens
  siRNA target sequence for FLJ20506 (NM_017848.3,2241-2259).
gctaggcaaagcagttgaa

SEQ ID NO: 363101 - DNA, 19 bp, Homo sapiens
  siRNA target sequence for FLJ20506 (NM_017848.3,2349-2367).
gctgctcatgtgttgtgta

SEQ ID NO: 363102 - DNA, 19 bp, Homo sapiens
  siRNA target sequence for FLJ20506 (NM_017848.3,2445-2463).
gtctacccagctttatgaa

SEQ ID NO: 363103 - DNA, 19 bp, Homo sapiens
  siRNA target sequence for FLJ20506 (NM_017848.3,2518-2536).
cttgctgccctcttcatga

SEQ ID NO: 363104 - DNA, 19 bp, Homo sapiens
  siRNA target sequence for FLJ20506 (NM_017848.3,2595-2613).
gcattgctgtccatggatt

SEQ ID NO: 363105 - DNA, 19 bp, Homo sapiens
  siRNA target sequence for FLJ20506 (NM_017848.3,2600-2618).
gctgtccatggatttactt

SEQ ID NO: 363106 - DNA, 19 bp, Homo sapiens
  siRNA target sequence for FLJ20506 (NM_017848.3,2637-2655).
gagcaagctaattaaagca

SEQ ID NO: 363107 - DNA, 19 bp, Homo sapiens
  siRNA target sequence for FLJ20506 (NM_017848.3,3002-3020).
gcatgcaagtggtttctgt

SEQ ID NO: 363108 - DNA, 19 bp, Homo sapiens
  siRNA target sequence for FLJ20506 (NM_017848.3,3064-3082).
ggatccaagggacacaaaa

SEQ ID NO: 363109 - DNA, 19 bp, Homo sapiens
  siRNA target sequence for FLJ20506 (NM_017848.3,3065-3083).
gatccaagggacacaaaaa

SEQ ID NO: 363110 - DNA, 19 bp, Homo sapiens
  siRNA target sequence for FLJ20506 (NM_017848.3,3143-3161).
ggtctcgctcccaggtaaa

SEQ ID NO: 363111 - DNA, 19 bp, Homo sapiens
  siRNA target sequence for FLJ20506 (NM_017848.3,3144-3162).
gtctcgctcccaggtaaat

SEQ ID NO: 363112 - DNA, 19 bp, Homo sapiens
  siRNA target sequence for FLJ20506 (NM_017848.3,3149-3167).
gctcccaggtaaatggaaa

SEQ ID NO: 363113 - DNA, 19 bp, Homo sapiens
  siRNA target sequence for FLJ20506 (NM_017848.3,3164-3182).
gaaacagtggcgcattgat

SEQ ID NO: 363114 - DNA, 19 bp, Homo sapiens
  siRNA target sequence for FLJ20506 (NM_017848.3,3243-3261).
cagcaatgagtgtaataat

SEQ ID NO: 363115 - DNA, 19 bp, Homo sapiens
  siRNA target sequence for FLJ20506 (NM_017848.3,3246-3264).
caatgagtgtaataatggt

SEQ ID NO: 363116 - DNA, 19 bp, Homo sapiens
  siRNA target sequence for FLJ20506 (NM_017848.3,3267-3285).
ccgctacctccctatgaat

SEQ ID NO: 363117 - DNA, 19 bp, Homo sapiens
  siRNA target sequence for FLJ20506 (NM_017848.3,3268-3286).
cgctacctccctatgaata

SEQ ID NO: 363118 - DNA, 19 bp, Homo sapiens
  siRNA target sequence for FLJ20506 (NM_017848.3,3269-3287).
gctacctccctatgaataa

SEQ ID NO: 363119 - DNA, 19 bp, Homo sapiens
  siRNA target sequence for FLJ20506 (NM_017848.3,3270-3288).
ctacctccctatgaataat

SEQ ID NO: 363120 - DNA, 19 bp, Homo sapiens
  siRNA target sequence for FLJ20507 (NM_017849.1,486-504).
ccggacctgctgaaagatt

SEQ ID NO: 363121 - DNA, 19 bp, Homo sapiens
  siRNA target sequence for FLJ20507 (NM_017849.1,487-505).
cggacctgctgaaagattt

SEQ ID NO: 363122 - DNA, 19 bp, Homo sapiens
  siRNA target sequence for FLJ20507 (NM_017849.1,489-507).
gacctgctgaaagatttct

SEQ ID NO: 363123 - DNA, 19 bp, Homo sapiens
  siRNA target sequence for FLJ20507 (NM_017849.1,680-698).
caccgtcattggcttttct

SEQ ID NO: 363124 - DNA, 19 bp, Homo sapiens
  siRNA target sequence for FLJ20507 (NM_017849.1,682-700).
ccgtcattggcttttctta

SEQ ID NO: 363125 - DNA, 19 bp, Homo sapiens
  siRNA target sequence for FLJ20507 (NM_017849.1,683-701).
cgtcattggcttttcttat

SEQ ID NO: 363126 - DNA, 19 bp, Homo sapiens
  siRNA target sequence for FLJ20507 (NM_017849.1,753-771).
ggatcccaggtctatgtca

SEQ ID NO: 363127 - DNA, 19 bp, Homo sapiens
  siRNA target sequence for FLJ20507 (NM_017849.1,922-940).
cggaatatgaggtcatcaa

SEQ ID NO: 363128 - DNA, 19 bp, Homo sapiens
  siRNA target sequence for FLJ20507 (NM_017849.1,950-968).
gccaccccctgcttacaca

SEQ ID NO: 363129 - DNA, 19 bp, Homo sapiens
  siRNA target sequence for FLJ20508 (NM_017850.1,380-398).
cgggccttcccagatttaa

SEQ ID NO: 363130 - DNA, 19 bp, Homo sapiens
  siRNA target sequence for FLJ20508 (NM_017850.1,381-399).
gggccttcccagatttaaa

SEQ ID NO: 363131 - DNA, 19 bp, Homo sapiens
  siRNA target sequence for FLJ20508 (NM_017850.1,502-520).
ccatgtggagcgagtgttt

SEQ ID NO: 363132 - DNA, 19 bp, Homo sapiens
  siRNA target sequence for FLJ20508 (NM_017850.1,506-524).
gtggagcgagtgtttcaga

SEQ ID NO: 363133 - DNA, 19 bp, Homo sapiens
  siRNA target sequence for FLJ20508 (NM_017850.1,597-615).
ctgacatgttggaatggtt

SEQ ID NO: 363134 - DNA, 19 bp, Homo sapiens
  siRNA target sequence for FLJ20508 (NM_017850.1,649-667).
cctgaagagaaagtatctt

SEQ ID NO: 363135 - DNA, 19 bp, Homo sapiens
  siRNA target sequence for FLJ20508 (NM_017850.1,687-705).
gagacttggcaaacataca

SEQ ID NO: 363136 - DNA, 19 bp, Homo sapiens
  siRNA target sequence for FLJ20508 (NM_017850.1,719-737).
gcctgggaccgaatttcaa

SEQ ID NO: 363137 - DNA, 19 bp, Homo sapiens
  siRNA target sequence for FLJ20508 (NM_017850.1,720-738).
cctgggaccgaatttcaaa

SEQ ID NO: 363138 - DNA, 19 bp, Homo sapiens
  siRNA target sequence for FLJ20508 (NM_017850.1,721-739).
ctgggaccgaatttcaaaa

SEQ ID NO: 363139 - DNA, 19 bp, Homo sapiens
  siRNA target sequence for FLJ20508 (NM_017850.1,723-741).
gggaccgaatttcaaaaga

SEQ ID NO: 363140 - DNA, 19 bp, Homo sapiens
  siRNA target sequence for FLJ20508 (NM_017850.1,755-773).
cttgtacaagatatcctat

SEQ ID NO: 363141 - DNA, 19 bp, Homo sapiens
  siRNA target sequence for FLJ20508 (NM_017850.1,758-776).
gtacaagatatcctattga

SEQ ID NO: 363142 - DNA, 19 bp, Homo sapiens
  siRNA target sequence for FLJ20508 (NM_017850.1,764-782).
gatatcctattgaatgttt

SEQ ID NO: 363143 - DNA, 19 bp, Homo sapiens
  siRNA target sequence for FLJ20509 (NM_017851.1,566-584).
gcgactgtaaggactttga

SEQ ID NO: 363144 - DNA, 19 bp, Homo sapiens
  siRNA target sequence for FLJ20509 (NM_017851.1,710-728).
ccgtgtgtgaggtcattga

SEQ ID NO: 363145 - DNA, 19 bp, Homo sapiens
  siRNA target sequence for FLJ20509 (NM_017851.1,762-780).
ggattccaaggagatagat

SEQ ID NO: 363146 - DNA, 19 bp, Homo sapiens
  siRNA target sequence for FLJ20509 (NM_017851.1,781-799).
cgcagacgagcgagaatca

SEQ ID NO: 363147 - DNA, 19 bp, Homo sapiens
  siRNA target sequence for FLJ20509 (NM_017851.1,787-805).
cgagcgagaatcaaacata

SEQ ID NO: 363148 - DNA, 19 bp, Homo sapiens
  siRNA target sequence for FLJ20509 (NM_017851.1,791-809).
cgagaatcaaacatagtga

SEQ ID NO: 363149 - DNA, 19 bp, Homo sapiens
  siRNA target sequence for FLJ20509 (NM_017851.1,870-888).
gtacctcctggtgtattca

SEQ ID NO: 363150 - DNA, 19 bp, Homo sapiens
  siRNA target sequence for FLJ20509 (NM_017851.1,927-945).
gttttccagccattggttt

SEQ ID NO: 363151 - DNA, 19 bp, Homo sapiens
  siRNA target sequence for FLJ20509 (NM_017851.1,1006-1024).
gctttccaacacttttgga

SEQ ID NO: 363152 - DNA, 19 bp, Homo sapiens
  siRNA target sequence for FLJ20512 (NM_017854.1,292-310).
gggtcgggaagcagcatat

SEQ ID NO: 363153 - DNA, 19 bp, Homo sapiens
  siRNA target sequence for FLJ20513 (NM_017855.2,8-26).
ctatgtattctccttcaaa

SEQ ID NO: 363154 - DNA, 19 bp, Homo sapiens
  siRNA target sequence for FLJ20513 (NM_017855.2,42-60).
ggacagatgtttcaatact

SEQ ID NO: 363155 - DNA, 19 bp, Homo sapiens
  siRNA target sequence for FLJ20513 (NM_017855.2,43-61).
gacagatgtttcaatacta

SEQ ID NO: 363156 - DNA, 19 bp, Homo sapiens
  siRNA target sequence for FLJ20513 (NM_017855.2,54-72).
caatactatccagtttaca

SEQ ID NO: 363157 - DNA, 19 bp, Homo sapiens
  siRNA target sequence for FLJ20513 (NM_017855.2,127-145).
caagacagcaacagtatga

SEQ ID NO: 363158 - DNA, 19 bp, Homo sapiens
  siRNA target sequence for FLJ20513 (NM_017855.2,189-207).
ctagcagaacctgctatat

SEQ ID NO: 363159 - DNA, 19 bp, Homo sapiens
  siRNA target sequence for FLJ20513 (NM_017855.2,214-232).
gacagcagcaactagcttt

SEQ ID NO: 363160 - DNA, 19 bp, Homo sapiens
  siRNA target sequence for FLJ20513 (NM_017855.2,218-236).
gcagcaactagcttttgat

SEQ ID NO: 363161 - DNA, 19 bp, Homo sapiens
  siRNA target sequence for FLJ20513 (NM_017855.2,272-290).
gtcaacaggagaagagata

SEQ ID NO: 363162 - DNA, 19 bp, Homo sapiens
  siRNA target sequence for FLJ20513 (NM_017855.2,366-384).
cccagcacaaccaatgttt

SEQ ID NO: 363163 - DNA, 19 bp, Homo sapiens
  siRNA target sequence for FLJ20513 (NM_017855.2,371-389).
cacaaccaatgttttcact

SEQ ID NO: 363164 - DNA, 19 bp, Homo sapiens
  siRNA target sequence for FLJ20513 (NM_017855.2,391-409).
ctgctgtagaccaaactat

SEQ ID NO: 363165 - DNA, 19 bp, Homo sapiens
  siRNA target sequence for FLJ20513 (NM_017855.2,393-411).
gctgtagaccaaactatta

SEQ ID NO: 363166 - DNA, 19 bp, Homo sapiens
  siRNA target sequence for FLJ20514 (NM_017856.1,470-488).
caatcttccatggtactta

SEQ ID NO: 363167 - DNA, 19 bp, Homo sapiens
  siRNA target sequence for FLJ20516 (NM_017858.1,51-69).
gattgacctaccagattat

SEQ ID NO: 363168 - DNA, 19 bp, Homo sapiens
  siRNA target sequence for FLJ20516 (NM_017858.1,140-158).
gaactgagcctgatgaaga

SEQ ID NO: 363169 - DNA, 19 bp, Homo sapiens
  siRNA target sequence for FLJ20516 (NM_017858.1,187-205).
cctccaaagagaacagtta

SEQ ID NO: 363170 - DNA, 19 bp, Homo sapiens
  siRNA target sequence for FLJ20516 (NM_017858.1,188-206).
ctccaaagagaacagttaa

SEQ ID NO: 363171 - DNA, 19 bp, Homo sapiens
  siRNA target sequence for FLJ20516 (NM_017858.1,259-277).
ccagccttaaggcatgtat

SEQ ID NO: 363172 - DNA, 19 bp, Homo sapiens
  siRNA target sequence for FLJ20516 (NM_017858.1,260-278).
cagccttaaggcatgtatt

SEQ ID NO: 363173 - DNA, 19 bp, Homo sapiens
  siRNA target sequence for FLJ20516 (NM_017858.1,305-323).
gtcatgaggctgaagactt

SEQ ID NO: 363174 - DNA, 19 bp, Homo sapiens
  siRNA target sequence for FLJ20516 (NM_017858.1,378-396).
gcagtttgaggattttatt

SEQ ID NO: 363175 - DNA, 19 bp, Homo sapiens
  siRNA target sequence for FLJ20516 (NM_017858.1,433-451).
cagacctgtttaaaacgaa

SEQ ID NO: 363176 - DNA, 19 bp, Homo sapiens
  siRNA target sequence for FLJ20516 (NM_017858.1,435-453).
gacctgtttaaaacgaatt

SEQ ID NO: 363177 - DNA, 19 bp, Homo sapiens
  siRNA target sequence for FLJ20516 (NM_017858.1,438-456).
ctgtttaaaacgaattcga

SEQ ID NO: 363178 - DNA, 19 bp, Homo sapiens
  siRNA target sequence for FLJ20516 (NM_017858.1,454-472).
cgacttgatctccctattt

SEQ ID NO: 363179 - DNA, 19 bp, Homo sapiens
  siRNA target sequence for FLJ20516 (NM_017858.1,455-473).
gacttgatctccctatttt

SEQ ID NO: 363180 - DNA, 19 bp, Homo sapiens
  siRNA target sequence for FLJ20516 (NM_017858.1,499-517).
gatgaagttgcggagaata

SEQ ID NO: 363181 - DNA, 19 bp, Homo sapiens
  siRNA target sequence for FLJ20516 (NM_017858.1,558-576).
gacaaacttatctgaaagt

SEQ ID NO: 363182 - DNA, 19 bp, Homo sapiens
  siRNA target sequence for FLJ20516 (NM_017858.1,646-664).
caactggccttggaaagaa

SEQ ID NO: 363183 - DNA, 19 bp, Homo sapiens
  siRNA target sequence for FLJ20516 (NM_017858.1,669-687).
ggcaaagctgctgagtaat

SEQ ID NO: 363184 - DNA, 19 bp, Homo sapiens
  siRNA target sequence for FLJ20516 (NM_017858.1,691-709).
cagaccctaggaaatgata

SEQ ID NO: 363185 - DNA, 19 bp, Homo sapiens
  siRNA target sequence for FLJ20516 (NM_017858.1,738-756).
ggttgaagaggttaatact

SEQ ID NO: 363186 - DNA, 19 bp, Homo sapiens
  siRNA target sequence for FLJ20516 (NM_017858.1,771-789).
ggaggagtcaaatggatta

SEQ ID NO: 363187 - DNA, 19 bp, Homo sapiens
  siRNA target sequence for FLJ20516 (NM_017858.1,772-790).
gaggagtcaaatggattaa

SEQ ID NO: 363188 - DNA, 19 bp, Homo sapiens
  siRNA target sequence for FLJ20516 (NM_017858.1,777-795).
gtcaaatggattaaacgaa

SEQ ID NO: 363189 - DNA, 19 bp, Homo sapiens
  siRNA target sequence for FLJ20516 (NM_017858.1,796-814).
gacattctggacaatccat

SEQ ID NO: 363190 - DNA, 19 bp, Homo sapiens
  siRNA target sequence for FLJ20516 (NM_017858.1,804-822).
ggacaatccatgtaatgat

SEQ ID NO: 363191 - DNA, 19 bp, Homo sapiens
  siRNA target sequence for FLJ20516 (NM_017858.1,820-838).
gatgctattgccaatactt

SEQ ID NO: 363192 - DNA, 19 bp, Homo sapiens
  siRNA target sequence for FLJ20516 (NM_017858.1,823-841).
gctattgccaatactttaa

SEQ ID NO: 363193 - DNA, 19 bp, Homo sapiens
  siRNA target sequence for FLJ20516 (NM_017858.1,902-920).
catccagaaatattactga

SEQ ID NO: 363194 - DNA, 19 bp, Homo sapiens
  siRNA target sequence for FLJ20519 (NM_017860.3,94-112).
gggtcctgctgctgaatct

SEQ ID NO: 363195 - DNA, 19 bp, Homo sapiens
  siRNA target sequence for FLJ20519 (NM_017860.3,228-246).
ggtcttccccggaagacaa

SEQ ID NO: 363196 - DNA, 19 bp, Homo sapiens
  siRNA target sequence for FLJ20519 (NM_017860.3,234-252).
ccccggaagacaaggataa

SEQ ID NO: 363197 - DNA, 19 bp, Homo sapiens
  siRNA target sequence for FLJ20519 (NM_017860.3,235-253).
cccggaagacaaggataat

SEQ ID NO: 363198 - DNA, 19 bp, Homo sapiens
  siRNA target sequence for FLJ20519 (NM_017860.3,239-257).
gaagacaaggataatccta

SEQ ID NO: 363199 - DNA, 19 bp, Homo sapiens
  siRNA target sequence for FLJ20519 (NM_017860.3,349-367).
gccggtcgtccgccattaa

SEQ ID NO: 363200 - DNA, 19 bp, Homo sapiens
  siRNA target sequence for FLJ20519 (NM_017860.3,352-370).
ggtcgtccgccattaacga

SEQ ID NO: 363201 - DNA, 19 bp, Homo sapiens
  siRNA target sequence for FLJ20519 (NM_017860.3,371-389).
ggaggatgggtcttcagaa

SEQ ID NO: 363202 - DNA, 19 bp, Homo sapiens
  siRNA target sequence for FLJ20519 (NM_017860.3,401-419).
gattaatgccggaaaggat

SEQ ID NO: 363203 - DNA, 19 bp, Homo sapiens
  siRNA target sequence for FLJ20519 (NM_017860.3,440-458).
cagtgcgactcccaataca

SEQ ID NO: 363204 - DNA, 19 bp, Homo sapiens
  siRNA target sequence for FLJ20519 (NM_017860.3,466-484).
gttccagcacgaggtttat

SEQ ID NO: 363205 - DNA, 19 bp, Homo sapiens
  siRNA target sequence for FLJ20519 (NM_017860.3,476-494).
gaggtttatagccaatagt

SEQ ID NO: 363206 - DNA, 19 bp, Homo sapiens
  siRNA target sequence for FLJ20519 (NM_017860.3,478-496).
ggtttatagccaatagtca

SEQ ID NO: 363207 - DNA, 19 bp, Homo sapiens
  siRNA target sequence for FLJ20519 (NM_017860.3,800-818).
caagccttgcacctatcaa

SEQ ID NO: 363208 - DNA, 19 bp, Homo sapiens
  siRNA target sequence for FLJ20519 (NM_017860.3,804-822).
ccttgcacctatcaacaat

SEQ ID NO: 363209 - DNA, 19 bp, Homo sapiens
  siRNA target sequence for FLJ20519 (NM_017860.3,1055-1073).
cacagagatgcaaccaata

SEQ ID NO: 363210 - DNA, 19 bp, Homo sapiens
  siRNA target sequence for FLJ20522 (NM_017861.1,261-279).
cacagagaccttttaatca

SEQ ID NO: 363211 - DNA, 19 bp, Homo sapiens
  siRNA target sequence for FLJ20522 (NM_017861.1,263-281).
cagagaccttttaatcaaa

SEQ ID NO: 363212 - DNA, 19 bp, Homo sapiens
  siRNA target sequence for FLJ20522 (NM_017861.1,319-337).
gccgtctcttaattaaaca

SEQ ID NO: 363213 - DNA, 19 bp, Homo sapiens
  siRNA target sequence for FLJ20522 (NM_017861.1,367-385).
cgtatgagttggcttcatt

SEQ ID NO: 363214 - DNA, 19 bp, Homo sapiens
  siRNA target sequence for FLJ20522 (NM_017861.1,379-397).
cttcattacgagagagaaa

SEQ ID NO: 363215 - DNA, 19 bp, Homo sapiens
  siRNA target sequence for FLJ20522 (NM_017861.1,455-473).
gtccaaggagtctgaagtt

SEQ ID NO: 363216 - DNA, 19 bp, Homo sapiens
  siRNA target sequence for FLJ20522 (NM_017861.1,492-510).
gattcacagtgcattgact

SEQ ID NO: 363217 - DNA, 19 bp, Homo sapiens
  siRNA target sequence for FLJ20522 (NM_017861.1,573-591).
gcctcgattgtggtcaata

SEQ ID NO: 363218 - DNA, 19 bp, Homo sapiens
  siRNA target sequence for FLJ20522 (NM_017861.1,574-592).
cctcgattgtggtcaataa

SEQ ID NO: 363219 - DNA, 19 bp, Homo sapiens
  siRNA target sequence for FLJ20522 (NM_017861.1,618-636).
caagagttcccgattttga

SEQ ID NO: 363220 - DNA, 19 bp, Homo sapiens
  siRNA target sequence for FLJ20522 (NM_017861.1,621-639).
gagttcccgattttgaaat

SEQ ID NO: 363221 - DNA, 19 bp, Homo sapiens
  siRNA target sequence for FLJ20522 (NM_017861.1,700-718).
ggaacaagatgaagtataa

SEQ ID NO: 363222 - DNA, 19 bp, Homo sapiens
  siRNA target sequence for FLJ20522 (NM_017861.1,731-749).
gaatgtgattctacaagtt

SEQ ID NO: 363223 - DNA, 19 bp, Homo sapiens
  siRNA target sequence for FLJ20522 (NM_017861.1,753-771).
gtgggactgactgtacata

SEQ ID NO: 363224 - DNA, 19 bp, Homo sapiens
  siRNA target sequence for FLJ20522 (NM_017861.1,768-786).
catacctctctagtatgtt

SEQ ID NO: 363225 - DNA, 19 bp, Homo sapiens
  siRNA target sequence for FLJ20522 (NM_017861.1,828-846).
cttgtagcagttttcaaat

SEQ ID NO: 363226 - DNA, 19 bp, Homo sapiens
  siRNA target sequence for FLJ20527 (NM_017863.2,903-921).
gataaaccacattatggat

SEQ ID NO: 363227 - DNA, 19 bp, Homo sapiens
  siRNA target sequence for FLJ20527 (NM_017863.2,1097-1115).
gggtgacttgttagaagtt

SEQ ID NO: 363228 - DNA, 19 bp, Homo sapiens
  siRNA target sequence for FLJ20527 (NM_017863.2,1128-1146).
gagccaggcatctcaaaca

SEQ ID NO: 363229 - DNA, 19 bp, Homo sapiens
  siRNA target sequence for FLJ20527 (NM_017863.2,1167-1185).
cccatccgttgtattcata

SEQ ID NO: 363230 - DNA, 19 bp, Homo sapiens
  siRNA target sequence for FLJ20530 (NM_017864.1,46-64).
ggaagatctgcagtatgtt

SEQ ID NO: 363231 - DNA, 19 bp, Homo sapiens
  siRNA target sequence for FLJ20530 (NM_017864.1,47-65).
gaagatctgcagtatgttt

SEQ ID NO: 363232 - DNA, 19 bp, Homo sapiens
  siRNA target sequence for FLJ20530 (NM_017864.1,58-76).
gtatgttttcatgatttct

SEQ ID NO: 363233 - DNA, 19 bp, Homo sapiens
  siRNA target sequence for FLJ20530 (NM_017864.1,83-101).
gagcttttcattacattgt

SEQ ID NO: 363234 - DNA, 19 bp, Homo sapiens
  siRNA target sequence for FLJ20530 (NM_017864.1,145-163).
gagatcccctagagtaaat

SEQ ID NO: 363235 - DNA, 19 bp, Homo sapiens
  siRNA target sequence for FLJ20530 (NM_017864.1,147-165).
gatcccctagagtaaatct

SEQ ID NO: 363236 - DNA, 19 bp, Homo sapiens
  siRNA target sequence for FLJ20530 (NM_017864.1,156-174).
gagtaaatctgtgcattaa

SEQ ID NO: 363237 - DNA, 19 bp, Homo sapiens
  siRNA target sequence for FLJ20530 (NM_017864.1,166-184).
gtgcattaaacctgtaact

SEQ ID NO: 363238 - DNA, 19 bp, Homo sapiens
  siRNA target sequence for FLJ20530 (NM_017864.1,225-243).
gtcagttagagcatcaact

SEQ ID NO: 363239 - DNA, 19 bp, Homo sapiens
  siRNA target sequence for FLJ20530 (NM_017864.1,227-245).
cagttagagcatcaactta

SEQ ID NO: 363240 - DNA, 19 bp, Homo sapiens
  siRNA target sequence for FLJ20530 (NM_017864.1,229-247).
gttagagcatcaacttata

SEQ ID NO: 363241 - DNA, 19 bp, Homo sapiens
  siRNA target sequence for FLJ20530 (NM_017864.1,235-253).
gcatcaacttatattgtca

SEQ ID NO: 363242 - DNA, 19 bp, Homo sapiens
  siRNA target sequence for FLJ20530 (NM_017864.1,256-274).
ggatccttggaggattaga

SEQ ID NO: 363243 - DNA, 19 bp, Homo sapiens
  siRNA target sequence for FLJ20530 (NM_017864.1,265-283).
gaggattagacaaatttta

SEQ ID NO: 363244 - DNA, 19 bp, Homo sapiens
  siRNA target sequence for FLJ20530 (NM_017864.1,267-285).
ggattagacaaattttaat

SEQ ID NO: 363245 - DNA, 19 bp, Homo sapiens
  siRNA target sequence for FLJ20530 (NM_017864.1,316-334).
gttctggacagtgtctaat

SEQ ID NO: 363246 - DNA, 19 bp, Homo sapiens
  siRNA target sequence for FLJ20530 (NM_017864.1,351-369).
ctgtctatagtggtgttat

SEQ ID NO: 363247 - DNA, 19 bp, Homo sapiens
  siRNA target sequence for FLJ20530 (NM_017864.1,362-380).
ggtgttatcctgggaatta

SEQ ID NO: 363248 - DNA, 19 bp, Homo sapiens
  siRNA target sequence for FLJ20530 (NM_017864.1,363-381).
gtgttatcctgggaattaa

SEQ ID NO: 363249 - DNA, 19 bp, Homo sapiens
  siRNA target sequence for FLJ20530 (NM_017864.1,373-391).
gggaattaaagacaattta

SEQ ID NO: 363250 - DNA, 19 bp, Homo sapiens
  siRNA target sequence for FLJ20530 (NM_017864.1,448-466).
ggacttttcccatgctaaa

SEQ ID NO: 363251 - DNA, 19 bp, Homo sapiens
  siRNA target sequence for FLJ20530 (NM_017864.1,479-497).
gcttgtttggagttggtaa

SEQ ID NO: 363252 - DNA, 19 bp, Homo sapiens
  siRNA target sequence for FLJ20530 (NM_017864.1,483-501).
gtttggagttggtaacaga

SEQ ID NO: 363253 - DNA, 19 bp, Homo sapiens
  siRNA target sequence for FLJ20530 (NM_017864.1,594-612).
gaccgccatccgaccttat

SEQ ID NO: 363254 - DNA, 19 bp, Homo sapiens
  siRNA target sequence for FLJ20530 (NM_017864.1,598-616).
gccatccgaccttataagt

SEQ ID NO: 363255 - DNA, 19 bp, Homo sapiens
  siRNA target sequence for FLJ20530 (NM_017864.1,604-622).
cgaccttataagtagagta

SEQ ID NO: 363256 - DNA, 19 bp, Homo sapiens
  siRNA target sequence for FLJ20530 (NM_017864.1,623-641).
cgaggctatctggaaatga

SEQ ID NO: 363257 - DNA, 19 bp, Homo sapiens
  siRNA target sequence for FLJ20530 (NM_017864.1,680-698).
gaatgtgttgcctttatgt

SEQ ID NO: 363258 - DNA, 19 bp, Homo sapiens
  siRNA target sequence for FLJ20530 (NM_017864.1,809-827).
ccaggccctaaagaaagta

SEQ ID NO: 363259 - DNA, 19 bp, Homo sapiens
  siRNA target sequence for FLJ20530 (NM_017864.1,854-872).
gttgttgttcaaatctgta

SEQ ID NO: 363260 - DNA, 19 bp, Homo sapiens
  siRNA target sequence for FLJ20530 (NM_017864.1,886-904).
gcacaaacgaggaaatgat

SEQ ID NO: 363261 - DNA, 19 bp, Homo sapiens
  siRNA target sequence for FLJ20530 (NM_017864.1,956-974).
cggagtgaactgctttctt

SEQ ID NO: 363262 - DNA, 19 bp, Homo sapiens
  siRNA target sequence for FLJ20530 (NM_017864.1,989-1007).
cgagaaccactcgttttga

SEQ ID NO: 363263 - DNA, 19 bp, Homo sapiens
  siRNA target sequence for FLJ20530 (NM_017864.1,992-1010).
gaaccactcgttttgacta

SEQ ID NO: 363264 - DNA, 19 bp, Homo sapiens
  siRNA target sequence for FLJ20530 (NM_017864.1,996-1014).
cactcgttttgactattat

SEQ ID NO: 363265 - DNA, 19 bp, Homo sapiens
  siRNA target sequence for FLJ20530 (NM_017864.1,1000-1018).
cgttttgactattatttta

SEQ ID NO: 363266 - DNA, 19 bp, Homo sapiens
  siRNA target sequence for FLJ20530 (NM_017864.1,1043-1061).
gttcgggaggacattgtga

SEQ ID NO: 363267 - DNA, 19 bp, Homo sapiens
  siRNA target sequence for FLJ20530 (NM_017864.1,1114-1132).
ccagtctgtggactttgaa

SEQ ID NO: 363268 - DNA, 19 bp, Homo sapiens
  siRNA target sequence for FLJ20530 (NM_017864.1,1150-1168).
gaaagagctagttcgatat

SEQ ID NO: 363269 - DNA, 19 bp, Homo sapiens
  siRNA target sequence for FLJ20530 (NM_017864.1,1163-1181).
cgatatacactcagtataa

SEQ ID NO: 363270 - DNA, 19 bp, Homo sapiens
  siRNA target sequence for FLJ20530 (NM_017864.1,1164-1182).
gatatacactcagtataaa

SEQ ID NO: 363271 - DNA, 19 bp, Homo sapiens
  siRNA target sequence for FLJ20530 (NM_017864.1,1172-1190).
ctcagtataaatccaaata

SEQ ID NO: 363272 - DNA, 19 bp, Homo sapiens
  siRNA target sequence for FLJ20530 (NM_017864.1,1225-1243).
ctttgcaacgaatcagtat

SEQ ID NO: 363273 - DNA, 19 bp, Homo sapiens
  siRNA target sequence for FLJ20530 (NM_017864.1,1303-1321).
ggctgtgccccctgatgtt

SEQ ID NO: 363274 - DNA, 19 bp, Homo sapiens
  siRNA target sequence for FLJ20530 (NM_017864.1,1304-1322).
gctgtgccccctgatgttt

SEQ ID NO: 363275 - DNA, 19 bp, Homo sapiens
  siRNA target sequence for FLJ20530 (NM_017864.1,1309-1327).
gccccctgatgtttataca

SEQ ID NO: 363276 - DNA, 19 bp, Homo sapiens
  siRNA target sequence for FLJ20530 (NM_017864.1,1311-1329).
cccctgatgtttatacaga

SEQ ID NO: 363277 - DNA, 19 bp, Homo sapiens
  siRNA target sequence for FLJ20530 (NM_017864.1,1328-1346).
gaccaggtaataaaacgaa

SEQ ID NO: 363278 - DNA, 19 bp, Homo sapiens
  siRNA target sequence for FLJ20530 (NM_017864.1,1333-1351).
ggtaataaaacgaatgata

SEQ ID NO: 363279 - DNA, 19 bp, Homo sapiens
  siRNA target sequence for FLJ20530 (NM_017864.1,1408-1426).
cagagaaattgactacaaa

SEQ ID NO: 363280 - DNA, 19 bp, Homo sapiens
  siRNA target sequence for FLJ20530 (NM_017864.1,1420-1438).
ctacaaaacagcgtttaaa

SEQ ID NO: 363281 - DNA, 19 bp, Homo sapiens
  siRNA target sequence for FLJ20530 (NM_017864.1,1474-1492).
ctcctactacgactacata

SEQ ID NO: 363282 - DNA, 19 bp, Homo sapiens
  siRNA target sequence for FLJ20530 (NM_017864.1,1519-1537).
gacttatcttcatcataaa

SEQ ID NO: 363283 - DNA, 19 bp, Homo sapiens
  siRNA target sequence for FLJ20530 (NM_017864.1,1579-1597).
cggccagacagagttgaat

SEQ ID NO: 363284 - DNA, 19 bp, Homo sapiens
  siRNA target sequence for FLJ20530 (NM_017864.1,1627-1645).
ggcagcgcagagaaggaaa

SEQ ID NO: 363285 - DNA, 19 bp, Homo sapiens
  siRNA target sequence for FLJ20530 (NM_017864.1,1657-1675).
ccaagcaatggcaaaactt

SEQ ID NO: 363286 - DNA, 19 bp, Homo sapiens
  siRNA target sequence for FLJ20530 (NM_017864.1,1661-1679).
gcaatggcaaaactttact

SEQ ID NO: 363287 - DNA, 19 bp, Homo sapiens
  siRNA target sequence for FLJ20531 (NM_017865.2,341-359).
ggaccggtacacttcttca

SEQ ID NO: 363288 - DNA, 19 bp, Homo sapiens
  siRNA target sequence for FLJ20531 (NM_017865.2,588-606).
catactactcggagaagtt

SEQ ID NO: 363289 - DNA, 19 bp, Homo sapiens
  siRNA target sequence for FLJ20531 (NM_017865.2,783-801).
ctcagtgatgccagcttat

SEQ ID NO: 363290 - DNA, 19 bp, Homo sapiens
  siRNA target sequence for FLJ20531 (NM_017865.2,812-830).
ctcctccccagatgatagt

SEQ ID NO: 363291 - DNA, 19 bp, Homo sapiens
  siRNA target sequence for FLJ20531 (NM_017865.2,814-832).
cctccccagatgatagtga

SEQ ID NO: 363292 - DNA, 19 bp, Homo sapiens
  siRNA target sequence for FLJ20531 (NM_017865.2,1110-1128).
ggccccaagagaattagga

SEQ ID NO: 363293 - DNA, 19 bp, Homo sapiens
  siRNA target sequence for FLJ20531 (NM_017865.2,1112-1130).
ccccaagagaattaggaaa

SEQ ID NO: 363294 - DNA, 19 bp, Homo sapiens
  siRNA target sequence for FLJ20531 (NM_017865.2,1186-1204).
ccaaccggcagtatttgaa

SEQ ID NO: 363295 - DNA, 19 bp, Homo sapiens
  siRNA target sequence for FLJ20531 (NM_017865.2,1320-1338).
gacacccgggactacatct

SEQ ID NO: 363296 - DNA, 19 bp, Homo sapiens
  siRNA target sequence for FLJ20531 (NM_017865.2,1425-1443).
gagatatgcgggtttacct

SEQ ID NO: 363297 - DNA, 19 bp, Homo sapiens
  siRNA target sequence for FLJ20531 (NM_017865.2,1506-1524).
cgcttcccctgtgaattct

SEQ ID NO: 363298 - DNA, 19 bp, Homo sapiens
  siRNA target sequence for FLJ20531 (NM_017865.2,1557-1575).
gcagcccaccgtagcaaaa

SEQ ID NO: 363299 - DNA, 19 bp, Homo sapiens
  siRNA target sequence for FLJ20531 (NM_017865.2,1561-1579).
cccaccgtagcaaaagtca

SEQ ID NO: 363300 - DNA, 19 bp, Homo sapiens
  siRNA target sequence for FLJ20533 (NM_017866.3,277-295).
gagcgcagatccctgttta

SEQ ID NO: 363301 - DNA, 19 bp, Homo sapiens
  siRNA target sequence for FLJ20533 (NM_017866.3,298-316).
gggaaggatatgttcgatt

SEQ ID NO: 363302 - DNA, 19 bp, Homo sapiens
  siRNA target sequence for FLJ20533 (NM_017866.3,325-343).
cgccatctgacaaatcaga

SEQ ID NO: 363303 - DNA, 19 bp, Homo sapiens
  siRNA target sequence for FLJ20533 (NM_017866.3,418-436).
gtctgattggccttacatt

SEQ ID NO: 363304 - DNA, 19 bp, Homo sapiens
  siRNA target sequence for FLJ20533 (NM_017866.3,441-459).
ccatacatttttacacaaa

SEQ ID NO: 363305 - DNA, 19 bp, Homo sapiens
  siRNA target sequence for FLJ20533 (NM_017866.3,478-496).
gtgtgcctctgcctattca

SEQ ID NO: 363306 - DNA, 19 bp, Homo sapiens
  siRNA target sequence for FLJ20533 (NM_017866.3,480-498).
gtgcctctgcctattcaaa

SEQ ID NO: 363307 - DNA, 19 bp, Homo sapiens
  siRNA target sequence for FLJ20533 (NM_017866.3,510-528).
ggcatcatgggaagcttta

SEQ ID NO: 363308 - DNA, 19 bp, Homo sapiens
  siRNA target sequence for FLJ20533 (NM_017866.3,539-557).
cccagtgctgcttcacttt

SEQ ID NO: 363309 - DNA, 19 bp, Homo sapiens
  siRNA target sequence for FLJ20533 (NM_017866.3,540-558).
ccagtgctgcttcacttta

SEQ ID NO: 363310 - DNA, 19 bp, Homo sapiens
  siRNA target sequence for FLJ20533 (NM_017866.3,546-564).
ctgcttcactttattacaa

SEQ ID NO: 363311 - DNA, 19 bp, Homo sapiens
  siRNA target sequence for FLJ20533 (NM_017866.3,568-586).
gctatgtcattcgattgta

SEQ ID NO: 363312 - DNA, 19 bp, Homo sapiens
  siRNA target sequence for FLJ20533 (NM_017866.3,593-611).
ggccacaacagacacttat

SEQ ID NO: 363313 - DNA, 19 bp, Homo sapiens
  siRNA target sequence for FLJ20533 (NM_017866.3,594-612).
gccacaacagacacttata

SEQ ID NO: 363314 - DNA, 19 bp, Homo sapiens
  siRNA target sequence for FLJ20533 (NM_017866.3,753-771).
ccaaaccgtgaagactata

SEQ ID NO: 363315 - DNA, 19 bp, Homo sapiens
  siRNA target sequence for FLJ20533 (NM_017866.3,754-772).
caaaccgtgaagactatat

SEQ ID NO: 363316 - DNA, 19 bp, Homo sapiens
  siRNA target sequence for FLJ20533 (NM_017866.3,774-792).
catctaatgggttatgaca

SEQ ID NO: 363317 - DNA, 19 bp, Homo sapiens
  siRNA target sequence for FLJ20533 (NM_017866.3,837-855).
cggcataaagatgacaaat

SEQ ID NO: 363318 - DNA, 19 bp, Homo sapiens
  siRNA target sequence for FLJ20534 (NM_017867.1,360-378).
gagttccagaccattatta

SEQ ID NO: 363319 - DNA, 19 bp, Homo sapiens
  siRNA target sequence for FLJ20534 (NM_017867.1,698-716).
cttggttgttccagtagat

SEQ ID NO: 363320 - DNA, 19 bp, Homo sapiens
  siRNA target sequence for BANP (NM_017869.2,1429-1447).
gcgacatccaggttcagta

SEQ ID NO: 363321 - DNA, 19 bp, Homo sapiens
  siRNA target sequence for GBP (NM_017870.2,986-1004).
ctgcttcggcacaacttca

SEQ ID NO: 363322 - DNA, 19 bp, Homo sapiens
  siRNA target sequence for GBP (NM_017870.2,1187-1205).
gaactgtctgagttcctat

SEQ ID NO: 363323 - DNA, 19 bp, Homo sapiens
  siRNA target sequence for GBP (NM_017870.2,2580-2598).
gtgtgaggggcaagtttga

SEQ ID NO: 363324 - DNA, 19 bp, Homo sapiens
  siRNA target sequence for GBP (NM_017870.2,2782-2800).
gcgctatcagcgcaaagaa

SEQ ID NO: 363325 - DNA, 19 bp, Homo sapiens
  siRNA target sequence for GBP (NM_017870.2,3040-3058).
gcggaagcgagtagagttt

SEQ ID NO: 363326 - DNA, 19 bp, Homo sapiens
  siRNA target sequence for GBP (NM_017870.2,3048-3066).
gagtagagtttgtgacatt

SEQ ID NO: 363327 - DNA, 19 bp, Homo sapiens
  siRNA target sequence for FLJ20542 (NM_017871.3,107-125).
ctccattgcgggcaagaat

SEQ ID NO: 363328 - DNA, 19 bp, Homo sapiens
  siRNA target sequence for FLJ20542 (NM_017871.3,109-127).
ccattgcgggcaagaatgt

SEQ ID NO: 363329 - DNA, 19 bp, Homo sapiens
  siRNA target sequence for FLJ20542 (NM_017871.3,364-382).
gcaagatcgccgtagacaa

SEQ ID NO: 363330 - DNA, 19 bp, Homo sapiens
  siRNA target sequence for FLJ20542 (NM_017871.3,461-479).
gacggtccaggtagatgat

SEQ ID NO: 363331 - DNA, 19 bp, Homo sapiens
  siRNA target sequence for FLJ20542 (NM_017871.3,560-578).
ggtctacacgggtgattat

SEQ ID NO: 363332 - DNA, 19 bp, Homo sapiens
  siRNA target sequence for FLJ20542 (NM_017871.3,561-579).
gtctacacgggtgattata

SEQ ID NO: 363333 - DNA, 19 bp, Homo sapiens
  siRNA target sequence for FLJ20542 (NM_017871.3,584-602).
gaccccagaccgacactta

SEQ ID NO: 363334 - DNA, 19 bp, Homo sapiens
  siRNA target sequence for FLJ20542 (NM_017871.3,927-945).
cagaggaacatgtttgagt

SEQ ID NO: 363335 - DNA, 19 bp, Homo sapiens
  siRNA target sequence for FLJ20542 (NM_017871.3,962-980).
cttcgaccgggcttttgct

SEQ ID NO: 363336 - DNA, 19 bp, Homo sapiens
  siRNA target sequence for FLJ20542 (NM_017871.3,988-1006).
caggaccgatggttgtgtt

SEQ ID NO: 363337 - DNA, 19 bp, Homo sapiens
  siRNA target sequence for FLJ20542 (NM_017871.3,1063-1081).
ccggaaacgaaaagaacat

SEQ ID NO: 363338 - DNA, 19 bp, Homo sapiens
  siRNA target sequence for FLJ20542 (NM_017871.3,1111-1129).
gcaccgtcggccacaagat

SEQ ID NO: 363339 - DNA, 19 bp, Homo sapiens
  siRNA target sequence for FLJ20542 (NM_017871.3,1188-1206).
caggtggagtacatgtcat

SEQ ID NO: 363340 - DNA, 19 bp, Homo sapiens
  siRNA target sequence for FLJ20542 (NM_017871.3,1191-1209).
gtggagtacatgtcattca

SEQ ID NO: 363341 - DNA, 19 bp, Homo sapiens
  siRNA target sequence for FLJ20546 (NM_017872.2,12-30).
cgcctgtaaagttaaggtt

SEQ ID NO: 363342 - DNA, 19 bp, Homo sapiens
  siRNA target sequence for FLJ20546 (NM_017872.2,280-298).
gaactagaggatattgtga

SEQ ID NO: 363343 - DNA, 19 bp, Homo sapiens
  siRNA target sequence for FLJ20546 (NM_017872.2,316-334).
gatgagtacagctttgtgt

SEQ ID NO: 363344 - DNA, 19 bp, Homo sapiens
  siRNA target sequence for FLJ20546 (NM_017872.2,340-358).
cggaaaaccaattggttta

SEQ ID NO: 363345 - DNA, 19 bp, Homo sapiens
  siRNA target sequence for FLJ20546 (NM_017872.2,348-366).
caattggtttaaaagaaga

SEQ ID NO: 363346 - DNA, 19 bp, Homo sapiens
  siRNA target sequence for FLJ20546 (NM_017872.2,403-421).
gcctccagctatgtgtttt

SEQ ID NO: 363347 - DNA, 19 bp, Homo sapiens
  siRNA target sequence for FLJ20546 (NM_017872.2,405-423).
ctccagctatgtgttttat

SEQ ID NO: 363348 - DNA, 19 bp, Homo sapiens
  siRNA target sequence for FLJ20546 (NM_017872.2,535-553).
gcagattgtcacatcaata

SEQ ID NO: 363349 - DNA, 19 bp, Homo sapiens
  siRNA target sequence for FLJ20546 (NM_017872.2,576-594).
ggcacttatacaacaatct

SEQ ID NO: 363350 - DNA, 19 bp, Homo sapiens
  siRNA target sequence for FLJ20546 (NM_017872.2,668-686).
ctgaattcaacatcaacta

SEQ ID NO: 363351 - DNA, 19 bp, Homo sapiens
  siRNA target sequence for FLJ20546 (NM_017872.2,830-848).
ccttgcactgcgatatcat

SEQ ID NO: 363352 - DNA, 19 bp, Homo sapiens
  siRNA target sequence for C20orf27 (NM_017874.2,2306-2324).
gcgtcgtggccccattact

SEQ ID NO: 363353 - DNA, 19 bp, Homo sapiens
  siRNA target sequence for RNF126 (NM_017876.3,125-143).
catcccggacggtacttct

SEQ ID NO: 363354 - DNA, 19 bp, Homo sapiens
  siRNA target sequence for RNF126 (NM_017876.3,175-193).
cctgccggattatatctgt

SEQ ID NO: 363355 - DNA, 19 bp, Homo sapiens
  siRNA target sequence for RNF126 (NM_017876.3,198-216).
gatgcgagtctggttttat

SEQ ID NO: 363356 - DNA, 19 bp, Homo sapiens
  siRNA target sequence for RNF126 (NM_017876.3,201-219).
gcgagtctggttttatcga

SEQ ID NO: 363357 - DNA, 19 bp, Homo sapiens
  siRNA target sequence for FLJ20555 (NM_017877.2,116-134).
gttaccggctccatcaaca

SEQ ID NO: 363358 - DNA, 19 bp, Homo sapiens
  siRNA target sequence for FLJ20555 (NM_017877.2,143-161).
gcaaaatgggcggacaatt

SEQ ID NO: 363359 - DNA, 19 bp, Homo sapiens
  siRNA target sequence for FLJ20555 (NM_017877.2,430-448).
gcggggtgcagtgatcata

SEQ ID NO: 363360 - DNA, 19 bp, Homo sapiens
  siRNA target sequence for FLJ20555 (NM_017877.2,431-449).
cggggtgcagtgatcatat

SEQ ID NO: 363361 - DNA, 19 bp, Homo sapiens
  siRNA target sequence for FLJ20555 (NM_017877.2,432-450).
ggggtgcagtgatcatatt

SEQ ID NO: 363362 - DNA, 19 bp, Homo sapiens
  siRNA target sequence for FLJ20555 (NM_017877.2,434-452).
ggtgcagtgatcatattca

SEQ ID NO: 363363 - DNA, 19 bp, Homo sapiens
  siRNA target sequence for FLJ20555 (NM_017877.2,603-621).
caggggacctgttgatcat

SEQ ID NO: 363364 - DNA, 19 bp, Homo sapiens
  siRNA target sequence for FLJ20555 (NM_017877.2,606-624).
gggacctgttgatcatcat

SEQ ID NO: 363365 - DNA, 19 bp, Homo sapiens
  siRNA target sequence for FLJ20555 (NM_017877.2,667-685).
gttcgtctacaaacacaat

SEQ ID NO: 363366 - DNA, 19 bp, Homo sapiens
  siRNA target sequence for FLJ20555 (NM_017877.2,746-764).
ctgctggtgcccatgtact

SEQ ID NO: 363367 - DNA, 19 bp, Homo sapiens
  siRNA target sequence for FLJ20555 (NM_017877.2,960-978).
gcttgcgcaccgttgtcat

SEQ ID NO: 363368 - DNA, 19 bp, Homo sapiens
  siRNA target sequence for FLJ20555 (NM_017877.2,1159-1177).
ccgcactcccatcaatgat

SEQ ID NO: 363369 - DNA, 19 bp, Homo sapiens
  siRNA target sequence for HRASLS2 (NM_017878.1,212-230).
gtctgccctgaccaacaaa

SEQ ID NO: 363370 - DNA, 19 bp, Homo sapiens
  siRNA target sequence for HRASLS2 (NM_017878.1,316-334).
cactgccttccaacaaaat

SEQ ID NO: 363371 - DNA, 19 bp, Homo sapiens
  siRNA target sequence for HRASLS2 (NM_017878.1,360-378).
gggcaggagttgccttatt

SEQ ID NO: 363372 - DNA, 19 bp, Homo sapiens
  siRNA target sequence for HCFC1R1 (NM_017885.1,398-416).
cagctggggacataatgga

SEQ ID NO: 363373 - DNA, 19 bp, Homo sapiens
  siRNA target sequence for FLJ20580 (NM_017887.1,161-179).
cggacaagtggcagtacat

SEQ ID NO: 363374 - DNA, 19 bp, Homo sapiens
  siRNA target sequence for FLJ20580 (NM_017887.1,243-261).
caagctgtgtgcaagagaa

SEQ ID NO: 363375 - DNA, 19 bp, Homo sapiens
  siRNA target sequence for FLJ20580 (NM_017887.1,352-370).
ggccttgaaccagttgatt

SEQ ID NO: 363376 - DNA, 19 bp, Homo sapiens
  siRNA target sequence for FLJ20580 (NM_017887.1,353-371).
gccttgaaccagttgattt

SEQ ID NO: 363377 - DNA, 19 bp, Homo sapiens
  siRNA target sequence for FLJ20580 (NM_017887.1,419-437).
ccttcagtgacattaatct

SEQ ID NO: 363378 - DNA, 19 bp, Homo sapiens
  siRNA target sequence for FLJ20580 (NM_017887.1,450-468).
ctggactgactatgatgaa

SEQ ID NO: 363379 - DNA, 19 bp, Homo sapiens
  siRNA target sequence for FLJ20580 (NM_017887.1,452-470).
ggactgactatgatgaaaa

SEQ ID NO: 363380 - DNA, 19 bp, Homo sapiens
  siRNA target sequence for FLJ20580 (NM_017887.1,477-495).
ggagtctgtgggaatctat

SEQ ID NO: 363381 - DNA, 19 bp, Homo sapiens
  siRNA target sequence for COH1 (NM_017890.3,2616-2634).
cctaagtataggtgtgaaa

SEQ ID NO: 363382 - DNA, 19 bp, Homo sapiens
  siRNA target sequence for COH1 (NM_017890.3,2621-2639).
gtataggtgtgaaatctaa

SEQ ID NO: 363383 - DNA, 19 bp, Homo sapiens
  siRNA target sequence for COH1 (NM_017890.3,2663-2681).
gctcaatccagaatgttga

SEQ ID NO: 363384 - DNA, 19 bp, Homo sapiens
  siRNA target sequence for COH1 (NM_017890.3,2697-2715).
cacatcattggtcaaatgt

SEQ ID NO: 363385 - DNA, 19 bp, Homo sapiens
  siRNA target sequence for COH1 (NM_017890.3,2751-2769).
caaagccccagttgatagt

SEQ ID NO: 363386 - DNA, 19 bp, Homo sapiens
  siRNA target sequence for COH1 (NM_017890.3,2799-2817).
gggtccttctgacactaaa

SEQ ID NO: 363387 - DNA, 19 bp, Homo sapiens
  siRNA target sequence for COH1 (NM_017890.3,2837-2855).
ggctcaatgagagtagaaa

SEQ ID NO: 363388 - DNA, 19 bp, Homo sapiens
  siRNA target sequence for COH1 (NM_017890.3,2878-2896).
gatttgatggccttcacaa

SEQ ID NO: 363389 - DNA, 19 bp, Homo sapiens
  siRNA target sequence for COH1 (NM_017890.3,2883-2901).
gatggccttcacaatccaa

SEQ ID NO: 363390 - DNA, 19 bp, Homo sapiens
  siRNA target sequence for COH1 (NM_017890.3,2894-2912).
caatccaagttccacaata

SEQ ID NO: 363391 - DNA, 19 bp, Homo sapiens
  siRNA target sequence for COH1 (NM_017890.3,2902-2920).
gttccacaatatattgact

SEQ ID NO: 363392 - DNA, 19 bp, Homo sapiens
  siRNA target sequence for COH1 (NM_017890.3,2928-2946).
caattccggtgctgtactt

SEQ ID NO: 363393 - DNA, 19 bp, Homo sapiens
  siRNA target sequence for COH1 (NM_017890.3,2963-2981).
gactagcagttaatattga

SEQ ID NO: 363394 - DNA, 19 bp, Homo sapiens
  siRNA target sequence for COH1 (NM_017890.3,2980-2998).
gacccaatcttatatacgt

SEQ ID NO: 363395 - DNA, 19 bp, Homo sapiens
  siRNA target sequence for COH1 (NM_017890.3,3012-3030).
gcctcagaaacgaacaagt

SEQ ID NO: 363396 - DNA, 19 bp, Homo sapiens
  siRNA target sequence for COH1 (NM_017890.3,3013-3031).
cctcagaaacgaacaagta

SEQ ID NO: 363397 - DNA, 19 bp, Homo sapiens
  siRNA target sequence for COH1 (NM_017890.3,3023-3041).
gaacaagtagacatatgca

SEQ ID NO: 363398 - DNA, 19 bp, Homo sapiens
  siRNA target sequence for COH1 (NM_017890.3,3054-3072).
ggtagctgttcctcttgtt

SEQ ID NO: 363399 - DNA, 19 bp, Homo sapiens
  siRNA target sequence for COH1 (NM_017890.3,3055-3073).
gtagctgttcctcttgtta

SEQ ID NO: 363400 - DNA, 19 bp, Homo sapiens
  siRNA target sequence for COH1 (NM_017890.3,3070-3088).
gttatgccagtttgtagaa

SEQ ID NO: 363401 - DNA, 19 bp, Homo sapiens
  siRNA target sequence for COH1 (NM_017890.3,3097-3115).
gatgaggtgtctattggaa

SEQ ID NO: 363402 - DNA, 19 bp, Homo sapiens
  siRNA target sequence for COH1 (NM_017890.3,3214-3232).
cctgttaaagccatgttga

SEQ ID NO: 363403 - DNA, 19 bp, Homo sapiens
  siRNA target sequence for COH1 (NM_017890.3,3224-3242).
ccatgttgaatatatctga

SEQ ID NO: 363404 - DNA, 19 bp, Homo sapiens
  siRNA target sequence for COH1 (NM_017890.3,3319-3337).
cagcttgaagtacaatctt

SEQ ID NO: 363405 - DNA, 19 bp, Homo sapiens
  siRNA target sequence for COH1 (NM_017890.3,3366-3384).
gccttccccaagtacaatt

SEQ ID NO: 363406 - DNA, 19 bp, Homo sapiens
  siRNA target sequence for COH1 (NM_017890.3,3368-3386).
cttccccaagtacaattgt

SEQ ID NO: 363407 - DNA, 19 bp, Homo sapiens
  siRNA target sequence for COH1 (NM_017890.3,3372-3390).
cccaagtacaattgtatct

SEQ ID NO: 363408 - DNA, 19 bp, Homo sapiens
  siRNA target sequence for COH1 (NM_017890.3,3446-3464).
gaacacttgtcctctgttt

SEQ ID NO: 363409 - DNA, 19 bp, Homo sapiens
  siRNA target sequence for COH1 (NM_017890.3,3465-3483).
gcctcaaataaagattatt

SEQ ID NO: 363410 - DNA, 19 bp, Homo sapiens
  siRNA target sequence for COH1 (NM_017890.3,3485-3503).
gtgctgggcacaagtatat

SEQ ID NO: 363411 - DNA, 19 bp, Homo sapiens
  siRNA target sequence for COH1 (NM_017890.3,3508-3526).
cctctgcaggagattccat

SEQ ID NO: 363412 - DNA, 19 bp, Homo sapiens
  siRNA target sequence for COH1 (NM_017890.3,3509-3527).
ctctgcaggagattccatt

SEQ ID NO: 363413 - DNA, 19 bp, Homo sapiens
  siRNA target sequence for COH1 (NM_017890.3,3572-3590).
ggacgatcagcttgcataa

SEQ ID NO: 363414 - DNA, 19 bp, Homo sapiens
  siRNA target sequence for COH1 (NM_017890.3,3573-3591).
gacgatcagcttgcataat

SEQ ID NO: 363415 - DNA, 19 bp, Homo sapiens
  siRNA target sequence for COH1 (NM_017890.3,3575-3593).
cgatcagcttgcataattt

SEQ ID NO: 363416 - DNA, 19 bp, Homo sapiens
  siRNA target sequence for COH1 (NM_017890.3,3664-3682).
ctagctgtcacgtctcaaa

SEQ ID NO: 363417 - DNA, 19 bp, Homo sapiens
  siRNA target sequence for COH1 (NM_017890.3,3668-3686).
ctgtcacgtctcaaaaact

SEQ ID NO: 363418 - DNA, 19 bp, Homo sapiens
  siRNA target sequence for COH1 (NM_017890.3,3700-3718).
cctgatacacgacattcat

SEQ ID NO: 363419 - DNA, 19 bp, Homo sapiens
  siRNA target sequence for COH1 (NM_017890.3,3701-3719).
ctgatacacgacattcatt

SEQ ID NO: 363420 - DNA, 19 bp, Homo sapiens
  siRNA target sequence for COH1 (NM_017890.3,3741-3759).
cctagagtcactagagata

SEQ ID NO: 363421 - DNA, 19 bp, Homo sapiens
  siRNA target sequence for COH1 (NM_017890.3,3773-3791).
cccaggtccagctcttcta

SEQ ID NO: 363422 - DNA, 19 bp, Homo sapiens
  siRNA target sequence for COH1 (NM_017890.3,3777-3795).
ggtccagctcttctatgaa

SEQ ID NO: 363423 - DNA, 19 bp, Homo sapiens
  siRNA target sequence for COH1 (NM_017890.3,3783-3801).
gctcttctatgaactaact

SEQ ID NO: 363424 - DNA, 19 bp, Homo sapiens
  siRNA target sequence for COH1 (NM_017890.3,3793-3811).
gaactaactgatatcatga

SEQ ID NO: 363425 - DNA, 19 bp, Homo sapiens
  siRNA target sequence for COH1 (NM_017890.3,3832-3850).
cagaagagaggcaatctca

SEQ ID NO: 363426 - DNA, 19 bp, Homo sapiens
  siRNA target sequence for COH1 (NM_017890.3,3892-3910).
cctacttctccagttagaa

SEQ ID NO: 363427 - DNA, 19 bp, Homo sapiens
  siRNA target sequence for COH1 (NM_017890.3,3958-3976).
gctgacattgggactacta

SEQ ID NO: 363428 - DNA, 19 bp, Homo sapiens
  siRNA target sequence for COH1 (NM_017890.3,4027-4045).
gtgaccttggaacaaacta

SEQ ID NO: 363429 - DNA, 19 bp, Homo sapiens
  siRNA target sequence for COH1 (NM_017890.3,4064-4082).
ccagtggacgtgttagttt

SEQ ID NO: 363430 - DNA, 19 bp, Homo sapiens
  siRNA target sequence for COH1 (NM_017890.3,4065-4083).
cagtggacgtgttagttta

SEQ ID NO: 363431 - DNA, 19 bp, Homo sapiens
  siRNA target sequence for COH1 (NM_017890.3,4069-4087).
ggacgtgttagtttatgga

SEQ ID NO: 363432 - DNA, 19 bp, Homo sapiens
  siRNA target sequence for COH1 (NM_017890.3,4070-4088).
gacgtgttagtttatggat

SEQ ID NO: 363433 - DNA, 19 bp, Homo sapiens
  siRNA target sequence for COH1 (NM_017890.3,4092-4110).
gtgggtgcttcccaaaatt

SEQ ID NO: 363434 - DNA, 19 bp, Homo sapiens
  siRNA target sequence for COH1 (NM_017890.3,4095-4113).
ggtgcttcccaaaattact

SEQ ID NO: 363435 - DNA, 19 bp, Homo sapiens
  siRNA target sequence for COH1 (NM_017890.3,4126-4144).
gctccagatcctgaaaata

SEQ ID NO: 363436 - DNA, 19 bp, Homo sapiens
  siRNA target sequence for COH1 (NM_017890.3,4127-4145).
ctccagatcctgaaaataa

SEQ ID NO: 363437 - DNA, 19 bp, Homo sapiens
  siRNA target sequence for COH1 (NM_017890.3,4160-4178).
gtatggtcagtgaactaga

SEQ ID NO: 363438 - DNA, 19 bp, Homo sapiens
  siRNA target sequence for COH1 (NM_017890.3,4241-4259).
gtttcaatattgatcacta

SEQ ID NO: 363439 - DNA, 19 bp, Homo sapiens
  siRNA target sequence for COH1 (NM_017890.3,4371-4389).
gcaggaccctttcagtaat

SEQ ID NO: 363440 - DNA, 19 bp, Homo sapiens
  siRNA target sequence for COH1 (NM_017890.3,4375-4393).
gaccctttcagtaattgct

SEQ ID NO: 363441 - DNA, 19 bp, Homo sapiens
  siRNA target sequence for COH1 (NM_017890.3,4492-4510).
gtccgccacaagttaacat

SEQ ID NO: 363442 - DNA, 19 bp, Homo sapiens
  siRNA target sequence for COH1 (NM_017890.3,4494-4512).
ccgccacaagttaacatca

SEQ ID NO: 363443 - DNA, 19 bp, Homo sapiens
  siRNA target sequence for COH1 (NM_017890.3,4495-4513).
cgccacaagttaacatcaa

SEQ ID NO: 363444 - DNA, 19 bp, Homo sapiens
  siRNA target sequence for COH1 (NM_017890.3,4497-4515).
ccacaagttaacatcaaga

SEQ ID NO: 363445 - DNA, 19 bp, Homo sapiens
  siRNA target sequence for COH1 (NM_017890.3,4514-4532).
gaaatgagcgaagaagttt

SEQ ID NO: 363446 - DNA, 19 bp, Homo sapiens
  siRNA target sequence for COH1 (NM_017890.3,4519-4537).
gagcgaagaagttttcata

SEQ ID NO: 363447 - DNA, 19 bp, Homo sapiens
  siRNA target sequence for COH1 (NM_017890.3,4529-4547).
gttttcataagttatctga

SEQ ID NO: 363448 - DNA, 19 bp, Homo sapiens
  siRNA target sequence for COH1 (NM_017890.3,4709-4727).
ccatgaggacccatacact

SEQ ID NO: 363449 - DNA, 19 bp, Homo sapiens
  siRNA target sequence for COH1 (NM_017890.3,4724-4742).
cactgacatcccgcaattt

SEQ ID NO: 363450 - DNA, 19 bp, Homo sapiens
  siRNA target sequence for COH1 (NM_017890.3,4728-4746).
gacatcccgcaatttacct

SEQ ID NO: 363451 - DNA, 19 bp, Homo sapiens
  siRNA target sequence for COH1 (NM_017890.3,4733-4751).
cccgcaatttacctttgat

SEQ ID NO: 363452 - DNA, 19 bp, Homo sapiens
  siRNA target sequence for COH1 (NM_017890.3,4734-4752).
ccgcaatttacctttgatt

SEQ ID NO: 363453 - DNA, 19 bp, Homo sapiens
  siRNA target sequence for COH1 (NM_017890.3,4806-4824).
gccaactgttgaagctaat

SEQ ID NO: 363454 - DNA, 19 bp, Homo sapiens
  siRNA target sequence for COH1 (NM_017890.3,4907-4925).
ctgtccttaggaaagatat

SEQ ID NO: 363455 - DNA, 19 bp, Homo sapiens
  siRNA target sequence for COH1 (NM_017890.3,4937-4955).
ccttgaacttaggaattct

SEQ ID NO: 363456 - DNA, 19 bp, Homo sapiens
  siRNA target sequence for COH1 (NM_017890.3,5004-5022).
gcagtccatcaatattggt

SEQ ID NO: 363457 - DNA, 19 bp, Homo sapiens
  siRNA target sequence for COH1 (NM_017890.3,5005-5023).
cagtccatcaatattggta

SEQ ID NO: 363458 - DNA, 19 bp, Homo sapiens
  siRNA target sequence for COH1 (NM_017890.3,5026-5044).
gcacagtggcatcaactaa

SEQ ID NO: 363459 - DNA, 19 bp, Homo sapiens
  siRNA target sequence for COH1 (NM_017890.3,5027-5045).
cacagtggcatcaactaaa

SEQ ID NO: 363460 - DNA, 19 bp, Homo sapiens
  siRNA target sequence for COH1 (NM_017890.3,5031-5049).
gtggcatcaactaaaacca

SEQ ID NO: 363461 - DNA, 19 bp, Homo sapiens
  siRNA target sequence for COH1 (NM_017890.3,5066-5084).
caggaggggtggtaacaga

SEQ ID NO: 363462 - DNA, 19 bp, Homo sapiens
  siRNA target sequence for COH1 (NM_017890.3,5085-5103).
gactgaaaggaattctcaa

SEQ ID NO: 363463 - DNA, 19 bp, Homo sapiens
  siRNA target sequence for COH1 (NM_017890.3,5108-5126).
cagcccttgagtggaatat

SEQ ID NO: 363464 - DNA, 19 bp, Homo sapiens
  siRNA target sequence for COH1 (NM_017890.3,5171-5189).
cccccgttttgacagattt

SEQ ID NO: 363465 - DNA, 19 bp, Homo sapiens
  siRNA target sequence for COH1 (NM_017890.3,5173-5191).
cccgttttgacagattttt

SEQ ID NO: 363466 - DNA, 19 bp, Homo sapiens
  siRNA target sequence for COH1 (NM_017890.3,5220-5238).
cattttcaccaaagtagtt

SEQ ID NO: 363467 - DNA, 19 bp, Homo sapiens
  siRNA target sequence for COH1 (NM_017890.3,5253-5271).
gcatactgaggagatttta

SEQ ID NO: 363468 - DNA, 19 bp, Homo sapiens
  siRNA target sequence for COH1 (NM_017890.3,5279-5297).
gccattccttagaagtgaa

SEQ ID NO: 363469 - DNA, 19 bp, Homo sapiens
  siRNA target sequence for COH1 (NM_017890.3,5280-5298).
ccattccttagaagtgaat

SEQ ID NO: 363470 - DNA, 19 bp, Homo sapiens
  siRNA target sequence for COH1 (NM_017890.3,5281-5299).
cattccttagaagtgaata

SEQ ID NO: 363471 - DNA, 19 bp, Homo sapiens
  siRNA target sequence for COH1 (NM_017890.3,5322-5340).
cctaagtgtggctcaagtt

SEQ ID NO: 363472 - DNA, 19 bp, Homo sapiens
  siRNA target sequence for COH1 (NM_017890.3,5327-5345).
gtgtggctcaagttcaact

SEQ ID NO: 363473 - DNA, 19 bp, Homo sapiens
  siRNA target sequence for COH1 (NM_017890.3,5331-5349).
ggctcaagttcaactctta

SEQ ID NO: 363474 - DNA, 19 bp, Homo sapiens
  siRNA target sequence for COH1 (NM_017890.3,5333-5351).
ctcaagttcaactcttaca

SEQ ID NO: 363475 - DNA, 19 bp, Homo sapiens
  siRNA target sequence for COH1 (NM_017890.3,5346-5364).
cttacatcagttaatagta

SEQ ID NO: 363476 - DNA, 19 bp, Homo sapiens
  siRNA target sequence for COH1 (NM_017890.3,5377-5395).
ggactggaaccatcaaaca

SEQ ID NO: 363477 - DNA, 19 bp, Homo sapiens
  siRNA target sequence for COH1 (NM_017890.3,5378-5396).
gactggaaccatcaaacaa

SEQ ID NO: 363478 - DNA, 19 bp, Homo sapiens
  siRNA target sequence for COH1 (NM_017890.3,5399-5417).
ctgcagagatctctaaaca

SEQ ID NO: 363479 - DNA, 19 bp, Homo sapiens
  siRNA target sequence for COH1 (NM_017890.3,5576-5594).
cctcacgccagtcatcaat

SEQ ID NO: 363480 - DNA, 19 bp, Homo sapiens
  siRNA target sequence for COH1 (NM_017890.3,5577-5595).
ctcacgccagtcatcaatt

SEQ ID NO: 363481 - DNA, 19 bp, Homo sapiens
  siRNA target sequence for COH1 (NM_017890.3,5579-5597).
cacgccagtcatcaattgt

SEQ ID NO: 363482 - DNA, 19 bp, Homo sapiens
  siRNA target sequence for COH1 (NM_017890.3,5581-5599).
cgccagtcatcaattgtaa

SEQ ID NO: 363483 - DNA, 19 bp, Homo sapiens
  siRNA target sequence for COH1 (NM_017890.3,5639-5657).
caagtagaatctcactaat

SEQ ID NO: 363484 - DNA, 19 bp, Homo sapiens
  siRNA target sequence for COH1 (NM_017890.3,5673-5691).
ggccttatccaaatcgaaa

SEQ ID NO: 363485 - DNA, 19 bp, Homo sapiens
  siRNA target sequence for COH1 (NM_017890.3,5674-5692).
gccttatccaaatcgaaat

SEQ ID NO: 363486 - DNA, 19 bp, Homo sapiens
  siRNA target sequence for COH1 (NM_017890.3,5676-5694).
cttatccaaatcgaaatca

SEQ ID NO: 363487 - DNA, 19 bp, Homo sapiens
  siRNA target sequence for COH1 (NM_017890.3,5769-5787).
gcccaaccaggcatgtatt

SEQ ID NO: 363488 - DNA, 19 bp, Homo sapiens
  siRNA target sequence for COH1 (NM_017890.3,5770-5788).
cccaaccaggcatgtattt

SEQ ID NO: 363489 - DNA, 19 bp, Homo sapiens
  siRNA target sequence for COH1 (NM_017890.3,5792-5810).
cggtgacagcagaagatct

SEQ ID NO: 363490 - DNA, 19 bp, Homo sapiens
  siRNA target sequence for COH1 (NM_017890.3,5897-5915).
ctagacaagcacttggtat

SEQ ID NO: 363491 - DNA, 19 bp, Homo sapiens
  siRNA target sequence for COH1 (NM_017890.3,5906-5924).
cacttggtataactattgt

SEQ ID NO: 363492 - DNA, 19 bp, Homo sapiens
  siRNA target sequence for COH1 (NM_017890.3,6068-6086).
gggtggcctctgattacaa

SEQ ID NO: 363493 - DNA, 19 bp, Homo sapiens
  siRNA target sequence for COH1 (NM_017890.3,6069-6087).
ggtggcctctgattacaaa

SEQ ID NO: 363494 - DNA, 19 bp, Homo sapiens
  siRNA target sequence for COH1 (NM_017890.3,6109-6127).
ctgcctgaagcccttgatt

SEQ ID NO: 363495 - DNA, 19 bp, Homo sapiens
  siRNA target sequence for COH1 (NM_017890.3,6121-6139).
cttgattattgcactgttt

SEQ ID NO: 363496 - DNA, 19 bp, Homo sapiens
  siRNA target sequence for COH1 (NM_017890.3,6147-6165).
gacagtgcctggagaaata

SEQ ID NO: 363497 - DNA, 19 bp, Homo sapiens
  siRNA target sequence for COH1 (NM_017890.3,6226-6244).
ggaccagcggatgtcaatt

SEQ ID NO: 363498 - DNA, 19 bp, Homo sapiens
  siRNA target sequence for COH1 (NM_017890.3,6227-6245).
gaccagcggatgtcaattt

SEQ ID NO: 363499 - DNA, 19 bp, Homo sapiens
  siRNA target sequence for COH1 (NM_017890.3,6230-6248).
cagcggatgtcaatttgga

SEQ ID NO: 363500 - DNA, 19 bp, Homo sapiens
  siRNA target sequence for COH1 (NM_017890.3,6232-6250).
gcggatgtcaatttggata

SEQ ID NO: 363501 - DNA, 19 bp, Homo sapiens
  siRNA target sequence for COH1 (NM_017890.3,6282-6300).
caccaaactggatcagata

SEQ ID NO: 363502 - DNA, 19 bp, Homo sapiens
  siRNA target sequence for COH1 (NM_017890.3,6378-6396).
ggtgaataaggatgatctt

SEQ ID NO: 363503 - DNA, 19 bp, Homo sapiens
  siRNA target sequence for COH1 (NM_017890.3,6414-6432).
ccgtggaaagttgtctaaa

SEQ ID NO: 363504 - DNA, 19 bp, Homo sapiens
  siRNA target sequence for COH1 (NM_017890.3,6664-6682).
ctactcagtataaacgatt

SEQ ID NO: 363505 - DNA, 19 bp, Homo sapiens
  siRNA target sequence for COH1 (NM_017890.3,6678-6696).
cgattttctccttaaaaca

SEQ ID NO: 363506 - DNA, 19 bp, Homo sapiens
  siRNA target sequence for COH1 (NM_017890.3,6687-6705).
ccttaaaacaagtctcaaa

SEQ ID NO: 363507 - DNA, 19 bp, Homo sapiens
  siRNA target sequence for COH1 (NM_017890.3,6757-6775).
gctaagtggtgtaaacaca

SEQ ID NO: 363508 - DNA, 19 bp, Homo sapiens
  siRNA target sequence for COH1 (NM_017890.3,6805-6823).
ccaaaaatatccattgact

SEQ ID NO: 363509 - DNA, 19 bp, Homo sapiens
  siRNA target sequence for COH1 (NM_017890.3,6822-6840).
cttaagaggaggtctacta

SEQ ID NO: 363510 - DNA, 19 bp, Homo sapiens
  siRNA target sequence for COH1 (NM_017890.3,6851-6869).
ggggtcaagaacatttgaa

SEQ ID NO: 363511 - DNA, 19 bp, Homo sapiens
  siRNA target sequence for COH1 (NM_017890.3,6872-6890).
gtttagttcttctacatga

SEQ ID NO: 363512 - DNA, 19 bp, Homo sapiens
  siRNA target sequence for COH1 (NM_017890.3,6943-6961).
gaaccagtgcctcaaatgt

SEQ ID NO: 363513 - DNA, 19 bp, Homo sapiens
  siRNA target sequence for COH1 (NM_017890.3,7019-7037).
ggacaggtctatttcagta

SEQ ID NO: 363514 - DNA, 19 bp, Homo sapiens
  siRNA target sequence for COH1 (NM_017890.3,7020-7038).
gacaggtctatttcagtat

SEQ ID NO: 363515 - DNA, 19 bp, Homo sapiens
  siRNA target sequence for COH1 (NM_017890.3,7022-7040).
caggtctatttcagtatgt

SEQ ID NO: 363516 - DNA, 19 bp, Homo sapiens
  siRNA target sequence for COH1 (NM_017890.3,7042-7060).
caggatgctgaatctttga

SEQ ID NO: 363517 - DNA, 19 bp, Homo sapiens
  siRNA target sequence for COH1 (NM_017890.3,7069-7087).
ggggtctatgaagtcttat

SEQ ID NO: 363518 - DNA, 19 bp, Homo sapiens
  siRNA target sequence for COH1 (NM_017890.3,7070-7088).
gggtctatgaagtcttatt

SEQ ID NO: 363519 - DNA, 19 bp, Homo sapiens
  siRNA target sequence for COH1 (NM_017890.3,7116-7134).
gatgatgttatggagatat

SEQ ID NO: 363520 - DNA, 19 bp, Homo sapiens
  siRNA target sequence for COH1 (NM_017890.3,7150-7168).
ctcacccttgtacgaataa

SEQ ID NO: 363521 - DNA, 19 bp, Homo sapiens
  siRNA target sequence for COH1 (NM_017890.3,7152-7170).
cacccttgtacgaataact

SEQ ID NO: 363522 - DNA, 19 bp, Homo sapiens
  siRNA target sequence for COH1 (NM_017890.3,7163-7181).
gaataactcctgtaccttt

SEQ ID NO: 363523 - DNA, 19 bp, Homo sapiens
  siRNA target sequence for COH1 (NM_017890.3,7192-7210).
gaggatccagatattagca

SEQ ID NO: 363524 - DNA, 19 bp, Homo sapiens
  siRNA target sequence for COH1 (NM_017890.3,7237-7255).
gttccttgtagcttggaat

SEQ ID NO: 363525 - DNA, 19 bp, Homo sapiens
  siRNA target sequence for COH1 (NM_017890.3,7240-7258).
ccttgtagcttggaatact

SEQ ID NO: 363526 - DNA, 19 bp, Homo sapiens
  siRNA target sequence for COH1 (NM_017890.3,7286-7304).
catttagagaatttaatct

SEQ ID NO: 363527 - DNA, 19 bp, Homo sapiens
  siRNA target sequence for COH1 (NM_017890.3,7329-7347).
gcagttgccggatatcaat

SEQ ID NO: 363528 - DNA, 19 bp, Homo sapiens
  siRNA target sequence for COH1 (NM_017890.3,7357-7375).
gaccagaagaaattagtat

SEQ ID NO: 363529 - DNA, 19 bp, Homo sapiens
  siRNA target sequence for COH1 (NM_017890.3,7396-7414).
gtcttgaacagcagtcaaa

SEQ ID NO: 363530 - DNA, 19 bp, Homo sapiens
  siRNA target sequence for COH1 (NM_017890.3,7541-7559).
catccctttgcgtttcttt

SEQ ID NO: 363531 - DNA, 19 bp, Homo sapiens
  siRNA target sequence for COH1 (NM_017890.3,7575-7593).
ggaattccatctttgtcat

SEQ ID NO: 363532 - DNA, 19 bp, Homo sapiens
  siRNA target sequence for COH1 (NM_017890.3,7637-7655).
catttgtttccgacagaaa

SEQ ID NO: 363533 - DNA, 19 bp, Homo sapiens
  siRNA target sequence for COH1 (NM_017890.3,7664-7682).
ctgaactagaatacatgat

SEQ ID NO: 363534 - DNA, 19 bp, Homo sapiens
  siRNA target sequence for COH1 (NM_017890.3,7714-7732).
cgacagtggaataatggtt

SEQ ID NO: 363535 - DNA, 19 bp, Homo sapiens
  siRNA target sequence for COH1 (NM_017890.3,7739-7757).
gtcaggagatccagttctt

SEQ ID NO: 363536 - DNA, 19 bp, Homo sapiens
  siRNA target sequence for COH1 (NM_017890.3,7844-7862).
cagtttccagcgatgtagt

SEQ ID NO: 363537 - DNA, 19 bp, Homo sapiens
  siRNA target sequence for COH1 (NM_017890.3,7853-7871).
gcgatgtagtggaaaagct

SEQ ID NO: 363538 - DNA, 19 bp, Homo sapiens
  siRNA target sequence for COH1 (NM_017890.3,7878-7896).
ctgcaccgtgatagttgat

SEQ ID NO: 363539 - DNA, 19 bp, Homo sapiens
  siRNA target sequence for COH1 (NM_017890.3,7881-7899).
caccgtgatagttgattct

SEQ ID NO: 363540 - DNA, 19 bp, Homo sapiens
  siRNA target sequence for COH1 (NM_017890.3,7920-7938).
gcatgtagtccattcacta

SEQ ID NO: 363541 - DNA, 19 bp, Homo sapiens
  siRNA target sequence for COH1 (NM_017890.3,7924-7942).
gtagtccattcactaaaca

SEQ ID NO: 363542 - DNA, 19 bp, Homo sapiens
  siRNA target sequence for COH1 (NM_017890.3,7989-8007).
gttggtcttcagccatttt

SEQ ID NO: 363543 - DNA, 19 bp, Homo sapiens
  siRNA target sequence for COH1 (NM_017890.3,8120-8138).
ccccacagctgttacacat

SEQ ID NO: 363544 - DNA, 19 bp, Homo sapiens
  siRNA target sequence for COH1 (NM_017890.3,8127-8145).
gctgttacacatctgtatt

SEQ ID NO: 363545 - DNA, 19 bp, Homo sapiens
  siRNA target sequence for COH1 (NM_017890.3,8130-8148).
gttacacatctgtattgaa

SEQ ID NO: 363546 - DNA, 19 bp, Homo sapiens
  siRNA target sequence for COH1 (NM_017890.3,8187-8205).
ggaccatgccgggactttt

SEQ ID NO: 363547 - DNA, 19 bp, Homo sapiens
  siRNA target sequence for COH1 (NM_017890.3,8188-8206).
gaccatgccgggactttta

SEQ ID NO: 363548 - DNA, 19 bp, Homo sapiens
  siRNA target sequence for COH1 (NM_017890.3,8190-8208).
ccatgccgggacttttatt

SEQ ID NO: 363549 - DNA, 19 bp, Homo sapiens
  siRNA target sequence for COH1 (NM_017890.3,8191-8209).
catgccgggacttttatta

SEQ ID NO: 363550 - DNA, 19 bp, Homo sapiens
  siRNA target sequence for COH1 (NM_017890.3,8194-8212).
gccgggacttttattagaa

SEQ ID NO: 363551 - DNA, 19 bp, Homo sapiens
  siRNA target sequence for COH1 (NM_017890.3,8196-8214).
cgggacttttattagaaca

SEQ ID NO: 363552 - DNA, 19 bp, Homo sapiens
  siRNA target sequence for COH1 (NM_017890.3,8250-8268).
caaggttcagcaactcaat

SEQ ID NO: 363553 - DNA, 19 bp, Homo sapiens
  siRNA target sequence for COH1 (NM_017890.3,8259-8277).
gcaactcaatggagtacaa

SEQ ID NO: 363554 - DNA, 19 bp, Homo sapiens
  siRNA target sequence for COH1 (NM_017890.3,8260-8278).
caactcaatggagtacaaa

SEQ ID NO: 363555 - DNA, 19 bp, Homo sapiens
  siRNA target sequence for COH1 (NM_017890.3,8272-8290).
gtacaaaaacagattatca

SEQ ID NO: 363556 - DNA, 19 bp, Homo sapiens
  siRNA target sequence for COH1 (NM_017890.3,8296-8314).
ggaagacagatcatctgta

SEQ ID NO: 363557 - DNA, 19 bp, Homo sapiens
  siRNA target sequence for COH1 (NM_017890.3,8300-8318).
gacagatcatctgtagtta

SEQ ID NO: 363558 - DNA, 19 bp, Homo sapiens
  siRNA target sequence for COH1 (NM_017890.3,8378-8396).
ctgtagttcgggaacattt

SEQ ID NO: 363559 - DNA, 19 bp, Homo sapiens
  siRNA target sequence for COH1 (NM_017890.3,8383-8401).
gttcgggaacattttgact

SEQ ID NO: 363560 - DNA, 19 bp, Homo sapiens
  siRNA target sequence for COH1 (NM_017890.3,8418-8436).
gaaattgccttcgtacata

SEQ ID NO: 363561 - DNA, 19 bp, Homo sapiens
  siRNA target sequence for COH1 (NM_017890.3,8424-8442).
gccttcgtacatactagaa

SEQ ID NO: 363562 - DNA, 19 bp, Homo sapiens
  siRNA target sequence for COH1 (NM_017890.3,8425-8443).
ccttcgtacatactagaaa

SEQ ID NO: 363563 - DNA, 19 bp, Homo sapiens
  siRNA target sequence for COH1 (NM_017890.3,8524-8542).
cctgagtacagcattgtca

SEQ ID NO: 363564 - DNA, 19 bp, Homo sapiens
  siRNA target sequence for COH1 (NM_017890.3,8578-8596).
gtctggtgcacagttttga

SEQ ID NO: 363565 - DNA, 19 bp, Homo sapiens
  siRNA target sequence for COH1 (NM_017890.3,8580-8598).
ctggtgcacagttttgact

SEQ ID NO: 363566 - DNA, 19 bp, Homo sapiens
  siRNA target sequence for COH1 (NM_017890.3,8586-8604).
cacagttttgactttagaa

SEQ ID NO: 363567 - DNA, 19 bp, Homo sapiens
  siRNA target sequence for COH1 (NM_017890.3,8620-8638).
caacaacgaatgattgtgt

SEQ ID NO: 363568 - DNA, 19 bp, Homo sapiens
  siRNA target sequence for COH1 (NM_017890.3,8635-8653).
gtgttcagccctcttttta

SEQ ID NO: 363569 - DNA, 19 bp, Homo sapiens
  siRNA target sequence for COH1 (NM_017890.3,8672-8690).
cagaccccattatcataca

SEQ ID NO: 363570 - DNA, 19 bp, Homo sapiens
  siRNA target sequence for COH1 (NM_017890.3,8674-8692).
gaccccattatcatacatt

SEQ ID NO: 363571 - DNA, 19 bp, Homo sapiens
  siRNA target sequence for COH1 (NM_017890.3,8678-8696).
ccattatcatacatttgga

SEQ ID NO: 363572 - DNA, 19 bp, Homo sapiens
  siRNA target sequence for COH1 (NM_017890.3,8833-8851).
gcagttcccatctcaacat

SEQ ID NO: 363573 - DNA, 19 bp, Homo sapiens
  siRNA target sequence for COH1 (NM_017890.3,8846-8864).
caacatccctcattaagca

SEQ ID NO: 363574 - DNA, 19 bp, Homo sapiens
  siRNA target sequence for COH1 (NM_017890.3,8862-8880).
gcaaatagccactaaggta

SEQ ID NO: 363575 - DNA, 19 bp, Homo sapiens
  siRNA target sequence for COH1 (NM_017890.3,8887-8905).
ggaggcacagttaatcaga

SEQ ID NO: 363576 - DNA, 19 bp, Homo sapiens
  siRNA target sequence for COH1 (NM_017890.3,8904-8922).
gatccttgacgaattctat

SEQ ID NO: 363577 - DNA, 19 bp, Homo sapiens
  siRNA target sequence for COH1 (NM_017890.3,8944-8962).
cccatatggccctataata

SEQ ID NO: 363578 - DNA, 19 bp, Homo sapiens
  siRNA target sequence for COH1 (NM_017890.3,8945-8963).
ccatatggccctataataa

SEQ ID NO: 363579 - DNA, 19 bp, Homo sapiens
  siRNA target sequence for COH1 (NM_017890.3,8953-8971).
ccctataataagaaggatt

SEQ ID NO: 363580 - DNA, 19 bp, Homo sapiens
  siRNA target sequence for COH1 (NM_017890.3,8978-8996).
ggaatgaacagctaagtca

SEQ ID NO: 363581 - DNA, 19 bp, Homo sapiens
  siRNA target sequence for COH1 (NM_017890.3,9013-9031).
cgagtgaagctgtcaatct

SEQ ID NO: 363582 - DNA, 19 bp, Homo sapiens
  siRNA target sequence for COH1 (NM_017890.3,9030-9048).
ctggaagccatatgttaga

SEQ ID NO: 363583 - DNA, 19 bp, Homo sapiens
  siRNA target sequence for COH1 (NM_017890.3,9050-9068).
ctttgttgatagaacttct

SEQ ID NO: 363584 - DNA, 19 bp, Homo sapiens
  siRNA target sequence for COH1 (NM_017890.3,9082-9100).
cttatcaatgaatccaaat

SEQ ID NO: 363585 - DNA, 19 bp, Homo sapiens
  siRNA target sequence for COH1 (NM_017890.3,9141-9159).
ggttcctgctggcaaaatt

SEQ ID NO: 363586 - DNA, 19 bp, Homo sapiens
  siRNA target sequence for COH1 (NM_017890.3,9142-9160).
gttcctgctggcaaaatta

SEQ ID NO: 363587 - DNA, 19 bp, Homo sapiens
  siRNA target sequence for COH1 (NM_017890.3,9225-9243).
gcacaagtcagtagcaatt

SEQ ID NO: 363588 - DNA, 19 bp, Homo sapiens
  siRNA target sequence for COH1 (NM_017890.3,9239-9257).
caattaaactggtccataa

SEQ ID NO: 363589 - DNA, 19 bp, Homo sapiens
  siRNA target sequence for COH1 (NM_017890.3,9273-9291).
gtggaaagatggaggtaat

SEQ ID NO: 363590 - DNA, 19 bp, Homo sapiens
  siRNA target sequence for COH1 (NM_017890.3,9313-9331).
gaagaagcgtttgttgata

SEQ ID NO: 363591 - DNA, 19 bp, Homo sapiens
  siRNA target sequence for COH1 (NM_017890.3,9319-9337).
gcgtttgttgatactgaaa

SEQ ID NO: 363592 - DNA, 19 bp, Homo sapiens
  siRNA target sequence for COH1 (NM_017890.3,9359-9377).
gacatcagaagttatgtca

SEQ ID NO: 363593 - DNA, 19 bp, Homo sapiens
  siRNA target sequence for COH1 (NM_017890.3,9392-9410).
ccatggtacagcaaggtat

SEQ ID NO: 363594 - DNA, 19 bp, Homo sapiens
  siRNA target sequence for COH1 (NM_017890.3,9393-9411).
catggtacagcaaggtata

SEQ ID NO: 363595 - DNA, 19 bp, Homo sapiens
  siRNA target sequence for COH1 (NM_017890.3,9396-9414).
ggtacagcaaggtatacaa

SEQ ID NO: 363596 - DNA, 19 bp, Homo sapiens
  siRNA target sequence for COH1 (NM_017890.3,9397-9415).
gtacagcaaggtatacaaa

SEQ ID NO: 363597 - DNA, 19 bp, Homo sapiens
  siRNA target sequence for COH1 (NM_017890.3,9407-9425).
gtatacaaattattcagat

SEQ ID NO: 363598 - DNA, 19 bp, Homo sapiens
  siRNA target sequence for COH1 (NM_017890.3,9435-9453).
gactacaataatcaataat

SEQ ID NO: 363599 - DNA, 19 bp, Homo sapiens
  siRNA target sequence for COH1 (NM_017890.3,9447-9465).
caataatacaccatatcaa

SEQ ID NO: 363600 - DNA, 19 bp, Homo sapiens
  siRNA target sequence for COH1 (NM_017890.3,9455-9473).
caccatatcaaatatttta

SEQ ID NO: 363601 - DNA, 19 bp, Homo sapiens
  siRNA target sequence for COH1 (NM_017890.3,9532-9550).
gacagtgctacttttagca

SEQ ID NO: 363602 - DNA, 19 bp, Homo sapiens
  siRNA target sequence for COH1 (NM_017890.3,9714-9732).
cctgccagctatagttaga

SEQ ID NO: 363603 - DNA, 19 bp, Homo sapiens
  siRNA target sequence for COH1 (NM_017890.3,9768-9786).
cgggaatttccgggaaaat

SEQ ID NO: 363604 - DNA, 19 bp, Homo sapiens
  siRNA target sequence for COH1 (NM_017890.3,9800-9818).
gggctatagtgctgacata

SEQ ID NO: 363605 - DNA, 19 bp, Homo sapiens
  siRNA target sequence for COH1 (NM_017890.3,9826-9844).
cacctcggagtgacttatt

SEQ ID NO: 363606 - DNA, 19 bp, Homo sapiens
  siRNA target sequence for COH1 (NM_017890.3,9828-9846).
cctcggagtgacttattta

SEQ ID NO: 363607 - DNA, 19 bp, Homo sapiens
  siRNA target sequence for COH1 (NM_017890.3,9861-9879).
ccctagtcctcgagtaatt

SEQ ID NO: 363608 - DNA, 19 bp, Homo sapiens
  siRNA target sequence for COH1 (NM_017890.3,9862-9880).
cctagtcctcgagtaatta

SEQ ID NO: 363609 - DNA, 19 bp, Homo sapiens
  siRNA target sequence for COH1 (NM_017890.3,9863-9881).
ctagtcctcgagtaattat

SEQ ID NO: 363610 - DNA, 19 bp, Homo sapiens
  siRNA target sequence for COH1 (NM_017890.3,9866-9884).
gtcctcgagtaattatcca

SEQ ID NO: 363611 - DNA, 19 bp, Homo sapiens
  siRNA target sequence for COH1 (NM_017890.3,9871-9889).
cgagtaattatccacaata

SEQ ID NO: 363612 - DNA, 19 bp, Homo sapiens
  siRNA target sequence for COH1 (NM_017890.3,9874-9892).
gtaattatccacaatagat

SEQ ID NO: 363613 - DNA, 19 bp, Homo sapiens
  siRNA target sequence for COH1 (NM_017890.3,9885-9903).
caatagatgtccagtaaaa

SEQ ID NO: 363614 - DNA, 19 bp, Homo sapiens
  siRNA target sequence for COH1 (NM_017890.3,9934-9952).
ccaaagtttgaggtttatt

SEQ ID NO: 363615 - DNA, 19 bp, Homo sapiens
  siRNA target sequence for COH1 (NM_017890.3,9943-9961).
gaggtttattgcaaaaaaa

SEQ ID NO: 363616 - DNA, 19 bp, Homo sapiens
  siRNA target sequence for COH1 (NM_017890.3,9966-9984).
ctccgagtgctcaattcat

SEQ ID NO: 363617 - DNA, 19 bp, Homo sapiens
  siRNA target sequence for COH1 (NM_017890.3,9968-9986).
ccgagtgctcaattcatca

SEQ ID NO: 363618 - DNA, 19 bp, Homo sapiens
  siRNA target sequence for COH1 (NM_017890.3,9969-9987).
cgagtgctcaattcatcat

SEQ ID NO: 363619 - DNA, 19 bp, Homo sapiens
  siRNA target sequence for COH1 (NM_017890.3,9991-10009).
ctgtatcatcagatttcca

SEQ ID NO: 363620 - DNA, 19 bp, Homo sapiens
  siRNA target sequence for COH1 (NM_017890.3,10047-10065).
cctacttttgagagttgaa

SEQ ID NO: 363621 - DNA, 19 bp, Homo sapiens
  siRNA target sequence for COH1 (NM_017890.3,10063-10081).
gaacctctagatgaagtaa

SEQ ID NO: 363622 - DNA, 19 bp, Homo sapiens
  siRNA target sequence for COH1 (NM_017890.3,10091-10109).
ggagtgatgccattgacat

SEQ ID NO: 363623 - DNA, 19 bp, Homo sapiens
  siRNA target sequence for COH1 (NM_017890.3,10213-10231).
ggaaaagcaggacctattt

SEQ ID NO: 363624 - DNA, 19 bp, Homo sapiens
  siRNA target sequence for COH1 (NM_017890.3,10219-10237).
gcaggacctattttaacca

SEQ ID NO: 363625 - DNA, 19 bp, Homo sapiens
  siRNA target sequence for COH1 (NM_017890.3,10220-10238).
caggacctattttaaccaa

SEQ ID NO: 363626 - DNA, 19 bp, Homo sapiens
  siRNA target sequence for COH1 (NM_017890.3,10222-10240).
ggacctattttaaccaata

SEQ ID NO: 363627 - DNA, 19 bp, Homo sapiens
  siRNA target sequence for COH1 (NM_017890.3,10225-10243).
cctattttaaccaatacca

SEQ ID NO: 363628 - DNA, 19 bp, Homo sapiens
  siRNA target sequence for COH1 (NM_017890.3,10245-10263).
cagagcgccagagaagatt

SEQ ID NO: 363629 - DNA, 19 bp, Homo sapiens
  siRNA target sequence for COH1 (NM_017890.3,10247-10265).
gagcgccagagaagattgt

SEQ ID NO: 363630 - DNA, 19 bp, Homo sapiens
  siRNA target sequence for COH1 (NM_017890.3,10249-10267).
gcgccagagaagattgtta

SEQ ID NO: 363631 - DNA, 19 bp, Homo sapiens
  siRNA target sequence for COH1 (NM_017890.3,10290-10308).
gttaagcctggcagtgttt

SEQ ID NO: 363632 - DNA, 19 bp, Homo sapiens
  siRNA target sequence for COH1 (NM_017890.3,10415-10433).
ctgtggctgcgttgtttga

SEQ ID NO: 363633 - DNA, 19 bp, Homo sapiens
  siRNA target sequence for COH1 (NM_017890.3,10419-10437).
ggctgcgttgtttgaactt

SEQ ID NO: 363634 - DNA, 19 bp, Homo sapiens
  siRNA target sequence for COH1 (NM_017890.3,10421-10439).
ctgcgttgtttgaacttta

SEQ ID NO: 363635 - DNA, 19 bp, Homo sapiens
  siRNA target sequence for COH1 (NM_017890.3,10423-10441).
gcgttgtttgaactttact

SEQ ID NO: 363636 - DNA, 19 bp, Homo sapiens
  siRNA target sequence for COH1 (NM_017890.3,10470-10488).
gctagacaaccagctttat

SEQ ID NO: 363637 - DNA, 19 bp, Homo sapiens
  siRNA target sequence for COH1 (NM_017890.3,10471-10489).
ctagacaaccagctttata

SEQ ID NO: 363638 - DNA, 19 bp, Homo sapiens
  siRNA target sequence for COH1 (NM_017890.3,10504-10522).
cactttgctgtcttagtct

SEQ ID NO: 363639 - DNA, 19 bp, Homo sapiens
  siRNA target sequence for COH1 (NM_017890.3,10564-10582).
cagagtctcctcatatcca

SEQ ID NO: 363640 - DNA, 19 bp, Homo sapiens
  siRNA target sequence for COH1 (NM_017890.3,10650-10668).
gagcatcctctgtgatatt

SEQ ID NO: 363641 - DNA, 19 bp, Homo sapiens
  siRNA target sequence for COH1 (NM_017890.3,10653-10671).
catcctctgtgatattaat

SEQ ID NO: 363642 - DNA, 19 bp, Homo sapiens
  siRNA target sequence for COH1 (NM_017890.3,10674-10692).
gttcagctttgaattaaaa

SEQ ID NO: 363643 - DNA, 19 bp, Homo sapiens
  siRNA target sequence for COH1 (NM_017890.3,10677-10695).
cagctttgaattaaaacct

SEQ ID NO: 363644 - DNA, 19 bp, Homo sapiens
  siRNA target sequence for COH1 (NM_017890.3,10714-10732).
gacacatttgtatactaca

SEQ ID NO: 363645 - DNA, 19 bp, Homo sapiens
  siRNA target sequence for COH1 (NM_017890.3,10875-10893).
ggtgatccagccagtaaat

SEQ ID NO: 363646 - DNA, 19 bp, Homo sapiens
  siRNA target sequence for COH1 (NM_017890.3,10876-10894).
gtgatccagccagtaaatt

SEQ ID NO: 363647 - DNA, 19 bp, Homo sapiens
  siRNA target sequence for COH1 (NM_017890.3,10953-10971).
ctccttctcggtgtttgaa

SEQ ID NO: 363648 - DNA, 19 bp, Homo sapiens
  siRNA target sequence for COH1 (NM_017890.3,11119-11137).
ggggtcgccgacttcttca

SEQ ID NO: 363649 - DNA, 19 bp, Homo sapiens
  siRNA target sequence for COH1 (NM_017890.3,11193-11211).
cagagggaccacatcgttt

SEQ ID NO: 363650 - DNA, 19 bp, Homo sapiens
  siRNA target sequence for COH1 (NM_017890.3,11197-11215).
gggaccacatcgtttgtaa

SEQ ID NO: 363651 - DNA, 19 bp, Homo sapiens
  siRNA target sequence for COH1 (NM_017890.3,11201-11219).
ccacatcgtttgtaaagca

SEQ ID NO: 363652 - DNA, 19 bp, Homo sapiens
  siRNA target sequence for COH1 (NM_017890.3,11391-11409).
cagcctgcttggtgcaatt

SEQ ID NO: 363653 - DNA, 19 bp, Homo sapiens
  siRNA target sequence for COH1 (NM_017890.3,11402-11420).
gtgcaattgctggtatagt

SEQ ID NO: 363654 - DNA, 19 bp, Homo sapiens
  siRNA target sequence for COH1 (NM_017890.3,11498-11516).
cgggtgtggggaaaggaat

SEQ ID NO: 363655 - DNA, 19 bp, Homo sapiens
  siRNA target sequence for COH1 (NM_017890.3,11568-11586).
gactggctatggtatttta

SEQ ID NO: 363656 - DNA, 19 bp, Homo sapiens
  siRNA target sequence for COH1 (NM_017890.3,11570-11588).
ctggctatggtattttaca

SEQ ID NO: 363657 - DNA, 19 bp, Homo sapiens
  siRNA target sequence for COH1 (NM_017890.3,11656-11674).
ccaaacagccatgtcaaat

SEQ ID NO: 363658 - DNA, 19 bp, Homo sapiens
  siRNA target sequence for COH1 (NM_017890.3,11657-11675).
caaacagccatgtcaaata

SEQ ID NO: 363659 - DNA, 19 bp, Homo sapiens
  siRNA target sequence for COH1 (NM_017890.3,11951-11969).
gactgtcagagcaacagta

SEQ ID NO: 363660 - DNA, 19 bp, Homo sapiens
  siRNA target sequence for COH1 (NM_017890.3,11983-12001).
gactacatcacaaagacat

SEQ ID NO: 363661 - DNA, 19 bp, Homo sapiens
  siRNA target sequence for COH1 (NM_017890.3,12020-12038).
gctgttcttccatgcaaat

SEQ ID NO: 363662 - DNA, 19 bp, Homo sapiens
  siRNA target sequence for COH1 (NM_017890.3,12070-12088).
ccctccactgttaaaacat

SEQ ID NO: 363663 - DNA, 19 bp, Homo sapiens
  siRNA target sequence for COH1 (NM_017890.3,12071-12089).
cctccactgttaaaacata

SEQ ID NO: 363664 - DNA, 19 bp, Homo sapiens
  siRNA target sequence for COH1 (NM_017890.3,12099-12117).
ggttgatccacattttgct

SEQ ID NO: 363665 - DNA, 19 bp, Homo sapiens
  siRNA target sequence for COH1 (NM_017890.3,12115-12133).
gctcaggtcttccttagta

SEQ ID NO: 363666 - DNA, 19 bp, Homo sapiens
  siRNA target sequence for COH1 (NM_017890.3,12116-12134).
ctcaggtcttccttagtaa

SEQ ID NO: 363667 - DNA, 19 bp, Homo sapiens
  siRNA target sequence for FLJ20584 (NM_017891.2,1454-1472).
ggcacgttcttcattagct

SEQ ID NO: 363668 - DNA, 19 bp, Homo sapiens
  siRNA target sequence for FLJ20584 (NM_017891.2,1488-1506).
ccgtagctgggttcttcta

SEQ ID NO: 363669 - DNA, 19 bp, Homo sapiens
  siRNA target sequence for FLJ20584 (NM_017891.2,1575-1593).
gcgaagccgctgcaatgat

SEQ ID NO: 363670 - DNA, 19 bp, Homo sapiens
  siRNA target sequence for FLJ20584 (NM_017891.2,2126-2144).
gcccgtatcagcaatgtct

SEQ ID NO: 363671 - DNA, 19 bp, Homo sapiens
  siRNA target sequence for DDX27 (NM_017895.6,31-49).
cgaggaggctgcgaaaagt

SEQ ID NO: 363672 - DNA, 19 bp, Homo sapiens
  siRNA target sequence for DDX27 (NM_017895.6,34-52).
ggaggctgcgaaaagttaa

SEQ ID NO: 363673 - DNA, 19 bp, Homo sapiens
  siRNA target sequence for DDX27 (NM_017895.6,117-135).
cggcttaatcggaaccata

SEQ ID NO: 363674 - DNA, 19 bp, Homo sapiens
  siRNA target sequence for DDX27 (NM_017895.6,207-225).
gctgggcagacgacaaaaa

SEQ ID NO: 363675 - DNA, 19 bp, Homo sapiens
  siRNA target sequence for DDX27 (NM_017895.6,248-266).
ctgatttcaaccctgattt

SEQ ID NO: 363676 - DNA, 19 bp, Homo sapiens
  siRNA target sequence for DDX27 (NM_017895.6,344-362).
gggcagccactacattaga

SEQ ID NO: 363677 - DNA, 19 bp, Homo sapiens
  siRNA target sequence for DDX27 (NM_017895.6,345-363).
ggcagccactacattagat

SEQ ID NO: 363678 - DNA, 19 bp, Homo sapiens
  siRNA target sequence for DDX27 (NM_017895.6,350-368).
ccactacattagatgagaa

SEQ ID NO: 363679 - DNA, 19 bp, Homo sapiens
  siRNA target sequence for DDX27 (NM_017895.6,353-371).
ctacattagatgagaagat

SEQ ID NO: 363680 - DNA, 19 bp, Homo sapiens
  siRNA target sequence for DDX27 (NM_017895.6,640-658).
gcatctcagtacgatgaaa

SEQ ID NO: 363681 - DNA, 19 bp, Homo sapiens
  siRNA target sequence for DDX27 (NM_017895.6,641-659).
catctcagtacgatgaaaa

SEQ ID NO: 363682 - DNA, 19 bp, Homo sapiens
  siRNA target sequence for DDX27 (NM_017895.6,796-814).
gccactgggacaggtaaaa

SEQ ID NO: 363683 - DNA, 19 bp, Homo sapiens
  siRNA target sequence for DDX27 (NM_017895.6,835-853).
gttttggagcgtctgattt

SEQ ID NO: 363684 - DNA, 19 bp, Homo sapiens
  siRNA target sequence for DDX27 (NM_017895.6,840-858).
ggagcgtctgatttataaa

SEQ ID NO: 363685 - DNA, 19 bp, Homo sapiens
  siRNA target sequence for DDX27 (NM_017895.6,1267-1285).
cctgtccggatatttgtga

SEQ ID NO: 363686 - DNA, 19 bp, Homo sapiens
  siRNA target sequence for DDX27 (NM_017895.6,1329-1347).
ccggatccggcctaatcgt

SEQ ID NO: 363687 - DNA, 19 bp, Homo sapiens
  siRNA target sequence for DDX27 (NM_017895.6,1483-1501).
gagctccatggcaacttgt

SEQ ID NO: 363688 - DNA, 19 bp, Homo sapiens
  siRNA target sequence for DDX27 (NM_017895.6,1519-1537).
gaggccctccggcgtttta

SEQ ID NO: 363689 - DNA, 19 bp, Homo sapiens
  siRNA target sequence for DDX27 (NM_017895.6,1524-1542).
cctccggcgttttaaggat

SEQ ID NO: 363690 - DNA, 19 bp, Homo sapiens
  siRNA target sequence for DDX27 (NM_017895.6,1580-1598).
cccgtggacttgacattga

SEQ ID NO: 363691 - DNA, 19 bp, Homo sapiens
  siRNA target sequence for DDX27 (NM_017895.6,1600-1618).
ggggtcaaaacggtaatca

SEQ ID NO: 363692 - DNA, 19 bp, Homo sapiens
  siRNA target sequence for DDX27 (NM_017895.6,1603-1621).
gtcaaaacggtaatcaact

SEQ ID NO: 363693 - DNA, 19 bp, Homo sapiens
  siRNA target sequence for DDX27 (NM_017895.6,1629-1647).
gcctaataccatcaaacat

SEQ ID NO: 363694 - DNA, 19 bp, Homo sapiens
  siRNA target sequence for DDX27 (NM_017895.6,1800-1818).
caaattccgggacaagatt

SEQ ID NO: 363695 - DNA, 19 bp, Homo sapiens
  siRNA target sequence for DDX27 (NM_017895.6,1884-1902).
gtcagaagcccagatcaat

SEQ ID NO: 363696 - DNA, 19 bp, Homo sapiens
  siRNA target sequence for DDX27 (NM_017895.6,2105-2123).
ggtctcagtttgaaatcct

SEQ ID NO: 363697 - DNA, 19 bp, Homo sapiens
  siRNA target sequence for DDX27 (NM_017895.6,2121-2139).
cctcaaggcgcagatgttt

SEQ ID NO: 363698 - DNA, 19 bp, Homo sapiens
  siRNA target sequence for DDX27 (NM_017895.6,2212-2230).
ggtcctgccaagaagcaaa

SEQ ID NO: 363699 - DNA, 19 bp, Homo sapiens
  siRNA target sequence for DDX27 (NM_017895.6,2349-2367).
gagacgaggaggaaacttt

SEQ ID NO: 363700 - DNA, 19 bp, Homo sapiens
  siRNA target sequence for DDX27 (NM_017895.6,2351-2369).
gacgaggaggaaactttaa

SEQ ID NO: 363701 - DNA, 19 bp, Homo sapiens
  siRNA target sequence for DDX27 (NM_017895.6,2353-2371).
cgaggaggaaactttaaat

SEQ ID NO: 363702 - DNA, 19 bp, Homo sapiens
  siRNA target sequence for FLJ20605 (NM_017898.3,699-717).
gttcaccaacttcttgaaa

SEQ ID NO: 363703 - DNA, 19 bp, Homo sapiens
  siRNA target sequence for FLJ20605 (NM_017898.3,724-742).
gcgtatagattggttcaat

SEQ ID NO: 363704 - DNA, 19 bp, Homo sapiens
  siRNA target sequence for FLJ20605 (NM_017898.3,725-743).
cgtatagattggttcaatt

SEQ ID NO: 363705 - DNA, 19 bp, Homo sapiens
  siRNA target sequence for FLJ20605 (NM_017898.3,783-801).
ccccactcttgatcagaat

SEQ ID NO: 363706 - DNA, 19 bp, Homo sapiens
  siRNA target sequence for FLJ20605 (NM_017898.3,785-803).
ccactcttgatcagaattt

SEQ ID NO: 363707 - DNA, 19 bp, Homo sapiens
  siRNA target sequence for FLJ20605 (NM_017898.3,856-874).
ctggtagatttgaatacca

SEQ ID NO: 363708 - DNA, 19 bp, Homo sapiens
  siRNA target sequence for FLJ20605 (NM_017898.3,900-918).
gaatttcaggccaaatatt

SEQ ID NO: 363709 - DNA, 19 bp, Homo sapiens
  siRNA target sequence for FLJ20605 (NM_017898.3,924-942).
gaccggctgtgatgctttt

SEQ ID NO: 363710 - DNA, 19 bp, Homo sapiens
  siRNA target sequence for FLJ20605 (NM_017898.3,926-944).
ccggctgtgatgcttttga

SEQ ID NO: 363711 - DNA, 19 bp, Homo sapiens
  siRNA target sequence for FLJ20605 (NM_017898.3,966-984).
cctaattggtagtgtagaa

SEQ ID NO: 363712 - DNA, 19 bp, Homo sapiens
  siRNA target sequence for FLJ20605 (NM_017898.3,973-991).
ggtagtgtagaagtgaaaa

SEQ ID NO: 363713 - DNA, 19 bp, Homo sapiens
  siRNA target sequence for FLJ20605 (NM_017898.3,974-992).
gtagtgtagaagtgaaaaa

SEQ ID NO: 363714 - DNA, 19 bp, Homo sapiens
  siRNA target sequence for FLJ20605 (NM_017898.3,999-1017).
ggcatgccccaggtgtatt

SEQ ID NO: 363715 - DNA, 19 bp, Homo sapiens
  siRNA target sequence for FLJ20605 (NM_017898.3,1000-1018).
gcatgccccaggtgtattt

SEQ ID NO: 363716 - DNA, 19 bp, Homo sapiens
  siRNA target sequence for FLJ20605 (NM_017898.3,1005-1023).
ccccaggtgtattttgaca

SEQ ID NO: 363717 - DNA, 19 bp, Homo sapiens
  siRNA target sequence for FLJ20605 (NM_017898.3,1105-1123).
gagagggaattgtacaagt

SEQ ID NO: 363718 - DNA, 19 bp, Homo sapiens
  siRNA target sequence for FLJ20605 (NM_017898.3,1119-1137).
caagttgtctccacttttt

SEQ ID NO: 363719 - DNA, 19 bp, Homo sapiens
  siRNA target sequence for HIF1AN (NM_017902.1,172-190).
gggcagaggagcttattga

SEQ ID NO: 363720 - DNA, 19 bp, Homo sapiens
  siRNA target sequence for HIF1AN (NM_017902.1,206-224).
ggtgctgaccgacacaaat

SEQ ID NO: 363721 - DNA, 19 bp, Homo sapiens
  siRNA target sequence for HIF1AN (NM_017902.1,209-227).
gctgaccgacacaaatctt

SEQ ID NO: 363722 - DNA, 19 bp, Homo sapiens
  siRNA target sequence for HIF1AN (NM_017902.1,214-232).
ccgacacaaatcttgtgta

SEQ ID NO: 363723 - DNA, 19 bp, Homo sapiens
  siRNA target sequence for HIF1AN (NM_017902.1,228-246).
gtgtatcctgccctgaaat

SEQ ID NO: 363724 - DNA, 19 bp, Homo sapiens
  siRNA target sequence for HIF1AN (NM_017902.1,240-258).
ctgaaatgggaccttgaat

SEQ ID NO: 363725 - DNA, 19 bp, Homo sapiens
  siRNA target sequence for HIF1AN (NM_017902.1,255-273).
gaatacctgcaagagaata

SEQ ID NO: 363726 - DNA, 19 bp, Homo sapiens
  siRNA target sequence for HIF1AN (NM_017902.1,301-319).
gtgccagcacccacaagtt

SEQ ID NO: 363727 - DNA, 19 bp, Homo sapiens
  siRNA target sequence for HIF1AN (NM_017902.1,314-332).
caagttcttgtactatgat

SEQ ID NO: 363728 - DNA, 19 bp, Homo sapiens
  siRNA target sequence for HIF1AN (NM_017902.1,344-362).
ggccaatttccagaacttt

SEQ ID NO: 363729 - DNA, 19 bp, Homo sapiens
  siRNA target sequence for HIF1AN (NM_017902.1,459-477).
cagcaaacgctcaatgaca

SEQ ID NO: 363730 - DNA, 19 bp, Homo sapiens
  siRNA target sequence for HIF1AN (NM_017902.1,491-509).
gattgtcatggacttctta

SEQ ID NO: 363731 - DNA, 19 bp, Homo sapiens
  siRNA target sequence for HIF1AN (NM_017902.1,501-519).
gacttcttaggttttaact

SEQ ID NO: 363732 - DNA, 19 bp, Homo sapiens
  siRNA target sequence for HIF1AN (NM_017902.1,521-539).
gaactggattaataagcaa

SEQ ID NO: 363733 - DNA, 19 bp, Homo sapiens
  siRNA target sequence for HIF1AN (NM_017902.1,621-639).
gatgagcagcagaactttt

SEQ ID NO: 363734 - DNA, 19 bp, Homo sapiens
  siRNA target sequence for HIF1AN (NM_017902.1,820-838).
ctggtgatgttctttacat

SEQ ID NO: 363735 - DNA, 19 bp, Homo sapiens
  siRNA target sequence for HIF1AN (NM_017902.1,845-863).
gtactggtggcatcacata

SEQ ID NO: 363736 - DNA, 19 bp, Homo sapiens
  siRNA target sequence for HIF1AN (NM_017902.1,853-871).
ggcatcacatagagtcatt

SEQ ID NO: 363737 - DNA, 19 bp, Homo sapiens
  siRNA target sequence for HIF1AN (NM_017902.1,854-872).
gcatcacatagagtcatta

SEQ ID NO: 363738 - DNA, 19 bp, Homo sapiens
  siRNA target sequence for HIF1AN (NM_017902.1,858-876).
cacatagagtcattactaa

SEQ ID NO: 363739 - DNA, 19 bp, Homo sapiens
  siRNA target sequence for HIF1AN (NM_017902.1,873-891).
ctaaatggggggattacca

SEQ ID NO: 363740 - DNA, 19 bp, Homo sapiens
  siRNA target sequence for HIF1AN (NM_017902.1,917-935).
ggctcccacccctaagaga

SEQ ID NO: 363741 - DNA, 19 bp, Homo sapiens
  siRNA target sequence for HIF1AN (NM_017902.1,918-936).
gctcccacccctaagagaa

SEQ ID NO: 363742 - DNA, 19 bp, Homo sapiens
  siRNA target sequence for HIF1AN (NM_017902.1,922-940).
ccacccctaagagaattga

SEQ ID NO: 363743 - DNA, 19 bp, Homo sapiens
  siRNA target sequence for HIF1AN (NM_017902.1,923-941).
cacccctaagagaattgaa

SEQ ID NO: 363744 - DNA, 19 bp, Homo sapiens
  siRNA target sequence for HIF1AN (NM_017902.1,925-943).
cccctaagagaattgaata

SEQ ID NO: 363745 - DNA, 19 bp, Homo sapiens
  siRNA target sequence for HIF1AN (NM_017902.1,968-986).
ggccataatgagaaacatt

SEQ ID NO: 363746 - DNA, 19 bp, Homo sapiens
  siRNA target sequence for HIF1AN (NM_017902.1,1033-1051).
ccttgttgaacacaatgat

SEQ ID NO: 363747 - DNA, 19 bp, Homo sapiens
  siRNA target sequence for FLJ20618 (NM_017903.2,546-564).
ggaacactggaggtagatt

SEQ ID NO: 363748 - DNA, 19 bp, Homo sapiens
  siRNA target sequence for FLJ20618 (NM_017903.2,547-565).
gaacactggaggtagattt

SEQ ID NO: 363749 - DNA, 19 bp, Homo sapiens
  siRNA target sequence for FLJ20618 (NM_017903.2,642-660).
gcactgttactgggaatta

SEQ ID NO: 363750 - DNA, 19 bp, Homo sapiens
  siRNA target sequence for FLJ20618 (NM_017903.2,705-723).
gctccatccaaagtgaatt

SEQ ID NO: 363751 - DNA, 19 bp, Homo sapiens
  siRNA target sequence for FLJ20618 (NM_017903.2,770-788).
ctaccttccctgtgctatt

SEQ ID NO: 363752 - DNA, 19 bp, Homo sapiens
  siRNA target sequence for FLJ20618 (NM_017903.2,815-833).
gatttttgcccgagatgat

SEQ ID NO: 363753 - DNA, 19 bp, Homo sapiens
  siRNA target sequence for FLJ20618 (NM_017903.2,831-849).
gattcctaccaccttacta

SEQ ID NO: 363754 - DNA, 19 bp, Homo sapiens
  siRNA target sequence for FLJ20619 (NM_017904.1,52-70).
ctgtggccgacgatctaga

SEQ ID NO: 363755 - DNA, 19 bp, Homo sapiens
  siRNA target sequence for FLJ20619 (NM_017904.1,615-633).
gagaaaaggggctggtatt

SEQ ID NO: 363756 - DNA, 19 bp, Homo sapiens
  siRNA target sequence for FLJ20619 (NM_017904.1,933-951).
cgcctggcaaaaatcttct

SEQ ID NO: 363757 - DNA, 19 bp, Homo sapiens
  siRNA target sequence for C13orf11 (NM_017905.2,223-241).
ggcgcagcgtgtgatcaaa

SEQ ID NO: 363758 - DNA, 19 bp, Homo sapiens
  siRNA target sequence for C13orf11 (NM_017905.2,225-243).
cgcagcgtgtgatcaaact

SEQ ID NO: 363759 - DNA, 19 bp, Homo sapiens
  siRNA target sequence for C13orf11 (NM_017905.2,315-333).
ggcttctccgccagaagaa

SEQ ID NO: 363760 - DNA, 19 bp, Homo sapiens
  siRNA target sequence for C13orf11 (NM_017905.2,316-334).
gcttctccgccagaagaat

SEQ ID NO: 363761 - DNA, 19 bp, Homo sapiens
  siRNA target sequence for C13orf11 (NM_017905.2,445-463).
gctgaatgaaagtgaaaat

SEQ ID NO: 363762 - DNA, 19 bp, Homo sapiens
  siRNA target sequence for C13orf11 (NM_017905.2,502-520).
gcagggggattacaaagat

SEQ ID NO: 363763 - DNA, 19 bp, Homo sapiens
  siRNA target sequence for C13orf11 (NM_017905.2,626-644).
caagttgaagcccttaaaa

SEQ ID NO: 363764 - DNA, 19 bp, Homo sapiens
  siRNA target sequence for C13orf11 (NM_017905.2,672-690).
ccatgcttgacgagattct

SEQ ID NO: 363765 - DNA, 19 bp, Homo sapiens
  siRNA target sequence for C13orf11 (NM_017905.2,673-691).
catgcttgacgagattctt

SEQ ID NO: 363766 - DNA, 19 bp, Homo sapiens
  siRNA target sequence for C13orf11 (NM_017905.2,676-694).
gcttgacgagattcttgaa

SEQ ID NO: 363767 - DNA, 19 bp, Homo sapiens
  siRNA target sequence for C13orf11 (NM_017905.2,809-827).
gaggccaattctaagcaaa

SEQ ID NO: 363768 - DNA, 19 bp, Homo sapiens
  siRNA target sequence for C13orf11 (NM_017905.2,814-832).
caattctaagcaaaatata

SEQ ID NO: 363769 - DNA, 19 bp, Homo sapiens
  siRNA target sequence for C13orf11 (NM_017905.2,861-879).
gtcttagcatgctgattga

SEQ ID NO: 363770 - DNA, 19 bp, Homo sapiens
  siRNA target sequence for C13orf11 (NM_017905.2,932-950).
cgtgcagatcaccacttta

SEQ ID NO: 363771 - DNA, 19 bp, Homo sapiens
  siRNA target sequence for C13orf11 (NM_017905.2,933-951).
gtgcagatcaccactttat

SEQ ID NO: 363772 - DNA, 19 bp, Homo sapiens
  siRNA target sequence for C13orf11 (NM_017905.2,935-953).
gcagatcaccactttataa

SEQ ID NO: 363773 - DNA, 19 bp, Homo sapiens
  siRNA target sequence for C13orf11 (NM_017905.2,936-954).
cagatcaccactttataaa

SEQ ID NO: 363774 - DNA, 19 bp, Homo sapiens
  siRNA target sequence for C13orf11 (NM_017905.2,986-1004).
ccttgtggctggctatgta

SEQ ID NO: 363775 - DNA, 19 bp, Homo sapiens
  siRNA target sequence for C13orf11 (NM_017905.2,998-1016).
ctatgtacagccataggat

SEQ ID NO: 363776 - DNA, 19 bp, Homo sapiens
  siRNA target sequence for C13orf11 (NM_017905.2,1008-1026).
ccataggattgcctacaat

SEQ ID NO: 363777 - DNA, 19 bp, Homo sapiens
  siRNA target sequence for C13orf11 (NM_017905.2,1061-1079).
ccttcaggactaaatagta

SEQ ID NO: 363778 - DNA, 19 bp, Homo sapiens
  siRNA target sequence for C13orf11 (NM_017905.2,1062-1080).
cttcaggactaaatagtat

SEQ ID NO: 363779 - DNA, 19 bp, Homo sapiens
  siRNA target sequence for C13orf11 (NM_017905.2,1065-1083).
caggactaaatagtattaa

SEQ ID NO: 363780 - DNA, 19 bp, Homo sapiens
  siRNA target sequence for C13orf11 (NM_017905.2,1067-1085).
ggactaaatagtattaagt

SEQ ID NO: 363781 - DNA, 19 bp, Homo sapiens
  siRNA target sequence for C13orf11 (NM_017905.2,1139-1157).
cttgttggcttagaatttt

SEQ ID NO: 363782 - DNA, 19 bp, Homo sapiens
  siRNA target sequence for C13orf11 (NM_017905.2,1196-1214).
caagggccgtgttacatga

SEQ ID NO: 363783 - DNA, 19 bp, Homo sapiens
  siRNA target sequence for C13orf11 (NM_017905.2,1204-1222).
gtgttacatgacactgtta

SEQ ID NO: 363784 - DNA, 19 bp, Homo sapiens
  siRNA target sequence for C13orf11 (NM_017905.2,1206-1224).
gttacatgacactgttaat

SEQ ID NO: 363785 - DNA, 19 bp, Homo sapiens
  siRNA target sequence for C13orf11 (NM_017905.2,1249-1267).
gcatctcttgcggatcaaa

SEQ ID NO: 363786 - DNA, 19 bp, Homo sapiens
  siRNA target sequence for C13orf11 (NM_017905.2,1270-1288).
cacgcagagcgtcttcatt

SEQ ID NO: 363787 - DNA, 19 bp, Homo sapiens
  siRNA target sequence for C13orf11 (NM_017905.2,1342-1360).
cagtgctcggggtgacaaa

SEQ ID NO: 363788 - DNA, 19 bp, Homo sapiens
  siRNA target sequence for C13orf11 (NM_017905.2,1438-1456).
cgtcatgccgactctcata

SEQ ID NO: 363789 - DNA, 19 bp, Homo sapiens
  siRNA target sequence for C13orf11 (NM_017905.2,1468-1486).
cagtgcatcttctagcatt

SEQ ID NO: 363790 - DNA, 19 bp, Homo sapiens
  siRNA target sequence for C13orf11 (NM_017905.2,1482-1500).
gcattgtcgtggaagttct

SEQ ID NO: 363791 - DNA, 19 bp, Homo sapiens
  siRNA target sequence for C13orf11 (NM_017905.2,1499-1517).
ctccgaatcctggttttga

SEQ ID NO: 363792 - DNA, 19 bp, Homo sapiens
  siRNA target sequence for C13orf11 (NM_017905.2,1501-1519).
ccgaatcctggttttgatt

SEQ ID NO: 363793 - DNA, 19 bp, Homo sapiens
  siRNA target sequence for C13orf11 (NM_017905.2,1545-1563).
cggtttttcttttatgtct

SEQ ID NO: 363794 - DNA, 19 bp, Homo sapiens
  siRNA target sequence for C13orf11 (NM_017905.2,1565-1583).
gttataaagaagtatctca

SEQ ID NO: 363795 - DNA, 19 bp, Homo sapiens
  siRNA target sequence for C13orf11 (NM_017905.2,1598-1616).
cggaagctgcacatggaaa

SEQ ID NO: 363796 - DNA, 19 bp, Homo sapiens
  siRNA target sequence for C13orf11 (NM_017905.2,1636-1654).
cctgatcttgggaatatct

SEQ ID NO: 363797 - DNA, 19 bp, Homo sapiens
  siRNA target sequence for C13orf11 (NM_017905.2,1646-1664).
ggaatatctgcctttatct

SEQ ID NO: 363798 - DNA, 19 bp, Homo sapiens
  siRNA target sequence for C13orf11 (NM_017905.2,1796-1814).
gacttcctggccatcgttt

SEQ ID NO: 363799 - DNA, 19 bp, Homo sapiens
  siRNA target sequence for C13orf11 (NM_017905.2,1991-2009).
gcccaggtcagcgagtttt

SEQ ID NO: 363800 - DNA, 19 bp, Homo sapiens
  siRNA target sequence for C13orf11 (NM_017905.2,1996-2014).
ggtcagcgagttttccttt

SEQ ID NO: 363801 - DNA, 19 bp, Homo sapiens
  siRNA target sequence for C13orf11 (NM_017905.2,2060-2078).
gtgtacctccttatactga

SEQ ID NO: 363802 - DNA, 19 bp, Homo sapiens
  siRNA target sequence for PAK1IP1 (NM_017906.1,214-232).
gtcagcagtagctgtaaat

SEQ ID NO: 363803 - DNA, 19 bp, Homo sapiens
  siRNA target sequence for PAK1IP1 (NM_017906.1,316-334).
gcatcacagtggtacaata

SEQ ID NO: 363804 - DNA, 19 bp, Homo sapiens
  siRNA target sequence for PAK1IP1 (NM_017906.1,317-335).
catcacagtggtacaataa

SEQ ID NO: 363805 - DNA, 19 bp, Homo sapiens
  siRNA target sequence for PAK1IP1 (NM_017906.1,320-338).
cacagtggtacaataactt

SEQ ID NO: 363806 - DNA, 19 bp, Homo sapiens
  siRNA target sequence for PAK1IP1 (NM_017906.1,353-371).
ggcaacaggcatttaatca

SEQ ID NO: 363807 - DNA, 19 bp, Homo sapiens
  siRNA target sequence for PAK1IP1 (NM_017906.1,417-435).
gggaatgcctgaagtcaat

SEQ ID NO: 363808 - DNA, 19 bp, Homo sapiens
  siRNA target sequence for PAK1IP1 (NM_017906.1,419-437).
gaatgcctgaagtcaatta

SEQ ID NO: 363809 - DNA, 19 bp, Homo sapiens
  siRNA target sequence for PAK1IP1 (NM_017906.1,424-442).
cctgaagtcaattaaagct

SEQ ID NO: 363810 - DNA, 19 bp, Homo sapiens
  siRNA target sequence for PAK1IP1 (NM_017906.1,493-511).
cctgtcggttggtacagat

SEQ ID NO: 363811 - DNA, 19 bp, Homo sapiens
  siRNA target sequence for PAK1IP1 (NM_017906.1,494-512).
ctgtcggttggtacagata

SEQ ID NO: 363812 - DNA, 19 bp, Homo sapiens
  siRNA target sequence for PAK1IP1 (NM_017906.1,522-540).
gaacgtggaatcttgtaga

SEQ ID NO: 363813 - DNA, 19 bp, Homo sapiens
  siRNA target sequence for PAK1IP1 (NM_017906.1,606-624).
gagagcagtatgtagttat

SEQ ID NO: 363814 - DNA, 19 bp, Homo sapiens
  siRNA target sequence for PAK1IP1 (NM_017906.1,608-626).
gagcagtatgtagttatca

SEQ ID NO: 363815 - DNA, 19 bp, Homo sapiens
  siRNA target sequence for PAK1IP1 (NM_017906.1,610-628).
gcagtatgtagttatcata

SEQ ID NO: 363816 - DNA, 19 bp, Homo sapiens
  siRNA target sequence for PAK1IP1 (NM_017906.1,652-670).
gcttgacactgcatccatt

SEQ ID NO: 363817 - DNA, 19 bp, Homo sapiens
  siRNA target sequence for PAK1IP1 (NM_017906.1,705-723).
ctgttaaatttctttcaga

SEQ ID NO: 363818 - DNA, 19 bp, Homo sapiens
  siRNA target sequence for PAK1IP1 (NM_017906.1,785-803).
gtgtgcctctgcgaattta

SEQ ID NO: 363819 - DNA, 19 bp, Homo sapiens
  siRNA target sequence for PAK1IP1 (NM_017906.1,790-808).
cctctgcgaatttaaagct

SEQ ID NO: 363820 - DNA, 19 bp, Homo sapiens
  siRNA target sequence for PAK1IP1 (NM_017906.1,832-850).
gttcagttttgaaattcca

SEQ ID NO: 363821 - DNA, 19 bp, Homo sapiens
  siRNA target sequence for PAK1IP1 (NM_017906.1,849-867).
cagagcatcatgttattgt

SEQ ID NO: 363822 - DNA, 19 bp, Homo sapiens
  siRNA target sequence for PAK1IP1 (NM_017906.1,919-937).
gaaagttcccccatcttta

SEQ ID NO: 363823 - DNA, 19 bp, Homo sapiens
  siRNA target sequence for PAK1IP1 (NM_017906.1,938-956).
ctctgtgaaataaacacta

SEQ ID NO: 363824 - DNA, 19 bp, Homo sapiens
  siRNA target sequence for PAK1IP1 (NM_017906.1,1030-1048).
gccttctcctgtaagtaaa

SEQ ID NO: 363825 - DNA, 19 bp, Homo sapiens
  siRNA target sequence for PAK1IP1 (NM_017906.1,1032-1050).
cttctcctgtaagtaaaga

SEQ ID NO: 363826 - DNA, 19 bp, Homo sapiens
  siRNA target sequence for PAK1IP1 (NM_017906.1,1056-1074).
ccaaaattggcaaaaagga

SEQ ID NO: 363827 - DNA, 19 bp, Homo sapiens
  siRNA target sequence for PAK1IP1 (NM_017906.1,1100-1118).
gaaaagcggtcaaaaccta

SEQ ID NO: 363828 - DNA, 19 bp, Homo sapiens
  siRNA target sequence for PAK1IP1 (NM_017906.1,1105-1123).
gcggtcaaaacctaacaca

SEQ ID NO: 363829 - DNA, 19 bp, Homo sapiens
  siRNA target sequence for PAK1IP1 (NM_017906.1,1106-1124).
cggtcaaaacctaacacaa

SEQ ID NO: 363830 - DNA, 19 bp, Homo sapiens
  siRNA target sequence for FLJ20625 (NM_017907.1,136-154).
ccctaccaaagctctcaat

SEQ ID NO: 363831 - DNA, 19 bp, Homo sapiens
  siRNA target sequence for FLJ20625 (NM_017907.1,234-252).
cagccagcaacatcattga

SEQ ID NO: 363832 - DNA, 19 bp, Homo sapiens
  siRNA target sequence for FLJ20625 (NM_017907.1,276-294).
gcatggagcagcatgagta

SEQ ID NO: 363833 - DNA, 19 bp, Homo sapiens
  siRNA target sequence for FLJ20625 (NM_017907.1,342-360).
gcagcctgacccattggaa

SEQ ID NO: 363834 - DNA, 19 bp, Homo sapiens
  siRNA target sequence for FLJ20625 (NM_017907.1,419-437).
cccatcccgttctctgatt

SEQ ID NO: 363835 - DNA, 19 bp, Homo sapiens
  siRNA target sequence for FLJ20625 (NM_017907.1,448-466).
ctccaggatagctgcttat

SEQ ID NO: 363836 - DNA, 19 bp, Homo sapiens
  siRNA target sequence for C6orf96 (NM_017909.1,148-166).
gtggccagatctcatcata

SEQ ID NO: 363837 - DNA, 19 bp, Homo sapiens
  siRNA target sequence for C6orf96 (NM_017909.1,150-168).
ggccagatctcatcatata

SEQ ID NO: 363838 - DNA, 19 bp, Homo sapiens
  siRNA target sequence for C6orf96 (NM_017909.1,151-169).
gccagatctcatcatatat

SEQ ID NO: 363839 - DNA, 19 bp, Homo sapiens
  siRNA target sequence for C6orf96 (NM_017909.1,179-197).
cacatcagtgccgaagaat

SEQ ID NO: 363840 - DNA, 19 bp, Homo sapiens
  siRNA target sequence for C6orf96 (NM_017909.1,189-207).
ccgaagaatcggtcatcta

SEQ ID NO: 363841 - DNA, 19 bp, Homo sapiens
  siRNA target sequence for C6orf96 (NM_017909.1,190-208).
cgaagaatcggtcatctaa

SEQ ID NO: 363842 - DNA, 19 bp, Homo sapiens
  siRNA target sequence for C6orf96 (NM_017909.1,191-209).
gaagaatcggtcatctaat

SEQ ID NO: 363843 - DNA, 19 bp, Homo sapiens
  siRNA target sequence for C6orf96 (NM_017909.1,194-212).
gaatcggtcatctaatgtt

SEQ ID NO: 363844 - DNA, 19 bp, Homo sapiens
  siRNA target sequence for C6orf96 (NM_017909.1,198-216).
cggtcatctaatgttaaaa

SEQ ID NO: 363845 - DNA, 19 bp, Homo sapiens
  siRNA target sequence for C6orf96 (NM_017909.1,210-228).
gttaaaaccacttaaggaa

SEQ ID NO: 363846 - DNA, 19 bp, Homo sapiens
  siRNA target sequence for C6orf96 (NM_017909.1,246-264).
cagcacactgacaatacgt

SEQ ID NO: 363847 - DNA, 19 bp, Homo sapiens
  siRNA target sequence for C6orf96 (NM_017909.1,262-280).
cgtcaaagcttggatttgt

SEQ ID NO: 363848 - DNA, 19 bp, Homo sapiens
  siRNA target sequence for C6orf96 (NM_017909.1,279-297).
gttccttcctgataaaaca

SEQ ID NO: 363849 - DNA, 19 bp, Homo sapiens
  siRNA target sequence for C6orf96 (NM_017909.1,296-314).
cagctagtggtttgaataa

SEQ ID NO: 363850 - DNA, 19 bp, Homo sapiens
  siRNA target sequence for C6orf96 (NM_017909.1,356-374).
gcatgctgtctccattaaa

SEQ ID NO: 363851 - DNA, 19 bp, Homo sapiens
  siRNA target sequence for C6orf96 (NM_017909.1,357-375).
catgctgtctccattaaat

SEQ ID NO: 363852 - DNA, 19 bp, Homo sapiens
  siRNA target sequence for C6orf96 (NM_017909.1,406-424).
cttccaaccatgaaatcct

SEQ ID NO: 363853 - DNA, 19 bp, Homo sapiens
  siRNA target sequence for C6orf96 (NM_017909.1,455-473).
caaatctgttgggttctaa

SEQ ID NO: 363854 - DNA, 19 bp, Homo sapiens
  siRNA target sequence for C6orf96 (NM_017909.1,552-570).
ggtgaagagaccactaaaa

SEQ ID NO: 363855 - DNA, 19 bp, Homo sapiens
  siRNA target sequence for C6orf96 (NM_017909.1,555-573).
gaagagaccactaaaagca

SEQ ID NO: 363856 - DNA, 19 bp, Homo sapiens
  siRNA target sequence for C6orf96 (NM_017909.1,656-674).
cggcagatgagtatcatct

SEQ ID NO: 363857 - DNA, 19 bp, Homo sapiens
  siRNA target sequence for C6orf96 (NM_017909.1,675-693).
gggaaatctgtctcaagat

SEQ ID NO: 363858 - DNA, 19 bp, Homo sapiens
  siRNA target sequence for C6orf96 (NM_017909.1,696-714).
ggcctcccacggatatgtt

SEQ ID NO: 363859 - DNA, 19 bp, Homo sapiens
  siRNA target sequence for C6orf96 (NM_017909.1,701-719).
cccacggatatgttgaagt

SEQ ID NO: 363860 - DNA, 19 bp, Homo sapiens
  siRNA target sequence for C6orf96 (NM_017909.1,705-723).
cggatatgttgaagtaaca

SEQ ID NO: 363861 - DNA, 19 bp, Homo sapiens
  siRNA target sequence for C6orf96 (NM_017909.1,1045-1063).
gctctatgcctttctgtaa

SEQ ID NO: 363862 - DNA, 19 bp, Homo sapiens
  siRNA target sequence for C6orf96 (NM_017909.1,1076-1094).
gggaagcatcactggataa

SEQ ID NO: 363863 - DNA, 19 bp, Homo sapiens
  siRNA target sequence for C6orf96 (NM_017909.1,1077-1095).
ggaagcatcactggataaa

SEQ ID NO: 363864 - DNA, 19 bp, Homo sapiens
  siRNA target sequence for C6orf96 (NM_017909.1,1078-1096).
gaagcatcactggataaat

SEQ ID NO: 363865 - DNA, 19 bp, Homo sapiens
  siRNA target sequence for C6orf96 (NM_017909.1,1081-1099).
gcatcactggataaattta

SEQ ID NO: 363866 - DNA, 19 bp, Homo sapiens
  siRNA target sequence for C6orf96 (NM_017909.1,1115-1133).
caattcctgaggctttaaa

SEQ ID NO: 363867 - DNA, 19 bp, Homo sapiens
  siRNA target sequence for C6orf96 (NM_017909.1,1176-1194).
gaaaatcggtgaactcttt

SEQ ID NO: 363868 - DNA, 19 bp, Homo sapiens
  siRNA target sequence for C6orf96 (NM_017909.1,1195-1213).
gctctaaggcaccgtataa

SEQ ID NO: 363869 - DNA, 19 bp, Homo sapiens
  siRNA target sequence for C6orf96 (NM_017909.1,1196-1214).
ctctaaggcaccgtataaa

SEQ ID NO: 363870 - DNA, 19 bp, Homo sapiens
  siRNA target sequence for C6orf96 (NM_017909.1,1198-1216).
ctaaggcaccgtataaact

SEQ ID NO: 363871 - DNA, 19 bp, Homo sapiens
  siRNA target sequence for C6orf96 (NM_017909.1,1266-1284).
cctggaaggactttacgat

SEQ ID NO: 363872 - DNA, 19 bp, Homo sapiens
  siRNA target sequence for C6orf96 (NM_017909.1,1267-1285).
ctggaaggactttacgata

SEQ ID NO: 363873 - DNA, 19 bp, Homo sapiens
  siRNA target sequence for C6orf96 (NM_017909.1,1269-1287).
ggaaggactttacgataaa

SEQ ID NO: 363874 - DNA, 19 bp, Homo sapiens
  siRNA target sequence for C6orf96 (NM_017909.1,1273-1291).
ggactttacgataaaacgt

SEQ ID NO: 363875 - DNA, 19 bp, Homo sapiens
  siRNA target sequence for C6orf96 (NM_017909.1,1290-1308).
gtgtcaattccttagcatt

SEQ ID NO: 363876 - DNA, 19 bp, Homo sapiens
  siRNA target sequence for C6orf96 (NM_017909.1,1313-1331).
gaagagttaaggtcatgaa

SEQ ID NO: 363877 - DNA, 19 bp, Homo sapiens
  siRNA target sequence for C6orf96 (NM_017909.1,1372-1390).
cggaatcacctgaatgaga

SEQ ID NO: 363878 - DNA, 19 bp, Homo sapiens
  siRNA target sequence for C6orf96 (NM_017909.1,1401-1419).
ccgcttggagtggatgatt

SEQ ID NO: 363879 - DNA, 19 bp, Homo sapiens
  siRNA target sequence for FLJ20635 (NM_017911.1,277-295).
gacaacaaatagaagtgaa

SEQ ID NO: 363880 - DNA, 19 bp, Homo sapiens
  siRNA target sequence for FLJ20635 (NM_017911.1,795-813).
caagagggcacatgaagta

SEQ ID NO: 363881 - DNA, 19 bp, Homo sapiens
  siRNA target sequence for FLJ20635 (NM_017911.1,891-909).
ctcaagacgcagaagtcat

SEQ ID NO: 363882 - DNA, 19 bp, Homo sapiens
  siRNA target sequence for FLJ20635 (NM_017911.1,911-929).
gaagtcctccagaacttat

SEQ ID NO: 363883 - DNA, 19 bp, Homo sapiens
  siRNA target sequence for FLJ20635 (NM_017911.1,932-950).
cgcaccaagtcctttctgt

SEQ ID NO: 363884 - DNA, 19 bp, Homo sapiens
  siRNA target sequence for FLJ20635 (NM_017911.1,933-951).
gcaccaagtcctttctgtt

SEQ ID NO: 363885 - DNA, 19 bp, Homo sapiens
  siRNA target sequence for FLJ20635 (NM_017911.1,1014-1032).
cgaataaggtggatttgga

SEQ ID NO: 363886 - DNA, 19 bp, Homo sapiens
  siRNA target sequence for FLJ20635 (NM_017911.1,1055-1073).
gagaatgaagaccatttct

SEQ ID NO: 363887 - DNA, 19 bp, Homo sapiens
  siRNA target sequence for FLJ20635 (NM_017911.1,1093-1111).
gcttctgcacggaatcaaa

SEQ ID NO: 363888 - DNA, 19 bp, Homo sapiens
  siRNA target sequence for FLJ20635 (NM_017911.1,1100-1118).
cacggaatcaaagttgtat

SEQ ID NO: 363889 - DNA, 19 bp, Homo sapiens
  siRNA target sequence for FLJ20635 (NM_017911.1,1104-1122).
gaatcaaagttgtatccta

SEQ ID NO: 363890 - DNA, 19 bp, Homo sapiens
  siRNA target sequence for FLJ20635 (NM_017911.1,1207-1225).
cgtggacagcaccacatta

SEQ ID NO: 363891 - DNA, 19 bp, Homo sapiens
  siRNA target sequence for FLJ20635 (NM_017911.1,1208-1226).
gtggacagcaccacattat

SEQ ID NO: 363892 - DNA, 19 bp, Homo sapiens
  siRNA target sequence for FLJ20635 (NM_017911.1,1219-1237).
cacattattgggtaatgca

SEQ ID NO: 363893 - DNA, 19 bp, Homo sapiens
  siRNA target sequence for FLJ20635 (NM_017911.1,1296-1314).
gcacacaatcagatactga

SEQ ID NO: 363894 - DNA, 19 bp, Homo sapiens
  siRNA target sequence for FLJ20641 (NM_017915.1,284-302).
ggacgtgactgaccattat

SEQ ID NO: 363895 - DNA, 19 bp, Homo sapiens
  siRNA target sequence for FLJ20641 (NM_017915.1,303-321).
gaggacgttaggaagattt

SEQ ID NO: 363896 - DNA, 19 bp, Homo sapiens
  siRNA target sequence for FLJ20641 (NM_017915.1,305-323).
ggacgttaggaagatttat

SEQ ID NO: 363897 - DNA, 19 bp, Homo sapiens
  siRNA target sequence for FLJ20641 (NM_017915.1,308-326).
cgttaggaagatttatgat

SEQ ID NO: 363898 - DNA, 19 bp, Homo sapiens
  siRNA target sequence for FLJ20641 (NM_017915.1,338-356).
gaacagtaatatgttagat

SEQ ID NO: 363899 - DNA, 19 bp, Homo sapiens
  siRNA target sequence for FLJ20641 (NM_017915.1,350-368).
gttagatctgattgatgtt

SEQ ID NO: 363900 - DNA, 19 bp, Homo sapiens
  siRNA target sequence for FLJ20641 (NM_017915.1,413-431).
cacagtatctcctagtcaa

SEQ ID NO: 363901 - DNA, 19 bp, Homo sapiens
  siRNA target sequence for FLJ20641 (NM_017915.1,424-442).
ctagtcaactactggattt

SEQ ID NO: 363902 - DNA, 19 bp, Homo sapiens
  siRNA target sequence for FLJ20641 (NM_017915.1,427-445).
gtcaactactggattttct

SEQ ID NO: 363903 - DNA, 19 bp, Homo sapiens
  siRNA target sequence for FLJ20641 (NM_017915.1,705-723).
gtggccacgtcttttatta

SEQ ID NO: 363904 - DNA, 19 bp, Homo sapiens
  siRNA target sequence for FLJ20641 (NM_017915.1,707-725).
ggccacgtcttttattaga

SEQ ID NO: 363905 - DNA, 19 bp, Homo sapiens
  siRNA target sequence for FLJ20641 (NM_017915.1,708-726).
gccacgtcttttattagaa

SEQ ID NO: 363906 - DNA, 19 bp, Homo sapiens
  siRNA target sequence for FLJ20641 (NM_017915.1,710-728).
cacgtcttttattagaaca

SEQ ID NO: 363907 - DNA, 19 bp, Homo sapiens
  siRNA target sequence for FLJ20641 (NM_017915.1,771-789).
cctttaaggacacatgtaa

SEQ ID NO: 363908 - DNA, 19 bp, Homo sapiens
  siRNA target sequence for FLJ20641 (NM_017915.1,772-790).
ctttaaggacacatgtaaa

SEQ ID NO: 363909 - DNA, 19 bp, Homo sapiens
  siRNA target sequence for FLJ20641 (NM_017915.1,859-877).
gcattgcagggggtcaaat

SEQ ID NO: 363910 - DNA, 19 bp, Homo sapiens
  siRNA target sequence for FLJ20641 (NM_017915.1,860-878).
cattgcagggggtcaaata

SEQ ID NO: 363911 - DNA, 19 bp, Homo sapiens
  siRNA target sequence for FLJ20641 (NM_017915.1,873-891).
caaatactgtcagtgataa

SEQ ID NO: 363912 - DNA, 19 bp, Homo sapiens
  siRNA target sequence for FLJ20641 (NM_017915.1,919-937).
gcagggatcctttttgcaa

SEQ ID NO: 363913 - DNA, 19 bp, Homo sapiens
  siRNA target sequence for FLJ20641 (NM_017915.1,951-969).
gttgctcaggatttggatt

SEQ ID NO: 363914 - DNA, 19 bp, Homo sapiens
  siRNA target sequence for FLJ20641 (NM_017915.1,1036-1054).
ctgctcggccaaaatctca

SEQ ID NO: 363915 - DNA, 19 bp, Homo sapiens
  siRNA target sequence for FLJ20641 (NM_017915.1,1064-1082).
ccatggtactgcatactgt

SEQ ID NO: 363916 - DNA, 19 bp, Homo sapiens
  siRNA target sequence for FLJ20641 (NM_017915.1,1102-1120).
ccttattagttcttttgga

SEQ ID NO: 363917 - DNA, 19 bp, Homo sapiens
  siRNA target sequence for FLJ20641 (NM_017915.1,1118-1136).
ggacgaagaagcagctaat

SEQ ID NO: 363918 - DNA, 19 bp, Homo sapiens
  siRNA target sequence for FLJ20641 (NM_017915.1,1121-1139).
cgaagaagcagctaatgct

SEQ ID NO: 363919 - DNA, 19 bp, Homo sapiens
  siRNA target sequence for FLJ20641 (NM_017915.1,1131-1149).
gctaatgctcctaccaaaa

SEQ ID NO: 363920 - DNA, 19 bp, Homo sapiens
  siRNA target sequence for FLJ20641 (NM_017915.1,1132-1150).
ctaatgctcctaccaaaaa

SEQ ID NO: 363921 - DNA, 19 bp, Homo sapiens
  siRNA target sequence for FLJ20641 (NM_017915.1,1201-1219).
cgtctattcttacactttt

SEQ ID NO: 363922 - DNA, 19 bp, Homo sapiens
  siRNA target sequence for FLJ20641 (NM_017915.1,1227-1245).
cccacacaggtgaataatt

SEQ ID NO: 363923 - DNA, 19 bp, Homo sapiens
  siRNA target sequence for FLJ20641 (NM_017915.1,1304-1322).
gaagcaaactttaattaga

SEQ ID NO: 363924 - DNA, 19 bp, Homo sapiens
  siRNA target sequence for FLJ20641 (NM_017915.1,1347-1365).
gatgactacatgataagca

SEQ ID NO: 363925 - DNA, 19 bp, Homo sapiens
  siRNA target sequence for FLJ20641 (NM_017915.1,1376-1394).
gaataatgttaatttagca

SEQ ID NO: 363926 - DNA, 19 bp, Homo sapiens
  siRNA target sequence for FLJ20641 (NM_017915.1,1401-1419).
cctttgtgtgttctttaca

SEQ ID NO: 363927 - DNA, 19 bp, Homo sapiens
  siRNA target sequence for FLJ20641 (NM_017915.1,1453-1471).
ctgttggaagatcaacaat

SEQ ID NO: 363928 - DNA, 19 bp, Homo sapiens
  siRNA target sequence for FLJ20641 (NM_017915.1,1662-1680).
gattcacagaatagattgt

SEQ ID NO: 363929 - DNA, 19 bp, Homo sapiens
  siRNA target sequence for FLJ20641 (NM_017915.1,1679-1697).
gtacggcaaactagctaaa

SEQ ID NO: 363930 - DNA, 19 bp, Homo sapiens
  siRNA target sequence for FLJ20641 (NM_017915.1,1682-1700).
cggcaaactagctaaagta

SEQ ID NO: 363931 - DNA, 19 bp, Homo sapiens
  siRNA target sequence for FLJ20641 (NM_017915.1,1744-1762).
gccaggcaaagttaactca

SEQ ID NO: 363932 - DNA, 19 bp, Homo sapiens
  siRNA target sequence for FLJ20641 (NM_017915.1,1748-1766).
ggcaaagttaactcagttt

SEQ ID NO: 363933 - DNA, 19 bp, Homo sapiens
  siRNA target sequence for FLJ20647 (NM_017918.3,418-436).
cagcagatggcaacatgat

SEQ ID NO: 363934 - DNA, 19 bp, Homo sapiens
  siRNA target sequence for FLJ20647 (NM_017918.3,420-438).
gcagatggcaacatgattt

SEQ ID NO: 363935 - DNA, 19 bp, Homo sapiens
  siRNA target sequence for FLJ20647 (NM_017918.3,442-460).
cttctaccttgatggatat

SEQ ID NO: 363936 - DNA, 19 bp, Homo sapiens
  siRNA target sequence for FLJ20647 (NM_017918.3,448-466).
ccttgatggatattttgct

SEQ ID NO: 363937 - DNA, 19 bp, Homo sapiens
  siRNA target sequence for FLJ20647 (NM_017918.3,455-473).
ggatattttgctaatgaat

SEQ ID NO: 363938 - DNA, 19 bp, Homo sapiens
  siRNA target sequence for FLJ20647 (NM_017918.3,588-606).
ctatttacaatcttgcatt

SEQ ID NO: 363939 - DNA, 19 bp, Homo sapiens
  siRNA target sequence for FLJ20647 (NM_017918.3,595-613).
caatcttgcatttagaaga

SEQ ID NO: 363940 - DNA, 19 bp, Homo sapiens
  siRNA target sequence for FLJ20647 (NM_017918.3,711-729).
cattcggaagccaaaacca

SEQ ID NO: 363941 - DNA, 19 bp, Homo sapiens
  siRNA target sequence for FLJ20647 (NM_017918.3,801-819).
gtgtactcctgggatatca

SEQ ID NO: 363942 - DNA, 19 bp, Homo sapiens
  siRNA target sequence for FLJ20647 (NM_017918.3,882-900).
gtcactcgacaggattata

SEQ ID NO: 363943 - DNA, 19 bp, Homo sapiens
  siRNA target sequence for FLJ20647 (NM_017918.3,884-902).
cactcgacaggattatact

SEQ ID NO: 363944 - DNA, 19 bp, Homo sapiens
  siRNA target sequence for FLJ20647 (NM_017918.3,886-904).
ctcgacaggattatactta

SEQ ID NO: 363945 - DNA, 19 bp, Homo sapiens
  siRNA target sequence for FLJ20647 (NM_017918.3,888-906).
cgacaggattatacttact

SEQ ID NO: 363946 - DNA, 19 bp, Homo sapiens
  siRNA target sequence for FLJ20647 (NM_017918.3,935-953).
gttcttccacaagaaatca

SEQ ID NO: 363947 - DNA, 19 bp, Homo sapiens
  siRNA target sequence for FLJ20647 (NM_017918.3,974-992).
gcagcaatacaacaagtta

SEQ ID NO: 363948 - DNA, 19 bp, Homo sapiens
  siRNA target sequence for FLJ20647 (NM_017918.3,1001-1019).
ccttgctaaggctaaagaa

SEQ ID NO: 363949 - DNA, 19 bp, Homo sapiens
  siRNA target sequence for FLJ20647 (NM_017918.3,1002-1020).
cttgctaaggctaaagaat

SEQ ID NO: 363950 - DNA, 19 bp, Homo sapiens
  siRNA target sequence for FLJ20647 (NM_017918.3,1025-1043).
gaaacaggcgcgtcattct

SEQ ID NO: 363951 - DNA, 19 bp, Homo sapiens
  siRNA target sequence for FLJ20647 (NM_017918.3,1058-1076).
gcaagtagaagaactcaat

SEQ ID NO: 363952 - DNA, 19 bp, Homo sapiens
  siRNA target sequence for URG4 (NM_017920.2,50-68).
gccccagaaataaaagcat

SEQ ID NO: 363953 - DNA, 19 bp, Homo sapiens
  siRNA target sequence for URG4 (NM_017920.2,141-159).
gttatggagatggtacaaa

SEQ ID NO: 363954 - DNA, 19 bp, Homo sapiens
  siRNA target sequence for URG4 (NM_017920.2,161-179).
gaggctcaggacaatgatt

SEQ ID NO: 363955 - DNA, 19 bp, Homo sapiens
  siRNA target sequence for URG4 (NM_017920.2,237-255).
cgtaccaggtccagaaact

SEQ ID NO: 363956 - DNA, 19 bp, Homo sapiens
  siRNA target sequence for URG4 (NM_017920.2,270-288).
ctctgcagatcagttttga

SEQ ID NO: 363957 - DNA, 19 bp, Homo sapiens
  siRNA target sequence for URG4 (NM_017920.2,272-290).
ctgcagatcagttttgaca

SEQ ID NO: 363958 - DNA, 19 bp, Homo sapiens
  siRNA target sequence for URG4 (NM_017920.2,473-491).
gaccttgctgccgacattt

SEQ ID NO: 363959 - DNA, 19 bp, Homo sapiens
  siRNA target sequence for URG4 (NM_017920.2,479-497).
gctgccgacatttattcct

SEQ ID NO: 363960 - DNA, 19 bp, Homo sapiens
  siRNA target sequence for URG4 (NM_017920.2,584-602).
caagaaatagcgttgaaaa

SEQ ID NO: 363961 - DNA, 19 bp, Homo sapiens
  siRNA target sequence for URG4 (NM_017920.2,647-665).
gagaaccactaccatacat

SEQ ID NO: 363962 - DNA, 19 bp, Homo sapiens
  siRNA target sequence for URG4 (NM_017920.2,649-667).
gaaccactaccatacattt

SEQ ID NO: 363963 - DNA, 19 bp, Homo sapiens
  siRNA target sequence for URG4 (NM_017920.2,909-927).
cggatgggttggtagaaat

SEQ ID NO: 363964 - DNA, 19 bp, Homo sapiens
  siRNA target sequence for URG4 (NM_017920.2,914-932).
gggttggtagaaatttcct

SEQ ID NO: 363965 - DNA, 19 bp, Homo sapiens
  siRNA target sequence for URG4 (NM_017920.2,951-969).
gggaggacttggacatttt

SEQ ID NO: 363966 - DNA, 19 bp, Homo sapiens
  siRNA target sequence for URG4 (NM_017920.2,1048-1066).
ctcctccgctgtgtttata

SEQ ID NO: 363967 - DNA, 19 bp, Homo sapiens
  siRNA target sequence for URG4 (NM_017920.2,1157-1175).
cgtgggaagcgcaacacaa

SEQ ID NO: 363968 - DNA, 19 bp, Homo sapiens
  siRNA target sequence for URG4 (NM_017920.2,1353-1371).
gcaaactgggcctaaaggt

SEQ ID NO: 363969 - DNA, 19 bp, Homo sapiens
  siRNA target sequence for URG4 (NM_017920.2,1406-1424).
gaccggatggagaggatta

SEQ ID NO: 363970 - DNA, 19 bp, Homo sapiens
  siRNA target sequence for URG4 (NM_017920.2,1409-1427).
cggatggagaggattacca

SEQ ID NO: 363971 - DNA, 19 bp, Homo sapiens
  siRNA target sequence for URG4 (NM_017920.2,1578-1596).
ggctgctagaacttcgaat

SEQ ID NO: 363972 - DNA, 19 bp, Homo sapiens
  siRNA target sequence for URG4 (NM_017920.2,1623-1641).
cgggggtgcaggagttcat

SEQ ID NO: 363973 - DNA, 19 bp, Homo sapiens
  siRNA target sequence for URG4 (NM_017920.2,1815-1833).
ccctaggggtggaacactt

SEQ ID NO: 363974 - DNA, 19 bp, Homo sapiens
  siRNA target sequence for URG4 (NM_017920.2,1837-1855).
gcgggagatgggacagttt

SEQ ID NO: 363975 - DNA, 19 bp, Homo sapiens
  siRNA target sequence for URG4 (NM_017920.2,1960-1978).
gcctctggagctaatcgat

SEQ ID NO: 363976 - DNA, 19 bp, Homo sapiens
  siRNA target sequence for URG4 (NM_017920.2,2271-2289).
cgtcagctggggacagatt

SEQ ID NO: 363977 - DNA, 19 bp, Homo sapiens
  siRNA target sequence for URG4 (NM_017920.2,2376-2394).
cagctattctgcatgcatt

SEQ ID NO: 363978 - DNA, 19 bp, Homo sapiens
  siRNA target sequence for URG4 (NM_017920.2,2422-2440).
gcccaactaccagtttgta

SEQ ID NO: 363979 - DNA, 19 bp, Homo sapiens
  siRNA target sequence for URG4 (NM_017920.2,2424-2442).
ccaactaccagtttgtata

SEQ ID NO: 363980 - DNA, 19 bp, Homo sapiens
  siRNA target sequence for URG4 (NM_017920.2,2443-2461).
ccagaaccttcatgatgta

SEQ ID NO: 363981 - DNA, 19 bp, Homo sapiens
  siRNA target sequence for URG4 (NM_017920.2,2446-2464).
gaaccttcatgatgtatct

SEQ ID NO: 363982 - DNA, 19 bp, Homo sapiens
  siRNA target sequence for URG4 (NM_017920.2,2678-2696).
gccatatttgaattgaaga

SEQ ID NO: 363983 - DNA, 19 bp, Homo sapiens
  siRNA target sequence for URG4 (NM_017920.2,2697-2715).
gatgcctactcgaaaacat

SEQ ID NO: 363984 - DNA, 19 bp, Homo sapiens
  siRNA target sequence for URG4 (NM_017920.2,2723-2741).
ggcttgtcgaaccaaaaca

SEQ ID NO: 363985 - DNA, 19 bp, Homo sapiens
  siRNA target sequence for URG4 (NM_017920.2,2724-2742).
gcttgtcgaaccaaaacaa

SEQ ID NO: 363986 - DNA, 19 bp, Homo sapiens
  siRNA target sequence for URG4 (NM_017920.2,2725-2743).
cttgtcgaaccaaaacaaa

SEQ ID NO: 363987 - DNA, 19 bp, Homo sapiens
  siRNA target sequence for NPL4 (NM_017921.1,138-156).
cgagagcatcataattcgt

SEQ ID NO: 363988 - DNA, 19 bp, Homo sapiens
  siRNA target sequence for NPL4 (NM_017921.1,237-255).
ggagtttggcttccaaaat

SEQ ID NO: 363989 - DNA, 19 bp, Homo sapiens
  siRNA target sequence for NPL4 (NM_017921.1,238-256).
gagtttggcttccaaaata

SEQ ID NO: 363990 - DNA, 19 bp, Homo sapiens
  siRNA target sequence for NPL4 (NM_017921.1,260-278).
gcttctcggtttacatcaa

SEQ ID NO: 363991 - DNA, 19 bp, Homo sapiens
  siRNA target sequence for NPL4 (NM_017921.1,261-279).
cttctcggtttacatcaat

SEQ ID NO: 363992 - DNA, 19 bp, Homo sapiens
  siRNA target sequence for NPL4 (NM_017921.1,266-284).
cggtttacatcaatagaaa

SEQ ID NO: 363993 - DNA, 19 bp, Homo sapiens
  siRNA target sequence for NPL4 (NM_017921.1,311-329).
ccaacaaatccctcaactt

SEQ ID NO: 363994 - DNA, 19 bp, Homo sapiens
  siRNA target sequence for NPL4 (NM_017921.1,320-338).
ccctcaacttgctaaaaat

SEQ ID NO: 363995 - DNA, 19 bp, Homo sapiens
  siRNA target sequence for NPL4 (NM_017921.1,477-495).
caaacaggacgggaagatt

SEQ ID NO: 363996 - DNA, 19 bp, Homo sapiens
  siRNA target sequence for NPL4 (NM_017921.1,481-499).
caggacgggaagatttaca

SEQ ID NO: 363997 - DNA, 19 bp, Homo sapiens
  siRNA target sequence for NPL4 (NM_017921.1,483-501).
ggacgggaagatttacaga

SEQ ID NO: 363998 - DNA, 19 bp, Homo sapiens
  siRNA target sequence for NPL4 (NM_017921.1,558-576).
ccctctagagccattcgat

SEQ ID NO: 363999 - DNA, 19 bp, Homo sapiens
  siRNA target sequence for NPL4 (NM_017921.1,569-587).
cattcgatgaggactatct

SEQ ID NO: 364000 - DNA, 19 bp, Homo sapiens
  siRNA target sequence for NPL4 (NM_017921.1,733-751).
ccgaatggcatctgtacta

SEQ ID NO: 364001 - DNA, 19 bp, Homo sapiens
  siRNA target sequence for NPL4 (NM_017921.1,734-752).
cgaatggcatctgtactaa

SEQ ID NO: 364002 - DNA, 19 bp, Homo sapiens
  siRNA target sequence for NPL4 (NM_017921.1,773-791).
cgctgaacagacagaagta

SEQ ID NO: 364003 - DNA, 19 bp, Homo sapiens
  siRNA target sequence for NPL4 (NM_017921.1,802-820).
gacaatatcatgtttgaga

SEQ ID NO: 364004 - DNA, 19 bp, Homo sapiens
  siRNA target sequence for NPL4 (NM_017921.1,804-822).
caatatcatgtttgagaat

SEQ ID NO: 364005 - DNA, 19 bp, Homo sapiens
  siRNA target sequence for NPL4 (NM_017921.1,828-846).
cgtcgctgaccgctttctt

SEQ ID NO: 364006 - DNA, 19 bp, Homo sapiens
  siRNA target sequence for NPL4 (NM_017921.1,833-851).
ctgaccgctttcttgactt

SEQ ID NO: 364007 - DNA, 19 bp, Homo sapiens
  siRNA target sequence for NPL4 (NM_017921.1,935-953).
ctgaagtggctgcgattta

SEQ ID NO: 364008 - DNA, 19 bp, Homo sapiens
  siRNA target sequence for NPL4 (NM_017921.1,955-973).
gagccacctcagattggta

SEQ ID NO: 364009 - DNA, 19 bp, Homo sapiens
  siRNA target sequence for NPL4 (NM_017921.1,990-1008).
gcttcttgaggatccaaaa

SEQ ID NO: 364010 - DNA, 19 bp, Homo sapiens
  siRNA target sequence for NPL4 (NM_017921.1,1048-1066).
cggaaggttggctggatat

SEQ ID NO: 364011 - DNA, 19 bp, Homo sapiens
  siRNA target sequence for NPL4 (NM_017921.1,1104-1122).
cgtccgctacagtcgaaat

SEQ ID NO: 364012 - DNA, 19 bp, Homo sapiens
  siRNA target sequence for NPL4 (NM_017921.1,1117-1135).
cgaaataaggacacctatt

SEQ ID NO: 364013 - DNA, 19 bp, Homo sapiens
  siRNA target sequence for NPL4 (NM_017921.1,1118-1136).
gaaataaggacacctattt

SEQ ID NO: 364014 - DNA, 19 bp, Homo sapiens
  siRNA target sequence for NPL4 (NM_017921.1,1126-1144).
gacacctatttcctaagtt

SEQ ID NO: 364015 - DNA, 19 bp, Homo sapiens
  siRNA target sequence for NPL4 (NM_017921.1,1128-1146).
cacctatttcctaagttca

SEQ ID NO: 364016 - DNA, 19 bp, Homo sapiens
  siRNA target sequence for NPL4 (NM_017921.1,1203-1221).
ctctccagacggacatttt

SEQ ID NO: 364017 - DNA, 19 bp, Homo sapiens
  siRNA target sequence for NPL4 (NM_017921.1,1392-1410).
cgtgcctgatgtgttttat

SEQ ID NO: 364018 - DNA, 19 bp, Homo sapiens
  siRNA target sequence for NPL4 (NM_017921.1,1393-1411).
gtgcctgatgtgttttata

SEQ ID NO: 364019 - DNA, 19 bp, Homo sapiens
  siRNA target sequence for NPL4 (NM_017921.1,1459-1477).
ctgcctgtggagtatctca

SEQ ID NO: 364020 - DNA, 19 bp, Homo sapiens
  siRNA target sequence for NPL4 (NM_017921.1,1479-1497).
catagacatcacaacaact

SEQ ID NO: 364021 - DNA, 19 bp, Homo sapiens
  siRNA target sequence for NPL4 (NM_017921.1,1501-1519).
cccaaggatccagtttaca

SEQ ID NO: 364022 - DNA, 19 bp, Homo sapiens
  siRNA target sequence for NPL4 (NM_017921.1,1510-1528).
ccagtttacactttttcta

SEQ ID NO: 364023 - DNA, 19 bp, Homo sapiens
  siRNA target sequence for NPL4 (NM_017921.1,1532-1550).
cgcaaaatccatttcctat

SEQ ID NO: 364024 - DNA, 19 bp, Homo sapiens
  siRNA target sequence for NPL4 (NM_017921.1,1573-1591).
gagacacaggacttccata

SEQ ID NO: 364025 - DNA, 19 bp, Homo sapiens
  siRNA target sequence for NPL4 (NM_017921.1,1577-1595).
cacaggacttccatagctt

SEQ ID NO: 364026 - DNA, 19 bp, Homo sapiens
  siRNA target sequence for NPL4 (NM_017921.1,1669-1687).
ctggtcaccaatgaagtta

SEQ ID NO: 364027 - DNA, 19 bp, Homo sapiens
  siRNA target sequence for NPL4 (NM_017921.1,1722-1740).
ggccgtgcggaccagaaat

SEQ ID NO: 364028 - DNA, 19 bp, Homo sapiens
  siRNA target sequence for NPL4 (NM_017921.1,1891-1909).
cagcactgcacgttcatga

SEQ ID NO: 364029 - DNA, 19 bp, Homo sapiens
  siRNA target sequence for FLJ20668 (NM_017923.1,15-33).
cagcagccacgtttgttgt

SEQ ID NO: 364030 - DNA, 19 bp, Homo sapiens
  siRNA target sequence for FLJ20668 (NM_017923.1,17-35).
gcagccacgtttgttgtaa

SEQ ID NO: 364031 - DNA, 19 bp, Homo sapiens
  siRNA target sequence for FLJ20668 (NM_017923.1,18-36).
cagccacgtttgttgtaat

SEQ ID NO: 364032 - DNA, 19 bp, Homo sapiens
  siRNA target sequence for FLJ20668 (NM_017923.1,60-78).
caagatatcaaccatgtat

SEQ ID NO: 364033 - DNA, 19 bp, Homo sapiens
  siRNA target sequence for FLJ20668 (NM_017923.1,71-89).
ccatgtattaccttaacca

SEQ ID NO: 364034 - DNA, 19 bp, Homo sapiens
  siRNA target sequence for FLJ20668 (NM_017923.1,72-90).
catgtattaccttaaccaa

SEQ ID NO: 364035 - DNA, 19 bp, Homo sapiens
  siRNA target sequence for FLJ20668 (NM_017923.1,88-106).
caagatgccaaattatcta

SEQ ID NO: 364036 - DNA, 19 bp, Homo sapiens
  siRNA target sequence for FLJ20668 (NM_017923.1,91-109).
gatgccaaattatctaact

SEQ ID NO: 364037 - DNA, 19 bp, Homo sapiens
  siRNA target sequence for FLJ20668 (NM_017923.1,94-112).
gccaaattatctaacttgt

SEQ ID NO: 364038 - DNA, 19 bp, Homo sapiens
  siRNA target sequence for FLJ20668 (NM_017923.1,300-318).
gataaagagctcagataca

SEQ ID NO: 364039 - DNA, 19 bp, Homo sapiens
  siRNA target sequence for FLJ20668 (NM_017923.1,465-483).
ggtttggtctttgtatgta

SEQ ID NO: 364040 - DNA, 19 bp, Homo sapiens
  siRNA target sequence for FLJ20668 (NM_017923.1,466-484).
gtttggtctttgtatgtat

SEQ ID NO: 364041 - DNA, 19 bp, Homo sapiens
  siRNA target sequence for FLJ20668 (NM_017923.1,471-489).
gtctttgtatgtattgata

SEQ ID NO: 364042 - DNA, 19 bp, Homo sapiens
  siRNA target sequence for FLJ20668 (NM_017923.1,493-511).
cggacagcggaggaaatca

SEQ ID NO: 364043 - DNA, 19 bp, Homo sapiens
  siRNA target sequence for FLJ20668 (NM_017923.1,532-550).
gtccttgaatggccatttt

SEQ ID NO: 364044 - DNA, 19 bp, Homo sapiens
  siRNA target sequence for FLJ20668 (NM_017923.1,542-560).
ggccattttggacaaaact

SEQ ID NO: 364045 - DNA, 19 bp, Homo sapiens
  siRNA target sequence for FLJ20668 (NM_017923.1,584-602).
caggaggtcttgtcttcat

SEQ ID NO: 364046 - DNA, 19 bp, Homo sapiens
  siRNA target sequence for FLJ20668 (NM_017923.1,606-624).
cgtacagtgtaaagtctat

SEQ ID NO: 364047 - DNA, 19 bp, Homo sapiens
  siRNA target sequence for FLJ20668 (NM_017923.1,705-723).
gaagaacttctcatgtaat

SEQ ID NO: 364048 - DNA, 19 bp, Homo sapiens
  siRNA target sequence for FLJ20668 (NM_017923.1,708-726).
gaacttctcatgtaatgta

SEQ ID NO: 364049 - DNA, 19 bp, Homo sapiens
  siRNA target sequence for FLJ20668 (NM_017923.1,763-781).
ccacaaacaggtgcaaatt

SEQ ID NO: 364050 - DNA, 19 bp, Homo sapiens
  siRNA target sequence for C14orf119 (NM_017924.2,62-80).
cttcaatgccactatcctt

SEQ ID NO: 364051 - DNA, 19 bp, Homo sapiens
  siRNA target sequence for C14orf119 (NM_017924.2,94-112).
ccctcagtaccacacaata

SEQ ID NO: 364052 - DNA, 19 bp, Homo sapiens
  siRNA target sequence for C14orf119 (NM_017924.2,96-114).
ctcagtaccacacaatact

SEQ ID NO: 364053 - DNA, 19 bp, Homo sapiens
  siRNA target sequence for C14orf119 (NM_017924.2,98-116).
cagtaccacacaatactaa

SEQ ID NO: 364054 - DNA, 19 bp, Homo sapiens
  siRNA target sequence for C14orf119 (NM_017924.2,194-212).
gtccccagcgtgaacgttt

SEQ ID NO: 364055 - DNA, 19 bp, Homo sapiens
  siRNA target sequence for C14orf119 (NM_017924.2,198-216).
ccagcgtgaacgtttccta

SEQ ID NO: 364056 - DNA, 19 bp, Homo sapiens
  siRNA target sequence for C14orf119 (NM_017924.2,236-254).
cagtgccagaaaaattaca

SEQ ID NO: 364057 - DNA, 19 bp, Homo sapiens
  siRNA target sequence for C14orf119 (NM_017924.2,296-314).
cagaccgaccaccttctat

SEQ ID NO: 364058 - DNA, 19 bp, Homo sapiens
  siRNA target sequence for C14orf119 (NM_017924.2,298-316).
gaccgaccaccttctatct

SEQ ID NO: 364059 - DNA, 19 bp, Homo sapiens
  siRNA target sequence for C14orf119 (NM_017924.2,300-318).
ccgaccaccttctatcttt

SEQ ID NO: 364060 - DNA, 19 bp, Homo sapiens
  siRNA target sequence for C14orf119 (NM_017924.2,319-337).
gagtgccagctacatcttt

SEQ ID NO: 364061 - DNA, 19 bp, Homo sapiens
  siRNA target sequence for C14orf119 (NM_017924.2,364-382).
gagcaggagcgcaatgaat

SEQ ID NO: 364062 - DNA, 19 bp, Homo sapiens
  siRNA target sequence for C14orf119 (NM_017924.2,370-388).
gagcgcaatgaatttgtca

SEQ ID NO: 364063 - DNA, 19 bp, Homo sapiens
  siRNA target sequence for C9orf55 (NM_017925.3,248-266).
gctgttgtagctatgatct

SEQ ID NO: 364064 - DNA, 19 bp, Homo sapiens
  siRNA target sequence for C9orf55 (NM_017925.3,249-267).
ctgttgtagctatgatctt

SEQ ID NO: 364065 - DNA, 19 bp, Homo sapiens
  siRNA target sequence for C9orf55 (NM_017925.3,275-293).
cagtggcaatgcccatata

SEQ ID NO: 364066 - DNA, 19 bp, Homo sapiens
  siRNA target sequence for C9orf55 (NM_017925.3,277-295).
gtggcaatgcccatatatt

SEQ ID NO: 364067 - DNA, 19 bp, Homo sapiens
  siRNA target sequence for C9orf55 (NM_017925.3,326-344).
cttagtgcacctttaccat

SEQ ID NO: 364068 - DNA, 19 bp, Homo sapiens
  siRNA target sequence for C9orf55 (NM_017925.3,330-348).
gtgcacctttaccatttat

SEQ ID NO: 364069 - DNA, 19 bp, Homo sapiens
  siRNA target sequence for C9orf55 (NM_017925.3,333-351).
cacctttaccatttatagt

SEQ ID NO: 364070 - DNA, 19 bp, Homo sapiens
  siRNA target sequence for C9orf55 (NM_017925.3,353-371).
ggagttgactcaaggtatt

SEQ ID NO: 364071 - DNA, 19 bp, Homo sapiens
  siRNA target sequence for C9orf55 (NM_017925.3,354-372).
gagttgactcaaggtattt

SEQ ID NO: 364072 - DNA, 19 bp, Homo sapiens
  siRNA target sequence for C9orf55 (NM_017925.3,361-379).
ctcaaggtattttgatctt

SEQ ID NO: 364073 - DNA, 19 bp, Homo sapiens
  siRNA target sequence for C9orf55 (NM_017925.3,405-423).
gcattgacttggatacgaa

SEQ ID NO: 364074 - DNA, 19 bp, Homo sapiens
  siRNA target sequence for C9orf55 (NM_017925.3,410-428).
gacttggatacgaacatgt

SEQ ID NO: 364075 - DNA, 19 bp, Homo sapiens
  siRNA target sequence for C9orf55 (NM_017925.3,412-430).
cttggatacgaacatgtta

SEQ ID NO: 364076 - DNA, 19 bp, Homo sapiens
  siRNA target sequence for C9orf55 (NM_017925.3,415-433).
ggatacgaacatgttatat

SEQ ID NO: 364077 - DNA, 19 bp, Homo sapiens
  siRNA target sequence for C9orf55 (NM_017925.3,424-442).
catgttatatgtatcagat

SEQ ID NO: 364078 - DNA, 19 bp, Homo sapiens
  siRNA target sequence for C9orf55 (NM_017925.3,427-445).
gttatatgtatcagatgaa

SEQ ID NO: 364079 - DNA, 19 bp, Homo sapiens
  siRNA target sequence for C9orf55 (NM_017925.3,481-499).
gccgtgcaaaaatctactt

SEQ ID NO: 364080 - DNA, 19 bp, Homo sapiens
  siRNA target sequence for C9orf55 (NM_017925.3,482-500).
ccgtgcaaaaatctactta

SEQ ID NO: 364081 - DNA, 19 bp, Homo sapiens
  siRNA target sequence for C9orf55 (NM_017925.3,494-512).
ctacttagcaccttaaaga

SEQ ID NO: 364082 - DNA, 19 bp, Homo sapiens
  siRNA target sequence for C9orf55 (NM_017925.3,501-519).
gcaccttaaagaaattgta

SEQ ID NO: 364083 - DNA, 19 bp, Homo sapiens
  siRNA target sequence for C9orf55 (NM_017925.3,502-520).
caccttaaagaaattgtat

SEQ ID NO: 364084 - DNA, 19 bp, Homo sapiens
  siRNA target sequence for C9orf55 (NM_017925.3,554-572).
gaaggctcagcgattgaca

SEQ ID NO: 364085 - DNA, 19 bp, Homo sapiens
  siRNA target sequence for C9orf55 (NM_017925.3,565-583).
gattgacatgactccaatt

SEQ ID NO: 364086 - DNA, 19 bp, Homo sapiens
  siRNA target sequence for C9orf55 (NM_017925.3,649-667).
gcgctttatggcgtctatt

SEQ ID NO: 364087 - DNA, 19 bp, Homo sapiens
  siRNA target sequence for C9orf55 (NM_017925.3,650-668).
cgctttatggcgtctattt

SEQ ID NO: 364088 - DNA, 19 bp, Homo sapiens
  siRNA target sequence for C9orf55 (NM_017925.3,652-670).
ctttatggcgtctatttta

SEQ ID NO: 364089 - DNA, 19 bp, Homo sapiens
  siRNA target sequence for C9orf55 (NM_017925.3,746-764).
gaccgacagggatttttaa

SEQ ID NO: 364090 - DNA, 19 bp, Homo sapiens
  siRNA target sequence for C9orf55 (NM_017925.3,773-791).
gatcgtgcctatgcaaaat

SEQ ID NO: 364091 - DNA, 19 bp, Homo sapiens
  siRNA target sequence for C9orf55 (NM_017925.3,776-794).
cgtgcctatgcaaaattct

SEQ ID NO: 364092 - DNA, 19 bp, Homo sapiens
  siRNA target sequence for C9orf55 (NM_017925.3,779-797).
gcctatgcaaaattctata

SEQ ID NO: 364093 - DNA, 19 bp, Homo sapiens
  siRNA target sequence for C9orf55 (NM_017925.3,798-816).
cccttttatccaaaacaca

SEQ ID NO: 364094 - DNA, 19 bp, Homo sapiens
  siRNA target sequence for C9orf55 (NM_017925.3,846-864).
gttttgtaagtgataaaga

SEQ ID NO: 364095 - DNA, 19 bp, Homo sapiens
  siRNA target sequence for C9orf55 (NM_017925.3,870-888).
gattagcattttttgatga

SEQ ID NO: 364096 - DNA, 19 bp, Homo sapiens
  siRNA target sequence for C9orf55 (NM_017925.3,887-905).
gactgcatagaaaagttgt

SEQ ID NO: 364097 - DNA, 19 bp, Homo sapiens
  siRNA target sequence for C9orf55 (NM_017925.3,930-948).
cagataaggttgattttga

SEQ ID NO: 364098 - DNA, 19 bp, Homo sapiens
  siRNA target sequence for C9orf55 (NM_017925.3,963-981).
ccagattgatagaactaga

SEQ ID NO: 364099 - DNA, 19 bp, Homo sapiens
  siRNA target sequence for C9orf55 (NM_017925.3,966-984).
gattgatagaactagatga

SEQ ID NO: 364100 - DNA, 19 bp, Homo sapiens
  siRNA target sequence for C9orf55 (NM_017925.3,970-988).
gatagaactagatgattca

SEQ ID NO: 364101 - DNA, 19 bp, Homo sapiens
  siRNA target sequence for C9orf55 (NM_017925.3,1049-1067).
gacctgtcaccaaagtaca

SEQ ID NO: 364102 - DNA, 19 bp, Homo sapiens
  siRNA target sequence for C9orf55 (NM_017925.3,1059-1077).
caaagtacagttacaaata

SEQ ID NO: 364103 - DNA, 19 bp, Homo sapiens
  siRNA target sequence for C9orf55 (NM_017925.3,1083-1101).
caagactggaccttaagct

SEQ ID NO: 364104 - DNA, 19 bp, Homo sapiens
  siRNA target sequence for C9orf55 (NM_017925.3,1108-1126).
cagaccgcaggagttgaaa

SEQ ID NO: 364105 - DNA, 19 bp, Homo sapiens
  siRNA target sequence for C9orf55 (NM_017925.3,1110-1128).
gaccgcaggagttgaaact

SEQ ID NO: 364106 - DNA, 19 bp, Homo sapiens
  siRNA target sequence for C9orf55 (NM_017925.3,1112-1130).
ccgcaggagttgaaacttt

SEQ ID NO: 364107 - DNA, 19 bp, Homo sapiens
  siRNA target sequence for C9orf55 (NM_017925.3,1153-1171).
gaatagcattacaaagagt

SEQ ID NO: 364108 - DNA, 19 bp, Homo sapiens
  siRNA target sequence for C9orf55 (NM_017925.3,1217-1235).
cataaattggcgaagagat

SEQ ID NO: 364109 - DNA, 19 bp, Homo sapiens
  siRNA target sequence for C9orf55 (NM_017925.3,1258-1276).
ggccaagtgtctgtttagt

SEQ ID NO: 364110 - DNA, 19 bp, Homo sapiens
  siRNA target sequence for C9orf55 (NM_017925.3,1264-1282).
gtgtctgtttagtcattgt

SEQ ID NO: 364111 - DNA, 19 bp, Homo sapiens
  siRNA target sequence for C9orf55 (NM_017925.3,1268-1286).
ctgtttagtcattgttaca

SEQ ID NO: 364112 - DNA, 19 bp, Homo sapiens
  siRNA target sequence for C9orf55 (NM_017925.3,1307-1325).
ccggcctatgttagagttt

SEQ ID NO: 364113 - DNA, 19 bp, Homo sapiens
  siRNA target sequence for C9orf55 (NM_017925.3,1309-1327).
ggcctatgttagagtttct

SEQ ID NO: 364114 - DNA, 19 bp, Homo sapiens
  siRNA target sequence for C9orf55 (NM_017925.3,1312-1330).
ctatgttagagtttctcat

SEQ ID NO: 364115 - DNA, 19 bp, Homo sapiens
  siRNA target sequence for C9orf55 (NM_017925.3,1322-1340).
gtttctcatcctaaagtca

SEQ ID NO: 364116 - DNA, 19 bp, Homo sapiens
  siRNA target sequence for C9orf55 (NM_017925.3,1344-1362).
cacttcagcaggcatatga

SEQ ID NO: 364117 - DNA, 19 bp, Homo sapiens
  siRNA target sequence for C9orf55 (NM_017925.3,1351-1369).
gcaggcatatgatgtactt

SEQ ID NO: 364118 - DNA, 19 bp, Homo sapiens
  siRNA target sequence for C9orf55 (NM_017925.3,1352-1370).
caggcatatgatgtactta

SEQ ID NO: 364119 - DNA, 19 bp, Homo sapiens
  siRNA target sequence for C9orf55 (NM_017925.3,1497-1515).
ggataaagcctaatgctat

SEQ ID NO: 364120 - DNA, 19 bp, Homo sapiens
  siRNA target sequence for C9orf55 (NM_017925.3,1498-1516).
gataaagcctaatgctatt

SEQ ID NO: 364121 - DNA, 19 bp, Homo sapiens
  siRNA target sequence for C9orf55 (NM_017925.3,1504-1522).
gcctaatgctattacttat

SEQ ID NO: 364122 - DNA, 19 bp, Homo sapiens
  siRNA target sequence for C9orf55 (NM_017925.3,1564-1582).
cagtacccgcagtggtatt

SEQ ID NO: 364123 - DNA, 19 bp, Homo sapiens
  siRNA target sequence for C9orf55 (NM_017925.3,1566-1584).
gtacccgcagtggtatttt

SEQ ID NO: 364124 - DNA, 19 bp, Homo sapiens
  siRNA target sequence for C9orf55 (NM_017925.3,1569-1587).
cccgcagtggtattttctt

SEQ ID NO: 364125 - DNA, 19 bp, Homo sapiens
  siRNA target sequence for C9orf55 (NM_017925.3,1571-1589).
cgcagtggtattttcttat

SEQ ID NO: 364126 - DNA, 19 bp, Homo sapiens
  siRNA target sequence for C9orf55 (NM_017925.3,1613-1631).
cgtggcttggcacagttta

SEQ ID NO: 364127 - DNA, 19 bp, Homo sapiens
  siRNA target sequence for C9orf55 (NM_017925.3,1627-1645).
gtttaggcagccgcttaaa

SEQ ID NO: 364128 - DNA, 19 bp, Homo sapiens
  siRNA target sequence for C9orf55 (NM_017925.3,1660-1678).
gtcacaggtctcctcaata

SEQ ID NO: 364129 - DNA, 19 bp, Homo sapiens
  siRNA target sequence for C9orf55 (NM_017925.3,1686-1704).
gtcagtctgaccaaggata

SEQ ID NO: 364130 - DNA, 19 bp, Homo sapiens
  siRNA target sequence for C9orf55 (NM_017925.3,1705-1723).
cgggtctaaggatgaactt

SEQ ID NO: 364131 - DNA, 19 bp, Homo sapiens
  siRNA target sequence for C9orf55 (NM_017925.3,1706-1724).
gggtctaaggatgaactta

SEQ ID NO: 364132 - DNA, 19 bp, Homo sapiens
  siRNA target sequence for C9orf55 (NM_017925.3,1714-1732).
ggatgaacttataaaggat

SEQ ID NO: 364133 - DNA, 19 bp, Homo sapiens
  siRNA target sequence for C9orf55 (NM_017925.3,1812-1830).
gtgatgcctctgctattgt

SEQ ID NO: 364134 - DNA, 19 bp, Homo sapiens
  siRNA target sequence for C9orf55 (NM_017925.3,1821-1839).
ctgctattgtggcaaaaca

SEQ ID NO: 364135 - DNA, 19 bp, Homo sapiens
  siRNA target sequence for C9orf55 (NM_017925.3,1858-1876).
gcctcacagtcctactgaa

SEQ ID NO: 364136 - DNA, 19 bp, Homo sapiens
  siRNA target sequence for C9orf55 (NM_017925.3,1884-1902).
catggggcagcagtattgt

SEQ ID NO: 364137 - DNA, 19 bp, Homo sapiens
  siRNA target sequence for C9orf55 (NM_017925.3,1890-1908).
gcagcagtattgtgaaagt

SEQ ID NO: 364138 - DNA, 19 bp, Homo sapiens
  siRNA target sequence for C9orf55 (NM_017925.3,1903-1921).
gaaagttccgtctggtata

SEQ ID NO: 364139 - DNA, 19 bp, Homo sapiens
  siRNA target sequence for C9orf55 (NM_017925.3,1947-1965).
gcactggtagtatatcaaa

SEQ ID NO: 364140 - DNA, 19 bp, Homo sapiens
  siRNA target sequence for C9orf55 (NM_017925.3,2005-2023).
ctttggcgaagctactaat

SEQ ID NO: 364141 - DNA, 19 bp, Homo sapiens
  siRNA target sequence for C9orf55 (NM_017925.3,2009-2027).
ggcgaagctactaatctca

SEQ ID NO: 364142 - DNA, 19 bp, Homo sapiens
  siRNA target sequence for C9orf55 (NM_017925.3,2010-2028).
gcgaagctactaatctcaa

SEQ ID NO: 364143 - DNA, 19 bp, Homo sapiens
  siRNA target sequence for C9orf55 (NM_017925.3,2069-2087).
cctgagaggagttgtagtt

SEQ ID NO: 364144 - DNA, 19 bp, Homo sapiens
  siRNA target sequence for C9orf55 (NM_017925.3,2070-2088).
ctgagaggagttgtagttt

SEQ ID NO: 364145 - DNA, 19 bp, Homo sapiens
  siRNA target sequence for C9orf55 (NM_017925.3,2072-2090).
gagaggagttgtagtttta

SEQ ID NO: 364146 - DNA, 19 bp, Homo sapiens
  siRNA target sequence for C9orf55 (NM_017925.3,2074-2092).
gaggagttgtagttttagt

SEQ ID NO: 364147 - DNA, 19 bp, Homo sapiens
  siRNA target sequence for C9orf55 (NM_017925.3,2103-2121).
gagcaggaatgttgcttaa

SEQ ID NO: 364148 - DNA, 19 bp, Homo sapiens
  siRNA target sequence for C9orf55 (NM_017925.3,2134-2152).
ggattcgaattcaagtgaa

SEQ ID NO: 364149 - DNA, 19 bp, Homo sapiens
  siRNA target sequence for C9orf55 (NM_017925.3,2135-2153).
gattcgaattcaagtgaaa

SEQ ID NO: 364150 - DNA, 19 bp, Homo sapiens
  siRNA target sequence for C9orf55 (NM_017925.3,2145-2163).
caagtgaaatggctatcat

SEQ ID NO: 364151 - DNA, 19 bp, Homo sapiens
  siRNA target sequence for C9orf55 (NM_017925.3,2169-2187).
gagcagatgccaagattct

SEQ ID NO: 364152 - DNA, 19 bp, Homo sapiens
  siRNA target sequence for C9orf55 (NM_017925.3,2235-2253).
gaacccatagctttgagaa

SEQ ID NO: 364153 - DNA, 19 bp, Homo sapiens
  siRNA target sequence for C9orf55 (NM_017925.3,2240-2258).
catagctttgagaatgtta

SEQ ID NO: 364154 - DNA, 19 bp, Homo sapiens
  siRNA target sequence for C9orf55 (NM_017925.3,2270-2288).
cctgatagtaggacttgta

SEQ ID NO: 364155 - DNA, 19 bp, Homo sapiens
  siRNA target sequence for C9orf55 (NM_017925.3,2271-2289).
ctgatagtaggacttgtat

SEQ ID NO: 364156 - DNA, 19 bp, Homo sapiens
  siRNA target sequence for C9orf55 (NM_017925.3,2273-2291).
gatagtaggacttgtatgt

SEQ ID NO: 364157 - DNA, 19 bp, Homo sapiens
  siRNA target sequence for C9orf55 (NM_017925.3,2374-2392).
ggttgatgacgtacctaaa

SEQ ID NO: 364158 - DNA, 19 bp, Homo sapiens
  siRNA target sequence for C9orf55 (NM_017925.3,2378-2396).
gatgacgtacctaaaacta

SEQ ID NO: 364159 - DNA, 19 bp, Homo sapiens
  siRNA target sequence for C9orf55 (NM_017925.3,2397-2415).
ctgcaacagtagatacata

SEQ ID NO: 364160 - DNA, 19 bp, Homo sapiens
  siRNA target sequence for C9orf55 (NM_017925.3,2419-2437).
gagtctactaagtgatagt

SEQ ID NO: 364161 - DNA, 19 bp, Homo sapiens
  siRNA target sequence for C9orf55 (NM_017925.3,2421-2439).
gtctactaagtgatagtaa

SEQ ID NO: 364162 - DNA, 19 bp, Homo sapiens
  siRNA target sequence for C9orf55 (NM_017925.3,2491-2509).
gagaagtagtttatatggt

SEQ ID NO: 364163 - DNA, 19 bp, Homo sapiens
  siRNA target sequence for C9orf55 (NM_017925.3,2499-2517).
gtttatatggtattgctaa

SEQ ID NO: 364164 - DNA, 19 bp, Homo sapiens
  siRNA target sequence for C9orf55 (NM_017925.3,2564-2582).
cttttagccactgaatgta

SEQ ID NO: 364165 - DNA, 19 bp, Homo sapiens
  siRNA target sequence for C9orf55 (NM_017925.3,2625-2643).
cagttattgcacgtaatct

SEQ ID NO: 364166 - DNA, 19 bp, Homo sapiens
  siRNA target sequence for C9orf55 (NM_017925.3,2636-2654).
cgtaatctggctgatgaaa

SEQ ID NO: 364167 - DNA, 19 bp, Homo sapiens
  siRNA target sequence for C9orf55 (NM_017925.3,2637-2655).
gtaatctggctgatgaaat

SEQ ID NO: 364168 - DNA, 19 bp, Homo sapiens
  siRNA target sequence for C9orf55 (NM_017925.3,2646-2664).
ctgatgaaatagaaagcta

SEQ ID NO: 364169 - DNA, 19 bp, Homo sapiens
  siRNA target sequence for C9orf55 (NM_017925.3,2662-2680).
ctatatgaacctaaaaagt

SEQ ID NO: 364170 - DNA, 19 bp, Homo sapiens
  siRNA target sequence for C9orf55 (NM_017925.3,2683-2701).
cctaggtagtaaatcttct

SEQ ID NO: 364171 - DNA, 19 bp, Homo sapiens
  siRNA target sequence for C9orf55 (NM_017925.3,2684-2702).
ctaggtagtaaatcttcta

SEQ ID NO: 364172 - DNA, 19 bp, Homo sapiens
  siRNA target sequence for C9orf55 (NM_017925.3,2687-2705).
ggtagtaaatcttctagta

SEQ ID NO: 364173 - DNA, 19 bp, Homo sapiens
  siRNA target sequence for C9orf55 (NM_017925.3,2688-2706).
gtagtaaatcttctagtat

SEQ ID NO: 364174 - DNA, 19 bp, Homo sapiens
  siRNA target sequence for C9orf55 (NM_017925.3,2738-2756).
ggcatgactactgcattta

SEQ ID NO: 364175 - DNA, 19 bp, Homo sapiens
  siRNA target sequence for C9orf55 (NM_017925.3,2743-2761).
gactactgcatttattcat

SEQ ID NO: 364176 - DNA, 19 bp, Homo sapiens
  siRNA target sequence for C9orf55 (NM_017925.3,2772-2790).
ggagatcaagcctaccttt

SEQ ID NO: 364177 - DNA, 19 bp, Homo sapiens
  siRNA target sequence for C9orf55 (NM_017925.3,2773-2791).
gagatcaagcctaccttta

SEQ ID NO: 364178 - DNA, 19 bp, Homo sapiens
  siRNA target sequence for C9orf55 (NM_017925.3,2775-2793).
gatcaagcctacctttaga

SEQ ID NO: 364179 - DNA, 19 bp, Homo sapiens
  siRNA target sequence for C9orf55 (NM_017925.3,2778-2796).
caagcctacctttagatca

SEQ ID NO: 364180 - DNA, 19 bp, Homo sapiens
  siRNA target sequence for C9orf55 (NM_017925.3,2799-2817).
gttcaccagcacaggaaaa

SEQ ID NO: 364181 - DNA, 19 bp, Homo sapiens
  siRNA target sequence for C9orf55 (NM_017925.3,2862-2880).
cttttactgggcgtttcaa

SEQ ID NO: 364182 - DNA, 19 bp, Homo sapiens
  siRNA target sequence for C9orf55 (NM_017925.3,2889-2907).
ccccctctcgaactcataa

SEQ ID NO: 364183 - DNA, 19 bp, Homo sapiens
  siRNA target sequence for C9orf55 (NM_017925.3,2903-2921).
cataaagaacgttcaactt

SEQ ID NO: 364184 - DNA, 19 bp, Homo sapiens
  siRNA target sequence for C9orf55 (NM_017925.3,2956-2974).
ctcgttgggttctgtagta

SEQ ID NO: 364185 - DNA, 19 bp, Homo sapiens
  siRNA target sequence for C9orf55 (NM_017925.3,2958-2976).
cgttgggttctgtagtaaa

SEQ ID NO: 364186 - DNA, 19 bp, Homo sapiens
  siRNA target sequence for C9orf55 (NM_017925.3,2979-2997).
ctttgtcagggctaaagct

SEQ ID NO: 364187 - DNA, 19 bp, Homo sapiens
  siRNA target sequence for C9orf55 (NM_017925.3,2985-3003).
cagggctaaagctggataa

SEQ ID NO: 364188 - DNA, 19 bp, Homo sapiens
  siRNA target sequence for C9orf55 (NM_017925.3,2988-3006).
ggctaaagctggataatat

SEQ ID NO: 364189 - DNA, 19 bp, Homo sapiens
  siRNA target sequence for C9orf55 (NM_017925.3,2989-3007).
gctaaagctggataatata

SEQ ID NO: 364190 - DNA, 19 bp, Homo sapiens
  siRNA target sequence for C9orf55 (NM_017925.3,3012-3030).
cagggcccaagatagatgt

SEQ ID NO: 364191 - DNA, 19 bp, Homo sapiens
  siRNA target sequence for C9orf55 (NM_017925.3,3034-3052).
gaaatctggtatgaaacaa

SEQ ID NO: 364192 - DNA, 19 bp, Homo sapiens
  siRNA target sequence for C9orf55 (NM_017925.3,3057-3075).
cgacagtagccagtaagat

SEQ ID NO: 364193 - DNA, 19 bp, Homo sapiens
  siRNA target sequence for C9orf55 (NM_017925.3,3097-3115).
ctacagctactcagatgat

SEQ ID NO: 364194 - DNA, 19 bp, Homo sapiens
  siRNA target sequence for C9orf55 (NM_017925.3,3152-3170).
ggcctagaagaccatattt

SEQ ID NO: 364195 - DNA, 19 bp, Homo sapiens
  siRNA target sequence for C9orf55 (NM_017925.3,3178-3196).
gaatatatcgcctaacaca

SEQ ID NO: 364196 - DNA, 19 bp, Homo sapiens
  siRNA target sequence for C9orf55 (NM_017925.3,3187-3205).
gcctaacacaagtatctca

SEQ ID NO: 364197 - DNA, 19 bp, Homo sapiens
  siRNA target sequence for C9orf55 (NM_017925.3,3208-3226).
gttggtccccagtgaactt

SEQ ID NO: 364198 - DNA, 19 bp, Homo sapiens
  siRNA target sequence for C9orf55 (NM_017925.3,3224-3242).
cttacccagagcaacacaa

SEQ ID NO: 364199 - DNA, 19 bp, Homo sapiens
  siRNA target sequence for C9orf55 (NM_017925.3,3229-3247).
ccagagcaacacaagtctt

SEQ ID NO: 364200 - DNA, 19 bp, Homo sapiens
  siRNA target sequence for C9orf55 (NM_017925.3,3275-3293).
ggaaaactgcattatccaa

SEQ ID NO: 364201 - DNA, 19 bp, Homo sapiens
  siRNA target sequence for C9orf55 (NM_017925.3,3291-3309).
caacaggtgaagttccatt

SEQ ID NO: 364202 - DNA, 19 bp, Homo sapiens
  siRNA target sequence for C9orf55 (NM_017925.3,3296-3314).
ggtgaagttccatttccaa

SEQ ID NO: 364203 - DNA, 19 bp, Homo sapiens
  siRNA target sequence for C9orf55 (NM_017925.3,3318-3336).
gcatgaaagggcaagactt

SEQ ID NO: 364204 - DNA, 19 bp, Homo sapiens
  siRNA target sequence for C9orf55 (NM_017925.3,3350-3368).
catggttcttctcaaaata

SEQ ID NO: 364205 - DNA, 19 bp, Homo sapiens
  siRNA target sequence for C9orf55 (NM_017925.3,3396-3414).
gtgcaatggaggttttgat

SEQ ID NO: 364206 - DNA, 19 bp, Homo sapiens
  siRNA target sequence for C9orf55 (NM_017925.3,3570-3588).
gaggttctgcaagcttttt

SEQ ID NO: 364207 - DNA, 19 bp, Homo sapiens
  siRNA target sequence for C9orf55 (NM_017925.3,3600-3618).
gtacctctggtgacagttt

SEQ ID NO: 364208 - DNA, 19 bp, Homo sapiens
  siRNA target sequence for C9orf55 (NM_017925.3,3661-3679).
caaacctgtatccagttta

SEQ ID NO: 364209 - DNA, 19 bp, Homo sapiens
  siRNA target sequence for C9orf55 (NM_017925.3,3788-3806).
ggagatgtccaaactatga

SEQ ID NO: 364210 - DNA, 19 bp, Homo sapiens
  siRNA target sequence for C9orf55 (NM_017925.3,3789-3807).
gagatgtccaaactatgaa

SEQ ID NO: 364211 - DNA, 19 bp, Homo sapiens
  siRNA target sequence for C9orf55 (NM_017925.3,3813-3831).
catctgtgcctaatagttt

SEQ ID NO: 364212 - DNA, 19 bp, Homo sapiens
  siRNA target sequence for C9orf55 (NM_017925.3,3818-3836).
gtgcctaatagtttatcaa

SEQ ID NO: 364213 - DNA, 19 bp, Homo sapiens
  siRNA target sequence for C9orf55 (NM_017925.3,3838-3856).
gcgaaatgtgtctttgact

SEQ ID NO: 364214 - DNA, 19 bp, Homo sapiens
  siRNA target sequence for C9orf55 (NM_017925.3,3873-3891).
gaggcccattgcagaatat

SEQ ID NO: 364215 - DNA, 19 bp, Homo sapiens
  siRNA target sequence for C9orf55 (NM_017925.3,3908-3926).
ccgtttcatggcatctcaa

SEQ ID NO: 364216 - DNA, 19 bp, Homo sapiens
  siRNA target sequence for C9orf55 (NM_017925.3,3914-3932).
catggcatctcaacagtta

SEQ ID NO: 364217 - DNA, 19 bp, Homo sapiens
  siRNA target sequence for C9orf55 (NM_017925.3,3924-3942).
caacagttagtcttccaaa

SEQ ID NO: 364218 - DNA, 19 bp, Homo sapiens
  siRNA target sequence for C9orf55 (NM_017925.3,4006-4024).
ctacttgagtcctctagta

SEQ ID NO: 364219 - DNA, 19 bp, Homo sapiens
  siRNA target sequence for C9orf55 (NM_017925.3,4027-4045).
ccgtaaagaacttgaatct

SEQ ID NO: 364220 - DNA, 19 bp, Homo sapiens
  siRNA target sequence for C9orf55 (NM_017925.3,4028-4046).
cgtaaagaacttgaatctt

SEQ ID NO: 364221 - DNA, 19 bp, Homo sapiens
  siRNA target sequence for C9orf55 (NM_017925.3,4061-4079).
ggtgatcaggtgattcata

SEQ ID NO: 364222 - DNA, 19 bp, Homo sapiens
  siRNA target sequence for C9orf55 (NM_017925.3,4064-4082).
gatcaggtgattcatacat

SEQ ID NO: 364223 - DNA, 19 bp, Homo sapiens
  siRNA target sequence for C9orf55 (NM_017925.3,4067-4085).
caggtgattcatacatctt

SEQ ID NO: 364224 - DNA, 19 bp, Homo sapiens
  siRNA target sequence for C9orf55 (NM_017925.3,4097-4115).
caacatccaatcattttct

SEQ ID NO: 364225 - DNA, 19 bp, Homo sapiens
  siRNA target sequence for C9orf55 (NM_017925.3,4114-4132).
ctggaacctcgtttggtat

SEQ ID NO: 364226 - DNA, 19 bp, Homo sapiens
  siRNA target sequence for C9orf55 (NM_017925.3,4155-4173).
gtaacttgccaggacttat

SEQ ID NO: 364227 - DNA, 19 bp, Homo sapiens
  siRNA target sequence for C9orf55 (NM_017925.3,4179-4197).
catctgaacattgtaatga

SEQ ID NO: 364228 - DNA, 19 bp, Homo sapiens
  siRNA target sequence for C9orf55 (NM_017925.3,4231-4249).
ggatagcaaacttgtgtat

SEQ ID NO: 364229 - DNA, 19 bp, Homo sapiens
  siRNA target sequence for C9orf55 (NM_017925.3,4232-4250).
gatagcaaacttgtgtata

SEQ ID NO: 364230 - DNA, 19 bp, Homo sapiens
  siRNA target sequence for C9orf55 (NM_017925.3,4253-4271).
cagctgttatgggataata

SEQ ID NO: 364231 - DNA, 19 bp, Homo sapiens
  siRNA target sequence for C9orf55 (NM_017925.3,4256-4274).
ctgttatgggataatatca

SEQ ID NO: 364232 - DNA, 19 bp, Homo sapiens
  siRNA target sequence for C9orf55 (NM_017925.3,4314-4332).
ggaggaattttaattctga

SEQ ID NO: 364233 - DNA, 19 bp, Homo sapiens
  siRNA target sequence for C9orf55 (NM_017925.3,4389-4407).
ccatcaggcagagtattca

SEQ ID NO: 364234 - DNA, 19 bp, Homo sapiens
  siRNA target sequence for C9orf55 (NM_017925.3,4406-4424).
cagcacaataatgttctta

SEQ ID NO: 364235 - DNA, 19 bp, Homo sapiens
  siRNA target sequence for C9orf55 (NM_017925.3,4428-4446).
ccatcaacctactttcaca

SEQ ID NO: 364236 - DNA, 19 bp, Homo sapiens
  siRNA target sequence for C9orf55 (NM_017925.3,4515-4533).
ctctaggaagagagaatat

SEQ ID NO: 364237 - DNA, 19 bp, Homo sapiens
  siRNA target sequence for C9orf55 (NM_017925.3,4645-4663).
gtgcaggaagtgttttgga

SEQ ID NO: 364238 - DNA, 19 bp, Homo sapiens
  siRNA target sequence for C14orf118 (NM_017926.2,321-339).
gtggctccggtgaccaatt

SEQ ID NO: 364239 - DNA, 19 bp, Homo sapiens
  siRNA target sequence for C14orf118 (NM_017926.2,323-341).
ggctccggtgaccaatttt

SEQ ID NO: 364240 - DNA, 19 bp, Homo sapiens
  siRNA target sequence for C14orf118 (NM_017926.2,324-342).
gctccggtgaccaatttta

SEQ ID NO: 364241 - DNA, 19 bp, Homo sapiens
  siRNA target sequence for C14orf118 (NM_017926.2,328-346).
cggtgaccaattttagtga

SEQ ID NO: 364242 - DNA, 19 bp, Homo sapiens
  siRNA target sequence for C14orf118 (NM_017926.2,347-365).
ctctgatgacacaatggta

SEQ ID NO: 364243 - DNA, 19 bp, Homo sapiens
  siRNA target sequence for C14orf118 (NM_017926.2,392-410).
cattgtcaagagtaagcaa

SEQ ID NO: 364244 - DNA, 19 bp, Homo sapiens
  siRNA target sequence for C14orf118 (NM_017926.2,396-414).
gtcaagagtaagcaacatt

SEQ ID NO: 364245 - DNA, 19 bp, Homo sapiens
  siRNA target sequence for C14orf118 (NM_017926.2,408-426).
caacattcttggcatgaat

SEQ ID NO: 364246 - DNA, 19 bp, Homo sapiens
  siRNA target sequence for C14orf118 (NM_017926.2,562-580).
ggttcaagtctgctaagaa

SEQ ID NO: 364247 - DNA, 19 bp, Homo sapiens
  siRNA target sequence for C14orf118 (NM_017926.2,593-611).
ccgctggaaggagaatact

SEQ ID NO: 364248 - DNA, 19 bp, Homo sapiens
  siRNA target sequence for C14orf118 (NM_017926.2,627-645).
ggccacggattgtgtgaat

SEQ ID NO: 364249 - DNA, 19 bp, Homo sapiens
  siRNA target sequence for C14orf118 (NM_017926.2,629-647).
ccacggattgtgtgaatca

SEQ ID NO: 364250 - DNA, 19 bp, Homo sapiens
  siRNA target sequence for C14orf118 (NM_017926.2,651-669).
gaaaataggactttcctaa

SEQ ID NO: 364251 - DNA, 19 bp, Homo sapiens
  siRNA target sequence for C14orf118 (NM_017926.2,862-880).
gattcactgtccctaatct

SEQ ID NO: 364252 - DNA, 19 bp, Homo sapiens
  siRNA target sequence for C14orf118 (NM_017926.2,887-905).
caagtgggctcctgatcat

SEQ ID NO: 364253 - DNA, 19 bp, Homo sapiens
  siRNA target sequence for C14orf118 (NM_017926.2,926-944).
ggattctggattggataaa

SEQ ID NO: 364254 - DNA, 19 bp, Homo sapiens
  siRNA target sequence for C14orf118 (NM_017926.2,981-999).
gctcaaagagggtaccata

SEQ ID NO: 364255 - DNA, 19 bp, Homo sapiens
  siRNA target sequence for C14orf118 (NM_017926.2,992-1010).
gtaccatactcgcttgaat

SEQ ID NO: 364256 - DNA, 19 bp, Homo sapiens
  siRNA target sequence for C14orf118 (NM_017926.2,1070-1088).
ggagaccagcataaacact

SEQ ID NO: 364257 - DNA, 19 bp, Homo sapiens
  siRNA target sequence for C14orf118 (NM_017926.2,1071-1089).
gagaccagcataaacactt

SEQ ID NO: 364258 - DNA, 19 bp, Homo sapiens
  siRNA target sequence for C14orf118 (NM_017926.2,1103-1121).
gataagccatatcattagt

SEQ ID NO: 364259 - DNA, 19 bp, Homo sapiens
  siRNA target sequence for C14orf118 (NM_017926.2,1276-1294).
ccagacaggcaaatgtaca

SEQ ID NO: 364260 - DNA, 19 bp, Homo sapiens
  siRNA target sequence for C14orf118 (NM_017926.2,1295-1313).
ctggggaccaccatgttca

SEQ ID NO: 364261 - DNA, 19 bp, Homo sapiens
  siRNA target sequence for C14orf118 (NM_017926.2,1306-1324).
catgttcacgtgacatcaa

SEQ ID NO: 364262 - DNA, 19 bp, Homo sapiens
  siRNA target sequence for C14orf118 (NM_017926.2,1480-1498).
caactactgctacattttt

SEQ ID NO: 364263 - DNA, 19 bp, Homo sapiens
  siRNA target sequence for FLJ20694 (NM_017928.1,149-167).
ccattcaaaccgagaaaca

SEQ ID NO: 364264 - DNA, 19 bp, Homo sapiens
  siRNA target sequence for FLJ20694 (NM_017928.1,391-409).
ggcctcaccctgtgcaaat

SEQ ID NO: 364265 - DNA, 19 bp, Homo sapiens
  siRNA target sequence for FLJ20694 (NM_017928.1,393-411).
cctcaccctgtgcaaatca

SEQ ID NO: 364266 - DNA, 19 bp, Homo sapiens
  siRNA target sequence for FLJ20694 (NM_017928.1,394-412).
ctcaccctgtgcaaatcat

SEQ ID NO: 364267 - DNA, 19 bp, Homo sapiens
  siRNA target sequence for FLJ20694 (NM_017928.1,482-500).
gcaagaacacactgttgtt

SEQ ID NO: 364268 - DNA, 19 bp, Homo sapiens
  siRNA target sequence for FLJ20694 (NM_017928.1,548-566).
gttgggagcttgtgcataa

SEQ ID NO: 364269 - DNA, 19 bp, Homo sapiens
  siRNA target sequence for PEX26 (NM_017929.2,515-533).
ctcctgggtccttcagtat

SEQ ID NO: 364270 - DNA, 19 bp, Homo sapiens
  siRNA target sequence for PEX26 (NM_017929.2,570-588).
gagctgtgcattcttttat

SEQ ID NO: 364271 - DNA, 19 bp, Homo sapiens
  siRNA target sequence for PEX26 (NM_017929.2,647-665).
cccagccaatcaaaacctt

SEQ ID NO: 364272 - DNA, 19 bp, Homo sapiens
  siRNA target sequence for PEX26 (NM_017929.2,776-794).
gcggcgactggatgtactt

SEQ ID NO: 364273 - DNA, 19 bp, Homo sapiens
  siRNA target sequence for PEX26 (NM_017929.2,778-796).
ggcgactggatgtacttca

SEQ ID NO: 364274 - DNA, 19 bp, Homo sapiens
  siRNA target sequence for PEX26 (NM_017929.2,933-951).
gcggtgagccacttctttt

SEQ ID NO: 364275 - DNA, 19 bp, Homo sapiens
  siRNA target sequence for PEX26 (NM_017929.2,994-1012).
gtctcctggtggtgagatt

SEQ ID NO: 364276 - DNA, 19 bp, Homo sapiens
  siRNA target sequence for PEX26 (NM_017929.2,998-1016).
cctggtggtgagatttgat

SEQ ID NO: 364277 - DNA, 19 bp, Homo sapiens
  siRNA target sequence for PEX26 (NM_017929.2,1073-1091).
gatccggaaggctgcattt

SEQ ID NO: 364278 - DNA, 19 bp, Homo sapiens
  siRNA target sequence for PEX26 (NM_017929.2,1076-1094).
ccggaaggctgcattttct

SEQ ID NO: 364279 - DNA, 19 bp, Homo sapiens
  siRNA target sequence for FLJ20699 (NM_017931.1,210-228).
gcagatccaacctttgtga

SEQ ID NO: 364280 - DNA, 19 bp, Homo sapiens
  siRNA target sequence for FLJ20699 (NM_017931.1,211-229).
cagatccaacctttgtgat

SEQ ID NO: 364281 - DNA, 19 bp, Homo sapiens
  siRNA target sequence for FLJ20699 (NM_017931.1,405-423).
ccgaaagcctgtgaactat

SEQ ID NO: 364282 - DNA, 19 bp, Homo sapiens
  siRNA target sequence for FLJ20699 (NM_017931.1,519-537).
gattctgttgctcgaattt

SEQ ID NO: 364283 - DNA, 19 bp, Homo sapiens
  siRNA target sequence for FLJ20699 (NM_017931.1,563-581).
cctaagcagctatgtgaaa

SEQ ID NO: 364284 - DNA, 19 bp, Homo sapiens
  siRNA target sequence for FLJ20699 (NM_017931.1,576-594).
gtgaaaggcatctactctt

SEQ ID NO: 364285 - DNA, 19 bp, Homo sapiens
  siRNA target sequence for FLJ20699 (NM_017931.1,578-596).
gaaaggcatctactctttt

SEQ ID NO: 364286 - DNA, 19 bp, Homo sapiens
  siRNA target sequence for FLJ20699 (NM_017931.1,636-654).
ctcgccaaagaggctttat

SEQ ID NO: 364287 - DNA, 19 bp, Homo sapiens
  siRNA target sequence for FLJ20699 (NM_017931.1,638-656).
cgccaaagaggctttatct

SEQ ID NO: 364288 - DNA, 19 bp, Homo sapiens
  siRNA target sequence for FLJ20699 (NM_017931.1,639-657).
gccaaagaggctttatcta

SEQ ID NO: 364289 - DNA, 19 bp, Homo sapiens
  siRNA target sequence for FLJ20699 (NM_017931.1,774-792).
gatatgttggcttgtcata

SEQ ID NO: 364290 - DNA, 19 bp, Homo sapiens
  siRNA target sequence for FLJ20699 (NM_017931.1,779-797).
gttggcttgtcataactat

SEQ ID NO: 364291 - DNA, 19 bp, Homo sapiens
  siRNA target sequence for FLJ20701 (NM_017933.3,357-375).
gcaaccacctgatgttaga

SEQ ID NO: 364292 - DNA, 19 bp, Homo sapiens
  siRNA target sequence for FLJ20701 (NM_017933.3,374-392).
gaagagtcgaggacatgtt

SEQ ID NO: 364293 - DNA, 19 bp, Homo sapiens
  siRNA target sequence for FLJ20701 (NM_017933.3,377-395).
gagtcgaggacatgttctt

SEQ ID NO: 364294 - DNA, 19 bp, Homo sapiens
  siRNA target sequence for FLJ20701 (NM_017933.3,519-537).
ctctcccagcggtcatctt

SEQ ID NO: 364295 - DNA, 19 bp, Homo sapiens
  siRNA target sequence for FLJ20701 (NM_017933.3,567-585).
cgaccacaccgctgatgaa

SEQ ID NO: 364296 - DNA, 19 bp, Homo sapiens
  siRNA target sequence for FLJ20701 (NM_017933.3,600-618).
gtggctgcaaggttaccta

SEQ ID NO: 364297 - DNA, 19 bp, Homo sapiens
  siRNA target sequence for FLJ20701 (NM_017933.3,636-654).
ccactggcatgcagttttt

SEQ ID NO: 364298 - DNA, 19 bp, Homo sapiens
  siRNA target sequence for FLJ20701 (NM_017933.3,742-760).
ggaaatccggccattccaa

SEQ ID NO: 364299 - DNA, 19 bp, Homo sapiens
  siRNA target sequence for FLJ20701 (NM_017933.3,798-816).
cagtgcacatggatacctt

SEQ ID NO: 364300 - DNA, 19 bp, Homo sapiens
  siRNA target sequence for FLJ20701 (NM_017933.3,880-898).
ggtctacagggagatcaat

SEQ ID NO: 364301 - DNA, 19 bp, Homo sapiens
  siRNA target sequence for KIAA2010 (NM_017936.2,294-312).
cgacggttctctactttta

SEQ ID NO: 364302 - DNA, 19 bp, Homo sapiens
  siRNA target sequence for KIAA2010 (NM_017936.2,298-316).
ggttctctacttttagagt

SEQ ID NO: 364303 - DNA, 19 bp, Homo sapiens
  siRNA target sequence for KIAA2010 (NM_017936.2,313-331).
gagtcgaaaataaatccta

SEQ ID NO: 364304 - DNA, 19 bp, Homo sapiens
  siRNA target sequence for KIAA2010 (NM_017936.2,393-411).
cttggcccttagctttcaa

SEQ ID NO: 364305 - DNA, 19 bp, Homo sapiens
  siRNA target sequence for KIAA2010 (NM_017936.2,396-414).
ggcccttagctttcaagaa

SEQ ID NO: 364306 - DNA, 19 bp, Homo sapiens
  siRNA target sequence for KIAA2010 (NM_017936.2,506-524).
ctgaagaggagcgttttga

SEQ ID NO: 364307 - DNA, 19 bp, Homo sapiens
  siRNA target sequence for KIAA2010 (NM_017936.2,514-532).
gagcgttttgatgatatgt

SEQ ID NO: 364308 - DNA, 19 bp, Homo sapiens
  siRNA target sequence for KIAA2010 (NM_017936.2,516-534).
gcgttttgatgatatgtca

SEQ ID NO: 364309 - DNA, 19 bp, Homo sapiens
  siRNA target sequence for KIAA2010 (NM_017936.2,517-535).
cgttttgatgatatgtcat

SEQ ID NO: 364310 - DNA, 19 bp, Homo sapiens
  siRNA target sequence for KIAA2010 (NM_017936.2,531-549).
gtcatcgccaggcttagaa

SEQ ID NO: 364311 - DNA, 19 bp, Homo sapiens
  siRNA target sequence for KIAA2010 (NM_017936.2,533-551).
catcgccaggcttagaatt

SEQ ID NO: 364312 - DNA, 19 bp, Homo sapiens
  siRNA target sequence for KIAA2010 (NM_017936.2,552-570).
gccatcttgtgaattaagt

SEQ ID NO: 364313 - DNA, 19 bp, Homo sapiens
  siRNA target sequence for KIAA2010 (NM_017936.2,614-632).
cacctcttcgtcgtgaaaa

SEQ ID NO: 364314 - DNA, 19 bp, Homo sapiens
  siRNA target sequence for KIAA2010 (NM_017936.2,634-652).
cttgcactggcactagaaa

SEQ ID NO: 364315 - DNA, 19 bp, Homo sapiens
  siRNA target sequence for KIAA2010 (NM_017936.2,691-709).
gtgtgtgaagatttggaaa

SEQ ID NO: 364316 - DNA, 19 bp, Homo sapiens
  siRNA target sequence for KIAA2010 (NM_017936.2,772-790).
gctctttttgaagttatgt

SEQ ID NO: 364317 - DNA, 19 bp, Homo sapiens
  siRNA target sequence for KIAA2010 (NM_017936.2,789-807).
gttctctgaagaatgtata

SEQ ID NO: 364318 - DNA, 19 bp, Homo sapiens
  siRNA target sequence for KIAA2010 (NM_017936.2,887-905).
ccaagtttaaagaagtgat

SEQ ID NO: 364319 - DNA, 19 bp, Homo sapiens
  siRNA target sequence for KIAA2010 (NM_017936.2,945-963).
gacatacagagttcagtat

SEQ ID NO: 364320 - DNA, 19 bp, Homo sapiens
  siRNA target sequence for KIAA2010 (NM_017936.2,947-965).
catacagagttcagtatat

SEQ ID NO: 364321 - DNA, 19 bp, Homo sapiens
  siRNA target sequence for KIAA2010 (NM_017936.2,960-978).
gtatatacaagatatggtt

SEQ ID NO: 364322 - DNA, 19 bp, Homo sapiens
  siRNA target sequence for KIAA2010 (NM_017936.2,986-1004).
ctccttcggtctttgaaga

SEQ ID NO: 364323 - DNA, 19 bp, Homo sapiens
  siRNA target sequence for KIAA2010 (NM_017936.2,1016-1034).
caacacttcactcttttat

SEQ ID NO: 364324 - DNA, 19 bp, Homo sapiens
  siRNA target sequence for KIAA2010 (NM_017936.2,1078-1096).
gaaaaatttctgacagatt

SEQ ID NO: 364325 - DNA, 19 bp, Homo sapiens
  siRNA target sequence for KIAA2010 (NM_017936.2,1093-1111).
gatttgtttgcacaactaa

SEQ ID NO: 364326 - DNA, 19 bp, Homo sapiens
  siRNA target sequence for KIAA2010 (NM_017936.2,1236-1254).
gggcatattaccagcttta

SEQ ID NO: 364327 - DNA, 19 bp, Homo sapiens
  siRNA target sequence for KIAA2010 (NM_017936.2,1263-1281).
ccttggcatggatgataca

SEQ ID NO: 364328 - DNA, 19 bp, Homo sapiens
  siRNA target sequence for KIAA2010 (NM_017936.2,1287-1305).
gcgaagtgctgctactgat

SEQ ID NO: 364329 - DNA, 19 bp, Homo sapiens
  siRNA target sequence for KIAA2010 (NM_017936.2,1288-1306).
cgaagtgctgctactgata

SEQ ID NO: 364330 - DNA, 19 bp, Homo sapiens
  siRNA target sequence for KIAA2010 (NM_017936.2,1301-1319).
ctgatatattctcatactt

SEQ ID NO: 364331 - DNA, 19 bp, Homo sapiens
  siRNA target sequence for KIAA2010 (NM_017936.2,1359-1377).
gcaggaggcacaacagaat

SEQ ID NO: 364332 - DNA, 19 bp, Homo sapiens
  siRNA target sequence for KIAA2010 (NM_017936.2,1392-1410).
gctcatcaacctcattata

SEQ ID NO: 364333 - DNA, 19 bp, Homo sapiens
  siRNA target sequence for KIAA2010 (NM_017936.2,1395-1413).
catcaacctcattatagaa

SEQ ID NO: 364334 - DNA, 19 bp, Homo sapiens
  siRNA target sequence for KIAA2010 (NM_017936.2,1404-1422).
cattatagaacatatgatt

SEQ ID NO: 364335 - DNA, 19 bp, Homo sapiens
  siRNA target sequence for KIAA2010 (NM_017936.2,1464-1482).
gggcctgcttcgaacttta

SEQ ID NO: 364336 - DNA, 19 bp, Homo sapiens
  siRNA target sequence for KIAA2010 (NM_017936.2,1466-1484).
gcctgcttcgaactttagt

SEQ ID NO: 364337 - DNA, 19 bp, Homo sapiens
  siRNA target sequence for KIAA2010 (NM_017936.2,1500-1518).
gctagccactgccaataaa

SEQ ID NO: 364338 - DNA, 19 bp, Homo sapiens
  siRNA target sequence for KIAA2010 (NM_017936.2,1501-1519).
ctagccactgccaataaaa

SEQ ID NO: 364339 - DNA, 19 bp, Homo sapiens
  siRNA target sequence for KIAA2010 (NM_017936.2,1579-1597).
cctttactagcaaatacaa

SEQ ID NO: 364340 - DNA, 19 bp, Homo sapiens
  siRNA target sequence for KIAA2010 (NM_017936.2,1635-1653).
ccaactattggcacttgta

SEQ ID NO: 364341 - DNA, 19 bp, Homo sapiens
  siRNA target sequence for KIAA2010 (NM_017936.2,1636-1654).
caactattggcacttgtat

SEQ ID NO: 364342 - DNA, 19 bp, Homo sapiens
  siRNA target sequence for KIAA2010 (NM_017936.2,1673-1691).
gtgtggagcaccataccta

SEQ ID NO: 364343 - DNA, 19 bp, Homo sapiens
  siRNA target sequence for KIAA2010 (NM_017936.2,1681-1699).
caccatacctaccacataa

SEQ ID NO: 364344 - DNA, 19 bp, Homo sapiens
  siRNA target sequence for KIAA2010 (NM_017936.2,1684-1702).
catacctaccacataaaga

SEQ ID NO: 364345 - DNA, 19 bp, Homo sapiens
  siRNA target sequence for KIAA2010 (NM_017936.2,1688-1706).
cctaccacataaagaacta

SEQ ID NO: 364346 - DNA, 19 bp, Homo sapiens
  siRNA target sequence for KIAA2010 (NM_017936.2,1728-1746).
ccggagagtgctagttctt

SEQ ID NO: 364347 - DNA, 19 bp, Homo sapiens
  siRNA target sequence for KIAA2010 (NM_017936.2,1729-1747).
cggagagtgctagttctta

SEQ ID NO: 364348 - DNA, 19 bp, Homo sapiens
  siRNA target sequence for KIAA2010 (NM_017936.2,1751-1769).
cctcgaagcatgctttctt

SEQ ID NO: 364349 - DNA, 19 bp, Homo sapiens
  siRNA target sequence for FLJ20716 (NM_017938.2,199-217).
gaaacgaaactccatctat

SEQ ID NO: 364350 - DNA, 19 bp, Homo sapiens
  siRNA target sequence for FLJ20716 (NM_017938.2,233-251).
cttattgtgtccgtgttaa

SEQ ID NO: 364351 - DNA, 19 bp, Homo sapiens
  siRNA target sequence for FLJ20716 (NM_017938.2,306-324).
gttattaccccggagttat

SEQ ID NO: 364352 - DNA, 19 bp, Homo sapiens
  siRNA target sequence for FLJ20716 (NM_017938.2,336-354).
gatcgttccttggaatcat

SEQ ID NO: 364353 - DNA, 19 bp, Homo sapiens
  siRNA target sequence for FLJ20716 (NM_017938.2,352-370).
cattggatcaaaccttatt

SEQ ID NO: 364354 - DNA, 19 bp, Homo sapiens
  siRNA target sequence for FLJ20716 (NM_017938.2,356-374).
ggatcaaaccttattgaga

SEQ ID NO: 364355 - DNA, 19 bp, Homo sapiens
  siRNA target sequence for FLJ20716 (NM_017938.2,357-375).
gatcaaaccttattgagaa

SEQ ID NO: 364356 - DNA, 19 bp, Homo sapiens
  siRNA target sequence for FLJ20716 (NM_017938.2,360-378).
caaaccttattgagaacaa

SEQ ID NO: 364357 - DNA, 19 bp, Homo sapiens
  siRNA target sequence for FLJ20716 (NM_017938.2,395-413).
gcttctatcgtgtttatca

SEQ ID NO: 364358 - DNA, 19 bp, Homo sapiens
  siRNA target sequence for FLJ20716 (NM_017938.2,496-514).
cgctaaccggtgccattat

SEQ ID NO: 364359 - DNA, 19 bp, Homo sapiens
  siRNA target sequence for FLJ20716 (NM_017938.2,498-516).
ctaaccggtgccattatgt

SEQ ID NO: 364360 - DNA, 19 bp, Homo sapiens
  siRNA target sequence for FLJ20716 (NM_017938.2,536-554).
gaagctgaggaggtcataa

SEQ ID NO: 364361 - DNA, 19 bp, Homo sapiens
  siRNA target sequence for FLJ20716 (NM_017938.2,539-557).
gctgaggaggtcataagtt

SEQ ID NO: 364362 - DNA, 19 bp, Homo sapiens
  siRNA target sequence for FLJ20716 (NM_017938.2,575-593).
ccttccacgagggttatga

SEQ ID NO: 364363 - DNA, 19 bp, Homo sapiens
  siRNA target sequence for FLJ20716 (NM_017938.2,632-650).
cacctcagccgtgaattct

SEQ ID NO: 364364 - DNA, 19 bp, Homo sapiens
  siRNA target sequence for FLJ20716 (NM_017938.2,725-743).
ggtgggtactacgaataca

SEQ ID NO: 364365 - DNA, 19 bp, Homo sapiens
  siRNA target sequence for FLJ20716 (NM_017938.2,726-744).
gtgggtactacgaatacat

SEQ ID NO: 364366 - DNA, 19 bp, Homo sapiens
  siRNA target sequence for FLJ20716 (NM_017938.2,753-771).
gcagttgccaagatatcat

SEQ ID NO: 364367 - DNA, 19 bp, Homo sapiens
  siRNA target sequence for FLJ20716 (NM_017938.2,943-961).
ccaagtggcatcctacaat

SEQ ID NO: 364368 - DNA, 19 bp, Homo sapiens
  siRNA target sequence for FLJ20716 (NM_017938.2,947-965).
gtggcatcctacaatacct

SEQ ID NO: 364369 - DNA, 19 bp, Homo sapiens
  siRNA target sequence for FLJ20716 (NM_017938.2,988-1006).
gccaccatattctgcttat

SEQ ID NO: 364370 - DNA, 19 bp, Homo sapiens
  siRNA target sequence for FLJ20716 (NM_017938.2,990-1008).
caccatattctgcttatga

SEQ ID NO: 364371 - DNA, 19 bp, Homo sapiens
  siRNA target sequence for FLJ20716 (NM_017938.2,1132-1150).
ctactatccaccttttgaa

SEQ ID NO: 364372 - DNA, 19 bp, Homo sapiens
  siRNA target sequence for FLJ20718 (NM_017939.1,313-331).
gtgatgacatggtgactaa

SEQ ID NO: 364373 - DNA, 19 bp, Homo sapiens
  siRNA target sequence for FLJ20718 (NM_017939.1,346-364).
ctctggttgcgctgctaaa

SEQ ID NO: 364374 - DNA, 19 bp, Homo sapiens
  siRNA target sequence for FLJ20718 (NM_017939.1,351-369).
gttgcgctgctaaaagagt

SEQ ID NO: 364375 - DNA, 19 bp, Homo sapiens
  siRNA target sequence for FLJ20718 (NM_017939.1,376-394).
ctggactggattcaaatga

SEQ ID NO: 364376 - DNA, 19 bp, Homo sapiens
  siRNA target sequence for FLJ20718 (NM_017939.1,461-479).
gaacgtgctgtggaatata

SEQ ID NO: 364377 - DNA, 19 bp, Homo sapiens
  siRNA target sequence for FLJ20718 (NM_017939.1,464-482).
cgtgctgtggaatatatgt

SEQ ID NO: 364378 - DNA, 19 bp, Homo sapiens
  siRNA target sequence for FLJ20718 (NM_017939.1,467-485).
gctgtggaatatatgtgaa

SEQ ID NO: 364379 - DNA, 19 bp, Homo sapiens
  siRNA target sequence for FLJ20718 (NM_017939.1,496-514).
gagcagtgtctatattcaa

SEQ ID NO: 364380 - DNA, 19 bp, Homo sapiens
  siRNA target sequence for FLJ20718 (NM_017939.1,498-516).
gcagtgtctatattcaaca

SEQ ID NO: 364381 - DNA, 19 bp, Homo sapiens
  siRNA target sequence for FLJ20718 (NM_017939.1,499-517).
cagtgtctatattcaacaa

SEQ ID NO: 364382 - DNA, 19 bp, Homo sapiens
  siRNA target sequence for FLJ20718 (NM_017939.1,503-521).
gtctatattcaacaaagaa

SEQ ID NO: 364383 - DNA, 19 bp, Homo sapiens
  siRNA target sequence for FLJ20718 (NM_017939.1,530-548).
ggagattgtgttaaagtat

SEQ ID NO: 364384 - DNA, 19 bp, Homo sapiens
  siRNA target sequence for FLJ20718 (NM_017939.1,531-549).
gagattgtgttaaagtatt

SEQ ID NO: 364385 - DNA, 19 bp, Homo sapiens
  siRNA target sequence for FLJ20718 (NM_017939.1,646-664).
gtgctacagcattgaacat

SEQ ID NO: 364386 - DNA, 19 bp, Homo sapiens
  siRNA target sequence for FLJ20718 (NM_017939.1,697-715).
ccatggaatctcttctatt

SEQ ID NO: 364387 - DNA, 19 bp, Homo sapiens
  siRNA target sequence for FLJ20718 (NM_017939.1,706-724).
ctcttctattgaagacatt

SEQ ID NO: 364388 - DNA, 19 bp, Homo sapiens
  siRNA target sequence for FLJ20718 (NM_017939.1,823-841).
gaatggatgctggtgaaat

SEQ ID NO: 364389 - DNA, 19 bp, Homo sapiens
  siRNA target sequence for FLJ20718 (NM_017939.1,832-850).
ctggtgaaatggttattca

SEQ ID NO: 364390 - DNA, 19 bp, Homo sapiens
  siRNA target sequence for FLJ20718 (NM_017939.1,834-852).
ggtgaaatggttattcaaa

SEQ ID NO: 364391 - DNA, 19 bp, Homo sapiens
  siRNA target sequence for FLJ20718 (NM_017939.1,861-879).
gctgaaacgcaaaggttaa

SEQ ID NO: 364392 - DNA, 19 bp, Homo sapiens
  siRNA target sequence for FLJ20718 (NM_017939.1,862-880).
ctgaaacgcaaaggttaaa

SEQ ID NO: 364393 - DNA, 19 bp, Homo sapiens
  siRNA target sequence for FLJ20718 (NM_017939.1,916-934).
ctaatggggatgatttgat

SEQ ID NO: 364394 - DNA, 19 bp, Homo sapiens
  siRNA target sequence for FLJ20718 (NM_017939.1,983-1001).
gaaaactttcgtttcagat

SEQ ID NO: 364395 - DNA, 19 bp, Homo sapiens
  siRNA target sequence for FLJ20718 (NM_017939.1,1066-1084).
ctctggaaattattgtcaa

SEQ ID NO: 364396 - DNA, 19 bp, Homo sapiens
  siRNA target sequence for FLJ20718 (NM_017939.1,1140-1158).
gatgaaagtgacgcattta

SEQ ID NO: 364397 - DNA, 19 bp, Homo sapiens
  siRNA target sequence for FLJ20718 (NM_017939.1,1149-1167).
gacgcatttatggagaatt

SEQ ID NO: 364398 - DNA, 19 bp, Homo sapiens
  siRNA target sequence for FLJ20718 (NM_017939.1,1245-1263).
ctcatcccaaagaagattt

SEQ ID NO: 364399 - DNA, 19 bp, Homo sapiens
  siRNA target sequence for FLJ20718 (NM_017939.1,1486-1504).
ctaaacatgttgactttct

SEQ ID NO: 364400 - DNA, 19 bp, Homo sapiens
  siRNA target sequence for FLJ20718 (NM_017939.1,1499-1517).
ctttctagaagccataagt

SEQ ID NO: 364401 - DNA, 19 bp, Homo sapiens
  siRNA target sequence for FLJ20718 (NM_017939.1,1522-1540).
ctttgagggcccttttgca

SEQ ID NO: 364402 - DNA, 19 bp, Homo sapiens
  siRNA target sequence for FLJ20718 (NM_017939.1,1578-1596).
cctgatcagctgatgacat

SEQ ID NO: 364403 - DNA, 19 bp, Homo sapiens
  siRNA target sequence for FLJ20718 (NM_017939.1,1579-1597).
ctgatcagctgatgacatt

SEQ ID NO: 364404 - DNA, 19 bp, Homo sapiens
  siRNA target sequence for FLJ20718 (NM_017939.1,1581-1599).
gatcagctgatgacattat

SEQ ID NO: 364405 - DNA, 19 bp, Homo sapiens
  siRNA target sequence for FLJ20718 (NM_017939.1,1621-1639).
gtaatgtcggggttagagt

SEQ ID NO: 364406 - DNA, 19 bp, Homo sapiens
  siRNA target sequence for FLJ20718 (NM_017939.1,1636-1654).
gagtgaatgtcgttagcat

SEQ ID NO: 364407 - DNA, 19 bp, Homo sapiens
  siRNA target sequence for FLJ20718 (NM_017939.1,1638-1656).
gtgaatgtcgttagcattt

SEQ ID NO: 364408 - DNA, 19 bp, Homo sapiens
  siRNA target sequence for FLJ20718 (NM_017939.1,1640-1658).
gaatgtcgttagcatttta

SEQ ID NO: 364409 - DNA, 19 bp, Homo sapiens
  siRNA target sequence for FLJ20718 (NM_017939.1,1644-1662).
gtcgttagcattttaggaa

SEQ ID NO: 364410 - DNA, 19 bp, Homo sapiens
  siRNA target sequence for FLJ20718 (NM_017939.1,1692-1710).
ggtacacttgaaactctta

SEQ ID NO: 364411 - DNA, 19 bp, Homo sapiens
  siRNA target sequence for FLJ20718 (NM_017939.1,1693-1711).
gtacacttgaaactcttaa

SEQ ID NO: 364412 - DNA, 19 bp, Homo sapiens
  siRNA target sequence for FLJ20718 (NM_017939.1,1720-1738).
ggtgctttctgcttgaagt

SEQ ID NO: 364413 - DNA, 19 bp, Homo sapiens
  siRNA target sequence for FLJ20718 (NM_017939.1,1721-1739).
gtgctttctgcttgaagtt

SEQ ID NO: 364414 - DNA, 19 bp, Homo sapiens
  siRNA target sequence for FLJ20718 (NM_017939.1,1820-1838).
cgaaagagcctcgattcaa

SEQ ID NO: 364415 - DNA, 19 bp, Homo sapiens
  siRNA target sequence for FLJ20718 (NM_017939.1,1821-1839).
gaaagagcctcgattcaaa

SEQ ID NO: 364416 - DNA, 19 bp, Homo sapiens
  siRNA target sequence for FLJ20718 (NM_017939.1,1863-1881).
gaattccagccggtcttta

SEQ ID NO: 364417 - DNA, 19 bp, Homo sapiens
  siRNA target sequence for FLJ20718 (NM_017939.1,1869-1887).
cagccggtctttaaaatga

SEQ ID NO: 364418 - DNA, 19 bp, Homo sapiens
  siRNA target sequence for FLJ20718 (NM_017939.1,1872-1890).
ccggtctttaaaatgaaga

SEQ ID NO: 364419 - DNA, 19 bp, Homo sapiens
  siRNA target sequence for FLJ20718 (NM_017939.1,1899-1917).
gaagggagaggtaactata

SEQ ID NO: 364420 - DNA, 19 bp, Homo sapiens
  siRNA target sequence for FLJ20718 (NM_017939.1,1938-1956).
cttgacaatgtgaaaatga

SEQ ID NO: 364421 - DNA, 19 bp, Homo sapiens
  siRNA target sequence for FLJ20718 (NM_017939.1,1961-1979).
gcgaagatttattgcttat

SEQ ID NO: 364422 - DNA, 19 bp, Homo sapiens
  siRNA target sequence for HLC-8 (NM_017941.3,139-157).
gaagtgtgtccttactgta

SEQ ID NO: 364423 - DNA, 19 bp, Homo sapiens
  siRNA target sequence for HLC-8 (NM_017941.3,142-160).
gtgtgtccttactgtaaga

SEQ ID NO: 364424 - DNA, 19 bp, Homo sapiens
  siRNA target sequence for HLC-8 (NM_017941.3,159-177).
gaagccatttaaacgatta

SEQ ID NO: 364425 - DNA, 19 bp, Homo sapiens
  siRNA target sequence for HLC-8 (NM_017941.3,182-200).
cccacttgccatactgtaa

SEQ ID NO: 364426 - DNA, 19 bp, Homo sapiens
  siRNA target sequence for HLC-8 (NM_017941.3,201-219).
gatgataggaccaaccata

SEQ ID NO: 364427 - DNA, 19 bp, Homo sapiens
  siRNA target sequence for HLC-8 (NM_017941.3,259-277).
ctcccacgtgctaaaaaga

SEQ ID NO: 364428 - DNA, 19 bp, Homo sapiens
  siRNA target sequence for HLC-8 (NM_017941.3,276-294).
gatgaaaggaccaatcaaa

SEQ ID NO: 364429 - DNA, 19 bp, Homo sapiens
  siRNA target sequence for HLC-8 (NM_017941.3,428-446).
ctacaaaggcagataaaga

SEQ ID NO: 364430 - DNA, 19 bp, Homo sapiens
  siRNA target sequence for HLC-8 (NM_017941.3,447-465).
catcaagaatccaatccaa

SEQ ID NO: 364431 - DNA, 19 bp, Homo sapiens
  siRNA target sequence for HLC-8 (NM_017941.3,463-481).
caaccatccttcaaaatgt

SEQ ID NO: 364432 - DNA, 19 bp, Homo sapiens
  siRNA target sequence for HLC-8 (NM_017941.3,517-535).
gaaaccaaggctcagtttt

SEQ ID NO: 364433 - DNA, 19 bp, Homo sapiens
  siRNA target sequence for HLC-8 (NM_017941.3,531-549).
gttttacgcatcagagaaa

SEQ ID NO: 364434 - DNA, 19 bp, Homo sapiens
  siRNA target sequence for HLC-8 (NM_017941.3,582-600).
gcctaaatcaggagaaagt

SEQ ID NO: 364435 - DNA, 19 bp, Homo sapiens
  siRNA target sequence for HLC-8 (NM_017941.3,689-707).
ctctacctaatgatgtaca

SEQ ID NO: 364436 - DNA, 19 bp, Homo sapiens
  siRNA target sequence for HLC-8 (NM_017941.3,691-709).
ctacctaatgatgtacaaa

SEQ ID NO: 364437 - DNA, 19 bp, Homo sapiens
  siRNA target sequence for HLC-8 (NM_017941.3,713-731).
cctctggtgatctcaaatt

SEQ ID NO: 364438 - DNA, 19 bp, Homo sapiens
  siRNA target sequence for HLC-8 (NM_017941.3,716-734).
ctggtgatctcaaattgga

SEQ ID NO: 364439 - DNA, 19 bp, Homo sapiens
  siRNA target sequence for HLC-8 (NM_017941.3,726-744).
caaattggacaaaattgat

SEQ ID NO: 364440 - DNA, 19 bp, Homo sapiens
  siRNA target sequence for HLC-8 (NM_017941.3,754-772).
caggaacttctagtaaaat

SEQ ID NO: 364441 - DNA, 19 bp, Homo sapiens
  siRNA target sequence for HLC-8 (NM_017941.3,784-802).
cctactggtgattgtcata

SEQ ID NO: 364442 - DNA, 19 bp, Homo sapiens
  siRNA target sequence for HLC-8 (NM_017941.3,785-803).
ctactggtgattgtcatat

SEQ ID NO: 364443 - DNA, 19 bp, Homo sapiens
  siRNA target sequence for HLC-8 (NM_017941.3,817-835).
gtcagtgatggggttaaaa

SEQ ID NO: 364444 - DNA, 19 bp, Homo sapiens
  siRNA target sequence for HLC-8 (NM_017941.3,829-847).
gttaaaagggtaagaacat

SEQ ID NO: 364445 - DNA, 19 bp, Homo sapiens
  siRNA target sequence for HLC-8 (NM_017941.3,838-856).
gtaagaacattattaagca

SEQ ID NO: 364446 - DNA, 19 bp, Homo sapiens
  siRNA target sequence for HLC-8 (NM_017941.3,888-906).
ctcaggagtccctactgat

SEQ ID NO: 364447 - DNA, 19 bp, Homo sapiens
  siRNA target sequence for HLC-8 (NM_017941.3,892-910).
ggagtccctactgatgtta

SEQ ID NO: 364448 - DNA, 19 bp, Homo sapiens
  siRNA target sequence for HLC-8 (NM_017941.3,897-915).
ccctactgatgttacagtt

SEQ ID NO: 364449 - DNA, 19 bp, Homo sapiens
  siRNA target sequence for HLC-8 (NM_017941.3,898-916).
cctactgatgttacagtta

SEQ ID NO: 364450 - DNA, 19 bp, Homo sapiens
  siRNA target sequence for HLC-8 (NM_017941.3,945-963).
cctcattttaagccttaaa

SEQ ID NO: 364451 - DNA, 19 bp, Homo sapiens
  siRNA target sequence for HLC-8 (NM_017941.3,957-975).
ccttaaaatgagctcatta

SEQ ID NO: 364452 - DNA, 19 bp, Homo sapiens
  siRNA target sequence for HLC-8 (NM_017941.3,969-987).
ctcattaggtaaaatccaa

SEQ ID NO: 364453 - DNA, 19 bp, Homo sapiens
  siRNA target sequence for HLC-8 (NM_017941.3,1031-1049).
cgtgtgggagcaaaggaaa

SEQ ID NO: 364454 - DNA, 19 bp, Homo sapiens
  siRNA target sequence for HLC-8 (NM_017941.3,1105-1123).
ggctgtgagaacttcaaca

SEQ ID NO: 364455 - DNA, 19 bp, Homo sapiens
  siRNA target sequence for HLC-8 (NM_017941.3,1163-1181).
gaccacatttaagtttgtt

SEQ ID NO: 364456 - DNA, 19 bp, Homo sapiens
  siRNA target sequence for HLC-8 (NM_017941.3,1194-1212).
gacgacttaccagtttcat

SEQ ID NO: 364457 - DNA, 19 bp, Homo sapiens
  siRNA target sequence for HLC-8 (NM_017941.3,1243-1261).
gcctctctagctacaacat

SEQ ID NO: 364458 - DNA, 19 bp, Homo sapiens
  siRNA target sequence for HLC-8 (NM_017941.3,1245-1263).
ctctctagctacaacattt

SEQ ID NO: 364459 - DNA, 19 bp, Homo sapiens
  siRNA target sequence for HLC-8 (NM_017941.3,1329-1347).
gagtcccgagggacagtta

SEQ ID NO: 364460 - DNA, 19 bp, Homo sapiens
  siRNA target sequence for HLC-8 (NM_017941.3,1349-1367).
ctctggagcccaaatctga

SEQ ID NO: 364461 - DNA, 19 bp, Homo sapiens
  siRNA target sequence for HLC-8 (NM_017941.3,1398-1416).
ccagagccctttatgttca

SEQ ID NO: 364462 - DNA, 19 bp, Homo sapiens
  siRNA target sequence for HLC-8 (NM_017941.3,1437-1455).
gagccccttcaccaatcat

SEQ ID NO: 364463 - DNA, 19 bp, Homo sapiens
  siRNA target sequence for HLC-8 (NM_017941.3,1554-1572).
gaagcctcagtgttggaat

SEQ ID NO: 364464 - DNA, 19 bp, Homo sapiens
  siRNA target sequence for HLC-8 (NM_017941.3,1558-1576).
cctcagtgttggaatgcaa

SEQ ID NO: 364465 - DNA, 19 bp, Homo sapiens
  siRNA target sequence for HLC-8 (NM_017941.3,1559-1577).
ctcagtgttggaatgcaat

SEQ ID NO: 364466 - DNA, 19 bp, Homo sapiens
  siRNA target sequence for HLC-8 (NM_017941.3,1580-1598).
cccagaagccacaacttat

SEQ ID NO: 364467 - DNA, 19 bp, Homo sapiens
  siRNA target sequence for HLC-8 (NM_017941.3,1584-1602).
gaagccacaacttatcagt

SEQ ID NO: 364468 - DNA, 19 bp, Homo sapiens
  siRNA target sequence for HLC-8 (NM_017941.3,1612-1630).
gaaagactctcacaagttt

SEQ ID NO: 364469 - DNA, 19 bp, Homo sapiens
  siRNA target sequence for HLC-8 (NM_017941.3,1642-1660).
cgaagctcaactcatataa

SEQ ID NO: 364470 - DNA, 19 bp, Homo sapiens
  siRNA target sequence for HLC-8 (NM_017941.3,1672-1690).
ccccctgccggacttacaa

SEQ ID NO: 364471 - DNA, 19 bp, Homo sapiens
  siRNA target sequence for HLC-8 (NM_017941.3,1714-1732).
ctcttgggagctgtacaaa

SEQ ID NO: 364472 - DNA, 19 bp, Homo sapiens
  siRNA target sequence for HLC-8 (NM_017941.3,1748-1766).
gcaacaccaccataaggaa

SEQ ID NO: 364473 - DNA, 19 bp, Homo sapiens
  siRNA target sequence for HLC-8 (NM_017941.3,1827-1845).
gagtttcagacgtctgaaa

SEQ ID NO: 364474 - DNA, 19 bp, Homo sapiens
  siRNA target sequence for HLC-8 (NM_017941.3,1914-1932).
ggattgccgctctaaaaca

SEQ ID NO: 364475 - DNA, 19 bp, Homo sapiens
  siRNA target sequence for HLC-8 (NM_017941.3,1915-1933).
gattgccgctctaaaacat

SEQ ID NO: 364476 - DNA, 19 bp, Homo sapiens
  siRNA target sequence for HLC-8 (NM_017941.3,1923-1941).
ctctaaaacatgtttggat

SEQ ID NO: 364477 - DNA, 19 bp, Homo sapiens
  siRNA target sequence for FBXO34 (NM_017943.2,191-209).
cacctaaagccatattgga

SEQ ID NO: 364478 - DNA, 19 bp, Homo sapiens
  siRNA target sequence for FBXO34 (NM_017943.2,252-270).
cgcagagaactcctatgaa

SEQ ID NO: 364479 - DNA, 19 bp, Homo sapiens
  siRNA target sequence for FBXO34 (NM_017943.2,305-323).
gctagccacataacatcaa

SEQ ID NO: 364480 - DNA, 19 bp, Homo sapiens
  siRNA target sequence for FBXO34 (NM_017943.2,313-331).
cataacatcaagtgtcttt

SEQ ID NO: 364481 - DNA, 19 bp, Homo sapiens
  siRNA target sequence for FBXO34 (NM_017943.2,338-356).
gcctctctcggtaaagcat

SEQ ID NO: 364482 - DNA, 19 bp, Homo sapiens
  siRNA target sequence for FBXO34 (NM_017943.2,375-393).
ggatcctttctccaaatgt

SEQ ID NO: 364483 - DNA, 19 bp, Homo sapiens
  siRNA target sequence for FBXO34 (NM_017943.2,425-443).
gagagcagcttgaatgtta

SEQ ID NO: 364484 - DNA, 19 bp, Homo sapiens
  siRNA target sequence for FBXO34 (NM_017943.2,427-445).
gagcagcttgaatgttaaa

SEQ ID NO: 364485 - DNA, 19 bp, Homo sapiens
  siRNA target sequence for FBXO34 (NM_017943.2,488-506).
gaagaaggaccacttgata

SEQ ID NO: 364486 - DNA, 19 bp, Homo sapiens
  siRNA target sequence for FBXO34 (NM_017943.2,577-595).
caggataggatctatgaaa

SEQ ID NO: 364487 - DNA, 19 bp, Homo sapiens
  siRNA target sequence for FBXO34 (NM_017943.2,713-731).
caacctgagccttttgcat

SEQ ID NO: 364488 - DNA, 19 bp, Homo sapiens
  siRNA target sequence for FBXO34 (NM_017943.2,791-809).
gggaggcctctgtcagtta

SEQ ID NO: 364489 - DNA, 19 bp, Homo sapiens
  siRNA target sequence for FBXO34 (NM_017943.2,792-810).
ggaggcctctgtcagttat

SEQ ID NO: 364490 - DNA, 19 bp, Homo sapiens
  siRNA target sequence for FBXO34 (NM_017943.2,850-868).
gctagctagctgttcaaaa

SEQ ID NO: 364491 - DNA, 19 bp, Homo sapiens
  siRNA target sequence for FBXO34 (NM_017943.2,851-869).
ctagctagctgttcaaaaa

SEQ ID NO: 364492 - DNA, 19 bp, Homo sapiens
  siRNA target sequence for FBXO34 (NM_017943.2,874-892).
cacaaactcacctgcaatt

SEQ ID NO: 364493 - DNA, 19 bp, Homo sapiens
  siRNA target sequence for FBXO34 (NM_017943.2,876-894).
caaactcacctgcaattgt

SEQ ID NO: 364494 - DNA, 19 bp, Homo sapiens
  siRNA target sequence for FBXO34 (NM_017943.2,884-902).
cctgcaattgtgaggtttt

SEQ ID NO: 364495 - DNA, 19 bp, Homo sapiens
  siRNA target sequence for FBXO34 (NM_017943.2,1014-1032).
cagtccgtgtccttgacat

SEQ ID NO: 364496 - DNA, 19 bp, Homo sapiens
  siRNA target sequence for FBXO34 (NM_017943.2,1085-1103).
gggagcctctcaaggaata

SEQ ID NO: 364497 - DNA, 19 bp, Homo sapiens
  siRNA target sequence for FBXO34 (NM_017943.2,1115-1133).
cgaaatgtgggcagagtat

SEQ ID NO: 364498 - DNA, 19 bp, Homo sapiens
  siRNA target sequence for FBXO34 (NM_017943.2,1126-1144).
cagagtattgcttgcaaat

SEQ ID NO: 364499 - DNA, 19 bp, Homo sapiens
  siRNA target sequence for FBXO34 (NM_017943.2,1231-1249).
ggattgtggcccttcaaga

SEQ ID NO: 364500 - DNA, 19 bp, Homo sapiens
  siRNA target sequence for FBXO34 (NM_017943.2,1325-1343).
gtgagtttccacatagaca

SEQ ID NO: 364501 - DNA, 19 bp, Homo sapiens
  siRNA target sequence for FBXO34 (NM_017943.2,1336-1354).
catagacagtgcagagtta

SEQ ID NO: 364502 - DNA, 19 bp, Homo sapiens
  siRNA target sequence for FBXO34 (NM_017943.2,1418-1436).
ctcgttgggttaccttttt

SEQ ID NO: 364503 - DNA, 19 bp, Homo sapiens
  siRNA target sequence for FBXO34 (NM_017943.2,1421-1439).
gttgggttacctttttcct

SEQ ID NO: 364504 - DNA, 19 bp, Homo sapiens
  siRNA target sequence for FBXO34 (NM_017943.2,1519-1537).
ccgaaatcctgatcaaaga

SEQ ID NO: 364505 - DNA, 19 bp, Homo sapiens
  siRNA target sequence for FBXO34 (NM_017943.2,1520-1538).
cgaaatcctgatcaaagaa

SEQ ID NO: 364506 - DNA, 19 bp, Homo sapiens
  siRNA target sequence for FBXO34 (NM_017943.2,1541-1559).
gaatctttgtgcattagta

SEQ ID NO: 364507 - DNA, 19 bp, Homo sapiens
  siRNA target sequence for FBXO34 (NM_017943.2,1617-1635).
cagttccagggatgttgtt

SEQ ID NO: 364508 - DNA, 19 bp, Homo sapiens
  siRNA target sequence for FBXO34 (NM_017943.2,1652-1670).
cagcacttgtcagactatt

SEQ ID NO: 364509 - DNA, 19 bp, Homo sapiens
  siRNA target sequence for FBXO34 (NM_017943.2,1992-2010).
gctgctatttcaagtttat

SEQ ID NO: 364510 - DNA, 19 bp, Homo sapiens
  siRNA target sequence for FBXO34 (NM_017943.2,1996-2014).
ctatttcaagtttatcatt

SEQ ID NO: 364511 - DNA, 19 bp, Homo sapiens
  siRNA target sequence for FBXO34 (NM_017943.2,2188-2206).
ctgccaccggtctcagaaa

SEQ ID NO: 364512 - DNA, 19 bp, Homo sapiens
  siRNA target sequence for FBXO34 (NM_017943.2,2192-2210).
caccggtctcagaaaggat

SEQ ID NO: 364513 - DNA, 19 bp, Homo sapiens
  siRNA target sequence for FBXO34 (NM_017943.2,2228-2246).
gggcttcatgacaatcact

SEQ ID NO: 364514 - DNA, 19 bp, Homo sapiens
  siRNA target sequence for FBXO34 (NM_017943.2,2266-2284).
ctttaatcgggcaatccat

SEQ ID NO: 364515 - DNA, 19 bp, Homo sapiens
  siRNA target sequence for MOCOS (NM_017947.1,211-229).
cagctcgaaagcttcacta

SEQ ID NO: 364516 - DNA, 19 bp, Homo sapiens
  siRNA target sequence for MOCOS (NM_017947.1,216-234).
cgaaagcttcactagtgat

SEQ ID NO: 364517 - DNA, 19 bp, Homo sapiens
  siRNA target sequence for MOCOS (NM_017947.1,221-239).
gcttcactagtgatctcat

SEQ ID NO: 364518 - DNA, 19 bp, Homo sapiens
  siRNA target sequence for MOCOS (NM_017947.1,240-258).
ggaaaacacttatggtaat

SEQ ID NO: 364519 - DNA, 19 bp, Homo sapiens
  siRNA target sequence for MOCOS (NM_017947.1,304-322).
gagcaggtgcgctacagaa

SEQ ID NO: 364520 - DNA, 19 bp, Homo sapiens
  siRNA target sequence for MOCOS (NM_017947.1,352-370).
gactacactgtgatcttca

SEQ ID NO: 364521 - DNA, 19 bp, Homo sapiens
  siRNA target sequence for MOCOS (NM_017947.1,378-396).
gagcacggctgctctcaaa

SEQ ID NO: 364522 - DNA, 19 bp, Homo sapiens
  siRNA target sequence for MOCOS (NM_017947.1,443-461).
gtgggagtcgcttctgtta

SEQ ID NO: 364523 - DNA, 19 bp, Homo sapiens
  siRNA target sequence for MOCOS (NM_017947.1,511-529).
gctataaatgtcatatcca

SEQ ID NO: 364524 - DNA, 19 bp, Homo sapiens
  siRNA target sequence for MOCOS (NM_017947.1,617-635).
gctacccagctcagagtaa

SEQ ID NO: 364525 - DNA, 19 bp, Homo sapiens
  siRNA target sequence for MOCOS (NM_017947.1,621-639).
cccagctcagagtaacttt

SEQ ID NO: 364526 - DNA, 19 bp, Homo sapiens
  siRNA target sequence for MOCOS (NM_017947.1,622-640).
ccagctcagagtaactttt

SEQ ID NO: 364527 - DNA, 19 bp, Homo sapiens
  siRNA target sequence for MOCOS (NM_017947.1,776-794).
ctcaccaggccgactttgt

SEQ ID NO: 364528 - DNA, 19 bp, Homo sapiens
  siRNA target sequence for MOCOS (NM_017947.1,839-857).
gcgctctgctggtccataa

SEQ ID NO: 364529 - DNA, 19 bp, Homo sapiens
  siRNA target sequence for MOCOS (NM_017947.1,840-858).
cgctctgctggtccataat

SEQ ID NO: 364530 - DNA, 19 bp, Homo sapiens
  siRNA target sequence for MOCOS (NM_017947.1,951-969).
ggtagctcagaggtttgaa

SEQ ID NO: 364531 - DNA, 19 bp, Homo sapiens
  siRNA target sequence for MOCOS (NM_017947.1,999-1017).
cgcgctaaaacatggattt

SEQ ID NO: 364532 - DNA, 19 bp, Homo sapiens
  siRNA target sequence for MOCOS (NM_017947.1,1001-1019).
cgctaaaacatggatttga

SEQ ID NO: 364533 - DNA, 19 bp, Homo sapiens
  siRNA target sequence for MOCOS (NM_017947.1,1073-1091).
ccttggctcagtataccta

SEQ ID NO: 364534 - DNA, 19 bp, Homo sapiens
  siRNA target sequence for MOCOS (NM_017947.1,1129-1147).
cctgtggtgcggatttaca

SEQ ID NO: 364535 - DNA, 19 bp, Homo sapiens
  siRNA target sequence for MOCOS (NM_017947.1,1276-1294).
cgaactggctgcttctgta

SEQ ID NO: 364536 - DNA, 19 bp, Homo sapiens
  siRNA target sequence for MOCOS (NM_017947.1,1363-1381).
catgtctgtggggacaata

SEQ ID NO: 364537 - DNA, 19 bp, Homo sapiens
  siRNA target sequence for MOCOS (NM_017947.1,1377-1395).
caatatggacctcatagat

SEQ ID NO: 364538 - DNA, 19 bp, Homo sapiens
  siRNA target sequence for MOCOS (NM_017947.1,1418-1436).
ggatttcatttggatacat

SEQ ID NO: 364539 - DNA, 19 bp, Homo sapiens
  siRNA target sequence for MOCOS (NM_017947.1,1459-1477).
gcctttcttaggttcatca

SEQ ID NO: 364540 - DNA, 19 bp, Homo sapiens
  siRNA target sequence for MOCOS (NM_017947.1,1460-1478).
cctttcttaggttcatcat

SEQ ID NO: 364541 - DNA, 19 bp, Homo sapiens
  siRNA target sequence for MOCOS (NM_017947.1,1461-1479).
ctttcttaggttcatcata

SEQ ID NO: 364542 - DNA, 19 bp, Homo sapiens
  siRNA target sequence for MOCOS (NM_017947.1,1465-1483).
cttaggttcatcatagaca

SEQ ID NO: 364543 - DNA, 19 bp, Homo sapiens
  siRNA target sequence for MOCOS (NM_017947.1,1650-1668).
caactcgtctactgtgaat

SEQ ID NO: 364544 - DNA, 19 bp, Homo sapiens
  siRNA target sequence for MOCOS (NM_017947.1,1713-1731).
gccgactccttcagagaaa

SEQ ID NO: 364545 - DNA, 19 bp, Homo sapiens
  siRNA target sequence for MOCOS (NM_017947.1,1754-1772).
cccttgggccacatgttgt

SEQ ID NO: 364546 - DNA, 19 bp, Homo sapiens
  siRNA target sequence for MOCOS (NM_017947.1,1863-1881).
gagctggatggttgtgaat

SEQ ID NO: 364547 - DNA, 19 bp, Homo sapiens
  siRNA target sequence for MOCOS (NM_017947.1,2053-2071).
gctgacagagtaagtactt

SEQ ID NO: 364548 - DNA, 19 bp, Homo sapiens
  siRNA target sequence for MOCOS (NM_017947.1,2054-2072).
ctgacagagtaagtactta

SEQ ID NO: 364549 - DNA, 19 bp, Homo sapiens
  siRNA target sequence for MOCOS (NM_017947.1,2093-2111).
caagctggttgtcaacatt

SEQ ID NO: 364550 - DNA, 19 bp, Homo sapiens
  siRNA target sequence for MOCOS (NM_017947.1,2097-2115).
ctggttgtcaacatttttt

SEQ ID NO: 364551 - DNA, 19 bp, Homo sapiens
  siRNA target sequence for MOCOS (NM_017947.1,2140-2158).
caaagttcaaactctcaaa

SEQ ID NO: 364552 - DNA, 19 bp, Homo sapiens
  siRNA target sequence for MOCOS (NM_017947.1,2233-2251).
cagtatctgctgatcaaca

SEQ ID NO: 364553 - DNA, 19 bp, Homo sapiens
  siRNA target sequence for MOCOS (NM_017947.1,2244-2262).
gatcaacacatccagtatt

SEQ ID NO: 364554 - DNA, 19 bp, Homo sapiens
  siRNA target sequence for MOCOS (NM_017947.1,2269-2287).
cttcaccggcaactaaaca

SEQ ID NO: 364555 - DNA, 19 bp, Homo sapiens
  siRNA target sequence for MOCOS (NM_017947.1,2340-2358).
gcgttttcgtgccaatatt

SEQ ID NO: 364556 - DNA, 19 bp, Homo sapiens
  siRNA target sequence for MOCOS (NM_017947.1,2341-2359).
cgttttcgtgccaatatta

SEQ ID NO: 364557 - DNA, 19 bp, Homo sapiens
  siRNA target sequence for MOCOS (NM_017947.1,2348-2366).
gtgccaatattattatcaa

SEQ ID NO: 364558 - DNA, 19 bp, Homo sapiens
  siRNA target sequence for MOCOS (NM_017947.1,2556-2574).
gatgcatgcatcattggat

SEQ ID NO: 364559 - DNA, 19 bp, Homo sapiens
  siRNA target sequence for MOCOS (NM_017947.1,2614-2632).
ctccctgtgttgaaagaga

SEQ ID NO: 364560 - DNA, 19 bp, Homo sapiens
  siRNA target sequence for MOCOS (NM_017947.1,2616-2634).
ccctgtgttgaaagagaat

SEQ ID NO: 364561 - DNA, 19 bp, Homo sapiens
  siRNA target sequence for MOCOS (NM_017947.1,2637-2655).
ggaaggtcatgatttacct

SEQ ID NO: 364562 - DNA, 19 bp, Homo sapiens
  siRNA target sequence for C9orf34 (NM_017948.3,42-60).
ccttagccaggacatttct

SEQ ID NO: 364563 - DNA, 19 bp, Homo sapiens
  siRNA target sequence for C9orf34 (NM_017948.3,64-82).
gcagacctacaaaatcagt

SEQ ID NO: 364564 - DNA, 19 bp, Homo sapiens
  siRNA target sequence for C9orf34 (NM_017948.3,114-132).
gatcatcacacggaaagat

SEQ ID NO: 364565 - DNA, 19 bp, Homo sapiens
  siRNA target sequence for C9orf34 (NM_017948.3,144-162).
cccacagaaagtttttgca

SEQ ID NO: 364566 - DNA, 19 bp, Homo sapiens
  siRNA target sequence for C9orf34 (NM_017948.3,181-199).
gcagaagcggacctgaaaa

SEQ ID NO: 364567 - DNA, 19 bp, Homo sapiens
  siRNA target sequence for C9orf34 (NM_017948.3,184-202).
gaagcggacctgaaaaaat

SEQ ID NO: 364568 - DNA, 19 bp, Homo sapiens
  siRNA target sequence for C9orf34 (NM_017948.3,187-205).
gcggacctgaaaaaatgta

SEQ ID NO: 364569 - DNA, 19 bp, Homo sapiens
  siRNA target sequence for C9orf34 (NM_017948.3,188-206).
cggacctgaaaaaatgtat

SEQ ID NO: 364570 - DNA, 19 bp, Homo sapiens
  siRNA target sequence for C9orf34 (NM_017948.3,335-353).
gtaacgccaacttgttaga

SEQ ID NO: 364571 - DNA, 19 bp, Homo sapiens
  siRNA target sequence for C9orf34 (NM_017948.3,362-380).
gaggagtggatttccatat

SEQ ID NO: 364572 - DNA, 19 bp, Homo sapiens
  siRNA target sequence for C9orf34 (NM_017948.3,432-450).
caaatttggaagagtctta

SEQ ID NO: 364573 - DNA, 19 bp, Homo sapiens
  siRNA target sequence for C9orf34 (NM_017948.3,472-490).
caacataaacgtaaaatca

SEQ ID NO: 364574 - DNA, 19 bp, Homo sapiens
  siRNA target sequence for C9orf34 (NM_017948.3,482-500).
gtaaaatcatcaaatatga

SEQ ID NO: 364575 - DNA, 19 bp, Homo sapiens
  siRNA target sequence for C9orf34 (NM_017948.3,515-533).
gccacaacctgaagaagat

SEQ ID NO: 364576 - DNA, 19 bp, Homo sapiens
  siRNA target sequence for C9orf34 (NM_017948.3,567-585).
cagcctgacttgggaatta

SEQ ID NO: 364577 - DNA, 19 bp, Homo sapiens
  siRNA target sequence for C9orf34 (NM_017948.3,569-587).
gcctgacttgggaattaga

SEQ ID NO: 364578 - DNA, 19 bp, Homo sapiens
  siRNA target sequence for C9orf34 (NM_017948.3,593-611).
ggaatgaccctatgagtaa

SEQ ID NO: 364579 - DNA, 19 bp, Homo sapiens
  siRNA target sequence for C9orf34 (NM_017948.3,750-768).
gcaacaggctgcacaaaaa

SEQ ID NO: 364580 - DNA, 19 bp, Homo sapiens
  siRNA target sequence for C9orf34 (NM_017948.3,756-774).
ggctgcacaaaaaagaact

SEQ ID NO: 364581 - DNA, 19 bp, Homo sapiens
  siRNA target sequence for C9orf34 (NM_017948.3,967-985).
caaccctcaataaatgaat

SEQ ID NO: 364582 - DNA, 19 bp, Homo sapiens
  siRNA target sequence for C9orf34 (NM_017948.3,1003-1021).
gaagttgtaagggatgatt

SEQ ID NO: 364583 - DNA, 19 bp, Homo sapiens
  siRNA target sequence for C9orf34 (NM_017948.3,1006-1024).
gttgtaagggatgatttca

SEQ ID NO: 364584 - DNA, 19 bp, Homo sapiens
  siRNA target sequence for C9orf34 (NM_017948.3,1009-1027).
gtaagggatgatttcaaat

SEQ ID NO: 364585 - DNA, 19 bp, Homo sapiens
  siRNA target sequence for C9orf34 (NM_017948.3,1038-1056).
caaactgcattctttaata

SEQ ID NO: 364586 - DNA, 19 bp, Homo sapiens
  siRNA target sequence for C9orf34 (NM_017948.3,1042-1060).
ctgcattctttaataggtt

SEQ ID NO: 364587 - DNA, 19 bp, Homo sapiens
  siRNA target sequence for C9orf34 (NM_017948.3,1044-1062).
gcattctttaataggttta

SEQ ID NO: 364588 - DNA, 19 bp, Homo sapiens
  siRNA target sequence for C9orf34 (NM_017948.3,1110-1128).
gagaaatgatcgtgagtat

SEQ ID NO: 364589 - DNA, 19 bp, Homo sapiens
  siRNA target sequence for C9orf34 (NM_017948.3,1125-1143).
gtatgactcaggagataca

SEQ ID NO: 364590 - DNA, 19 bp, Homo sapiens
  siRNA target sequence for C9orf34 (NM_017948.3,1147-1165).
gaaattattgcgatgaaaa

SEQ ID NO: 364591 - DNA, 19 bp, Homo sapiens
  siRNA target sequence for C9orf34 (NM_017948.3,1174-1192).
gctaaggtcaaaaacagta

SEQ ID NO: 364592 - DNA, 19 bp, Homo sapiens
  siRNA target sequence for C9orf34 (NM_017948.3,1220-1238).
cgaagaaaacttctttcaa

SEQ ID NO: 364593 - DNA, 19 bp, Homo sapiens
  siRNA target sequence for C9orf34 (NM_017948.3,1262-1280).
ctgatcactgtattaaact

SEQ ID NO: 364594 - DNA, 19 bp, Homo sapiens
  siRNA target sequence for C9orf34 (NM_017948.3,1267-1285).
cactgtattaaactacaaa

SEQ ID NO: 364595 - DNA, 19 bp, Homo sapiens
  siRNA target sequence for C9orf34 (NM_017948.3,1307-1325).
cagccctcagtcatggatt

SEQ ID NO: 364596 - DNA, 19 bp, Homo sapiens
  siRNA target sequence for C9orf34 (NM_017948.3,1312-1330).
ctcagtcatggattaaagt

SEQ ID NO: 364597 - DNA, 19 bp, Homo sapiens
  siRNA target sequence for C9orf34 (NM_017948.3,1314-1332).
cagtcatggattaaagtct

SEQ ID NO: 364598 - DNA, 19 bp, Homo sapiens
  siRNA target sequence for C9orf34 (NM_017948.3,1329-1347).
gtctcttaatcgtaaatct

SEQ ID NO: 364599 - DNA, 19 bp, Homo sapiens
  siRNA target sequence for C9orf34 (NM_017948.3,1490-1508).
gtgatctgaaggttccaaa

SEQ ID NO: 364600 - DNA, 19 bp, Homo sapiens
  siRNA target sequence for C9orf34 (NM_017948.3,1500-1518).
ggttccaaatgaagatact

SEQ ID NO: 364601 - DNA, 19 bp, Homo sapiens
  siRNA target sequence for C9orf34 (NM_017948.3,1539-1557).
caccacccaatgcaagttt

SEQ ID NO: 364602 - DNA, 19 bp, Homo sapiens
  siRNA target sequence for C9orf34 (NM_017948.3,1598-1616).
gcagaggccgacagtgtat

SEQ ID NO: 364603 - DNA, 19 bp, Homo sapiens
  siRNA target sequence for C9orf34 (NM_017948.3,1599-1617).
cagaggccgacagtgtatt

SEQ ID NO: 364604 - DNA, 19 bp, Homo sapiens
  siRNA target sequence for C9orf34 (NM_017948.3,1722-1740).
gggagtaggctgtctatat

SEQ ID NO: 364605 - DNA, 19 bp, Homo sapiens
  siRNA target sequence for C9orf34 (NM_017948.3,1726-1744).
gtaggctgtctatatgaaa

SEQ ID NO: 364606 - DNA, 19 bp, Homo sapiens
  siRNA target sequence for C9orf34 (NM_017948.3,1747-1765).
gagtcaatgaaaaaatcct

SEQ ID NO: 364607 - DNA, 19 bp, Homo sapiens
  siRNA target sequence for C9orf34 (NM_017948.3,1771-1789).
gacagtgttgcctctaaca

SEQ ID NO: 364608 - DNA, 19 bp, Homo sapiens
  siRNA target sequence for C9orf34 (NM_017948.3,1775-1793).
gtgttgcctctaacaataa

SEQ ID NO: 364609 - DNA, 19 bp, Homo sapiens
  siRNA target sequence for C9orf34 (NM_017948.3,1816-1834).
gaggatcccagtatcatat

SEQ ID NO: 364610 - DNA, 19 bp, Homo sapiens
  siRNA target sequence for C9orf34 (NM_017948.3,1843-1861).
gatgggtccccatatgtta

SEQ ID NO: 364611 - DNA, 19 bp, Homo sapiens
  siRNA target sequence for C9orf34 (NM_017948.3,1905-1923).
ggcgaatggcccaaactat

SEQ ID NO: 364612 - DNA, 19 bp, Homo sapiens
  siRNA target sequence for C9orf34 (NM_017948.3,1906-1924).
gcgaatggcccaaactata

SEQ ID NO: 364613 - DNA, 19 bp, Homo sapiens
  siRNA target sequence for C9orf34 (NM_017948.3,1907-1925).
cgaatggcccaaactatat

SEQ ID NO: 364614 - DNA, 19 bp, Homo sapiens
  siRNA target sequence for C9orf34 (NM_017948.3,1977-1995).
gtcccctagcagttctgaa

SEQ ID NO: 364615 - DNA, 19 bp, Homo sapiens
  siRNA target sequence for C9orf34 (NM_017948.3,2012-2030).
ctatttctaggccattaga

SEQ ID NO: 364616 - DNA, 19 bp, Homo sapiens
  siRNA target sequence for C9orf34 (NM_017948.3,2018-2036).
ctaggccattagaaggtaa

SEQ ID NO: 364617 - DNA, 19 bp, Homo sapiens
  siRNA target sequence for C9orf34 (NM_017948.3,2033-2051).
gtaagaagtccttaagtct

SEQ ID NO: 364618 - DNA, 19 bp, Homo sapiens
  siRNA target sequence for C9orf34 (NM_017948.3,2094-2112).
ccatagtaccacaaagaca

SEQ ID NO: 364619 - DNA, 19 bp, Homo sapiens
  siRNA target sequence for C9orf34 (NM_017948.3,2124-2142).
ggaagagcggtctgattca

SEQ ID NO: 364620 - DNA, 19 bp, Homo sapiens
  siRNA target sequence for C9orf34 (NM_017948.3,2187-2205).
ggacactcgggaaatcaaa

SEQ ID NO: 364621 - DNA, 19 bp, Homo sapiens
  siRNA target sequence for C9orf34 (NM_017948.3,2192-2210).
ctcgggaaatcaaaactga

SEQ ID NO: 364622 - DNA, 19 bp, Homo sapiens
  siRNA target sequence for C9orf34 (NM_017948.3,2218-2236).
ctttctattagtaattcgt

SEQ ID NO: 364623 - DNA, 19 bp, Homo sapiens
  siRNA target sequence for C9orf34 (NM_017948.3,2235-2253).
gtcagatgtgagtgctaaa

SEQ ID NO: 364624 - DNA, 19 bp, Homo sapiens
  siRNA target sequence for C9orf34 (NM_017948.3,2295-2313).
ggaagcgaggcaaaaagca

SEQ ID NO: 364625 - DNA, 19 bp, Homo sapiens
  siRNA target sequence for C9orf34 (NM_017948.3,2325-2343).
gaagaagctggtgcataat

SEQ ID NO: 364626 - DNA, 19 bp, Homo sapiens
  siRNA target sequence for C9orf34 (NM_017948.3,2328-2346).
gaagctggtgcataatgct

SEQ ID NO: 364627 - DNA, 19 bp, Homo sapiens
  siRNA target sequence for C9orf34 (NM_017948.3,2338-2356).
cataatgctctggcaaatt

SEQ ID NO: 364628 - DNA, 19 bp, Homo sapiens
  siRNA target sequence for C9orf34 (NM_017948.3,2397-2415).
cggttctgacagtgaatgt

SEQ ID NO: 364629 - DNA, 19 bp, Homo sapiens
  siRNA target sequence for C9orf34 (NM_017948.3,2475-2493).
gtctatgggtaaaacatca

SEQ ID NO: 364630 - DNA, 19 bp, Homo sapiens
  siRNA target sequence for C9orf34 (NM_017948.3,2489-2507).
catcagggaagctgtttga

SEQ ID NO: 364631 - DNA, 19 bp, Homo sapiens
  siRNA target sequence for C9orf34 (NM_017948.3,2587-2605).
ggacagaagctcatggatt

SEQ ID NO: 364632 - DNA, 19 bp, Homo sapiens
  siRNA target sequence for C9orf34 (NM_017948.3,2637-2655).
ccgcatggactctcgattt

SEQ ID NO: 364633 - DNA, 19 bp, Homo sapiens
  siRNA target sequence for C9orf34 (NM_017948.3,2640-2658).
catggactctcgatttcta

SEQ ID NO: 364634 - DNA, 19 bp, Homo sapiens
  siRNA target sequence for C9orf34 (NM_017948.3,2644-2662).
gactctcgatttctagaaa

SEQ ID NO: 364635 - DNA, 19 bp, Homo sapiens
  siRNA target sequence for C9orf34 (NM_017948.3,2646-2664).
ctctcgatttctagaaact

SEQ ID NO: 364636 - DNA, 19 bp, Homo sapiens
  siRNA target sequence for C9orf34 (NM_017948.3,2743-2761).
gccctgaatgttgtacaaa

SEQ ID NO: 364637 - DNA, 19 bp, Homo sapiens
  siRNA target sequence for C9orf34 (NM_017948.3,2745-2763).
cctgaatgttgtacaaagt

SEQ ID NO: 364638 - DNA, 19 bp, Homo sapiens
  siRNA target sequence for C9orf34 (NM_017948.3,2857-2875).
gaccatgccacttacgaaa

SEQ ID NO: 364639 - DNA, 19 bp, Homo sapiens
  siRNA target sequence for C9orf34 (NM_017948.3,2950-2968).
gaggtgtctaaagaaatgt

SEQ ID NO: 364640 - DNA, 19 bp, Homo sapiens
  siRNA target sequence for C9orf34 (NM_017948.3,2980-2998).
gctatggatctgaaagaaa

SEQ ID NO: 364641 - DNA, 19 bp, Homo sapiens
  siRNA target sequence for C9orf34 (NM_017948.3,3048-3066).
gaatgaggactgtggtaaa

SEQ ID NO: 364642 - DNA, 19 bp, Homo sapiens
  siRNA target sequence for C9orf34 (NM_017948.3,3125-3143).
gcgggttcacgttctcttt

SEQ ID NO: 364643 - DNA, 19 bp, Homo sapiens
  siRNA target sequence for C9orf34 (NM_017948.3,3126-3144).
cgggttcacgttctctttt

SEQ ID NO: 364644 - DNA, 19 bp, Homo sapiens
  siRNA target sequence for C9orf34 (NM_017948.3,3177-3195).
gacctacagagttgaaaca

SEQ ID NO: 364645 - DNA, 19 bp, Homo sapiens
  siRNA target sequence for C9orf34 (NM_017948.3,3179-3197).
cctacagagttgaaacagt

SEQ ID NO: 364646 - DNA, 19 bp, Homo sapiens
  siRNA target sequence for C9orf34 (NM_017948.3,3219-3237).
gcaggaagaccctcgttta

SEQ ID NO: 364647 - DNA, 19 bp, Homo sapiens
  siRNA target sequence for C9orf34 (NM_017948.3,3222-3240).
ggaagaccctcgtttacaa

SEQ ID NO: 364648 - DNA, 19 bp, Homo sapiens
  siRNA target sequence for C9orf34 (NM_017948.3,3325-3343).
gagaccactagatttttct

SEQ ID NO: 364649 - DNA, 19 bp, Homo sapiens
  siRNA target sequence for C9orf34 (NM_017948.3,3354-3372).
gaatgatgaacgacttcaa

SEQ ID NO: 364650 - DNA, 19 bp, Homo sapiens
  siRNA target sequence for C9orf34 (NM_017948.3,3370-3388).
caaggttctgacttattct

SEQ ID NO: 364651 - DNA, 19 bp, Homo sapiens
  siRNA target sequence for C9orf34 (NM_017948.3,3394-3412).
ggagtaggaagtaatatga

SEQ ID NO: 364652 - DNA, 19 bp, Homo sapiens
  siRNA target sequence for C9orf34 (NM_017948.3,3449-3467).
gtatggattgtcgaaagaa

SEQ ID NO: 364653 - DNA, 19 bp, Homo sapiens
  siRNA target sequence for C9orf34 (NM_017948.3,3453-3471).
ggattgtcgaaagaaacat

SEQ ID NO: 364654 - DNA, 19 bp, Homo sapiens
  siRNA target sequence for C9orf34 (NM_017948.3,3454-3472).
gattgtcgaaagaaacata

SEQ ID NO: 364655 - DNA, 19 bp, Homo sapiens
  siRNA target sequence for C9orf34 (NM_017948.3,3458-3476).
gtcgaaagaaacataaaga

SEQ ID NO: 364656 - DNA, 19 bp, Homo sapiens
  siRNA target sequence for C9orf34 (NM_017948.3,3469-3487).
cataaagacgcaaaaagga

SEQ ID NO: 364657 - DNA, 19 bp, Homo sapiens
  siRNA target sequence for C14orf34 (NM_017949.1,903-921).
gattacgacatcatcgaat

SEQ ID NO: 364658 - DNA, 19 bp, Homo sapiens
  siRNA target sequence for C14orf34 (NM_017949.1,1256-1274).
caaccttccggatgacttt

SEQ ID NO: 364659 - DNA, 19 bp, Homo sapiens
  siRNA target sequence for C14orf34 (NM_017949.1,1496-1514).
ggagagagatcgattgaaa

SEQ ID NO: 364660 - DNA, 19 bp, Homo sapiens
  siRNA target sequence for C14orf34 (NM_017949.1,1497-1515).
gagagagatcgattgaaat

SEQ ID NO: 364661 - DNA, 19 bp, Homo sapiens
  siRNA target sequence for C14orf34 (NM_017949.1,1501-1519).
gagatcgattgaaatacga

SEQ ID NO: 364662 - DNA, 19 bp, Homo sapiens
  siRNA target sequence for C14orf34 (NM_017949.1,1503-1521).
gatcgattgaaatacgaat

SEQ ID NO: 364663 - DNA, 19 bp, Homo sapiens
  siRNA target sequence for C14orf34 (NM_017949.1,1518-1536).
gaatcccagaaatctaaat

SEQ ID NO: 364664 - DNA, 19 bp, Homo sapiens
  siRNA target sequence for C14orf34 (NM_017949.1,1604-1622).
ccccgctgtgtctgaagat

SEQ ID NO: 364665 - DNA, 19 bp, Homo sapiens
  siRNA target sequence for C14orf34 (NM_017949.1,1661-1679).
cacccggaggaaactgttt

SEQ ID NO: 364666 - DNA, 19 bp, Homo sapiens
  siRNA target sequence for C14orf34 (NM_017949.1,1799-1817).
gggccacgcgtgtgatgaa

SEQ ID NO: 364667 - DNA, 19 bp, Homo sapiens
  siRNA target sequence for FLJ20758 (NM_017952.4,125-143).
cacgcagctgcagatttta

SEQ ID NO: 364668 - DNA, 19 bp, Homo sapiens
  siRNA target sequence for FLJ20758 (NM_017952.4,149-167).
gtagtgcaaccctctcaaa

SEQ ID NO: 364669 - DNA, 19 bp, Homo sapiens
  siRNA target sequence for FLJ20758 (NM_017952.4,190-208).
gggattgaagaagtagtaa

SEQ ID NO: 364670 - DNA, 19 bp, Homo sapiens
  siRNA target sequence for FLJ20758 (NM_017952.4,250-268).
gcacttgcatccacagtaa

SEQ ID NO: 364671 - DNA, 19 bp, Homo sapiens
  siRNA target sequence for FLJ20758 (NM_017952.4,251-269).
cacttgcatccacagtaaa

SEQ ID NO: 364672 - DNA, 19 bp, Homo sapiens
  siRNA target sequence for FLJ20758 (NM_017952.4,278-296).
ccacagctgtgccttatgt

SEQ ID NO: 364673 - DNA, 19 bp, Homo sapiens
  siRNA target sequence for FLJ20758 (NM_017952.4,288-306).
gccttatgtgtttcaagat

SEQ ID NO: 364674 - DNA, 19 bp, Homo sapiens
  siRNA target sequence for FLJ20758 (NM_017952.4,290-308).
cttatgtgtttcaagatga

SEQ ID NO: 364675 - DNA, 19 bp, Homo sapiens
  siRNA target sequence for FLJ20758 (NM_017952.4,301-319).
caagatgatccttacctta

SEQ ID NO: 364676 - DNA, 19 bp, Homo sapiens
  siRNA target sequence for FLJ20758 (NM_017952.4,336-354).
ggaatctcgttcattttta

SEQ ID NO: 364677 - DNA, 19 bp, Homo sapiens
  siRNA target sequence for FLJ20758 (NM_017952.4,436-454).
cctcatataccgtgtttaa

SEQ ID NO: 364678 - DNA, 19 bp, Homo sapiens
  siRNA target sequence for FLJ20758 (NM_017952.4,437-455).
ctcatataccgtgtttaat

SEQ ID NO: 364679 - DNA, 19 bp, Homo sapiens
  siRNA target sequence for FLJ20758 (NM_017952.4,449-467).
gtttaatgcctgagtactt

SEQ ID NO: 364680 - DNA, 19 bp, Homo sapiens
  siRNA target sequence for FLJ20758 (NM_017952.4,465-483).
ctttgaacctcagatcaaa

SEQ ID NO: 364681 - DNA, 19 bp, Homo sapiens
  siRNA target sequence for FLJ20758 (NM_017952.4,536-554).
cctctgtggacatgtttga

SEQ ID NO: 364682 - DNA, 19 bp, Homo sapiens
  siRNA target sequence for FLJ20758 (NM_017952.4,549-567).
gtttgatcagcttttgcaa

SEQ ID NO: 364683 - DNA, 19 bp, Homo sapiens
  siRNA target sequence for FLJ20758 (NM_017952.4,634-652).
caggagccctcaactgatt

SEQ ID NO: 364684 - DNA, 19 bp, Homo sapiens
  siRNA target sequence for FLJ20758 (NM_017952.4,639-657).
gccctcaactgattaccat

SEQ ID NO: 364685 - DNA, 19 bp, Homo sapiens
  siRNA target sequence for FLJ20758 (NM_017952.4,640-658).
ccctcaactgattaccatt

SEQ ID NO: 364686 - DNA, 19 bp, Homo sapiens
  siRNA target sequence for FLJ20758 (NM_017952.4,641-659).
cctcaactgattaccattt

SEQ ID NO: 364687 - DNA, 19 bp, Homo sapiens
  siRNA target sequence for FLJ20758 (NM_017952.4,642-660).
ctcaactgattaccatttt

SEQ ID NO: 364688 - DNA, 19 bp, Homo sapiens
  siRNA target sequence for FLJ20758 (NM_017952.4,668-686).
ctggacagtcagaagcatt

SEQ ID NO: 364689 - DNA, 19 bp, Homo sapiens
  siRNA target sequence for FLJ20758 (NM_017952.4,716-734).
ggaaagctggtcatcagtt

SEQ ID NO: 364690 - DNA, 19 bp, Homo sapiens
  siRNA target sequence for FLJ20758 (NM_017952.4,717-735).
gaaagctggtcatcagttt

SEQ ID NO: 364691 - DNA, 19 bp, Homo sapiens
  siRNA target sequence for FLJ20758 (NM_017952.4,727-745).
catcagtttggagttacat

SEQ ID NO: 364692 - DNA, 19 bp, Homo sapiens
  siRNA target sequence for FLJ20758 (NM_017952.4,739-757).
gttacatggcgagcaaaaa

SEQ ID NO: 364693 - DNA, 19 bp, Homo sapiens
  siRNA target sequence for FLJ20758 (NM_017952.4,802-820).
cattcctattgcacaatga

SEQ ID NO: 364694 - DNA, 19 bp, Homo sapiens
  siRNA target sequence for FLJ20758 (NM_017952.4,831-849).
ggtgaagcaccgagcttat

SEQ ID NO: 364695 - DNA, 19 bp, Homo sapiens
  siRNA target sequence for FLJ20758 (NM_017952.4,850-868).
gagcaggcattaaacttgt

SEQ ID NO: 364696 - DNA, 19 bp, Homo sapiens
  siRNA target sequence for FLJ20758 (NM_017952.4,864-882).
cttgtacactgagttacta

SEQ ID NO: 364697 - DNA, 19 bp, Homo sapiens
  siRNA target sequence for FLJ20758 (NM_017952.4,890-908).
gactccatgctgatgtata

SEQ ID NO: 364698 - DNA, 19 bp, Homo sapiens
  siRNA target sequence for FLJ20758 (NM_017952.4,895-913).
catgctgatgtatacacat

SEQ ID NO: 364699 - DNA, 19 bp, Homo sapiens
  siRNA target sequence for FLJ20758 (NM_017952.4,904-922).
gtatacacatttaatgcat

SEQ ID NO: 364700 - DNA, 19 bp, Homo sapiens
  siRNA target sequence for FLJ20758 (NM_017952.4,932-950).
caacagtatgtgcgataaa

SEQ ID NO: 364701 - DNA, 19 bp, Homo sapiens
  siRNA target sequence for FLJ20758 (NM_017952.4,937-955).
gtatgtgcgataaatgaga

SEQ ID NO: 364702 - DNA, 19 bp, Homo sapiens
  siRNA target sequence for FLJ20758 (NM_017952.4,944-962).
cgataaatgagaaatttga

SEQ ID NO: 364703 - DNA, 19 bp, Homo sapiens
  siRNA target sequence for FLJ20758 (NM_017952.4,1055-1073).
gtctccgaagatttcatgt

SEQ ID NO: 364704 - DNA, 19 bp, Homo sapiens
  siRNA target sequence for FLJ20758 (NM_017952.4,1085-1103).
cgccagccttacaggtttt

SEQ ID NO: 364705 - DNA, 19 bp, Homo sapiens
  siRNA target sequence for FLJ20758 (NM_017952.4,1086-1104).
gccagccttacaggtttta

SEQ ID NO: 364706 - DNA, 19 bp, Homo sapiens
  siRNA target sequence for FLJ20758 (NM_017952.4,1133-1151).
cctcgcttgcaacatatca

SEQ ID NO: 364707 - DNA, 19 bp, Homo sapiens
  siRNA target sequence for FLJ20758 (NM_017952.4,1180-1198).
ggagaccctttaaagagat

SEQ ID NO: 364708 - DNA, 19 bp, Homo sapiens
  siRNA target sequence for FLJ20758 (NM_017952.4,1199-1217).
catccttcatcatttatga

SEQ ID NO: 364709 - DNA, 19 bp, Homo sapiens
  siRNA target sequence for FLJ20758 (NM_017952.4,1258-1276).
gacccggatgatgataagt

SEQ ID NO: 364710 - DNA, 19 bp, Homo sapiens
  siRNA target sequence for FLJ20758 (NM_017952.4,1267-1285).
gatgataagttttttcagt

SEQ ID NO: 364711 - DNA, 19 bp, Homo sapiens
  siRNA target sequence for FLJ20758 (NM_017952.4,1333-1351).
caagtacatggccttttaa

SEQ ID NO: 364712 - DNA, 19 bp, Homo sapiens
  siRNA target sequence for FLJ20758 (NM_017952.4,1355-1373).
ccggagacaactggaaatt

SEQ ID NO: 364713 - DNA, 19 bp, Homo sapiens
  siRNA target sequence for FLJ20758 (NM_017952.4,1409-1427).
ccaagttcttcgatttgat

SEQ ID NO: 364714 - DNA, 19 bp, Homo sapiens
  siRNA target sequence for FLJ20758 (NM_017952.4,1476-1494).
gataccttcagcctacttt

SEQ ID NO: 364715 - DNA, 19 bp, Homo sapiens
  siRNA target sequence for FLJ20758 (NM_017952.4,1495-1513).
ccccactcccaaacaatga

SEQ ID NO: 364716 - DNA, 19 bp, Homo sapiens
  siRNA target sequence for FLJ20758 (NM_017952.4,1496-1514).
cccactcccaaacaatgat

SEQ ID NO: 364717 - DNA, 19 bp, Homo sapiens
  siRNA target sequence for FLJ20758 (NM_017952.4,1497-1515).
ccactcccaaacaatgata

SEQ ID NO: 364718 - DNA, 19 bp, Homo sapiens
  siRNA target sequence for FLJ20758 (NM_017952.4,1502-1520).
cccaaacaatgatacatct

SEQ ID NO: 364719 - DNA, 19 bp, Homo sapiens
  siRNA target sequence for FLJ20758 (NM_017952.4,1503-1521).
ccaaacaatgatacatctt

SEQ ID NO: 364720 - DNA, 19 bp, Homo sapiens
  siRNA target sequence for FLJ20758 (NM_017952.4,1541-1559).
ccaatcggctagaagtgat

SEQ ID NO: 364721 - DNA, 19 bp, Homo sapiens
  siRNA target sequence for FLJ20758 (NM_017952.4,1546-1564).
cggctagaagtgattccta

SEQ ID NO: 364722 - DNA, 19 bp, Homo sapiens
  siRNA target sequence for FLJ20758 (NM_017952.4,1662-1680).
gcttcaggtggcatttgct

SEQ ID NO: 364723 - DNA, 19 bp, Homo sapiens
  siRNA target sequence for FLJ20758 (NM_017952.4,1752-1770).
cacctctctcaactgtata

SEQ ID NO: 364724 - DNA, 19 bp, Homo sapiens
  siRNA target sequence for FLJ20758 (NM_017952.4,1757-1775).
ctctcaactgtatagctat

SEQ ID NO: 364725 - DNA, 19 bp, Homo sapiens
  siRNA target sequence for FLJ20758 (NM_017952.4,1766-1784).
gtatagctatcctcttttt

SEQ ID NO: 364726 - DNA, 19 bp, Homo sapiens
  siRNA target sequence for FLJ20758 (NM_017952.4,1872-1890).
gcttatggacagtgcaaaa

SEQ ID NO: 364727 - DNA, 19 bp, Homo sapiens
  siRNA target sequence for FLJ20758 (NM_017952.4,1908-1926).
ccaggccattgaagtagta

SEQ ID NO: 364728 - DNA, 19 bp, Homo sapiens
  siRNA target sequence for FLJ20758 (NM_017952.4,1939-1957).
gccttcagcttacctattt

SEQ ID NO: 364729 - DNA, 19 bp, Homo sapiens
  siRNA target sequence for FLJ20758 (NM_017952.4,1964-1982).
gcctcacccagagagtaat

SEQ ID NO: 364730 - DNA, 19 bp, Homo sapiens
  siRNA target sequence for FLJ20758 (NM_017952.4,1968-1986).
cacccagagagtaatgagt

SEQ ID NO: 364731 - DNA, 19 bp, Homo sapiens
  siRNA target sequence for FLJ20758 (NM_017952.4,2013-2031).
ggaagccctaagtaatcta

SEQ ID NO: 364732 - DNA, 19 bp, Homo sapiens
  siRNA target sequence for FLJ20758 (NM_017952.4,2014-2032).
gaagccctaagtaatctaa

SEQ ID NO: 364733 - DNA, 19 bp, Homo sapiens
  siRNA target sequence for FLJ20729 (NM_017953.2,489-507).
caggagacggatagtagtt

SEQ ID NO: 364734 - DNA, 19 bp, Homo sapiens
  siRNA target sequence for FLJ20729 (NM_017953.2,646-664).
gcataaaagaggaattgat

SEQ ID NO: 364735 - DNA, 19 bp, Homo sapiens
  siRNA target sequence for FLJ20729 (NM_017953.2,771-789).
cggaaactggccatgtcaa

SEQ ID NO: 364736 - DNA, 19 bp, Homo sapiens
  siRNA target sequence for FLJ20729 (NM_017953.2,834-852).
cgttgtatgcgatattcct

SEQ ID NO: 364737 - DNA, 19 bp, Homo sapiens
  siRNA target sequence for FLJ20729 (NM_017953.2,954-972).
ctcctaagtgattatcgat

SEQ ID NO: 364738 - DNA, 19 bp, Homo sapiens
  siRNA target sequence for FLJ20729 (NM_017953.2,956-974).
cctaagtgattatcgattt

SEQ ID NO: 364739 - DNA, 19 bp, Homo sapiens
  siRNA target sequence for FLJ20729 (NM_017953.2,957-975).
ctaagtgattatcgatttt

SEQ ID NO: 364740 - DNA, 19 bp, Homo sapiens
  siRNA target sequence for FLJ20729 (NM_017953.2,988-1006).
caagaacagcggaccatat

SEQ ID NO: 364741 - DNA, 19 bp, Homo sapiens
  siRNA target sequence for FLJ20729 (NM_017953.2,1069-1087).
gtgcccggaggcaaggtat

SEQ ID NO: 364742 - DNA, 19 bp, Homo sapiens
  siRNA target sequence for FLJ20729 (NM_017953.2,1071-1089).
gcccggaggcaaggtatta

SEQ ID NO: 364743 - DNA, 19 bp, Homo sapiens
  siRNA target sequence for FLJ20729 (NM_017953.2,1072-1090).
cccggaggcaaggtattaa

SEQ ID NO: 364744 - DNA, 19 bp, Homo sapiens
  siRNA target sequence for FLJ20729 (NM_017953.2,1076-1094).
gaggcaaggtattaactta

SEQ ID NO: 364745 - DNA, 19 bp, Homo sapiens
  siRNA target sequence for FLJ20729 (NM_017953.2,1078-1096).
ggcaaggtattaacttaaa

SEQ ID NO: 364746 - DNA, 19 bp, Homo sapiens
  siRNA target sequence for FLJ20729 (NM_017953.2,1130-1148).
gaattcaaccttttttgat

SEQ ID NO: 364747 - DNA, 19 bp, Homo sapiens
  siRNA target sequence for FLJ20729 (NM_017953.2,1198-1216).
gtcaagctgagtacataga

SEQ ID NO: 364748 - DNA, 19 bp, Homo sapiens
  siRNA target sequence for FLJ20729 (NM_017953.2,1208-1226).
gtacatagaaaaaagagta

SEQ ID NO: 364749 - DNA, 19 bp, Homo sapiens
  siRNA target sequence for FLJ20729 (NM_017953.2,1224-1242).
gtaccagatgataaaacta

SEQ ID NO: 364750 - DNA, 19 bp, Homo sapiens
  siRNA target sequence for FLJ20729 (NM_017953.2,1240-1258).
ctattaatgaaatcctaaa

SEQ ID NO: 364751 - DNA, 19 bp, Homo sapiens
  siRNA target sequence for FLJ20729 (NM_017953.2,1253-1271).
cctaaaaccttacattgat

SEQ ID NO: 364752 - DNA, 19 bp, Homo sapiens
  siRNA target sequence for FLJ20729 (NM_017953.2,1288-1306).
ctgtaattcgtcaaaggtt

SEQ ID NO: 364753 - DNA, 19 bp, Homo sapiens
  siRNA target sequence for FLJ20729 (NM_017953.2,1426-1444).
ggaacaaagtgatcattga

SEQ ID NO: 364754 - DNA, 19 bp, Homo sapiens
  siRNA target sequence for FLJ20729 (NM_017953.2,1439-1457).
cattgagtatccaacatta

SEQ ID NO: 364755 - DNA, 19 bp, Homo sapiens
  siRNA target sequence for FLJ20729 (NM_017953.2,1458-1476).
catgtggtattgaaaggat

SEQ ID NO: 364756 - DNA, 19 bp, Homo sapiens
  siRNA target sequence for FLJ20729 (NM_017953.2,1464-1482).
gtattgaaaggatccaata

SEQ ID NO: 364757 - DNA, 19 bp, Homo sapiens
  siRNA target sequence for FLJ20729 (NM_017953.2,1523-1541).
caagaacgttggcaatgaa

SEQ ID NO: 364758 - DNA, 19 bp, Homo sapiens
  siRNA target sequence for CADPS2 (NM_017954.7,435-453).
gtagctgacgaagcatttt

SEQ ID NO: 364759 - DNA, 19 bp, Homo sapiens
  siRNA target sequence for CADPS2 (NM_017954.7,455-473).
caacgcagttcggagttat

SEQ ID NO: 364760 - DNA, 19 bp, Homo sapiens
  siRNA target sequence for CADPS2 (NM_017954.7,458-476).
cgcagttcggagttattat

SEQ ID NO: 364761 - DNA, 19 bp, Homo sapiens
  siRNA target sequence for CADPS2 (NM_017954.7,460-478).
cagttcggagttattatga

SEQ ID NO: 364762 - DNA, 19 bp, Homo sapiens
  siRNA target sequence for CADPS2 (NM_017954.7,466-484).
ggagttattatgaggtttt

SEQ ID NO: 364763 - DNA, 19 bp, Homo sapiens
  siRNA target sequence for CADPS2 (NM_017954.7,469-487).
gttattatgaggtttttct

SEQ ID NO: 364764 - DNA, 19 bp, Homo sapiens
  siRNA target sequence for CADPS2 (NM_017954.7,526-544).
ggtgttctgctaatgactt

SEQ ID NO: 364765 - DNA, 19 bp, Homo sapiens
  siRNA target sequence for CADPS2 (NM_017954.7,540-558).
gacttcagagaagtattta

SEQ ID NO: 364766 - DNA, 19 bp, Homo sapiens
  siRNA target sequence for CADPS2 (NM_017954.7,581-599).
gcggagtttgccagaaata

SEQ ID NO: 364767 - DNA, 19 bp, Homo sapiens
  siRNA target sequence for CADPS2 (NM_017954.7,600-618).
gatggcttgagcaaagaga

SEQ ID NO: 364768 - DNA, 19 bp, Homo sapiens
  siRNA target sequence for CADPS2 (NM_017954.7,631-649).
catggatagccaaatatga

SEQ ID NO: 364769 - DNA, 19 bp, Homo sapiens
  siRNA target sequence for CADPS2 (NM_017954.7,679-697).
gcaaacagccaaatagaat

SEQ ID NO: 364770 - DNA, 19 bp, Homo sapiens
  siRNA target sequence for CADPS2 (NM_017954.7,706-724).
gtgcagtgtctgaacttat

SEQ ID NO: 364771 - DNA, 19 bp, Homo sapiens
  siRNA target sequence for CADPS2 (NM_017954.7,711-729).
gtgtctgaacttattctga

SEQ ID NO: 364772 - DNA, 19 bp, Homo sapiens
  siRNA target sequence for CADPS2 (NM_017954.7,756-774).
cagcagattctgggtatta

SEQ ID NO: 364773 - DNA, 19 bp, Homo sapiens
  siRNA target sequence for CADPS2 (NM_017954.7,758-776).
gcagattctgggtattaaa

SEQ ID NO: 364774 - DNA, 19 bp, Homo sapiens
  siRNA target sequence for CADPS2 (NM_017954.7,842-860).
gatcagaagggaacttgat

SEQ ID NO: 364775 - DNA, 19 bp, Homo sapiens
  siRNA target sequence for CADPS2 (NM_017954.7,905-923).
ccccaaatttatagcaaaa

SEQ ID NO: 364776 - DNA, 19 bp, Homo sapiens
  siRNA target sequence for CADPS2 (NM_017954.7,929-947).
ggagaatatgtatatagaa

SEQ ID NO: 364777 - DNA, 19 bp, Homo sapiens
  siRNA target sequence for CADPS2 (NM_017954.7,971-989).
gctaatggccaatttggaa

SEQ ID NO: 364778 - DNA, 19 bp, Homo sapiens
  siRNA target sequence for CADPS2 (NM_017954.7,1008-1026).
ggtggtccggaatttaaat

SEQ ID NO: 364779 - DNA, 19 bp, Homo sapiens
  siRNA target sequence for CADPS2 (NM_017954.7,1012-1030).
gtccggaatttaaattaca

SEQ ID NO: 364780 - DNA, 19 bp, Homo sapiens
  siRNA target sequence for CADPS2 (NM_017954.7,1014-1032).
ccggaatttaaattacaaa

SEQ ID NO: 364781 - DNA, 19 bp, Homo sapiens
  siRNA target sequence for CADPS2 (NM_017954.7,1015-1033).
cggaatttaaattacaaaa

SEQ ID NO: 364782 - DNA, 19 bp, Homo sapiens
  siRNA target sequence for CADPS2 (NM_017954.7,1083-1101).
gagattcagctgtcaaagt

SEQ ID NO: 364783 - DNA, 19 bp, Homo sapiens
  siRNA target sequence for CADPS2 (NM_017954.7,1117-1135).
cattcaccttagagattgt

SEQ ID NO: 364784 - DNA, 19 bp, Homo sapiens
  siRNA target sequence for CADPS2 (NM_017954.7,1121-1139).
caccttagagattgtcata

SEQ ID NO: 364785 - DNA, 19 bp, Homo sapiens
  siRNA target sequence for CADPS2 (NM_017954.7,1123-1141).
ccttagagattgtcataat

SEQ ID NO: 364786 - DNA, 19 bp, Homo sapiens
  siRNA target sequence for CADPS2 (NM_017954.7,1162-1180).
cagttgctcccaatcgaat

SEQ ID NO: 364787 - DNA, 19 bp, Homo sapiens
  siRNA target sequence for CADPS2 (NM_017954.7,1167-1185).
gctcccaatcgaattgttt

SEQ ID NO: 364788 - DNA, 19 bp, Homo sapiens
  siRNA target sequence for CADPS2 (NM_017954.7,1168-1186).
ctcccaatcgaattgttta

SEQ ID NO: 364789 - DNA, 19 bp, Homo sapiens
  siRNA target sequence for CADPS2 (NM_017954.7,1170-1188).
cccaatcgaattgtttact

SEQ ID NO: 364790 - DNA, 19 bp, Homo sapiens
  siRNA target sequence for CADPS2 (NM_017954.7,1252-1270).
gggggactcaaggagattt

SEQ ID NO: 364791 - DNA, 19 bp, Homo sapiens
  siRNA target sequence for CADPS2 (NM_017954.7,1285-1303).
ctcggcctgtggtcaaagt

SEQ ID NO: 364792 - DNA, 19 bp, Homo sapiens
  siRNA target sequence for CADPS2 (NM_017954.7,1287-1305).
cggcctgtggtcaaagtga

SEQ ID NO: 364793 - DNA, 19 bp, Homo sapiens
  siRNA target sequence for CADPS2 (NM_017954.7,1334-1352).
ggccctggaagataaagaa

SEQ ID NO: 364794 - DNA, 19 bp, Homo sapiens
  siRNA target sequence for CADPS2 (NM_017954.7,1353-1371).
ctgggaagggtgatattat

SEQ ID NO: 364795 - DNA, 19 bp, Homo sapiens
  siRNA target sequence for CADPS2 (NM_017954.7,1364-1382).
gatattatacccaacttct

SEQ ID NO: 364796 - DNA, 19 bp, Homo sapiens
  siRNA target sequence for CADPS2 (NM_017954.7,1387-1405).
gctccaaatcagctgaatt

SEQ ID NO: 364797 - DNA, 19 bp, Homo sapiens
  siRNA target sequence for CADPS2 (NM_017954.7,1388-1406).
ctccaaatcagctgaatta

SEQ ID NO: 364798 - DNA, 19 bp, Homo sapiens
  siRNA target sequence for CADPS2 (NM_017954.7,1409-1427).
ccgaatggtagttccaaaa

SEQ ID NO: 364799 - DNA, 19 bp, Homo sapiens
  siRNA target sequence for CADPS2 (NM_017954.7,1410-1428).
cgaatggtagttccaaaaa

SEQ ID NO: 364800 - DNA, 19 bp, Homo sapiens
  siRNA target sequence for CADPS2 (NM_017954.7,1432-1450).
gccaggattctgacttaaa

SEQ ID NO: 364801 - DNA, 19 bp, Homo sapiens
  siRNA target sequence for CADPS2 (NM_017954.7,1458-1476).
ctggcagtgcgaatggata

SEQ ID NO: 364802 - DNA, 19 bp, Homo sapiens
  siRNA target sequence for CADPS2 (NM_017954.7,1460-1478).
ggcagtgcgaatggataaa

SEQ ID NO: 364803 - DNA, 19 bp, Homo sapiens
  siRNA target sequence for CADPS2 (NM_017954.7,1493-1511).
gcatagtggatatctgtat

SEQ ID NO: 364804 - DNA, 19 bp, Homo sapiens
  siRNA target sequence for CADPS2 (NM_017954.7,1512-1530).
gcccttggacagaaggttt

SEQ ID NO: 364805 - DNA, 19 bp, Homo sapiens
  siRNA target sequence for CADPS2 (NM_017954.7,1549-1567).
gttactttgttctagttca

SEQ ID NO: 364806 - DNA, 19 bp, Homo sapiens
  siRNA target sequence for CADPS2 (NM_017954.7,1563-1581).
gttcaggttagccaatata

SEQ ID NO: 364807 - DNA, 19 bp, Homo sapiens
  siRNA target sequence for CADPS2 (NM_017954.7,1566-1584).
caggttagccaatatacct

SEQ ID NO: 364808 - DNA, 19 bp, Homo sapiens
  siRNA target sequence for CADPS2 (NM_017954.7,1573-1591).
gccaatatacctttgctat

SEQ ID NO: 364809 - DNA, 19 bp, Homo sapiens
  siRNA target sequence for CADPS2 (NM_017954.7,1634-1652).
gcagcttgaaggctatact

SEQ ID NO: 364810 - DNA, 19 bp, Homo sapiens
  siRNA target sequence for CADPS2 (NM_017954.7,1680-1698).
cttcagggtggttgtatgt

SEQ ID NO: 364811 - DNA, 19 bp, Homo sapiens
  siRNA target sequence for CADPS2 (NM_017954.7,1686-1704).
ggtggttgtatgttcttta

SEQ ID NO: 364812 - DNA, 19 bp, Homo sapiens
  siRNA target sequence for CADPS2 (NM_017954.7,1746-1764).
gatgaacaggacagaatat

SEQ ID NO: 364813 - DNA, 19 bp, Homo sapiens
  siRNA target sequence for CADPS2 (NM_017954.7,1786-1804).
gggccacaggtcaatcata

SEQ ID NO: 364814 - DNA, 19 bp, Homo sapiens
  siRNA target sequence for CADPS2 (NM_017954.7,1832-1850).
gaaactgaatcctaaagga

SEQ ID NO: 364815 - DNA, 19 bp, Homo sapiens
  siRNA target sequence for CADPS2 (NM_017954.7,1887-1905).
gatgcagatcgttttcaga

SEQ ID NO: 364816 - DNA, 19 bp, Homo sapiens
  siRNA target sequence for CADPS2 (NM_017954.7,1891-1909).
cagatcgttttcagaaaca

SEQ ID NO: 364817 - DNA, 19 bp, Homo sapiens
  siRNA target sequence for CADPS2 (NM_017954.7,2035-2053).
gccctggccaagtctttgt

SEQ ID NO: 364818 - DNA, 19 bp, Homo sapiens
  siRNA target sequence for CADPS2 (NM_017954.7,2037-2055).
cctggccaagtctttgtgt

SEQ ID NO: 364819 - DNA, 19 bp, Homo sapiens
  siRNA target sequence for CADPS2 (NM_017954.7,2166-2184).
ctccattacagctttgcat

SEQ ID NO: 364820 - DNA, 19 bp, Homo sapiens
  siRNA target sequence for CADPS2 (NM_017954.7,2217-2235).
gatggaattgggactgttt

SEQ ID NO: 364821 - DNA, 19 bp, Homo sapiens
  siRNA target sequence for CADPS2 (NM_017954.7,2305-2323).
gccatttcagatactgttt

SEQ ID NO: 364822 - DNA, 19 bp, Homo sapiens
  siRNA target sequence for CADPS2 (NM_017954.7,2306-2324).
ccatttcagatactgtttt

SEQ ID NO: 364823 - DNA, 19 bp, Homo sapiens
  siRNA target sequence for CADPS2 (NM_017954.7,2349-2367).
ctaaaagctacactttcat

SEQ ID NO: 364824 - DNA, 19 bp, Homo sapiens
  siRNA target sequence for CADPS2 (NM_017954.7,2454-2472).
gctgccttgatcaattaca

SEQ ID NO: 364825 - DNA, 19 bp, Homo sapiens
  siRNA target sequence for CADPS2 (NM_017954.7,2457-2475).
gccttgatcaattacacta

SEQ ID NO: 364826 - DNA, 19 bp, Homo sapiens
  siRNA target sequence for CADPS2 (NM_017954.7,2557-2575).
cagagctctgcatagaagt

SEQ ID NO: 364827 - DNA, 19 bp, Homo sapiens
  siRNA target sequence for CADPS2 (NM_017954.7,2668-2686).
ctttatttacagtggatat

SEQ ID NO: 364828 - DNA, 19 bp, Homo sapiens
  siRNA target sequence for CADPS2 (NM_017954.7,2760-2778).
ctccgaaatgacacacttt

SEQ ID NO: 364829 - DNA, 19 bp, Homo sapiens
  siRNA target sequence for CADPS2 (NM_017954.7,2763-2781).
cgaaatgacacacttttgt

SEQ ID NO: 364830 - DNA, 19 bp, Homo sapiens
  siRNA target sequence for CADPS2 (NM_017954.7,2771-2789).
cacacttttgtgtaatgga

SEQ ID NO: 364831 - DNA, 19 bp, Homo sapiens
  siRNA target sequence for CADPS2 (NM_017954.7,2804-2822).
cttgcaagaaatctttgta

SEQ ID NO: 364832 - DNA, 19 bp, Homo sapiens
  siRNA target sequence for CADPS2 (NM_017954.7,2857-2875).
cttccatcgcccagtcaat

SEQ ID NO: 364833 - DNA, 19 bp, Homo sapiens
  siRNA target sequence for CADPS2 (NM_017954.7,2870-2888).
gtcaattcacagaggtttt

SEQ ID NO: 364834 - DNA, 19 bp, Homo sapiens
  siRNA target sequence for CADPS2 (NM_017954.7,3004-3022).
cttcgtggatgccttcttt

SEQ ID NO: 364835 - DNA, 19 bp, Homo sapiens
  siRNA target sequence for CADPS2 (NM_017954.7,3010-3028).
ggatgccttctttatatga

SEQ ID NO: 364836 - DNA, 19 bp, Homo sapiens
  siRNA target sequence for CADPS2 (NM_017954.7,3035-3053).
caatggctcagcaacatca

SEQ ID NO: 364837 - DNA, 19 bp, Homo sapiens
  siRNA target sequence for CADPS2 (NM_017954.7,3171-3189).
ctagaggcctgtgtcaaaa

SEQ ID NO: 364838 - DNA, 19 bp, Homo sapiens
  siRNA target sequence for CADPS2 (NM_017954.7,3256-3274).
cttccgtttgcactatgtt

SEQ ID NO: 364839 - DNA, 19 bp, Homo sapiens
  siRNA target sequence for CADPS2 (NM_017954.7,3259-3277).
ccgtttgcactatgtttaa

SEQ ID NO: 364840 - DNA, 19 bp, Homo sapiens
  siRNA target sequence for CADPS2 (NM_017954.7,3260-3278).
cgtttgcactatgtttaat

SEQ ID NO: 364841 - DNA, 19 bp, Homo sapiens
  siRNA target sequence for CADPS2 (NM_017954.7,3446-3464).
gctgtcaaggtatgatgaa

SEQ ID NO: 364842 - DNA, 19 bp, Homo sapiens
  siRNA target sequence for CADPS2 (NM_017954.7,3462-3480).
gaaggcactttcttttcat

SEQ ID NO: 364843 - DNA, 19 bp, Homo sapiens
  siRNA target sequence for CADPS2 (NM_017954.7,3543-3561).
gatctggcagacacctata

SEQ ID NO: 364844 - DNA, 19 bp, Homo sapiens
  siRNA target sequence for CADPS2 (NM_017954.7,3546-3564).
ctggcagacacctatatta

SEQ ID NO: 364845 - DNA, 19 bp, Homo sapiens
  siRNA target sequence for CADPS2 (NM_017954.7,3549-3567).
gcagacacctatattatgt

SEQ ID NO: 364846 - DNA, 19 bp, Homo sapiens
  siRNA target sequence for CADPS2 (NM_017954.7,3570-3588).
gttcggcaaaaccaagata

SEQ ID NO: 364847 - DNA, 19 bp, Homo sapiens
  siRNA target sequence for CADPS2 (NM_017954.7,3671-3689).
cgtgtggttgactgataga

SEQ ID NO: 364848 - DNA, 19 bp, Homo sapiens
  siRNA target sequence for CADPS2 (NM_017954.7,3672-3690).
gtgtggttgactgatagat

SEQ ID NO: 364849 - DNA, 19 bp, Homo sapiens
  siRNA target sequence for CADPS2 (NM_017954.7,3674-3692).
gtggttgactgatagatta

SEQ ID NO: 364850 - DNA, 19 bp, Homo sapiens
  siRNA target sequence for CADPS2 (NM_017954.7,3719-3737).
gaagacgctcatcaagatt

SEQ ID NO: 364851 - DNA, 19 bp, Homo sapiens
  siRNA target sequence for CADPS2 (NM_017954.7,3724-3742).
cgctcatcaagattgtgaa

SEQ ID NO: 364852 - DNA, 19 bp, Homo sapiens
  siRNA target sequence for CADPS2 (NM_017954.7,3748-3766).
cctacagggactttcgatt

SEQ ID NO: 364853 - DNA, 19 bp, Homo sapiens
  siRNA target sequence for CADPS2 (NM_017954.7,3787-3805).
cactgaacagtaagactta

SEQ ID NO: 364854 - DNA, 19 bp, Homo sapiens
  siRNA target sequence for CADPS2 (NM_017954.7,3794-3812).
cagtaagacttatgatact

SEQ ID NO: 364855 - DNA, 19 bp, Homo sapiens
  siRNA target sequence for CADPS2 (NM_017954.7,3796-3814).
gtaagacttatgatactgt

SEQ ID NO: 364856 - DNA, 19 bp, Homo sapiens
  siRNA target sequence for CADPS2 (NM_017954.7,3815-3833).
gcacagacgtttaacagta

SEQ ID NO: 364857 - DNA, 19 bp, Homo sapiens
  siRNA target sequence for CADPS2 (NM_017954.7,3876-3894).
ggcattactatgaaagaca

SEQ ID NO: 364858 - DNA, 19 bp, Homo sapiens
  siRNA target sequence for CDCA4 (NM_017955.2,608-626).
gatggccctcgagaaaaca

SEQ ID NO: 364859 - DNA, 19 bp, Homo sapiens
  siRNA target sequence for CDCA4 (NM_017955.2,634-652).
ctttcacaagtcacttgat

SEQ ID NO: 364860 - DNA, 19 bp, Homo sapiens
  siRNA target sequence for CDCA4 (NM_017955.2,640-658).
caagtcacttgatcagata

SEQ ID NO: 364861 - DNA, 19 bp, Homo sapiens
  siRNA target sequence for CDCA4 (NM_017955.2,643-661).
gtcacttgatcagatattt

SEQ ID NO: 364862 - DNA, 19 bp, Homo sapiens
  siRNA target sequence for FLJ20772 (NM_017956.1,193-211).
gtttacccagcgatacaga

SEQ ID NO: 364863 - DNA, 19 bp, Homo sapiens
  siRNA target sequence for FLJ20772 (NM_017956.1,198-216).
cccagcgatacagagaata

SEQ ID NO: 364864 - DNA, 19 bp, Homo sapiens
  siRNA target sequence for FLJ20772 (NM_017956.1,226-244).
gcagaaactctttgataca

SEQ ID NO: 364865 - DNA, 19 bp, Homo sapiens
  siRNA target sequence for FLJ20772 (NM_017956.1,397-415).
gagggcccagggttgttca

SEQ ID NO: 364866 - DNA, 19 bp, Homo sapiens
  siRNA target sequence for FLJ20772 (NM_017956.1,411-429).
gttcacctgcccaaaaatt

SEQ ID NO: 364867 - DNA, 19 bp, Homo sapiens
  siRNA target sequence for FLJ20772 (NM_017956.1,1398-1416).
cccatgtggatcacatagt

SEQ ID NO: 364868 - DNA, 19 bp, Homo sapiens
  siRNA target sequence for EPN3 (NM_017957.1,603-621).
cgtgtacaaggctctaaca

SEQ ID NO: 364869 - DNA, 19 bp, Homo sapiens
  siRNA target sequence for EPN3 (NM_017957.1,1803-1821).
cctggacctgggcatacta

SEQ ID NO: 364870 - DNA, 19 bp, Homo sapiens
  siRNA target sequence for EPN3 (NM_017957.1,2018-2036).
gcaggccgacgctaaacca

SEQ ID NO: 364871 - DNA, 19 bp, Homo sapiens
  siRNA target sequence for PLEKHB2 (NM_017958.1,154-172).
cggatggtcacctgatcta

SEQ ID NO: 364872 - DNA, 19 bp, Homo sapiens
  siRNA target sequence for PLEKHB2 (NM_017958.1,156-174).
gatggtcacctgatctatt

SEQ ID NO: 364873 - DNA, 19 bp, Homo sapiens
  siRNA target sequence for PLEKHB2 (NM_017958.1,160-178).
gtcacctgatctattatga

SEQ ID NO: 364874 - DNA, 19 bp, Homo sapiens
  siRNA target sequence for PLEKHB2 (NM_017958.1,190-208).
ggcagaatatcgaggataa

SEQ ID NO: 364875 - DNA, 19 bp, Homo sapiens
  siRNA target sequence for PLEKHB2 (NM_017958.1,274-292).
cggatggaaagtcaaaaga

SEQ ID NO: 364876 - DNA, 19 bp, Homo sapiens
  siRNA target sequence for PLEKHB2 (NM_017958.1,293-311).
ctgcatgctccagattgtt

SEQ ID NO: 364877 - DNA, 19 bp, Homo sapiens
  siRNA target sequence for PLEKHB2 (NM_017958.1,296-314).
catgctccagattgtttgt

SEQ ID NO: 364878 - DNA, 19 bp, Homo sapiens
  siRNA target sequence for PLEKHB2 (NM_017958.1,315-333).
cgagatgggaaaacaatta

SEQ ID NO: 364879 - DNA, 19 bp, Homo sapiens
  siRNA target sequence for PLEKHB2 (NM_017958.1,362-380).
cttggcctggaaatttaca

SEQ ID NO: 364880 - DNA, 19 bp, Homo sapiens
  siRNA target sequence for PLEKHB2 (NM_017958.1,524-542).
gtacccgccaggaactcaa

SEQ ID NO: 364881 - DNA, 19 bp, Homo sapiens
  siRNA target sequence for PLEKHB2 (NM_017958.1,527-545).
cccgccaggaactcaagtt

SEQ ID NO: 364882 - DNA, 19 bp, Homo sapiens
  siRNA target sequence for PLEKHB2 (NM_017958.1,529-547).
cgccaggaactcaagttgt

SEQ ID NO: 364883 - DNA, 19 bp, Homo sapiens
  siRNA target sequence for PLEKHB2 (NM_017958.1,532-550).
caggaactcaagttgtcta

SEQ ID NO: 364884 - DNA, 19 bp, Homo sapiens
  siRNA target sequence for C9orf63 (NM_017960.1,233-251).
gttaaagagcctagtgaat

SEQ ID NO: 364885 - DNA, 19 bp, Homo sapiens
  siRNA target sequence for C9orf63 (NM_017960.1,297-315).
gctagagccgccatggaaa

SEQ ID NO: 364886 - DNA, 19 bp, Homo sapiens
  siRNA target sequence for C9orf63 (NM_017960.1,437-455).
gacaagggagcctgtaaga

SEQ ID NO: 364887 - DNA, 19 bp, Homo sapiens
  siRNA target sequence for C9orf63 (NM_017960.1,439-457).
caagggagcctgtaagagt

SEQ ID NO: 364888 - DNA, 19 bp, Homo sapiens
  siRNA target sequence for C9orf63 (NM_017960.1,528-546).
ggactggtgtatattaata

SEQ ID NO: 364889 - DNA, 19 bp, Homo sapiens
  siRNA target sequence for C9orf63 (NM_017960.1,529-547).
gactggtgtatattaatat

SEQ ID NO: 364890 - DNA, 19 bp, Homo sapiens
  siRNA target sequence for KIAA1295 (NM_017963.2,332-350).
gccaggttacggtagtcat

SEQ ID NO: 364891 - DNA, 19 bp, Homo sapiens
  siRNA target sequence for KIAA1295 (NM_017963.2,333-351).
ccaggttacggtagtcatt

SEQ ID NO: 364892 - DNA, 19 bp, Homo sapiens
  siRNA target sequence for KIAA1295 (NM_017963.2,334-352).
caggttacggtagtcattt

SEQ ID NO: 364893 - DNA, 19 bp, Homo sapiens
  siRNA target sequence for KIAA1295 (NM_017963.2,336-354).
ggttacggtagtcatttta

SEQ ID NO: 364894 - DNA, 19 bp, Homo sapiens
  siRNA target sequence for KIAA1295 (NM_017963.2,337-355).
gttacggtagtcattttaa

SEQ ID NO: 364895 - DNA, 19 bp, Homo sapiens
  siRNA target sequence for KIAA1295 (NM_017963.2,341-359).
cggtagtcattttaaacct

SEQ ID NO: 364896 - DNA, 19 bp, Homo sapiens
  siRNA target sequence for KIAA1295 (NM_017963.2,366-384).
caaggccacgccatagaat

SEQ ID NO: 364897 - DNA, 19 bp, Homo sapiens
  siRNA target sequence for KIAA1295 (NM_017963.2,369-387).
ggccacgccatagaatcaa

SEQ ID NO: 364898 - DNA, 19 bp, Homo sapiens
  siRNA target sequence for KIAA1295 (NM_017963.2,370-388).
gccacgccatagaatcaat

SEQ ID NO: 364899 - DNA, 19 bp, Homo sapiens
  siRNA target sequence for KIAA1295 (NM_017963.2,371-389).
ccacgccatagaatcaatt

SEQ ID NO: 364900 - DNA, 19 bp, Homo sapiens
  siRNA target sequence for KIAA1295 (NM_017963.2,372-390).
cacgccatagaatcaattt

SEQ ID NO: 364901 - DNA, 19 bp, Homo sapiens
  siRNA target sequence for KIAA1295 (NM_017963.2,401-419).
gttcttggccctaaaatgt

SEQ ID NO: 364902 - DNA, 19 bp, Homo sapiens
  siRNA target sequence for KIAA1295 (NM_017963.2,423-441).
cgcccactgaggatttcat

SEQ ID NO: 364903 - DNA, 19 bp, Homo sapiens
  siRNA target sequence for KIAA1295 (NM_017963.2,424-442).
gcccactgaggatttcatt

SEQ ID NO: 364904 - DNA, 19 bp, Homo sapiens
  siRNA target sequence for KIAA1295 (NM_017963.2,425-443).
cccactgaggatttcatta

SEQ ID NO: 364905 - DNA, 19 bp, Homo sapiens
  siRNA target sequence for KIAA1295 (NM_017963.2,493-511).
gtgtgccaggacttgagaa

SEQ ID NO: 364906 - DNA, 19 bp, Homo sapiens
  siRNA target sequence for KIAA1295 (NM_017963.2,527-545).
gagtggacagtctggtatt

SEQ ID NO: 364907 - DNA, 19 bp, Homo sapiens
  siRNA target sequence for KIAA1295 (NM_017963.2,607-625).
ccagtagctggcaacttga

SEQ ID NO: 364908 - DNA, 19 bp, Homo sapiens
  siRNA target sequence for KIAA1295 (NM_017963.2,671-689).
gtgcccaagtcttacatgt

SEQ ID NO: 364909 - DNA, 19 bp, Homo sapiens
  siRNA target sequence for KIAA1295 (NM_017963.2,709-727).
ggaggccgtacctttctct

SEQ ID NO: 364910 - DNA, 19 bp, Homo sapiens
  siRNA target sequence for FLJ10006 (NM_017969.1,281-299).
cggcgaccagtcagatgat

SEQ ID NO: 364911 - DNA, 19 bp, Homo sapiens
  siRNA target sequence for FLJ10006 (NM_017969.1,342-360).
gacggtgaggatgatgtaa

SEQ ID NO: 364912 - DNA, 19 bp, Homo sapiens
  siRNA target sequence for FLJ10006 (NM_017969.1,344-362).
cggtgaggatgatgtaaat

SEQ ID NO: 364913 - DNA, 19 bp, Homo sapiens
  siRNA target sequence for FLJ10006 (NM_017969.1,391-409).
gtgtagaacgtcattcaga

SEQ ID NO: 364914 - DNA, 19 bp, Homo sapiens
  siRNA target sequence for FLJ10006 (NM_017969.1,470-488).
gaacgatgagcccttaaat

SEQ ID NO: 364915 - DNA, 19 bp, Homo sapiens
  siRNA target sequence for FLJ10006 (NM_017969.1,473-491).
cgatgagcccttaaatctt

SEQ ID NO: 364916 - DNA, 19 bp, Homo sapiens
  siRNA target sequence for FLJ10006 (NM_017969.1,474-492).
gatgagcccttaaatctta

SEQ ID NO: 364917 - DNA, 19 bp, Homo sapiens
  siRNA target sequence for FLJ10006 (NM_017969.1,479-497).
gcccttaaatcttaatgct

SEQ ID NO: 364918 - DNA, 19 bp, Homo sapiens
  siRNA target sequence for FLJ10006 (NM_017969.1,480-498).
cccttaaatcttaatgcta

SEQ ID NO: 364919 - DNA, 19 bp, Homo sapiens
  siRNA target sequence for FLJ10006 (NM_017969.1,571-589).
ctgcaagcgattctgaaaa

SEQ ID NO: 364920 - DNA, 19 bp, Homo sapiens
  siRNA target sequence for FLJ10006 (NM_017969.1,789-807).
gctctaaaacctcaaatca

SEQ ID NO: 364921 - DNA, 19 bp, Homo sapiens
  siRNA target sequence for FLJ10006 (NM_017969.1,996-1014).
cgtatcagtgactcagaaa

SEQ ID NO: 364922 - DNA, 19 bp, Homo sapiens
  siRNA target sequence for FLJ10006 (NM_017969.1,1829-1847).
ggactttctgtcagatttt

SEQ ID NO: 364923 - DNA, 19 bp, Homo sapiens
  siRNA target sequence for FLJ10006 (NM_017969.1,1899-1917).
cgcgatggtggcaccttta

SEQ ID NO: 364924 - DNA, 19 bp, Homo sapiens
  siRNA target sequence for FLJ10006 (NM_017969.1,1906-1924).
gtggcacctttattagtga

SEQ ID NO: 364925 - DNA, 19 bp, Homo sapiens
  siRNA target sequence for FLJ10006 (NM_017969.1,1942-1960).
gtgccatgatcgtcaagat

SEQ ID NO: 364926 - DNA, 19 bp, Homo sapiens
  siRNA target sequence for FLJ10006 (NM_017969.1,1982-2000).
cagacagttgaacaatcaa

SEQ ID NO: 364927 - DNA, 19 bp, Homo sapiens
  siRNA target sequence for FLJ10006 (NM_017969.1,2233-2251).
gacgagcagtgatgtatct

SEQ ID NO: 364928 - DNA, 19 bp, Homo sapiens
  siRNA target sequence for FLJ10006 (NM_017969.1,2235-2253).
cgagcagtgatgtatctct

SEQ ID NO: 364929 - DNA, 19 bp, Homo sapiens
  siRNA target sequence for FLJ10006 (NM_017969.1,2236-2254).
gagcagtgatgtatctcta

SEQ ID NO: 364930 - DNA, 19 bp, Homo sapiens
  siRNA target sequence for FLJ10006 (NM_017969.1,2238-2256).
gcagtgatgtatctctata

SEQ ID NO: 364931 - DNA, 19 bp, Homo sapiens
  siRNA target sequence for FLJ10006 (NM_017969.1,2285-2303).
ggacatggcagggaaatta

SEQ ID NO: 364932 - DNA, 19 bp, Homo sapiens
  siRNA target sequence for FLJ10006 (NM_017969.1,2310-2328).
gagtggtctaggcctatat

SEQ ID NO: 364933 - DNA, 19 bp, Homo sapiens
  siRNA target sequence for FLJ10006 (NM_017969.1,2315-2333).
gtctaggcctatatttggt

SEQ ID NO: 364934 - DNA, 19 bp, Homo sapiens
  siRNA target sequence for FLJ10006 (NM_017969.1,2331-2349).
ggtcttacctcaaactaca

SEQ ID NO: 364935 - DNA, 19 bp, Homo sapiens
  siRNA target sequence for FLJ10006 (NM_017969.1,2332-2350).
gtcttacctcaaactacaa

SEQ ID NO: 364936 - DNA, 19 bp, Homo sapiens
  siRNA target sequence for FLJ10006 (NM_017969.1,2397-2415).
cctcaacgacgaagaatga

SEQ ID NO: 364937 - DNA, 19 bp, Homo sapiens
  siRNA target sequence for FLJ10006 (NM_017969.1,2400-2418).
caacgacgaagaatgaaca

SEQ ID NO: 364938 - DNA, 19 bp, Homo sapiens
  siRNA target sequence for FLJ10006 (NM_017969.1,2437-2455).
ccagaagagacctggaaaa

SEQ ID NO: 364939 - DNA, 19 bp, Homo sapiens
  siRNA target sequence for FLJ10006 (NM_017969.1,2530-2548).
cttcaaacaaggactatgt

SEQ ID NO: 364940 - DNA, 19 bp, Homo sapiens
  siRNA target sequence for FLJ10006 (NM_017969.1,2547-2565).
gttgtcaggcccaaatgga

SEQ ID NO: 364941 - DNA, 19 bp, Homo sapiens
  siRNA target sequence for FLJ10006 (NM_017969.1,2642-2660).
gttcacagatataaggaaa

SEQ ID NO: 364942 - DNA, 19 bp, Homo sapiens
  siRNA target sequence for C14orf118 (NM_017972.2,1125-1143).
cctcggcagaaagatttct

SEQ ID NO: 364943 - DNA, 19 bp, Homo sapiens
  siRNA target sequence for APG16L (NM_017974.2,449-467).
caagaggaactgactgaat

SEQ ID NO: 364944 - DNA, 19 bp, Homo sapiens
  siRNA target sequence for APG16L (NM_017974.2,611-629).
gacctgcgcactaagcttt

SEQ ID NO: 364945 - DNA, 19 bp, Homo sapiens
  siRNA target sequence for APG16L (NM_017974.2,676-694).
cctgcagatcacttttact

SEQ ID NO: 364946 - DNA, 19 bp, Homo sapiens
  siRNA target sequence for APG16L (NM_017974.2,695-713).
gccttggagggaaaactga

SEQ ID NO: 364947 - DNA, 19 bp, Homo sapiens
  siRNA target sequence for APG16L (NM_017974.2,772-790).
ggaagccaatcggcttaat

SEQ ID NO: 364948 - DNA, 19 bp, Homo sapiens
  siRNA target sequence for APG16L (NM_017974.2,1296-1314).
ctgtggatgattatcgatt

SEQ ID NO: 364949 - DNA, 19 bp, Homo sapiens
  siRNA target sequence for APG16L (NM_017974.2,1370-1388).
gacaatgcgcggattgtct

SEQ ID NO: 364950 - DNA, 19 bp, Homo sapiens
  siRNA target sequence for APG16L (NM_017974.2,1427-1445).
cgcagcaaagtctgcataa

SEQ ID NO: 364951 - DNA, 19 bp, Homo sapiens
  siRNA target sequence for APG16L (NM_017974.2,1460-1478).
ggatccagttgcaatgata

SEQ ID NO: 364952 - DNA, 19 bp, Homo sapiens
  siRNA target sequence for APG16L (NM_017974.2,1461-1479).
gatccagttgcaatgatat

SEQ ID NO: 364953 - DNA, 19 bp, Homo sapiens
  siRNA target sequence for APG16L (NM_017974.2,1464-1482).
ccagttgcaatgatattgt

SEQ ID NO: 364954 - DNA, 19 bp, Homo sapiens
  siRNA target sequence for APG16L (NM_017974.2,1483-1501).
ctgcacagagcaatgtgta

SEQ ID NO: 364955 - DNA, 19 bp, Homo sapiens
  siRNA target sequence for APG16L (NM_017974.2,1497-1515).
gtgtaatgagtggacattt

SEQ ID NO: 364956 - DNA, 19 bp, Homo sapiens
  siRNA target sequence for APG16L (NM_017974.2,1529-1547).
cgtttctgggacattcgat

SEQ ID NO: 364957 - DNA, 19 bp, Homo sapiens
  siRNA target sequence for APG16L (NM_017974.2,1570-1588).
ggagctgttgggaaagatt

SEQ ID NO: 364958 - DNA, 19 bp, Homo sapiens
  siRNA target sequence for APG16L (NM_017974.2,1629-1647).
gctgctcccgtgatgactt

SEQ ID NO: 364959 - DNA, 19 bp, Homo sapiens
  siRNA target sequence for APG16L (NM_017974.2,1635-1653).
cccgtgatgacttgctaaa

SEQ ID NO: 364960 - DNA, 19 bp, Homo sapiens
  siRNA target sequence for APG16L (NM_017974.2,1636-1654).
ccgtgatgacttgctaaaa

SEQ ID NO: 364961 - DNA, 19 bp, Homo sapiens
  siRNA target sequence for APG16L (NM_017974.2,1645-1663).
cttgctaaaagttattgat

SEQ ID NO: 364962 - DNA, 19 bp, Homo sapiens
  siRNA target sequence for APG16L (NM_017974.2,1661-1679).
gatctccgaacaaatgcta

SEQ ID NO: 364963 - DNA, 19 bp, Homo sapiens
  siRNA target sequence for APG16L (NM_017974.2,1778-1796).
gagggctctctgtatatct

SEQ ID NO: 364964 - DNA, 19 bp, Homo sapiens
  siRNA target sequence for FLJ10036 (NM_017975.2,266-284).
gcgcagcagaggactttta

SEQ ID NO: 364965 - DNA, 19 bp, Homo sapiens
  siRNA target sequence for FLJ10036 (NM_017975.2,496-514).
gaaactgccatatctgatt

SEQ ID NO: 364966 - DNA, 19 bp, Homo sapiens
  siRNA target sequence for FLJ10036 (NM_017975.2,502-520).
gccatatctgatttctcta

SEQ ID NO: 364967 - DNA, 19 bp, Homo sapiens
  siRNA target sequence for FLJ10036 (NM_017975.2,558-576).
gaaggcaaggcagttaatt

SEQ ID NO: 364968 - DNA, 19 bp, Homo sapiens
  siRNA target sequence for FLJ10036 (NM_017975.2,587-605).
ccatggctcacaatcctaa

SEQ ID NO: 364969 - DNA, 19 bp, Homo sapiens
  siRNA target sequence for FLJ10036 (NM_017975.2,588-606).
catggctcacaatcctaat

SEQ ID NO: 364970 - DNA, 19 bp, Homo sapiens
  siRNA target sequence for FLJ10036 (NM_017975.2,592-610).
gctcacaatcctaatatga

SEQ ID NO: 364971 - DNA, 19 bp, Homo sapiens
  siRNA target sequence for FLJ10036 (NM_017975.2,601-619).
cctaatatgacccatttga

SEQ ID NO: 364972 - DNA, 19 bp, Homo sapiens
  siRNA target sequence for FLJ10036 (NM_017975.2,602-620).
ctaatatgacccatttgaa

SEQ ID NO: 364973 - DNA, 19 bp, Homo sapiens
  siRNA target sequence for FLJ10036 (NM_017975.2,611-629).
cccatttgaagattaatct

SEQ ID NO: 364974 - DNA, 19 bp, Homo sapiens
  siRNA target sequence for FLJ10036 (NM_017975.2,676-694).
gatcctgaaggtacttgtt

SEQ ID NO: 364975 - DNA, 19 bp, Homo sapiens
  siRNA target sequence for FLJ10036 (NM_017975.2,709-727).
cttatcacaacaaacaaca

SEQ ID NO: 364976 - DNA, 19 bp, Homo sapiens
  siRNA target sequence for FLJ10036 (NM_017975.2,728-746).
gcattacaggaattgtctt

SEQ ID NO: 364977 - DNA, 19 bp, Homo sapiens
  siRNA target sequence for FLJ10036 (NM_017975.2,784-802).
gtaaatcttgaaaacctaa

SEQ ID NO: 364978 - DNA, 19 bp, Homo sapiens
  siRNA target sequence for FLJ10036 (NM_017975.2,823-841).
catcacttgtctactgtaa

SEQ ID NO: 364979 - DNA, 19 bp, Homo sapiens
  siRNA target sequence for FLJ10036 (NM_017975.2,859-877).
cagtatgagctctttaagt

SEQ ID NO: 364980 - DNA, 19 bp, Homo sapiens
  siRNA target sequence for FLJ10036 (NM_017975.2,914-932).
ctgcgatcgctttggatat

SEQ ID NO: 364981 - DNA, 19 bp, Homo sapiens
  siRNA target sequence for FLJ10036 (NM_017975.2,916-934).
gcgatcgctttggatattt

SEQ ID NO: 364982 - DNA, 19 bp, Homo sapiens
  siRNA target sequence for FLJ10036 (NM_017975.2,983-1001).
ctgcaactctgaatattaa

SEQ ID NO: 364983 - DNA, 19 bp, Homo sapiens
  siRNA target sequence for FLJ10036 (NM_017975.2,1019-1037).
ccagaggtcctttgaatca

SEQ ID NO: 364984 - DNA, 19 bp, Homo sapiens
  siRNA target sequence for FLJ10036 (NM_017975.2,1020-1038).
cagaggtcctttgaatcat

SEQ ID NO: 364985 - DNA, 19 bp, Homo sapiens
  siRNA target sequence for FLJ10036 (NM_017975.2,1174-1192).
gatggatttggtgattcta

SEQ ID NO: 364986 - DNA, 19 bp, Homo sapiens
  siRNA target sequence for FLJ10036 (NM_017975.2,1247-1265).
gttccgtcaagcgtctttt

SEQ ID NO: 364987 - DNA, 19 bp, Homo sapiens
  siRNA target sequence for FLJ10036 (NM_017975.2,1250-1268).
ccgtcaagcgtcttttcaa

SEQ ID NO: 364988 - DNA, 19 bp, Homo sapiens
  siRNA target sequence for FLJ10036 (NM_017975.2,1251-1269).
cgtcaagcgtcttttcaaa

SEQ ID NO: 364989 - DNA, 19 bp, Homo sapiens
  siRNA target sequence for FLJ10036 (NM_017975.2,1254-1272).
caagcgtcttttcaaagtt

SEQ ID NO: 364990 - DNA, 19 bp, Homo sapiens
  siRNA target sequence for FLJ10036 (NM_017975.2,1266-1284).
caaagttcggagtgatctt

SEQ ID NO: 364991 - DNA, 19 bp, Homo sapiens
  siRNA target sequence for FLJ10036 (NM_017975.2,1270-1288).
gttcggagtgatcttgatt

SEQ ID NO: 364992 - DNA, 19 bp, Homo sapiens
  siRNA target sequence for FLJ10036 (NM_017975.2,1362-1380).
gatcatccagagtctacaa

SEQ ID NO: 364993 - DNA, 19 bp, Homo sapiens
  siRNA target sequence for FLJ10036 (NM_017975.2,1373-1391).
gtctacaacgtggtgatat

SEQ ID NO: 364994 - DNA, 19 bp, Homo sapiens
  siRNA target sequence for FLJ10036 (NM_017975.2,1404-1422).
ccatagtggaagtaacagt

SEQ ID NO: 364995 - DNA, 19 bp, Homo sapiens
  siRNA target sequence for FLJ10036 (NM_017975.2,1415-1433).
gtaacagtttactaagtaa

SEQ ID NO: 364996 - DNA, 19 bp, Homo sapiens
  siRNA target sequence for FLJ10036 (NM_017975.2,1434-1452).
gctcattcatcagtcttat

SEQ ID NO: 364997 - DNA, 19 bp, Homo sapiens
  siRNA target sequence for FLJ10036 (NM_017975.2,1437-1455).
cattcatcagtcttatcat

SEQ ID NO: 364998 - DNA, 19 bp, Homo sapiens
  siRNA target sequence for FLJ10036 (NM_017975.2,1487-1505).
ctattccagttcaaatgct

SEQ ID NO: 364999 - DNA, 19 bp, Homo sapiens
  siRNA target sequence for FLJ10036 (NM_017975.2,1559-1577).
gtcaggaacttgcatcttt

SEQ ID NO: 365000 - DNA, 19 bp, Homo sapiens
  siRNA target sequence for FLJ10036 (NM_017975.2,1563-1581).
ggaacttgcatctttgaat

SEQ ID NO: 365001 - DNA, 19 bp, Homo sapiens
  siRNA target sequence for FLJ10036 (NM_017975.2,1601-1619).
ctccatcagtagatataca

SEQ ID NO: 365002 - DNA, 19 bp, Homo sapiens
  siRNA target sequence for FLJ10036 (NM_017975.2,1626-1644).
ggtttatcgtgtccaaaaa

SEQ ID NO: 365003 - DNA, 19 bp, Homo sapiens
  siRNA target sequence for FLJ10036 (NM_017975.2,1673-1691).
gttgcatgcctttcattaa

SEQ ID NO: 365004 - DNA, 19 bp, Homo sapiens
  siRNA target sequence for FLJ10036 (NM_017975.2,1728-1746).
ctgcataaagtattacaaa

SEQ ID NO: 365005 - DNA, 19 bp, Homo sapiens
  siRNA target sequence for FLJ10036 (NM_017975.2,1730-1748).
gcataaagtattacaaaca

SEQ ID NO: 365006 - DNA, 19 bp, Homo sapiens
  siRNA target sequence for FLJ10036 (NM_017975.2,1793-1811).
caactgctgtaaagaactt

SEQ ID NO: 365007 - DNA, 19 bp, Homo sapiens
  siRNA target sequence for FLJ10036 (NM_017975.2,1801-1819).
gtaaagaacttatatcaaa

SEQ ID NO: 365008 - DNA, 19 bp, Homo sapiens
  siRNA target sequence for FLJ10036 (NM_017975.2,1858-1876).
ggtcaaaagaagattaaga

SEQ ID NO: 365009 - DNA, 19 bp, Homo sapiens
  siRNA target sequence for FLJ10036 (NM_017975.2,1901-1919).
cacccatagaccatctgaa

SEQ ID NO: 365010 - DNA, 19 bp, Homo sapiens
  siRNA target sequence for FLJ10036 (NM_017975.2,1904-1922).
ccatagaccatctgaattt

SEQ ID NO: 365011 - DNA, 19 bp, Homo sapiens
  siRNA target sequence for FLJ10036 (NM_017975.2,1930-1948).
cctgatttttcggaattaa

SEQ ID NO: 365012 - DNA, 19 bp, Homo sapiens
  siRNA target sequence for FLJ10036 (NM_017975.2,1969-1987).
gaaaggatattctttacta

SEQ ID NO: 365013 - DNA, 19 bp, Homo sapiens
  siRNA target sequence for FLJ10036 (NM_017975.2,1973-1991).
ggatattctttactaacat

SEQ ID NO: 365014 - DNA, 19 bp, Homo sapiens
  siRNA target sequence for FLJ10036 (NM_017975.2,2000-2018).
gcagccaggtgcatttcaa

SEQ ID NO: 365015 - DNA, 19 bp, Homo sapiens
  siRNA target sequence for AIM1L (NM_017977.1,195-213).
ggtaagtgccacattgaca

SEQ ID NO: 365016 - DNA, 19 bp, Homo sapiens
  siRNA target sequence for AIM1L (NM_017977.1,196-214).
gtaagtgccacattgacat

SEQ ID NO: 365017 - DNA, 19 bp, Homo sapiens
  siRNA target sequence for AIM1L (NM_017977.1,233-251).
cccaggaagagatcaaaca

SEQ ID NO: 365018 - DNA, 19 bp, Homo sapiens
  siRNA target sequence for AIM1L (NM_017977.1,647-665).
cccggagcctcgaggaata

SEQ ID NO: 365019 - DNA, 19 bp, Homo sapiens
  siRNA target sequence for AIM1L (NM_017977.1,842-860).
gcagccaggccgtgaaagt

SEQ ID NO: 365020 - DNA, 19 bp, Homo sapiens
  siRNA target sequence for AIM1L (NM_017977.1,850-868).
gccgtgaaagtgctaagta

SEQ ID NO: 365021 - DNA, 19 bp, Homo sapiens
  siRNA target sequence for AIM1L (NM_017977.1,851-869).
ccgtgaaagtgctaagtaa

SEQ ID NO: 365022 - DNA, 19 bp, Homo sapiens
  siRNA target sequence for AIM1L (NM_017977.1,989-1007).
ccgggacagcagagcttaa

SEQ ID NO: 365023 - DNA, 19 bp, Homo sapiens
  siRNA target sequence for AIM1L (NM_017977.1,990-1008).
cgggacagcagagcttaaa

SEQ ID NO: 365024 - DNA, 19 bp, Homo sapiens
  siRNA target sequence for AIM1L (NM_017977.1,1049-1067).
ctcacctgcctaagaatca

SEQ ID NO: 365025 - DNA, 19 bp, Homo sapiens
  siRNA target sequence for LIMS2 (NM_017980.2,381-399).
ccccgaggggctcttctat

SEQ ID NO: 365026 - DNA, 19 bp, Homo sapiens
  siRNA target sequence for LIMS2 (NM_017980.2,422-440).
gcgaacacgacttccaaat

SEQ ID NO: 365027 - DNA, 19 bp, Homo sapiens
  siRNA target sequence for LIMS2 (NM_017980.2,461-479).
gatcctgcggtgagttcat

SEQ ID NO: 365028 - DNA, 19 bp, Homo sapiens
  siRNA target sequence for LIMS2 (NM_017980.2,464-482).
cctgcggtgagttcatcat

SEQ ID NO: 365029 - DNA, 19 bp, Homo sapiens
  siRNA target sequence for LIMS2 (NM_017980.2,465-483).
ctgcggtgagttcatcatt

SEQ ID NO: 365030 - DNA, 19 bp, Homo sapiens
  siRNA target sequence for LIMS2 (NM_017980.2,709-727).
caccctgaccacttcaact

SEQ ID NO: 365031 - DNA, 19 bp, Homo sapiens
  siRNA target sequence for LIMS2 (NM_017980.2,928-946).
gggcaccggcactatgaga

SEQ ID NO: 365032 - DNA, 19 bp, Homo sapiens
  siRNA target sequence for LIMS2 (NM_017980.2,991-1009).
ggggacgtctgctacaact

SEQ ID NO: 365033 - DNA, 19 bp, Homo sapiens
  siRNA target sequence for LIMS2 (NM_017980.2,1101-1119).
caccctgaagaacaagttt

SEQ ID NO: 365034 - DNA, 19 bp, Homo sapiens
  siRNA target sequence for FLJ10055 (NM_017983.3,142-160).
gaactaaagccgggtataa

SEQ ID NO: 365035 - DNA, 19 bp, Homo sapiens
  siRNA target sequence for FLJ10055 (NM_017983.3,145-163).
ctaaagccgggtataagct

SEQ ID NO: 365036 - DNA, 19 bp, Homo sapiens
  siRNA target sequence for FLJ10055 (NM_017983.3,154-172).
ggtataagctgttttctct

SEQ ID NO: 365037 - DNA, 19 bp, Homo sapiens
  siRNA target sequence for FLJ10055 (NM_017983.3,198-216).
gtccacggaagcaatgaaa

SEQ ID NO: 365038 - DNA, 19 bp, Homo sapiens
  siRNA target sequence for FLJ10055 (NM_017983.3,266-284).
ggtagtcagtcacacaaaa

SEQ ID NO: 365039 - DNA, 19 bp, Homo sapiens
  siRNA target sequence for FLJ10055 (NM_017983.3,291-309).
cagatgaacgtgtatcact

SEQ ID NO: 365040 - DNA, 19 bp, Homo sapiens
  siRNA target sequence for FLJ10055 (NM_017983.3,478-496).
gtctatgtgctctctctat

SEQ ID NO: 365041 - DNA, 19 bp, Homo sapiens
  siRNA target sequence for FLJ10055 (NM_017983.3,480-498).
ctatgtgctctctctatca

SEQ ID NO: 365042 - DNA, 19 bp, Homo sapiens
  siRNA target sequence for FLJ10055 (NM_017983.3,486-504).
gctctctctatcaaccatt

SEQ ID NO: 365043 - DNA, 19 bp, Homo sapiens
  siRNA target sequence for FLJ10055 (NM_017983.3,541-559).
caggggagattgtgcttta

SEQ ID NO: 365044 - DNA, 19 bp, Homo sapiens
  siRNA target sequence for FLJ10055 (NM_017983.3,544-562).
gggagattgtgctttatga

SEQ ID NO: 365045 - DNA, 19 bp, Homo sapiens
  siRNA target sequence for FLJ10055 (NM_017983.3,545-563).
ggagattgtgctttatgat

SEQ ID NO: 365046 - DNA, 19 bp, Homo sapiens
  siRNA target sequence for FLJ10055 (NM_017983.3,648-666).
ctagcaagtgcgtctgaaa

SEQ ID NO: 365047 - DNA, 19 bp, Homo sapiens
  siRNA target sequence for FLJ10055 (NM_017983.3,748-766).
caatcagctctctagtgtt

SEQ ID NO: 365048 - DNA, 19 bp, Homo sapiens
  siRNA target sequence for FLJ10055 (NM_017983.3,754-772).
gctctctagtgttcagtat

SEQ ID NO: 365049 - DNA, 19 bp, Homo sapiens
  siRNA target sequence for FLJ10055 (NM_017983.3,878-896).
ctacatgggaaagatgttt

SEQ ID NO: 365050 - DNA, 19 bp, Homo sapiens
  siRNA target sequence for FLJ10055 (NM_017983.3,960-978).
gccactgcacgcttgaact

SEQ ID NO: 365051 - DNA, 19 bp, Homo sapiens
  siRNA target sequence for FLJ10055 (NM_017983.3,1053-1071).
ggacacctttatatgtaca

SEQ ID NO: 365052 - DNA, 19 bp, Homo sapiens
  siRNA target sequence for FLJ10055 (NM_017983.3,1056-1074).
cacctttatatgtacaatt

SEQ ID NO: 365053 - DNA, 19 bp, Homo sapiens
  siRNA target sequence for FLJ10055 (NM_017983.3,1089-1107).
ggaggagagtgtgtcttaa

SEQ ID NO: 365054 - DNA, 19 bp, Homo sapiens
  siRNA target sequence for FLJ10055 (NM_017983.3,1090-1108).
gaggagagtgtgtcttaat

SEQ ID NO: 365055 - DNA, 19 bp, Homo sapiens
  siRNA target sequence for FLJ10055 (NM_017983.3,1093-1111).
gagagtgtgtcttaatcaa

SEQ ID NO: 365056 - DNA, 19 bp, Homo sapiens
  siRNA target sequence for FLJ10055 (NM_017983.3,1226-1244).
ctccacggtgccaggttat

SEQ ID NO: 365057 - DNA, 19 bp, Homo sapiens
  siRNA target sequence for FLJ10055 (NM_017983.3,1229-1247).
cacggtgccaggttattct

SEQ ID NO: 365058 - DNA, 19 bp, Homo sapiens
  siRNA target sequence for FLJ10055 (NM_017983.3,1231-1249).
cggtgccaggttattctga

SEQ ID NO: 365059 - DNA, 19 bp, Homo sapiens
  siRNA target sequence for FLJ10055 (NM_017983.3,1260-1278).
gcgctgcgaggagaagtta

SEQ ID NO: 365060 - DNA, 19 bp, Homo sapiens
  siRNA target sequence for FLJ10055 (NM_017983.3,1261-1279).
cgctgcgaggagaagttat

SEQ ID NO: 365061 - DNA, 19 bp, Homo sapiens
  siRNA target sequence for FLJ10055 (NM_017983.3,1262-1280).
gctgcgaggagaagttatt

SEQ ID NO: 365062 - DNA, 19 bp, Homo sapiens
  siRNA target sequence for FLJ10055 (NM_017983.3,1265-1283).
gcgaggagaagttattcct

SEQ ID NO: 365063 - DNA, 19 bp, Homo sapiens
  siRNA target sequence for FLJ10055 (NM_017983.3,1301-1319).
gggaccagtgtgtcttgat

SEQ ID NO: 365064 - DNA, 19 bp, Homo sapiens
  siRNA target sequence for FLJ10055 (NM_017983.3,1310-1328).
gtgtcttgatgatgagaat

SEQ ID NO: 365065 - DNA, 19 bp, Homo sapiens
  siRNA target sequence for ZCWPW1 (NM_017984.2,256-274).
caacgttgcagaataaaga

SEQ ID NO: 365066 - DNA, 19 bp, Homo sapiens
  siRNA target sequence for ZCWPW1 (NM_017984.2,308-326).
cccacctgcacaaaaatct

SEQ ID NO: 365067 - DNA, 19 bp, Homo sapiens
  siRNA target sequence for ZCWPW1 (NM_017984.2,648-666).
gcccagcccgtagtatcta

SEQ ID NO: 365068 - DNA, 19 bp, Homo sapiens
  siRNA target sequence for ZCWPW1 (NM_017984.2,731-749).
ggaggtaccacatactcaa

SEQ ID NO: 365069 - DNA, 19 bp, Homo sapiens
  siRNA target sequence for ZCWPW1 (NM_017984.2,783-801).
cctgagataaggacatcta

SEQ ID NO: 365070 - DNA, 19 bp, Homo sapiens
  siRNA target sequence for ZCWPW1 (NM_017984.2,786-804).
gagataaggacatctaagt

SEQ ID NO: 365071 - DNA, 19 bp, Homo sapiens
  siRNA target sequence for ZCWPW1 (NM_017984.2,822-840).
gcaccctctaagaagaaat

SEQ ID NO: 365072 - DNA, 19 bp, Homo sapiens
  siRNA target sequence for ZCWPW1 (NM_017984.2,827-845).
ctctaagaagaaatccaat

SEQ ID NO: 365073 - DNA, 19 bp, Homo sapiens
  siRNA target sequence for ZCWPW1 (NM_017984.2,921-939).
caggaagaccgactaaaga

SEQ ID NO: 365074 - DNA, 19 bp, Homo sapiens
  siRNA target sequence for ZCWPW1 (NM_017984.2,1076-1094).
ctcagttctcccagataat

SEQ ID NO: 365075 - DNA, 19 bp, Homo sapiens
  siRNA target sequence for ZCWPW1 (NM_017984.2,1122-1140).
cagtataatcgctgtgata

SEQ ID NO: 365076 - DNA, 19 bp, Homo sapiens
  siRNA target sequence for ZCWPW1 (NM_017984.2,1235-1253).
ctggtggccaggcatgata

SEQ ID NO: 365077 - DNA, 19 bp, Homo sapiens
  siRNA target sequence for ZCWPW1 (NM_017984.2,1238-1256).
gtggccaggcatgatagaa

SEQ ID NO: 365078 - DNA, 19 bp, Homo sapiens
  siRNA target sequence for ZCWPW1 (NM_017984.2,1241-1259).
gccaggcatgatagaatct

SEQ ID NO: 365079 - DNA, 19 bp, Homo sapiens
  siRNA target sequence for ZCWPW1 (NM_017984.2,1263-1281).
cctgacttaggggaatatt

SEQ ID NO: 365080 - DNA, 19 bp, Homo sapiens
  siRNA target sequence for ZCWPW1 (NM_017984.2,1264-1282).
ctgacttaggggaatattt

SEQ ID NO: 365081 - DNA, 19 bp, Homo sapiens
  siRNA target sequence for ZCWPW1 (NM_017984.2,1268-1286).
cttaggggaatattttctt

SEQ ID NO: 365082 - DNA, 19 bp, Homo sapiens
  siRNA target sequence for ZCWPW1 (NM_017984.2,1328-1346).
gacgttttttggagaaaca

SEQ ID NO: 365083 - DNA, 19 bp, Homo sapiens
  siRNA target sequence for ZCWPW1 (NM_017984.2,1403-1421).
ggagctatcagtcatgaaa

SEQ ID NO: 365084 - DNA, 19 bp, Homo sapiens
  siRNA target sequence for ZCWPW1 (NM_017984.2,1404-1422).
gagctatcagtcatgaaaa

SEQ ID NO: 365085 - DNA, 19 bp, Homo sapiens
  siRNA target sequence for ZCWPW1 (NM_017984.2,1497-1515).
caggaacgggttaacttgt

SEQ ID NO: 365086 - DNA, 19 bp, Homo sapiens
  siRNA target sequence for ZCWPW1 (NM_017984.2,1528-1546).
gccgattcaacggatctaa

SEQ ID NO: 365087 - DNA, 19 bp, Homo sapiens
  siRNA target sequence for ZCWPW1 (NM_017984.2,1530-1548).
cgattcaacggatctaaca

SEQ ID NO: 365088 - DNA, 19 bp, Homo sapiens
  siRNA target sequence for ZCWPW1 (NM_017984.2,1535-1553).
caacggatctaacagtaat

SEQ ID NO: 365089 - DNA, 19 bp, Homo sapiens
  siRNA target sequence for ZCWPW1 (NM_017984.2,1572-1590).
cagctctctggtttgaaca

SEQ ID NO: 365090 - DNA, 19 bp, Homo sapiens
  siRNA target sequence for ZCWPW1 (NM_017984.2,1662-1680).
ccaattttgcccattcgta

SEQ ID NO: 365091 - DNA, 19 bp, Homo sapiens
  siRNA target sequence for ZCWPW1 (NM_017984.2,1663-1681).
caattttgcccattcgtaa

SEQ ID NO: 365092 - DNA, 19 bp, Homo sapiens
  siRNA target sequence for ZCWPW1 (NM_017984.2,1673-1691).
cattcgtaagcgagtcaaa

SEQ ID NO: 365093 - DNA, 19 bp, Homo sapiens
  siRNA target sequence for C9orf68 (NM_017985.1,167-185).
cggggtctacctcatgaat

SEQ ID NO: 365094 - DNA, 19 bp, Homo sapiens
  siRNA target sequence for C9orf68 (NM_017985.1,169-187).
gggtctacctcatgaatca

SEQ ID NO: 365095 - DNA, 19 bp, Homo sapiens
  siRNA target sequence for C9orf68 (NM_017985.1,217-235).
cgttccccattatgattca

SEQ ID NO: 365096 - DNA, 19 bp, Homo sapiens
  siRNA target sequence for C9orf68 (NM_017985.1,236-254).
ggagagcatgagatttgaa

SEQ ID NO: 365097 - DNA, 19 bp, Homo sapiens
  siRNA target sequence for C9orf68 (NM_017985.1,241-259).
gcatgagatttgaaaaggt

SEQ ID NO: 365098 - DNA, 19 bp, Homo sapiens
  siRNA target sequence for C9orf68 (NM_017985.1,283-301).
gagctgtagtagacctttt

SEQ ID NO: 365099 - DNA, 19 bp, Homo sapiens
  siRNA target sequence for C9orf68 (NM_017985.1,286-304).
ctgtagtagaccttttgga

SEQ ID NO: 365100 - DNA, 19 bp, Homo sapiens
  siRNA target sequence for C9orf68 (NM_017985.1,291-309).
gtagaccttttggaaatgt

SEQ ID NO: 365101 - DNA, 19 bp, Homo sapiens
  siRNA target sequence for C9orf68 (NM_017985.1,394-412).
gtagggaggtgctcatgaa

SEQ ID NO: 365102 - DNA, 19 bp, Homo sapiens
  siRNA target sequence for C9orf68 (NM_017985.1,481-499).
gtgtgtttctgcatagaaa

SEQ ID NO: 365103 - DNA, 19 bp, Homo sapiens
  siRNA target sequence for C9orf68 (NM_017985.1,483-501).
gtgtttctgcatagaaaca

SEQ ID NO: 365104 - DNA, 19 bp, Homo sapiens
  siRNA target sequence for FLJ10060 (NM_017986.2,1042-1060).
ggcctgttgtacctctaat

SEQ ID NO: 365105 - DNA, 19 bp, Homo sapiens
  siRNA target sequence for FLJ10060 (NM_017986.2,1328-1346).
ccatcactaccctctgtaa

SEQ ID NO: 365106 - DNA, 19 bp, Homo sapiens
  siRNA target sequence for FLJ10081 (NM_017991.3,440-458).
ccactctatgacaatcaga

SEQ ID NO: 365107 - DNA, 19 bp, Homo sapiens
  siRNA target sequence for FLJ10081 (NM_017991.3,460-478).
ggcacgcagcgtgatgaat

SEQ ID NO: 365108 - DNA, 19 bp, Homo sapiens
  siRNA target sequence for FLJ10081 (NM_017991.3,462-480).
cacgcagcgtgatgaatga

SEQ ID NO: 365109 - DNA, 19 bp, Homo sapiens
  siRNA target sequence for FLJ10081 (NM_017991.3,464-482).
cgcagcgtgatgaatgagt

SEQ ID NO: 365110 - DNA, 19 bp, Homo sapiens
  siRNA target sequence for FLJ10081 (NM_017991.3,483-501).
gtgaacggcatgtcatctt

SEQ ID NO: 365111 - DNA, 19 bp, Homo sapiens
  siRNA target sequence for FLJ10081 (NM_017991.3,643-661).
caacgaaggggcttgtaat

SEQ ID NO: 365112 - DNA, 19 bp, Homo sapiens
  siRNA target sequence for FLJ10081 (NM_017991.3,863-881).
cttgtgtcatccaacacaa

SEQ ID NO: 365113 - DNA, 19 bp, Homo sapiens
  siRNA target sequence for FLJ10081 (NM_017991.3,948-966).
gtgtgctttctcataacaa

SEQ ID NO: 365114 - DNA, 19 bp, Homo sapiens
  siRNA target sequence for FLJ10081 (NM_017991.3,981-999).
ctggctctccgctgattct

SEQ ID NO: 365115 - DNA, 19 bp, Homo sapiens
  siRNA target sequence for FLJ10081 (NM_017991.3,983-1001).
ggctctccgctgattctca

SEQ ID NO: 365116 - DNA, 19 bp, Homo sapiens
  siRNA target sequence for FLJ10081 (NM_017991.3,984-1002).
gctctccgctgattctcat

SEQ ID NO: 365117 - DNA, 19 bp, Homo sapiens
  siRNA target sequence for FLJ10081 (NM_017991.3,1102-1120).
cacccatctgctgaacaat

SEQ ID NO: 365118 - DNA, 19 bp, Homo sapiens
  siRNA target sequence for FLJ10081 (NM_017991.3,1123-1141).
cagtggggtaggagttcta

SEQ ID NO: 365119 - DNA, 19 bp, Homo sapiens
  siRNA target sequence for FLJ10081 (NM_017991.3,1125-1143).
gtggggtaggagttctaca

SEQ ID NO: 365120 - DNA, 19 bp, Homo sapiens
  siRNA target sequence for FLJ10081 (NM_017991.3,1142-1160).
cagtgtctcgagcatatga

SEQ ID NO: 365121 - DNA, 19 bp, Homo sapiens
  siRNA target sequence for FLJ10081 (NM_017991.3,1144-1162).
gtgtctcgagcatatgatt

SEQ ID NO: 365122 - DNA, 19 bp, Homo sapiens
  siRNA target sequence for FLJ10081 (NM_017991.3,1253-1271).
gcctgtcatgtgtcagtaa

SEQ ID NO: 365123 - DNA, 19 bp, Homo sapiens
  siRNA target sequence for FLJ10081 (NM_017991.3,1302-1320).
ggtttcctctgcttactgt

SEQ ID NO: 365124 - DNA, 19 bp, Homo sapiens
  siRNA target sequence for FLJ10081 (NM_017991.3,1330-1348).
cagaggggatgtagatgat

SEQ ID NO: 365125 - DNA, 19 bp, Homo sapiens
  siRNA target sequence for FLJ10081 (NM_017991.3,1343-1361).
gatgatcccctcttggata

SEQ ID NO: 365126 - DNA, 19 bp, Homo sapiens
  siRNA target sequence for FLJ10081 (NM_017991.3,1349-1367).
cccctcttggatatgaaga

SEQ ID NO: 365127 - DNA, 19 bp, Homo sapiens
  siRNA target sequence for FLJ10081 (NM_017991.3,1473-1491).
ggggagctgatgacaatct

SEQ ID NO: 365128 - DNA, 19 bp, Homo sapiens
  siRNA target sequence for FLJ10081 (NM_017991.3,1484-1502).
gacaatctcagaataagca

SEQ ID NO: 365129 - DNA, 19 bp, Homo sapiens
  siRNA target sequence for FLJ10081 (NM_017991.3,1536-1554).
gcatggtggacagatgtat

SEQ ID NO: 365130 - DNA, 19 bp, Homo sapiens
  siRNA target sequence for FLJ10081 (NM_017991.3,1551-1569).
gtattcaggatgagattgt

SEQ ID NO: 365131 - DNA, 19 bp, Homo sapiens
  siRNA target sequence for FLJ10081 (NM_017991.3,1674-1692).
gagacttggcctttgaagt

SEQ ID NO: 365132 - DNA, 19 bp, Homo sapiens
  siRNA target sequence for FLJ10081 (NM_017991.3,1837-1855).
cagtcagattggaagttct

SEQ ID NO: 365133 - DNA, 19 bp, Homo sapiens
  siRNA target sequence for FLJ10081 (NM_017991.3,2019-2037).
ccaaacgaccgaagatcaa

SEQ ID NO: 365134 - DNA, 19 bp, Homo sapiens
  siRNA target sequence for FLJ10081 (NM_017991.3,2361-2379).
gcttcagcttgcaggatat

SEQ ID NO: 365135 - DNA, 19 bp, Homo sapiens
  siRNA target sequence for FLJ10081 (NM_017991.3,2497-2515).
caccattgtccgtaccatt

SEQ ID NO: 365136 - DNA, 19 bp, Homo sapiens
  siRNA target sequence for FLJ10081 (NM_017991.3,2665-2683).
ggtccccaccaccattact

SEQ ID NO: 365137 - DNA, 19 bp, Homo sapiens
  siRNA target sequence for FLJ10099 (NM_017994.3,341-359).
cctgggctacttcttcaaa

SEQ ID NO: 365138 - DNA, 19 bp, Homo sapiens
  siRNA target sequence for FLJ10099 (NM_017994.3,342-360).
ctgggctacttcttcaaaa

SEQ ID NO: 365139 - DNA, 19 bp, Homo sapiens
  siRNA target sequence for FLJ10099 (NM_017994.3,408-426).
ctgctacggttcaatgatt

SEQ ID NO: 365140 - DNA, 19 bp, Homo sapiens
  siRNA target sequence for FLJ10099 (NM_017994.3,423-441).
gatttggacttgtgtgtat

SEQ ID NO: 365141 - DNA, 19 bp, Homo sapiens
  siRNA target sequence for FLJ10099 (NM_017994.3,479-497).
cacaactccggaaagtaca

SEQ ID NO: 365142 - DNA, 19 bp, Homo sapiens
  siRNA target sequence for FLJ10099 (NM_017994.3,481-499).
caactccggaaagtacaat

SEQ ID NO: 365143 - DNA, 19 bp, Homo sapiens
  siRNA target sequence for FLJ10099 (NM_017994.3,625-643).
gcaacgtcacccatctgta

SEQ ID NO: 365144 - DNA, 19 bp, Homo sapiens
  siRNA target sequence for FLJ10099 (NM_017994.3,649-667).
ccatcttagggcatcagat

SEQ ID NO: 365145 - DNA, 19 bp, Homo sapiens
  siRNA target sequence for FLJ10099 (NM_017994.3,650-668).
catcttagggcatcagatt

SEQ ID NO: 365146 - DNA, 19 bp, Homo sapiens
  siRNA target sequence for FLJ10099 (NM_017994.3,690-708).
cacgaggagataaacatca

SEQ ID NO: 365147 - DNA, 19 bp, Homo sapiens
  siRNA target sequence for FLJ10099 (NM_017994.3,867-885).
gccacgctctggtacaaga

SEQ ID NO: 365148 - DNA, 19 bp, Homo sapiens
  siRNA target sequence for FLJ10099 (NM_017994.3,868-886).
ccacgctctggtacaagat

SEQ ID NO: 365149 - DNA, 19 bp, Homo sapiens
  siRNA target sequence for FLJ10099 (NM_017994.3,873-891).
ctctggtacaagatcttca

SEQ ID NO: 365150 - DNA, 19 bp, Homo sapiens
  siRNA target sequence for FLJ10099 (NM_017994.3,913-931).
caaaatacgcccaagatta

SEQ ID NO: 365151 - DNA, 19 bp, Homo sapiens
  siRNA target sequence for FLJ10099 (NM_017994.3,978-996).
gctttaaatcccaagctta

SEQ ID NO: 365152 - DNA, 19 bp, Homo sapiens
  siRNA target sequence for FLJ10099 (NM_017994.3,1011-1029).
gatgatgaccgttcattaa

SEQ ID NO: 365153 - DNA, 19 bp, Homo sapiens
  siRNA target sequence for FLJ10099 (NM_017994.3,1014-1032).
gatgaccgttcattaataa

SEQ ID NO: 365154 - DNA, 19 bp, Homo sapiens
  siRNA target sequence for FLJ10099 (NM_017994.3,1103-1121).
caagggcagacctagcaaa

SEQ ID NO: 365155 - DNA, 19 bp, Homo sapiens
  siRNA target sequence for FLJ10099 (NM_017994.3,1126-1144).
gtcagagcaatcctgaatt

SEQ ID NO: 365156 - DNA, 19 bp, Homo sapiens
  siRNA target sequence for FLJ10103 (NM_017996.2,191-209).
gataatggatcatcatgtt

SEQ ID NO: 365157 - DNA, 19 bp, Homo sapiens
  siRNA target sequence for FLJ10103 (NM_017996.2,311-329).
ccgagtgttccatcagaat

SEQ ID NO: 365158 - DNA, 19 bp, Homo sapiens
  siRNA target sequence for FLJ10103 (NM_017996.2,313-331).
gagtgttccatcagaatgt

SEQ ID NO: 365159 - DNA, 19 bp, Homo sapiens
  siRNA target sequence for FLJ10103 (NM_017996.2,315-333).
gtgttccatcagaatgtct

SEQ ID NO: 365160 - DNA, 19 bp, Homo sapiens
  siRNA target sequence for FLJ10103 (NM_017996.2,369-387).
ccttgtttcttgcgtaaat

SEQ ID NO: 365161 - DNA, 19 bp, Homo sapiens
  siRNA target sequence for FLJ10103 (NM_017996.2,393-411).
cctgatggacgctacttta

SEQ ID NO: 365162 - DNA, 19 bp, Homo sapiens
  siRNA target sequence for FLJ10103 (NM_017996.2,394-412).
ctgatggacgctactttat

SEQ ID NO: 365163 - DNA, 19 bp, Homo sapiens
  siRNA target sequence for FLJ10103 (NM_017996.2,436-454).
ctcttgaaatctatgagta

SEQ ID NO: 365164 - DNA, 19 bp, Homo sapiens
  siRNA target sequence for FLJ10103 (NM_017996.2,479-497).
cctactgcagggatacgaa

SEQ ID NO: 365165 - DNA, 19 bp, Homo sapiens
  siRNA target sequence for FLJ10103 (NM_017996.2,490-508).
gatacgaaggagaaatcct

SEQ ID NO: 365166 - DNA, 19 bp, Homo sapiens
  siRNA target sequence for FLJ10103 (NM_017996.2,550-568).
ggctctttgaacgcttttt

SEQ ID NO: 365167 - DNA, 19 bp, Homo sapiens
  siRNA target sequence for FLJ10103 (NM_017996.2,570-588).
gtcctgctgcacattacca

SEQ ID NO: 365168 - DNA, 19 bp, Homo sapiens
  siRNA target sequence for FLJ10103 (NM_017996.2,572-590).
cctgctgcacattaccaat

SEQ ID NO: 365169 - DNA, 19 bp, Homo sapiens
  siRNA target sequence for FLJ10103 (NM_017996.2,575-593).
gctgcacattaccaatgtt

SEQ ID NO: 365170 - DNA, 19 bp, Homo sapiens
  siRNA target sequence for FLJ10103 (NM_017996.2,743-761).
cccacggtcccctctagaa

SEQ ID NO: 365171 - DNA, 19 bp, Homo sapiens
  siRNA target sequence for FLJ10103 (NM_017996.2,745-763).
cacggtcccctctagaaga

SEQ ID NO: 365172 - DNA, 19 bp, Homo sapiens
  siRNA target sequence for FLJ10103 (NM_017996.2,748-766).
ggtcccctctagaagacta

SEQ ID NO: 365173 - DNA, 19 bp, Homo sapiens
  siRNA target sequence for FLJ10103 (NM_017996.2,749-767).
gtcccctctagaagactat

SEQ ID NO: 365174 - DNA, 19 bp, Homo sapiens
  siRNA target sequence for FLJ10103 (NM_017996.2,764-782).
ctattccctccatatcatt

SEQ ID NO: 365175 - DNA, 19 bp, Homo sapiens
  siRNA target sequence for FLJ10103 (NM_017996.2,807-825).
gatacacgcacgttcaagt

SEQ ID NO: 365176 - DNA, 19 bp, Homo sapiens
  siRNA target sequence for FLJ10103 (NM_017996.2,852-870).
caagggctgtacttgtaca

SEQ ID NO: 365177 - DNA, 19 bp, Homo sapiens
  siRNA target sequence for FLJ10103 (NM_017996.2,856-874).
ggctgtacttgtacaaaaa

SEQ ID NO: 365178 - DNA, 19 bp, Homo sapiens
  siRNA target sequence for FLJ10103 (NM_017996.2,928-946).
ctcctgaaggcactttcat

SEQ ID NO: 365179 - DNA, 19 bp, Homo sapiens
  siRNA target sequence for FLJ10103 (NM_017996.2,958-976).
ccattggccgcttttgcta

SEQ ID NO: 365180 - DNA, 19 bp, Homo sapiens
  siRNA target sequence for FLJ10103 (NM_017996.2,959-977).
cattggccgcttttgctat

SEQ ID NO: 365181 - DNA, 19 bp, Homo sapiens
  siRNA target sequence for FLJ10103 (NM_017996.2,1051-1069).
cctttagggatcctttcat

SEQ ID NO: 365182 - DNA, 19 bp, Homo sapiens
  siRNA target sequence for FLJ10103 (NM_017996.2,1086-1104).
cggttgctggtatatttgt

SEQ ID NO: 365183 - DNA, 19 bp, Homo sapiens
  siRNA target sequence for FLJ10103 (NM_017996.2,1215-1233).
cacctgtttatcaagtaca

SEQ ID NO: 365184 - DNA, 19 bp, Homo sapiens
  siRNA target sequence for FLJ10103 (NM_017996.2,1237-1255).
gtgaggatgtagtaacact

SEQ ID NO: 365185 - DNA, 19 bp, Homo sapiens
  siRNA target sequence for FLJ10103 (NM_017996.2,1373-1391).
ctgtgacctttttcgtaat

SEQ ID NO: 365186 - DNA, 19 bp, Homo sapiens
  siRNA target sequence for FLJ10103 (NM_017996.2,1377-1395).
gacctttttcgtaatgcta

SEQ ID NO: 365187 - DNA, 19 bp, Homo sapiens
  siRNA target sequence for FLJ10103 (NM_017996.2,1463-1481).
ccggttcaaagacactatt

SEQ ID NO: 365188 - DNA, 19 bp, Homo sapiens
  siRNA target sequence for FLJ10103 (NM_017996.2,1464-1482).
cggttcaaagacactatta

SEQ ID NO: 365189 - DNA, 19 bp, Homo sapiens
  siRNA target sequence for FLJ10103 (NM_017996.2,1465-1483).
ggttcaaagacactattat

SEQ ID NO: 365190 - DNA, 19 bp, Homo sapiens
  siRNA target sequence for FLJ10103 (NM_017996.2,1564-1582).
gtagcccctatctggattt

SEQ ID NO: 365191 - DNA, 19 bp, Homo sapiens
  siRNA target sequence for RNF31 (NM_017999.3,484-502).
ctggcgtggtgtcaagttt

SEQ ID NO: 365192 - DNA, 19 bp, Homo sapiens
  siRNA target sequence for RNF31 (NM_017999.3,486-504).
ggcgtggtgtcaagtttaa

SEQ ID NO: 365193 - DNA, 19 bp, Homo sapiens
  siRNA target sequence for RNF31 (NM_017999.3,487-505).
gcgtggtgtcaagtttaat

SEQ ID NO: 365194 - DNA, 19 bp, Homo sapiens
  siRNA target sequence for RNF31 (NM_017999.3,488-506).
cgtggtgtcaagtttaata

SEQ ID NO: 365195 - DNA, 19 bp, Homo sapiens
  siRNA target sequence for RNF31 (NM_017999.3,548-566).
cgagatgtgctgcgattat

SEQ ID NO: 365196 - DNA, 19 bp, Homo sapiens
  siRNA target sequence for RNF31 (NM_017999.3,760-778).
gctgcagctttcagaattt

SEQ ID NO: 365197 - DNA, 19 bp, Homo sapiens
  siRNA target sequence for RNF31 (NM_017999.3,773-791).
gaatttgaccccctattga

SEQ ID NO: 365198 - DNA, 19 bp, Homo sapiens
  siRNA target sequence for RNF31 (NM_017999.3,883-901).
gcactgcccatcctgtaaa

SEQ ID NO: 365199 - DNA, 19 bp, Homo sapiens
  siRNA target sequence for RNF31 (NM_017999.3,1301-1319).
gctgtgctatgttccatat

SEQ ID NO: 365200 - DNA, 19 bp, Homo sapiens
  siRNA target sequence for RNF31 (NM_017999.3,1476-1494).
ctggctgggtgtgtgttat

SEQ ID NO: 365201 - DNA, 19 bp, Homo sapiens
  siRNA target sequence for RNF31 (NM_017999.3,1709-1727).
cctgtccagaggagatctt

SEQ ID NO: 365202 - DNA, 19 bp, Homo sapiens
  siRNA target sequence for RNF31 (NM_017999.3,1883-1901).
gtcatggcaaccttgatga

SEQ ID NO: 365203 - DNA, 19 bp, Homo sapiens
  siRNA target sequence for FLJ10116 (NM_018000.1,351-369).
cccctcgtcagtgataaca

SEQ ID NO: 365204 - DNA, 19 bp, Homo sapiens
  siRNA target sequence for FLJ10116 (NM_018000.1,352-370).
ccctcgtcagtgataacaa

SEQ ID NO: 365205 - DNA, 19 bp, Homo sapiens
  siRNA target sequence for FLJ10116 (NM_018000.1,359-377).
cagtgataacaatccatat

SEQ ID NO: 365206 - DNA, 19 bp, Homo sapiens
  siRNA target sequence for FLJ10116 (NM_018000.1,424-442).
ggagtatgccccatgatgt

SEQ ID NO: 365207 - DNA, 19 bp, Homo sapiens
  siRNA target sequence for FLJ10116 (NM_018000.1,465-483).
gacagaaccctgtacaatt

SEQ ID NO: 365208 - DNA, 19 bp, Homo sapiens
  siRNA target sequence for FLJ10116 (NM_018000.1,469-487).
gaaccctgtacaatttgat

SEQ ID NO: 365209 - DNA, 19 bp, Homo sapiens
  siRNA target sequence for FLJ10116 (NM_018000.1,563-581).
ggttcgaagggaagtaaga

SEQ ID NO: 365210 - DNA, 19 bp, Homo sapiens
  siRNA target sequence for FLJ10116 (NM_018000.1,586-604).
gatggaagtgcatcttaga

SEQ ID NO: 365211 - DNA, 19 bp, Homo sapiens
  siRNA target sequence for FLJ10116 (NM_018000.1,589-607).
ggaagtgcatcttagaaga

SEQ ID NO: 365212 - DNA, 19 bp, Homo sapiens
  siRNA target sequence for FLJ10116 (NM_018000.1,665-683).
cagtgattctaaaaacaca

SEQ ID NO: 365213 - DNA, 19 bp, Homo sapiens
  siRNA target sequence for FLJ10116 (NM_018000.1,685-703).
ggaaagctcgagagatgtt

SEQ ID NO: 365214 - DNA, 19 bp, Homo sapiens
  siRNA target sequence for FLJ10116 (NM_018000.1,690-708).
gctcgagagatgttgttaa

SEQ ID NO: 365215 - DNA, 19 bp, Homo sapiens
  siRNA target sequence for FLJ10116 (NM_018000.1,691-709).
ctcgagagatgttgttaaa

SEQ ID NO: 365216 - DNA, 19 bp, Homo sapiens
  siRNA target sequence for FLJ10116 (NM_018000.1,745-763).
gggagctctcagagagata

SEQ ID NO: 365217 - DNA, 19 bp, Homo sapiens
  siRNA target sequence for FLJ10116 (NM_018000.1,750-768).
ctctcagagagatatctct

SEQ ID NO: 365218 - DNA, 19 bp, Homo sapiens
  siRNA target sequence for FLJ10116 (NM_018000.1,752-770).
ctcagagagatatctcttt

SEQ ID NO: 365219 - DNA, 19 bp, Homo sapiens
  siRNA target sequence for FLJ10116 (NM_018000.1,779-797).
ccgtctcattgcacttgat

SEQ ID NO: 365220 - DNA, 19 bp, Homo sapiens
  siRNA target sequence for FLJ10116 (NM_018000.1,798-816).
gctgcagaagagttcttta

SEQ ID NO: 365221 - DNA, 19 bp, Homo sapiens
  siRNA target sequence for FLJ10116 (NM_018000.1,907-925).
gcagacttgcacatatgca

SEQ ID NO: 365222 - DNA, 19 bp, Homo sapiens
  siRNA target sequence for FLJ10116 (NM_018000.1,916-934).
cacatatgcagggagtatt

SEQ ID NO: 365223 - DNA, 19 bp, Homo sapiens
  siRNA target sequence for FEZL (NM_018008.2,369-387).
cgaggtgccgtcaaagaca

SEQ ID NO: 365224 - DNA, 19 bp, Homo sapiens
  siRNA target sequence for FEZL (NM_018008.2,493-511).
gccagcggcttgtgcaaaa

SEQ ID NO: 365225 - DNA, 19 bp, Homo sapiens
  siRNA target sequence for FEZL (NM_018008.2,620-638).
ccagcggctcgctctacta

SEQ ID NO: 365226 - DNA, 19 bp, Homo sapiens
  siRNA target sequence for FEZL (NM_018008.2,623-641).
gcggctcgctctactactt

SEQ ID NO: 365227 - DNA, 19 bp, Homo sapiens
  siRNA target sequence for FEZL (NM_018008.2,625-643).
ggctcgctctactacttca

SEQ ID NO: 365228 - DNA, 19 bp, Homo sapiens
  siRNA target sequence for FEZL (NM_018008.2,629-647).
cgctctactacttcaacta

SEQ ID NO: 365229 - DNA, 19 bp, Homo sapiens
  siRNA target sequence for FEZL (NM_018008.2,785-803).
gcctggctgcggacaagtt

SEQ ID NO: 365230 - DNA, 19 bp, Homo sapiens
  siRNA target sequence for FEZL (NM_018008.2,937-955).
gatggcaagcccaaaaact

SEQ ID NO: 365231 - DNA, 19 bp, Homo sapiens
  siRNA target sequence for FEZL (NM_018008.2,940-958).
ggcaagcccaaaaacttca

SEQ ID NO: 365232 - DNA, 19 bp, Homo sapiens
  siRNA target sequence for FEZL (NM_018008.2,979-997).
gtgtttaacgctcactata

SEQ ID NO: 365233 - DNA, 19 bp, Homo sapiens
  siRNA target sequence for FEZL (NM_018008.2,981-999).
gtttaacgctcactataat

SEQ ID NO: 365234 - DNA, 19 bp, Homo sapiens
  siRNA target sequence for FEZL (NM_018008.2,1036-1054).
ccgttcgtgtgcaaagtct

SEQ ID NO: 365235 - DNA, 19 bp, Homo sapiens
  siRNA target sequence for FEZL (NM_018008.2,1082-1100).
cgctctgcaggcacaaaat

SEQ ID NO: 365236 - DNA, 19 bp, Homo sapiens
  siRNA target sequence for FEZL (NM_018008.2,1083-1101).
gctctgcaggcacaaaatt

SEQ ID NO: 365237 - DNA, 19 bp, Homo sapiens
  siRNA target sequence for FEZL (NM_018008.2,1084-1102).
ctctgcaggcacaaaatta

SEQ ID NO: 365238 - DNA, 19 bp, Homo sapiens
  siRNA target sequence for FEZL (NM_018008.2,1203-1221).
gcccttcgtctgcgaattt

SEQ ID NO: 365239 - DNA, 19 bp, Homo sapiens
  siRNA target sequence for FEZL (NM_018008.2,1204-1222).
cccttcgtctgcgaatttt

SEQ ID NO: 365240 - DNA, 19 bp, Homo sapiens
  siRNA target sequence for TAPBP-R (NM_018009.3,393-411).
ggacttcaccgatttccaa

SEQ ID NO: 365241 - DNA, 19 bp, Homo sapiens
  siRNA target sequence for TAPBP-R (NM_018009.3,427-445).
caagatgacccacctatta

SEQ ID NO: 365242 - DNA, 19 bp, Homo sapiens
  siRNA target sequence for TAPBP-R (NM_018009.3,430-448).
gatgacccacctattatct

SEQ ID NO: 365243 - DNA, 19 bp, Homo sapiens
  siRNA target sequence for TAPBP-R (NM_018009.3,993-1011).
ggacgaggggacctacatt

SEQ ID NO: 365244 - DNA, 19 bp, Homo sapiens
  siRNA target sequence for TAPBP-R (NM_018009.3,1065-1083).
ccaagcttcccctaaagta

SEQ ID NO: 365245 - DNA, 19 bp, Homo sapiens
  siRNA target sequence for TAPBP-R (NM_018009.3,1127-1145).
gcgacattgctggctatta

SEQ ID NO: 365246 - DNA, 19 bp, Homo sapiens
  siRNA target sequence for ESRRBL1 (NM_018010.2,102-120).
cacgacgtcgggtttggaa

SEQ ID NO: 365247 - DNA, 19 bp, Homo sapiens
  siRNA target sequence for ESRRBL1 (NM_018010.2,311-329).
ccaaccctggcgaacagtt

SEQ ID NO: 365248 - DNA, 19 bp, Homo sapiens
  siRNA target sequence for ESRRBL1 (NM_018010.2,316-334).
cctggcgaacagttctaca

SEQ ID NO: 365249 - DNA, 19 bp, Homo sapiens
  siRNA target sequence for ESRRBL1 (NM_018010.2,319-337).
ggcgaacagttctacatgt

SEQ ID NO: 365250 - DNA, 19 bp, Homo sapiens
  siRNA target sequence for ESRRBL1 (NM_018010.2,320-338).
gcgaacagttctacatgtt

SEQ ID NO: 365251 - DNA, 19 bp, Homo sapiens
  siRNA target sequence for ESRRBL1 (NM_018010.2,321-339).
cgaacagttctacatgttt

SEQ ID NO: 365252 - DNA, 19 bp, Homo sapiens
  siRNA target sequence for ESRRBL1 (NM_018010.2,322-340).
gaacagttctacatgtttt

SEQ ID NO: 365253 - DNA, 19 bp, Homo sapiens
  siRNA target sequence for ESRRBL1 (NM_018010.2,346-364).
cttgctgcttggttgatta

SEQ ID NO: 365254 - DNA, 19 bp, Homo sapiens
  siRNA target sequence for ESRRBL1 (NM_018010.2,406-424).
gaccctaatgcaacaatat

SEQ ID NO: 365255 - DNA, 19 bp, Homo sapiens
  siRNA target sequence for ESRRBL1 (NM_018010.2,408-426).
ccctaatgcaacaatatct

SEQ ID NO: 365256 - DNA, 19 bp, Homo sapiens
  siRNA target sequence for ESRRBL1 (NM_018010.2,410-428).
ctaatgcaacaatatctaa

SEQ ID NO: 365257 - DNA, 19 bp, Homo sapiens
  siRNA target sequence for ESRRBL1 (NM_018010.2,439-457).
gagcttcggtcatttggaa

SEQ ID NO: 365258 - DNA, 19 bp, Homo sapiens
  siRNA target sequence for ESRRBL1 (NM_018010.2,491-509).
caggttatggagaacatgt

SEQ ID NO: 365259 - DNA, 19 bp, Homo sapiens
  siRNA target sequence for ESRRBL1 (NM_018010.2,512-530).
gctatgttcttgattgctt

SEQ ID NO: 365260 - DNA, 19 bp, Homo sapiens
  siRNA target sequence for ESRRBL1 (NM_018010.2,573-591).
gccaatatacccagtagaa

SEQ ID NO: 365261 - DNA, 19 bp, Homo sapiens
  siRNA target sequence for ESRRBL1 (NM_018010.2,575-593).
caatatacccagtagaaga

SEQ ID NO: 365262 - DNA, 19 bp, Homo sapiens
  siRNA target sequence for ESRRBL1 (NM_018010.2,616-634).
gaagatgatgcagaattaa

SEQ ID NO: 365263 - DNA, 19 bp, Homo sapiens
  siRNA target sequence for ESRRBL1 (NM_018010.2,722-740).
catatcacttggatatgaa

SEQ ID NO: 365264 - DNA, 19 bp, Homo sapiens
  siRNA target sequence for ESRRBL1 (NM_018010.2,744-762).
gactgccaaacaagaagat

SEQ ID NO: 365265 - DNA, 19 bp, Homo sapiens
  siRNA target sequence for ESRRBL1 (NM_018010.2,812-830).
gtgtactaccgcaactgaa

SEQ ID NO: 365266 - DNA, 19 bp, Homo sapiens
  siRNA target sequence for ESRRBL1 (NM_018010.2,817-835).
ctaccgcaactgaaagtca

SEQ ID NO: 365267 - DNA, 19 bp, Homo sapiens
  siRNA target sequence for ESRRBL1 (NM_018010.2,826-844).
ctgaaagtcacgattagga

SEQ ID NO: 365268 - DNA, 19 bp, Homo sapiens
  siRNA target sequence for ESRRBL1 (NM_018010.2,863-881).
gaatccatgttgaccaaat

SEQ ID NO: 365269 - DNA, 19 bp, Homo sapiens
  siRNA target sequence for ESRRBL1 (NM_018010.2,936-954).
ggacaaactccataatgaa

SEQ ID NO: 365270 - DNA, 19 bp, Homo sapiens
  siRNA target sequence for ESRRBL1 (NM_018010.2,937-955).
gacaaactccataatgaaa

SEQ ID NO: 365271 - DNA, 19 bp, Homo sapiens
  siRNA target sequence for ESRRBL1 (NM_018010.2,980-998).
gcagccgagaaaagtacat

SEQ ID NO: 365272 - DNA, 19 bp, Homo sapiens
  siRNA target sequence for ESRRBL1 (NM_018010.2,983-1001).
gccgagaaaagtacatcaa

SEQ ID NO: 365273 - DNA, 19 bp, Homo sapiens
  siRNA target sequence for ESRRBL1 (NM_018010.2,985-1003).
cgagaaaagtacatcaaca

SEQ ID NO: 365274 - DNA, 19 bp, Homo sapiens
  siRNA target sequence for ESRRBL1 (NM_018010.2,1109-1127).
gactcctctctgaggttat

SEQ ID NO: 365275 - DNA, 19 bp, Homo sapiens
  siRNA target sequence for ESRRBL1 (NM_018010.2,1122-1140).
ggttatggaagaattagaa

SEQ ID NO: 365276 - DNA, 19 bp, Homo sapiens
  siRNA target sequence for ESRRBL1 (NM_018010.2,1300-1318).
gagaagtccaacatgacta

SEQ ID NO: 365277 - DNA, 19 bp, Homo sapiens
  siRNA target sequence for ESRRBL1 (NM_018010.2,1323-1341).
catgcatgccacagttatt

SEQ ID NO: 365278 - DNA, 19 bp, Homo sapiens
  siRNA target sequence for ESRRBL1 (NM_018010.2,1348-1366).
ccagcaacaggcttttatt

SEQ ID NO: 365279 - DNA, 19 bp, Homo sapiens
  siRNA target sequence for FLJ10154 (NM_018011.1,354-372).
gtgcggaagcgttccaaat

SEQ ID NO: 365280 - DNA, 19 bp, Homo sapiens
  siRNA target sequence for FLJ10154 (NM_018011.1,356-374).
gcggaagcgttccaaatct

SEQ ID NO: 365281 - DNA, 19 bp, Homo sapiens
  siRNA target sequence for FLJ10154 (NM_018011.1,481-499).
ccgaccgcatcgacatctt

SEQ ID NO: 365282 - DNA, 19 bp, Homo sapiens
  siRNA target sequence for FLJ10154 (NM_018011.1,575-593).
cgagcggcagcgaaaaatt

SEQ ID NO: 365283 - DNA, 19 bp, Homo sapiens
  siRNA target sequence for FLJ10154 (NM_018011.1,578-596).
gcggcagcgaaaaattcga

SEQ ID NO: 365284 - DNA, 19 bp, Homo sapiens
  siRNA target sequence for FLJ10154 (NM_018011.1,790-808).
ctgagcttgccgcacaaaa

SEQ ID NO: 365285 - DNA, 19 bp, Homo sapiens
  siRNA target sequence for FLJ10154 (NM_018011.1,794-812).
gcttgccgcacaaaaagct

SEQ ID NO: 365286 - DNA, 19 bp, Homo sapiens
  siRNA target sequence for FLJ10154 (NM_018011.1,905-923).
cgaagaacagttgagaatt

SEQ ID NO: 365287 - DNA, 19 bp, Homo sapiens
  siRNA target sequence for FLJ10159 (NM_018013.1,588-606).
gtcagacccgaaccttaat

SEQ ID NO: 365288 - DNA, 19 bp, Homo sapiens
  siRNA target sequence for FLJ10159 (NM_018013.1,590-608).
cagacccgaaccttaataa

SEQ ID NO: 365289 - DNA, 19 bp, Homo sapiens
  siRNA target sequence for FLJ10159 (NM_018013.1,774-792).
gaggtgcctccgaattaga

SEQ ID NO: 365290 - DNA, 19 bp, Homo sapiens
  siRNA target sequence for FLJ10159 (NM_018013.1,776-794).
ggtgcctccgaattagaaa

SEQ ID NO: 365291 - DNA, 19 bp, Homo sapiens
  siRNA target sequence for FLJ10159 (NM_018013.1,777-795).
gtgcctccgaattagaaat

SEQ ID NO: 365292 - DNA, 19 bp, Homo sapiens
  siRNA target sequence for FLJ10159 (NM_018013.1,779-797).
gcctccgaattagaaatca

SEQ ID NO: 365293 - DNA, 19 bp, Homo sapiens
  siRNA target sequence for BCL11A (NM_018014.2,247-265).
ggcaaaccccagcacttaa

SEQ ID NO: 365294 - DNA, 19 bp, Homo sapiens
  siRNA target sequence for BCL11A (NM_018014.2,279-297).
ctcgcccgagcctcttgaa

SEQ ID NO: 365295 - DNA, 19 bp, Homo sapiens
  siRNA target sequence for BCL11A (NM_018014.2,371-389).
gtgggcagtgccagatgaa

SEQ ID NO: 365296 - DNA, 19 bp, Homo sapiens
  siRNA target sequence for BCL11A (NM_018014.2,373-391).
gggcagtgccagatgaact

SEQ ID NO: 365297 - DNA, 19 bp, Homo sapiens
  siRNA target sequence for BCL11A (NM_018014.2,393-411).
cccattgggggacattctt

SEQ ID NO: 365298 - DNA, 19 bp, Homo sapiens
  siRNA target sequence for BCL11A (NM_018014.2,394-412).
ccattgggggacattctta

SEQ ID NO: 365299 - DNA, 19 bp, Homo sapiens
  siRNA target sequence for BCL11A (NM_018014.2,420-438).
cgagcacaaacggaaacaa

SEQ ID NO: 365300 - DNA, 19 bp, Homo sapiens
  siRNA target sequence for BCL11A (NM_018014.2,421-439).
gagcacaaacggaaacaat

SEQ ID NO: 365301 - DNA, 19 bp, Homo sapiens
  siRNA target sequence for BCL11A (NM_018014.2,446-464).
gcagcctctgcttagaaaa

SEQ ID NO: 365302 - DNA, 19 bp, Homo sapiens
  siRNA target sequence for BCL11A (NM_018014.2,447-465).
cagcctctgcttagaaaaa

SEQ ID NO: 365303 - DNA, 19 bp, Homo sapiens
  siRNA target sequence for BCL11A (NM_018014.2,547-565).
ccagaggatgacgattgtt

SEQ ID NO: 365304 - DNA, 19 bp, Homo sapiens
  siRNA target sequence for BCL11A (NM_018014.2,548-566).
cagaggatgacgattgttt

SEQ ID NO: 365305 - DNA, 19 bp, Homo sapiens
  siRNA target sequence for BCL11A (NM_018014.2,550-568).
gaggatgacgattgtttat

SEQ ID NO: 365306 - DNA, 19 bp, Homo sapiens
  siRNA target sequence for BCL11A (NM_018014.2,552-570).
ggatgacgattgtttatca

SEQ ID NO: 365307 - DNA, 19 bp, Homo sapiens
  siRNA target sequence for BCL11A (NM_018014.2,553-571).
gatgacgattgtttatcaa

SEQ ID NO: 365308 - DNA, 19 bp, Homo sapiens
  siRNA target sequence for BCL11A (NM_018014.2,704-722).
cgcagggtatttgtaaaga

SEQ ID NO: 365309 - DNA, 19 bp, Homo sapiens
  siRNA target sequence for BCL11A (NM_018014.2,727-745).
cccagcagctacacatgta

SEQ ID NO: 365310 - DNA, 19 bp, Homo sapiens
  siRNA target sequence for BCL11A (NM_018014.2,729-747).
cagcagctacacatgtaca

SEQ ID NO: 365311 - DNA, 19 bp, Homo sapiens
  siRNA target sequence for BCL11A (NM_018014.2,738-756).
cacatgtacaacttgcaaa

SEQ ID NO: 365312 - DNA, 19 bp, Homo sapiens
  siRNA target sequence for BCL11A (NM_018014.2,794-812).
cacagaacactcatggatt

SEQ ID NO: 365313 - DNA, 19 bp, Homo sapiens
  siRNA target sequence for BCL11A (NM_018014.2,796-814).
cagaacactcatggattaa

SEQ ID NO: 365314 - DNA, 19 bp, Homo sapiens
  siRNA target sequence for BCL11A (NM_018014.2,904-922).
cctctccatgggattcata

SEQ ID NO: 365315 - DNA, 19 bp, Homo sapiens
  siRNA target sequence for BCL11A (NM_018014.2,905-923).
ctctccatgggattcatat

SEQ ID NO: 365316 - DNA, 19 bp, Homo sapiens
  siRNA target sequence for BCL11A (NM_018014.2,909-927).
ccatgggattcatattgca

SEQ ID NO: 365317 - DNA, 19 bp, Homo sapiens
  siRNA target sequence for BCL11A (NM_018014.2,938-956).
cctttaacctgctaagaat

SEQ ID NO: 365318 - DNA, 19 bp, Homo sapiens
  siRNA target sequence for BCL11A (NM_018014.2,1153-1171).
gagcctcccgccatggatt

SEQ ID NO: 365319 - DNA, 19 bp, Homo sapiens
  siRNA target sequence for BCL11A (NM_018014.2,1156-1174).
cctcccgccatggatttct

SEQ ID NO: 365320 - DNA, 19 bp, Homo sapiens
  siRNA target sequence for BCL11A (NM_018014.2,1159-1177).
cccgccatggatttctcta

SEQ ID NO: 365321 - DNA, 19 bp, Homo sapiens
  siRNA target sequence for BCL11A (NM_018014.2,1236-1254).
cagccctatgcaaaggtta

SEQ ID NO: 365322 - DNA, 19 bp, Homo sapiens
  siRNA target sequence for BCL11A (NM_018014.2,1345-1363).
ccggtcaagtccaagtcat

SEQ ID NO: 365323 - DNA, 19 bp, Homo sapiens
  siRNA target sequence for BCL11A (NM_018014.2,1376-1394).
gcaagacgttcaaatttca

SEQ ID NO: 365324 - DNA, 19 bp, Homo sapiens
  siRNA target sequence for BCL11A (NM_018014.2,2386-2404).
gggagcacgccccatatta

SEQ ID NO: 365325 - DNA, 19 bp, Homo sapiens
  siRNA target sequence for BCL11A (NM_018014.2,2388-2406).
gagcacgccccatattagt

SEQ ID NO: 365326 - DNA, 19 bp, Homo sapiens
  siRNA target sequence for BCL11A (NM_018014.2,2528-2546).
gctcgagagcccttaagtt

SEQ ID NO: 365327 - DNA, 19 bp, Homo sapiens
  siRNA target sequence for FLJ10178 (NM_018015.2,136-154).
gcttgtgaggatcttacat

SEQ ID NO: 365328 - DNA, 19 bp, Homo sapiens
  siRNA target sequence for FLJ10178 (NM_018015.2,137-155).
cttgtgaggatcttacata

SEQ ID NO: 365329 - DNA, 19 bp, Homo sapiens
  siRNA target sequence for FLJ10178 (NM_018015.2,140-158).
gtgaggatcttacataaat

SEQ ID NO: 365330 - DNA, 19 bp, Homo sapiens
  siRNA target sequence for FLJ10178 (NM_018015.2,144-162).
ggatcttacataaatcaaa

SEQ ID NO: 365331 - DNA, 19 bp, Homo sapiens
  siRNA target sequence for FLJ10178 (NM_018015.2,145-163).
gatcttacataaatcaaaa

SEQ ID NO: 365332 - DNA, 19 bp, Homo sapiens
  siRNA target sequence for FLJ10178 (NM_018015.2,166-184).
gcgatactatggaaaacct

SEQ ID NO: 365333 - DNA, 19 bp, Homo sapiens
  siRNA target sequence for FLJ10178 (NM_018015.2,239-257).
ggcacagtgtcagtgatta

SEQ ID NO: 365334 - DNA, 19 bp, Homo sapiens
  siRNA target sequence for FLJ10178 (NM_018015.2,240-258).
gcacagtgtcagtgattat

SEQ ID NO: 365335 - DNA, 19 bp, Homo sapiens
  siRNA target sequence for FLJ10178 (NM_018015.2,269-287).
ctgtgtcctgagtggtata

SEQ ID NO: 365336 - DNA, 19 bp, Homo sapiens
  siRNA target sequence for FLJ10178 (NM_018015.2,271-289).
gtgtcctgagtggtataaa

SEQ ID NO: 365337 - DNA, 19 bp, Homo sapiens
  siRNA target sequence for FLJ10178 (NM_018015.2,291-309).
gtttgcgggttggtttagt

SEQ ID NO: 365338 - DNA, 19 bp, Homo sapiens
  siRNA target sequence for FLJ10178 (NM_018015.2,295-313).
gcgggttggtttagttctt

SEQ ID NO: 365339 - DNA, 19 bp, Homo sapiens
  siRNA target sequence for FLJ10178 (NM_018015.2,297-315).
gggttggtttagttcttct

SEQ ID NO: 365340 - DNA, 19 bp, Homo sapiens
  siRNA target sequence for FLJ10178 (NM_018015.2,311-329).
cttctgcttcaagactatt

SEQ ID NO: 365341 - DNA, 19 bp, Homo sapiens
  siRNA target sequence for FLJ10178 (NM_018015.2,325-343).
ctattctgttaaaaagagt

SEQ ID NO: 365342 - DNA, 19 bp, Homo sapiens
  siRNA target sequence for FLJ10178 (NM_018015.2,342-360).
gttatccattcagaataca

SEQ ID NO: 365343 - DNA, 19 bp, Homo sapiens
  siRNA target sequence for FLJ10178 (NM_018015.2,369-387).
ccgtggatccacagatcaa

SEQ ID NO: 365344 - DNA, 19 bp, Homo sapiens
  siRNA target sequence for FLJ10178 (NM_018015.2,370-388).
cgtggatccacagatcaaa

SEQ ID NO: 365345 - DNA, 19 bp, Homo sapiens
  siRNA target sequence for FLJ10178 (NM_018015.2,373-391).
ggatccacagatcaaacta

SEQ ID NO: 365346 - DNA, 19 bp, Homo sapiens
  siRNA target sequence for FLJ10178 (NM_018015.2,374-392).
gatccacagatcaaactaa

SEQ ID NO: 365347 - DNA, 19 bp, Homo sapiens
  siRNA target sequence for FLJ10178 (NM_018015.2,377-395).
ccacagatcaaactaattt

SEQ ID NO: 365348 - DNA, 19 bp, Homo sapiens
  siRNA target sequence for FLJ10178 (NM_018015.2,422-440).
cgagatcccccaacaaata

SEQ ID NO: 365349 - DNA, 19 bp, Homo sapiens
  siRNA target sequence for FLJ10178 (NM_018015.2,429-447).
ccccaacaaatataattat

SEQ ID NO: 365350 - DNA, 19 bp, Homo sapiens
  siRNA target sequence for FLJ10178 (NM_018015.2,491-509).
ctaaatcaccgatttacca

SEQ ID NO: 365351 - DNA, 19 bp, Homo sapiens
  siRNA target sequence for FLJ10178 (NM_018015.2,523-541).
ggatgatatgccagaaaat

SEQ ID NO: 365352 - DNA, 19 bp, Homo sapiens
  siRNA target sequence for FLJ10178 (NM_018015.2,524-542).
gatgatatgccagaaaatt

SEQ ID NO: 365353 - DNA, 19 bp, Homo sapiens
  siRNA target sequence for FLJ10178 (NM_018015.2,582-600).
gggtccagcggtcaaaaaa

SEQ ID NO: 365354 - DNA, 19 bp, Homo sapiens
  siRNA target sequence for FLJ10178 (NM_018015.2,584-602).
gtccagcggtcaaaaaaga

SEQ ID NO: 365355 - DNA, 19 bp, Homo sapiens
  siRNA target sequence for FLJ10178 (NM_018015.2,627-645).
catatcgctggattcacat

SEQ ID NO: 365356 - DNA, 19 bp, Homo sapiens
  siRNA target sequence for FLJ10178 (NM_018015.2,643-661).
cattgctgacggtacttca

SEQ ID NO: 365357 - DNA, 19 bp, Homo sapiens
  siRNA target sequence for FLJ10178 (NM_018015.2,654-672).
gtacttcagaacaaccatt

SEQ ID NO: 365358 - DNA, 19 bp, Homo sapiens
  siRNA target sequence for FLJ10178 (NM_018015.2,660-678).
cagaacaaccatttatagt

SEQ ID NO: 365359 - DNA, 19 bp, Homo sapiens
  siRNA target sequence for FLJ10178 (NM_018015.2,690-708).
caacatcgcagccagaaat

SEQ ID NO: 365360 - DNA, 19 bp, Homo sapiens
  siRNA target sequence for FLJ10178 (NM_018015.2,696-714).
cgcagccagaaatctttga

SEQ ID NO: 365361 - DNA, 19 bp, Homo sapiens
  siRNA target sequence for FLJ10178 (NM_018015.2,725-743).
ccaatggcatattttgtgt

SEQ ID NO: 365362 - DNA, 19 bp, Homo sapiens
  siRNA target sequence for FLJ10178 (NM_018015.2,742-760).
gtgtacacagttgaaagtt

SEQ ID NO: 365363 - DNA, 19 bp, Homo sapiens
  siRNA target sequence for FLJ10178 (NM_018015.2,744-762).
gtacacagttgaaagttgt

SEQ ID NO: 365364 - DNA, 19 bp, Homo sapiens
  siRNA target sequence for FLJ10178 (NM_018015.2,812-830).
gagagtggagtgtttatta

SEQ ID NO: 365365 - DNA, 19 bp, Homo sapiens
  siRNA target sequence for FLJ10178 (NM_018015.2,840-858).
gaggccagccgtatacgta

SEQ ID NO: 365366 - DNA, 19 bp, Homo sapiens
  siRNA target sequence for FLJ10178 (NM_018015.2,844-862).
ccagccgtatacgtatgat

SEQ ID NO: 365367 - DNA, 19 bp, Homo sapiens
  siRNA target sequence for FLJ10178 (NM_018015.2,889-907).
ctctcaagcagctagagta

SEQ ID NO: 365368 - DNA, 19 bp, Homo sapiens
  siRNA target sequence for FLJ10178 (NM_018015.2,927-945).
gtaaacggcatcaagatga

SEQ ID NO: 365369 - DNA, 19 bp, Homo sapiens
  siRNA target sequence for FLJ10178 (NM_018015.2,1067-1085).
gtacaaacaaagggaatta

SEQ ID NO: 365370 - DNA, 19 bp, Homo sapiens
  siRNA target sequence for FLJ10178 (NM_018015.2,1105-1123).
cttcaaccgtcgagcaaat

SEQ ID NO: 365371 - DNA, 19 bp, Homo sapiens
  siRNA target sequence for FLJ10178 (NM_018015.2,1108-1126).
caaccgtcgagcaaatata

SEQ ID NO: 365372 - DNA, 19 bp, Homo sapiens
  siRNA target sequence for FLJ10178 (NM_018015.2,1111-1129).
ccgtcgagcaaatataaat

SEQ ID NO: 365373 - DNA, 19 bp, Homo sapiens
  siRNA target sequence for FLJ10178 (NM_018015.2,1115-1133).
cgagcaaatataaatgcta

SEQ ID NO: 365374 - DNA, 19 bp, Homo sapiens
  siRNA target sequence for FLJ10178 (NM_018015.2,1231-1249).
ccgtgtttatcctgaaagt

SEQ ID NO: 365375 - DNA, 19 bp, Homo sapiens
  siRNA target sequence for FLJ10178 (NM_018015.2,1233-1251).
gtgtttatcctgaaagtat

SEQ ID NO: 365376 - DNA, 19 bp, Homo sapiens
  siRNA target sequence for FLJ10178 (NM_018015.2,1286-1304).
cttagtgaccagtataatt

SEQ ID NO: 365377 - DNA, 19 bp, Homo sapiens
  siRNA target sequence for FLJ10178 (NM_018015.2,1343-1361).
ccaaaacttgatgatttta

SEQ ID NO: 365378 - DNA, 19 bp, Homo sapiens
  siRNA target sequence for FLJ10178 (NM_018015.2,1376-1394).
cttggacattttgaagtaa

SEQ ID NO: 365379 - DNA, 19 bp, Homo sapiens
  siRNA target sequence for FLJ10178 (NM_018015.2,1411-1429).
ccatgagatagcaatcgat

SEQ ID NO: 365380 - DNA, 19 bp, Homo sapiens
  siRNA target sequence for FLJ10178 (NM_018015.2,1466-1484).
cgaacatctcaaatagaca

SEQ ID NO: 365381 - DNA, 19 bp, Homo sapiens
  siRNA target sequence for FLJ10178 (NM_018015.2,1487-1505).
ctgttgacctccatgaatt

SEQ ID NO: 365382 - DNA, 19 bp, Homo sapiens
  siRNA target sequence for FLJ10178 (NM_018015.2,1501-1519).
gaattacagctgtgcatat

SEQ ID NO: 365383 - DNA, 19 bp, Homo sapiens
  siRNA target sequence for FLJ10178 (NM_018015.2,1562-1580).
gcggttgcaggtgatatta

SEQ ID NO: 365384 - DNA, 19 bp, Homo sapiens
  siRNA target sequence for FLJ10178 (NM_018015.2,1563-1581).
cggttgcaggtgatattat

SEQ ID NO: 365385 - DNA, 19 bp, Homo sapiens
  siRNA target sequence for FLJ10178 (NM_018015.2,1564-1582).
ggttgcaggtgatattata

SEQ ID NO: 365386 - DNA, 19 bp, Homo sapiens
  siRNA target sequence for FLJ10178 (NM_018015.2,1565-1583).
gttgcaggtgatattataa

SEQ ID NO: 365387 - DNA, 19 bp, Homo sapiens
  siRNA target sequence for FLJ10178 (NM_018015.2,1590-1608).
caactgaactggatagagt

SEQ ID NO: 365388 - DNA, 19 bp, Homo sapiens
  siRNA target sequence for FLJ10178 (NM_018015.2,1618-1636).
cggtatcttggatatctgt

SEQ ID NO: 365389 - DNA, 19 bp, Homo sapiens
  siRNA target sequence for FLJ10178 (NM_018015.2,1675-1693).
gatttatagtccagagaat

SEQ ID NO: 365390 - DNA, 19 bp, Homo sapiens
  siRNA target sequence for FLJ10188 (NM_018017.2,665-683).
gaccacatagcctctactt

SEQ ID NO: 365391 - DNA, 19 bp, Homo sapiens
  siRNA target sequence for FLJ10188 (NM_018017.2,701-719).
gggaaaacacctgaattaa

SEQ ID NO: 365392 - DNA, 19 bp, Homo sapiens
  siRNA target sequence for FLJ10188 (NM_018017.2,773-791).
gagtccaaactattgtcat

SEQ ID NO: 365393 - DNA, 19 bp, Homo sapiens
  siRNA target sequence for FLJ10188 (NM_018017.2,777-795).
ccaaactattgtcattaaa

SEQ ID NO: 365394 - DNA, 19 bp, Homo sapiens
  siRNA target sequence for FLJ10188 (NM_018017.2,787-805).
gtcattaaacactgataaa

SEQ ID NO: 365395 - DNA, 19 bp, Homo sapiens
  siRNA target sequence for FLJ10188 (NM_018017.2,826-844).
gcataataatcgaattgaa

SEQ ID NO: 365396 - DNA, 19 bp, Homo sapiens
  siRNA target sequence for FLJ10188 (NM_018017.2,941-959).
cctagtggaaattttgcta

SEQ ID NO: 365397 - DNA, 19 bp, Homo sapiens
  siRNA target sequence for FLJ10188 (NM_018017.2,1010-1028).
gtggaattaaggtcatcta

SEQ ID NO: 365398 - DNA, 19 bp, Homo sapiens
  siRNA target sequence for FLJ10188 (NM_018017.2,1080-1098).
cagactgcaccaagaaatt

SEQ ID NO: 365399 - DNA, 19 bp, Homo sapiens
  siRNA target sequence for FLJ10188 (NM_018017.2,1082-1100).
gactgcaccaagaaattta

SEQ ID NO: 365400 - DNA, 19 bp, Homo sapiens
  siRNA target sequence for FLJ10188 (NM_018017.2,1184-1202).
catcgagtaccaaatggaa

SEQ ID NO: 365401 - DNA, 19 bp, Homo sapiens
  siRNA target sequence for FLJ10188 (NM_018017.2,1315-1333).
gctcttcgtagacatttgt

SEQ ID NO: 365402 - DNA, 19 bp, Homo sapiens
  siRNA target sequence for FLJ10188 (NM_018017.2,1321-1339).
cgtagacatttgttcagaa

SEQ ID NO: 365403 - DNA, 19 bp, Homo sapiens
  siRNA target sequence for FLJ10188 (NM_018017.2,1387-1405).
gcagcatatgaacacaatt

SEQ ID NO: 365404 - DNA, 19 bp, Homo sapiens
  siRNA target sequence for FLJ10188 (NM_018017.2,1388-1406).
cagcatatgaacacaatta

SEQ ID NO: 365405 - DNA, 19 bp, Homo sapiens
  siRNA target sequence for FLJ10188 (NM_018017.2,1390-1408).
gcatatgaacacaattaaa

SEQ ID NO: 365406 - DNA, 19 bp, Homo sapiens
  siRNA target sequence for FLJ10188 (NM_018017.2,1475-1493).
caagacgttacagctaaaa

SEQ ID NO: 365407 - DNA, 19 bp, Homo sapiens
  siRNA target sequence for FLJ10188 (NM_018017.2,1496-1514).
gcagttcagcagttacaca

SEQ ID NO: 365408 - DNA, 19 bp, Homo sapiens
  siRNA target sequence for FLJ10188 (NM_018017.2,1561-1579).
ggcacgccaagaaaaagaa

SEQ ID NO: 365409 - DNA, 19 bp, Homo sapiens
  siRNA target sequence for FLJ10188 (NM_018017.2,1728-1746).
ggttgcaccagctgtatga

SEQ ID NO: 365410 - DNA, 19 bp, Homo sapiens
  siRNA target sequence for FLJ10188 (NM_018017.2,1810-1828).
ctctcacgtcatcaaagta

SEQ ID NO: 365411 - DNA, 19 bp, Homo sapiens
  siRNA target sequence for FLJ10188 (NM_018017.2,1814-1832).
cacgtcatcaaagtaaagt

SEQ ID NO: 365412 - DNA, 19 bp, Homo sapiens
  siRNA target sequence for FLJ10188 (NM_018017.2,1831-1849).
gtgggcacaaaacaaatta

SEQ ID NO: 365413 - DNA, 19 bp, Homo sapiens
  siRNA target sequence for FLJ10188 (NM_018017.2,1931-1949).
gcagatcagatacgaaaaa

SEQ ID NO: 365414 - DNA, 19 bp, Homo sapiens
  siRNA target sequence for FLJ10188 (NM_018017.2,1932-1950).
cagatcagatacgaaaaaa

SEQ ID NO: 365415 - DNA, 19 bp, Homo sapiens
  siRNA target sequence for FLJ10188 (NM_018017.2,1934-1952).
gatcagatacgaaaaaact

SEQ ID NO: 365416 - DNA, 19 bp, Homo sapiens
  siRNA target sequence for FLJ10188 (NM_018017.2,1944-1962).
gaaaaaactgtcaggatat

SEQ ID NO: 365417 - DNA, 19 bp, Homo sapiens
  siRNA target sequence for FLJ10188 (NM_018017.2,2013-2031).
caaagcttagagtcacaaa

SEQ ID NO: 365418 - DNA, 19 bp, Homo sapiens
  siRNA target sequence for FLJ10188 (NM_018017.2,2077-2095).
gatgcatcatgccaaaata

SEQ ID NO: 365419 - DNA, 19 bp, Homo sapiens
  siRNA target sequence for FLJ10188 (NM_018017.2,2164-2182).
ggtgaaatgtctagaagat

SEQ ID NO: 365420 - DNA, 19 bp, Homo sapiens
  siRNA target sequence for FLJ10188 (NM_018017.2,2172-2190).
gtctagaagatgaacgatt

SEQ ID NO: 365421 - DNA, 19 bp, Homo sapiens
  siRNA target sequence for FLJ10188 (NM_018017.2,2174-2192).
ctagaagatgaacgattaa

SEQ ID NO: 365422 - DNA, 19 bp, Homo sapiens
  siRNA target sequence for FLJ10188 (NM_018017.2,2177-2195).
gaagatgaacgattaagaa

SEQ ID NO: 365423 - DNA, 19 bp, Homo sapiens
  siRNA target sequence for FLJ10188 (NM_018017.2,2307-2325).
gaggtaagcaagaaattga

SEQ ID NO: 365424 - DNA, 19 bp, Homo sapiens
  siRNA target sequence for FLJ10188 (NM_018017.2,2309-2327).
ggtaagcaagaaattgaaa

SEQ ID NO: 365425 - DNA, 19 bp, Homo sapiens
  siRNA target sequence for FLJ10188 (NM_018017.2,2383-2401).
catcgaaggcagtaggaaa

SEQ ID NO: 365426 - DNA, 19 bp, Homo sapiens
  siRNA target sequence for FLJ10188 (NM_018017.2,2427-2445).
cagaaaggctcactagtaa

SEQ ID NO: 365427 - DNA, 19 bp, Homo sapiens
  siRNA target sequence for FLJ10188 (NM_018017.2,2429-2447).
gaaaggctcactagtaaga

SEQ ID NO: 365428 - DNA, 19 bp, Homo sapiens
  siRNA target sequence for FLJ10188 (NM_018017.2,2455-2473).
gcttcagtctgaatccaat

SEQ ID NO: 365429 - DNA, 19 bp, Homo sapiens
  siRNA target sequence for FLJ10188 (NM_018017.2,2459-2477).
cagtctgaatccaattctt

SEQ ID NO: 365430 - DNA, 19 bp, Homo sapiens
  siRNA target sequence for FLJ10188 (NM_018017.2,2482-2500).
gtcacaatttgataaagtt

SEQ ID NO: 365431 - DNA, 19 bp, Homo sapiens
  siRNA target sequence for FLJ10188 (NM_018017.2,2503-2521).
ctgtagtgaaagtcagtta

SEQ ID NO: 365432 - DNA, 19 bp, Homo sapiens
  siRNA target sequence for FLJ10188 (NM_018017.2,2624-2642).
gaactcgcttgtagacaaa

SEQ ID NO: 365433 - DNA, 19 bp, Homo sapiens
  siRNA target sequence for FLJ10188 (NM_018017.2,2634-2652).
gtagacaaacagaagttaa

SEQ ID NO: 365434 - DNA, 19 bp, Homo sapiens
  siRNA target sequence for FLJ10188 (NM_018017.2,2661-2679).
gtacccaggtagaagaatt

SEQ ID NO: 365435 - DNA, 19 bp, Homo sapiens
  siRNA target sequence for FLJ10188 (NM_018017.2,2705-2723).
cgtaaacatgcctctagta

SEQ ID NO: 365436 - DNA, 19 bp, Homo sapiens
  siRNA target sequence for FLJ10188 (NM_018017.2,2706-2724).
gtaaacatgcctctagtat

SEQ ID NO: 365437 - DNA, 19 bp, Homo sapiens
  siRNA target sequence for FLJ10188 (NM_018017.2,2809-2827).
catgggaagtcgttctagt

SEQ ID NO: 365438 - DNA, 19 bp, Homo sapiens
  siRNA target sequence for FLJ10188 (NM_018017.2,2812-2830).
gggaagtcgttctagttca

SEQ ID NO: 365439 - DNA, 19 bp, Homo sapiens
  siRNA target sequence for FLJ10188 (NM_018017.2,2813-2831).
ggaagtcgttctagttcat

SEQ ID NO: 365440 - DNA, 19 bp, Homo sapiens
  siRNA target sequence for FLJ10188 (NM_018017.2,2864-2882).
gatcgatctccagaaaata

SEQ ID NO: 365441 - DNA, 19 bp, Homo sapiens
  siRNA target sequence for FLJ10188 (NM_018017.2,2918-2936).
gtagataaggccatgttga

SEQ ID NO: 365442 - DNA, 19 bp, Homo sapiens
  siRNA target sequence for FLJ10188 (NM_018017.2,2932-2950).
gttgattgagagaatagtt

SEQ ID NO: 365443 - DNA, 19 bp, Homo sapiens
  siRNA target sequence for FLJ10188 (NM_018017.2,2943-2961).
gaatagttaggctgcaaaa

SEQ ID NO: 365444 - DNA, 19 bp, Homo sapiens
  siRNA target sequence for FLJ10188 (NM_018017.2,2964-2982).
cacatgcccggaaaaatga

SEQ ID NO: 365445 - DNA, 19 bp, Homo sapiens
  siRNA target sequence for FLJ10188 (NM_018017.2,2998-3016).
ggaggaccacatcaaacaa

SEQ ID NO: 365446 - DNA, 19 bp, Homo sapiens
  siRNA target sequence for FLJ10188 (NM_018017.2,3014-3032).
caactggtggaagaaatta

SEQ ID NO: 365447 - DNA, 19 bp, Homo sapiens
  siRNA target sequence for FLJ10188 (NM_018017.2,3074-3092).
gaatcaggcacactttctt

SEQ ID NO: 365448 - DNA, 19 bp, Homo sapiens
  siRNA target sequence for FLJ10188 (NM_018017.2,3090-3108).
cttcagaggcatctgattt

SEQ ID NO: 365449 - DNA, 19 bp, Homo sapiens
  siRNA target sequence for FLJ10188 (NM_018017.2,3112-3130).
caaagttcatttaagtaga

SEQ ID NO: 365450 - DNA, 19 bp, Homo sapiens
  siRNA target sequence for FLJ10188 (NM_018017.2,3164-3182).
catccagctgacaatggat

SEQ ID NO: 365451 - DNA, 19 bp, Homo sapiens
  siRNA target sequence for FLJ10188 (NM_018017.2,3232-3250).
ggaggatacgttactaaaa

SEQ ID NO: 365452 - DNA, 19 bp, Homo sapiens
  siRNA target sequence for FLJ10193 (NM_018019.2,84-102).
cgacaggcggaggatgtat

SEQ ID NO: 365453 - DNA, 19 bp, Homo sapiens
  siRNA target sequence for FLJ10193 (NM_018019.2,425-443).
gcaagtcaggaccaagaat

SEQ ID NO: 365454 - DNA, 19 bp, Homo sapiens
  siRNA target sequence for FLJ10199 (NM_018022.1,662-680).
ctgagtatcagggataaga

SEQ ID NO: 365455 - DNA, 19 bp, Homo sapiens
  siRNA target sequence for FLJ10199 (NM_018022.1,787-805).
ggctgcctcaaggtactat

SEQ ID NO: 365456 - DNA, 19 bp, Homo sapiens
  siRNA target sequence for FLJ10199 (NM_018022.1,789-807).
ctgcctcaaggtactatgt

SEQ ID NO: 365457 - DNA, 19 bp, Homo sapiens
  siRNA target sequence for FLJ10199 (NM_018022.1,821-839).
gaagtgatgaacacaaact

SEQ ID NO: 365458 - DNA, 19 bp, Homo sapiens
  siRNA target sequence for FLJ10199 (NM_018022.1,824-842).
gtgatgaacacaaactact

SEQ ID NO: 365459 - DNA, 19 bp, Homo sapiens
  siRNA target sequence for FLJ10199 (NM_018022.1,1005-1023).
gactgaaaccgctgaaagt

SEQ ID NO: 365460 - DNA, 19 bp, Homo sapiens
  siRNA target sequence for FLJ10199 (NM_018022.1,1015-1033).
gctgaaagttcgaaggatt

SEQ ID NO: 365461 - DNA, 19 bp, Homo sapiens
  siRNA target sequence for FLJ10199 (NM_018022.1,1016-1034).
ctgaaagttcgaaggatta

SEQ ID NO: 365462 - DNA, 19 bp, Homo sapiens
  siRNA target sequence for FLJ10199 (NM_018022.1,1066-1084).
gatcaacctcccagacaaa

SEQ ID NO: 365463 - DNA, 19 bp, Homo sapiens
  siRNA target sequence for FLJ10199 (NM_018022.1,1099-1117).
ctcgatagagcctttgact

SEQ ID NO: 365464 - DNA, 19 bp, Homo sapiens
  siRNA target sequence for FLJ10199 (NM_018022.1,1119-1137).
ctccaccgcagtatgatga

SEQ ID NO: 365465 - DNA, 19 bp, Homo sapiens
  siRNA target sequence for FLJ10199 (NM_018022.1,1122-1140).
caccgcagtatgatgaagt

SEQ ID NO: 365466 - DNA, 19 bp, Homo sapiens
  siRNA target sequence for FLJ10204 (NM_018024.1,254-272).
ccagtatcctttagaagaa

SEQ ID NO: 365467 - DNA, 19 bp, Homo sapiens
  siRNA target sequence for FLJ10204 (NM_018024.1,308-326).
gatacctatctggaaacaa

SEQ ID NO: 365468 - DNA, 19 bp, Homo sapiens
  siRNA target sequence for FLJ10204 (NM_018024.1,356-374).
ctgggattaccatgttgtt

SEQ ID NO: 365469 - DNA, 19 bp, Homo sapiens
  siRNA target sequence for FLJ10204 (NM_018024.1,394-412).
gaggacagaacttcattta

SEQ ID NO: 365470 - DNA, 19 bp, Homo sapiens
  siRNA target sequence for FLJ10204 (NM_018024.1,442-460).
gcctctttgacacttatgt

SEQ ID NO: 365471 - DNA, 19 bp, Homo sapiens
  siRNA target sequence for FLJ10204 (NM_018024.1,443-461).
cctctttgacacttatgta

SEQ ID NO: 365472 - DNA, 19 bp, Homo sapiens
  siRNA target sequence for FLJ10204 (NM_018024.1,519-537).
gtgatccgtgcagattcat

SEQ ID NO: 365473 - DNA, 19 bp, Homo sapiens
  siRNA target sequence for FLJ10204 (NM_018024.1,521-539).
gatccgtgcagattcatat

SEQ ID NO: 365474 - DNA, 19 bp, Homo sapiens
  siRNA target sequence for FLJ10204 (NM_018024.1,556-574).
ctgaccgatctcacatgaa

SEQ ID NO: 365475 - DNA, 19 bp, Homo sapiens
  siRNA target sequence for FLJ10204 (NM_018024.1,653-671).
cgatttcatcagtatggat

SEQ ID NO: 365476 - DNA, 19 bp, Homo sapiens
  siRNA target sequence for FLJ10204 (NM_018024.1,695-713).
ctacacactatccgaattt

SEQ ID NO: 365477 - DNA, 19 bp, Homo sapiens
  siRNA target sequence for FLJ10204 (NM_018024.1,698-716).
cacactatccgaatttaca

SEQ ID NO: 365478 - DNA, 19 bp, Homo sapiens
  siRNA target sequence for FLJ10204 (NM_018024.1,700-718).
cactatccgaatttacaca

SEQ ID NO: 365479 - DNA, 19 bp, Homo sapiens
  siRNA target sequence for FLJ10204 (NM_018024.1,720-738).
cggtttggcagtaaaaact

SEQ ID NO: 365480 - DNA, 19 bp, Homo sapiens
  siRNA target sequence for FLJ10213 (NM_018029.3,454-472).
gttaattctcacagtcttt

SEQ ID NO: 365481 - DNA, 19 bp, Homo sapiens
  siRNA target sequence for FLJ10213 (NM_018029.3,483-501).
ctgtgacagatcttacaaa

SEQ ID NO: 365482 - DNA, 19 bp, Homo sapiens
  siRNA target sequence for FLJ10213 (NM_018029.3,503-521).
gatcttttagacctatgat

SEQ ID NO: 365483 - DNA, 19 bp, Homo sapiens
  siRNA target sequence for FLJ10213 (NM_018029.3,514-532).
cctatgattcttaacaaaa

SEQ ID NO: 365484 - DNA, 19 bp, Homo sapiens
  siRNA target sequence for FLJ10213 (NM_018029.3,552-570).
ccaattttccacaatgtct

SEQ ID NO: 365485 - DNA, 19 bp, Homo sapiens
  siRNA target sequence for FLJ10213 (NM_018029.3,561-579).
cacaatgtctcatctaaga

SEQ ID NO: 365486 - DNA, 19 bp, Homo sapiens
  siRNA target sequence for FLJ10213 (NM_018029.3,635-653).
ctgaccttcaaggaagatt

SEQ ID NO: 365487 - DNA, 19 bp, Homo sapiens
  siRNA target sequence for FLJ10213 (NM_018029.3,706-724).
cccagcattggggatatta

SEQ ID NO: 365488 - DNA, 19 bp, Homo sapiens
  siRNA target sequence for FLJ10213 (NM_018029.3,715-733).
ggggatattaaggacatta

SEQ ID NO: 365489 - DNA, 19 bp, Homo sapiens
  siRNA target sequence for FLJ10213 (NM_018029.3,764-782).
cacataaatctcatttcca

SEQ ID NO: 365490 - DNA, 19 bp, Homo sapiens
  siRNA target sequence for FLJ10213 (NM_018029.3,783-801).
ccctgtgaccccaagttta

SEQ ID NO: 365491 - DNA, 19 bp, Homo sapiens
  siRNA target sequence for FLJ10213 (NM_018029.3,897-915).
ggaaaggggtactccttat

SEQ ID NO: 365492 - DNA, 19 bp, Homo sapiens
  siRNA target sequence for FLJ10213 (NM_018029.3,910-928).
ccttatgctagcagattca

SEQ ID NO: 365493 - DNA, 19 bp, Homo sapiens
  siRNA target sequence for FLJ10213 (NM_018029.3,911-929).
cttatgctagcagattcaa

SEQ ID NO: 365494 - DNA, 19 bp, Homo sapiens
  siRNA target sequence for FLJ10213 (NM_018029.3,978-996).
ctgctgtgaccttttgata

SEQ ID NO: 365495 - DNA, 19 bp, Homo sapiens
  siRNA target sequence for FLJ10213 (NM_018029.3,999-1017).
cattgcggctggatcaagt

SEQ ID NO: 365496 - DNA, 19 bp, Homo sapiens
  siRNA target sequence for FLJ10213 (NM_018029.3,1062-1080).
ggcaatgatggcatctatt

SEQ ID NO: 365497 - DNA, 19 bp, Homo sapiens
  siRNA target sequence for FLJ10213 (NM_018029.3,1129-1147).
gcagaatcagccataggtt

SEQ ID NO: 365498 - DNA, 19 bp, Homo sapiens
  siRNA target sequence for FLJ10213 (NM_018029.3,1219-1237).
cacaagctacgcaagtcaa

SEQ ID NO: 365499 - DNA, 19 bp, Homo sapiens
  siRNA target sequence for LUC7L (NM_018032.2,236-254).
gctgggacgcgcatggatt

SEQ ID NO: 365500 - DNA, 19 bp, Homo sapiens
  siRNA target sequence for LUC7L (NM_018032.2,237-255).
ctgggacgcgcatggattt

SEQ ID NO: 365501 - DNA, 19 bp, Homo sapiens
  siRNA target sequence for LUC7L (NM_018032.2,247-265).
catggatttaggagaatgt

SEQ ID NO: 365502 - DNA, 19 bp, Homo sapiens
  siRNA target sequence for LUC7L (NM_018032.2,289-307).
ccgagcagattatgagatt

SEQ ID NO: 365503 - DNA, 19 bp, Homo sapiens
  siRNA target sequence for LUC7L (NM_018032.2,302-320).
gagattgcaagtaaagaaa

SEQ ID NO: 365504 - DNA, 19 bp, Homo sapiens
  siRNA target sequence for LUC7L (NM_018032.2,325-343).
cctgttttttgaattagat

SEQ ID NO: 365505 - DNA, 19 bp, Homo sapiens
  siRNA target sequence for LUC7L (NM_018032.2,428-446).
gaaatcagtgcggaagttt

SEQ ID NO: 365506 - DNA, 19 bp, Homo sapiens
  siRNA target sequence for LUC7L (NM_018032.2,456-474).
cagaaaaagtacatgagtt

SEQ ID NO: 365507 - DNA, 19 bp, Homo sapiens
  siRNA target sequence for LUC7L (NM_018032.2,458-476).
gaaaaagtacatgagttaa

SEQ ID NO: 365508 - DNA, 19 bp, Homo sapiens
  siRNA target sequence for LUC7L (NM_018032.2,514-532).
gctaggggctgaaggtaat

SEQ ID NO: 365509 - DNA, 19 bp, Homo sapiens
  siRNA target sequence for LUC7L (NM_018032.2,593-611).
gctgaggaagaatacagaa

SEQ ID NO: 365510 - DNA, 19 bp, Homo sapiens
  siRNA target sequence for LUC7L (NM_018032.2,712-730).
ccacttcggtggcaagtta

SEQ ID NO: 365511 - DNA, 19 bp, Homo sapiens
  siRNA target sequence for LUC7L (NM_018032.2,727-745).
gttacacttggggttcatt

SEQ ID NO: 365512 - DNA, 19 bp, Homo sapiens
  siRNA target sequence for LUC7L (NM_018032.2,731-749).
cacttggggttcattcaga

SEQ ID NO: 365513 - DNA, 19 bp, Homo sapiens
  siRNA target sequence for LUC7L (NM_018032.2,753-771).
gagagaagcttgatcagtt

SEQ ID NO: 365514 - DNA, 19 bp, Homo sapiens
  siRNA target sequence for LUC7L (NM_018032.2,859-877).
caggaggtcgggatcaaga

SEQ ID NO: 365515 - DNA, 19 bp, Homo sapiens
  siRNA target sequence for LUC7L (NM_018032.2,914-932).
cgtcggaggcggtcaagat

SEQ ID NO: 365516 - DNA, 19 bp, Homo sapiens
  siRNA target sequence for LUC7L (NM_018032.2,939-957).
cccgagagcgacggaaatt

SEQ ID NO: 365517 - DNA, 19 bp, Homo sapiens
  siRNA target sequence for LUC7L (NM_018032.2,941-959).
cgagagcgacggaaattgt

SEQ ID NO: 365518 - DNA, 19 bp, Homo sapiens
  siRNA target sequence for LUC7L (NM_018032.2,964-982).
gtcccggtcccgagataga

SEQ ID NO: 365519 - DNA, 19 bp, Homo sapiens
  siRNA target sequence for LUC7L (NM_018032.2,966-984).
cccggtcccgagatagaca

SEQ ID NO: 365520 - DNA, 19 bp, Homo sapiens
  siRNA target sequence for LUC7L (NM_018032.2,967-985).
ccggtcccgagatagacat

SEQ ID NO: 365521 - DNA, 19 bp, Homo sapiens
  siRNA target sequence for LUC7L (NM_018032.2,1041-1059).
gggaccgaagtgcgaaata

SEQ ID NO: 365522 - DNA, 19 bp, Homo sapiens
  siRNA target sequence for LUC7L (NM_018032.2,1043-1061).
gaccgaagtgcgaaataca

SEQ ID NO: 365523 - DNA, 19 bp, Homo sapiens
  siRNA target sequence for LUC7L (NM_018032.2,1046-1064).
cgaagtgcgaaatacaagt

SEQ ID NO: 365524 - DNA, 19 bp, Homo sapiens
  siRNA target sequence for FLJ10232 (NM_018033.1,355-373).
gcttctttgggtcacttat

SEQ ID NO: 365525 - DNA, 19 bp, Homo sapiens
  siRNA target sequence for FLJ10233 (NM_018034.2,332-350).
gattgctccaaatcatctt

SEQ ID NO: 365526 - DNA, 19 bp, Homo sapiens
  siRNA target sequence for FLJ10233 (NM_018034.2,382-400).
gagttctgactcttctgat

SEQ ID NO: 365527 - DNA, 19 bp, Homo sapiens
  siRNA target sequence for FLJ10233 (NM_018034.2,406-424).
gttaattggccctccttta

SEQ ID NO: 365528 - DNA, 19 bp, Homo sapiens
  siRNA target sequence for FLJ10233 (NM_018034.2,420-438).
ctttaccccctaaaatggt

SEQ ID NO: 365529 - DNA, 19 bp, Homo sapiens
  siRNA target sequence for FLJ10233 (NM_018034.2,426-444).
cccctaaaatggtaggaaa

SEQ ID NO: 365530 - DNA, 19 bp, Homo sapiens
  siRNA target sequence for FLJ10233 (NM_018034.2,592-610).
gaagcatggcactaaaaca

SEQ ID NO: 365531 - DNA, 19 bp, Homo sapiens
  siRNA target sequence for FLJ10233 (NM_018034.2,735-753).
cctgtgagtgccatcagat

SEQ ID NO: 365532 - DNA, 19 bp, Homo sapiens
  siRNA target sequence for FLJ10233 (NM_018034.2,745-763).
ccatcagatcaagtcatta

SEQ ID NO: 365533 - DNA, 19 bp, Homo sapiens
  siRNA target sequence for FLJ10233 (NM_018034.2,751-769).
gatcaagtcattacagtat

SEQ ID NO: 365534 - DNA, 19 bp, Homo sapiens
  siRNA target sequence for FLJ10233 (NM_018034.2,754-772).
caagtcattacagtatagt

SEQ ID NO: 365535 - DNA, 19 bp, Homo sapiens
  siRNA target sequence for FLJ10233 (NM_018034.2,777-795).
caggagacatgattcttgt

SEQ ID NO: 365536 - DNA, 19 bp, Homo sapiens
  siRNA target sequence for FLJ10233 (NM_018034.2,784-802).
catgattcttgttgtatct

SEQ ID NO: 365537 - DNA, 19 bp, Homo sapiens
  siRNA target sequence for FLJ10233 (NM_018034.2,823-841).
gattgacagagatggtttt

SEQ ID NO: 365538 - DNA, 19 bp, Homo sapiens
  siRNA target sequence for FLJ10233 (NM_018034.2,902-920).
catacagcaatgcttcata

SEQ ID NO: 365539 - DNA, 19 bp, Homo sapiens
  siRNA target sequence for FLJ10233 (NM_018034.2,985-1003).
gacgtgggaagttgaaaat

SEQ ID NO: 365540 - DNA, 19 bp, Homo sapiens
  siRNA target sequence for FLJ10233 (NM_018034.2,1038-1056).
cgatgcaaggcaaaaaagt

SEQ ID NO: 365541 - DNA, 19 bp, Homo sapiens
  siRNA target sequence for FLJ10233 (NM_018034.2,1061-1079).
cccactacgtgcacatata

SEQ ID NO: 365542 - DNA, 19 bp, Homo sapiens
  siRNA target sequence for FLJ10233 (NM_018034.2,1063-1081).
cactacgtgcacatatagt

SEQ ID NO: 365543 - DNA, 19 bp, Homo sapiens
  siRNA target sequence for FLJ10233 (NM_018034.2,1069-1087).
gtgcacatatagtagagat

SEQ ID NO: 365544 - DNA, 19 bp, Homo sapiens
  siRNA target sequence for FLJ10233 (NM_018034.2,1127-1145).
cagatctgggaccgaaatt

SEQ ID NO: 365545 - DNA, 19 bp, Homo sapiens
  siRNA target sequence for FLJ10233 (NM_018034.2,1138-1156).
ccgaaatttgactgttcat

SEQ ID NO: 365546 - DNA, 19 bp, Homo sapiens
  siRNA target sequence for FLJ10233 (NM_018034.2,1154-1172).
catcctaagttccactata

SEQ ID NO: 365547 - DNA, 19 bp, Homo sapiens
  siRNA target sequence for FLJ10233 (NM_018034.2,1158-1176).
ctaagttccactataaaca

SEQ ID NO: 365548 - DNA, 19 bp, Homo sapiens
  siRNA target sequence for FLJ10233 (NM_018034.2,1198-1216).
cacttcttgcgtgactttt

SEQ ID NO: 365549 - DNA, 19 bp, Homo sapiens
  siRNA target sequence for FLJ10233 (NM_018034.2,1203-1221).
cttgcgtgactttttccta

SEQ ID NO: 365550 - DNA, 19 bp, Homo sapiens
  siRNA target sequence for FLJ10233 (NM_018034.2,1207-1225).
cgtgactttttcctatgat

SEQ ID NO: 365551 - DNA, 19 bp, Homo sapiens
  siRNA target sequence for FLJ10233 (NM_018034.2,1244-1262).
cgtggaggtgacgattcat

SEQ ID NO: 365552 - DNA, 19 bp, Homo sapiens
  siRNA target sequence for FLJ10233 (NM_018034.2,1245-1263).
gtggaggtgacgattcatt

SEQ ID NO: 365553 - DNA, 19 bp, Homo sapiens
  siRNA target sequence for FLJ10233 (NM_018034.2,1248-1266).
gaggtgacgattcattaaa

SEQ ID NO: 365554 - DNA, 19 bp, Homo sapiens
  siRNA target sequence for FLJ10233 (NM_018034.2,1250-1268).
ggtgacgattcattaaaat

SEQ ID NO: 365555 - DNA, 19 bp, Homo sapiens
  siRNA target sequence for FLJ10233 (NM_018034.2,1272-1290).
gggacatccgacaatttaa

SEQ ID NO: 365556 - DNA, 19 bp, Homo sapiens
  siRNA target sequence for FLJ10233 (NM_018034.2,1273-1291).
ggacatccgacaatttaat

SEQ ID NO: 365557 - DNA, 19 bp, Homo sapiens
  siRNA target sequence for FLJ10233 (NM_018034.2,1274-1292).
gacatccgacaatttaata

SEQ ID NO: 365558 - DNA, 19 bp, Homo sapiens
  siRNA target sequence for FLJ10233 (NM_018034.2,1279-1297).
ccgacaatttaataaacca

SEQ ID NO: 365559 - DNA, 19 bp, Homo sapiens
  siRNA target sequence for FLJ10233 (NM_018034.2,1321-1339).
caccatgttcccaatgact

SEQ ID NO: 365560 - DNA, 19 bp, Homo sapiens
  siRNA target sequence for FLJ10233 (NM_018034.2,1347-1365).
gtttcagtccagatgataa

SEQ ID NO: 365561 - DNA, 19 bp, Homo sapiens
  siRNA target sequence for FLJ10233 (NM_018034.2,1356-1374).
cagatgataagctcatagt

SEQ ID NO: 365562 - DNA, 19 bp, Homo sapiens
  siRNA target sequence for FLJ10233 (NM_018034.2,1375-1393).
cactggtacatctattcaa

SEQ ID NO: 365563 - DNA, 19 bp, Homo sapiens
  siRNA target sequence for FLJ10233 (NM_018034.2,1401-1419).
gtggcagcggcaaacttgt

SEQ ID NO: 365564 - DNA, 19 bp, Homo sapiens
  siRNA target sequence for FLJ10233 (NM_018034.2,1403-1421).
ggcagcggcaaacttgttt

SEQ ID NO: 365565 - DNA, 19 bp, Homo sapiens
  siRNA target sequence for FLJ10233 (NM_018034.2,1404-1422).
gcagcggcaaacttgtttt

SEQ ID NO: 365566 - DNA, 19 bp, Homo sapiens
  siRNA target sequence for FLJ10233 (NM_018034.2,1427-1445).
gagcgtaggactttccaaa

SEQ ID NO: 365567 - DNA, 19 bp, Homo sapiens
  siRNA target sequence for FLJ10233 (NM_018034.2,1437-1455).
ctttccaaagggtgtatga

SEQ ID NO: 365568 - DNA, 19 bp, Homo sapiens
  siRNA target sequence for FLJ10233 (NM_018034.2,1441-1459).
ccaaagggtgtatgaaata

SEQ ID NO: 365569 - DNA, 19 bp, Homo sapiens
  siRNA target sequence for FLJ10233 (NM_018034.2,1465-1483).
cacagatgcgagtgttgtt

SEQ ID NO: 365570 - DNA, 19 bp, Homo sapiens
  siRNA target sequence for FLJ10233 (NM_018034.2,1535-1553).
ggattggctaaagtctatt

SEQ ID NO: 365571 - DNA, 19 bp, Homo sapiens
  siRNA target sequence for FLJ10233 (NM_018034.2,1536-1554).
gattggctaaagtctatta

SEQ ID NO: 365572 - DNA, 19 bp, Homo sapiens
  siRNA target sequence for FLJ10233 (NM_018034.2,1571-1589).
cagaggggagcaaaattat

SEQ ID NO: 365573 - DNA, 19 bp, Homo sapiens
  siRNA target sequence for FLJ10233 (NM_018034.2,1603-1621).
ccagcggaaggcaaaacaa

SEQ ID NO: 365574 - DNA, 19 bp, Homo sapiens
  siRNA target sequence for FLJ10233 (NM_018034.2,1656-1674).
ctcatgccttgcctatgtt

SEQ ID NO: 365575 - DNA, 19 bp, Homo sapiens
  siRNA target sequence for FLJ10233 (NM_018034.2,1732-1750).
cctgaagtcgcataaacct

SEQ ID NO: 365576 - DNA, 19 bp, Homo sapiens
  siRNA target sequence for FLJ10233 (NM_018034.2,1801-1819).
gggcactctctcttcctat

SEQ ID NO: 365577 - DNA, 19 bp, Homo sapiens
  siRNA target sequence for FLJ10233 (NM_018034.2,1802-1820).
ggcactctctcttcctata

SEQ ID NO: 365578 - DNA, 19 bp, Homo sapiens
  siRNA target sequence for FLJ10233 (NM_018034.2,1803-1821).
gcactctctcttcctatat

SEQ ID NO: 365579 - DNA, 19 bp, Homo sapiens
  siRNA target sequence for FLJ10233 (NM_018034.2,1843-1861).
caagaccgatgacagtaat

SEQ ID NO: 365580 - DNA, 19 bp, Homo sapiens
  siRNA target sequence for FLJ10233 (NM_018034.2,1846-1864).
gaccgatgacagtaatcct

SEQ ID NO: 365581 - DNA, 19 bp, Homo sapiens
  siRNA target sequence for FLJ10233 (NM_018034.2,1895-1913).
gcagaagacagcccatatt

SEQ ID NO: 365582 - DNA, 19 bp, Homo sapiens
  siRNA target sequence for FLJ10241 (NM_018035.1,204-222).
ggtgcatgagaaaaatcga

SEQ ID NO: 365583 - DNA, 19 bp, Homo sapiens
  siRNA target sequence for FLJ10241 (NM_018035.1,205-223).
gtgcatgagaaaaatcgat

SEQ ID NO: 365584 - DNA, 19 bp, Homo sapiens
  siRNA target sequence for FLJ10241 (NM_018035.1,259-277).
ggcgcaggtgcctttttca

SEQ ID NO: 365585 - DNA, 19 bp, Homo sapiens
  siRNA target sequence for FLJ10241 (NM_018035.1,260-278).
gcgcaggtgcctttttcat

SEQ ID NO: 365586 - DNA, 19 bp, Homo sapiens
  siRNA target sequence for FLJ10241 (NM_018035.1,288-306).
gggaggcgcagtcaagttt

SEQ ID NO: 365587 - DNA, 19 bp, Homo sapiens
  siRNA target sequence for FLJ10241 (NM_018035.1,320-338).
ggatcaggccagataagta

SEQ ID NO: 365588 - DNA, 19 bp, Homo sapiens
  siRNA target sequence for FLJ10241 (NM_018035.1,321-339).
gatcaggccagataagtat

SEQ ID NO: 365589 - DNA, 19 bp, Homo sapiens
  siRNA target sequence for FLJ10241 (NM_018035.1,354-372).
ggagttctggaatttctgt

SEQ ID NO: 365590 - DNA, 19 bp, Homo sapiens
  siRNA target sequence for FLJ10241 (NM_018035.1,401-419).
gtgactgtgacatcaacta

SEQ ID NO: 365591 - DNA, 19 bp, Homo sapiens
  siRNA target sequence for FLJ10241 (NM_018035.1,648-666).
ccctggcctcactcagata

SEQ ID NO: 365592 - DNA, 19 bp, Homo sapiens
  siRNA target sequence for FLJ10241 (NM_018035.1,649-667).
cctggcctcactcagatat

SEQ ID NO: 365593 - DNA, 19 bp, Homo sapiens
  siRNA target sequence for FLJ10241 (NM_018035.1,650-668).
ctggcctcactcagatatt

SEQ ID NO: 365594 - DNA, 19 bp, Homo sapiens
  siRNA target sequence for C14orf103 (NM_018036.4,320-338).
gctgtctgttgccgttaaa

SEQ ID NO: 365595 - DNA, 19 bp, Homo sapiens
  siRNA target sequence for C14orf103 (NM_018036.4,321-339).
ctgtctgttgccgttaaaa

SEQ ID NO: 365596 - DNA, 19 bp, Homo sapiens
  siRNA target sequence for C14orf103 (NM_018036.4,325-343).
ctgttgccgttaaaatatt

SEQ ID NO: 365597 - DNA, 19 bp, Homo sapiens
  siRNA target sequence for C14orf103 (NM_018036.4,327-345).
gttgccgttaaaatattgt

SEQ ID NO: 365598 - DNA, 19 bp, Homo sapiens
  siRNA target sequence for C14orf103 (NM_018036.4,361-379).
ccaatacaaaggaatttct

SEQ ID NO: 365599 - DNA, 19 bp, Homo sapiens
  siRNA target sequence for C14orf103 (NM_018036.4,403-421).
ccactctccagcatagaat

SEQ ID NO: 365600 - DNA, 19 bp, Homo sapiens
  siRNA target sequence for C14orf103 (NM_018036.4,440-458).
ctggcatgagcagatttta

SEQ ID NO: 365601 - DNA, 19 bp, Homo sapiens
  siRNA target sequence for C14orf103 (NM_018036.4,444-462).
catgagcagattttatact

SEQ ID NO: 365602 - DNA, 19 bp, Homo sapiens
  siRNA target sequence for C14orf103 (NM_018036.4,508-526).
cttcatttacaacttttca

SEQ ID NO: 365603 - DNA, 19 bp, Homo sapiens
  siRNA target sequence for C14orf103 (NM_018036.4,542-560).
ctgtgcacttgattataga

SEQ ID NO: 365604 - DNA, 19 bp, Homo sapiens
  siRNA target sequence for C14orf103 (NM_018036.4,552-570).
gattatagacccctttatt

SEQ ID NO: 365605 - DNA, 19 bp, Homo sapiens
  siRNA target sequence for C14orf103 (NM_018036.4,573-591).
ccaatccgatctcttctta

SEQ ID NO: 365606 - DNA, 19 bp, Homo sapiens
  siRNA target sequence for C14orf103 (NM_018036.4,585-603).
cttcttaccgtggaaacat

SEQ ID NO: 365607 - DNA, 19 bp, Homo sapiens
  siRNA target sequence for C14orf103 (NM_018036.4,588-606).
cttaccgtggaaacattca

SEQ ID NO: 365608 - DNA, 19 bp, Homo sapiens
  siRNA target sequence for C14orf103 (NM_018036.4,614-632).
cagtagcgttgcattggat

SEQ ID NO: 365609 - DNA, 19 bp, Homo sapiens
  siRNA target sequence for C14orf103 (NM_018036.4,616-634).
gtagcgttgcattggataa

SEQ ID NO: 365610 - DNA, 19 bp, Homo sapiens
  siRNA target sequence for C14orf103 (NM_018036.4,620-638).
cgttgcattggataaatct

SEQ ID NO: 365611 - DNA, 19 bp, Homo sapiens
  siRNA target sequence for C14orf103 (NM_018036.4,621-639).
gttgcattggataaatctt

SEQ ID NO: 365612 - DNA, 19 bp, Homo sapiens
  siRNA target sequence for C14orf103 (NM_018036.4,670-688).
ctgctttacatctatctga

SEQ ID NO: 365613 - DNA, 19 bp, Homo sapiens
  siRNA target sequence for C14orf103 (NM_018036.4,678-696).
catctatctgacaaatgca

SEQ ID NO: 365614 - DNA, 19 bp, Homo sapiens
  siRNA target sequence for C14orf103 (NM_018036.4,829-847).
ccagcgatgttgtccatat

SEQ ID NO: 365615 - DNA, 19 bp, Homo sapiens
  siRNA target sequence for C14orf103 (NM_018036.4,833-851).
cgatgttgtccatatcaga

SEQ ID NO: 365616 - DNA, 19 bp, Homo sapiens
  siRNA target sequence for C14orf103 (NM_018036.4,865-883).
cttgtgctgcgttaatgaa

SEQ ID NO: 365617 - DNA, 19 bp, Homo sapiens
  siRNA target sequence for C14orf103 (NM_018036.4,868-886).
gtgctgcgttaatgaatct

SEQ ID NO: 365618 - DNA, 19 bp, Homo sapiens
  siRNA target sequence for C14orf103 (NM_018036.4,870-888).
gctgcgttaatgaatctca

SEQ ID NO: 365619 - DNA, 19 bp, Homo sapiens
  siRNA target sequence for C14orf103 (NM_018036.4,871-889).
ctgcgttaatgaatctcat

SEQ ID NO: 365620 - DNA, 19 bp, Homo sapiens
  siRNA target sequence for C14orf103 (NM_018036.4,874-892).
cgttaatgaatctcattca

SEQ ID NO: 365621 - DNA, 19 bp, Homo sapiens
  siRNA target sequence for C14orf103 (NM_018036.4,922-940).
cacctaacaaggcagatat

SEQ ID NO: 365622 - DNA, 19 bp, Homo sapiens
  siRNA target sequence for C14orf103 (NM_018036.4,1080-1098).
caaggcacctcgtcagtaa

SEQ ID NO: 365623 - DNA, 19 bp, Homo sapiens
  siRNA target sequence for C14orf103 (NM_018036.4,1121-1139).
ggatgaaaaatctcaaatt

SEQ ID NO: 365624 - DNA, 19 bp, Homo sapiens
  siRNA target sequence for C14orf103 (NM_018036.4,1176-1194).
gacgagagtgggaatgtat

SEQ ID NO: 365625 - DNA, 19 bp, Homo sapiens
  siRNA target sequence for C14orf103 (NM_018036.4,1238-1256).
catcagtgatgcaatgaca

SEQ ID NO: 365626 - DNA, 19 bp, Homo sapiens
  siRNA target sequence for C14orf103 (NM_018036.4,1365-1383).
gtgataagagacaattatt

SEQ ID NO: 365627 - DNA, 19 bp, Homo sapiens
  siRNA target sequence for C14orf103 (NM_018036.4,1414-1432).
gcaaagcccccttacactt

SEQ ID NO: 365628 - DNA, 19 bp, Homo sapiens
  siRNA target sequence for C14orf103 (NM_018036.4,1415-1433).
caaagcccccttacacttt

SEQ ID NO: 365629 - DNA, 19 bp, Homo sapiens
  siRNA target sequence for C14orf103 (NM_018036.4,1520-1538).
cacttctccggctaaaagt

SEQ ID NO: 365630 - DNA, 19 bp, Homo sapiens
  siRNA target sequence for C14orf103 (NM_018036.4,1522-1540).
cttctccggctaaaagtta

SEQ ID NO: 365631 - DNA, 19 bp, Homo sapiens
  siRNA target sequence for C14orf103 (NM_018036.4,1525-1543).
ctccggctaaaagttatat

SEQ ID NO: 365632 - DNA, 19 bp, Homo sapiens
  siRNA target sequence for C14orf103 (NM_018036.4,1527-1545).
ccggctaaaagttatatta

SEQ ID NO: 365633 - DNA, 19 bp, Homo sapiens
  siRNA target sequence for C14orf103 (NM_018036.4,1574-1592).
cacgagacatggacgtaat

SEQ ID NO: 365634 - DNA, 19 bp, Homo sapiens
  siRNA target sequence for C14orf103 (NM_018036.4,1577-1595).
gagacatggacgtaataca

SEQ ID NO: 365635 - DNA, 19 bp, Homo sapiens
  siRNA target sequence for C14orf103 (NM_018036.4,1724-1742).
ctcccggcaggtgttcatt

SEQ ID NO: 365636 - DNA, 19 bp, Homo sapiens
  siRNA target sequence for C14orf103 (NM_018036.4,1802-1820).
cctgtattgcagtaaagaa

SEQ ID NO: 365637 - DNA, 19 bp, Homo sapiens
  siRNA target sequence for C14orf103 (NM_018036.4,1927-1945).
cgctccgcctcaatattga

SEQ ID NO: 365638 - DNA, 19 bp, Homo sapiens
  siRNA target sequence for C14orf103 (NM_018036.4,1970-1988).
ggatttcttcacaagtctt

SEQ ID NO: 365639 - DNA, 19 bp, Homo sapiens
  siRNA target sequence for C14orf103 (NM_018036.4,1984-2002).
gtctttctgcagaagtaga

SEQ ID NO: 365640 - DNA, 19 bp, Homo sapiens
  siRNA target sequence for C14orf103 (NM_018036.4,2014-2032).
ctccagatccagaagttaa

SEQ ID NO: 365641 - DNA, 19 bp, Homo sapiens
  siRNA target sequence for C14orf103 (NM_018036.4,2019-2037).
gatccagaagttaaaaagt

SEQ ID NO: 365642 - DNA, 19 bp, Homo sapiens
  siRNA target sequence for C14orf103 (NM_018036.4,2090-2108).
ggagccaaatctggttatt

SEQ ID NO: 365643 - DNA, 19 bp, Homo sapiens
  siRNA target sequence for C14orf103 (NM_018036.4,2091-2109).
gagccaaatctggttattt

SEQ ID NO: 365644 - DNA, 19 bp, Homo sapiens
  siRNA target sequence for C14orf103 (NM_018036.4,2093-2111).
gccaaatctggttatttct

SEQ ID NO: 365645 - DNA, 19 bp, Homo sapiens
  siRNA target sequence for C14orf103 (NM_018036.4,2222-2240).
gcctgtgttttttagagaa

SEQ ID NO: 365646 - DNA, 19 bp, Homo sapiens
  siRNA target sequence for C14orf103 (NM_018036.4,2259-2277).
gttcccattcgacttgatt

SEQ ID NO: 365647 - DNA, 19 bp, Homo sapiens
  siRNA target sequence for C14orf103 (NM_018036.4,2285-2303).
caaacatgtatcaatggat

SEQ ID NO: 365648 - DNA, 19 bp, Homo sapiens
  siRNA target sequence for C14orf103 (NM_018036.4,2308-2326).
gtacgctagctgggatttt

SEQ ID NO: 365649 - DNA, 19 bp, Homo sapiens
  siRNA target sequence for C14orf103 (NM_018036.4,2327-2345).
gattggtctggctcagtta

SEQ ID NO: 365650 - DNA, 19 bp, Homo sapiens
  siRNA target sequence for C14orf103 (NM_018036.4,2331-2349).
ggtctggctcagttaaact

SEQ ID NO: 365651 - DNA, 19 bp, Homo sapiens
  siRNA target sequence for C14orf103 (NM_018036.4,2363-2381).
gctcaagaggctttcctat

SEQ ID NO: 365652 - DNA, 19 bp, Homo sapiens
  siRNA target sequence for C14orf103 (NM_018036.4,2377-2395).
cctatcgacatggtttact

SEQ ID NO: 365653 - DNA, 19 bp, Homo sapiens
  siRNA target sequence for C14orf103 (NM_018036.4,2378-2396).
ctatcgacatggtttacta

SEQ ID NO: 365654 - DNA, 19 bp, Homo sapiens
  siRNA target sequence for C14orf103 (NM_018036.4,2389-2407).
gtttactaggcgttgacaa

SEQ ID NO: 365655 - DNA, 19 bp, Homo sapiens
  siRNA target sequence for C14orf103 (NM_018036.4,2394-2412).
ctaggcgttgacaaattat

SEQ ID NO: 365656 - DNA, 19 bp, Homo sapiens
  siRNA target sequence for C14orf103 (NM_018036.4,2397-2415).
ggcgttgacaaattattct

SEQ ID NO: 365657 - DNA, 19 bp, Homo sapiens
  siRNA target sequence for C14orf103 (NM_018036.4,2428-2446).
ctgagtggcttaatgacat

SEQ ID NO: 365658 - DNA, 19 bp, Homo sapiens
  siRNA target sequence for C14orf103 (NM_018036.4,2430-2448).
gagtggcttaatgacatta

SEQ ID NO: 365659 - DNA, 19 bp, Homo sapiens
  siRNA target sequence for C14orf103 (NM_018036.4,2434-2452).
ggcttaatgacattaagaa

SEQ ID NO: 365660 - DNA, 19 bp, Homo sapiens
  siRNA target sequence for C14orf103 (NM_018036.4,2436-2454).
cttaatgacattaagaaga

SEQ ID NO: 365661 - DNA, 19 bp, Homo sapiens
  siRNA target sequence for C14orf103 (NM_018036.4,2478-2496).
ggtgttggacctatgcatt

SEQ ID NO: 365662 - DNA, 19 bp, Homo sapiens
  siRNA target sequence for C14orf103 (NM_018036.4,2488-2506).
ctatgcattcactagtaca

SEQ ID NO: 365663 - DNA, 19 bp, Homo sapiens
  siRNA target sequence for C14orf103 (NM_018036.4,2492-2510).
gcattcactagtacaatta

SEQ ID NO: 365664 - DNA, 19 bp, Homo sapiens
  siRNA target sequence for C14orf103 (NM_018036.4,2626-2644).
ctgctctagaactcacaaa

SEQ ID NO: 365665 - DNA, 19 bp, Homo sapiens
  siRNA target sequence for C14orf103 (NM_018036.4,2628-2646).
gctctagaactcacaaaca

SEQ ID NO: 365666 - DNA, 19 bp, Homo sapiens
  siRNA target sequence for C14orf103 (NM_018036.4,2673-2691).
gcagagactgcttatgata

SEQ ID NO: 365667 - DNA, 19 bp, Homo sapiens
  siRNA target sequence for C14orf103 (NM_018036.4,2826-2844).
gacacggctcagaccattt

SEQ ID NO: 365668 - DNA, 19 bp, Homo sapiens
  siRNA target sequence for C14orf103 (NM_018036.4,2828-2846).
cacggctcagaccatttat

SEQ ID NO: 365669 - DNA, 19 bp, Homo sapiens
  siRNA target sequence for C14orf103 (NM_018036.4,2830-2848).
cggctcagaccatttatga

SEQ ID NO: 365670 - DNA, 19 bp, Homo sapiens
  siRNA target sequence for C14orf103 (NM_018036.4,2831-2849).
ggctcagaccatttatgaa

SEQ ID NO: 365671 - DNA, 19 bp, Homo sapiens
  siRNA target sequence for C14orf103 (NM_018036.4,2832-2850).
gctcagaccatttatgaaa

SEQ ID NO: 365672 - DNA, 19 bp, Homo sapiens
  siRNA target sequence for C14orf103 (NM_018036.4,2927-2945).
ggtgaaacctctgattgtt

SEQ ID NO: 365673 - DNA, 19 bp, Homo sapiens
  siRNA target sequence for FLJ10246 (NM_018038.1,30-48).
gtcatggacatttgaatat

SEQ ID NO: 365674 - DNA, 19 bp, Homo sapiens
  siRNA target sequence for FLJ10246 (NM_018038.1,109-127).
cactttagcgggcagttaa

SEQ ID NO: 365675 - DNA, 19 bp, Homo sapiens
  siRNA target sequence for FLJ10246 (NM_018038.1,159-177).
gtggatccagtttgaactt

SEQ ID NO: 365676 - DNA, 19 bp, Homo sapiens
  siRNA target sequence for FLJ10246 (NM_018038.1,162-180).
gatccagtttgaacttact

SEQ ID NO: 365677 - DNA, 19 bp, Homo sapiens
  siRNA target sequence for FLJ10246 (NM_018038.1,285-303).
gcatgttggtggtaaactt

SEQ ID NO: 365678 - DNA, 19 bp, Homo sapiens
  siRNA target sequence for FLJ10246 (NM_018038.1,295-313).
ggtaaacttgagattgtat

SEQ ID NO: 365679 - DNA, 19 bp, Homo sapiens
  siRNA target sequence for FLJ10246 (NM_018038.1,296-314).
gtaaacttgagattgtata

SEQ ID NO: 365680 - DNA, 19 bp, Homo sapiens
  siRNA target sequence for FLJ10246 (NM_018038.1,301-319).
cttgagattgtatacacaa

SEQ ID NO: 365681 - DNA, 19 bp, Homo sapiens
  siRNA target sequence for FLJ10246 (NM_018038.1,361-379).
caagctcccaagagtttct

SEQ ID NO: 365682 - DNA, 19 bp, Homo sapiens
  siRNA target sequence for FLJ10246 (NM_018038.1,443-461).
gtagaggggctcatttcct

SEQ ID NO: 365683 - DNA, 19 bp, Homo sapiens
  siRNA target sequence for FLJ10246 (NM_018038.1,449-467).
gggctcatttcctgaacaa

SEQ ID NO: 365684 - DNA, 19 bp, Homo sapiens
  siRNA target sequence for FLJ10246 (NM_018038.1,450-468).
ggctcatttcctgaacaaa

SEQ ID NO: 365685 - DNA, 19 bp, Homo sapiens
  siRNA target sequence for FLJ10246 (NM_018038.1,452-470).
ctcatttcctgaacaaaat

SEQ ID NO: 365686 - DNA, 19 bp, Homo sapiens
  siRNA target sequence for FLJ10251 (NM_018039.2,863-881).
gcccagaatccaaattgta

SEQ ID NO: 365687 - DNA, 19 bp, Homo sapiens
  siRNA target sequence for FLJ10251 (NM_018039.2,1007-1025).
gccagagagacctatgata

SEQ ID NO: 365688 - DNA, 19 bp, Homo sapiens
  siRNA target sequence for FLJ10251 (NM_018039.2,1013-1031).
gagacctatgataatatca

SEQ ID NO: 365689 - DNA, 19 bp, Homo sapiens
  siRNA target sequence for FLJ10251 (NM_018039.2,1015-1033).
gacctatgataatatcagt

SEQ ID NO: 365690 - DNA, 19 bp, Homo sapiens
  siRNA target sequence for FLJ10251 (NM_018039.2,1207-1225).
ctggaagaaccgcatctat

SEQ ID NO: 365691 - DNA, 19 bp, Homo sapiens
  siRNA target sequence for FLJ10251 (NM_018039.2,1209-1227).
ggaagaaccgcatctataa

SEQ ID NO: 365692 - DNA, 19 bp, Homo sapiens
  siRNA target sequence for FLJ10251 (NM_018039.2,1210-1228).
gaagaaccgcatctataat

SEQ ID NO: 365693 - DNA, 19 bp, Homo sapiens
  siRNA target sequence for FLJ10251 (NM_018039.2,1213-1231).
gaaccgcatctataattca

SEQ ID NO: 365694 - DNA, 19 bp, Homo sapiens
  siRNA target sequence for FLJ10251 (NM_018039.2,1252-1270).
cagtggctccttgtttgat

SEQ ID NO: 365695 - DNA, 19 bp, Homo sapiens
  siRNA target sequence for FLJ10251 (NM_018039.2,1345-1363).
catagaaggcgtcaataca

SEQ ID NO: 365696 - DNA, 19 bp, Homo sapiens
  siRNA target sequence for FLJ10251 (NM_018039.2,2144-2162).
ggtccatctgcacagatta

SEQ ID NO: 365697 - DNA, 19 bp, Homo sapiens
  siRNA target sequence for FLJ10251 (NM_018039.2,2158-2176).
gattatccacccgtcaaat

SEQ ID NO: 365698 - DNA, 19 bp, Homo sapiens
  siRNA target sequence for FLJ10251 (NM_018039.2,2193-2211).
gtcgccctcctcagaaact

SEQ ID NO: 365699 - DNA, 19 bp, Homo sapiens
  siRNA target sequence for FLJ10251 (NM_018039.2,2195-2213).
cgccctcctcagaaactga

SEQ ID NO: 365700 - DNA, 19 bp, Homo sapiens
  siRNA target sequence for FLJ10260 (NM_018042.2,506-524).
ggtctcacgagctatgtgt

SEQ ID NO: 365701 - DNA, 19 bp, Homo sapiens
  siRNA target sequence for FLJ10260 (NM_018042.2,538-556).
ctggagggggagtgatcaa

SEQ ID NO: 365702 - DNA, 19 bp, Homo sapiens
  siRNA target sequence for FLJ10260 (NM_018042.2,547-565).
gagtgatcaaggctgaaat

SEQ ID NO: 365703 - DNA, 19 bp, Homo sapiens
  siRNA target sequence for FLJ10260 (NM_018042.2,567-585).
gagaatgaagactatagtt

SEQ ID NO: 365704 - DNA, 19 bp, Homo sapiens
  siRNA target sequence for FLJ10260 (NM_018042.2,594-612).
gatggaataggactagatt

SEQ ID NO: 365705 - DNA, 19 bp, Homo sapiens
  siRNA target sequence for FLJ10260 (NM_018042.2,603-621).
ggactagatttggaaaatt

SEQ ID NO: 365706 - DNA, 19 bp, Homo sapiens
  siRNA target sequence for FLJ10260 (NM_018042.2,668-686).
gcagaatggtaactacttt

SEQ ID NO: 365707 - DNA, 19 bp, Homo sapiens
  siRNA target sequence for FLJ10260 (NM_018042.2,743-761).
gagctccaatttgtacaaa

SEQ ID NO: 365708 - DNA, 19 bp, Homo sapiens
  siRNA target sequence for FLJ10260 (NM_018042.2,755-773).
gtacaaaagagatataaca

SEQ ID NO: 365709 - DNA, 19 bp, Homo sapiens
  siRNA target sequence for FLJ10260 (NM_018042.2,758-776).
caaaagagatataacatct

SEQ ID NO: 365710 - DNA, 19 bp, Homo sapiens
  siRNA target sequence for FLJ10260 (NM_018042.2,830-848).
gactagagggagattgtat

SEQ ID NO: 365711 - DNA, 19 bp, Homo sapiens
  siRNA target sequence for FLJ10260 (NM_018042.2,877-895).
cccgtgttgatatacaaga

SEQ ID NO: 365712 - DNA, 19 bp, Homo sapiens
  siRNA target sequence for FLJ10260 (NM_018042.2,878-896).
ccgtgttgatatacaagaa

SEQ ID NO: 365713 - DNA, 19 bp, Homo sapiens
  siRNA target sequence for FLJ10260 (NM_018042.2,1004-1022).
ctcgacagaaaagttgtta

SEQ ID NO: 365714 - DNA, 19 bp, Homo sapiens
  siRNA target sequence for FLJ10260 (NM_018042.2,1006-1024).
cgacagaaaagttgttaca

SEQ ID NO: 365715 - DNA, 19 bp, Homo sapiens
  siRNA target sequence for FLJ10260 (NM_018042.2,1088-1106).
gttcattggtttaaatgaa

SEQ ID NO: 365716 - DNA, 19 bp, Homo sapiens
  siRNA target sequence for FLJ10260 (NM_018042.2,1437-1455).
gaggtgatctctcaaataa

SEQ ID NO: 365717 - DNA, 19 bp, Homo sapiens
  siRNA target sequence for FLJ10260 (NM_018042.2,1439-1457).
ggtgatctctcaaataaat

SEQ ID NO: 365718 - DNA, 19 bp, Homo sapiens
  siRNA target sequence for FLJ10260 (NM_018042.2,1440-1458).
gtgatctctcaaataaata

SEQ ID NO: 365719 - DNA, 19 bp, Homo sapiens
  siRNA target sequence for FLJ10260 (NM_018042.2,1524-1542).
gggctatcaggaaggataa

SEQ ID NO: 365720 - DNA, 19 bp, Homo sapiens
  siRNA target sequence for FLJ10260 (NM_018042.2,1791-1809).
caaactgccctaaccttaa

SEQ ID NO: 365721 - DNA, 19 bp, Homo sapiens
  siRNA target sequence for FLJ10260 (NM_018042.2,1795-1813).
ctgccctaaccttaaagca

SEQ ID NO: 365722 - DNA, 19 bp, Homo sapiens
  siRNA target sequence for FLJ10260 (NM_018042.2,1833-1851).
ggttacactaaaaaagtgt

SEQ ID NO: 365723 - DNA, 19 bp, Homo sapiens
  siRNA target sequence for FLJ10260 (NM_018042.2,1848-1866).
gtgtgtgtcatgacaaaga

SEQ ID NO: 365724 - DNA, 19 bp, Homo sapiens
  siRNA target sequence for FLJ10260 (NM_018042.2,1892-1910).
gacaagctgccagtatgat

SEQ ID NO: 365725 - DNA, 19 bp, Homo sapiens
  siRNA target sequence for FLJ10260 (NM_018042.2,1908-1926).
gatttaaggtcgcaagtaa

SEQ ID NO: 365726 - DNA, 19 bp, Homo sapiens
  siRNA target sequence for FLJ10260 (NM_018042.2,2031-2049).
gaaaatctataccagataa

SEQ ID NO: 365727 - DNA, 19 bp, Homo sapiens
  siRNA target sequence for FLJ10260 (NM_018042.2,2042-2060).
ccagataatcggtatagat

SEQ ID NO: 365728 - DNA, 19 bp, Homo sapiens
  siRNA target sequence for FLJ10260 (NM_018042.2,2043-2061).
cagataatcggtatagatt

SEQ ID NO: 365729 - DNA, 19 bp, Homo sapiens
  siRNA target sequence for FLJ10260 (NM_018042.2,2053-2071).
gtatagattgctttcagaa

SEQ ID NO: 365730 - DNA, 19 bp, Homo sapiens
  siRNA target sequence for ORAOV2 (NM_018043.4,114-132).
gcgtccacatcatcaacat

SEQ ID NO: 365731 - DNA, 19 bp, Homo sapiens
  siRNA target sequence for ORAOV2 (NM_018043.4,175-193).
gctgctgaactccttatct

SEQ ID NO: 365732 - DNA, 19 bp, Homo sapiens
  siRNA target sequence for ORAOV2 (NM_018043.4,496-514).
gcgggacgaggacactaaa

SEQ ID NO: 365733 - DNA, 19 bp, Homo sapiens
  siRNA target sequence for ORAOV2 (NM_018043.4,497-515).
cgggacgaggacactaaaa

SEQ ID NO: 365734 - DNA, 19 bp, Homo sapiens
  siRNA target sequence for ORAOV2 (NM_018043.4,498-516).
gggacgaggacactaaaat

SEQ ID NO: 365735 - DNA, 19 bp, Homo sapiens
  siRNA target sequence for ORAOV2 (NM_018043.4,518-536).
cacggagtcgggtttgtga

SEQ ID NO: 365736 - DNA, 19 bp, Homo sapiens
  siRNA target sequence for ORAOV2 (NM_018043.4,522-540).
gagtcgggtttgtgaaaat

SEQ ID NO: 365737 - DNA, 19 bp, Homo sapiens
  siRNA target sequence for ORAOV2 (NM_018043.4,604-622).
gaagatgtaccacattaat

SEQ ID NO: 365738 - DNA, 19 bp, Homo sapiens
  siRNA target sequence for ORAOV2 (NM_018043.4,627-645).
cccgtggcctcctgaaaaa

SEQ ID NO: 365739 - DNA, 19 bp, Homo sapiens
  siRNA target sequence for ORAOV2 (NM_018043.4,769-787).
gtctgataaggattccttt

SEQ ID NO: 365740 - DNA, 19 bp, Homo sapiens
  siRNA target sequence for ORAOV2 (NM_018043.4,801-819).
cccggagcacgattgtcta

SEQ ID NO: 365741 - DNA, 19 bp, Homo sapiens
  siRNA target sequence for ORAOV2 (NM_018043.4,802-820).
ccggagcacgattgtctat

SEQ ID NO: 365742 - DNA, 19 bp, Homo sapiens
  siRNA target sequence for ORAOV2 (NM_018043.4,804-822).
ggagcacgattgtctatga

SEQ ID NO: 365743 - DNA, 19 bp, Homo sapiens
  siRNA target sequence for ORAOV2 (NM_018043.4,807-825).
gcacgattgtctatgagat

SEQ ID NO: 365744 - DNA, 19 bp, Homo sapiens
  siRNA target sequence for ORAOV2 (NM_018043.4,810-828).
cgattgtctatgagatctt

SEQ ID NO: 365745 - DNA, 19 bp, Homo sapiens
  siRNA target sequence for ORAOV2 (NM_018043.4,924-942).
gagactacaacggtgaaaa

SEQ ID NO: 365746 - DNA, 19 bp, Homo sapiens
  siRNA target sequence for ORAOV2 (NM_018043.4,936-954).
gtgaaaacgtcgagttcaa

SEQ ID NO: 365747 - DNA, 19 bp, Homo sapiens
  siRNA target sequence for ORAOV2 (NM_018043.4,1019-1037).
gacctggtcaggaagtatt

SEQ ID NO: 365748 - DNA, 19 bp, Homo sapiens
  siRNA target sequence for ORAOV2 (NM_018043.4,1174-1192).
gtgtgaccagagacacaat

SEQ ID NO: 365749 - DNA, 19 bp, Homo sapiens
  siRNA target sequence for ORAOV2 (NM_018043.4,1176-1194).
gtgaccagagacacaatat

SEQ ID NO: 365750 - DNA, 19 bp, Homo sapiens
  siRNA target sequence for ORAOV2 (NM_018043.4,1178-1196).
gaccagagacacaatatca

SEQ ID NO: 365751 - DNA, 19 bp, Homo sapiens
  siRNA target sequence for ORAOV2 (NM_018043.4,1589-1607).
gtcctcggcgtcatcatct

SEQ ID NO: 365752 - DNA, 19 bp, Homo sapiens
  siRNA target sequence for ORAOV2 (NM_018043.4,1595-1613).
ggcgtcatcatctacagaa

SEQ ID NO: 365753 - DNA, 19 bp, Homo sapiens
  siRNA target sequence for ORAOV2 (NM_018043.4,1870-1888).
cttcaaaggccggtttgtt

SEQ ID NO: 365754 - DNA, 19 bp, Homo sapiens
  siRNA target sequence for ORAOV2 (NM_018043.4,1899-1917).
gcgactacgtgtacatttt

SEQ ID NO: 365755 - DNA, 19 bp, Homo sapiens
  siRNA target sequence for ORAOV2 (NM_018043.4,1918-1936).
ccgttccttccgaatggaa

SEQ ID NO: 365756 - DNA, 19 bp, Homo sapiens
  siRNA target sequence for ORAOV2 (NM_018043.4,2199-2217).
gcttcgtcaccctgtttgt

SEQ ID NO: 365757 - DNA, 19 bp, Homo sapiens
  siRNA target sequence for ORAOV2 (NM_018043.4,2273-2291).
cgcctggacgccaaaaagt

SEQ ID NO: 365758 - DNA, 19 bp, Homo sapiens
  siRNA target sequence for ORAOV2 (NM_018043.4,2274-2292).
gcctggacgccaaaaagtt

SEQ ID NO: 365759 - DNA, 19 bp, Homo sapiens
  siRNA target sequence for ORAOV2 (NM_018043.4,2319-2337).
ctgtcagagccaaagacat

SEQ ID NO: 365760 - DNA, 19 bp, Homo sapiens
  siRNA target sequence for ORAOV2 (NM_018043.4,2335-2353).
catcggaatctggtacaat

SEQ ID NO: 365761 - DNA, 19 bp, Homo sapiens
  siRNA target sequence for ORAOV2 (NM_018043.4,2564-2582).
gtgcagatctgcaggtata

SEQ ID NO: 365762 - DNA, 19 bp, Homo sapiens
  siRNA target sequence for ORAOV2 (NM_018043.4,2566-2584).
gcagatctgcaggtataaa

SEQ ID NO: 365763 - DNA, 19 bp, Homo sapiens
  siRNA target sequence for ORAOV2 (NM_018043.4,2600-2618).
ccgtggtcggaaaacaagt

SEQ ID NO: 365764 - DNA, 19 bp, Homo sapiens
  siRNA target sequence for ORAOV2 (NM_018043.4,2601-2619).
cgtggtcggaaaacaagta

SEQ ID NO: 365765 - DNA, 19 bp, Homo sapiens
  siRNA target sequence for WBSCR20A (NM_018044.2,83-101).
gccgccagggctctatcaa

SEQ ID NO: 365766 - DNA, 19 bp, Homo sapiens
  siRNA target sequence for WBSCR20A (NM_018044.2,246-264).
ggccaaggtgctagtgtat

SEQ ID NO: 365767 - DNA, 19 bp, Homo sapiens
  siRNA target sequence for FLJ10276 (NM_018045.4,622-640).
ctggcatcggtatttctat

SEQ ID NO: 365768 - DNA, 19 bp, Homo sapiens
  siRNA target sequence for FLJ10276 (NM_018045.4,625-643).
gcatcggtatttctataaa

SEQ ID NO: 365769 - DNA, 19 bp, Homo sapiens
  siRNA target sequence for FLJ10276 (NM_018045.4,759-777).
cacccatatctccaaaaga

SEQ ID NO: 365770 - DNA, 19 bp, Homo sapiens
  siRNA target sequence for FLJ10276 (NM_018045.4,788-806).
cctgtggccaaaatttcta

SEQ ID NO: 365771 - DNA, 19 bp, Homo sapiens
  siRNA target sequence for FLJ10276 (NM_018045.4,835-853).
gagcccctgtgaagagaat

SEQ ID NO: 365772 - DNA, 19 bp, Homo sapiens
  siRNA target sequence for FLJ10276 (NM_018045.4,1044-1062).
gaccctcaccccctattca

SEQ ID NO: 365773 - DNA, 19 bp, Homo sapiens
  siRNA target sequence for FLJ10276 (NM_018045.4,1046-1064).
ccctcaccccctattcact

SEQ ID NO: 365774 - DNA, 19 bp, Homo sapiens
  siRNA target sequence for FLJ10276 (NM_018045.4,1152-1170).
cagacttacgggtgtttga

SEQ ID NO: 365775 - DNA, 19 bp, Homo sapiens
  siRNA target sequence for FLJ10276 (NM_018045.4,1192-1210).
gtctacaccctccaacaat

SEQ ID NO: 365776 - DNA, 19 bp, Homo sapiens
  siRNA target sequence for FLJ10276 (NM_018045.4,1348-1366).
gggaagcgagcctaatggt

SEQ ID NO: 365777 - DNA, 19 bp, Homo sapiens
  siRNA target sequence for HSU84971 (NM_018046.2,544-562).
gcacgcaggtggaagaact

SEQ ID NO: 365778 - DNA, 19 bp, Homo sapiens
  siRNA target sequence for HSU84971 (NM_018046.2,643-661).
ggtcaatctcagattattt

SEQ ID NO: 365779 - DNA, 19 bp, Homo sapiens
  siRNA target sequence for HSU84971 (NM_018046.2,644-662).
gtcaatctcagattatttt

SEQ ID NO: 365780 - DNA, 19 bp, Homo sapiens
  siRNA target sequence for HSU84971 (NM_018046.2,681-699).
gacgttagtcttccaaata

SEQ ID NO: 365781 - DNA, 19 bp, Homo sapiens
  siRNA target sequence for HSU84971 (NM_018046.2,683-701).
cgttagtcttccaaataaa

SEQ ID NO: 365782 - DNA, 19 bp, Homo sapiens
  siRNA target sequence for HSU84971 (NM_018046.2,732-750).
gctatcgaaacttctattt

SEQ ID NO: 365783 - DNA, 19 bp, Homo sapiens
  siRNA target sequence for HSU84971 (NM_018046.2,733-751).
ctatcgaaacttctatttt

SEQ ID NO: 365784 - DNA, 19 bp, Homo sapiens
  siRNA target sequence for HSU84971 (NM_018046.2,737-755).
cgaaacttctattttgaat

SEQ ID NO: 365785 - DNA, 19 bp, Homo sapiens
  siRNA target sequence for HSU84971 (NM_018046.2,757-775).
ctaaagaccatttacaagt

SEQ ID NO: 365786 - DNA, 19 bp, Homo sapiens
  siRNA target sequence for HSU84971 (NM_018046.2,791-809).
ccctggtaccgatagaaca

SEQ ID NO: 365787 - DNA, 19 bp, Homo sapiens
  siRNA target sequence for HSU84971 (NM_018046.2,795-813).
ggtaccgatagaacagaaa

SEQ ID NO: 365788 - DNA, 19 bp, Homo sapiens
  siRNA target sequence for HSU84971 (NM_018046.2,796-814).
gtaccgatagaacagaaaa

SEQ ID NO: 365789 - DNA, 19 bp, Homo sapiens
  siRNA target sequence for HSU84971 (NM_018046.2,799-817).
ccgatagaacagaaaatgt

SEQ ID NO: 365790 - DNA, 19 bp, Homo sapiens
  siRNA target sequence for HSU84971 (NM_018046.2,860-878).
gccagcatctgcattagca

SEQ ID NO: 365791 - DNA, 19 bp, Homo sapiens
  siRNA target sequence for HSU84971 (NM_018046.2,861-879).
ccagcatctgcattagcaa

SEQ ID NO: 365792 - DNA, 19 bp, Homo sapiens
  siRNA target sequence for HSU84971 (NM_018046.2,892-910).
ccttagaaggctcatcatt

SEQ ID NO: 365793 - DNA, 19 bp, Homo sapiens
  siRNA target sequence for HSU84971 (NM_018046.2,893-911).
cttagaaggctcatcatta

SEQ ID NO: 365794 - DNA, 19 bp, Homo sapiens
  siRNA target sequence for HSU84971 (NM_018046.2,904-922).
catcattagctgaaagttt

SEQ ID NO: 365795 - DNA, 19 bp, Homo sapiens
  siRNA target sequence for HSU84971 (NM_018046.2,945-963).
gtatcacagactggattta

SEQ ID NO: 365796 - DNA, 19 bp, Homo sapiens
  siRNA target sequence for HSU84971 (NM_018046.2,953-971).
gactggatttagttatgat

SEQ ID NO: 365797 - DNA, 19 bp, Homo sapiens
  siRNA target sequence for HSU84971 (NM_018046.2,955-973).
ctggatttagttatgatga

SEQ ID NO: 365798 - DNA, 19 bp, Homo sapiens
  siRNA target sequence for HSU84971 (NM_018046.2,1000-1018).
gcactggtttctattatga

SEQ ID NO: 365799 - DNA, 19 bp, Homo sapiens
  siRNA target sequence for HSU84971 (NM_018046.2,1001-1019).
cactggtttctattatgat

SEQ ID NO: 365800 - DNA, 19 bp, Homo sapiens
  siRNA target sequence for HSU84971 (NM_018046.2,1049-1067).
cactggaatttattactat

SEQ ID NO: 365801 - DNA, 19 bp, Homo sapiens
  siRNA target sequence for HSU84971 (NM_018046.2,1077-1095).
gaaagtggtcgttatcagt

SEQ ID NO: 365802 - DNA, 19 bp, Homo sapiens
  siRNA target sequence for HSU84971 (NM_018046.2,1083-1101).
ggtcgttatcagtttcatt

SEQ ID NO: 365803 - DNA, 19 bp, Homo sapiens
  siRNA target sequence for HSU84971 (NM_018046.2,1094-1112).
gtttcattctcgagtagat

SEQ ID NO: 365804 - DNA, 19 bp, Homo sapiens
  siRNA target sequence for HSU84971 (NM_018046.2,1105-1123).
gagtagatttgcaacctta

SEQ ID NO: 365805 - DNA, 19 bp, Homo sapiens
  siRNA target sequence for HSU84971 (NM_018046.2,1116-1134).
caaccttatccgacttcta

SEQ ID NO: 365806 - DNA, 19 bp, Homo sapiens
  siRNA target sequence for HSU84971 (NM_018046.2,1126-1144).
cgacttctagcacaaaaca

SEQ ID NO: 365807 - DNA, 19 bp, Homo sapiens
  siRNA target sequence for HSU84971 (NM_018046.2,1298-1316).
ggccaaaataggcattcat

SEQ ID NO: 365808 - DNA, 19 bp, Homo sapiens
  siRNA target sequence for HSU84971 (NM_018046.2,1300-1318).
ccaaaataggcattcatca

SEQ ID NO: 365809 - DNA, 19 bp, Homo sapiens
  siRNA target sequence for HSU84971 (NM_018046.2,1347-1365).
ccaactagtggaaatacta

SEQ ID NO: 365810 - DNA, 19 bp, Homo sapiens
  siRNA target sequence for HSU84971 (NM_018046.2,1348-1366).
caactagtggaaatactat

SEQ ID NO: 365811 - DNA, 19 bp, Homo sapiens
  siRNA target sequence for HSU84971 (NM_018046.2,1443-1461).
ccagaggaaggtgaaatta

SEQ ID NO: 365812 - DNA, 19 bp, Homo sapiens
  siRNA target sequence for HSU84971 (NM_018046.2,1468-1486).
ctcagactgaggatagtta

SEQ ID NO: 365813 - DNA, 19 bp, Homo sapiens
  siRNA target sequence for HSU84971 (NM_018046.2,1561-1579).
ccccatgtattagagtaat

SEQ ID NO: 365814 - DNA, 19 bp, Homo sapiens
  siRNA target sequence for HSU84971 (NM_018046.2,1562-1580).
cccatgtattagagtaatt

SEQ ID NO: 365815 - DNA, 19 bp, Homo sapiens
  siRNA target sequence for HSU84971 (NM_018046.2,1564-1582).
catgtattagagtaattgt

SEQ ID NO: 365816 - DNA, 19 bp, Homo sapiens
  siRNA target sequence for HSU84971 (NM_018046.2,1567-1585).
gtattagagtaattgtcat

SEQ ID NO: 365817 - DNA, 19 bp, Homo sapiens
  siRNA target sequence for HSU84971 (NM_018046.2,1593-1611).
cctgtgttgcagataggat

SEQ ID NO: 365818 - DNA, 19 bp, Homo sapiens
  siRNA target sequence for HSU84971 (NM_018046.2,1601-1619).
gcagataggatcactcttt

SEQ ID NO: 365819 - DNA, 19 bp, Homo sapiens
  siRNA target sequence for HSU84971 (NM_018046.2,1602-1620).
cagataggatcactcttta

SEQ ID NO: 365820 - DNA, 19 bp, Homo sapiens
  siRNA target sequence for HSU84971 (NM_018046.2,1608-1626).
ggatcactctttatcatta

SEQ ID NO: 365821 - DNA, 19 bp, Homo sapiens
  siRNA target sequence for HSU84971 (NM_018046.2,1728-1746).
gaccatgacttacaaagtt

SEQ ID NO: 365822 - DNA, 19 bp, Homo sapiens
  siRNA target sequence for HSU84971 (NM_018046.2,1730-1748).
ccatgacttacaaagttat

SEQ ID NO: 365823 - DNA, 19 bp, Homo sapiens
  siRNA target sequence for HSU84971 (NM_018046.2,1757-1775).
ggatcaaggcagtcaaaat

SEQ ID NO: 365824 - DNA, 19 bp, Homo sapiens
  siRNA target sequence for HSU84971 (NM_018046.2,1776-1794).
ggcacaattgttaatggaa

SEQ ID NO: 365825 - DNA, 19 bp, Homo sapiens
  siRNA target sequence for HSU84971 (NM_018046.2,1777-1795).
gcacaattgttaatggaaa

SEQ ID NO: 365826 - DNA, 19 bp, Homo sapiens
  siRNA target sequence for HSU84971 (NM_018046.2,1822-1840).
gtgacccttacgtacttga

SEQ ID NO: 365827 - DNA, 19 bp, Homo sapiens
  siRNA target sequence for HSU84971 (NM_018046.2,1874-1892).
cttatcctttcacattcat

SEQ ID NO: 365828 - DNA, 19 bp, Homo sapiens
  siRNA target sequence for HSU84971 (NM_018046.2,1939-1957).
cccaccttcgccttgataa

SEQ ID NO: 365829 - DNA, 19 bp, Homo sapiens
  siRNA target sequence for HSU84971 (NM_018046.2,1941-1959).
caccttcgccttgataaga

SEQ ID NO: 365830 - DNA, 19 bp, Homo sapiens
  siRNA target sequence for HSU84971 (NM_018046.2,1948-1966).
gccttgataagaaagatga

SEQ ID NO: 365831 - DNA, 19 bp, Homo sapiens
  siRNA target sequence for HSU84971 (NM_018046.2,1974-1992).
gttggtccaacactaagta

SEQ ID NO: 365832 - DNA, 19 bp, Homo sapiens
  siRNA target sequence for HSU84971 (NM_018046.2,1984-2002).
cactaagtaaggaggaaaa

SEQ ID NO: 365833 - DNA, 19 bp, Homo sapiens
  siRNA target sequence for HSU84971 (NM_018046.2,2049-2067).
ggtttacagaatacagaat

SEQ ID NO: 365834 - DNA, 19 bp, Homo sapiens
  siRNA target sequence for HSU84971 (NM_018046.2,2106-2124).
gatagagctggaaaacgta

SEQ ID NO: 365835 - DNA, 19 bp, Homo sapiens
  siRNA target sequence for HSU84971 (NM_018046.2,2262-2280).
gatggtggaggaatgaaaa

SEQ ID NO: 365836 - DNA, 19 bp, Homo sapiens
  siRNA target sequence for HSU84971 (NM_018046.2,2395-2413).
cacgagagcggtttactga

SEQ ID NO: 365837 - DNA, 19 bp, Homo sapiens
  siRNA target sequence for HSU84971 (NM_018046.2,2397-2415).
cgagagcggtttactgaaa

SEQ ID NO: 365838 - DNA, 19 bp, Homo sapiens
  siRNA target sequence for HSU84971 (NM_018046.2,2398-2416).
gagagcggtttactgaaaa

SEQ ID NO: 365839 - DNA, 19 bp, Homo sapiens
  siRNA target sequence for HSU84971 (NM_018046.2,2400-2418).
gagcggtttactgaaaact

SEQ ID NO: 365840 - DNA, 19 bp, Homo sapiens
  siRNA target sequence for HSU84971 (NM_018046.2,2466-2484).
gtaaaagggactttagagt

SEQ ID NO: 365841 - DNA, 19 bp, Homo sapiens
  siRNA target sequence for GNRPX (NM_018049.1,415-433).
cggagaagcctcatcttct

SEQ ID NO: 365842 - DNA, 19 bp, Homo sapiens
  siRNA target sequence for FLJ10298 (NM_018050.2,272-290).
gagaagggagcttgactta

SEQ ID NO: 365843 - DNA, 19 bp, Homo sapiens
  siRNA target sequence for FLJ10298 (NM_018050.2,277-295).
gggagcttgacttacactt

SEQ ID NO: 365844 - DNA, 19 bp, Homo sapiens
  siRNA target sequence for FLJ10298 (NM_018050.2,278-296).
ggagcttgacttacacttt

SEQ ID NO: 365845 - DNA, 19 bp, Homo sapiens
  siRNA target sequence for FLJ10298 (NM_018050.2,282-300).
cttgacttacactttggta

SEQ ID NO: 365846 - DNA, 19 bp, Homo sapiens
  siRNA target sequence for FLJ10298 (NM_018050.2,324-342).
gctgtctgctagtcagaat

SEQ ID NO: 365847 - DNA, 19 bp, Homo sapiens
  siRNA target sequence for FLJ10298 (NM_018050.2,325-343).
ctgtctgctagtcagaatt

SEQ ID NO: 365848 - DNA, 19 bp, Homo sapiens
  siRNA target sequence for FLJ10298 (NM_018050.2,335-353).
gtcagaattgcctcaaaaa

SEQ ID NO: 365849 - DNA, 19 bp, Homo sapiens
  siRNA target sequence for FLJ10298 (NM_018050.2,339-357).
gaattgcctcaaaaagagt

SEQ ID NO: 365850 - DNA, 19 bp, Homo sapiens
  siRNA target sequence for FLJ10298 (NM_018050.2,411-429).
caatgagcccgtatatact

SEQ ID NO: 365851 - DNA, 19 bp, Homo sapiens
  siRNA target sequence for FLJ10298 (NM_018050.2,415-433).
gagcccgtatatacttcaa

SEQ ID NO: 365852 - DNA, 19 bp, Homo sapiens
  siRNA target sequence for FLJ10298 (NM_018050.2,417-435).
gcccgtatatacttcaact

SEQ ID NO: 365853 - DNA, 19 bp, Homo sapiens
  siRNA target sequence for FLJ10298 (NM_018050.2,479-497).
caggggacaaagcatgtaa

SEQ ID NO: 365854 - DNA, 19 bp, Homo sapiens
  siRNA target sequence for FLJ10298 (NM_018050.2,507-525).
cttcgacactcgaaaaaca

SEQ ID NO: 365855 - DNA, 19 bp, Homo sapiens
  siRNA target sequence for FLJ10298 (NM_018050.2,535-553).
cccaactgctacctatttt

SEQ ID NO: 365856 - DNA, 19 bp, Homo sapiens
  siRNA target sequence for FLJ10298 (NM_018050.2,540-558).
ctgctacctatttttctgt

SEQ ID NO: 365857 - DNA, 19 bp, Homo sapiens
  siRNA target sequence for FLJ10298 (NM_018050.2,567-585).
ggaagcctgtccattgaaa

SEQ ID NO: 365858 - DNA, 19 bp, Homo sapiens
  siRNA target sequence for FLJ10298 (NM_018050.2,761-779).
ggagagacacactttctca

SEQ ID NO: 365859 - DNA, 19 bp, Homo sapiens
  siRNA target sequence for FLJ10298 (NM_018050.2,794-812).
cagatcacttggagaaact

SEQ ID NO: 365860 - DNA, 19 bp, Homo sapiens
  siRNA target sequence for FLJ10298 (NM_018050.2,833-851).
gtgcccagctccttgctta

SEQ ID NO: 365861 - DNA, 19 bp, Homo sapiens
  siRNA target sequence for FLJ10298 (NM_018050.2,835-853).
gcccagctccttgcttata

SEQ ID NO: 365862 - DNA, 19 bp, Homo sapiens
  siRNA target sequence for FLJ10298 (NM_018050.2,840-858).
gctccttgcttataaggaa

SEQ ID NO: 365863 - DNA, 19 bp, Homo sapiens
  siRNA target sequence for FLJ10298 (NM_018050.2,865-883).
cattctcagagttcacaat

SEQ ID NO: 365864 - DNA, 19 bp, Homo sapiens
  siRNA target sequence for FLJ10298 (NM_018050.2,888-906).
ctctgatcaagaaatagct

SEQ ID NO: 365865 - DNA, 19 bp, Homo sapiens
  siRNA target sequence for FLJ10298 (NM_018050.2,997-1015).
cttctacccaccaatgctt

SEQ ID NO: 365866 - DNA, 19 bp, Homo sapiens
  siRNA target sequence for FLJ10298 (NM_018050.2,1090-1108).
cctcccacgaccctcattt

SEQ ID NO: 365867 - DNA, 19 bp, Homo sapiens
  siRNA target sequence for FLJ10298 (NM_018050.2,1093-1111).
cccacgaccctcatttcta

SEQ ID NO: 365868 - DNA, 19 bp, Homo sapiens
  siRNA target sequence for FLJ10298 (NM_018050.2,1140-1158).
ccaagcaatggctacaaca

SEQ ID NO: 365869 - DNA, 19 bp, Homo sapiens
  siRNA target sequence for FLJ10298 (NM_018050.2,1194-1212).
ctcgaaaggcagcttagaa

SEQ ID NO: 365870 - DNA, 19 bp, Homo sapiens
  siRNA target sequence for FLJ10298 (NM_018050.2,1228-1246).
gaaatctccaacctaactt

SEQ ID NO: 365871 - DNA, 19 bp, Homo sapiens
  siRNA target sequence for FLJ10298 (NM_018050.2,1270-1288).
cctactgcactttctatgt

SEQ ID NO: 365872 - DNA, 19 bp, Homo sapiens
  siRNA target sequence for FLJ10298 (NM_018050.2,1294-1312).
gtggagtcttccactatga

SEQ ID NO: 365873 - DNA, 19 bp, Homo sapiens
  siRNA target sequence for FLJ10298 (NM_018050.2,1296-1314).
ggagtcttccactatgaat

SEQ ID NO: 365874 - DNA, 19 bp, Homo sapiens
  siRNA target sequence for FLJ10298 (NM_018050.2,1386-1404).
gtacggccttccatttgaa

SEQ ID NO: 365875 - DNA, 19 bp, Homo sapiens
  siRNA target sequence for FLJ10298 (NM_018050.2,1494-1512).
ccgcaggaaacgttactca

SEQ ID NO: 365876 - DNA, 19 bp, Homo sapiens
  siRNA target sequence for FLJ10298 (NM_018050.2,1495-1513).
cgcaggaaacgttactcaa

SEQ ID NO: 365877 - DNA, 19 bp, Homo sapiens
  siRNA target sequence for FLJ10298 (NM_018050.2,1514-1532).
gactggattatttgatcaa

SEQ ID NO: 365878 - DNA, 19 bp, Homo sapiens
  siRNA target sequence for FLJ10300 (NM_018051.2,1741-1759).
ccaagcaggcatatgttca

SEQ ID NO: 365879 - DNA, 19 bp, Homo sapiens
  siRNA target sequence for FLJ10300 (NM_018051.2,1755-1773).
gttcagtgtaacgaagata

SEQ ID NO: 365880 - DNA, 19 bp, Homo sapiens
  siRNA target sequence for FLJ10300 (NM_018051.2,1826-1844).
ccagcacccgggagaaagt

SEQ ID NO: 365881 - DNA, 19 bp, Homo sapiens
  siRNA target sequence for FLJ10300 (NM_018051.2,1860-1878).
ggcagtgaacaaagagata

SEQ ID NO: 365882 - DNA, 19 bp, Homo sapiens
  siRNA target sequence for FLJ10300 (NM_018051.2,1893-1911).
gttatgccaaagattgata

SEQ ID NO: 365883 - DNA, 19 bp, Homo sapiens
  siRNA target sequence for FLJ10300 (NM_018051.2,1904-1922).
gattgatactccaaggtta

SEQ ID NO: 365884 - DNA, 19 bp, Homo sapiens
  siRNA target sequence for FLJ10300 (NM_018051.2,1908-1926).
gatactccaaggttatgta

SEQ ID NO: 365885 - DNA, 19 bp, Homo sapiens
  siRNA target sequence for FLJ10300 (NM_018051.2,2013-2031).
caagacagggccctgtatt

SEQ ID NO: 365886 - DNA, 19 bp, Homo sapiens
  siRNA target sequence for FLJ10300 (NM_018051.2,2016-2034).
gacagggccctgtatttta

SEQ ID NO: 365887 - DNA, 19 bp, Homo sapiens
  siRNA target sequence for FLJ10300 (NM_018051.2,2020-2038).
gggccctgtattttagtga

SEQ ID NO: 365888 - DNA, 19 bp, Homo sapiens
  siRNA target sequence for FLJ10300 (NM_018051.2,2319-2337).
gttgtcgtctgggatttga

SEQ ID NO: 365889 - DNA, 19 bp, Homo sapiens
  siRNA target sequence for FLJ10300 (NM_018051.2,2343-2361).
gactcaaggctgcattact

SEQ ID NO: 365890 - DNA, 19 bp, Homo sapiens
  siRNA target sequence for FLJ10300 (NM_018051.2,2404-2422).
cgttttccaccgatggaat

SEQ ID NO: 365891 - DNA, 19 bp, Homo sapiens
  siRNA target sequence for FLJ10300 (NM_018051.2,2419-2437).
gaatccttacctcagtaaa

SEQ ID NO: 365892 - DNA, 19 bp, Homo sapiens
  siRNA target sequence for FLJ10300 (NM_018051.2,2570-2588).
gagtggggttctcaatgta

SEQ ID NO: 365893 - DNA, 19 bp, Homo sapiens
  siRNA target sequence for FLJ10300 (NM_018051.2,2592-2610).
gtggttgttgaattaccaa

SEQ ID NO: 365894 - DNA, 19 bp, Homo sapiens
  siRNA target sequence for FLJ10300 (NM_018051.2,2616-2634).
gacatcgcaggttcaataa

SEQ ID NO: 365895 - DNA, 19 bp, Homo sapiens
  siRNA target sequence for FLJ10300 (NM_018051.2,2621-2639).
cgcaggttcaataagtgat

SEQ ID NO: 365896 - DNA, 19 bp, Homo sapiens
  siRNA target sequence for FLJ10300 (NM_018051.2,2622-2640).
gcaggttcaataagtgatt

SEQ ID NO: 365897 - DNA, 19 bp, Homo sapiens
  siRNA target sequence for FLJ10300 (NM_018051.2,2663-2681).
ggtcaagctggtacatagt

SEQ ID NO: 365898 - DNA, 19 bp, Homo sapiens
  siRNA target sequence for FLJ10300 (NM_018051.2,2702-2720).
cagtctttcccataaaggt

SEQ ID NO: 365899 - DNA, 19 bp, Homo sapiens
  siRNA target sequence for FLJ10300 (NM_018051.2,2704-2722).
gtctttcccataaaggtaa

SEQ ID NO: 365900 - DNA, 19 bp, Homo sapiens
  siRNA target sequence for FLJ10300 (NM_018051.2,2710-2728).
cccataaaggtaatgaatt

SEQ ID NO: 365901 - DNA, 19 bp, Homo sapiens
  siRNA target sequence for FLJ10300 (NM_018051.2,2711-2729).
ccataaaggtaatgaattt

SEQ ID NO: 365902 - DNA, 19 bp, Homo sapiens
  siRNA target sequence for FLJ10300 (NM_018051.2,2731-2749).
ggggcactacacaaacact

SEQ ID NO: 365903 - DNA, 19 bp, Homo sapiens
  siRNA target sequence for FLJ10300 (NM_018051.2,2735-2753).
cactacacaaacactgaat

SEQ ID NO: 365904 - DNA, 19 bp, Homo sapiens
  siRNA target sequence for FLJ10300 (NM_018051.2,2770-2788).
cagatcctaatcactttat

SEQ ID NO: 365905 - DNA, 19 bp, Homo sapiens
  siRNA target sequence for FLJ10300 (NM_018051.2,2772-2790).
gatcctaatcactttatta

SEQ ID NO: 365906 - DNA, 19 bp, Homo sapiens
  siRNA target sequence for FLJ10300 (NM_018051.2,2795-2813).
cacagacatgggtctcata

SEQ ID NO: 365907 - DNA, 19 bp, Homo sapiens
  siRNA target sequence for FLJ10300 (NM_018051.2,2816-2834).
ccatggcacaagacaagat

SEQ ID NO: 365908 - DNA, 19 bp, Homo sapiens
  siRNA target sequence for FLJ10300 (NM_018051.2,2817-2835).
catggcacaagacaagatt

SEQ ID NO: 365909 - DNA, 19 bp, Homo sapiens
  siRNA target sequence for FLJ10300 (NM_018051.2,2820-2838).
ggcacaagacaagatttga

SEQ ID NO: 365910 - DNA, 19 bp, Homo sapiens
  siRNA target sequence for FLJ10300 (NM_018051.2,2837-2855).
gagagtggctcccaaacta

SEQ ID NO: 365911 - DNA, 19 bp, Homo sapiens
  siRNA target sequence for FLJ10300 (NM_018051.2,2839-2857).
gagtggctcccaaactatt

SEQ ID NO: 365912 - DNA, 19 bp, Homo sapiens
  siRNA target sequence for FLJ10300 (NM_018051.2,2841-2859).
gtggctcccaaactattca

SEQ ID NO: 365913 - DNA, 19 bp, Homo sapiens
  siRNA target sequence for FLJ10300 (NM_018051.2,2881-2899).
gaccagtgaaagttaatgt

SEQ ID NO: 365914 - DNA, 19 bp, Homo sapiens
  siRNA target sequence for FLJ10300 (NM_018051.2,2911-2929).
caccatttggagaaccaat

SEQ ID NO: 365915 - DNA, 19 bp, Homo sapiens
  siRNA target sequence for FLJ10300 (NM_018051.2,2913-2931).
ccatttggagaaccaatat

SEQ ID NO: 365916 - DNA, 19 bp, Homo sapiens
  siRNA target sequence for FLJ10300 (NM_018051.2,3078-3096).
gacgacacatccaacatct

SEQ ID NO: 365917 - DNA, 19 bp, Homo sapiens
  siRNA target sequence for FLJ10305 (NM_018052.3,375-393).
gttcgtggcccagaacaat

SEQ ID NO: 365918 - DNA, 19 bp, Homo sapiens
  siRNA target sequence for FLJ10305 (NM_018052.3,576-594).
cagcaggctgcgctactat

SEQ ID NO: 365919 - DNA, 19 bp, Homo sapiens
  siRNA target sequence for FLJ10305 (NM_018052.3,724-742).
ctcctagaccgccttttaa

SEQ ID NO: 365920 - DNA, 19 bp, Homo sapiens
  siRNA target sequence for FLJ10305 (NM_018052.3,753-771).
gactgagagcaacaagttt

SEQ ID NO: 365921 - DNA, 19 bp, Homo sapiens
  siRNA target sequence for FLJ10305 (NM_018052.3,864-882).
ggagtcggtgccagacatt

SEQ ID NO: 365922 - DNA, 19 bp, Homo sapiens
  siRNA target sequence for FLJ10305 (NM_018052.3,865-883).
gagtcggtgccagacatta

SEQ ID NO: 365923 - DNA, 19 bp, Homo sapiens
  siRNA target sequence for FLJ10305 (NM_018052.3,869-887).
cggtgccagacattaacct

SEQ ID NO: 365924 - DNA, 19 bp, Homo sapiens
  siRNA target sequence for FLJ10305 (NM_018052.3,1185-1203).
ctacgatgaccgcaagaaa

SEQ ID NO: 365925 - DNA, 19 bp, Homo sapiens
  siRNA target sequence for FLJ10305 (NM_018052.3,1454-1472).
ggatcgtgcaggtcctaaa

SEQ ID NO: 365926 - DNA, 19 bp, Homo sapiens
  siRNA target sequence for FLJ10305 (NM_018052.3,1508-1526).
ccaggattgcagttctcaa

SEQ ID NO: 365927 - DNA, 19 bp, Homo sapiens
  siRNA target sequence for FLJ10305 (NM_018052.3,1603-1621).
cagacgttatcggatgaat

SEQ ID NO: 365928 - DNA, 19 bp, Homo sapiens
  siRNA target sequence for FLJ10305 (NM_018052.3,1786-1804).
ggtaccaaaggcttagaat

SEQ ID NO: 365929 - DNA, 19 bp, Homo sapiens
  siRNA target sequence for FLJ10305 (NM_018052.3,1791-1809).
caaaggcttagaatgttct

SEQ ID NO: 365930 - DNA, 19 bp, Homo sapiens
  siRNA target sequence for FLJ10305 (NM_018052.3,1819-1837).
cccaccatgaattcttact

SEQ ID NO: 365931 - DNA, 19 bp, Homo sapiens
  siRNA target sequence for FLJ10305 (NM_018052.3,2260-2278).
ctggtgcagctgattgagt

SEQ ID NO: 365932 - DNA, 19 bp, Homo sapiens
  siRNA target sequence for FLJ10305 (NM_018052.3,2277-2295).
gtgccccatcttcacatat

SEQ ID NO: 365933 - DNA, 19 bp, Homo sapiens
  siRNA target sequence for FLJ10307 (NM_018053.2,1190-1208).
caggcgcatgacccattta

SEQ ID NO: 365934 - DNA, 19 bp, Homo sapiens
  siRNA target sequence for FLJ10307 (NM_018053.2,1193-1211).
gcgcatgacccatttagca

SEQ ID NO: 365935 - DNA, 19 bp, Homo sapiens
  siRNA target sequence for FLJ10315 (NM_018056.1,1033-1051).
gtctggttcgtgaagaaca

SEQ ID NO: 365936 - DNA, 19 bp, Homo sapiens
  siRNA target sequence for FLJ10315 (NM_018056.1,1230-1248).
gcacccgtggactgaagaa

SEQ ID NO: 365937 - DNA, 19 bp, Homo sapiens
  siRNA target sequence for FLJ10315 (NM_018056.1,1231-1249).
cacccgtggactgaagaat

SEQ ID NO: 365938 - DNA, 19 bp, Homo sapiens
  siRNA target sequence for FLJ10315 (NM_018056.1,1281-1299).
cagcaagaacgtctacaaa

SEQ ID NO: 365939 - DNA, 19 bp, Homo sapiens
  siRNA target sequence for FLJ10315 (NM_018056.1,1401-1419).
gctggagggcgctgtcatt

SEQ ID NO: 365940 - DNA, 19 bp, Homo sapiens
  siRNA target sequence for FLJ10315 (NM_018056.1,1405-1423).
gagggcgctgtcattgtct

SEQ ID NO: 365941 - DNA, 19 bp, Homo sapiens
  siRNA target sequence for FLJ10315 (NM_018056.1,1407-1425).
gggcgctgtcattgtctat

SEQ ID NO: 365942 - DNA, 19 bp, Homo sapiens
  siRNA target sequence for FLJ10315 (NM_018056.1,1519-1537).
ctccgggaccgcttggtat

SEQ ID NO: 365943 - DNA, 19 bp, Homo sapiens
  siRNA target sequence for FLJ10315 (NM_018056.1,1542-1560).
caaggcctactcatactct

SEQ ID NO: 365944 - DNA, 19 bp, Homo sapiens
  siRNA target sequence for FLJ10330 (NM_018061.1,275-293).
ctgtcgtcgccttacttca

SEQ ID NO: 365945 - DNA, 19 bp, Homo sapiens
  siRNA target sequence for FLJ10330 (NM_018061.1,277-295).
gtcgtcgccttacttcaaa

SEQ ID NO: 365946 - DNA, 19 bp, Homo sapiens
  siRNA target sequence for FLJ10330 (NM_018061.1,279-297).
cgtcgccttacttcaaagt

SEQ ID NO: 365947 - DNA, 19 bp, Homo sapiens
  siRNA target sequence for FLJ10330 (NM_018061.1,282-300).
cgccttacttcaaagtaca

SEQ ID NO: 365948 - DNA, 19 bp, Homo sapiens
  siRNA target sequence for FLJ10330 (NM_018061.1,332-350).
gtggacgagatctacttta

SEQ ID NO: 365949 - DNA, 19 bp, Homo sapiens
  siRNA target sequence for FLJ10330 (NM_018061.1,490-508).
gaagttaactcgaaagcaa

SEQ ID NO: 365950 - DNA, 19 bp, Homo sapiens
  siRNA target sequence for FLJ10330 (NM_018061.1,505-523).
gcaagtgatgggtcttata

SEQ ID NO: 365951 - DNA, 19 bp, Homo sapiens
  siRNA target sequence for FLJ10330 (NM_018061.1,506-524).
caagtgatgggtcttataa

SEQ ID NO: 365952 - DNA, 19 bp, Homo sapiens
  siRNA target sequence for FLJ10330 (NM_018061.1,549-567).
gagcgcttggatttatgta

SEQ ID NO: 365953 - DNA, 19 bp, Homo sapiens
  siRNA target sequence for FLJ10330 (NM_018061.1,551-569).
gcgcttggatttatgtata

SEQ ID NO: 365954 - DNA, 19 bp, Homo sapiens
  siRNA target sequence for FLJ10330 (NM_018061.1,552-570).
cgcttggatttatgtatat

SEQ ID NO: 365955 - DNA, 19 bp, Homo sapiens
  siRNA target sequence for FLJ10330 (NM_018061.1,596-614).
ctgtgggactggtttgaat

SEQ ID NO: 365956 - DNA, 19 bp, Homo sapiens
  siRNA target sequence for FLJ10330 (NM_018061.1,670-688).
gaccattggagaaatgcta

SEQ ID NO: 365957 - DNA, 19 bp, Homo sapiens
  siRNA target sequence for FLJ10330 (NM_018061.1,678-696).
gagaaatgctacgatcttt

SEQ ID NO: 365958 - DNA, 19 bp, Homo sapiens
  siRNA target sequence for FLJ10330 (NM_018061.1,780-798).
cccgacctagaaaaatcaa

SEQ ID NO: 365959 - DNA, 19 bp, Homo sapiens
  siRNA target sequence for FLJ10330 (NM_018061.1,929-947).
ggccatgggtcttctagtt

SEQ ID NO: 365960 - DNA, 19 bp, Homo sapiens
  siRNA target sequence for FLJ10330 (NM_018061.1,931-949).
ccatgggtcttctagtttt

SEQ ID NO: 365961 - DNA, 19 bp, Homo sapiens
  siRNA target sequence for FLJ10330 (NM_018061.1,935-953).
gggtcttctagttttgaca

SEQ ID NO: 365962 - DNA, 19 bp, Homo sapiens
  siRNA target sequence for FLJ10330 (NM_018061.1,1020-1038).
ggcgaagatcccgaagtat

SEQ ID NO: 365963 - DNA, 19 bp, Homo sapiens
  siRNA target sequence for FLJ10330 (NM_018061.1,1021-1039).
gcgaagatcccgaagtatt

SEQ ID NO: 365964 - DNA, 19 bp, Homo sapiens
  siRNA target sequence for FLJ10330 (NM_018061.1,1023-1041).
gaagatcccgaagtattga

SEQ ID NO: 365965 - DNA, 19 bp, Homo sapiens
  siRNA target sequence for FLJ10330 (NM_018061.1,1055-1073).
cgcaggcgcagcagaagta

SEQ ID NO: 365966 - DNA, 19 bp, Homo sapiens
  siRNA target sequence for FLJ10330 (NM_018061.1,1095-1113).
gtcgaagtcgtgataggaa

SEQ ID NO: 365967 - DNA, 19 bp, Homo sapiens
  siRNA target sequence for FLJ10330 (NM_018061.1,1172-1190).
cgagatcgtgactatgata

SEQ ID NO: 365968 - DNA, 19 bp, Homo sapiens
  siRNA target sequence for FLJ10330 (NM_018061.1,1178-1196).
cgtgactatgataaggaaa

SEQ ID NO: 365969 - DNA, 19 bp, Homo sapiens
  siRNA target sequence for FLJ10330 (NM_018061.1,1305-1323).
ggcggcacagagatgacaa

SEQ ID NO: 365970 - DNA, 19 bp, Homo sapiens
  siRNA target sequence for FLJ10330 (NM_018061.1,1306-1324).
gcggcacagagatgacaaa

SEQ ID NO: 365971 - DNA, 19 bp, Homo sapiens
  siRNA target sequence for FLJ10330 (NM_018061.1,1390-1408).
gagtcgaagtagaaatgca

SEQ ID NO: 365972 - DNA, 19 bp, Homo sapiens
  siRNA target sequence for FLJ10330 (NM_018061.1,1409-1427).
gggaaacgaagtagaagta

SEQ ID NO: 365973 - DNA, 19 bp, Homo sapiens
  siRNA target sequence for FLJ10330 (NM_018061.1,1605-1623).
gagatcacagtgatagtaa

SEQ ID NO: 365974 - DNA, 19 bp, Homo sapiens
  siRNA target sequence for FLJ10330 (NM_018061.1,1646-1664).
cgtcgaaggagccaaagta

SEQ ID NO: 365975 - DNA, 19 bp, Homo sapiens
  siRNA target sequence for FLJ10330 (NM_018061.1,1647-1665).
gtcgaaggagccaaagtat

SEQ ID NO: 365976 - DNA, 19 bp, Homo sapiens
  siRNA target sequence for FLJ10330 (NM_018061.1,1656-1674).
gccaaagtatagaacaaga

SEQ ID NO: 365977 - DNA, 19 bp, Homo sapiens
  siRNA target sequence for FANCL (NM_018062.1,82-100).
ccccagaaccggtcgaaaa

SEQ ID NO: 365978 - DNA, 19 bp, Homo sapiens
  siRNA target sequence for FANCL (NM_018062.1,92-110).
ggtcgaaaaccgtgtatga

SEQ ID NO: 365979 - DNA, 19 bp, Homo sapiens
  siRNA target sequence for FANCL (NM_018062.1,101-119).
ccgtgtatgagggattcat

SEQ ID NO: 365980 - DNA, 19 bp, Homo sapiens
  siRNA target sequence for FANCL (NM_018062.1,103-121).
gtgtatgagggattcatct

SEQ ID NO: 365981 - DNA, 19 bp, Homo sapiens
  siRNA target sequence for FANCL (NM_018062.1,150-168).
gatagtgttgcctgaagat

SEQ ID NO: 365982 - DNA, 19 bp, Homo sapiens
  siRNA target sequence for FANCL (NM_018062.1,184-202).
gcaagattattatgtagtt

SEQ ID NO: 365983 - DNA, 19 bp, Homo sapiens
  siRNA target sequence for FANCL (NM_018062.1,205-223).
cagctgagaacaatactta

SEQ ID NO: 365984 - DNA, 19 bp, Homo sapiens
  siRNA target sequence for FANCL (NM_018062.1,224-242).
gtggataccatcgaatagt

SEQ ID NO: 365985 - DNA, 19 bp, Homo sapiens
  siRNA target sequence for FANCL (NM_018062.1,227-245).
gataccatcgaatagtaca

SEQ ID NO: 365986 - DNA, 19 bp, Homo sapiens
  siRNA target sequence for FANCL (NM_018062.1,265-283).
cctgatctaatgagcttta

SEQ ID NO: 365987 - DNA, 19 bp, Homo sapiens
  siRNA target sequence for FANCL (NM_018062.1,266-284).
ctgatctaatgagctttat

SEQ ID NO: 365988 - DNA, 19 bp, Homo sapiens
  siRNA target sequence for FANCL (NM_018062.1,278-296).
gctttatgatggagttgaa

SEQ ID NO: 365989 - DNA, 19 bp, Homo sapiens
  siRNA target sequence for FANCL (NM_018062.1,368-386).
caagccttattgaagagat

SEQ ID NO: 365990 - DNA, 19 bp, Homo sapiens
  siRNA target sequence for FANCL (NM_018062.1,373-391).
cttattgaagagataggaa

SEQ ID NO: 365991 - DNA, 19 bp, Homo sapiens
  siRNA target sequence for FANCL (NM_018062.1,398-416).
gttgggataaacttgtgta

SEQ ID NO: 365992 - DNA, 19 bp, Homo sapiens
  siRNA target sequence for FANCL (NM_018062.1,418-436).
gcggatacctgcttcagta

SEQ ID NO: 365993 - DNA, 19 bp, Homo sapiens
  siRNA target sequence for FANCL (NM_018062.1,428-446).
gcttcagtaccatcaagtt

SEQ ID NO: 365994 - DNA, 19 bp, Homo sapiens
  siRNA target sequence for FANCL (NM_018062.1,429-447).
cttcagtaccatcaagtta

SEQ ID NO: 365995 - DNA, 19 bp, Homo sapiens
  siRNA target sequence for FANCL (NM_018062.1,432-450).
cagtaccatcaagttaaaa

SEQ ID NO: 365996 - DNA, 19 bp, Homo sapiens
  siRNA target sequence for FANCL (NM_018062.1,461-479).
cttctggtagagagcattt

SEQ ID NO: 365997 - DNA, 19 bp, Homo sapiens
  siRNA target sequence for FANCL (NM_018062.1,464-482).
ctggtagagagcatttaat

SEQ ID NO: 365998 - DNA, 19 bp, Homo sapiens
  siRNA target sequence for FANCL (NM_018062.1,575-593).
gctccttaataagcattta

SEQ ID NO: 365999 - DNA, 19 bp, Homo sapiens
  siRNA target sequence for FANCL (NM_018062.1,608-626).
cagcaatagaatcactaaa

SEQ ID NO: 366000 - DNA, 19 bp, Homo sapiens
  siRNA target sequence for FANCL (NM_018062.1,668-686).
gggtacttgagccagaaaa

SEQ ID NO: 366001 - DNA, 19 bp, Homo sapiens
  siRNA target sequence for FANCL (NM_018062.1,669-687).
ggtacttgagccagaaaaa

SEQ ID NO: 366002 - DNA, 19 bp, Homo sapiens
  siRNA target sequence for FANCL (NM_018062.1,704-722).
cagcacgcagaattgcatt

SEQ ID NO: 366003 - DNA, 19 bp, Homo sapiens
  siRNA target sequence for FANCL (NM_018062.1,709-727).
cgcagaattgcattaggta

SEQ ID NO: 366004 - DNA, 19 bp, Homo sapiens
  siRNA target sequence for FANCL (NM_018062.1,710-728).
gcagaattgcattaggtaa

SEQ ID NO: 366005 - DNA, 19 bp, Homo sapiens
  siRNA target sequence for FANCL (NM_018062.1,711-729).
cagaattgcattaggtaat

SEQ ID NO: 366006 - DNA, 19 bp, Homo sapiens
  siRNA target sequence for FANCL (NM_018062.1,759-777).
caggcatcctactatgctt

SEQ ID NO: 366007 - DNA, 19 bp, Homo sapiens
  siRNA target sequence for FANCL (NM_018062.1,797-815).
gagctgaccatgtggtaaa

SEQ ID NO: 366008 - DNA, 19 bp, Homo sapiens
  siRNA target sequence for FANCL (NM_018062.1,852-870).
gtgggatccagaaaatagt

SEQ ID NO: 366009 - DNA, 19 bp, Homo sapiens
  siRNA target sequence for FANCL (NM_018062.1,854-872).
gggatccagaaaatagtgt

SEQ ID NO: 366010 - DNA, 19 bp, Homo sapiens
  siRNA target sequence for FANCL (NM_018062.1,914-932).
ctcgtgctatcctggaaaa

SEQ ID NO: 366011 - DNA, 19 bp, Homo sapiens
  siRNA target sequence for FANCL (NM_018062.1,916-934).
cgtgctatcctggaaaaat

SEQ ID NO: 366012 - DNA, 19 bp, Homo sapiens
  siRNA target sequence for FANCL (NM_018062.1,962-980).
gttatgcttatcaacttga

SEQ ID NO: 366013 - DNA, 19 bp, Homo sapiens
  siRNA target sequence for FANCL (NM_018062.1,1021-1039).
ggacaacctttccatcaaa

SEQ ID NO: 366014 - DNA, 19 bp, Homo sapiens
  siRNA target sequence for FANCL (NM_018062.1,1024-1042).
caacctttccatcaaatat

SEQ ID NO: 366015 - DNA, 19 bp, Homo sapiens
  siRNA target sequence for FANCL (NM_018062.1,1027-1045).
cctttccatcaaatatgct

SEQ ID NO: 366016 - DNA, 19 bp, Homo sapiens
  siRNA target sequence for FANCL (NM_018062.1,1028-1046).
ctttccatcaaatatgctt

SEQ ID NO: 366017 - DNA, 19 bp, Homo sapiens
  siRNA target sequence for FANCL (NM_018062.1,1053-1071).
gtggctgagaggactacta

SEQ ID NO: 366018 - DNA, 19 bp, Homo sapiens
  siRNA target sequence for FANCL (NM_018062.1,1056-1074).
gctgagaggactactaact

SEQ ID NO: 366019 - DNA, 19 bp, Homo sapiens
  siRNA target sequence for FANCL (NM_018062.1,1057-1075).
ctgagaggactactaacta

SEQ ID NO: 366020 - DNA, 19 bp, Homo sapiens
  siRNA target sequence for FANCL (NM_018062.1,1059-1077).
gagaggactactaactagt

SEQ ID NO: 366021 - DNA, 19 bp, Homo sapiens
  siRNA target sequence for FANCL (NM_018062.1,1073-1091).
ctagtagacagagttttaa

SEQ ID NO: 366022 - DNA, 19 bp, Homo sapiens
  siRNA target sequence for FANCL (NM_018062.1,1076-1094).
gtagacagagttttaacat

SEQ ID NO: 366023 - DNA, 19 bp, Homo sapiens
  siRNA target sequence for FANCL (NM_018062.1,1079-1097).
gacagagttttaacatcat

SEQ ID NO: 366024 - DNA, 19 bp, Homo sapiens
  siRNA target sequence for FANCL (NM_018062.1,1081-1099).
cagagttttaacatcatat

SEQ ID NO: 366025 - DNA, 19 bp, Homo sapiens
  siRNA target sequence for FANCL (NM_018062.1,1092-1110).
catcatatttggtgaatgt

SEQ ID NO: 366026 - DNA, 19 bp, Homo sapiens
  siRNA target sequence for FANCL (NM_018062.1,1102-1120).
ggtgaatgtccatattgta

SEQ ID NO: 366027 - DNA, 19 bp, Homo sapiens
  siRNA target sequence for FANCL (NM_018062.1,1121-1139).
gtaagccaattaccttaaa

SEQ ID NO: 366028 - DNA, 19 bp, Homo sapiens
  siRNA target sequence for C6orf166 (NM_018064.2,530-548).
gtgcggagccactctgaaa

SEQ ID NO: 366029 - DNA, 19 bp, Homo sapiens
  siRNA target sequence for C6orf166 (NM_018064.2,689-707).
cgcctcgccgcagaagtat

SEQ ID NO: 366030 - DNA, 19 bp, Homo sapiens
  siRNA target sequence for C6orf166 (NM_018064.2,691-709).
cctcgccgcagaagtatct

SEQ ID NO: 366031 - DNA, 19 bp, Homo sapiens
  siRNA target sequence for C6orf166 (NM_018064.2,747-765).
cgcctcaccacagaacaaa

SEQ ID NO: 366032 - DNA, 19 bp, Homo sapiens
  siRNA target sequence for C6orf166 (NM_018064.2,834-852).
cagacagatccgtgttgta

SEQ ID NO: 366033 - DNA, 19 bp, Homo sapiens
  siRNA target sequence for C6orf166 (NM_018064.2,836-854).
gacagatccgtgttgtact

SEQ ID NO: 366034 - DNA, 19 bp, Homo sapiens
  siRNA target sequence for C6orf166 (NM_018064.2,960-978).
cggcaggttgggatgatct

SEQ ID NO: 366035 - DNA, 19 bp, Homo sapiens
  siRNA target sequence for C6orf166 (NM_018064.2,1062-1080).
gatgcgtttgtgaagttta

SEQ ID NO: 366036 - DNA, 19 bp, Homo sapiens
  siRNA target sequence for C6orf166 (NM_018064.2,1076-1094).
gtttacgcatgatcaaata

SEQ ID NO: 366037 - DNA, 19 bp, Homo sapiens
  siRNA target sequence for C6orf166 (NM_018064.2,1113-1131).
cagcctgctagctatgttt

SEQ ID NO: 366038 - DNA, 19 bp, Homo sapiens
  siRNA target sequence for C6orf166 (NM_018064.2,1116-1134).
cctgctagctatgtttcat

SEQ ID NO: 366039 - DNA, 19 bp, Homo sapiens
  siRNA target sequence for FLJ10349 (NM_018066.2,640-658).
cagaccctgccaagttcat

SEQ ID NO: 366040 - DNA, 19 bp, Homo sapiens
  siRNA target sequence for FLJ10349 (NM_018066.2,642-660).
gaccctgccaagttcattt

SEQ ID NO: 366041 - DNA, 19 bp, Homo sapiens
  siRNA target sequence for FLJ10349 (NM_018066.2,869-887).
gcagctcatcgaagactat

SEQ ID NO: 366042 - DNA, 19 bp, Homo sapiens
  siRNA target sequence for FLJ10349 (NM_018066.2,870-888).
cagctcatcgaagactata

SEQ ID NO: 366043 - DNA, 19 bp, Homo sapiens
  siRNA target sequence for FLJ10349 (NM_018066.2,1029-1047).
ggagccgacttccatttct

SEQ ID NO: 366044 - DNA, 19 bp, Homo sapiens
  siRNA target sequence for FLJ10350 (NM_018067.2,904-922).
gcctcgccggtgcagaaaa

SEQ ID NO: 366045 - DNA, 19 bp, Homo sapiens
  siRNA target sequence for FLJ10350 (NM_018067.2,1429-1447).
gtgacccctagcaaaccaa

SEQ ID NO: 366046 - DNA, 19 bp, Homo sapiens
  siRNA target sequence for FLJ10350 (NM_018067.2,1751-1769).
gtctggagcgggaaaagca

SEQ ID NO: 366047 - DNA, 19 bp, Homo sapiens
  siRNA target sequence for FLJ10350 (NM_018067.2,1810-1828).
cgtctggaggagatcatga

SEQ ID NO: 366048 - DNA, 19 bp, Homo sapiens
  siRNA target sequence for FLJ10350 (NM_018067.2,1833-1851).
gactcggaagtcagaagtt

SEQ ID NO: 366049 - DNA, 19 bp, Homo sapiens
  siRNA target sequence for FLJ10350 (NM_018067.2,2319-2337).
gggtcctctctgttgtttt

SEQ ID NO: 366050 - DNA, 19 bp, Homo sapiens
  siRNA target sequence for PIWIL2 (NM_018068.2,187-205).
gttggccacaagcttctaa

SEQ ID NO: 366051 - DNA, 19 bp, Homo sapiens
  siRNA target sequence for PIWIL2 (NM_018068.2,192-210).
ccacaagcttctaaacctt

SEQ ID NO: 366052 - DNA, 19 bp, Homo sapiens
  siRNA target sequence for PIWIL2 (NM_018068.2,193-211).
cacaagcttctaaaccttt

SEQ ID NO: 366053 - DNA, 19 bp, Homo sapiens
  siRNA target sequence for PIWIL2 (NM_018068.2,245-263).
cagaggccatgtatttgga

SEQ ID NO: 366054 - DNA, 19 bp, Homo sapiens
  siRNA target sequence for PIWIL2 (NM_018068.2,332-350).
ccgaggcctgggcattgaa

SEQ ID NO: 366055 - DNA, 19 bp, Homo sapiens
  siRNA target sequence for PIWIL2 (NM_018068.2,341-359).
gggcattgaaacagtttct

SEQ ID NO: 366056 - DNA, 19 bp, Homo sapiens
  siRNA target sequence for PIWIL2 (NM_018068.2,342-360).
ggcattgaaacagtttcta

SEQ ID NO: 366057 - DNA, 19 bp, Homo sapiens
  siRNA target sequence for PIWIL2 (NM_018068.2,388-406).
catcaggtagaggcatttt

SEQ ID NO: 366058 - DNA, 19 bp, Homo sapiens
  siRNA target sequence for PIWIL2 (NM_018068.2,412-430).
gaggcttgtctgctaatct

SEQ ID NO: 366059 - DNA, 19 bp, Homo sapiens
  siRNA target sequence for PIWIL2 (NM_018068.2,548-566).
gagttcagatgcgtcttta

SEQ ID NO: 366060 - DNA, 19 bp, Homo sapiens
  siRNA target sequence for PIWIL2 (NM_018068.2,786-804).
ggactgaacctcgtcaaaa

SEQ ID NO: 366061 - DNA, 19 bp, Homo sapiens
  siRNA target sequence for PIWIL2 (NM_018068.2,787-805).
gactgaacctcgtcaaaat

SEQ ID NO: 366062 - DNA, 19 bp, Homo sapiens
  siRNA target sequence for PIWIL2 (NM_018068.2,811-829).
gtcataatgaagcagttta

SEQ ID NO: 366063 - DNA, 19 bp, Homo sapiens
  siRNA target sequence for PIWIL2 (NM_018068.2,925-943).
cgtttgatggatctattct

SEQ ID NO: 366064 - DNA, 19 bp, Homo sapiens
  siRNA target sequence for PIWIL2 (NM_018068.2,1059-1077).
ctgtgcattcccttctaca

SEQ ID NO: 366065 - DNA, 19 bp, Homo sapiens
  siRNA target sequence for PIWIL2 (NM_018068.2,1083-1101).
gttttccgtcgggtaatga

SEQ ID NO: 366066 - DNA, 19 bp, Homo sapiens
  siRNA target sequence for PIWIL2 (NM_018068.2,1088-1106).
ccgtcgggtaatgaaactt

SEQ ID NO: 366067 - DNA, 19 bp, Homo sapiens
  siRNA target sequence for PIWIL2 (NM_018068.2,1094-1112).
ggtaatgaaacttttagat

SEQ ID NO: 366068 - DNA, 19 bp, Homo sapiens
  siRNA target sequence for PIWIL2 (NM_018068.2,1119-1137).
cttgtggggagaaactttt

SEQ ID NO: 366069 - DNA, 19 bp, Homo sapiens
  siRNA target sequence for PIWIL2 (NM_018068.2,1142-1160).
ccctacaagtgctatggta

SEQ ID NO: 366070 - DNA, 19 bp, Homo sapiens
  siRNA target sequence for PIWIL2 (NM_018068.2,1147-1165).
caagtgctatggtactaca

SEQ ID NO: 366071 - DNA, 19 bp, Homo sapiens
  siRNA target sequence for PIWIL2 (NM_018068.2,1325-1343).
ggatgagtgtactaagctt

SEQ ID NO: 366072 - DNA, 19 bp, Homo sapiens
  siRNA target sequence for PIWIL2 (NM_018068.2,1344-1362).
ctggttggcaatattgtta

SEQ ID NO: 366073 - DNA, 19 bp, Homo sapiens
  siRNA target sequence for PIWIL2 (NM_018068.2,1347-1365).
gttggcaatattgttatca

SEQ ID NO: 366074 - DNA, 19 bp, Homo sapiens
  siRNA target sequence for PIWIL2 (NM_018068.2,1359-1377).
gttatcacccgatataaca

SEQ ID NO: 366075 - DNA, 19 bp, Homo sapiens
  siRNA target sequence for PIWIL2 (NM_018068.2,1376-1394).
caatcgtacctatcgtatt

SEQ ID NO: 366076 - DNA, 19 bp, Homo sapiens
  siRNA target sequence for PIWIL2 (NM_018068.2,1381-1399).
gtacctatcgtattgatga

SEQ ID NO: 366077 - DNA, 19 bp, Homo sapiens
  siRNA target sequence for PIWIL2 (NM_018068.2,1384-1402).
cctatcgtattgatgatgt

SEQ ID NO: 366078 - DNA, 19 bp, Homo sapiens
  siRNA target sequence for PIWIL2 (NM_018068.2,1535-1553).
cagtgagagacaggataat

SEQ ID NO: 366079 - DNA, 19 bp, Homo sapiens
  siRNA target sequence for PIWIL2 (NM_018068.2,1609-1627).
ccggaatcccagagaagat

SEQ ID NO: 366080 - DNA, 19 bp, Homo sapiens
  siRNA target sequence for PIWIL2 (NM_018068.2,1689-1707).
caccatagtgctttggaat

SEQ ID NO: 366081 - DNA, 19 bp, Homo sapiens
  siRNA target sequence for PIWIL2 (NM_018068.2,1762-1780).
gggggctccgtctgcaaaa

SEQ ID NO: 366082 - DNA, 19 bp, Homo sapiens
  siRNA target sequence for PIWIL2 (NM_018068.2,1765-1783).
ggctccgtctgcaaaagga

SEQ ID NO: 366083 - DNA, 19 bp, Homo sapiens
  siRNA target sequence for PIWIL2 (NM_018068.2,1766-1784).
gctccgtctgcaaaaggat

SEQ ID NO: 366084 - DNA, 19 bp, Homo sapiens
  siRNA target sequence for PIWIL2 (NM_018068.2,1803-1821).
cgtgttctgccaatggaaa

SEQ ID NO: 366085 - DNA, 19 bp, Homo sapiens
  siRNA target sequence for PIWIL2 (NM_018068.2,1806-1824).
gttctgccaatggaaagaa

SEQ ID NO: 366086 - DNA, 19 bp, Homo sapiens
  siRNA target sequence for PIWIL2 (NM_018068.2,1809-1827).
ctgccaatggaaagaatta

SEQ ID NO: 366087 - DNA, 19 bp, Homo sapiens
  siRNA target sequence for PIWIL2 (NM_018068.2,1813-1831).
caatggaaagaattaactt

SEQ ID NO: 366088 - DNA, 19 bp, Homo sapiens
  siRNA target sequence for PIWIL2 (NM_018068.2,1890-1908).
gacccttccatcttgacta

SEQ ID NO: 366089 - DNA, 19 bp, Homo sapiens
  siRNA target sequence for PIWIL2 (NM_018068.2,1960-1978).
ctcgagaactggtcaacat

SEQ ID NO: 366090 - DNA, 19 bp, Homo sapiens
  siRNA target sequence for PIWIL2 (NM_018068.2,2020-2038).
caccggcctgggttgaact

SEQ ID NO: 366091 - DNA, 19 bp, Homo sapiens
  siRNA target sequence for PIWIL2 (NM_018068.2,2022-2040).
ccggcctgggttgaactaa

SEQ ID NO: 366092 - DNA, 19 bp, Homo sapiens
  siRNA target sequence for PIWIL2 (NM_018068.2,2023-2041).
cggcctgggttgaactaaa

SEQ ID NO: 366093 - DNA, 19 bp, Homo sapiens
  siRNA target sequence for PIWIL2 (NM_018068.2,2057-2075).
gacttatgtcagaaccatt

SEQ ID NO: 366094 - DNA, 19 bp, Homo sapiens
  siRNA target sequence for PIWIL2 (NM_018068.2,2089-2107).
gagctgaggggaagataca

SEQ ID NO: 366095 - DNA, 19 bp, Homo sapiens
  siRNA target sequence for PIWIL2 (NM_018068.2,2126-2144).
catgggcccacgtgatgat

SEQ ID NO: 366096 - DNA, 19 bp, Homo sapiens
  siRNA target sequence for PIWIL2 (NM_018068.2,2131-2149).
gcccacgtgatgatctcta

SEQ ID NO: 366097 - DNA, 19 bp, Homo sapiens
  siRNA target sequence for PIWIL2 (NM_018068.2,2132-2150).
cccacgtgatgatctctat

SEQ ID NO: 366098 - DNA, 19 bp, Homo sapiens
  siRNA target sequence for PIWIL2 (NM_018068.2,2189-2207).
gccctcccaggttgtcaat

SEQ ID NO: 366099 - DNA, 19 bp, Homo sapiens
  siRNA target sequence for PIWIL2 (NM_018068.2,2191-2209).
cctcccaggttgtcaatgt

SEQ ID NO: 366100 - DNA, 19 bp, Homo sapiens
  siRNA target sequence for PIWIL2 (NM_018068.2,2192-2210).
ctcccaggttgtcaatgtt

SEQ ID NO: 366101 - DNA, 19 bp, Homo sapiens
  siRNA target sequence for PIWIL2 (NM_018068.2,2239-2257).
ggagtgtggcccagaagat

SEQ ID NO: 366102 - DNA, 19 bp, Homo sapiens
  siRNA target sequence for PIWIL2 (NM_018068.2,2304-2322).
gatattcctctgaaacagt

SEQ ID NO: 366103 - DNA, 19 bp, Homo sapiens
  siRNA target sequence for PIWIL2 (NM_018068.2,2333-2351).
cgggatggatgtttaccat

SEQ ID NO: 366104 - DNA, 19 bp, Homo sapiens
  siRNA target sequence for PIWIL2 (NM_018068.2,2384-2402).
cttcgtggcaagcatcaat

SEQ ID NO: 366105 - DNA, 19 bp, Homo sapiens
  siRNA target sequence for PIWIL2 (NM_018068.2,2405-2423).
caccctcacaaaatggtat

SEQ ID NO: 366106 - DNA, 19 bp, Homo sapiens
  siRNA target sequence for PIWIL2 (NM_018068.2,2479-2497).
gcctcgtgggctccttaaa

SEQ ID NO: 366107 - DNA, 19 bp, Homo sapiens
  siRNA target sequence for PIWIL2 (NM_018068.2,2521-2539).
gtctaccagagaagattgt

SEQ ID NO: 366108 - DNA, 19 bp, Homo sapiens
  siRNA target sequence for PIWIL2 (NM_018068.2,2588-2606).
ctatgagattcctcaacta

SEQ ID NO: 366109 - DNA, 19 bp, Homo sapiens
  siRNA target sequence for PIWIL2 (NM_018068.2,2598-2616).
cctcaactacagaagtgtt

SEQ ID NO: 366110 - DNA, 19 bp, Homo sapiens
  siRNA target sequence for PIWIL2 (NM_018068.2,2599-2617).
ctcaactacagaagtgttt

SEQ ID NO: 366111 - DNA, 19 bp, Homo sapiens
  siRNA target sequence for PIWIL2 (NM_018068.2,2697-2715).
gctcctcagaactttgtaa

SEQ ID NO: 366112 - DNA, 19 bp, Homo sapiens
  siRNA target sequence for PIWIL2 (NM_018068.2,2731-2749).
ctgtggtagatcatacaat

SEQ ID NO: 366113 - DNA, 19 bp, Homo sapiens
  siRNA target sequence for PIWIL2 (NM_018068.2,2733-2751).
gtggtagatcatacaataa

SEQ ID NO: 366114 - DNA, 19 bp, Homo sapiens
  siRNA target sequence for PIWIL2 (NM_018068.2,2735-2753).
ggtagatcatacaataaca

SEQ ID NO: 366115 - DNA, 19 bp, Homo sapiens
  siRNA target sequence for PIWIL2 (NM_018068.2,2736-2754).
gtagatcatacaataacaa

SEQ ID NO: 366116 - DNA, 19 bp, Homo sapiens
  siRNA target sequence for PIWIL2 (NM_018068.2,2758-2776).
gtgagtgggtggatttcta

SEQ ID NO: 366117 - DNA, 19 bp, Homo sapiens
  siRNA target sequence for PIWIL2 (NM_018068.2,2809-2827).
gcattcctacgcattatgt

SEQ ID NO: 366118 - DNA, 19 bp, Homo sapiens
  siRNA target sequence for PIWIL2 (NM_018068.2,2971-2989).
gacacatcttgcatcatga

SEQ ID NO: 366119 - DNA, 19 bp, Homo sapiens
  siRNA target sequence for FLJ10359 (NM_018072.3,269-287).
gttcaacgtggagttgata

SEQ ID NO: 366120 - DNA, 19 bp, Homo sapiens
  siRNA target sequence for FLJ10359 (NM_018072.3,272-290).
caacgtggagttgatagtt

SEQ ID NO: 366121 - DNA, 19 bp, Homo sapiens
  siRNA target sequence for FLJ10359 (NM_018072.3,349-367).
gcactgttgctggaatatt

SEQ ID NO: 366122 - DNA, 19 bp, Homo sapiens
  siRNA target sequence for FLJ10359 (NM_018072.3,369-387).
ccggataaagttttacaca

SEQ ID NO: 366123 - DNA, 19 bp, Homo sapiens
  siRNA target sequence for FLJ10359 (NM_018072.3,423-441).
gtcatgcgcctagatgata

SEQ ID NO: 366124 - DNA, 19 bp, Homo sapiens
  siRNA target sequence for FLJ10359 (NM_018072.3,425-443).
catgcgcctagatgatact

SEQ ID NO: 366125 - DNA, 19 bp, Homo sapiens
  siRNA target sequence for FLJ10359 (NM_018072.3,429-447).
cgcctagatgatacttaca

SEQ ID NO: 366126 - DNA, 19 bp, Homo sapiens
  siRNA target sequence for FLJ10359 (NM_018072.3,432-450).
ctagatgatacttacagtt

SEQ ID NO: 366127 - DNA, 19 bp, Homo sapiens
  siRNA target sequence for FLJ10359 (NM_018072.3,479-497).
ggttattcccgcacttatt

SEQ ID NO: 366128 - DNA, 19 bp, Homo sapiens
  siRNA target sequence for FLJ10359 (NM_018072.3,489-507).
gcacttattcagtctgata

SEQ ID NO: 366129 - DNA, 19 bp, Homo sapiens
  siRNA target sequence for FLJ10359 (NM_018072.3,508-526).
gtggagattctatagaagt

SEQ ID NO: 366130 - DNA, 19 bp, Homo sapiens
  siRNA target sequence for FLJ10359 (NM_018072.3,510-528).
ggagattctatagaagttt

SEQ ID NO: 366131 - DNA, 19 bp, Homo sapiens
  siRNA target sequence for FLJ10359 (NM_018072.3,513-531).
gattctatagaagtttcaa

SEQ ID NO: 366132 - DNA, 19 bp, Homo sapiens
  siRNA target sequence for FLJ10359 (NM_018072.3,529-547).
caagaaacgttgaagagat

SEQ ID NO: 366133 - DNA, 19 bp, Homo sapiens
  siRNA target sequence for FLJ10359 (NM_018072.3,545-563).
gattgtggtaaaaatcatt

SEQ ID NO: 366134 - DNA, 19 bp, Homo sapiens
  siRNA target sequence for FLJ10359 (NM_018072.3,551-569).
ggtaaaaatcattagtgta

SEQ ID NO: 366135 - DNA, 19 bp, Homo sapiens
  siRNA target sequence for FLJ10359 (NM_018072.3,613-631).
ccatccttgttcaacttgt

SEQ ID NO: 366136 - DNA, 19 bp, Homo sapiens
  siRNA target sequence for FLJ10359 (NM_018072.3,614-632).
catccttgttcaacttgtt

SEQ ID NO: 366137 - DNA, 19 bp, Homo sapiens
  siRNA target sequence for FLJ10359 (NM_018072.3,715-733).
ctgcctatggcgaaaagga

SEQ ID NO: 366138 - DNA, 19 bp, Homo sapiens
  siRNA target sequence for FLJ10359 (NM_018072.3,723-741).
ggcgaaaaggatgctattt

SEQ ID NO: 366139 - DNA, 19 bp, Homo sapiens
  siRNA target sequence for FLJ10359 (NM_018072.3,724-742).
gcgaaaaggatgctatttt

SEQ ID NO: 366140 - DNA, 19 bp, Homo sapiens
  siRNA target sequence for FLJ10359 (NM_018072.3,725-743).
cgaaaaggatgctatttta

SEQ ID NO: 366141 - DNA, 19 bp, Homo sapiens
  siRNA target sequence for FLJ10359 (NM_018072.3,787-805).
gtgtccagcatcagataca

SEQ ID NO: 366142 - DNA, 19 bp, Homo sapiens
  siRNA target sequence for FLJ10359 (NM_018072.3,789-807).
gtccagcatcagatacaaa

SEQ ID NO: 366143 - DNA, 19 bp, Homo sapiens
  siRNA target sequence for FLJ10359 (NM_018072.3,800-818).
gatacaaagcttgatgaat

SEQ ID NO: 366144 - DNA, 19 bp, Homo sapiens
  siRNA target sequence for FLJ10359 (NM_018072.3,867-885).
cccaaagcagtgtcattta

SEQ ID NO: 366145 - DNA, 19 bp, Homo sapiens
  siRNA target sequence for FLJ10359 (NM_018072.3,869-887).
caaagcagtgtcatttaat

SEQ ID NO: 366146 - DNA, 19 bp, Homo sapiens
  siRNA target sequence for FLJ10359 (NM_018072.3,947-965).
gcaactgcggcattttaaa

SEQ ID NO: 366147 - DNA, 19 bp, Homo sapiens
  siRNA target sequence for FLJ10359 (NM_018072.3,948-966).
caactgcggcattttaaat

SEQ ID NO: 366148 - DNA, 19 bp, Homo sapiens
  siRNA target sequence for FLJ10359 (NM_018072.3,1033-1051).
gtggtggtcctgagatttt

SEQ ID NO: 366149 - DNA, 19 bp, Homo sapiens
  siRNA target sequence for FLJ10359 (NM_018072.3,1035-1053).
ggtggtcctgagattttaa

SEQ ID NO: 366150 - DNA, 19 bp, Homo sapiens
  siRNA target sequence for FLJ10359 (NM_018072.3,1082-1100).
cgttctcggctatatcagt

SEQ ID NO: 366151 - DNA, 19 bp, Homo sapiens
  siRNA target sequence for FLJ10359 (NM_018072.3,1104-1122).
gttgcacagtccatggaaa

SEQ ID NO: 366152 - DNA, 19 bp, Homo sapiens
  siRNA target sequence for FLJ10359 (NM_018072.3,1158-1176).
gcgctccttagtaaagctt

SEQ ID NO: 366153 - DNA, 19 bp, Homo sapiens
  siRNA target sequence for FLJ10359 (NM_018072.3,1159-1177).
cgctccttagtaaagctta

SEQ ID NO: 366154 - DNA, 19 bp, Homo sapiens
  siRNA target sequence for FLJ10359 (NM_018072.3,1173-1191).
gcttacgacctgttagata

SEQ ID NO: 366155 - DNA, 19 bp, Homo sapiens
  siRNA target sequence for FLJ10359 (NM_018072.3,1174-1192).
cttacgacctgttagataa

SEQ ID NO: 366156 - DNA, 19 bp, Homo sapiens
  siRNA target sequence for FLJ10359 (NM_018072.3,1206-1224).
ctgcccacagagacattca

SEQ ID NO: 366157 - DNA, 19 bp, Homo sapiens
  siRNA target sequence for FLJ10359 (NM_018072.3,1250-1268).
caatcccctgccatctgtt

SEQ ID NO: 366158 - DNA, 19 bp, Homo sapiens
  siRNA target sequence for FLJ10359 (NM_018072.3,1278-1296).
gcgctggaccttttgaata

SEQ ID NO: 366159 - DNA, 19 bp, Homo sapiens
  siRNA target sequence for FLJ10359 (NM_018072.3,1279-1297).
cgctggaccttttgaataa

SEQ ID NO: 366160 - DNA, 19 bp, Homo sapiens
  siRNA target sequence for FLJ10359 (NM_018072.3,1281-1299).
ctggaccttttgaataaca

SEQ ID NO: 366161 - DNA, 19 bp, Homo sapiens
  siRNA target sequence for FLJ10359 (NM_018072.3,1372-1390).
ccattgtgcagcgtaagaa

SEQ ID NO: 366162 - DNA, 19 bp, Homo sapiens
  siRNA target sequence for FLJ10359 (NM_018072.3,1373-1391).
cattgtgcagcgtaagaaa

SEQ ID NO: 366163 - DNA, 19 bp, Homo sapiens
  siRNA target sequence for FLJ10359 (NM_018072.3,1404-1422).
gaagaacaagcaatcaaca

SEQ ID NO: 366164 - DNA, 19 bp, Homo sapiens
  siRNA target sequence for FLJ10359 (NM_018072.3,1635-1653).
ccatcgttgctgacaacaa

SEQ ID NO: 366165 - DNA, 19 bp, Homo sapiens
  siRNA target sequence for FLJ10359 (NM_018072.3,1636-1654).
catcgttgctgacaacaat

SEQ ID NO: 366166 - DNA, 19 bp, Homo sapiens
  siRNA target sequence for FLJ10359 (NM_018072.3,1779-1797).
gtgattcatctggagaaaa

SEQ ID NO: 366167 - DNA, 19 bp, Homo sapiens
  siRNA target sequence for FLJ10359 (NM_018072.3,1835-1853).
ccgtctcacatctcttaaa

SEQ ID NO: 366168 - DNA, 19 bp, Homo sapiens
  siRNA target sequence for FLJ10359 (NM_018072.3,1941-1959).
cacatgggtccgtttatga

SEQ ID NO: 366169 - DNA, 19 bp, Homo sapiens
  siRNA target sequence for FLJ10359 (NM_018072.3,1960-1978).
gcatcttgcaagagcatat

SEQ ID NO: 366170 - DNA, 19 bp, Homo sapiens
  siRNA target sequence for FLJ10359 (NM_018072.3,1961-1979).
catcttgcaagagcatatt

SEQ ID NO: 366171 - DNA, 19 bp, Homo sapiens
  siRNA target sequence for FLJ10359 (NM_018072.3,2017-2035).
ctcagctaaccgccttttt

SEQ ID NO: 366172 - DNA, 19 bp, Homo sapiens
  siRNA target sequence for FLJ10359 (NM_018072.3,2088-2106).
gttggaaaaacggaaaatt

SEQ ID NO: 366173 - DNA, 19 bp, Homo sapiens
  siRNA target sequence for FLJ10359 (NM_018072.3,2098-2116).
cggaaaattgtatcattga

SEQ ID NO: 366174 - DNA, 19 bp, Homo sapiens
  siRNA target sequence for FLJ10359 (NM_018072.3,2127-2145).
gccatggttgtcaaacttt

SEQ ID NO: 366175 - DNA, 19 bp, Homo sapiens
  siRNA target sequence for FLJ10359 (NM_018072.3,2178-2196).
ctgtttgattgggctaaaa

SEQ ID NO: 366176 - DNA, 19 bp, Homo sapiens
  siRNA target sequence for FLJ10359 (NM_018072.3,2180-2198).
gtttgattgggctaaaaca

SEQ ID NO: 366177 - DNA, 19 bp, Homo sapiens
  siRNA target sequence for FLJ10359 (NM_018072.3,2390-2408).
cttgctgttgcagtttatt

SEQ ID NO: 366178 - DNA, 19 bp, Homo sapiens
  siRNA target sequence for FLJ10359 (NM_018072.3,2650-2668).
cctcgcctaaggttcgatt

SEQ ID NO: 366179 - DNA, 19 bp, Homo sapiens
  siRNA target sequence for FLJ10359 (NM_018072.3,2651-2669).
ctcgcctaaggttcgattt

SEQ ID NO: 366180 - DNA, 19 bp, Homo sapiens
  siRNA target sequence for FLJ10359 (NM_018072.3,2664-2682).
cgatttgctgctttgatta

SEQ ID NO: 366181 - DNA, 19 bp, Homo sapiens
  siRNA target sequence for FLJ10359 (NM_018072.3,2838-2856).
ccactccagagctatttct

SEQ ID NO: 366182 - DNA, 19 bp, Homo sapiens
  siRNA target sequence for FLJ10374 (NM_018074.3,81-99).
gtcggagcgaaaagtatta

SEQ ID NO: 366183 - DNA, 19 bp, Homo sapiens
  siRNA target sequence for FLJ10374 (NM_018074.3,83-101).
cggagcgaaaagtattaaa

SEQ ID NO: 366184 - DNA, 19 bp, Homo sapiens
  siRNA target sequence for FLJ10374 (NM_018074.3,85-103).
gagcgaaaagtattaaaca

SEQ ID NO: 366185 - DNA, 19 bp, Homo sapiens
  siRNA target sequence for FLJ10374 (NM_018074.3,87-105).
gcgaaaagtattaaacaaa

SEQ ID NO: 366186 - DNA, 19 bp, Homo sapiens
  siRNA target sequence for FLJ10374 (NM_018074.3,116-134).
cggactttgacccatcaaa

SEQ ID NO: 366187 - DNA, 19 bp, Homo sapiens
  siRNA target sequence for FLJ10374 (NM_018074.3,206-224).
gtaagacgtgcggagaata

SEQ ID NO: 366188 - DNA, 19 bp, Homo sapiens
  siRNA target sequence for FLJ10374 (NM_018074.3,212-230).
cgtgcggagaatacatcta

SEQ ID NO: 366189 - DNA, 19 bp, Homo sapiens
  siRNA target sequence for FLJ10374 (NM_018074.3,215-233).
gcggagaatacatctacaa

SEQ ID NO: 366190 - DNA, 19 bp, Homo sapiens
  siRNA target sequence for FLJ10374 (NM_018074.3,231-249).
caaggggaagaaattcaat

SEQ ID NO: 366191 - DNA, 19 bp, Homo sapiens
  siRNA target sequence for FLJ10374 (NM_018074.3,386-404).
gagccacgcggaatttcca

SEQ ID NO: 366192 - DNA, 19 bp, Homo sapiens
  siRNA target sequence for FLJ10374 (NM_018074.3,863-881).
ggctggtcgtggtgaagaa

SEQ ID NO: 366193 - DNA, 19 bp, Homo sapiens
  siRNA target sequence for FLJ10375 (NM_018075.2,319-337).
gaagcagtgggattggtaa

SEQ ID NO: 366194 - DNA, 19 bp, Homo sapiens
  siRNA target sequence for FLJ10375 (NM_018075.2,325-343).
gtgggattggtaaaagagt

SEQ ID NO: 366195 - DNA, 19 bp, Homo sapiens
  siRNA target sequence for FLJ10375 (NM_018075.2,356-374).
ccatgagagccttcacata

SEQ ID NO: 366196 - DNA, 19 bp, Homo sapiens
  siRNA target sequence for FLJ10375 (NM_018075.2,360-378).
gagagccttcacatacaga

SEQ ID NO: 366197 - DNA, 19 bp, Homo sapiens
  siRNA target sequence for FLJ10375 (NM_018075.2,433-451).
gcagaatgtcaattcatta

SEQ ID NO: 366198 - DNA, 19 bp, Homo sapiens
  siRNA target sequence for FLJ10375 (NM_018075.2,557-575).
cgtctggcatcgtgattca

SEQ ID NO: 366199 - DNA, 19 bp, Homo sapiens
  siRNA target sequence for FLJ10375 (NM_018075.2,626-644).
ggtacactcggtttgcttt

SEQ ID NO: 366200 - DNA, 19 bp, Homo sapiens
  siRNA target sequence for FLJ10375 (NM_018075.2,648-666).
gtatcagcccatagagaat

SEQ ID NO: 366201 - DNA, 19 bp, Homo sapiens
  siRNA target sequence for FLJ10375 (NM_018075.2,682-700).
gcctatcagaaccatctaa

SEQ ID NO: 366202 - DNA, 19 bp, Homo sapiens
  siRNA target sequence for FLJ10375 (NM_018075.2,757-775).
gcctttgtcttgaaagata

SEQ ID NO: 366203 - DNA, 19 bp, Homo sapiens
  siRNA target sequence for FLJ10375 (NM_018075.2,799-817).
gccactctcctaattacct

SEQ ID NO: 366204 - DNA, 19 bp, Homo sapiens
  siRNA target sequence for FLJ10375 (NM_018075.2,819-837).
ccagatcctcaaccaaatt

SEQ ID NO: 366205 - DNA, 19 bp, Homo sapiens
  siRNA target sequence for FLJ10375 (NM_018075.2,854-872).
cttattggctccaaaggaa

SEQ ID NO: 366206 - DNA, 19 bp, Homo sapiens
  siRNA target sequence for FLJ10375 (NM_018075.2,893-911).
ggaaggtgcaggctttaaa

SEQ ID NO: 366207 - DNA, 19 bp, Homo sapiens
  siRNA target sequence for FLJ10375 (NM_018075.2,914-932).
cagacattgatgctacatt

SEQ ID NO: 366208 - DNA, 19 bp, Homo sapiens
  siRNA target sequence for FLJ10375 (NM_018075.2,916-934).
gacattgatgctacattat

SEQ ID NO: 366209 - DNA, 19 bp, Homo sapiens
  siRNA target sequence for FLJ10375 (NM_018075.2,976-994).
ggcacctttgatgattact

SEQ ID NO: 366210 - DNA, 19 bp, Homo sapiens
  siRNA target sequence for FLJ10375 (NM_018075.2,985-1003).
gatgattacttggagttat

SEQ ID NO: 366211 - DNA, 19 bp, Homo sapiens
  siRNA target sequence for FLJ10375 (NM_018075.2,1054-1072).
gctgcctttgctgtgttaa

SEQ ID NO: 366212 - DNA, 19 bp, Homo sapiens
  siRNA target sequence for FLJ10375 (NM_018075.2,1057-1075).
gcctttgctgtgttaaata

SEQ ID NO: 366213 - DNA, 19 bp, Homo sapiens
  siRNA target sequence for FLJ10375 (NM_018075.2,1058-1076).
cctttgctgtgttaaataa

SEQ ID NO: 366214 - DNA, 19 bp, Homo sapiens
  siRNA target sequence for FLJ10375 (NM_018075.2,1119-1137).
cttcaaacgtccattctca

SEQ ID NO: 366215 - DNA, 19 bp, Homo sapiens
  siRNA target sequence for FLJ10375 (NM_018075.2,1136-1154).
cagaaccttcagccaatat

SEQ ID NO: 366216 - DNA, 19 bp, Homo sapiens
  siRNA target sequence for FLJ10375 (NM_018075.2,1223-1241).
gaatgtcaccacaagtgaa

SEQ ID NO: 366217 - DNA, 19 bp, Homo sapiens
  siRNA target sequence for FLJ10375 (NM_018075.2,1349-1367).
cacggcatatccagatgaa

SEQ ID NO: 366218 - DNA, 19 bp, Homo sapiens
  siRNA target sequence for FLJ10375 (NM_018075.2,1352-1370).
ggcatatccagatgaaact

SEQ ID NO: 366219 - DNA, 19 bp, Homo sapiens
  siRNA target sequence for FLJ10375 (NM_018075.2,1353-1371).
gcatatccagatgaaacta

SEQ ID NO: 366220 - DNA, 19 bp, Homo sapiens
  siRNA target sequence for FLJ10817 (NM_018076.2,408-426).
gcagctgtcacgcttgtta

SEQ ID NO: 366221 - DNA, 19 bp, Homo sapiens
  siRNA target sequence for FLJ10817 (NM_018076.2,411-429).
gctgtcacgcttgttactt

SEQ ID NO: 366222 - DNA, 19 bp, Homo sapiens
  siRNA target sequence for FLJ10817 (NM_018076.2,412-430).
ctgtcacgcttgttactta

SEQ ID NO: 366223 - DNA, 19 bp, Homo sapiens
  siRNA target sequence for FLJ10817 (NM_018076.2,414-432).
gtcacgcttgttacttatt

SEQ ID NO: 366224 - DNA, 19 bp, Homo sapiens
  siRNA target sequence for FLJ10817 (NM_018076.2,423-441).
gttacttattgccaaaact

SEQ ID NO: 366225 - DNA, 19 bp, Homo sapiens
  siRNA target sequence for FLJ10817 (NM_018076.2,480-498).
cagagaccccatagtaaaa

SEQ ID NO: 366226 - DNA, 19 bp, Homo sapiens
  siRNA target sequence for FLJ10817 (NM_018076.2,504-522).
gggctctgattataataca

SEQ ID NO: 366227 - DNA, 19 bp, Homo sapiens
  siRNA target sequence for FLJ10817 (NM_018076.2,506-524).
gctctgattataatacaat

SEQ ID NO: 366228 - DNA, 19 bp, Homo sapiens
  siRNA target sequence for FLJ10817 (NM_018076.2,607-625).
gctatgctgcttaagcaat

SEQ ID NO: 366229 - DNA, 19 bp, Homo sapiens
  siRNA target sequence for FLJ10817 (NM_018076.2,633-651).
gcacctcctcaatcattct

SEQ ID NO: 366230 - DNA, 19 bp, Homo sapiens
  siRNA target sequence for FLJ10817 (NM_018076.2,636-654).
cctcctcaatcattctcta

SEQ ID NO: 366231 - DNA, 19 bp, Homo sapiens
  siRNA target sequence for FLJ10817 (NM_018076.2,683-701).
gtcccatgacggtgaagaa

SEQ ID NO: 366232 - DNA, 19 bp, Homo sapiens
  siRNA target sequence for FLJ10817 (NM_018076.2,742-760).
caaacagtcttggaatcta

SEQ ID NO: 366233 - DNA, 19 bp, Homo sapiens
  siRNA target sequence for FLJ10817 (NM_018076.2,748-766).
gtcttggaatctattgaat

SEQ ID NO: 366234 - DNA, 19 bp, Homo sapiens
  siRNA target sequence for FLJ10817 (NM_018076.2,803-821).
ccccaccgtggagacaaat

SEQ ID NO: 366235 - DNA, 19 bp, Homo sapiens
  siRNA target sequence for FLJ10817 (NM_018076.2,804-822).
cccaccgtggagacaaatt

SEQ ID NO: 366236 - DNA, 19 bp, Homo sapiens
  siRNA target sequence for FLJ10817 (NM_018076.2,884-902).
gcagtgcaggaggagtatt

SEQ ID NO: 366237 - DNA, 19 bp, Homo sapiens
  siRNA target sequence for FLJ10817 (NM_018076.2,887-905).
gtgcaggaggagtattttt

SEQ ID NO: 366238 - DNA, 19 bp, Homo sapiens
  siRNA target sequence for FLJ10817 (NM_018076.2,889-907).
gcaggaggagtatttttaa

SEQ ID NO: 366239 - DNA, 19 bp, Homo sapiens
  siRNA target sequence for FLJ10817 (NM_018076.2,925-943).
gatgaaggggacgttaatt

SEQ ID NO: 366240 - DNA, 19 bp, Homo sapiens
  siRNA target sequence for FLJ10817 (NM_018076.2,950-968).
gaaaaggttcaatttataa

SEQ ID NO: 366241 - DNA, 19 bp, Homo sapiens
  siRNA target sequence for FLJ10817 (NM_018076.2,1022-1040).
ctaaattgggaattagctt

SEQ ID NO: 366242 - DNA, 19 bp, Homo sapiens
  siRNA target sequence for FLJ10817 (NM_018076.2,1501-1519).
gtgattgcgttgtgttcaa

SEQ ID NO: 366243 - DNA, 19 bp, Homo sapiens
  siRNA target sequence for FLJ10817 (NM_018076.2,1554-1572).
gttggccatcagagatgtt

SEQ ID NO: 366244 - DNA, 19 bp, Homo sapiens
  siRNA target sequence for FLJ10817 (NM_018076.2,1577-1595).
gcctggaagtgctgataaa

SEQ ID NO: 366245 - DNA, 19 bp, Homo sapiens
  siRNA target sequence for FLJ10817 (NM_018076.2,1578-1596).
cctggaagtgctgataaat

SEQ ID NO: 366246 - DNA, 19 bp, Homo sapiens
  siRNA target sequence for FLJ10817 (NM_018076.2,1579-1597).
ctggaagtgctgataaatt

SEQ ID NO: 366247 - DNA, 19 bp, Homo sapiens
  siRNA target sequence for FLJ10817 (NM_018076.2,1603-1621).
gaaaccgatgaagtcaaat

SEQ ID NO: 366248 - DNA, 19 bp, Homo sapiens
  siRNA target sequence for FLJ10817 (NM_018076.2,1609-1627).
gatgaagtcaaatgtaaga

SEQ ID NO: 366249 - DNA, 19 bp, Homo sapiens
  siRNA target sequence for FLJ10817 (NM_018076.2,1630-1648).
ggttcattaaaaatactga

SEQ ID NO: 366250 - DNA, 19 bp, Homo sapiens
  siRNA target sequence for FLJ10817 (NM_018076.2,1650-1668).
ggaaatcagtcataatcct

SEQ ID NO: 366251 - DNA, 19 bp, Homo sapiens
  siRNA target sequence for FLJ10817 (NM_018076.2,1690-1708).
gaccttgggggcttaccaa

SEQ ID NO: 366252 - DNA, 19 bp, Homo sapiens
  siRNA target sequence for FLJ10817 (NM_018076.2,1693-1711).
cttgggggcttaccaatta

SEQ ID NO: 366253 - DNA, 19 bp, Homo sapiens
  siRNA target sequence for FLJ10817 (NM_018076.2,1697-1715).
ggggcttaccaattatggt

SEQ ID NO: 366254 - DNA, 19 bp, Homo sapiens
  siRNA target sequence for FLJ10817 (NM_018076.2,1713-1731).
ggtgaatatacttgattct

SEQ ID NO: 366255 - DNA, 19 bp, Homo sapiens
  siRNA target sequence for FLJ10817 (NM_018076.2,1751-1769).
gtttggcagccgagactat

SEQ ID NO: 366256 - DNA, 19 bp, Homo sapiens
  siRNA target sequence for FLJ10817 (NM_018076.2,1761-1779).
cgagactatcgcgaatgtt

SEQ ID NO: 366257 - DNA, 19 bp, Homo sapiens
  siRNA target sequence for FLJ10817 (NM_018076.2,1770-1788).
cgcgaatgttgccaagttt

SEQ ID NO: 366258 - DNA, 19 bp, Homo sapiens
  siRNA target sequence for FLJ10817 (NM_018076.2,1772-1790).
cgaatgttgccaagtttaa

SEQ ID NO: 366259 - DNA, 19 bp, Homo sapiens
  siRNA target sequence for FLJ10817 (NM_018076.2,1773-1791).
gaatgttgccaagtttaaa

SEQ ID NO: 366260 - DNA, 19 bp, Homo sapiens
  siRNA target sequence for FLJ10817 (NM_018076.2,1877-1895).
cccaatcgagtctgtatga

SEQ ID NO: 366261 - DNA, 19 bp, Homo sapiens
  siRNA target sequence for FLJ10817 (NM_018076.2,1946-1964).
gcagtaagagtcatacgaa

SEQ ID NO: 366262 - DNA, 19 bp, Homo sapiens
  siRNA target sequence for FLJ10817 (NM_018076.2,1947-1965).
cagtaagagtcatacgaat

SEQ ID NO: 366263 - DNA, 19 bp, Homo sapiens
  siRNA target sequence for FLJ10817 (NM_018076.2,1949-1967).
gtaagagtcatacgaataa

SEQ ID NO: 366264 - DNA, 19 bp, Homo sapiens
  siRNA target sequence for FLJ10817 (NM_018076.2,2024-2042).
ctcatgaaaacatgctaat

SEQ ID NO: 366265 - DNA, 19 bp, Homo sapiens
  siRNA target sequence for FLJ10817 (NM_018076.2,2124-2142).
ccttgtcaagaacctaaat

SEQ ID NO: 366266 - DNA, 19 bp, Homo sapiens
  siRNA target sequence for FLJ10817 (NM_018076.2,2125-2143).
cttgtcaagaacctaaata

SEQ ID NO: 366267 - DNA, 19 bp, Homo sapiens
  siRNA target sequence for FLJ10817 (NM_018076.2,2133-2151).
gaacctaaatagtgagaat

SEQ ID NO: 366268 - DNA, 19 bp, Homo sapiens
  siRNA target sequence for FLJ10817 (NM_018076.2,2225-2243).
ggctgcacggaggacttaa

SEQ ID NO: 366269 - DNA, 19 bp, Homo sapiens
  siRNA target sequence for FLJ10817 (NM_018076.2,2246-2264).
ccttggccagtctactcaa

SEQ ID NO: 366270 - DNA, 19 bp, Homo sapiens
  siRNA target sequence for FLJ10817 (NM_018076.2,2251-2269).
gccagtctactcaataaca

SEQ ID NO: 366271 - DNA, 19 bp, Homo sapiens
  siRNA target sequence for FLJ10817 (NM_018076.2,2253-2271).
cagtctactcaataacact

SEQ ID NO: 366272 - DNA, 19 bp, Homo sapiens
  siRNA target sequence for FLJ10817 (NM_018076.2,2296-2314).
gtcacaggggctatatgga

SEQ ID NO: 366273 - DNA, 19 bp, Homo sapiens
  siRNA target sequence for FLJ10817 (NM_018076.2,2302-2320).
ggggctatatggaaatgtt

SEQ ID NO: 366274 - DNA, 19 bp, Homo sapiens
  siRNA target sequence for FLJ10817 (NM_018076.2,2376-2394).
ggtgggacttctaacagat

SEQ ID NO: 366275 - DNA, 19 bp, Homo sapiens
  siRNA target sequence for FLJ10817 (NM_018076.2,2453-2471).
gtgaaaaccgagtcattgt

SEQ ID NO: 366276 - DNA, 19 bp, Homo sapiens
  siRNA target sequence for FLJ10817 (NM_018076.2,2486-2504).
gcattcaaccacttgtgaa

SEQ ID NO: 366277 - DNA, 19 bp, Homo sapiens
  siRNA target sequence for FLJ10817 (NM_018076.2,2502-2520).
gaacctccttgttggaata

SEQ ID NO: 366278 - DNA, 19 bp, Homo sapiens
  siRNA target sequence for FLJ10817 (NM_018076.2,2572-2590).
gaacctgaaagtatgatga

SEQ ID NO: 366279 - DNA, 19 bp, Homo sapiens
  siRNA target sequence for FLJ10817 (NM_018076.2,2589-2607).
gataattgatcgcttagat

SEQ ID NO: 366280 - DNA, 19 bp, Homo sapiens
  siRNA target sequence for FLJ10817 (NM_018076.2,2605-2623).
gatggagttcgtttgttgt

SEQ ID NO: 366281 - DNA, 19 bp, Homo sapiens
  siRNA target sequence for FLJ10817 (NM_018076.2,2625-2643).
gtccctgctgaaaaatcct

SEQ ID NO: 366282 - DNA, 19 bp, Homo sapiens
  siRNA target sequence for FLJ10817 (NM_018076.2,2677-2695).
ctctgtccatgcatcaaaa

SEQ ID NO: 366283 - DNA, 19 bp, Homo sapiens
  siRNA target sequence for FLJ10817 (NM_018076.2,2688-2706).
catcaaaaatgcaaaggat

SEQ ID NO: 366284 - DNA, 19 bp, Homo sapiens
  siRNA target sequence for FLJ10817 (NM_018076.2,2712-2730).
ggaaatggttcgttccttt

SEQ ID NO: 366285 - DNA, 19 bp, Homo sapiens
  siRNA target sequence for FLJ10817 (NM_018076.2,2742-2760).
ggaacttattgtcaattta

SEQ ID NO: 366286 - DNA, 19 bp, Homo sapiens
  siRNA target sequence for FLJ10817 (NM_018076.2,2779-2797).
gaagttctggcaagtgtat

SEQ ID NO: 366287 - DNA, 19 bp, Homo sapiens
  siRNA target sequence for FLJ10817 (NM_018076.2,2811-2829).
caacatagcaaaagatcaa

SEQ ID NO: 366288 - DNA, 19 bp, Homo sapiens
  siRNA target sequence for FLJ10817 (NM_018076.2,2874-2892).
gtccaaactggcaaataca

SEQ ID NO: 366289 - DNA, 19 bp, Homo sapiens
  siRNA target sequence for FLJ10817 (NM_018076.2,2881-2899).
ctggcaaatacaaataaca

SEQ ID NO: 366290 - DNA, 19 bp, Homo sapiens
  siRNA target sequence for FLJ10817 (NM_018076.2,2898-2916).
caataaattgagacatcat

SEQ ID NO: 366291 - DNA, 19 bp, Homo sapiens
  siRNA target sequence for FLJ10817 (NM_018076.2,2990-3008).
ctccactagtgcgttatct

SEQ ID NO: 366292 - DNA, 19 bp, Homo sapiens
  siRNA target sequence for FLJ10817 (NM_018076.2,2992-3010).
ccactagtgcgttatctga

SEQ ID NO: 366293 - DNA, 19 bp, Homo sapiens
  siRNA target sequence for FLJ10817 (NM_018076.2,2993-3011).
cactagtgcgttatctgaa

SEQ ID NO: 366294 - DNA, 19 bp, Homo sapiens
  siRNA target sequence for FLJ10817 (NM_018076.2,2998-3016).
gtgcgttatctgaaatcaa

SEQ ID NO: 366295 - DNA, 19 bp, Homo sapiens
  siRNA target sequence for FLJ10817 (NM_018076.2,3000-3018).
gcgttatctgaaatcaaat

SEQ ID NO: 366296 - DNA, 19 bp, Homo sapiens
  siRNA target sequence for FLJ10817 (NM_018076.2,3083-3101).
gcatcaccatgcatgagaa

SEQ ID NO: 366297 - DNA, 19 bp, Homo sapiens
  siRNA target sequence for FLJ10817 (NM_018076.2,3104-3122).
gtgcagtaaagcttctact

SEQ ID NO: 366298 - DNA, 19 bp, Homo sapiens
  siRNA target sequence for FLJ10817 (NM_018076.2,3114-3132).
gcttctactggatatggtt

SEQ ID NO: 366299 - DNA, 19 bp, Homo sapiens
  siRNA target sequence for FLJ10817 (NM_018076.2,3163-3181).
gcagctggttgtatatcca

SEQ ID NO: 366300 - DNA, 19 bp, Homo sapiens
  siRNA target sequence for FLJ10817 (NM_018076.2,3166-3184).
gctggttgtatatccaata

SEQ ID NO: 366301 - DNA, 19 bp, Homo sapiens
  siRNA target sequence for FLJ10817 (NM_018076.2,3167-3185).
ctggttgtatatccaatat

SEQ ID NO: 366302 - DNA, 19 bp, Homo sapiens
  siRNA target sequence for FLJ10817 (NM_018076.2,3203-3221).
ctacagagaaggcaagata

SEQ ID NO: 366303 - DNA, 19 bp, Homo sapiens
  siRNA target sequence for FLJ10817 (NM_018076.2,3208-3226).
gagaaggcaagatacactt

SEQ ID NO: 366304 - DNA, 19 bp, Homo sapiens
  siRNA target sequence for FLJ10378 (NM_018078.2,143-161).
gccaacaccaagtgaatta

SEQ ID NO: 366305 - DNA, 19 bp, Homo sapiens
  siRNA target sequence for FLJ10378 (NM_018078.2,145-163).
caacaccaagtgaattagt

SEQ ID NO: 366306 - DNA, 19 bp, Homo sapiens
  siRNA target sequence for FLJ10378 (NM_018078.2,272-290).
ccgggaaacaaaattaaat

SEQ ID NO: 366307 - DNA, 19 bp, Homo sapiens
  siRNA target sequence for FLJ10378 (NM_018078.2,315-333).
gatgaggctcagtcaagta

SEQ ID NO: 366308 - DNA, 19 bp, Homo sapiens
  siRNA target sequence for FLJ10378 (NM_018078.2,320-338).
ggctcagtcaagtaatcaa

SEQ ID NO: 366309 - DNA, 19 bp, Homo sapiens
  siRNA target sequence for FLJ10378 (NM_018078.2,364-382).
gggtaccactccacttaga

SEQ ID NO: 366310 - DNA, 19 bp, Homo sapiens
  siRNA target sequence for FLJ10378 (NM_018078.2,365-383).
ggtaccactccacttagat

SEQ ID NO: 366311 - DNA, 19 bp, Homo sapiens
  siRNA target sequence for FLJ10378 (NM_018078.2,372-390).
ctccacttagatgttgtaa

SEQ ID NO: 366312 - DNA, 19 bp, Homo sapiens
  siRNA target sequence for FLJ10378 (NM_018078.2,419-437).
ccggaacagctcaagatgt

SEQ ID NO: 366313 - DNA, 19 bp, Homo sapiens
  siRNA target sequence for FLJ10378 (NM_018078.2,447-465).
gcaaataaaccaacacata

SEQ ID NO: 366314 - DNA, 19 bp, Homo sapiens
  siRNA target sequence for FLJ10378 (NM_018078.2,456-474).
ccaacacataacaatagga

SEQ ID NO: 366315 - DNA, 19 bp, Homo sapiens
  siRNA target sequence for FLJ10378 (NM_018078.2,490-508).
gttggaagcgagatagaga

SEQ ID NO: 366316 - DNA, 19 bp, Homo sapiens
  siRNA target sequence for FLJ10378 (NM_018078.2,544-562).
gaagtgagggtggtaatat

SEQ ID NO: 366317 - DNA, 19 bp, Homo sapiens
  siRNA target sequence for FLJ10378 (NM_018078.2,622-640).
gaaatcctcgattgaactt

SEQ ID NO: 366318 - DNA, 19 bp, Homo sapiens
  siRNA target sequence for FLJ10378 (NM_018078.2,627-645).
cctcgattgaactttgatt

SEQ ID NO: 366319 - DNA, 19 bp, Homo sapiens
  siRNA target sequence for FLJ10378 (NM_018078.2,628-646).
ctcgattgaactttgatta

SEQ ID NO: 366320 - DNA, 19 bp, Homo sapiens
  siRNA target sequence for FLJ10378 (NM_018078.2,635-653).
gaactttgattattcatat

SEQ ID NO: 366321 - DNA, 19 bp, Homo sapiens
  siRNA target sequence for FLJ10378 (NM_018078.2,649-667).
catatggttatcaagaaca

SEQ ID NO: 366322 - DNA, 19 bp, Homo sapiens
  siRNA target sequence for FLJ10378 (NM_018078.2,677-695).
gactgatcaaccatttcaa

SEQ ID NO: 366323 - DNA, 19 bp, Homo sapiens
  siRNA target sequence for FLJ10378 (NM_018078.2,699-717).
gaacttaataccagtatga

SEQ ID NO: 366324 - DNA, 19 bp, Homo sapiens
  siRNA target sequence for FLJ10378 (NM_018078.2,712-730).
gtatgatgtattactatga

SEQ ID NO: 366325 - DNA, 19 bp, Homo sapiens
  siRNA target sequence for FLJ10378 (NM_018078.2,792-810).
cgtcaaattgaatattact

SEQ ID NO: 366326 - DNA, 19 bp, Homo sapiens
  siRNA target sequence for FLJ10378 (NM_018078.2,793-811).
gtcaaattgaatattactt

SEQ ID NO: 366327 - DNA, 19 bp, Homo sapiens
  siRNA target sequence for FLJ10378 (NM_018078.2,827-845).
ggaacgagacttctttctt

SEQ ID NO: 366328 - DNA, 19 bp, Homo sapiens
  siRNA target sequence for FLJ10378 (NM_018078.2,912-930).
gctctcactacaaacctta

SEQ ID NO: 366329 - DNA, 19 bp, Homo sapiens
  siRNA target sequence for FLJ10378 (NM_018078.2,919-937).
ctacaaaccttaatctcat

SEQ ID NO: 366330 - DNA, 19 bp, Homo sapiens
  siRNA target sequence for FLJ10378 (NM_018078.2,1061-1079).
ctctcaactgattgattgt

SEQ ID NO: 366331 - DNA, 19 bp, Homo sapiens
  siRNA target sequence for FLJ10378 (NM_018078.2,1307-1325).
ccctgaagggtcattaaat

SEQ ID NO: 366332 - DNA, 19 bp, Homo sapiens
  siRNA target sequence for FLJ10378 (NM_018078.2,1373-1391).
gtttgatgaagagattgaa

SEQ ID NO: 366333 - DNA, 19 bp, Homo sapiens
  siRNA target sequence for FLJ10378 (NM_018078.2,1398-1416).
ggacgaaaaaacacattta

SEQ ID NO: 366334 - DNA, 19 bp, Homo sapiens
  siRNA target sequence for FLJ10378 (NM_018078.2,1417-1435).
ctgattggtctgataatga

SEQ ID NO: 366335 - DNA, 19 bp, Homo sapiens
  siRNA target sequence for FLJ10378 (NM_018078.2,1458-1476).
caagacttaaacaagattt

SEQ ID NO: 366336 - DNA, 19 bp, Homo sapiens
  siRNA target sequence for FLJ10378 (NM_018078.2,1461-1479).
gacttaaacaagattttga

SEQ ID NO: 366337 - DNA, 19 bp, Homo sapiens
  siRNA target sequence for FLJ10378 (NM_018078.2,1486-1504).
ctcagacaccaccttatgt

SEQ ID NO: 366338 - DNA, 19 bp, Homo sapiens
  siRNA target sequence for FLJ10378 (NM_018078.2,1490-1508).
gacaccaccttatgtgaaa

SEQ ID NO: 366339 - DNA, 19 bp, Homo sapiens
  siRNA target sequence for FLJ10378 (NM_018078.2,1539-1557).
cacatgtctcgggcaaaaa

SEQ ID NO: 366340 - DNA, 19 bp, Homo sapiens
  siRNA target sequence for FLJ10378 (NM_018078.2,1544-1562).
gtctcgggcaaaaatcaca

SEQ ID NO: 366341 - DNA, 19 bp, Homo sapiens
  siRNA target sequence for FLJ10378 (NM_018078.2,1550-1568).
ggcaaaaatcacatctgaa

SEQ ID NO: 366342 - DNA, 19 bp, Homo sapiens
  siRNA target sequence for FLJ10378 (NM_018078.2,1679-1697).
gctaaatctcattagtaaa

SEQ ID NO: 366343 - DNA, 19 bp, Homo sapiens
  siRNA target sequence for FLJ10378 (NM_018078.2,1827-1845).
gaattagctcagaagttat

SEQ ID NO: 366344 - DNA, 19 bp, Homo sapiens
  siRNA target sequence for FLJ10378 (NM_018078.2,1836-1854).
cagaagttatttgatgttt

SEQ ID NO: 366345 - DNA, 19 bp, Homo sapiens
  siRNA target sequence for FLJ10378 (NM_018078.2,1848-1866).
gatgtttcagaaataactt

SEQ ID NO: 366346 - DNA, 19 bp, Homo sapiens
  siRNA target sequence for FLJ10378 (NM_018078.2,1954-1972).
ctaggttacaagatcctaa

SEQ ID NO: 366347 - DNA, 19 bp, Homo sapiens
  siRNA target sequence for FLJ10378 (NM_018078.2,2164-2182).
caccactagcaggaagtta

SEQ ID NO: 366348 - DNA, 19 bp, Homo sapiens
  siRNA target sequence for FLJ10378 (NM_018078.2,2169-2187).
ctagcaggaagttatggat

SEQ ID NO: 366349 - DNA, 19 bp, Homo sapiens
  siRNA target sequence for FLJ10378 (NM_018078.2,2184-2202).
ggatgtactcctcattcat

SEQ ID NO: 366350 - DNA, 19 bp, Homo sapiens
  siRNA target sequence for FLJ10378 (NM_018078.2,2278-2296).
gtcgaagatgcctaagtga

SEQ ID NO: 366351 - DNA, 19 bp, Homo sapiens
  siRNA target sequence for FLJ10378 (NM_018078.2,2284-2302).
gatgcctaagtgagagaaa

SEQ ID NO: 366352 - DNA, 19 bp, Homo sapiens
  siRNA target sequence for FLJ10378 (NM_018078.2,2316-2334).
ggtcagtcccaagaaatga

SEQ ID NO: 366353 - DNA, 19 bp, Homo sapiens
  siRNA target sequence for FLJ10378 (NM_018078.2,2317-2335).
gtcagtcccaagaaatgaa

SEQ ID NO: 366354 - DNA, 19 bp, Homo sapiens
  siRNA target sequence for FLJ10378 (NM_018078.2,2413-2431).
cttgggaagatgcaaaaga

SEQ ID NO: 366355 - DNA, 19 bp, Homo sapiens
  siRNA target sequence for FLJ10378 (NM_018078.2,2438-2456).
caggtatgggttagaatgt

SEQ ID NO: 366356 - DNA, 19 bp, Homo sapiens
  siRNA target sequence for FLJ10378 (NM_018078.2,2612-2630).
gtctattgacccaaaactt

SEQ ID NO: 366357 - DNA, 19 bp, Homo sapiens
  siRNA target sequence for FLJ10378 (NM_018078.2,2614-2632).
ctattgacccaaaacttca

SEQ ID NO: 366358 - DNA, 19 bp, Homo sapiens
  siRNA target sequence for FLJ10378 (NM_018078.2,2634-2652).
gaatacctctgtagtttta

SEQ ID NO: 366359 - DNA, 19 bp, Homo sapiens
  siRNA target sequence for FLJ10378 (NM_018078.2,2670-2688).
cgtgttgatccccctatta

SEQ ID NO: 366360 - DNA, 19 bp, Homo sapiens
  siRNA target sequence for FLJ10378 (NM_018078.2,2679-2697).
ccccctattagtgatgaat

SEQ ID NO: 366361 - DNA, 19 bp, Homo sapiens
  siRNA target sequence for FLJ10378 (NM_018078.2,2680-2698).
cccctattagtgatgaatt

SEQ ID NO: 366362 - DNA, 19 bp, Homo sapiens
  siRNA target sequence for FLJ10378 (NM_018078.2,2681-2699).
ccctattagtgatgaattt

SEQ ID NO: 366363 - DNA, 19 bp, Homo sapiens
  siRNA target sequence for FLJ10378 (NM_018078.2,2774-2792).
gccaccaaatgctgctaaa

SEQ ID NO: 366364 - DNA, 19 bp, Homo sapiens
  siRNA target sequence for FLJ10378 (NM_018078.2,2806-2824).
gtgagcttcaggtaccaat

SEQ ID NO: 366365 - DNA, 19 bp, Homo sapiens
  siRNA target sequence for FLJ10378 (NM_018078.2,2811-2829).
cttcaggtaccaataaact

SEQ ID NO: 366366 - DNA, 19 bp, Homo sapiens
  siRNA target sequence for FLJ10378 (NM_018078.2,2850-2868).
ccggagtccagtgacaatt

SEQ ID NO: 366367 - DNA, 19 bp, Homo sapiens
  siRNA target sequence for FLJ10385 (NM_018081.1,254-272).
cacgcttccccgatgaata

SEQ ID NO: 366368 - DNA, 19 bp, Homo sapiens
  siRNA target sequence for FLJ10385 (NM_018081.1,258-276).
cttccccgatgaataaaaa

SEQ ID NO: 366369 - DNA, 19 bp, Homo sapiens
  siRNA target sequence for FLJ10385 (NM_018081.1,498-516).
caaacgggagcctttctga

SEQ ID NO: 366370 - DNA, 19 bp, Homo sapiens
  siRNA target sequence for FLJ10385 (NM_018081.1,599-617).
gacaccgcttggaactaca

SEQ ID NO: 366371 - DNA, 19 bp, Homo sapiens
  siRNA target sequence for FLJ10385 (NM_018081.1,666-684).
gcacccaacctgagaactt

SEQ ID NO: 366372 - DNA, 19 bp, Homo sapiens
  siRNA target sequence for FLJ10385 (NM_018081.1,710-728).
gacggttcctgcatcttga

SEQ ID NO: 366373 - DNA, 19 bp, Homo sapiens
  siRNA target sequence for FLJ10385 (NM_018081.1,718-736).
ctgcatcttgaccaatagt

SEQ ID NO: 366374 - DNA, 19 bp, Homo sapiens
  siRNA target sequence for FLJ10385 (NM_018081.1,740-758).
gataacatcttgcgaattt

SEQ ID NO: 366375 - DNA, 19 bp, Homo sapiens
  siRNA target sequence for FLJ10385 (NM_018081.1,839-857).
ggtgataccatctatgatt

SEQ ID NO: 366376 - DNA, 19 bp, Homo sapiens
  siRNA target sequence for FLJ10385 (NM_018081.1,840-858).
gtgataccatctatgatta

SEQ ID NO: 366377 - DNA, 19 bp, Homo sapiens
  siRNA target sequence for FLJ10385 (NM_018081.1,842-860).
gataccatctatgattact

SEQ ID NO: 366378 - DNA, 19 bp, Homo sapiens
  siRNA target sequence for FLJ10385 (NM_018081.1,919-937).
ccgggagaacccgattcat

SEQ ID NO: 366379 - DNA, 19 bp, Homo sapiens
  siRNA target sequence for FLJ10385 (NM_018081.1,920-938).
cgggagaacccgattcata

SEQ ID NO: 366380 - DNA, 19 bp, Homo sapiens
  siRNA target sequence for FLJ10385 (NM_018081.1,921-939).
gggagaacccgattcatat

SEQ ID NO: 366381 - DNA, 19 bp, Homo sapiens
  siRNA target sequence for FLJ10385 (NM_018081.1,923-941).
gagaacccgattcatatct

SEQ ID NO: 366382 - DNA, 19 bp, Homo sapiens
  siRNA target sequence for FLJ10385 (NM_018081.1,1063-1081).
ccggactgtgcgtgttttt

SEQ ID NO: 366383 - DNA, 19 bp, Homo sapiens
  siRNA target sequence for FLJ10385 (NM_018081.1,1064-1082).
cggactgtgcgtgtttttt

SEQ ID NO: 366384 - DNA, 19 bp, Homo sapiens
  siRNA target sequence for FLJ10385 (NM_018081.1,1108-1126).
cgaggtccgagccacattt

SEQ ID NO: 366385 - DNA, 19 bp, Homo sapiens
  siRNA target sequence for FLJ10385 (NM_018081.1,1111-1129).
ggtccgagccacatttgca

SEQ ID NO: 366386 - DNA, 19 bp, Homo sapiens
  siRNA target sequence for FLJ10385 (NM_018081.1,1112-1130).
gtccgagccacatttgcaa

SEQ ID NO: 366387 - DNA, 19 bp, Homo sapiens
  siRNA target sequence for FLJ10385 (NM_018081.1,1114-1132).
ccgagccacatttgcaaaa

SEQ ID NO: 366388 - DNA, 19 bp, Homo sapiens
  siRNA target sequence for FLJ10385 (NM_018081.1,1115-1133).
cgagccacatttgcaaaaa

SEQ ID NO: 366389 - DNA, 19 bp, Homo sapiens
  siRNA target sequence for FLJ10385 (NM_018081.1,1304-1322).
gatggcaaccgcttcttct

SEQ ID NO: 366390 - DNA, 19 bp, Homo sapiens
  siRNA target sequence for FLJ10385 (NM_018081.1,1410-1428).
ccaatcagcgcatctactt

SEQ ID NO: 366391 - DNA, 19 bp, Homo sapiens
  siRNA target sequence for FLJ10385 (NM_018081.1,1523-1541).
ccggagcccgtgttgagtt

SEQ ID NO: 366392 - DNA, 19 bp, Homo sapiens
  siRNA target sequence for FLJ10385 (NM_018081.1,1524-1542).
cggagcccgtgttgagttt

SEQ ID NO: 366393 - DNA, 19 bp, Homo sapiens
  siRNA target sequence for FLJ10385 (NM_018081.1,1609-1627).
ctccggtcagcgtgtgttt

SEQ ID NO: 366394 - DNA, 19 bp, Homo sapiens
  siRNA target sequence for FLJ10385 (NM_018081.1,1690-1708).
ccacgtccaccttgaatgt

SEQ ID NO: 366395 - DNA, 19 bp, Homo sapiens
  siRNA target sequence for FLJ10385 (NM_018081.1,1799-1817).
ggtgtgggtgagctgatat

SEQ ID NO: 366396 - DNA, 19 bp, Homo sapiens
  siRNA target sequence for RPC2 (NM_018082.2,113-131).
cccgactgtagaggaaaaa

SEQ ID NO: 366397 - DNA, 19 bp, Homo sapiens
  siRNA target sequence for RPC2 (NM_018082.2,114-132).
ccgactgtagaggaaaaat

SEQ ID NO: 366398 - DNA, 19 bp, Homo sapiens
  siRNA target sequence for RPC2 (NM_018082.2,261-279).
gaccctatgtggtacttaa

SEQ ID NO: 366399 - DNA, 19 bp, Homo sapiens
  siRNA target sequence for RPC2 (NM_018082.2,263-281).
ccctatgtggtacttaaaa

SEQ ID NO: 366400 - DNA, 19 bp, Homo sapiens
  siRNA target sequence for RPC2 (NM_018082.2,318-336).
gaaagcttcaatgtaacta

SEQ ID NO: 366401 - DNA, 19 bp, Homo sapiens
  siRNA target sequence for RPC2 (NM_018082.2,385-403).
cccctattacagtggatat

SEQ ID NO: 366402 - DNA, 19 bp, Homo sapiens
  siRNA target sequence for RPC2 (NM_018082.2,454-472).
gcagaatgcccataatgct

SEQ ID NO: 366403 - DNA, 19 bp, Homo sapiens
  siRNA target sequence for RPC2 (NM_018082.2,455-473).
cagaatgcccataatgcta

SEQ ID NO: 366404 - DNA, 19 bp, Homo sapiens
  siRNA target sequence for RPC2 (NM_018082.2,464-482).
cataatgctacgtagttca

SEQ ID NO: 366405 - DNA, 19 bp, Homo sapiens
  siRNA target sequence for RPC2 (NM_018082.2,470-488).
gctacgtagttcaaactgt

SEQ ID NO: 366406 - DNA, 19 bp, Homo sapiens
  siRNA target sequence for RPC2 (NM_018082.2,620-638).
catcgtggaggctgataga

SEQ ID NO: 366407 - DNA, 19 bp, Homo sapiens
  siRNA target sequence for RPC2 (NM_018082.2,644-662).
ggctgttggagcttcagtt

SEQ ID NO: 366408 - DNA, 19 bp, Homo sapiens
  siRNA target sequence for RPC2 (NM_018082.2,705-723).
gtgaaacaaggacgatttt

SEQ ID NO: 366409 - DNA, 19 bp, Homo sapiens
  siRNA target sequence for RPC2 (NM_018082.2,707-725).
gaaacaaggacgattttat

SEQ ID NO: 366410 - DNA, 19 bp, Homo sapiens
  siRNA target sequence for RPC2 (NM_018082.2,891-909).
cagatgcaggcattaaaat

SEQ ID NO: 366411 - DNA, 19 bp, Homo sapiens
  siRNA target sequence for RPC2 (NM_018082.2,1031-1049).
caatttccgagccaaatgt

SEQ ID NO: 366412 - DNA, 19 bp, Homo sapiens
  siRNA target sequence for RPC2 (NM_018082.2,1038-1056).
cgagccaaatgtatctata

SEQ ID NO: 366413 - DNA, 19 bp, Homo sapiens
  siRNA target sequence for RPC2 (NM_018082.2,1062-1080).
gtgatggtgcgaagagtta

SEQ ID NO: 366414 - DNA, 19 bp, Homo sapiens
  siRNA target sequence for RPC2 (NM_018082.2,1104-1122).
gttgacgacagagattatt

SEQ ID NO: 366415 - DNA, 19 bp, Homo sapiens
  siRNA target sequence for RPC2 (NM_018082.2,1109-1127).
cgacagagattattatggt

SEQ ID NO: 366416 - DNA, 19 bp, Homo sapiens
  siRNA target sequence for RPC2 (NM_018082.2,1110-1128).
gacagagattattatggta

SEQ ID NO: 366417 - DNA, 19 bp, Homo sapiens
  siRNA target sequence for RPC2 (NM_018082.2,1126-1144).
gtaacaagcgactggaatt

SEQ ID NO: 366418 - DNA, 19 bp, Homo sapiens
  siRNA target sequence for RPC2 (NM_018082.2,1167-1185).
ctttttgaagacttgttca

SEQ ID NO: 366419 - DNA, 19 bp, Homo sapiens
  siRNA target sequence for RPC2 (NM_018082.2,1176-1194).
gacttgttcaaaaaattta

SEQ ID NO: 366420 - DNA, 19 bp, Homo sapiens
  siRNA target sequence for RPC2 (NM_018082.2,1215-1233).
gccgaccaggtgattccta

SEQ ID NO: 366421 - DNA, 19 bp, Homo sapiens
  siRNA target sequence for RPC2 (NM_018082.2,1216-1234).
ccgaccaggtgattcctaa

SEQ ID NO: 366422 - DNA, 19 bp, Homo sapiens
  siRNA target sequence for RPC2 (NM_018082.2,1243-1261).
cagcccagtttgatgttgt

SEQ ID NO: 366423 - DNA, 19 bp, Homo sapiens
  siRNA target sequence for RPC2 (NM_018082.2,1247-1265).
ccagtttgatgttgtcaaa

SEQ ID NO: 366424 - DNA, 19 bp, Homo sapiens
  siRNA target sequence for RPC2 (NM_018082.2,1305-1323).
gctatttctaccggaaatt

SEQ ID NO: 366425 - DNA, 19 bp, Homo sapiens
  siRNA target sequence for RPC2 (NM_018082.2,1317-1335).
ggaaattggtctttaaaga

SEQ ID NO: 366426 - DNA, 19 bp, Homo sapiens
  siRNA target sequence for RPC2 (NM_018082.2,1371-1389).
ctgtctcgcttgtcatata

SEQ ID NO: 366427 - DNA, 19 bp, Homo sapiens
  siRNA target sequence for RPC2 (NM_018082.2,1373-1391).
gtctcgcttgtcatatata

SEQ ID NO: 366428 - DNA, 19 bp, Homo sapiens
  siRNA target sequence for RPC2 (NM_018082.2,1517-1535).
ggcatgtggtttggttaaa

SEQ ID NO: 366429 - DNA, 19 bp, Homo sapiens
  siRNA target sequence for RPC2 (NM_018082.2,1550-1568).
gacacacatcacaactgat

SEQ ID NO: 366430 - DNA, 19 bp, Homo sapiens
  siRNA target sequence for RPC2 (NM_018082.2,1552-1570).
cacacatcacaactgatat

SEQ ID NO: 366431 - DNA, 19 bp, Homo sapiens
  siRNA target sequence for RPC2 (NM_018082.2,1575-1593).
gatggacccattgttaaat

SEQ ID NO: 366432 - DNA, 19 bp, Homo sapiens
  siRNA target sequence for RPC2 (NM_018082.2,1608-1626).
ggagtagaagatgtgaatt

SEQ ID NO: 366433 - DNA, 19 bp, Homo sapiens
  siRNA target sequence for RPC2 (NM_018082.2,1633-1651).
gtggggaagagctctctta

SEQ ID NO: 366434 - DNA, 19 bp, Homo sapiens
  siRNA target sequence for RPC2 (NM_018082.2,1644-1662).
ctctcttacccaaatgtgt

SEQ ID NO: 366435 - DNA, 19 bp, Homo sapiens
  siRNA target sequence for RPC2 (NM_018082.2,1715-1733).
gctagtgaatacatttcga

SEQ ID NO: 366436 - DNA, 19 bp, Homo sapiens
  siRNA target sequence for RPC2 (NM_018082.2,1761-1779).
gaatttgtttccatctcaa

SEQ ID NO: 366437 - DNA, 19 bp, Homo sapiens
  siRNA target sequence for RPC2 (NM_018082.2,1831-1849).
gcagaccctacataattgt

SEQ ID NO: 366438 - DNA, 19 bp, Homo sapiens
  siRNA target sequence for RPC2 (NM_018082.2,1834-1852).
gaccctacataattgtcaa

SEQ ID NO: 366439 - DNA, 19 bp, Homo sapiens
  siRNA target sequence for RPC2 (NM_018082.2,1837-1855).
cctacataattgtcaagaa

SEQ ID NO: 366440 - DNA, 19 bp, Homo sapiens
  siRNA target sequence for RPC2 (NM_018082.2,1838-1856).
ctacataattgtcaagaaa

SEQ ID NO: 366441 - DNA, 19 bp, Homo sapiens
  siRNA target sequence for RPC2 (NM_018082.2,1864-1882).
cagcagtcacaaataaaca

SEQ ID NO: 366442 - DNA, 19 bp, Homo sapiens
  siRNA target sequence for RPC2 (NM_018082.2,1896-1914).
gcccaagggtacaggaatt

SEQ ID NO: 366443 - DNA, 19 bp, Homo sapiens
  siRNA target sequence for RPC2 (NM_018082.2,1898-1916).
ccaagggtacaggaatttt

SEQ ID NO: 366444 - DNA, 19 bp, Homo sapiens
  siRNA target sequence for RPC2 (NM_018082.2,1929-1947).
catgagagtctggttgaat

SEQ ID NO: 366445 - DNA, 19 bp, Homo sapiens
  siRNA target sequence for RPC2 (NM_018082.2,1934-1952).
gagtctggttgaatattta

SEQ ID NO: 366446 - DNA, 19 bp, Homo sapiens
  siRNA target sequence for RPC2 (NM_018082.2,1984-2002).
cactgtacgaacacacaat

SEQ ID NO: 366447 - DNA, 19 bp, Homo sapiens
  siRNA target sequence for RPC2 (NM_018082.2,1986-2004).
ctgtacgaacacacaatta

SEQ ID NO: 366448 - DNA, 19 bp, Homo sapiens
  siRNA target sequence for RPC2 (NM_018082.2,1988-2006).
gtacgaacacacaattaat

SEQ ID NO: 366449 - DNA, 19 bp, Homo sapiens
  siRNA target sequence for RPC2 (NM_018082.2,1991-2009).
cgaacacacaattaataaa

SEQ ID NO: 366450 - DNA, 19 bp, Homo sapiens
  siRNA target sequence for RPC2 (NM_018082.2,2015-2033).
cacccacttggagattgaa

SEQ ID NO: 366451 - DNA, 19 bp, Homo sapiens
  siRNA target sequence for RPC2 (NM_018082.2,2087-2105).
ccagtcaccgagaaacact

SEQ ID NO: 366452 - DNA, 19 bp, Homo sapiens
  siRNA target sequence for RPC2 (NM_018082.2,2092-2110).
caccgagaaacacttatca

SEQ ID NO: 366453 - DNA, 19 bp, Homo sapiens
  siRNA target sequence for RPC2 (NM_018082.2,2094-2112).
ccgagaaacacttatcagt

SEQ ID NO: 366454 - DNA, 19 bp, Homo sapiens
  siRNA target sequence for RPC2 (NM_018082.2,2130-2148).
gccatgggtactataggat

SEQ ID NO: 366455 - DNA, 19 bp, Homo sapiens
  siRNA target sequence for RPC2 (NM_018082.2,2131-2149).
ccatgggtactataggata

SEQ ID NO: 366456 - DNA, 19 bp, Homo sapiens
  siRNA target sequence for RPC2 (NM_018082.2,2150-2168).
caaccagcgaaacagaatt

SEQ ID NO: 366457 - DNA, 19 bp, Homo sapiens
  siRNA target sequence for RPC2 (NM_018082.2,2197-2215).
cacaaaaacccatggttaa

SEQ ID NO: 366458 - DNA, 19 bp, Homo sapiens
  siRNA target sequence for RPC2 (NM_018082.2,2199-2217).
caaaaacccatggttaaga

SEQ ID NO: 366459 - DNA, 19 bp, Homo sapiens
  siRNA target sequence for RPC2 (NM_018082.2,2218-2236).
caaaaaccattgaattgat

SEQ ID NO: 366460 - DNA, 19 bp, Homo sapiens
  siRNA target sequence for RPC2 (NM_018082.2,2285-2303).
gagctatagtggctatgat

SEQ ID NO: 366461 - DNA, 19 bp, Homo sapiens
  siRNA target sequence for RPC2 (NM_018082.2,2287-2305).
gctatagtggctatgatat

SEQ ID NO: 366462 - DNA, 19 bp, Homo sapiens
  siRNA target sequence for RPC2 (NM_018082.2,2352-2370).
gggcgttgccttgtatata

SEQ ID NO: 366463 - DNA, 19 bp, Homo sapiens
  siRNA target sequence for RPC2 (NM_018082.2,2353-2371).
ggcgttgccttgtatataa

SEQ ID NO: 366464 - DNA, 19 bp, Homo sapiens
  siRNA target sequence for RPC2 (NM_018082.2,2354-2372).
gcgttgccttgtatataaa

SEQ ID NO: 366465 - DNA, 19 bp, Homo sapiens
  siRNA target sequence for RPC2 (NM_018082.2,2360-2378).
ccttgtatataaaaatgct

SEQ ID NO: 366466 - DNA, 19 bp, Homo sapiens
  siRNA target sequence for RPC2 (NM_018082.2,2399-2417).
caccaatcagacttttgat

SEQ ID NO: 366467 - DNA, 19 bp, Homo sapiens
  siRNA target sequence for RPC2 (NM_018082.2,2401-2419).
ccaatcagacttttgataa

SEQ ID NO: 366468 - DNA, 19 bp, Homo sapiens
  siRNA target sequence for RPC2 (NM_018082.2,2457-2475).
cctatctggcgacatgaaa

SEQ ID NO: 366469 - DNA, 19 bp, Homo sapiens
  siRNA target sequence for RPC2 (NM_018082.2,2458-2476).
ctatctggcgacatgaaat

SEQ ID NO: 366470 - DNA, 19 bp, Homo sapiens
  siRNA target sequence for RPC2 (NM_018082.2,2462-2480).
ctggcgacatgaaatctta

SEQ ID NO: 366471 - DNA, 19 bp, Homo sapiens
  siRNA target sequence for RPC2 (NM_018082.2,2464-2482).
ggcgacatgaaatcttaga

SEQ ID NO: 366472 - DNA, 19 bp, Homo sapiens
  siRNA target sequence for RPC2 (NM_018082.2,2465-2483).
gcgacatgaaatcttagat

SEQ ID NO: 366473 - DNA, 19 bp, Homo sapiens
  siRNA target sequence for RPC2 (NM_018082.2,2497-2515).
gttctccaggtgagaaagt

SEQ ID NO: 366474 - DNA, 19 bp, Homo sapiens
  siRNA target sequence for RPC2 (NM_018082.2,2522-2540).
caaacaagtgcttgtaaat

SEQ ID NO: 366475 - DNA, 19 bp, Homo sapiens
  siRNA target sequence for RPC2 (NM_018082.2,2549-2567).
gcccacagtgactcagatt

SEQ ID NO: 366476 - DNA, 19 bp, Homo sapiens
  siRNA target sequence for RPC2 (NM_018082.2,2558-2576).
gactcagattcctttggaa

SEQ ID NO: 366477 - DNA, 19 bp, Homo sapiens
  siRNA target sequence for RPC2 (NM_018082.2,2594-2612).
gcaaccacagtacaaagat

SEQ ID NO: 366478 - DNA, 19 bp, Homo sapiens
  siRNA target sequence for RPC2 (NM_018082.2,2631-2649).
ggagcaacagactcatata

SEQ ID NO: 366479 - DNA, 19 bp, Homo sapiens
  siRNA target sequence for RPC2 (NM_018082.2,2635-2653).
caacagactcatatattga

SEQ ID NO: 366480 - DNA, 19 bp, Homo sapiens
  siRNA target sequence for RPC2 (NM_018082.2,2714-2732).
gacaaggcgtccagaaatt

SEQ ID NO: 366481 - DNA, 19 bp, Homo sapiens
  siRNA target sequence for RPC2 (NM_018082.2,2818-2836).
gcatctgtccggacatcat

SEQ ID NO: 366482 - DNA, 19 bp, Homo sapiens
  siRNA target sequence for RPC2 (NM_018082.2,2978-2996).
cctcgttcgccatggttat

SEQ ID NO: 366483 - DNA, 19 bp, Homo sapiens
  siRNA target sequence for RPC2 (NM_018082.2,2979-2997).
ctcgttcgccatggttata

SEQ ID NO: 366484 - DNA, 19 bp, Homo sapiens
  siRNA target sequence for RPC2 (NM_018082.2,2982-3000).
gttcgccatggttataact

SEQ ID NO: 366485 - DNA, 19 bp, Homo sapiens
  siRNA target sequence for RPC2 (NM_018082.2,2985-3003).
cgccatggttataactact

SEQ ID NO: 366486 - DNA, 19 bp, Homo sapiens
  siRNA target sequence for RPC2 (NM_018082.2,2986-3004).
gccatggttataactactt

SEQ ID NO: 366487 - DNA, 19 bp, Homo sapiens
  siRNA target sequence for RPC2 (NM_018082.2,3005-3023).
ggggaaagactatgttaca

SEQ ID NO: 366488 - DNA, 19 bp, Homo sapiens
  siRNA target sequence for RPC2 (NM_018082.2,3032-3050).
cacaggtgagcccttagaa

SEQ ID NO: 366489 - DNA, 19 bp, Homo sapiens
  siRNA target sequence for RPC2 (NM_018082.2,3037-3055).
gtgagcccttagaagcata

SEQ ID NO: 366490 - DNA, 19 bp, Homo sapiens
  siRNA target sequence for RPC2 (NM_018082.2,3042-3060).
cccttagaagcatacatct

SEQ ID NO: 366491 - DNA, 19 bp, Homo sapiens
  siRNA target sequence for RPC2 (NM_018082.2,3043-3061).
ccttagaagcatacatcta

SEQ ID NO: 366492 - DNA, 19 bp, Homo sapiens
  siRNA target sequence for RPC2 (NM_018082.2,3044-3062).
cttagaagcatacatctat

SEQ ID NO: 366493 - DNA, 19 bp, Homo sapiens
  siRNA target sequence for RPC2 (NM_018082.2,3098-3116).
ggtgctagataaaatgcat

SEQ ID NO: 366494 - DNA, 19 bp, Homo sapiens
  siRNA target sequence for RPC2 (NM_018082.2,3212-3230).
ctgtttaatcggttatgga

SEQ ID NO: 366495 - DNA, 19 bp, Homo sapiens
  siRNA target sequence for RPC2 (NM_018082.2,3240-3258).
cttttgctagagagactaa

SEQ ID NO: 366496 - DNA, 19 bp, Homo sapiens
  siRNA target sequence for RPC2 (NM_018082.2,3245-3263).
gctagagagactaatgatt

SEQ ID NO: 366497 - DNA, 19 bp, Homo sapiens
  siRNA target sequence for RPC2 (NM_018082.2,3435-3453).
ctgtccaagtacaatgaat

SEQ ID NO: 366498 - DNA, 19 bp, Homo sapiens
  siRNA target sequence for FLJ10407 (NM_018087.3,273-291).
gcaggtcgcgggacatact

SEQ ID NO: 366499 - DNA, 19 bp, Homo sapiens
  siRNA target sequence for FLJ10407 (NM_018087.3,309-327).
ggaggatagttgcaagtat

SEQ ID NO: 366500 - DNA, 19 bp, Homo sapiens
  siRNA target sequence for FLJ10407 (NM_018087.3,310-328).
gaggatagttgcaagtatt

SEQ ID NO: 366501 - DNA, 19 bp, Homo sapiens
  siRNA target sequence for FLJ10407 (NM_018087.3,360-378).
ccacagtatttataatttt

SEQ ID NO: 366502 - DNA, 19 bp, Homo sapiens
  siRNA target sequence for FLJ10407 (NM_018087.3,381-399).
gcaggattgatttgtttca

SEQ ID NO: 366503 - DNA, 19 bp, Homo sapiens
  siRNA target sequence for FLJ10407 (NM_018087.3,433-451).
cctgtatagttcctatgta

SEQ ID NO: 366504 - DNA, 19 bp, Homo sapiens
  siRNA target sequence for FLJ10407 (NM_018087.3,441-459).
gttcctatgtaatctttta

SEQ ID NO: 366505 - DNA, 19 bp, Homo sapiens
  siRNA target sequence for FLJ10407 (NM_018087.3,466-484).
gctgctgtcagtggtaata

SEQ ID NO: 366506 - DNA, 19 bp, Homo sapiens
  siRNA target sequence for FLJ10407 (NM_018087.3,541-559).
ctccagactagctctgata

SEQ ID NO: 366507 - DNA, 19 bp, Homo sapiens
  siRNA target sequence for FLJ10407 (NM_018087.3,552-570).
ctctgatagggaagatcat

SEQ ID NO: 366508 - DNA, 19 bp, Homo sapiens
  siRNA target sequence for FLJ10407 (NM_018087.3,556-574).
gatagggaagatcattcat

SEQ ID NO: 366509 - DNA, 19 bp, Homo sapiens
  siRNA target sequence for FLJ10407 (NM_018087.3,654-672).
gccagtacagctttcttgt

SEQ ID NO: 366510 - DNA, 19 bp, Homo sapiens
  siRNA target sequence for FLJ10407 (NM_018087.3,710-728).
gctgcgcaaacctgcttaa

SEQ ID NO: 366511 - DNA, 19 bp, Homo sapiens
  siRNA target sequence for FLJ10407 (NM_018087.3,711-729).
ctgcgcaaacctgcttaaa

SEQ ID NO: 366512 - DNA, 19 bp, Homo sapiens
  siRNA target sequence for FLJ10407 (NM_018087.3,714-732).
cgcaaacctgcttaaatga

SEQ ID NO: 366513 - DNA, 19 bp, Homo sapiens
  siRNA target sequence for FLJ10407 (NM_018087.3,749-767).
ctactgactggagcattta

SEQ ID NO: 366514 - DNA, 19 bp, Homo sapiens
  siRNA target sequence for FLJ10407 (NM_018087.3,761-779).
gcatttatgggctatagct

SEQ ID NO: 366515 - DNA, 19 bp, Homo sapiens
  siRNA target sequence for FLJ10407 (NM_018087.3,778-796).
ctatagcctcctgtatttt

SEQ ID NO: 366516 - DNA, 19 bp, Homo sapiens
  siRNA target sequence for FLJ10407 (NM_018087.3,783-801).
gcctcctgtattttgttaa

SEQ ID NO: 366517 - DNA, 19 bp, Homo sapiens
  siRNA target sequence for FLJ10407 (NM_018087.3,805-823).
catgaactatcttccattt

SEQ ID NO: 366518 - DNA, 19 bp, Homo sapiens
  siRNA target sequence for FLJ10407 (NM_018087.3,824-842).
cccatcatacagcaataca

SEQ ID NO: 366519 - DNA, 19 bp, Homo sapiens
  siRNA target sequence for FLJ10407 (NM_018087.3,859-877).
gagatctctgctcttatta

SEQ ID NO: 366520 - DNA, 19 bp, Homo sapiens
  siRNA target sequence for FLJ10407 (NM_018087.3,864-882).
ctctgctcttattagttaa

SEQ ID NO: 366521 - DNA, 19 bp, Homo sapiens
  siRNA target sequence for FLJ10407 (NM_018087.3,869-887).
ctcttattagttaaacaca

SEQ ID NO: 366522 - DNA, 19 bp, Homo sapiens
  siRNA target sequence for FLJ10407 (NM_018087.3,900-918).
cactgttcctggttagaaa

SEQ ID NO: 366523 - DNA, 19 bp, Homo sapiens
  siRNA target sequence for FLJ10407 (NM_018087.3,944-962).
ggctatattcccaaagctt

SEQ ID NO: 366524 - DNA, 19 bp, Homo sapiens
  siRNA target sequence for FLJ10407 (NM_018087.3,1082-1100).
ctgacgacttggtatgtct

SEQ ID NO: 366525 - DNA, 19 bp, Homo sapiens
  siRNA target sequence for FLJ10407 (NM_018087.3,1099-1117).
ctcatggatactcttcaaa

SEQ ID NO: 366526 - DNA, 19 bp, Homo sapiens
  siRNA target sequence for FLJ10407 (NM_018087.3,1101-1119).
catggatactcttcaaaat

SEQ ID NO: 366527 - DNA, 19 bp, Homo sapiens
  siRNA target sequence for FLJ10407 (NM_018087.3,1180-1198).
gtgccttccaaaagtgtta

SEQ ID NO: 366528 - DNA, 19 bp, Homo sapiens
  siRNA target sequence for FLJ10407 (NM_018087.3,1182-1200).
gccttccaaaagtgttaaa

SEQ ID NO: 366529 - DNA, 19 bp, Homo sapiens
  siRNA target sequence for FLJ10407 (NM_018087.3,1183-1201).
ccttccaaaagtgttaaat

SEQ ID NO: 366530 - DNA, 19 bp, Homo sapiens
  siRNA target sequence for FLJ10407 (NM_018087.3,1208-1226).
cctccccccatcataaagt

SEQ ID NO: 366531 - DNA, 19 bp, Homo sapiens
  siRNA target sequence for FLJ10407 (NM_018087.3,1211-1229).
ccccccatcataaagtatt

SEQ ID NO: 366532 - DNA, 19 bp, Homo sapiens
  siRNA target sequence for FLJ10407 (NM_018087.3,1212-1230).
cccccatcataaagtattt

SEQ ID NO: 366533 - DNA, 19 bp, Homo sapiens
  siRNA target sequence for FLJ10407 (NM_018087.3,1213-1231).
ccccatcataaagtattta

SEQ ID NO: 366534 - DNA, 19 bp, Homo sapiens
  siRNA target sequence for FLJ10407 (NM_018087.3,1310-1328).
ggacatccccacaattgga

SEQ ID NO: 366535 - DNA, 19 bp, Homo sapiens
  siRNA target sequence for FLJ10407 (NM_018087.3,1375-1393).
gaaactgattctctatcaa

SEQ ID NO: 366536 - DNA, 19 bp, Homo sapiens
  siRNA target sequence for FLJ10407 (NM_018087.3,1428-1446).
cttacccagtggaacctaa

SEQ ID NO: 366537 - DNA, 19 bp, Homo sapiens
  siRNA target sequence for FLJ10407 (NM_018087.3,1438-1456).
ggaacctaagaaattaaat

SEQ ID NO: 366538 - DNA, 19 bp, Homo sapiens
  siRNA target sequence for FLJ10407 (NM_018087.3,1509-1527).
cttcagtgccaccattagt

SEQ ID NO: 366539 - DNA, 19 bp, Homo sapiens
  siRNA target sequence for FLJ10407 (NM_018087.3,1514-1532).
gtgccaccattagttaaaa

SEQ ID NO: 366540 - DNA, 19 bp, Homo sapiens
  siRNA target sequence for FLJ10407 (NM_018087.3,1516-1534).
gccaccattagttaaaaca

SEQ ID NO: 366541 - DNA, 19 bp, Homo sapiens
  siRNA target sequence for FLJ10407 (NM_018087.3,1517-1535).
ccaccattagttaaaacat

SEQ ID NO: 366542 - DNA, 19 bp, Homo sapiens
  siRNA target sequence for FLJ10407 (NM_018087.3,1588-1606).
cccatttggctctagtgta

SEQ ID NO: 366543 - DNA, 19 bp, Homo sapiens
  siRNA target sequence for FLJ10407 (NM_018087.3,1609-1627).
gaatcggatggctggaatt

SEQ ID NO: 366544 - DNA, 19 bp, Homo sapiens
  siRNA target sequence for FLJ10407 (NM_018087.3,1656-1674).
cgcaaagtcctcagctaat

SEQ ID NO: 366545 - DNA, 19 bp, Homo sapiens
  siRNA target sequence for FLJ10407 (NM_018087.3,1758-1776).
gtgctgagggtaagacaat

SEQ ID NO: 366546 - DNA, 19 bp, Homo sapiens
  siRNA target sequence for FLJ10407 (NM_018087.3,1842-1860).
caaaacgggtgctgataat

SEQ ID NO: 366547 - DNA, 19 bp, Homo sapiens
  siRNA target sequence for FLJ10407 (NM_018087.3,1847-1865).
cgggtgctgataatgtatt

SEQ ID NO: 366548 - DNA, 19 bp, Homo sapiens
  siRNA target sequence for FLJ10407 (NM_018087.3,1921-1939).
gcatatttgggcattagaa

SEQ ID NO: 366549 - DNA, 19 bp, Homo sapiens
  siRNA target sequence for FLJ10407 (NM_018087.3,1965-1983).
catttacagaggatagatt

SEQ ID NO: 366550 - DNA, 19 bp, Homo sapiens
  siRNA target sequence for FLJ10407 (NM_018087.3,2007-2025).
cagctatccttaatacttt

SEQ ID NO: 366551 - DNA, 19 bp, Homo sapiens
  siRNA target sequence for FLJ10407 (NM_018087.3,2009-2027).
gctatccttaatactttgt

SEQ ID NO: 366552 - DNA, 19 bp, Homo sapiens
  siRNA target sequence for FLJ10407 (NM_018087.3,2041-2059).
ggcagtcgacaagtacttt

SEQ ID NO: 366553 - DNA, 19 bp, Homo sapiens
  siRNA target sequence for FLJ10407 (NM_018087.3,2047-2065).
cgacaagtactttaagctt

SEQ ID NO: 366554 - DNA, 19 bp, Homo sapiens
  siRNA target sequence for FLJ10407 (NM_018087.3,2103-2121).
gccttgtggacacttcata

SEQ ID NO: 366555 - DNA, 19 bp, Homo sapiens
  siRNA target sequence for FLJ10407 (NM_018087.3,2164-2182).
catctatcgaataactact

SEQ ID NO: 366556 - DNA, 19 bp, Homo sapiens
  siRNA target sequence for FLJ10407 (NM_018087.3,2167-2185).
ctatcgaataactactaca

SEQ ID NO: 366557 - DNA, 19 bp, Homo sapiens
  siRNA target sequence for FLJ10407 (NM_018087.3,2209-2227).
gcaagcatctgcagaacat

SEQ ID NO: 366558 - DNA, 19 bp, Homo sapiens
  siRNA target sequence for FLJ10415 (NM_018089.1,173-191).
cggatgctccggtctttca

SEQ ID NO: 366559 - DNA, 19 bp, Homo sapiens
  siRNA target sequence for FLJ10415 (NM_018089.1,295-313).
ctccagggtcctatggata

SEQ ID NO: 366560 - DNA, 19 bp, Homo sapiens
  siRNA target sequence for FLJ10415 (NM_018089.1,297-315).
ccagggtcctatggatatt

SEQ ID NO: 366561 - DNA, 19 bp, Homo sapiens
  siRNA target sequence for FLJ10415 (NM_018089.1,298-316).
cagggtcctatggatattt

SEQ ID NO: 366562 - DNA, 19 bp, Homo sapiens
  siRNA target sequence for FLJ10415 (NM_018089.1,300-318).
gggtcctatggatatttca

SEQ ID NO: 366563 - DNA, 19 bp, Homo sapiens
  siRNA target sequence for FLJ10415 (NM_018089.1,372-390).
gagggaacattataagctt

SEQ ID NO: 366564 - DNA, 19 bp, Homo sapiens
  siRNA target sequence for FLJ10415 (NM_018089.1,393-411).
ctggcatcggtttaaccta

SEQ ID NO: 366565 - DNA, 19 bp, Homo sapiens
  siRNA target sequence for FLJ10415 (NM_018089.1,395-413).
ggcatcggtttaacctaaa

SEQ ID NO: 366566 - DNA, 19 bp, Homo sapiens
  siRNA target sequence for FLJ10415 (NM_018089.1,441-459).
gtctgccctggactttgaa

SEQ ID NO: 366567 - DNA, 19 bp, Homo sapiens
  siRNA target sequence for FLJ10415 (NM_018089.1,446-464).
ccctggactttgaaaagca

SEQ ID NO: 366568 - DNA, 19 bp, Homo sapiens
  siRNA target sequence for FLJ10415 (NM_018089.1,486-504).
cagcatctcgggatcagaa

SEQ ID NO: 366569 - DNA, 19 bp, Homo sapiens
  siRNA target sequence for FLJ10415 (NM_018089.1,548-566).
gggagagggctacatttga

SEQ ID NO: 366570 - DNA, 19 bp, Homo sapiens
  siRNA target sequence for FLJ10415 (NM_018089.1,550-568).
gagagggctacatttgaga

SEQ ID NO: 366571 - DNA, 19 bp, Homo sapiens
  siRNA target sequence for FLJ10415 (NM_018089.1,596-614).
ctcatcgagttcttttcca

SEQ ID NO: 366572 - DNA, 19 bp, Homo sapiens
  siRNA target sequence for FLJ10415 (NM_018089.1,909-927).
caatgaagccacactatat

SEQ ID NO: 366573 - DNA, 19 bp, Homo sapiens
  siRNA target sequence for FLJ10415 (NM_018089.1,975-993).
ggaggaggctggtacaata

SEQ ID NO: 366574 - DNA, 19 bp, Homo sapiens
  siRNA target sequence for FLJ10415 (NM_018089.1,1009-1027).
cgctctggccggtctttgt

SEQ ID NO: 366575 - DNA, 19 bp, Homo sapiens
  siRNA target sequence for FLJ10415 (NM_018089.1,1010-1028).
gctctggccggtctttgtt

SEQ ID NO: 366576 - DNA, 19 bp, Homo sapiens
  siRNA target sequence for FLJ10420 (NM_018090.3,179-197).
gacagatggcctacatcaa

SEQ ID NO: 366577 - DNA, 19 bp, Homo sapiens
  siRNA target sequence for FLJ10420 (NM_018090.3,303-321).
ccgcatcgaagatggaaat

SEQ ID NO: 366578 - DNA, 19 bp, Homo sapiens
  siRNA target sequence for FLJ10420 (NM_018090.3,324-342).
gcgacgggcgtttattgga

SEQ ID NO: 366579 - DNA, 19 bp, Homo sapiens
  siRNA target sequence for FLJ10420 (NM_018090.3,325-343).
cgacgggcgtttattggaa

SEQ ID NO: 366580 - DNA, 19 bp, Homo sapiens
  siRNA target sequence for FLJ10420 (NM_018090.3,326-344).
gacgggcgtttattggaat

SEQ ID NO: 366581 - DNA, 19 bp, Homo sapiens
  siRNA target sequence for FLJ10420 (NM_018090.3,358-376).
cgaggtgatgcctttgact

SEQ ID NO: 366582 - DNA, 19 bp, Homo sapiens
  siRNA target sequence for FLJ10420 (NM_018090.3,449-467).
cagaccaaggccctaaact

SEQ ID NO: 366583 - DNA, 19 bp, Homo sapiens
  siRNA target sequence for FLJ10420 (NM_018090.3,744-762).
gggagactttaccaaatct

SEQ ID NO: 366584 - DNA, 19 bp, Homo sapiens
  siRNA target sequence for NETO2 (NM_018092.3,405-423).
gctcggtcctcaaagtgtt

SEQ ID NO: 366585 - DNA, 19 bp, Homo sapiens
  siRNA target sequence for NETO2 (NM_018092.3,409-427).
ggtcctcaaagtgttgtta

SEQ ID NO: 366586 - DNA, 19 bp, Homo sapiens
  siRNA target sequence for NETO2 (NM_018092.3,451-469).
gattgccgtggcccaaaaa

SEQ ID NO: 366587 - DNA, 19 bp, Homo sapiens
  siRNA target sequence for NETO2 (NM_018092.3,564-582).
caaattatcctgactcata

SEQ ID NO: 366588 - DNA, 19 bp, Homo sapiens
  siRNA target sequence for NETO2 (NM_018092.3,621-639).
ctccacgtcaaagaataga

SEQ ID NO: 366589 - DNA, 19 bp, Homo sapiens
  siRNA target sequence for NETO2 (NM_018092.3,623-641).
ccacgtcaaagaatagagt

SEQ ID NO: 366590 - DNA, 19 bp, Homo sapiens
  siRNA target sequence for NETO2 (NM_018092.3,624-642).
cacgtcaaagaatagagtt

SEQ ID NO: 366591 - DNA, 19 bp, Homo sapiens
  siRNA target sequence for NETO2 (NM_018092.3,743-761).
cgttactgtggcgtgaaaa

SEQ ID NO: 366592 - DNA, 19 bp, Homo sapiens
  siRNA target sequence for NETO2 (NM_018092.3,763-781).
ccctccattaattagatca

SEQ ID NO: 366593 - DNA, 19 bp, Homo sapiens
  siRNA target sequence for NETO2 (NM_018092.3,777-795).
gatcaacagggagattcat

SEQ ID NO: 366594 - DNA, 19 bp, Homo sapiens
  siRNA target sequence for NETO2 (NM_018092.3,785-803).
gggagattcatgtggatta

SEQ ID NO: 366595 - DNA, 19 bp, Homo sapiens
  siRNA target sequence for NETO2 (NM_018092.3,799-817).
gattaagtttagttctgat

SEQ ID NO: 366596 - DNA, 19 bp, Homo sapiens
  siRNA target sequence for NETO2 (NM_018092.3,863-881).
ccagatccagactttactt

SEQ ID NO: 366597 - DNA, 19 bp, Homo sapiens
  siRNA target sequence for NETO2 (NM_018092.3,928-946).
ctcgggagctgatggaata

SEQ ID NO: 366598 - DNA, 19 bp, Homo sapiens
  siRNA target sequence for NETO2 (NM_018092.3,951-969).
gctctagtcaggtagaaca

SEQ ID NO: 366599 - DNA, 19 bp, Homo sapiens
  siRNA target sequence for NETO2 (NM_018092.3,986-1004).
ccaggccaagccgttgatt

SEQ ID NO: 366600 - DNA, 19 bp, Homo sapiens
  siRNA target sequence for NETO2 (NM_018092.3,990-1008).
gccaagccgttgattgcat

SEQ ID NO: 366601 - DNA, 19 bp, Homo sapiens
  siRNA target sequence for NETO2 (NM_018092.3,1024-1042).
cactccaaaagctaagatt

SEQ ID NO: 366602 - DNA, 19 bp, Homo sapiens
  siRNA target sequence for NETO2 (NM_018092.3,1048-1066).
gaggttcctagattatcaa

SEQ ID NO: 366603 - DNA, 19 bp, Homo sapiens
  siRNA target sequence for NETO2 (NM_018092.3,1050-1068).
ggttcctagattatcaaat

SEQ ID NO: 366604 - DNA, 19 bp, Homo sapiens
  siRNA target sequence for NETO2 (NM_018092.3,1162-1180).
ggccaatgatgtaatgctt

SEQ ID NO: 366605 - DNA, 19 bp, Homo sapiens
  siRNA target sequence for NETO2 (NM_018092.3,1187-1205).
ggaattggagtgattcgaa

SEQ ID NO: 366606 - DNA, 19 bp, Homo sapiens
  siRNA target sequence for NETO2 (NM_018092.3,1188-1206).
gaattggagtgattcgaat

SEQ ID NO: 366607 - DNA, 19 bp, Homo sapiens
  siRNA target sequence for NETO2 (NM_018092.3,1226-1244).
cggcttagcaggtttcgaa

SEQ ID NO: 366608 - DNA, 19 bp, Homo sapiens
  siRNA target sequence for NETO2 (NM_018092.3,1227-1245).
ggcttagcaggtttcgaat

SEQ ID NO: 366609 - DNA, 19 bp, Homo sapiens
  siRNA target sequence for NETO2 (NM_018092.3,1237-1255).
gtttcgaatgctctttact

SEQ ID NO: 366610 - DNA, 19 bp, Homo sapiens
  siRNA target sequence for NETO2 (NM_018092.3,1275-1293).
gcacaagcagcactttctt

SEQ ID NO: 366611 - DNA, 19 bp, Homo sapiens
  siRNA target sequence for NETO2 (NM_018092.3,1352-1370).
gcatacccttgggatgaaa

SEQ ID NO: 366612 - DNA, 19 bp, Homo sapiens
  siRNA target sequence for NETO2 (NM_018092.3,1397-1415).
ggagtatttgaacaaatca

SEQ ID NO: 366613 - DNA, 19 bp, Homo sapiens
  siRNA target sequence for NETO2 (NM_018092.3,1459-1477).
cttggtccttctcattatt

SEQ ID NO: 366614 - DNA, 19 bp, Homo sapiens
  siRNA target sequence for NETO2 (NM_018092.3,1520-1538).
gcttgcaaaaccgctttta

SEQ ID NO: 366615 - DNA, 19 bp, Homo sapiens
  siRNA target sequence for NETO2 (NM_018092.3,1524-1542).
gcaaaaccgcttttaataa

SEQ ID NO: 366616 - DNA, 19 bp, Homo sapiens
  siRNA target sequence for NETO2 (NM_018092.3,1525-1543).
caaaaccgcttttaataaa

SEQ ID NO: 366617 - DNA, 19 bp, Homo sapiens
  siRNA target sequence for NETO2 (NM_018092.3,1548-1566).
ggttccaagaagtgtttga

SEQ ID NO: 366618 - DNA, 19 bp, Homo sapiens
  siRNA target sequence for NETO2 (NM_018092.3,1632-1650).
cggaagaattggacaacta

SEQ ID NO: 366619 - DNA, 19 bp, Homo sapiens
  siRNA target sequence for NETO2 (NM_018092.3,1714-1732).
ggcctccagcgtcaaacaa

SEQ ID NO: 366620 - DNA, 19 bp, Homo sapiens
  siRNA target sequence for NETO2 (NM_018092.3,1715-1733).
gcctccagcgtcaaacaaa

SEQ ID NO: 366621 - DNA, 19 bp, Homo sapiens
  siRNA target sequence for NETO2 (NM_018092.3,1827-1845).
gtagttacactttcaaaca

SEQ ID NO: 366622 - DNA, 19 bp, Homo sapiens
  siRNA target sequence for NETO2 (NM_018092.3,1869-1887).
ccctggaagaccgagtaat

SEQ ID NO: 366623 - DNA, 19 bp, Homo sapiens
  siRNA target sequence for NETO2 (NM_018092.3,1889-1907).
gaggagattccctgtgaaa

SEQ ID NO: 366624 - DNA, 19 bp, Homo sapiens
  siRNA target sequence for NETO2 (NM_018092.3,1892-1910).
gagattccctgtgaaattt

SEQ ID NO: 366625 - DNA, 19 bp, Homo sapiens
  siRNA target sequence for NETO2 (NM_018092.3,1898-1916).
ccctgtgaaatttatgtca

SEQ ID NO: 366626 - DNA, 19 bp, Homo sapiens
  siRNA target sequence for NETO2 (NM_018092.3,1935-1953).
cacaagcatccatatccat

SEQ ID NO: 366627 - DNA, 19 bp, Homo sapiens
  siRNA target sequence for NETO2 (NM_018092.3,1940-1958).
gcatccatatccattgact

SEQ ID NO: 366628 - DNA, 19 bp, Homo sapiens
  siRNA target sequence for FLJ10439 (NM_018093.1,212-230).
ccgagactgggatcttgaa

SEQ ID NO: 366629 - DNA, 19 bp, Homo sapiens
  siRNA target sequence for FLJ10439 (NM_018093.1,225-243).
cttgaaaggggtaaatctt

SEQ ID NO: 366630 - DNA, 19 bp, Homo sapiens
  siRNA target sequence for FLJ10439 (NM_018093.1,380-398).
gcaccgaggatggcatatt

SEQ ID NO: 366631 - DNA, 19 bp, Homo sapiens
  siRNA target sequence for FLJ10439 (NM_018093.1,457-475).
gacggcaccctcatcacat

SEQ ID NO: 366632 - DNA, 19 bp, Homo sapiens
  siRNA target sequence for FLJ10439 (NM_018093.1,723-741).
ggaccaggacatacagttt

SEQ ID NO: 366633 - DNA, 19 bp, Homo sapiens
  siRNA target sequence for FLJ10439 (NM_018093.1,780-798).
ccaccaggtccgtgtttat

SEQ ID NO: 366634 - DNA, 19 bp, Homo sapiens
  siRNA target sequence for FLJ10439 (NM_018093.1,879-897).
gggaggcaactcagtgatt

SEQ ID NO: 366635 - DNA, 19 bp, Homo sapiens
  siRNA target sequence for FLJ10439 (NM_018093.1,1070-1088).
cacggggtctggagcataa

SEQ ID NO: 366636 - DNA, 19 bp, Homo sapiens
  siRNA target sequence for FLJ10439 (NM_018093.1,1076-1094).
gtctggagcataaggttta

SEQ ID NO: 366637 - DNA, 19 bp, Homo sapiens
  siRNA target sequence for FLJ10439 (NM_018093.1,1081-1099).
gagcataaggtttatctca

SEQ ID NO: 366638 - DNA, 19 bp, Homo sapiens
  siRNA target sequence for FLJ10439 (NM_018093.1,1090-1108).
gtttatctcaagtctcaat

SEQ ID NO: 366639 - DNA, 19 bp, Homo sapiens
  siRNA target sequence for FLJ10439 (NM_018093.1,1194-1212).
cacagagacagatgaactt

SEQ ID NO: 366640 - DNA, 19 bp, Homo sapiens
  siRNA target sequence for FLJ10460 (NM_018097.1,76-94).
ctaggccacttcatagctt

SEQ ID NO: 366641 - DNA, 19 bp, Homo sapiens
  siRNA target sequence for FLJ10460 (NM_018097.1,92-110).
cttcggggatggtcaatca

SEQ ID NO: 366642 - DNA, 19 bp, Homo sapiens
  siRNA target sequence for FLJ10460 (NM_018097.1,102-120).
ggtcaatcaggagatgtta

SEQ ID NO: 366643 - DNA, 19 bp, Homo sapiens
  siRNA target sequence for FLJ10460 (NM_018097.1,112-130).
gagatgttaaacatgtcta

SEQ ID NO: 366644 - DNA, 19 bp, Homo sapiens
  siRNA target sequence for FLJ10460 (NM_018097.1,123-141).
catgtctaagaaaacagtt

SEQ ID NO: 366645 - DNA, 19 bp, Homo sapiens
  siRNA target sequence for FLJ10460 (NM_018097.1,273-291).
ggctcagaagtgtcatact

SEQ ID NO: 366646 - DNA, 19 bp, Homo sapiens
  siRNA target sequence for FLJ10460 (NM_018097.1,284-302).
gtcatactctgcaaagcat

SEQ ID NO: 366647 - DNA, 19 bp, Homo sapiens
  siRNA target sequence for FLJ10460 (NM_018097.1,299-317).
gcatgaataatcatttgga

SEQ ID NO: 366648 - DNA, 19 bp, Homo sapiens
  siRNA target sequence for FLJ10460 (NM_018097.1,338-356).
gatcccttaggcaaagact

SEQ ID NO: 366649 - DNA, 19 bp, Homo sapiens
  siRNA target sequence for FLJ10460 (NM_018097.1,394-412).
gctgtttatcacagatata

SEQ ID NO: 366650 - DNA, 19 bp, Homo sapiens
  siRNA target sequence for FLJ10460 (NM_018097.1,403-421).
cacagatatatggtacatt

SEQ ID NO: 366651 - DNA, 19 bp, Homo sapiens
  siRNA target sequence for FLJ10460 (NM_018097.1,407-425).
gatatatggtacatttgct

SEQ ID NO: 366652 - DNA, 19 bp, Homo sapiens
  siRNA target sequence for FLJ10460 (NM_018097.1,440-458).
ctttcattgagagattaga

SEQ ID NO: 366653 - DNA, 19 bp, Homo sapiens
  siRNA target sequence for FLJ10460 (NM_018097.1,457-475).
gaaacccaccttgaaacaa

SEQ ID NO: 366654 - DNA, 19 bp, Homo sapiens
  siRNA target sequence for FLJ10460 (NM_018097.1,582-600).
caagtggcgtaaacaacaa

SEQ ID NO: 366655 - DNA, 19 bp, Homo sapiens
  siRNA target sequence for FLJ10460 (NM_018097.1,587-605).
ggcgtaaacaacaaaacga

SEQ ID NO: 366656 - DNA, 19 bp, Homo sapiens
  siRNA target sequence for FLJ10460 (NM_018097.1,588-606).
gcgtaaacaacaaaacgaa

SEQ ID NO: 366657 - DNA, 19 bp, Homo sapiens
  siRNA target sequence for FLJ10460 (NM_018097.1,624-642).
caaaatattagctgaagaa

SEQ ID NO: 366658 - DNA, 19 bp, Homo sapiens
  siRNA target sequence for FLJ10462 (NM_018099.3,273-291).
ccacaattgcagctttcta

SEQ ID NO: 366659 - DNA, 19 bp, Homo sapiens
  siRNA target sequence for FLJ10462 (NM_018099.3,442-460).
gatcctagacagtaagcta

SEQ ID NO: 366660 - DNA, 19 bp, Homo sapiens
  siRNA target sequence for FLJ10462 (NM_018099.3,472-490).
caaagaagtttgtccaaat

SEQ ID NO: 366661 - DNA, 19 bp, Homo sapiens
  siRNA target sequence for FLJ10462 (NM_018099.3,483-501).
gtccaaatgtgcatgagaa

SEQ ID NO: 366662 - DNA, 19 bp, Homo sapiens
  siRNA target sequence for FLJ10462 (NM_018099.3,497-515).
gagaagatcagagctattt

SEQ ID NO: 366663 - DNA, 19 bp, Homo sapiens
  siRNA target sequence for FLJ10462 (NM_018099.3,519-537).
cagatctcaatcagaatga

SEQ ID NO: 366664 - DNA, 19 bp, Homo sapiens
  siRNA target sequence for FLJ10462 (NM_018099.3,663-681).
cccggcagctcttgcttat

SEQ ID NO: 366665 - DNA, 19 bp, Homo sapiens
  siRNA target sequence for FLJ10462 (NM_018099.3,726-744).
ctgcctattcaaattgtaa

SEQ ID NO: 366666 - DNA, 19 bp, Homo sapiens
  siRNA target sequence for FLJ10462 (NM_018099.3,748-766).
gaagcacatcgatgaagtt

SEQ ID NO: 366667 - DNA, 19 bp, Homo sapiens
  siRNA target sequence for FLJ10462 (NM_018099.3,752-770).
cacatcgatgaagttatct

SEQ ID NO: 366668 - DNA, 19 bp, Homo sapiens
  siRNA target sequence for FLJ10462 (NM_018099.3,814-832).
gtggttagacgatgctatt

SEQ ID NO: 366669 - DNA, 19 bp, Homo sapiens
  siRNA target sequence for FLJ10462 (NM_018099.3,816-834).
ggttagacgatgctattat

SEQ ID NO: 366670 - DNA, 19 bp, Homo sapiens
  siRNA target sequence for FLJ10462 (NM_018099.3,817-835).
gttagacgatgctattatt

SEQ ID NO: 366671 - DNA, 19 bp, Homo sapiens
  siRNA target sequence for FLJ10462 (NM_018099.3,859-877).
cagagattggcccaatatt

SEQ ID NO: 366672 - DNA, 19 bp, Homo sapiens
  siRNA target sequence for FLJ10462 (NM_018099.3,989-1007).
ccaggttgggttgataata

SEQ ID NO: 366673 - DNA, 19 bp, Homo sapiens
  siRNA target sequence for FLJ10462 (NM_018099.3,1088-1106).
gacgtaattccagttgata

SEQ ID NO: 366674 - DNA, 19 bp, Homo sapiens
  siRNA target sequence for FLJ10462 (NM_018099.3,1090-1108).
cgtaattccagttgataca

SEQ ID NO: 366675 - DNA, 19 bp, Homo sapiens
  siRNA target sequence for FLJ10462 (NM_018099.3,1103-1121).
gatacagtcgtcaatctca

SEQ ID NO: 366676 - DNA, 19 bp, Homo sapiens
  siRNA target sequence for FLJ10462 (NM_018099.3,1148-1166).
gttcacagacctaagtcaa

SEQ ID NO: 366677 - DNA, 19 bp, Homo sapiens
  siRNA target sequence for FLJ10462 (NM_018099.3,1247-1265).
gaaaaaatcccatttgaga

SEQ ID NO: 366678 - DNA, 19 bp, Homo sapiens
  siRNA target sequence for FLJ10462 (NM_018099.3,1405-1423).
gctcatgaatcggctttta

SEQ ID NO: 366679 - DNA, 19 bp, Homo sapiens
  siRNA target sequence for FLJ10462 (NM_018099.3,1406-1424).
ctcatgaatcggcttttaa

SEQ ID NO: 366680 - DNA, 19 bp, Homo sapiens
  siRNA target sequence for FLJ10462 (NM_018099.3,1408-1426).
catgaatcggcttttaaga

SEQ ID NO: 366681 - DNA, 19 bp, Homo sapiens
  siRNA target sequence for FLJ10462 (NM_018099.3,1411-1429).
gaatcggcttttaagaact

SEQ ID NO: 366682 - DNA, 19 bp, Homo sapiens
  siRNA target sequence for FLJ10462 (NM_018099.3,1415-1433).
cggcttttaagaactgttt

SEQ ID NO: 366683 - DNA, 19 bp, Homo sapiens
  siRNA target sequence for FLJ10462 (NM_018099.3,1430-1448).
gtttccatgttggagtatt

SEQ ID NO: 366684 - DNA, 19 bp, Homo sapiens
  siRNA target sequence for FLJ10462 (NM_018099.3,1465-1483).
ggaatggagcacgtacaat

SEQ ID NO: 366685 - DNA, 19 bp, Homo sapiens
  siRNA target sequence for FLJ10462 (NM_018099.3,1470-1488).
ggagcacgtacaatacaga

SEQ ID NO: 366686 - DNA, 19 bp, Homo sapiens
  siRNA target sequence for FLJ10462 (NM_018099.3,1471-1489).
gagcacgtacaatacagaa

SEQ ID NO: 366687 - DNA, 19 bp, Homo sapiens
  siRNA target sequence for FLJ10462 (NM_018099.3,1476-1494).
cgtacaatacagaaatgct

SEQ ID NO: 366688 - DNA, 19 bp, Homo sapiens
  siRNA target sequence for FLJ10462 (NM_018099.3,1511-1529).
cctgaagaccagagagtat

SEQ ID NO: 366689 - DNA, 19 bp, Homo sapiens
  siRNA target sequence for FLJ10462 (NM_018099.3,1512-1530).
ctgaagaccagagagtatt

SEQ ID NO: 366690 - DNA, 19 bp, Homo sapiens
  siRNA target sequence for FLJ10462 (NM_018099.3,1538-1556).
gacgtgcgccagttgaact

SEQ ID NO: 366691 - DNA, 19 bp, Homo sapiens
  siRNA target sequence for FLJ10462 (NM_018099.3,1557-1575).
ggttggaatacattgaaaa

SEQ ID NO: 366692 - DNA, 19 bp, Homo sapiens
  siRNA target sequence for FLJ10462 (NM_018099.3,1653-1671).
ggctccgaaatattcacta

SEQ ID NO: 366693 - DNA, 19 bp, Homo sapiens
  siRNA target sequence for FLJ10462 (NM_018099.3,1699-1717).
cgcctggcgccttctcatt

SEQ ID NO: 366694 - DNA, 19 bp, Homo sapiens
  siRNA target sequence for FLJ10462 (NM_018099.3,1727-1745).
cagatggctcggaatgtct

SEQ ID NO: 366695 - DNA, 19 bp, Homo sapiens
  siRNA target sequence for FLJ10462 (NM_018099.3,1736-1754).
cggaatgtctggttcttca

SEQ ID NO: 366696 - DNA, 19 bp, Homo sapiens
  siRNA target sequence for FLJ10462 (NM_018099.3,1737-1755).
ggaatgtctggttcttcat

SEQ ID NO: 366697 - DNA, 19 bp, Homo sapiens
  siRNA target sequence for FLJ10462 (NM_018099.3,1757-1775).
gtaagcttctgttataaat

SEQ ID NO: 366698 - DNA, 19 bp, Homo sapiens
  siRNA target sequence for FLJ10462 (NM_018099.3,1794-1812).
catccagcacgctcaaagt

SEQ ID NO: 366699 - DNA, 19 bp, Homo sapiens
  siRNA target sequence for CDCA8 (NM_018101.1,173-191).
gctcgcctcctttctgaaa

SEQ ID NO: 366700 - DNA, 19 bp, Homo sapiens
  siRNA target sequence for CDCA8 (NM_018101.1,197-215).
cgaccgtgaagtggaaata

SEQ ID NO: 366701 - DNA, 19 bp, Homo sapiens
  siRNA target sequence for CDCA8 (NM_018101.1,200-218).
ccgtgaagtggaaatacga

SEQ ID NO: 366702 - DNA, 19 bp, Homo sapiens
  siRNA target sequence for CDCA8 (NM_018101.1,201-219).
cgtgaagtggaaatacgaa

SEQ ID NO: 366703 - DNA, 19 bp, Homo sapiens
  siRNA target sequence for CDCA8 (NM_018101.1,216-234).
cgaatcaagcaaattgagt

SEQ ID NO: 366704 - DNA, 19 bp, Homo sapiens
  siRNA target sequence for CDCA8 (NM_018101.1,303-321).
gctctgcgcgagatgaact

SEQ ID NO: 366705 - DNA, 19 bp, Homo sapiens
  siRNA target sequence for CDCA8 (NM_018101.1,383-401).
cctggatatcaccgaaata

SEQ ID NO: 366706 - DNA, 19 bp, Homo sapiens
  siRNA target sequence for CDCA8 (NM_018101.1,384-402).
ctggatatcaccgaaataa

SEQ ID NO: 366707 - DNA, 19 bp, Homo sapiens
  siRNA target sequence for CDCA8 (NM_018101.1,392-410).
caccgaaataaacaaacta

SEQ ID NO: 366708 - DNA, 19 bp, Homo sapiens
  siRNA target sequence for CDCA8 (NM_018101.1,444-462).
gccaaaacacgaaaggtaa

SEQ ID NO: 366709 - DNA, 19 bp, Homo sapiens
  siRNA target sequence for CDCA8 (NM_018101.1,445-463).
ccaaaacacgaaaggtaat

SEQ ID NO: 366710 - DNA, 19 bp, Homo sapiens
  siRNA target sequence for CDCA8 (NM_018101.1,446-464).
caaaacacgaaaggtaata

SEQ ID NO: 366711 - DNA, 19 bp, Homo sapiens
  siRNA target sequence for CDCA8 (NM_018101.1,510-528).
gaacgtaagaatcttcaaa

SEQ ID NO: 366712 - DNA, 19 bp, Homo sapiens
  siRNA target sequence for CDCA8 (NM_018101.1,602-620).
gtcaagccgtgctaacact

SEQ ID NO: 366713 - DNA, 19 bp, Homo sapiens
  siRNA target sequence for CDCA8 (NM_018101.1,648-666).
gtgtccatggtcaaaccaa

SEQ ID NO: 366714 - DNA, 19 bp, Homo sapiens
  siRNA target sequence for CDCA8 (NM_018101.1,690-708).
gactcaagggtcttcaaga

SEQ ID NO: 366715 - DNA, 19 bp, Homo sapiens
  siRNA target sequence for CDCA8 (NM_018101.1,730-748).
cagcaggagagcggattta

SEQ ID NO: 366716 - DNA, 19 bp, Homo sapiens
  siRNA target sequence for LRRC5 (NM_018103.3,503-521).
gcaggaaccatgcaactta

SEQ ID NO: 366717 - DNA, 19 bp, Homo sapiens
  siRNA target sequence for LRRC5 (NM_018103.3,606-624).
ccaccaacatcccaaagat

SEQ ID NO: 366718 - DNA, 19 bp, Homo sapiens
  siRNA target sequence for LRRC5 (NM_018103.3,647-665).
caagatgggcggacaacaa

SEQ ID NO: 366719 - DNA, 19 bp, Homo sapiens
  siRNA target sequence for LRRC5 (NM_018103.3,656-674).
cggacaacaaacgacattt

SEQ ID NO: 366720 - DNA, 19 bp, Homo sapiens
  siRNA target sequence for LRRC5 (NM_018103.3,720-738).
catatcctcgcacagattt

SEQ ID NO: 366721 - DNA, 19 bp, Homo sapiens
  siRNA target sequence for LRRC5 (NM_018103.3,732-750).
cagatttcgcacttccaaa

SEQ ID NO: 366722 - DNA, 19 bp, Homo sapiens
  siRNA target sequence for LRRC5 (NM_018103.3,776-794).
gatccaacaggtcgaaaaa

SEQ ID NO: 366723 - DNA, 19 bp, Homo sapiens
  siRNA target sequence for LRRC5 (NM_018103.3,779-797).
ccaacaggtcgaaaaacaa

SEQ ID NO: 366724 - DNA, 19 bp, Homo sapiens
  siRNA target sequence for LRRC5 (NM_018103.3,780-798).
caacaggtcgaaaaacaaa

SEQ ID NO: 366725 - DNA, 19 bp, Homo sapiens
  siRNA target sequence for LRRC5 (NM_018103.3,783-801).
caggtcgaaaaacaaactt

SEQ ID NO: 366726 - DNA, 19 bp, Homo sapiens
  siRNA target sequence for LRRC5 (NM_018103.3,845-863).
ctggcccttccgtggtatt

SEQ ID NO: 366727 - DNA, 19 bp, Homo sapiens
  siRNA target sequence for LRRC5 (NM_018103.3,847-865).
ggcccttccgtggtattct

SEQ ID NO: 366728 - DNA, 19 bp, Homo sapiens
  siRNA target sequence for LRRC5 (NM_018103.3,848-866).
gcccttccgtggtattcta

SEQ ID NO: 366729 - DNA, 19 bp, Homo sapiens
  siRNA target sequence for LRRC5 (NM_018103.3,851-869).
cttccgtggtattctaagt

SEQ ID NO: 366730 - DNA, 19 bp, Homo sapiens
  siRNA target sequence for LRRC5 (NM_018103.3,854-872).
ccgtggtattctaagtact

SEQ ID NO: 366731 - DNA, 19 bp, Homo sapiens
  siRNA target sequence for LRRC5 (NM_018103.3,855-873).
cgtggtattctaagtactt

SEQ ID NO: 366732 - DNA, 19 bp, Homo sapiens
  siRNA target sequence for LRRC5 (NM_018103.3,907-925).
catggtcagtagcaacttt

SEQ ID NO: 366733 - DNA, 19 bp, Homo sapiens
  siRNA target sequence for LRRC5 (NM_018103.3,911-929).
gtcagtagcaacttttggt

SEQ ID NO: 366734 - DNA, 19 bp, Homo sapiens
  siRNA target sequence for LRRC5 (NM_018103.3,919-937).
caacttttggttcaaatat

SEQ ID NO: 366735 - DNA, 19 bp, Homo sapiens
  siRNA target sequence for LRRC5 (NM_018103.3,1122-1140).
gtgccagtacaccaatgat

SEQ ID NO: 366736 - DNA, 19 bp, Homo sapiens
  siRNA target sequence for LRRC5 (NM_018103.3,1124-1142).
gccagtacaccaatgatca

SEQ ID NO: 366737 - DNA, 19 bp, Homo sapiens
  siRNA target sequence for LRRC5 (NM_018103.3,1125-1143).
ccagtacaccaatgatcaa

SEQ ID NO: 366738 - DNA, 19 bp, Homo sapiens
  siRNA target sequence for LRRC5 (NM_018103.3,1126-1144).
cagtacaccaatgatcaat

SEQ ID NO: 366739 - DNA, 19 bp, Homo sapiens
  siRNA target sequence for LRRC5 (NM_018103.3,1200-1218).
caatcctggataaaaagga

SEQ ID NO: 366740 - DNA, 19 bp, Homo sapiens
  siRNA target sequence for LRRC5 (NM_018103.3,1277-1295).
gatagtgacttgatctata

SEQ ID NO: 366741 - DNA, 19 bp, Homo sapiens
  siRNA target sequence for LRRC5 (NM_018103.3,1281-1299).
gtgacttgatctataaact

SEQ ID NO: 366742 - DNA, 19 bp, Homo sapiens
  siRNA target sequence for LRRC5 (NM_018103.3,1283-1301).
gacttgatctataaactct

SEQ ID NO: 366743 - DNA, 19 bp, Homo sapiens
  siRNA target sequence for LRRC5 (NM_018103.3,1304-1322).
gtggtccaaacagttatca

SEQ ID NO: 366744 - DNA, 19 bp, Homo sapiens
  siRNA target sequence for LRRC5 (NM_018103.3,1307-1325).
gtccaaacagttatcaaaa

SEQ ID NO: 366745 - DNA, 19 bp, Homo sapiens
  siRNA target sequence for LRRC5 (NM_018103.3,1348-1366).
ctgctatacagcgaacttt

SEQ ID NO: 366746 - DNA, 19 bp, Homo sapiens
  siRNA target sequence for LRRC5 (NM_018103.3,1369-1387).
caacgcaatcagctttgaa

SEQ ID NO: 366747 - DNA, 19 bp, Homo sapiens
  siRNA target sequence for LRRC5 (NM_018103.3,1406-1424).
gttgagcatctgattggtt

SEQ ID NO: 366748 - DNA, 19 bp, Homo sapiens
  siRNA target sequence for LRRC5 (NM_018103.3,1417-1435).
gattggttatgaggtattt

SEQ ID NO: 366749 - DNA, 19 bp, Homo sapiens
  siRNA target sequence for LRRC5 (NM_018103.3,1443-1461).
cccacaatatggcttacat

SEQ ID NO: 366750 - DNA, 19 bp, Homo sapiens
  siRNA target sequence for LRRC5 (NM_018103.3,1471-1489).
gcttctcatcagttacata

SEQ ID NO: 366751 - DNA, 19 bp, Homo sapiens
  siRNA target sequence for LRRC5 (NM_018103.3,1486-1504).
catatccattatttgtgtt

SEQ ID NO: 366752 - DNA, 19 bp, Homo sapiens
  siRNA target sequence for LRRC5 (NM_018103.3,1536-1554).
ggttattcaggataccttt

SEQ ID NO: 366753 - DNA, 19 bp, Homo sapiens
  siRNA target sequence for LRRC5 (NM_018103.3,1545-1563).
ggatacctttgaaggaata

SEQ ID NO: 366754 - DNA, 19 bp, Homo sapiens
  siRNA target sequence for LRRC5 (NM_018103.3,1685-1703).
gtgttcttgtcagaagtta

SEQ ID NO: 366755 - DNA, 19 bp, Homo sapiens
  siRNA target sequence for LRRC5 (NM_018103.3,1715-1733).
cttagggaaattagtttga

SEQ ID NO: 366756 - DNA, 19 bp, Homo sapiens
  siRNA target sequence for LRRC5 (NM_018103.3,1822-1840).
ggtgcccgatgctgtcttt

SEQ ID NO: 366757 - DNA, 19 bp, Homo sapiens
  siRNA target sequence for LRRC5 (NM_018103.3,1861-1879).
gctaaagcttgaactaatt

SEQ ID NO: 366758 - DNA, 19 bp, Homo sapiens
  siRNA target sequence for LRRC5 (NM_018103.3,1961-1979).
gaacagactgcttttagct

SEQ ID NO: 366759 - DNA, 19 bp, Homo sapiens
  siRNA target sequence for LRRC5 (NM_018103.3,1977-1995).
gctttcttcgcgatcactt

SEQ ID NO: 366760 - DNA, 19 bp, Homo sapiens
  siRNA target sequence for LRRC5 (NM_018103.3,1982-2000).
cttcgcgatcacttgagat

SEQ ID NO: 366761 - DNA, 19 bp, Homo sapiens
  siRNA target sequence for LRRC5 (NM_018103.3,1998-2016).
gatgccttcacgtgaagtt

SEQ ID NO: 366762 - DNA, 19 bp, Homo sapiens
  siRNA target sequence for LRRC5 (NM_018103.3,2017-2035).
cactgatgtggctgaaatt

SEQ ID NO: 366763 - DNA, 19 bp, Homo sapiens
  siRNA target sequence for LRRC5 (NM_018103.3,2037-2055).
ctgcctgggtgtatttgct

SEQ ID NO: 366764 - DNA, 19 bp, Homo sapiens
  siRNA target sequence for LRRC5 (NM_018103.3,2062-2080).
ccttcgagagttgtactta

SEQ ID NO: 366765 - DNA, 19 bp, Homo sapiens
  siRNA target sequence for LRRC5 (NM_018103.3,2085-2103).
gcaatttgaactctgaaaa

SEQ ID NO: 366766 - DNA, 19 bp, Homo sapiens
  siRNA target sequence for LRRC5 (NM_018103.3,2097-2115).
ctgaaaacaataagatgat

SEQ ID NO: 366767 - DNA, 19 bp, Homo sapiens
  siRNA target sequence for LRRC5 (NM_018103.3,2110-2128).
gatgataggacttgaatct

SEQ ID NO: 366768 - DNA, 19 bp, Homo sapiens
  siRNA target sequence for LRRC5 (NM_018103.3,2133-2151).
gagagttgcggcaccttaa

SEQ ID NO: 366769 - DNA, 19 bp, Homo sapiens
  siRNA target sequence for LRRC5 (NM_018103.3,2135-2153).
gagttgcggcaccttaaga

SEQ ID NO: 366770 - DNA, 19 bp, Homo sapiens
  siRNA target sequence for LRRC5 (NM_018103.3,2137-2155).
gttgcggcaccttaagatt

SEQ ID NO: 366771 - DNA, 19 bp, Homo sapiens
  siRNA target sequence for LRRC5 (NM_018103.3,2159-2177).
cacgtgaagagcaatttga

SEQ ID NO: 366772 - DNA, 19 bp, Homo sapiens
  siRNA target sequence for LRRC5 (NM_018103.3,2211-2229).
cacatcttacaaagttagt

SEQ ID NO: 366773 - DNA, 19 bp, Homo sapiens
  siRNA target sequence for LRRC5 (NM_018103.3,2213-2231).
catcttacaaagttagtca

SEQ ID NO: 366774 - DNA, 19 bp, Homo sapiens
  siRNA target sequence for LRRC5 (NM_018103.3,2220-2238).
caaagttagtcattcataa

SEQ ID NO: 366775 - DNA, 19 bp, Homo sapiens
  siRNA target sequence for LRRC5 (NM_018103.3,2247-2265).
ctaaactcttggtactgaa

SEQ ID NO: 366776 - DNA, 19 bp, Homo sapiens
  siRNA target sequence for LRRC5 (NM_018103.3,2258-2276).
gtactgaacagccttaaga

SEQ ID NO: 366777 - DNA, 19 bp, Homo sapiens
  siRNA target sequence for LRRC5 (NM_018103.3,2323-2341).
gagaatcccacatgctatt

SEQ ID NO: 366778 - DNA, 19 bp, Homo sapiens
  siRNA target sequence for LRRC5 (NM_018103.3,2325-2343).
gaatcccacatgctatttt

SEQ ID NO: 366779 - DNA, 19 bp, Homo sapiens
  siRNA target sequence for LRRC5 (NM_018103.3,2429-2447).
cgactgacttgtttaaaat

SEQ ID NO: 366780 - DNA, 19 bp, Homo sapiens
  siRNA target sequence for LRRC5 (NM_018103.3,2452-2470).
gcataacaaaattgttact

SEQ ID NO: 366781 - DNA, 19 bp, Homo sapiens
  siRNA target sequence for LRRC5 (NM_018103.3,2453-2471).
cataacaaaattgttacta

SEQ ID NO: 366782 - DNA, 19 bp, Homo sapiens
  siRNA target sequence for LRRC5 (NM_018103.3,2478-2496).
cctctattacccatgtcaa

SEQ ID NO: 366783 - DNA, 19 bp, Homo sapiens
  siRNA target sequence for LRRC5 (NM_018103.3,2479-2497).
ctctattacccatgtcaaa

SEQ ID NO: 366784 - DNA, 19 bp, Homo sapiens
  siRNA target sequence for LRRC5 (NM_018103.3,2481-2499).
ctattacccatgtcaaaaa

SEQ ID NO: 366785 - DNA, 19 bp, Homo sapiens
  siRNA target sequence for LRRC5 (NM_018103.3,2524-2542).
caacaagctcgaatcctta

SEQ ID NO: 366786 - DNA, 19 bp, Homo sapiens
  siRNA target sequence for LRRC5 (NM_018103.3,2543-2561).
ccagtggcagtatttagtt

SEQ ID NO: 366787 - DNA, 19 bp, Homo sapiens
  siRNA target sequence for LRRC5 (NM_018103.3,2549-2567).
gcagtatttagtttacaga

SEQ ID NO: 366788 - DNA, 19 bp, Homo sapiens
  siRNA target sequence for LRRC5 (NM_018103.3,2566-2584).
gaaactcagatgcttagat

SEQ ID NO: 366789 - DNA, 19 bp, Homo sapiens
  siRNA target sequence for LRRC5 (NM_018103.3,2639-2657).
ctgcagcatttgcatatca

SEQ ID NO: 366790 - DNA, 19 bp, Homo sapiens
  siRNA target sequence for LRRC5 (NM_018103.3,2742-2760).
cctcactcccagagaaagt

SEQ ID NO: 366791 - DNA, 19 bp, Homo sapiens
  siRNA target sequence for LRRC5 (NM_018103.3,2743-2761).
ctcactcccagagaaagtt

SEQ ID NO: 366792 - DNA, 19 bp, Homo sapiens
  siRNA target sequence for LRRC5 (NM_018103.3,2890-2908).
cctgccactcgaagtcaaa

SEQ ID NO: 366793 - DNA, 19 bp, Homo sapiens
  siRNA target sequence for LRRC5 (NM_018103.3,2911-2929).
ggcattgaatcaagacata

SEQ ID NO: 366794 - DNA, 19 bp, Homo sapiens
  siRNA target sequence for LRRC5 (NM_018103.3,2912-2930).
gcattgaatcaagacataa

SEQ ID NO: 366795 - DNA, 19 bp, Homo sapiens
  siRNA target sequence for THAP1 (NM_018105.2,293-311).
ccgtttctttccacaagtt

SEQ ID NO: 366796 - DNA, 19 bp, Homo sapiens
  siRNA target sequence for THAP1 (NM_018105.2,294-312).
cgtttctttccacaagttt

SEQ ID NO: 366797 - DNA, 19 bp, Homo sapiens
  siRNA target sequence for THAP1 (NM_018105.2,303-321).
ccacaagtttcctcttact

SEQ ID NO: 366798 - DNA, 19 bp, Homo sapiens
  siRNA target sequence for THAP1 (NM_018105.2,316-334).
cttactcgacccagtcttt

SEQ ID NO: 366799 - DNA, 19 bp, Homo sapiens
  siRNA target sequence for THAP1 (NM_018105.2,320-338).
ctcgacccagtctttgtaa

SEQ ID NO: 366800 - DNA, 19 bp, Homo sapiens
  siRNA target sequence for THAP1 (NM_018105.2,567-585).
ccaggttgatgctgctatt

SEQ ID NO: 366801 - DNA, 19 bp, Homo sapiens
  siRNA target sequence for THAP1 (NM_018105.2,570-588).
ggttgatgctgctattgga

SEQ ID NO: 366802 - DNA, 19 bp, Homo sapiens
  siRNA target sequence for THAP1 (NM_018105.2,577-595).
gctgctattggattactaa

SEQ ID NO: 366803 - DNA, 19 bp, Homo sapiens
  siRNA target sequence for THAP1 (NM_018105.2,602-620).
ctcttcagacccctgttaa

SEQ ID NO: 366804 - DNA, 19 bp, Homo sapiens
  siRNA target sequence for THAP1 (NM_018105.2,614-632).
ctgttaatctctcagtttt

SEQ ID NO: 366805 - DNA, 19 bp, Homo sapiens
  siRNA target sequence for THAP1 (NM_018105.2,635-653).
gtgaccacaactatactgt

SEQ ID NO: 366806 - DNA, 19 bp, Homo sapiens
  siRNA target sequence for THAP1 (NM_018105.2,666-684).
gcaccagcggaaaaggatt

SEQ ID NO: 366807 - DNA, 19 bp, Homo sapiens
  siRNA target sequence for THAP1 (NM_018105.2,680-698).
ggattcatcagctagaaca

SEQ ID NO: 366808 - DNA, 19 bp, Homo sapiens
  siRNA target sequence for THAP1 (NM_018105.2,760-778).
cggcagcttgaaaaattaa

SEQ ID NO: 366809 - DNA, 19 bp, Homo sapiens
  siRNA target sequence for THAP1 (NM_018105.2,804-822).
gaaagacgacgtatcagaa

SEQ ID NO: 366810 - DNA, 19 bp, Homo sapiens
  siRNA target sequence for THAP1 (NM_018105.2,827-845).
gttatgtgattctaccaaa

SEQ ID NO: 366811 - DNA, 19 bp, Homo sapiens
  siRNA target sequence for FLJ10490 (NM_018111.1,159-177).
ggaaagacgcgctgtgttt

SEQ ID NO: 366812 - DNA, 19 bp, Homo sapiens
  siRNA target sequence for FLJ10493 (NM_018112.1,153-171).
ctcccgcacgtccatgttt

SEQ ID NO: 366813 - DNA, 19 bp, Homo sapiens
  siRNA target sequence for FLJ10493 (NM_018112.1,243-261).
ggcatggaagaatcctatt

SEQ ID NO: 366814 - DNA, 19 bp, Homo sapiens
  siRNA target sequence for FLJ10493 (NM_018112.1,256-274).
cctatttcaagctggttta

SEQ ID NO: 366815 - DNA, 19 bp, Homo sapiens
  siRNA target sequence for FLJ10493 (NM_018112.1,295-313).
ggtggaggaattttatcct

SEQ ID NO: 366816 - DNA, 19 bp, Homo sapiens
  siRNA target sequence for FLJ10493 (NM_018112.1,330-348).
gcctccattgaagtttctt

SEQ ID NO: 366817 - DNA, 19 bp, Homo sapiens
  siRNA target sequence for FLJ10493 (NM_018112.1,346-364).
cttgcaaaccacactaaca

SEQ ID NO: 366818 - DNA, 19 bp, Homo sapiens
  siRNA target sequence for FLJ10493 (NM_018112.1,349-367).
gcaaaccacactaacatat

SEQ ID NO: 366819 - DNA, 19 bp, Homo sapiens
  siRNA target sequence for FLJ10493 (NM_018112.1,363-381).
catattactggcatcttca

SEQ ID NO: 366820 - DNA, 19 bp, Homo sapiens
  siRNA target sequence for FLJ10493 (NM_018112.1,373-391).
gcatcttcaatctggtata

SEQ ID NO: 366821 - DNA, 19 bp, Homo sapiens
  siRNA target sequence for FLJ10493 (NM_018112.1,423-441).
ccagggctattcatatcta

SEQ ID NO: 366822 - DNA, 19 bp, Homo sapiens
  siRNA target sequence for FLJ10493 (NM_018112.1,479-497).
ccagaacttggaaaatagt

SEQ ID NO: 366823 - DNA, 19 bp, Homo sapiens
  siRNA target sequence for FLJ10493 (NM_018112.1,502-520).
ggagtcacacatgctaata

SEQ ID NO: 366824 - DNA, 19 bp, Homo sapiens
  siRNA target sequence for FLJ10493 (NM_018112.1,505-523).
gtcacacatgctaatagct

SEQ ID NO: 366825 - DNA, 19 bp, Homo sapiens
  siRNA target sequence for FLJ10493 (NM_018112.1,509-527).
cacatgctaatagctatta

SEQ ID NO: 366826 - DNA, 19 bp, Homo sapiens
  siRNA target sequence for FLJ10493 (NM_018112.1,514-532).
gctaatagctattacaaaa

SEQ ID NO: 366827 - DNA, 19 bp, Homo sapiens
  siRNA target sequence for FLJ10493 (NM_018112.1,515-533).
ctaatagctattacaaaaa

SEQ ID NO: 366828 - DNA, 19 bp, Homo sapiens
  siRNA target sequence for FLJ10493 (NM_018112.1,572-590).
gtgcaggtggtaccattat

SEQ ID NO: 366829 - DNA, 19 bp, Homo sapiens
  siRNA target sequence for FLJ10493 (NM_018112.1,577-595).
ggtggtaccattataacga

SEQ ID NO: 366830 - DNA, 19 bp, Homo sapiens
  siRNA target sequence for FLJ10493 (NM_018112.1,578-596).
gtggtaccattataacgaa

SEQ ID NO: 366831 - DNA, 19 bp, Homo sapiens
  siRNA target sequence for FLJ10493 (NM_018112.1,580-598).
ggtaccattataacgaatt

SEQ ID NO: 366832 - DNA, 19 bp, Homo sapiens
  siRNA target sequence for FLJ10493 (NM_018112.1,581-599).
gtaccattataacgaattt

SEQ ID NO: 366833 - DNA, 19 bp, Homo sapiens
  siRNA target sequence for FLJ10493 (NM_018112.1,584-602).
ccattataacgaattttga

SEQ ID NO: 366834 - DNA, 19 bp, Homo sapiens
  siRNA target sequence for FLJ10493 (NM_018112.1,640-658).
gaatggctgaagatgtcat

SEQ ID NO: 366835 - DNA, 19 bp, Homo sapiens
  siRNA target sequence for FLJ10493 (NM_018112.1,674-692).
ccctgctggggtcagttat

SEQ ID NO: 366836 - DNA, 19 bp, Homo sapiens
  siRNA target sequence for FLJ10493 (NM_018112.1,679-697).
ctggggtcagttatcttca

SEQ ID NO: 366837 - DNA, 19 bp, Homo sapiens
  siRNA target sequence for FLJ10493 (NM_018112.1,682-700).
gggtcagttatcttcacat

SEQ ID NO: 366838 - DNA, 19 bp, Homo sapiens
  siRNA target sequence for FLJ10493 (NM_018112.1,718-736).
ctggcaatatcaaagcata

SEQ ID NO: 366839 - DNA, 19 bp, Homo sapiens
  siRNA target sequence for FLJ10493 (NM_018112.1,720-738).
ggcaatatcaaagcataat

SEQ ID NO: 366840 - DNA, 19 bp, Homo sapiens
  siRNA target sequence for FLJ10493 (NM_018112.1,747-765).
cctttataccatctttatt

SEQ ID NO: 366841 - DNA, 19 bp, Homo sapiens
  siRNA target sequence for FLJ10493 (NM_018112.1,817-835).
gctccttttgaggatacat

SEQ ID NO: 366842 - DNA, 19 bp, Homo sapiens
  siRNA target sequence for FLJ10493 (NM_018112.1,818-836).
ctccttttgaggatacatt

SEQ ID NO: 366843 - DNA, 19 bp, Homo sapiens
  siRNA target sequence for FLJ10493 (NM_018112.1,930-948).
ctcaaagccggtagatgtt

SEQ ID NO: 366844 - DNA, 19 bp, Homo sapiens
  siRNA target sequence for FLJ10493 (NM_018112.1,940-958).
gtagatgttgcctcagata

SEQ ID NO: 366845 - DNA, 19 bp, Homo sapiens
  siRNA target sequence for FLJ10498 (NM_018115.1,261-279).
gactttatacacacatatt

SEQ ID NO: 366846 - DNA, 19 bp, Homo sapiens
  siRNA target sequence for FLJ10498 (NM_018115.1,263-281).
ctttatacacacatattgt

SEQ ID NO: 366847 - DNA, 19 bp, Homo sapiens
  siRNA target sequence for FLJ10498 (NM_018115.1,304-322).
gcaaaacacaagaacaata

SEQ ID NO: 366848 - DNA, 19 bp, Homo sapiens
  siRNA target sequence for FLJ10498 (NM_018115.1,1494-1512).
cactagccgagttttaact

SEQ ID NO: 366849 - DNA, 19 bp, Homo sapiens
  siRNA target sequence for FLJ10498 (NM_018115.1,1496-1514).
ctagccgagttttaactca

SEQ ID NO: 366850 - DNA, 19 bp, Homo sapiens
  siRNA target sequence for FLJ10498 (NM_018115.1,1769-1787).
ccagttcgacaaataaaga

SEQ ID NO: 366851 - DNA, 19 bp, Homo sapiens
  siRNA target sequence for FLJ10498 (NM_018115.1,1772-1790).
gttcgacaaataaagagaa

SEQ ID NO: 366852 - DNA, 19 bp, Homo sapiens
  siRNA target sequence for FLJ10498 (NM_018115.1,1877-1895).
cactacgagatgcactttt

SEQ ID NO: 366853 - DNA, 19 bp, Homo sapiens
  siRNA target sequence for FLJ10498 (NM_018115.1,1879-1897).
ctacgagatgcacttttga

SEQ ID NO: 366854 - DNA, 19 bp, Homo sapiens
  siRNA target sequence for FLJ10498 (NM_018115.1,1882-1900).
cgagatgcacttttgaaaa

SEQ ID NO: 366855 - DNA, 19 bp, Homo sapiens
  siRNA target sequence for MCM3APAS (NM_018118.1,701-719).
gggataataagtaacagta

SEQ ID NO: 366856 - DNA, 19 bp, Homo sapiens
  siRNA target sequence for MCM3APAS (NM_018118.1,711-729).
gtaacagtacccatacaca

SEQ ID NO: 366857 - DNA, 19 bp, Homo sapiens
  siRNA target sequence for MCM3APAS (NM_018118.1,779-797).
ggaggagcagggacacata

SEQ ID NO: 366858 - DNA, 19 bp, Homo sapiens
  siRNA target sequence for MCM3APAS (NM_018118.1,783-801).
gagcagggacacatatgct

SEQ ID NO: 366859 - DNA, 19 bp, Homo sapiens
  siRNA target sequence for MCM3APAS (NM_018118.1,792-810).
cacatatgctcacaatgat

SEQ ID NO: 366860 - DNA, 19 bp, Homo sapiens
  siRNA target sequence for C10orf6 (NM_018121.2,676-694).
gggacaggaagcagtcaat

SEQ ID NO: 366861 - DNA, 19 bp, Homo sapiens
  siRNA target sequence for C10orf6 (NM_018121.2,677-695).
ggacaggaagcagtcaatt

SEQ ID NO: 366862 - DNA, 19 bp, Homo sapiens
  siRNA target sequence for C10orf6 (NM_018121.2,683-701).
gaagcagtcaattatagat

SEQ ID NO: 366863 - DNA, 19 bp, Homo sapiens
  siRNA target sequence for C10orf6 (NM_018121.2,687-705).
cagtcaattatagatttct

SEQ ID NO: 366864 - DNA, 19 bp, Homo sapiens
  siRNA target sequence for C10orf6 (NM_018121.2,707-725).
caaaccagcttcaaaacaa

SEQ ID NO: 366865 - DNA, 19 bp, Homo sapiens
  siRNA target sequence for C10orf6 (NM_018121.2,726-744).
gacagacacatgttggatt

SEQ ID NO: 366866 - DNA, 19 bp, Homo sapiens
  siRNA target sequence for C10orf6 (NM_018121.2,737-755).
gttggattcaccacaaaaa

SEQ ID NO: 366867 - DNA, 19 bp, Homo sapiens
  siRNA target sequence for C10orf6 (NM_018121.2,741-759).
gattcaccacaaaaatcaa

SEQ ID NO: 366868 - DNA, 19 bp, Homo sapiens
  siRNA target sequence for C10orf6 (NM_018121.2,774-792).
ggaagtagattgtctatca

SEQ ID NO: 366869 - DNA, 19 bp, Homo sapiens
  siRNA target sequence for C10orf6 (NM_018121.2,823-841).
cctcaccaaaagaatctaa

SEQ ID NO: 366870 - DNA, 19 bp, Homo sapiens
  siRNA target sequence for C10orf6 (NM_018121.2,868-886).
gccctattatagaagcttt

SEQ ID NO: 366871 - DNA, 19 bp, Homo sapiens
  siRNA target sequence for C10orf6 (NM_018121.2,950-968).
gtcactagcctccaaatat

SEQ ID NO: 366872 - DNA, 19 bp, Homo sapiens
  siRNA target sequence for C10orf6 (NM_018121.2,972-990).
gccaaaggaacaaatatct

SEQ ID NO: 366873 - DNA, 19 bp, Homo sapiens
  siRNA target sequence for C10orf6 (NM_018121.2,1063-1081).
ggaagtcactattcattca

SEQ ID NO: 366874 - DNA, 19 bp, Homo sapiens
  siRNA target sequence for C10orf6 (NM_018121.2,1069-1087).
cactattcattcatgaaaa

SEQ ID NO: 366875 - DNA, 19 bp, Homo sapiens
  siRNA target sequence for C10orf6 (NM_018121.2,1271-1289).
ctgcagagaacgagaacta

SEQ ID NO: 366876 - DNA, 19 bp, Homo sapiens
  siRNA target sequence for C10orf6 (NM_018121.2,1582-1600).
gcacaagagaatctatgat

SEQ ID NO: 366877 - DNA, 19 bp, Homo sapiens
  siRNA target sequence for C10orf6 (NM_018121.2,1700-1718).
gttgcgcttagaagatata

SEQ ID NO: 366878 - DNA, 19 bp, Homo sapiens
  siRNA target sequence for C10orf6 (NM_018121.2,1704-1722).
cgcttagaagatatatcca

SEQ ID NO: 366879 - DNA, 19 bp, Homo sapiens
  siRNA target sequence for C10orf6 (NM_018121.2,1705-1723).
gcttagaagatatatccaa

SEQ ID NO: 366880 - DNA, 19 bp, Homo sapiens
  siRNA target sequence for C10orf6 (NM_018121.2,1721-1739).
caaggaaccgagtgatgaa

SEQ ID NO: 366881 - DNA, 19 bp, Homo sapiens
  siRNA target sequence for C10orf6 (NM_018121.2,1758-1776).
ggcttggcaccttcaaatt

SEQ ID NO: 366882 - DNA, 19 bp, Homo sapiens
  siRNA target sequence for C10orf6 (NM_018121.2,1830-1848).
ggtaccaaggagactaaga

SEQ ID NO: 366883 - DNA, 19 bp, Homo sapiens
  siRNA target sequence for C10orf6 (NM_018121.2,1831-1849).
gtaccaaggagactaagat

SEQ ID NO: 366884 - DNA, 19 bp, Homo sapiens
  siRNA target sequence for C10orf6 (NM_018121.2,1858-1876).
cccacttacctttatctca

SEQ ID NO: 366885 - DNA, 19 bp, Homo sapiens
  siRNA target sequence for C10orf6 (NM_018121.2,1883-1901).
gtctgcaattaaaaaagct

SEQ ID NO: 366886 - DNA, 19 bp, Homo sapiens
  siRNA target sequence for C10orf6 (NM_018121.2,1949-1967).
ggagacaaaactaccttta

SEQ ID NO: 366887 - DNA, 19 bp, Homo sapiens
  siRNA target sequence for C10orf6 (NM_018121.2,1990-2008).
gttcctctctagtaccatt

SEQ ID NO: 366888 - DNA, 19 bp, Homo sapiens
  siRNA target sequence for C10orf6 (NM_018121.2,1993-2011).
cctctctagtaccattaaa

SEQ ID NO: 366889 - DNA, 19 bp, Homo sapiens
  siRNA target sequence for C10orf6 (NM_018121.2,1994-2012).
ctctctagtaccattaaat

SEQ ID NO: 366890 - DNA, 19 bp, Homo sapiens
  siRNA target sequence for C10orf6 (NM_018121.2,1998-2016).
ctagtaccattaaatgcta

SEQ ID NO: 366891 - DNA, 19 bp, Homo sapiens
  siRNA target sequence for C10orf6 (NM_018121.2,2054-2072).
gcgttcctcatctaaagaa

SEQ ID NO: 366892 - DNA, 19 bp, Homo sapiens
  siRNA target sequence for C10orf6 (NM_018121.2,2055-2073).
cgttcctcatctaaagaat

SEQ ID NO: 366893 - DNA, 19 bp, Homo sapiens
  siRNA target sequence for C10orf6 (NM_018121.2,2060-2078).
ctcatctaaagaatgttct

SEQ ID NO: 366894 - DNA, 19 bp, Homo sapiens
  siRNA target sequence for C10orf6 (NM_018121.2,2125-2143).
ctaataaggccgattctaa

SEQ ID NO: 366895 - DNA, 19 bp, Homo sapiens
  siRNA target sequence for C10orf6 (NM_018121.2,2132-2150).
ggccgattctaatgtatct

SEQ ID NO: 366896 - DNA, 19 bp, Homo sapiens
  siRNA target sequence for C10orf6 (NM_018121.2,2133-2151).
gccgattctaatgtatctt

SEQ ID NO: 366897 - DNA, 19 bp, Homo sapiens
  siRNA target sequence for C10orf6 (NM_018121.2,2135-2153).
cgattctaatgtatcttca

SEQ ID NO: 366898 - DNA, 19 bp, Homo sapiens
  siRNA target sequence for C10orf6 (NM_018121.2,2170-2188).
gacctttgcgctcagaata

SEQ ID NO: 366899 - DNA, 19 bp, Homo sapiens
  siRNA target sequence for C10orf6 (NM_018121.2,2285-2303).
gagttcaggaaattccaat

SEQ ID NO: 366900 - DNA, 19 bp, Homo sapiens
  siRNA target sequence for C10orf6 (NM_018121.2,2331-2349).
ctaaggggtgattttgata

SEQ ID NO: 366901 - DNA, 19 bp, Homo sapiens
  siRNA target sequence for C10orf6 (NM_018121.2,2352-2370).
gatgaagaaagtttaggtt

SEQ ID NO: 366902 - DNA, 19 bp, Homo sapiens
  siRNA target sequence for C10orf6 (NM_018121.2,2507-2525).
ctatacaggacatgttcat

SEQ ID NO: 366903 - DNA, 19 bp, Homo sapiens
  siRNA target sequence for C10orf6 (NM_018121.2,2529-2547).
ggaacttacacaaatacct

SEQ ID NO: 366904 - DNA, 19 bp, Homo sapiens
  siRNA target sequence for C10orf6 (NM_018121.2,2545-2563).
ccttagaacgtctagtgaa

SEQ ID NO: 366905 - DNA, 19 bp, Homo sapiens
  siRNA target sequence for C10orf6 (NM_018121.2,2624-2642).
gcaaggccgaggcattaaa

SEQ ID NO: 366906 - DNA, 19 bp, Homo sapiens
  siRNA target sequence for C10orf6 (NM_018121.2,2636-2654).
cattaaatccccaatcaga

SEQ ID NO: 366907 - DNA, 19 bp, Homo sapiens
  siRNA target sequence for C10orf6 (NM_018121.2,2703-2721).
cacaaggaatttctaaaga

SEQ ID NO: 366908 - DNA, 19 bp, Homo sapiens
  siRNA target sequence for C10orf6 (NM_018121.2,2728-2746).
cagttacaattgatgctat

SEQ ID NO: 366909 - DNA, 19 bp, Homo sapiens
  siRNA target sequence for C10orf6 (NM_018121.2,2810-2828).
gtataccttggatttaaga

SEQ ID NO: 366910 - DNA, 19 bp, Homo sapiens
  siRNA target sequence for C10orf6 (NM_018121.2,2903-2921).
gacaacacaaggtttcctt

SEQ ID NO: 366911 - DNA, 19 bp, Homo sapiens
  siRNA target sequence for C10orf6 (NM_018121.2,2919-2937).
cttacgtctgcttatcact

SEQ ID NO: 366912 - DNA, 19 bp, Homo sapiens
  siRNA target sequence for C10orf6 (NM_018121.2,2947-2965).
gtcctgtccctgtgttaaa

SEQ ID NO: 366913 - DNA, 19 bp, Homo sapiens
  siRNA target sequence for C10orf6 (NM_018121.2,2976-2994).
cggatgatgtcagttcata

SEQ ID NO: 366914 - DNA, 19 bp, Homo sapiens
  siRNA target sequence for C10orf6 (NM_018121.2,2978-2996).
gatgatgtcagttcataca

SEQ ID NO: 366915 - DNA, 19 bp, Homo sapiens
  siRNA target sequence for C10orf6 (NM_018121.2,3043-3061).
caattagaaatgatacctt

SEQ ID NO: 366916 - DNA, 19 bp, Homo sapiens
  siRNA target sequence for C10orf6 (NM_018121.2,3079-3097).
ggccatggatcccatcatt

SEQ ID NO: 366917 - DNA, 19 bp, Homo sapiens
  siRNA target sequence for C10orf6 (NM_018121.2,3089-3107).
cccatcattgtctgatgta

SEQ ID NO: 366918 - DNA, 19 bp, Homo sapiens
  siRNA target sequence for C10orf6 (NM_018121.2,3108-3126).
gcagctgtgtttttcaata

SEQ ID NO: 366919 - DNA, 19 bp, Homo sapiens
  siRNA target sequence for C10orf6 (NM_018121.2,3122-3140).
caatatggggattgatttt

SEQ ID NO: 366920 - DNA, 19 bp, Homo sapiens
  siRNA target sequence for C10orf6 (NM_018121.2,3128-3146).
ggggattgattttagatct

SEQ ID NO: 366921 - DNA, 19 bp, Homo sapiens
  siRNA target sequence for C10orf6 (NM_018121.2,3149-3167).
gtttcccctggagaatctt

SEQ ID NO: 366922 - DNA, 19 bp, Homo sapiens
  siRNA target sequence for C10orf6 (NM_018121.2,3176-3194).
ctttaatgaagactatcta

SEQ ID NO: 366923 - DNA, 19 bp, Homo sapiens
  siRNA target sequence for C10orf6 (NM_018121.2,3319-3337).
ctatacatccagaaggtta

SEQ ID NO: 366924 - DNA, 19 bp, Homo sapiens
  siRNA target sequence for C10orf6 (NM_018121.2,3334-3352).
gttaccaggatcgtgaaat

SEQ ID NO: 366925 - DNA, 19 bp, Homo sapiens
  siRNA target sequence for C10orf6 (NM_018121.2,3339-3357).
caggatcgtgaaataatgt

SEQ ID NO: 366926 - DNA, 19 bp, Homo sapiens
  siRNA target sequence for C10orf6 (NM_018121.2,3398-3416).
gctgaaacagattccttta

SEQ ID NO: 366927 - DNA, 19 bp, Homo sapiens
  siRNA target sequence for C10orf6 (NM_018121.2,3540-3558).
gtacagctggtccctaatt

SEQ ID NO: 366928 - DNA, 19 bp, Homo sapiens
  siRNA target sequence for C10orf6 (NM_018121.2,3543-3561).
cagctggtccctaattgga

SEQ ID NO: 366929 - DNA, 19 bp, Homo sapiens
  siRNA target sequence for C10orf6 (NM_018121.2,3587-3605).
gtgcctcagtctagtgatt

SEQ ID NO: 366930 - DNA, 19 bp, Homo sapiens
  siRNA target sequence for C10orf6 (NM_018121.2,3589-3607).
gcctcagtctagtgattat

SEQ ID NO: 366931 - DNA, 19 bp, Homo sapiens
  siRNA target sequence for C10orf6 (NM_018121.2,3591-3609).
ctcagtctagtgattattt

SEQ ID NO: 366932 - DNA, 19 bp, Homo sapiens
  siRNA target sequence for C10orf6 (NM_018121.2,3652-3670).
gtaatctgcaggtatcagt

SEQ ID NO: 366933 - DNA, 19 bp, Homo sapiens
  siRNA target sequence for C10orf6 (NM_018121.2,3679-3697).
gctatcttgtgcagatgaa

SEQ ID NO: 366934 - DNA, 19 bp, Homo sapiens
  siRNA target sequence for C10orf6 (NM_018121.2,3699-3717).
ccttctgatttgttaaaga

SEQ ID NO: 366935 - DNA, 19 bp, Homo sapiens
  siRNA target sequence for C10orf6 (NM_018121.2,3822-3840).
catttagtcggtgaagtta

SEQ ID NO: 366936 - DNA, 19 bp, Homo sapiens
  siRNA target sequence for C10orf6 (NM_018121.2,3828-3846).
gtcggtgaagttagttgtt

SEQ ID NO: 366937 - DNA, 19 bp, Homo sapiens
  siRNA target sequence for C10orf6 (NM_018121.2,3830-3848).
cggtgaagttagttgttct

SEQ ID NO: 366938 - DNA, 19 bp, Homo sapiens
  siRNA target sequence for C10orf6 (NM_018121.2,3834-3852).
gaagttagttgttctcatt

SEQ ID NO: 366939 - DNA, 19 bp, Homo sapiens
  siRNA target sequence for C10orf6 (NM_018121.2,3865-3883).
gacaacggaaacactttgt

SEQ ID NO: 366940 - DNA, 19 bp, Homo sapiens
  siRNA target sequence for C10orf6 (NM_018121.2,3940-3958).
gacttttttacagaactaa

SEQ ID NO: 366941 - DNA, 19 bp, Homo sapiens
  siRNA target sequence for C10orf6 (NM_018121.2,3968-3986).
cttggtcgccaggatacat

SEQ ID NO: 366942 - DNA, 19 bp, Homo sapiens
  siRNA target sequence for FLJ10520 (NM_018124.2,566-584).
ccctactgaaggaacagat

SEQ ID NO: 366943 - DNA, 19 bp, Homo sapiens
  siRNA target sequence for FLJ10520 (NM_018124.2,670-688).
cgtgttcaggacttgcaaa

SEQ ID NO: 366944 - DNA, 19 bp, Homo sapiens
  siRNA target sequence for FLJ10520 (NM_018124.2,671-689).
gtgttcaggacttgcaaaa

SEQ ID NO: 366945 - DNA, 19 bp, Homo sapiens
  siRNA target sequence for FLJ10520 (NM_018124.2,676-694).
caggacttgcaaaaactta

SEQ ID NO: 366946 - DNA, 19 bp, Homo sapiens
  siRNA target sequence for FLJ10520 (NM_018124.2,834-852).
ccggatcatggcatactgt

SEQ ID NO: 366947 - DNA, 19 bp, Homo sapiens
  siRNA target sequence for FLJ10520 (NM_018124.2,861-879).
gagctgcctggtgatatca

SEQ ID NO: 366948 - DNA, 19 bp, Homo sapiens
  siRNA target sequence for FLJ10520 (NM_018124.2,863-881).
gctgcctggtgatatcaca

SEQ ID NO: 366949 - DNA, 19 bp, Homo sapiens
  siRNA target sequence for FLJ10520 (NM_018124.2,985-1003).
cgtggactggcgtttagca

SEQ ID NO: 366950 - DNA, 19 bp, Homo sapiens
  siRNA target sequence for FLJ10520 (NM_018124.2,1031-1049).
cttccctagacaacactat

SEQ ID NO: 366951 - DNA, 19 bp, Homo sapiens
  siRNA target sequence for FLJ10520 (NM_018124.2,1034-1052).
ccctagacaacactattaa

SEQ ID NO: 366952 - DNA, 19 bp, Homo sapiens
  siRNA target sequence for FLJ10520 (NM_018124.2,1056-1074).
gaccagcctggagacaaat

SEQ ID NO: 366953 - DNA, 19 bp, Homo sapiens
  siRNA target sequence for FLJ10520 (NM_018124.2,1076-1094).
ccgtggtccagacttataa

SEQ ID NO: 366954 - DNA, 19 bp, Homo sapiens
  siRNA target sequence for FLJ10520 (NM_018124.2,1077-1095).
cgtggtccagacttataat

SEQ ID NO: 366955 - DNA, 19 bp, Homo sapiens
  siRNA target sequence for FLJ10520 (NM_018124.2,1080-1098).
ggtccagacttataatgct

SEQ ID NO: 366956 - DNA, 19 bp, Homo sapiens
  siRNA target sequence for FLJ10520 (NM_018124.2,1127-1145).
gtcttgatgaggctaacta

SEQ ID NO: 366957 - DNA, 19 bp, Homo sapiens
  siRNA target sequence for FLJ10520 (NM_018124.2,1153-1171).
gctggactggccaatggtt

SEQ ID NO: 366958 - DNA, 19 bp, Homo sapiens
  siRNA target sequence for FLJ10520 (NM_018124.2,1169-1187).
gttcaattctggtatatga

SEQ ID NO: 366959 - DNA, 19 bp, Homo sapiens
  siRNA target sequence for FLJ10520 (NM_018124.2,1244-1262).
cactggtctccctgtcata

SEQ ID NO: 366960 - DNA, 19 bp, Homo sapiens
  siRNA target sequence for FLJ10520 (NM_018124.2,1388-1406).
cagggggctgcatagactt

SEQ ID NO: 366961 - DNA, 19 bp, Homo sapiens
  siRNA target sequence for FLJ10520 (NM_018124.2,1391-1409).
ggggctgcatagactttca

SEQ ID NO: 366962 - DNA, 19 bp, Homo sapiens
  siRNA target sequence for FLJ10520 (NM_018124.2,1393-1411).
ggctgcatagactttcaga

SEQ ID NO: 366963 - DNA, 19 bp, Homo sapiens
  siRNA target sequence for FLJ10520 (NM_018124.2,1442-1460).
cctacaggcctgataaaaa

SEQ ID NO: 366964 - DNA, 19 bp, Homo sapiens
  siRNA target sequence for FLJ10520 (NM_018124.2,1507-1525).
gatgacactggaaatccaa

SEQ ID NO: 366965 - DNA, 19 bp, Homo sapiens
  siRNA target sequence for FLJ10520 (NM_018124.2,1561-1579).
ggacctacttgcaaactat

SEQ ID NO: 366966 - DNA, 19 bp, Homo sapiens
  siRNA target sequence for FLJ10520 (NM_018124.2,1562-1580).
gacctacttgcaaactatt

SEQ ID NO: 366967 - DNA, 19 bp, Homo sapiens
  siRNA target sequence for FLJ10520 (NM_018124.2,1755-1773).
cagctacttggctacctta

SEQ ID NO: 366968 - DNA, 19 bp, Homo sapiens
  siRNA target sequence for FLJ10520 (NM_018124.2,1758-1776).
ctacttggctaccttaaca

SEQ ID NO: 366969 - DNA, 19 bp, Homo sapiens
  siRNA target sequence for FLJ10520 (NM_018124.2,1766-1784).
ctaccttaacagagaagat

SEQ ID NO: 366970 - DNA, 19 bp, Homo sapiens
  siRNA target sequence for FLJ10520 (NM_018124.2,1779-1797).
gaagatggtccacatctat

SEQ ID NO: 366971 - DNA, 19 bp, Homo sapiens
  siRNA target sequence for FLJ10521 (NM_018125.2,250-268).
ccaggagaggcgtttgagt

SEQ ID NO: 366972 - DNA, 19 bp, Homo sapiens
  siRNA target sequence for FLJ10521 (NM_018125.2,505-523).
cgcattgaccggttcactt

SEQ ID NO: 366973 - DNA, 19 bp, Homo sapiens
  siRNA target sequence for FLJ10521 (NM_018125.2,809-827).
ggactaagagagacatctt

SEQ ID NO: 366974 - DNA, 19 bp, Homo sapiens
  siRNA target sequence for FLJ10521 (NM_018125.2,862-880).
ctgaagcacaagtacgatt

SEQ ID NO: 366975 - DNA, 19 bp, Homo sapiens
  siRNA target sequence for FLJ10521 (NM_018125.2,868-886).
cacaagtacgattgtaaga

SEQ ID NO: 366976 - DNA, 19 bp, Homo sapiens
  siRNA target sequence for FLJ10521 (NM_018125.2,1370-1388).
ccatggtgctagatgtgta

SEQ ID NO: 366977 - DNA, 19 bp, Homo sapiens
  siRNA target sequence for FLJ10521 (NM_018125.2,1415-1433).
gtgccatgtccatcatcaa

SEQ ID NO: 366978 - DNA, 19 bp, Homo sapiens
  siRNA target sequence for FLJ10521 (NM_018125.2,2005-2023).
gacggtggcacctatgaca

SEQ ID NO: 366979 - DNA, 19 bp, Homo sapiens
  siRNA target sequence for FLJ10521 (NM_018125.2,2396-2414).
gggtcaacaggttacattt

SEQ ID NO: 366980 - DNA, 19 bp, Homo sapiens
  siRNA target sequence for FLJ10521 (NM_018125.2,3847-3865).
gcccaccgcaaggagattt

SEQ ID NO: 366981 - DNA, 19 bp, Homo sapiens
  siRNA target sequence for FLJ10521 (NM_018125.2,3891-3909).
gcagggctaccgcaacttt

SEQ ID NO: 366982 - DNA, 19 bp, Homo sapiens
  siRNA target sequence for FLJ10521 (NM_018125.2,3979-3997).
caggtgcccttgatgctat

SEQ ID NO: 366983 - DNA, 19 bp, Homo sapiens
  siRNA target sequence for ELAC2 (NM_018127.4,342-360).
catgcaggagcacaagtta

SEQ ID NO: 366984 - DNA, 19 bp, Homo sapiens
  siRNA target sequence for ELAC2 (NM_018127.4,395-413).
gaatgcactggtctaatgt

SEQ ID NO: 366985 - DNA, 19 bp, Homo sapiens
  siRNA target sequence for ELAC2 (NM_018127.4,501-519).
cctcgaagcaatcaaaata

SEQ ID NO: 366986 - DNA, 19 bp, Homo sapiens
  siRNA target sequence for ELAC2 (NM_018127.4,504-522).
cgaagcaatcaaaatattt

SEQ ID NO: 366987 - DNA, 19 bp, Homo sapiens
  siRNA target sequence for ELAC2 (NM_018127.4,527-545).
gtccattgaaaggaataga

SEQ ID NO: 366988 - DNA, 19 bp, Homo sapiens
  siRNA target sequence for ELAC2 (NM_018127.4,560-578).
cccactctgccccagaata

SEQ ID NO: 366989 - DNA, 19 bp, Homo sapiens
  siRNA target sequence for ELAC2 (NM_018127.4,681-699).
cagtccagagcgatcttca

SEQ ID NO: 366990 - DNA, 19 bp, Homo sapiens
  siRNA target sequence for ELAC2 (NM_018127.4,778-796).
gtcgtagctttcatctgta

SEQ ID NO: 366991 - DNA, 19 bp, Homo sapiens
  siRNA target sequence for ELAC2 (NM_018127.4,789-807).
catctgtaagcttcactta

SEQ ID NO: 366992 - DNA, 19 bp, Homo sapiens
  siRNA target sequence for ELAC2 (NM_018127.4,984-1002).
ggtagaatgtccagatgaa

SEQ ID NO: 366993 - DNA, 19 bp, Homo sapiens
  siRNA target sequence for ELAC2 (NM_018127.4,1159-1177).
cacttggtcctgaatgaga

SEQ ID NO: 366994 - DNA, 19 bp, Homo sapiens
  siRNA target sequence for ELAC2 (NM_018127.4,1197-1215).
ccttcgcagccacaagatt

SEQ ID NO: 366995 - DNA, 19 bp, Homo sapiens
  siRNA target sequence for ELAC2 (NM_018127.4,1201-1219).
cgcagccacaagattcaaa

SEQ ID NO: 366996 - DNA, 19 bp, Homo sapiens
  siRNA target sequence for ELAC2 (NM_018127.4,1362-1380).
gagggatgccattattact

SEQ ID NO: 366997 - DNA, 19 bp, Homo sapiens
  siRNA target sequence for ELAC2 (NM_018127.4,1382-1400).
gcaatcctgaggaattcat

SEQ ID NO: 366998 - DNA, 19 bp, Homo sapiens
  siRNA target sequence for ELAC2 (NM_018127.4,1490-1508).
gaagtcagtacccagaaat

SEQ ID NO: 366999 - DNA, 19 bp, Homo sapiens
  siRNA target sequence for ELAC2 (NM_018127.4,1493-1511).
gtcagtacccagaaatcat

SEQ ID NO: 367000 - DNA, 19 bp, Homo sapiens
  siRNA target sequence for ELAC2 (NM_018127.4,1536-1554).
cccgatgaagattcgaaat

SEQ ID NO: 367001 - DNA, 19 bp, Homo sapiens
  siRNA target sequence for ELAC2 (NM_018127.4,1538-1556).
cgatgaagattcgaaatgt

SEQ ID NO: 367002 - DNA, 19 bp, Homo sapiens
  siRNA target sequence for ELAC2 (NM_018127.4,1625-1643).
ggcagctgtgccgtcatta

SEQ ID NO: 367003 - DNA, 19 bp, Homo sapiens
  siRNA target sequence for ELAC2 (NM_018127.4,2346-2364).
gctgattcccccactgaaa

SEQ ID NO: 367004 - DNA, 19 bp, Homo sapiens
  siRNA target sequence for FLJ10534 (NM_018128.4,979-997).
ccgctcaagcagcagaata

SEQ ID NO: 367005 - DNA, 19 bp, Homo sapiens
  siRNA target sequence for FLJ10534 (NM_018128.4,1053-1071).
gggccgtctggcactgaaa

SEQ ID NO: 367006 - DNA, 19 bp, Homo sapiens
  siRNA target sequence for FLJ10534 (NM_018128.4,1054-1072).
ggccgtctggcactgaaaa

SEQ ID NO: 367007 - DNA, 19 bp, Homo sapiens
  siRNA target sequence for FLJ10534 (NM_018128.4,1064-1082).
cactgaaaaccctaagcaa

SEQ ID NO: 367008 - DNA, 19 bp, Homo sapiens
  siRNA target sequence for FLJ10534 (NM_018128.4,1283-1301).
gaacagtacacttgaatga

SEQ ID NO: 367009 - DNA, 19 bp, Homo sapiens
  siRNA target sequence for FLJ10534 (NM_018128.4,1306-1324).
ggaaacacccagaacttta

SEQ ID NO: 367010 - DNA, 19 bp, Homo sapiens
  siRNA target sequence for FLJ10534 (NM_018128.4,1307-1325).
gaaacacccagaactttat

SEQ ID NO: 367011 - DNA, 19 bp, Homo sapiens
  siRNA target sequence for FLJ10534 (NM_018128.4,1379-1397).
gggatctgcacgttgtgtt

SEQ ID NO: 367012 - DNA, 19 bp, Homo sapiens
  siRNA target sequence for FLJ10534 (NM_018128.4,1380-1398).
ggatctgcacgttgtgtta

SEQ ID NO: 367013 - DNA, 19 bp, Homo sapiens
  siRNA target sequence for FLJ10534 (NM_018128.4,1384-1402).
ctgcacgttgtgttagaca

SEQ ID NO: 367014 - DNA, 19 bp, Homo sapiens
  siRNA target sequence for FLJ10534 (NM_018128.4,1395-1413).
gttagacatggctaaagta

SEQ ID NO: 367015 - DNA, 19 bp, Homo sapiens
  siRNA target sequence for FLJ10534 (NM_018128.4,1406-1424).
ctaaagtagctgataccat

SEQ ID NO: 367016 - DNA, 19 bp, Homo sapiens
  siRNA target sequence for FLJ10534 (NM_018128.4,1456-1474).
gacagcaccggtgattact

SEQ ID NO: 367017 - DNA, 19 bp, Homo sapiens
  siRNA target sequence for FLJ10534 (NM_018128.4,1497-1515).
gggccttccgacctataca

SEQ ID NO: 367018 - DNA, 19 bp, Homo sapiens
  siRNA target sequence for FLJ10534 (NM_018128.4,1499-1517).
gccttccgacctatacact

SEQ ID NO: 367019 - DNA, 19 bp, Homo sapiens
  siRNA target sequence for FLJ10534 (NM_018128.4,1500-1518).
ccttccgacctatacacta

SEQ ID NO: 367020 - DNA, 19 bp, Homo sapiens
  siRNA target sequence for FLJ10534 (NM_018128.4,1596-1614).
gcgctttccgcatgacaaa

SEQ ID NO: 367021 - DNA, 19 bp, Homo sapiens
  siRNA target sequence for FLJ10534 (NM_018128.4,1598-1616).
gctttccgcatgacaaact

SEQ ID NO: 367022 - DNA, 19 bp, Homo sapiens
  siRNA target sequence for FLJ10534 (NM_018128.4,1762-1780).
gtgggcaccttgaaaattt

SEQ ID NO: 367023 - DNA, 19 bp, Homo sapiens
  siRNA target sequence for FLJ10534 (NM_018128.4,1924-1942).
gacatggcaatggagattt

SEQ ID NO: 367024 - DNA, 19 bp, Homo sapiens
  siRNA target sequence for FLJ10534 (NM_018128.4,2018-2036).
ccttgcaagcagaggttat

SEQ ID NO: 367025 - DNA, 19 bp, Homo sapiens
  siRNA target sequence for FLJ10534 (NM_018128.4,2087-2105).
gcgaggcaaaggatttctt

SEQ ID NO: 367026 - DNA, 19 bp, Homo sapiens
  siRNA target sequence for FLJ10534 (NM_018128.4,2309-2327).
gggagtctgtgcatgatga

SEQ ID NO: 367027 - DNA, 19 bp, Homo sapiens
  siRNA target sequence for FLJ10534 (NM_018128.4,2319-2337).
gcatgatgatctgtatgat

SEQ ID NO: 367028 - DNA, 19 bp, Homo sapiens
  siRNA target sequence for FLJ10534 (NM_018128.4,2437-2455).
gtggctgctcgaattcgat

SEQ ID NO: 367029 - DNA, 19 bp, Homo sapiens
  siRNA target sequence for FLJ10534 (NM_018128.4,2439-2457).
ggctgctcgaattcgattt

SEQ ID NO: 367030 - DNA, 19 bp, Homo sapiens
  siRNA target sequence for FLJ10534 (NM_018128.4,2441-2459).
ctgctcgaattcgatttca

SEQ ID NO: 367031 - DNA, 19 bp, Homo sapiens
  siRNA target sequence for FLJ10534 (NM_018128.4,2444-2462).
ctcgaattcgatttcagaa

SEQ ID NO: 367032 - DNA, 19 bp, Homo sapiens
  siRNA target sequence for FLJ10534 (NM_018128.4,2446-2464).
cgaattcgatttcagaaat

SEQ ID NO: 367033 - DNA, 19 bp, Homo sapiens
  siRNA target sequence for FLJ10534 (NM_018128.4,2489-2507).
catctccatgggatcctaa

SEQ ID NO: 367034 - DNA, 19 bp, Homo sapiens
  siRNA target sequence for FLJ10534 (NM_018128.4,2499-2517).
ggatcctaaggaaaacctt

SEQ ID NO: 367035 - DNA, 19 bp, Homo sapiens
  siRNA target sequence for FLJ10534 (NM_018128.4,2521-2539).
caagattatgctcgaatat

SEQ ID NO: 367036 - DNA, 19 bp, Homo sapiens
  siRNA target sequence for FLJ10534 (NM_018128.4,2531-2549).
ctcgaatatttcagtttca

SEQ ID NO: 367037 - DNA, 19 bp, Homo sapiens
  siRNA target sequence for FLJ10534 (NM_018128.4,2548-2566).
cagaactttactaacacta

SEQ ID NO: 367038 - DNA, 19 bp, Homo sapiens
  siRNA target sequence for FLJ10534 (NM_018128.4,2614-2632).
gaggttggctggtatgtca

SEQ ID NO: 367039 - DNA, 19 bp, Homo sapiens
  siRNA target sequence for FLJ10534 (NM_018128.4,2622-2640).
ctggtatgtcacacttcat

SEQ ID NO: 367040 - DNA, 19 bp, Homo sapiens
  siRNA target sequence for FLJ10534 (NM_018128.4,2683-2701).
ggaacacccttgattgcat

SEQ ID NO: 367041 - DNA, 19 bp, Homo sapiens
  siRNA target sequence for FLJ10534 (NM_018128.4,2684-2702).
gaacacccttgattgcatt

SEQ ID NO: 367042 - DNA, 19 bp, Homo sapiens
  siRNA target sequence for FLJ10534 (NM_018128.4,2827-2845).
cgagcctcacctttattct

SEQ ID NO: 367043 - DNA, 19 bp, Homo sapiens
  siRNA target sequence for FLJ10534 (NM_018128.4,2853-2871).
cactgcagcggacaaacat

SEQ ID NO: 367044 - DNA, 19 bp, Homo sapiens
  siRNA target sequence for FLJ10534 (NM_018128.4,2855-2873).
ctgcagcggacaaacataa

SEQ ID NO: 367045 - DNA, 19 bp, Homo sapiens
  siRNA target sequence for FLJ10534 (NM_018128.4,2904-2922).
cctggtggcgacagtctat

SEQ ID NO: 367046 - DNA, 19 bp, Homo sapiens
  siRNA target sequence for FLJ10534 (NM_018128.4,2917-2935).
gtctatgcgccaatcactt

SEQ ID NO: 367047 - DNA, 19 bp, Homo sapiens
  siRNA target sequence for FLJ10534 (NM_018128.4,3014-3032).
cagtagatccagacagaat

SEQ ID NO: 367048 - DNA, 19 bp, Homo sapiens
  siRNA target sequence for FLJ10534 (NM_018128.4,3023-3041).
cagacagaatggtcatcaa

SEQ ID NO: 367049 - DNA, 19 bp, Homo sapiens
  siRNA target sequence for FLJ10534 (NM_018128.4,3025-3043).
gacagaatggtcatcaaga

SEQ ID NO: 367050 - DNA, 19 bp, Homo sapiens
  siRNA target sequence for FLJ10534 (NM_018128.4,3058-3076).
ggtcatcctttcaaaattt

SEQ ID NO: 367051 - DNA, 19 bp, Homo sapiens
  siRNA target sequence for FLJ10534 (NM_018128.4,3088-3106).
gcagtagtacgttacatgt

SEQ ID NO: 367052 - DNA, 19 bp, Homo sapiens
  siRNA target sequence for FLJ10534 (NM_018128.4,3089-3107).
cagtagtacgttacatgtt

SEQ ID NO: 367053 - DNA, 19 bp, Homo sapiens
  siRNA target sequence for FLJ10534 (NM_018128.4,3094-3112).
gtacgttacatgttcttca

SEQ ID NO: 367054 - DNA, 19 bp, Homo sapiens
  siRNA target sequence for FLJ10534 (NM_018128.4,3194-3212).
gtacccatggccacatgaa

SEQ ID NO: 367055 - DNA, 19 bp, Homo sapiens
  siRNA target sequence for FLJ10534 (NM_018128.4,3250-3268).
gtactgatgaacctgtata

SEQ ID NO: 367056 - DNA, 19 bp, Homo sapiens
  siRNA target sequence for FLJ10534 (NM_018128.4,3255-3273).
gatgaacctgtataaacga

SEQ ID NO: 367057 - DNA, 19 bp, Homo sapiens
  siRNA target sequence for FLJ10534 (NM_018128.4,3287-3305).
ggacttatgatccatatgt

SEQ ID NO: 367058 - DNA, 19 bp, Homo sapiens
  siRNA target sequence for FLJ10534 (NM_018128.4,3288-3306).
gacttatgatccatatgta

SEQ ID NO: 367059 - DNA, 19 bp, Homo sapiens
  siRNA target sequence for FLJ10539 (NM_018130.1,363-381).
ggggctgaacatgttaact

SEQ ID NO: 367060 - DNA, 19 bp, Homo sapiens
  siRNA target sequence for FLJ10539 (NM_018130.1,383-401).
ctcttctggcaccaagaaa

SEQ ID NO: 367061 - DNA, 19 bp, Homo sapiens
  siRNA target sequence for FLJ10539 (NM_018130.1,536-554).
cgcagtgccactatggatt

SEQ ID NO: 367062 - DNA, 19 bp, Homo sapiens
  siRNA target sequence for FLJ10539 (NM_018130.1,537-555).
gcagtgccactatggattt

SEQ ID NO: 367063 - DNA, 19 bp, Homo sapiens
  siRNA target sequence for FLJ10539 (NM_018130.1,550-568).
ggatttggaaacttacgat

SEQ ID NO: 367064 - DNA, 19 bp, Homo sapiens
  siRNA target sequence for FLJ10539 (NM_018130.1,600-618).
gagtgatgttattgatatt

SEQ ID NO: 367065 - DNA, 19 bp, Homo sapiens
  siRNA target sequence for FLJ10539 (NM_018130.1,697-715).
cattatctagctgactttt

SEQ ID NO: 367066 - DNA, 19 bp, Homo sapiens
  siRNA target sequence for FLJ10539 (NM_018130.1,724-742).
gaggcgattgaacagattt

SEQ ID NO: 367067 - DNA, 19 bp, Homo sapiens
  siRNA target sequence for FLJ10539 (NM_018130.1,727-745).
gcgattgaacagattttga

SEQ ID NO: 367068 - DNA, 19 bp, Homo sapiens
  siRNA target sequence for FLJ10539 (NM_018130.1,728-746).
cgattgaacagattttgaa

SEQ ID NO: 367069 - DNA, 19 bp, Homo sapiens
  siRNA target sequence for FLJ10539 (NM_018130.1,754-772).
ccttggtggactgacaaat

SEQ ID NO: 367070 - DNA, 19 bp, Homo sapiens
  siRNA target sequence for FLJ10539 (NM_018130.1,755-773).
cttggtggactgacaaata

SEQ ID NO: 367071 - DNA, 19 bp, Homo sapiens
  siRNA target sequence for FLJ10539 (NM_018130.1,852-870).
gaagtatcagctacgaaaa

SEQ ID NO: 367072 - DNA, 19 bp, Homo sapiens
  siRNA target sequence for FLJ10539 (NM_018130.1,859-877).
cagctacgaaaatttgtca

SEQ ID NO: 367073 - DNA, 19 bp, Homo sapiens
  siRNA target sequence for FLJ10539 (NM_018130.1,861-879).
gctacgaaaatttgtcaat

SEQ ID NO: 367074 - DNA, 19 bp, Homo sapiens
  siRNA target sequence for FLJ10539 (NM_018130.1,862-880).
ctacgaaaatttgtcaata

SEQ ID NO: 367075 - DNA, 19 bp, Homo sapiens
  siRNA target sequence for FLJ10539 (NM_018130.1,865-883).
cgaaaatttgtcaataaat

SEQ ID NO: 367076 - DNA, 19 bp, Homo sapiens
  siRNA target sequence for FLJ10539 (NM_018130.1,924-942).
cagtttgattgatatcctt

SEQ ID NO: 367077 - DNA, 19 bp, Homo sapiens
  siRNA target sequence for FLJ10539 (NM_018130.1,988-1006).
gttgaatctgcatggaata

SEQ ID NO: 367078 - DNA, 19 bp, Homo sapiens
  siRNA target sequence for FLJ10539 (NM_018130.1,991-1009).
gaatctgcatggaatatca

SEQ ID NO: 367079 - DNA, 19 bp, Homo sapiens
  siRNA target sequence for FLJ10539 (NM_018130.1,1043-1061).
cttggactaacgttcatga

SEQ ID NO: 367080 - DNA, 19 bp, Homo sapiens
  siRNA target sequence for FLJ10539 (NM_018130.1,1046-1064).
ggactaacgttcatgatat

SEQ ID NO: 367081 - DNA, 19 bp, Homo sapiens
  siRNA target sequence for FLJ10539 (NM_018130.1,1049-1067).
ctaacgttcatgatatcat

SEQ ID NO: 367082 - DNA, 19 bp, Homo sapiens
  siRNA target sequence for FLJ10539 (NM_018130.1,1089-1107).
gttgtgttacccactctat

SEQ ID NO: 367083 - DNA, 19 bp, Homo sapiens
  siRNA target sequence for FLJ10539 (NM_018130.1,1099-1117).
ccactctatcgccatttca

SEQ ID NO: 367084 - DNA, 19 bp, Homo sapiens
  siRNA target sequence for FLJ10539 (NM_018130.1,1100-1118).
cactctatcgccatttcaa

SEQ ID NO: 367085 - DNA, 19 bp, Homo sapiens
  siRNA target sequence for FLJ10539 (NM_018130.1,1131-1149).
ggcctacagggacactata

SEQ ID NO: 367086 - DNA, 19 bp, Homo sapiens
  siRNA target sequence for FLJ10539 (NM_018130.1,1137-1155).
cagggacactataaagata

SEQ ID NO: 367087 - DNA, 19 bp, Homo sapiens
  siRNA target sequence for FLJ10539 (NM_018130.1,1139-1157).
gggacactataaagatatt

SEQ ID NO: 367088 - DNA, 19 bp, Homo sapiens
  siRNA target sequence for FLJ10539 (NM_018130.1,1222-1240).
gacccagcgtacatactga

SEQ ID NO: 367089 - DNA, 19 bp, Homo sapiens
  siRNA target sequence for FLJ10539 (NM_018130.1,1224-1242).
cccagcgtacatactgaat

SEQ ID NO: 367090 - DNA, 19 bp, Homo sapiens
  siRNA target sequence for FLJ10539 (NM_018130.1,1226-1244).
cagcgtacatactgaatga

SEQ ID NO: 367091 - DNA, 19 bp, Homo sapiens
  siRNA target sequence for FLJ10539 (NM_018130.1,1229-1247).
cgtacatactgaatgatct

SEQ ID NO: 367092 - DNA, 19 bp, Homo sapiens
  siRNA target sequence for FLJ10539 (NM_018130.1,1265-1283).
gtgtgtggattcagaaagt

SEQ ID NO: 367093 - DNA, 19 bp, Homo sapiens
  siRNA target sequence for FLJ10539 (NM_018130.1,1304-1322).
ctcttgcagaagccttaaa

SEQ ID NO: 367094 - DNA, 19 bp, Homo sapiens
  siRNA target sequence for FLJ10539 (NM_018130.1,1455-1473).
cagctctgaggcaagtgat

SEQ ID NO: 367095 - DNA, 19 bp, Homo sapiens
  siRNA target sequence for FLJ10539 (NM_018130.1,1624-1642).
ggtggagtacgcagaaaca

SEQ ID NO: 367096 - DNA, 19 bp, Homo sapiens
  siRNA target sequence for FLJ10539 (NM_018130.1,1783-1801).
gctgtaaaccgcagcaata

SEQ ID NO: 367097 - DNA, 19 bp, Homo sapiens
  siRNA target sequence for FLJ10539 (NM_018130.1,1784-1802).
ctgtaaaccgcagcaatat

SEQ ID NO: 367098 - DNA, 19 bp, Homo sapiens
  siRNA target sequence for FLJ10539 (NM_018130.1,1816-1834).
ggctgtcagacaccaaata

SEQ ID NO: 367099 - DNA, 19 bp, Homo sapiens
  siRNA target sequence for C10orf3 (NM_018131.3,325-343).
ggggatcgaagcctagtaa

SEQ ID NO: 367100 - DNA, 19 bp, Homo sapiens
  siRNA target sequence for C10orf3 (NM_018131.3,327-345).
ggatcgaagcctagtaact

SEQ ID NO: 367101 - DNA, 19 bp, Homo sapiens
  siRNA target sequence for C10orf3 (NM_018131.3,344-362).
ctccaaatccgaaactaca

SEQ ID NO: 367102 - DNA, 19 bp, Homo sapiens
  siRNA target sequence for C10orf3 (NM_018131.3,346-364).
ccaaatccgaaactacatt

SEQ ID NO: 367103 - DNA, 19 bp, Homo sapiens
  siRNA target sequence for C10orf3 (NM_018131.3,347-365).
caaatccgaaactacatta

SEQ ID NO: 367104 - DNA, 19 bp, Homo sapiens
  siRNA target sequence for C10orf3 (NM_018131.3,377-395).
gggagaaattgcacactta

SEQ ID NO: 367105 - DNA, 19 bp, Homo sapiens
  siRNA target sequence for C10orf3 (NM_018131.3,378-396).
ggagaaattgcacacttaa

SEQ ID NO: 367106 - DNA, 19 bp, Homo sapiens
  siRNA target sequence for C10orf3 (NM_018131.3,379-397).
gagaaattgcacacttaaa

SEQ ID NO: 367107 - DNA, 19 bp, Homo sapiens
  siRNA target sequence for C10orf3 (NM_018131.3,494-512).
ggagaagaatgcttatcaa

SEQ ID NO: 367108 - DNA, 19 bp, Homo sapiens
  siRNA target sequence for C10orf3 (NM_018131.3,551-569).
ccaactgaaggccagatat

SEQ ID NO: 367109 - DNA, 19 bp, Homo sapiens
  siRNA target sequence for C10orf3 (NM_018131.3,552-570).
caactgaaggccagatata

SEQ ID NO: 367110 - DNA, 19 bp, Homo sapiens
  siRNA target sequence for C10orf3 (NM_018131.3,555-573).
ctgaaggccagatatagta

SEQ ID NO: 367111 - DNA, 19 bp, Homo sapiens
  siRNA target sequence for C10orf3 (NM_018131.3,557-575).
gaaggccagatatagtact

SEQ ID NO: 367112 - DNA, 19 bp, Homo sapiens
  siRNA target sequence for C10orf3 (NM_018131.3,632-650).
ggtgttgaaagccttatct

SEQ ID NO: 367113 - DNA, 19 bp, Homo sapiens
  siRNA target sequence for C10orf3 (NM_018131.3,635-653).
gttgaaagccttatctgaa

SEQ ID NO: 367114 - DNA, 19 bp, Homo sapiens
  siRNA target sequence for C10orf3 (NM_018131.3,651-669).
gaagagaaagacgtattga

SEQ ID NO: 367115 - DNA, 19 bp, Homo sapiens
  siRNA target sequence for C10orf3 (NM_018131.3,656-674).
gaaagacgtattgaaacaa

SEQ ID NO: 367116 - DNA, 19 bp, Homo sapiens
  siRNA target sequence for C10orf3 (NM_018131.3,692-710).
ctcacgaattgctgaactt

SEQ ID NO: 367117 - DNA, 19 bp, Homo sapiens
  siRNA target sequence for C10orf3 (NM_018131.3,694-712).
cacgaattgctgaacttga

SEQ ID NO: 367118 - DNA, 19 bp, Homo sapiens
  siRNA target sequence for C10orf3 (NM_018131.3,722-740).
caatacactccgtttatca

SEQ ID NO: 367119 - DNA, 19 bp, Homo sapiens
  siRNA target sequence for C10orf3 (NM_018131.3,750-768).
gctccaaactgcttcaact

SEQ ID NO: 367120 - DNA, 19 bp, Homo sapiens
  siRNA target sequence for C10orf3 (NM_018131.3,830-848).
gcagtggctcgtgtatgat

SEQ ID NO: 367121 - DNA, 19 bp, Homo sapiens
  siRNA target sequence for C10orf3 (NM_018131.3,851-869).
gcagcgggaagtctatgta

SEQ ID NO: 367122 - DNA, 19 bp, Homo sapiens
  siRNA target sequence for C10orf3 (NM_018131.3,852-870).
cagcgggaagtctatgtaa

SEQ ID NO: 367123 - DNA, 19 bp, Homo sapiens
  siRNA target sequence for C10orf3 (NM_018131.3,854-872).
gcgggaagtctatgtaaaa

SEQ ID NO: 367124 - DNA, 19 bp, Homo sapiens
  siRNA target sequence for C10orf3 (NM_018131.3,857-875).
ggaagtctatgtaaaagga

SEQ ID NO: 367125 - DNA, 19 bp, Homo sapiens
  siRNA target sequence for C10orf3 (NM_018131.3,867-885).
gtaaaaggacttttagcaa

SEQ ID NO: 367126 - DNA, 19 bp, Homo sapiens
  siRNA target sequence for C10orf3 (NM_018131.3,873-891).
ggacttttagcaaagatct

SEQ ID NO: 367127 - DNA, 19 bp, Homo sapiens
  siRNA target sequence for C10orf3 (NM_018131.3,874-892).
gacttttagcaaagatctt

SEQ ID NO: 367128 - DNA, 19 bp, Homo sapiens
  siRNA target sequence for C10orf3 (NM_018131.3,952-970).
ctgaatcagaaggttatct

SEQ ID NO: 367129 - DNA, 19 bp, Homo sapiens
  siRNA target sequence for C10orf3 (NM_018131.3,1031-1049).
ggttgaacgacaaaccata

SEQ ID NO: 367130 - DNA, 19 bp, Homo sapiens
  siRNA target sequence for C10orf3 (NM_018131.3,1032-1050).
gttgaacgacaaaccataa

SEQ ID NO: 367131 - DNA, 19 bp, Homo sapiens
  siRNA target sequence for C10orf3 (NM_018131.3,1099-1117).
cccaaaaagaagttcacaa

SEQ ID NO: 367132 - DNA, 19 bp, Homo sapiens
  siRNA target sequence for C10orf3 (NM_018131.3,1127-1145).
gctgttgtattcacaaaga

SEQ ID NO: 367133 - DNA, 19 bp, Homo sapiens
  siRNA target sequence for C10orf3 (NM_018131.3,1157-1175).
gcaacatctggaagatgat

SEQ ID NO: 367134 - DNA, 19 bp, Homo sapiens
  siRNA target sequence for C10orf3 (NM_018131.3,1258-1276).
ccgaagagctcttatctca

SEQ ID NO: 367135 - DNA, 19 bp, Homo sapiens
  siRNA target sequence for C10orf3 (NM_018131.3,1333-1351).
ctctgttggaacaacagat

SEQ ID NO: 367136 - DNA, 19 bp, Homo sapiens
  siRNA target sequence for C10orf3 (NM_018131.3,1353-1371).
caggcatgtactttagact

SEQ ID NO: 367137 - DNA, 19 bp, Homo sapiens
  siRNA target sequence for C10orf3 (NM_018131.3,1357-1375).
catgtactttagactttga

SEQ ID NO: 367138 - DNA, 19 bp, Homo sapiens
  siRNA target sequence for C10orf3 (NM_018131.3,1495-1513).
ccatcacagagccattagt

SEQ ID NO: 367139 - DNA, 19 bp, Homo sapiens
  siRNA target sequence for C10orf3 (NM_018131.3,1501-1519).
cagagccattagtcacttt

SEQ ID NO: 367140 - DNA, 19 bp, Homo sapiens
  siRNA target sequence for C10orf3 (NM_018131.3,1548-1566).
gttgccgcctcaccaaaaa

SEQ ID NO: 367141 - DNA, 19 bp, Homo sapiens
  siRNA target sequence for C10orf3 (NM_018131.3,1570-1588).
ccactgctgcactcaatga

SEQ ID NO: 367142 - DNA, 19 bp, Homo sapiens
  siRNA target sequence for C10orf3 (NM_018131.3,1653-1671).
gtccatgtggaatactgtt

SEQ ID NO: 367143 - DNA, 19 bp, Homo sapiens
  siRNA target sequence for C6orf139 (NM_018132.2,122-140).
cgctcaacagttaaaaaga

SEQ ID NO: 367144 - DNA, 19 bp, Homo sapiens
  siRNA target sequence for C6orf139 (NM_018132.2,185-203).
gaataaggttagaaacaca

SEQ ID NO: 367145 - DNA, 19 bp, Homo sapiens
  siRNA target sequence for C6orf139 (NM_018132.2,333-351).
gaccatttgcaaactatga

SEQ ID NO: 367146 - DNA, 19 bp, Homo sapiens
  siRNA target sequence for C6orf139 (NM_018132.2,353-371).
ggaatcagtaataatgaca

SEQ ID NO: 367147 - DNA, 19 bp, Homo sapiens
  siRNA target sequence for C6orf139 (NM_018132.2,360-378).
gtaataatgacaattttga

SEQ ID NO: 367148 - DNA, 19 bp, Homo sapiens
  siRNA target sequence for C6orf139 (NM_018132.2,486-504).
gatttaactaatgtatcaa

SEQ ID NO: 367149 - DNA, 19 bp, Homo sapiens
  siRNA target sequence for C6orf139 (NM_018132.2,518-536).
ggaaagggcacgagacaaa

SEQ ID NO: 367150 - DNA, 19 bp, Homo sapiens
  siRNA target sequence for C6orf139 (NM_018132.2,526-544).
cacgagacaaagctaatga

SEQ ID NO: 367151 - DNA, 19 bp, Homo sapiens
  siRNA target sequence for C6orf139 (NM_018132.2,590-608).
gaccacagagttaatgact

SEQ ID NO: 367152 - DNA, 19 bp, Homo sapiens
  siRNA target sequence for C6orf139 (NM_018132.2,686-704).
gatgcatcaaataaatagt

SEQ ID NO: 367153 - DNA, 19 bp, Homo sapiens
  siRNA target sequence for C6orf139 (NM_018132.2,723-741).
ccggaactttctcagaaaa

SEQ ID NO: 367154 - DNA, 19 bp, Homo sapiens
  siRNA target sequence for C6orf139 (NM_018132.2,812-830).
cttggatattcttcataat

SEQ ID NO: 367155 - DNA, 19 bp, Homo sapiens
  siRNA target sequence for C6orf139 (NM_018132.2,845-863).
gagcatgtcaaccttcatt

SEQ ID NO: 367156 - DNA, 19 bp, Homo sapiens
  siRNA target sequence for C6orf139 (NM_018132.2,847-865).
gcatgtcaaccttcattga

SEQ ID NO: 367157 - DNA, 19 bp, Homo sapiens
  siRNA target sequence for C6orf139 (NM_018132.2,848-866).
catgtcaaccttcattgaa

SEQ ID NO: 367158 - DNA, 19 bp, Homo sapiens
  siRNA target sequence for C6orf139 (NM_018132.2,851-869).
gtcaaccttcattgaagaa

SEQ ID NO: 367159 - DNA, 19 bp, Homo sapiens
  siRNA target sequence for FLJ10546 (NM_018133.2,774-792).
gccgcctagtgctcaacta

SEQ ID NO: 367160 - DNA, 19 bp, Homo sapiens
  siRNA target sequence for FLJ10546 (NM_018133.2,812-830).
gcgtttactgagattaaca

SEQ ID NO: 367161 - DNA, 19 bp, Homo sapiens
  siRNA target sequence for FLJ10546 (NM_018133.2,867-885).
gtgtttgcggacatttgct

SEQ ID NO: 367162 - DNA, 19 bp, Homo sapiens
  siRNA target sequence for FLJ10546 (NM_018133.2,873-891).
gcggacatttgctacaaga

SEQ ID NO: 367163 - DNA, 19 bp, Homo sapiens
  siRNA target sequence for FLJ10546 (NM_018133.2,874-892).
cggacatttgctacaagat

SEQ ID NO: 367164 - DNA, 19 bp, Homo sapiens
  siRNA target sequence for FLJ10546 (NM_018133.2,912-930).
ccacctgccaacattatgt

SEQ ID NO: 367165 - DNA, 19 bp, Homo sapiens
  siRNA target sequence for FLJ10546 (NM_018133.2,923-941).
cattatgtctgcaaaactt

SEQ ID NO: 367166 - DNA, 19 bp, Homo sapiens
  siRNA target sequence for FLJ10546 (NM_018133.2,1094-1112).
gaagcagttgactgttctt

SEQ ID NO: 367167 - DNA, 19 bp, Homo sapiens
  siRNA target sequence for FLJ10546 (NM_018133.2,1100-1118).
gttgactgttcttctgata

SEQ ID NO: 367168 - DNA, 19 bp, Homo sapiens
  siRNA target sequence for FLJ10546 (NM_018133.2,1286-1304).
gctattggcagttctgtta

SEQ ID NO: 367169 - DNA, 19 bp, Homo sapiens
  siRNA target sequence for FLJ10546 (NM_018133.2,1306-1324).
caatggtttgcctacttat

SEQ ID NO: 367170 - DNA, 19 bp, Homo sapiens
  siRNA target sequence for FLJ10546 (NM_018133.2,1320-1338).
cttataatgggctttcaat

SEQ ID NO: 367171 - DNA, 19 bp, Homo sapiens
  siRNA target sequence for FLJ10546 (NM_018133.2,1328-1346).
gggctttcaatagatagat

SEQ ID NO: 367172 - DNA, 19 bp, Homo sapiens
  siRNA target sequence for FLJ10546 (NM_018133.2,1329-1347).
ggctttcaatagatagatt

SEQ ID NO: 367173 - DNA, 19 bp, Homo sapiens
  siRNA target sequence for FLJ10546 (NM_018133.2,1330-1348).
gctttcaatagatagattt

SEQ ID NO: 367174 - DNA, 19 bp, Homo sapiens
  siRNA target sequence for FLJ10546 (NM_018133.2,1367-1385).
cctgaacattcaaatacga

SEQ ID NO: 367175 - DNA, 19 bp, Homo sapiens
  siRNA target sequence for FLJ10546 (NM_018133.2,1368-1386).
ctgaacattcaaatacgat

SEQ ID NO: 367176 - DNA, 19 bp, Homo sapiens
  siRNA target sequence for FLJ10546 (NM_018133.2,1457-1475).
gtagccactgacttatgtt

SEQ ID NO: 367177 - DNA, 19 bp, Homo sapiens
  siRNA target sequence for FLJ10546 (NM_018133.2,1550-1568).
gtactccgcagcttagaaa

SEQ ID NO: 367178 - DNA, 19 bp, Homo sapiens
  siRNA target sequence for FLJ10546 (NM_018133.2,1555-1573).
ccgcagcttagaaactgtt

SEQ ID NO: 367179 - DNA, 19 bp, Homo sapiens
  siRNA target sequence for FLJ10546 (NM_018133.2,1556-1574).
cgcagcttagaaactgttt

SEQ ID NO: 367180 - DNA, 19 bp, Homo sapiens
  siRNA target sequence for FLJ10546 (NM_018133.2,1560-1578).
gcttagaaactgtttcaaa

SEQ ID NO: 367181 - DNA, 19 bp, Homo sapiens
  siRNA target sequence for FLJ10546 (NM_018133.2,1697-1715).
gcacttcatgggttatcat

SEQ ID NO: 367182 - DNA, 19 bp, Homo sapiens
  siRNA target sequence for FLJ10546 (NM_018133.2,1700-1718).
cttcatgggttatcatgta

SEQ ID NO: 367183 - DNA, 19 bp, Homo sapiens
  siRNA target sequence for FLJ10546 (NM_018133.2,1724-1742).
gcaactccgaagatagcaa

SEQ ID NO: 367184 - DNA, 19 bp, Homo sapiens
  siRNA target sequence for FLJ10546 (NM_018133.2,1725-1743).
caactccgaagatagcaaa

SEQ ID NO: 367185 - DNA, 19 bp, Homo sapiens
  siRNA target sequence for FLJ10546 (NM_018133.2,1728-1746).
ctccgaagatagcaaaatt

SEQ ID NO: 367186 - DNA, 19 bp, Homo sapiens
  siRNA target sequence for FLJ10546 (NM_018133.2,1771-1789).
gagtgacagtgagaaagtt

SEQ ID NO: 367187 - DNA, 19 bp, Homo sapiens
  siRNA target sequence for FLJ10546 (NM_018133.2,1787-1805).
gttcagccacttccaattt

SEQ ID NO: 367188 - DNA, 19 bp, Homo sapiens
  siRNA target sequence for FLJ10546 (NM_018133.2,1855-1873).
gaaacgggagagcaaaatt

SEQ ID NO: 367189 - DNA, 19 bp, Homo sapiens
  siRNA target sequence for FLJ10546 (NM_018133.2,1927-1945).
caaaactgtacttttatct

SEQ ID NO: 367190 - DNA, 19 bp, Homo sapiens
  siRNA target sequence for FLJ10546 (NM_018133.2,2124-2142).
gtgggcgtgctactcaaaa

SEQ ID NO: 367191 - DNA, 19 bp, Homo sapiens
  siRNA target sequence for FLJ10546 (NM_018133.2,2129-2147).
cgtgctactcaaaatccaa

SEQ ID NO: 367192 - DNA, 19 bp, Homo sapiens
  siRNA target sequence for FLJ10546 (NM_018133.2,2138-2156).
caaaatccaagtgttctta

SEQ ID NO: 367193 - DNA, 19 bp, Homo sapiens
  siRNA target sequence for FLJ10546 (NM_018133.2,2171-2189).
cgctgcccttgctactcta

SEQ ID NO: 367194 - DNA, 19 bp, Homo sapiens
  siRNA target sequence for FLJ10546 (NM_018133.2,2172-2190).
gctgcccttgctactctaa

SEQ ID NO: 367195 - DNA, 19 bp, Homo sapiens
  siRNA target sequence for FLJ10546 (NM_018133.2,2191-2209).
ccgcaaagcctgcttagat

SEQ ID NO: 367196 - DNA, 19 bp, Homo sapiens
  siRNA target sequence for FLJ10546 (NM_018133.2,2192-2210).
cgcaaagcctgcttagatt

SEQ ID NO: 367197 - DNA, 19 bp, Homo sapiens
  siRNA target sequence for FLJ10546 (NM_018133.2,2194-2212).
caaagcctgcttagattgt

SEQ ID NO: 367198 - DNA, 19 bp, Homo sapiens
  siRNA target sequence for FLJ10546 (NM_018133.2,2198-2216).
gcctgcttagattgtatat

SEQ ID NO: 367199 - DNA, 19 bp, Homo sapiens
  siRNA target sequence for FLJ10546 (NM_018133.2,2222-2240).
ggctgccaaaactcctata

SEQ ID NO: 367200 - DNA, 19 bp, Homo sapiens
  siRNA target sequence for FLJ10546 (NM_018133.2,2223-2241).
gctgccaaaactcctatat

SEQ ID NO: 367201 - DNA, 19 bp, Homo sapiens
  siRNA target sequence for FLJ10546 (NM_018133.2,2352-2370).
gtaccagcaccagtgtaat

SEQ ID NO: 367202 - DNA, 19 bp, Homo sapiens
  siRNA target sequence for FLJ10546 (NM_018133.2,2385-2403).
ccccagtaacgacgttttt

SEQ ID NO: 367203 - DNA, 19 bp, Homo sapiens
  siRNA target sequence for FLJ10546 (NM_018133.2,2386-2404).
cccagtaacgacgttttta

SEQ ID NO: 367204 - DNA, 19 bp, Homo sapiens
  siRNA target sequence for FLJ10546 (NM_018133.2,2438-2456).
gaagctatagacatgagat

SEQ ID NO: 367205 - DNA, 19 bp, Homo sapiens
  siRNA target sequence for FLJ10547 (NM_018134.1,94-112).
gcctgcgagctgagtatga

SEQ ID NO: 367206 - DNA, 19 bp, Homo sapiens
  siRNA target sequence for FLJ10547 (NM_018134.1,514-532).
gccacttggccatggaatt

SEQ ID NO: 367207 - DNA, 19 bp, Homo sapiens
  siRNA target sequence for FLJ10547 (NM_018134.1,539-557).
gctgcaacaggccatcaat

SEQ ID NO: 367208 - DNA, 19 bp, Homo sapiens
  siRNA target sequence for FLJ10547 (NM_018134.1,562-580).
gtaaggagtacctacttct

SEQ ID NO: 367209 - DNA, 19 bp, Homo sapiens
  siRNA target sequence for FLJ10547 (NM_018134.1,752-770).
ctgtcacagggtcaaatca

SEQ ID NO: 367210 - DNA, 19 bp, Homo sapiens
  siRNA target sequence for FLJ10547 (NM_018134.1,797-815).
cactacacaaaaaaacatt

SEQ ID NO: 367211 - DNA, 19 bp, Homo sapiens
  siRNA target sequence for FLJ10547 (NM_018134.1,858-876).
ccaccgtcgtctataccat

SEQ ID NO: 367212 - DNA, 19 bp, Homo sapiens
  siRNA target sequence for FLJ10547 (NM_018134.1,862-880).
cgtcgtctataccatcaaa

SEQ ID NO: 367213 - DNA, 19 bp, Homo sapiens
  siRNA target sequence for FLJ10547 (NM_018134.1,980-998).
gacccccagaggtttaaaa

SEQ ID NO: 367214 - DNA, 19 bp, Homo sapiens
  siRNA target sequence for FLJ10547 (NM_018134.1,1042-1060).
cactctatgaggactcaaa

SEQ ID NO: 367215 - DNA, 19 bp, Homo sapiens
  siRNA target sequence for FLJ10547 (NM_018134.1,1044-1062).
ctctatgaggactcaaata

SEQ ID NO: 367216 - DNA, 19 bp, Homo sapiens
  siRNA target sequence for FLJ10547 (NM_018134.1,1265-1283).
caatgagcctagtcatgaa

SEQ ID NO: 367217 - DNA, 19 bp, Homo sapiens
  siRNA target sequence for FLJ10547 (NM_018134.1,1326-1344).
cctgagattctgtcttcta

SEQ ID NO: 367218 - DNA, 19 bp, Homo sapiens
  siRNA target sequence for ASPM (NM_018136.2,347-365).
gccgagtaagagagattat

SEQ ID NO: 367219 - DNA, 19 bp, Homo sapiens
  siRNA target sequence for ASPM (NM_018136.2,349-367).
cgagtaagagagattatga

SEQ ID NO: 367220 - DNA, 19 bp, Homo sapiens
  siRNA target sequence for ASPM (NM_018136.2,452-470).
gggataccattaaaaagaa

SEQ ID NO: 367221 - DNA, 19 bp, Homo sapiens
  siRNA target sequence for ASPM (NM_018136.2,717-735).
ctctgtacgtcgatctact

SEQ ID NO: 367222 - DNA, 19 bp, Homo sapiens
  siRNA target sequence for ASPM (NM_018136.2,727-745).
cgatctactacctactcat

SEQ ID NO: 367223 - DNA, 19 bp, Homo sapiens
  siRNA target sequence for ASPM (NM_018136.2,781-799).
gtacacagtgccaacgttt

SEQ ID NO: 367224 - DNA, 19 bp, Homo sapiens
  siRNA target sequence for ASPM (NM_018136.2,784-802).
cacagtgccaacgtttcaa

SEQ ID NO: 367225 - DNA, 19 bp, Homo sapiens
  siRNA target sequence for ASPM (NM_018136.2,790-808).
gccaacgtttcaaaagttt

SEQ ID NO: 367226 - DNA, 19 bp, Homo sapiens
  siRNA target sequence for ASPM (NM_018136.2,864-882).
ccaaagaggagagaatagt

SEQ ID NO: 367227 - DNA, 19 bp, Homo sapiens
  siRNA target sequence for ASPM (NM_018136.2,876-894).
gaatagtaaacttagtctt

SEQ ID NO: 367228 - DNA, 19 bp, Homo sapiens
  siRNA target sequence for ASPM (NM_018136.2,892-910).
cttacccccaactgttctt

SEQ ID NO: 367229 - DNA, 19 bp, Homo sapiens
  siRNA target sequence for ASPM (NM_018136.2,905-923).
gttcttcaactttgaacat

SEQ ID NO: 367230 - DNA, 19 bp, Homo sapiens
  siRNA target sequence for ASPM (NM_018136.2,980-998).
gagctaataatgaactaga

SEQ ID NO: 367231 - DNA, 19 bp, Homo sapiens
  siRNA target sequence for ASPM (NM_018136.2,991-1009).
gaactagaattagtaacat

SEQ ID NO: 367232 - DNA, 19 bp, Homo sapiens
  siRNA target sequence for ASPM (NM_018136.2,997-1015).
gaattagtaacatgtcttt

SEQ ID NO: 367233 - DNA, 19 bp, Homo sapiens
  siRNA target sequence for ASPM (NM_018136.2,1007-1025).
catgtctttcatcagatat

SEQ ID NO: 367234 - DNA, 19 bp, Homo sapiens
  siRNA target sequence for ASPM (NM_018136.2,1012-1030).
ctttcatcagatatgttta

SEQ ID NO: 367235 - DNA, 19 bp, Homo sapiens
  siRNA target sequence for ASPM (NM_018136.2,1016-1034).
catcagatatgtttatgaa

SEQ ID NO: 367236 - DNA, 19 bp, Homo sapiens
  siRNA target sequence for ASPM (NM_018136.2,1132-1150).
ctaaatcaggatctagaat

SEQ ID NO: 367237 - DNA, 19 bp, Homo sapiens
  siRNA target sequence for ASPM (NM_018136.2,1151-1169).
cagagtcagttaatcctat

SEQ ID NO: 367238 - DNA, 19 bp, Homo sapiens
  siRNA target sequence for ASPM (NM_018136.2,1203-1221).
ggcatatatgtgtacatct

SEQ ID NO: 367239 - DNA, 19 bp, Homo sapiens
  siRNA target sequence for ASPM (NM_018136.2,1305-1323).
gccacgtattcctgaatgt

SEQ ID NO: 367240 - DNA, 19 bp, Homo sapiens
  siRNA target sequence for ASPM (NM_018136.2,1357-1375).
gaactagtagaaatgaagt

SEQ ID NO: 367241 - DNA, 19 bp, Homo sapiens
  siRNA target sequence for ASPM (NM_018136.2,1420-1438).
gcagttcaggatatttcta

SEQ ID NO: 367242 - DNA, 19 bp, Homo sapiens
  siRNA target sequence for ASPM (NM_018136.2,1436-1454).
ctagtcatagccacaataa

SEQ ID NO: 367243 - DNA, 19 bp, Homo sapiens
  siRNA target sequence for ASPM (NM_018136.2,1460-1478).
ctaagagacgtccaatact

SEQ ID NO: 367244 - DNA, 19 bp, Homo sapiens
  siRNA target sequence for ASPM (NM_018136.2,1464-1482).
gagacgtccaatactttct

SEQ ID NO: 367245 - DNA, 19 bp, Homo sapiens
  siRNA target sequence for ASPM (NM_018136.2,1483-1501).
gccactgttactaaaagga

SEQ ID NO: 367246 - DNA, 19 bp, Homo sapiens
  siRNA target sequence for ASPM (NM_018136.2,1505-1523).
ccacctgtaccagagaaaa

SEQ ID NO: 367247 - DNA, 19 bp, Homo sapiens
  siRNA target sequence for ASPM (NM_018136.2,1575-1593).
gggtgaacatgaaaaagta

SEQ ID NO: 367248 - DNA, 19 bp, Homo sapiens
  siRNA target sequence for ASPM (NM_018136.2,1628-1646).
cttatcttccaattataga

SEQ ID NO: 367249 - DNA, 19 bp, Homo sapiens
  siRNA target sequence for ASPM (NM_018136.2,1636-1654).
ccaattatagatccaatat

SEQ ID NO: 367250 - DNA, 19 bp, Homo sapiens
  siRNA target sequence for ASPM (NM_018136.2,1637-1655).
caattatagatccaatatt

SEQ ID NO: 367251 - DNA, 19 bp, Homo sapiens
  siRNA target sequence for ASPM (NM_018136.2,1664-1682).
ctaagagttataaaaacga

SEQ ID NO: 367252 - DNA, 19 bp, Homo sapiens
  siRNA target sequence for ASPM (NM_018136.2,1709-1727).
cagttgctcggaaaagaaa

SEQ ID NO: 367253 - DNA, 19 bp, Homo sapiens
  siRNA target sequence for ASPM (NM_018136.2,1711-1729).
gttgctcggaaaagaaaga

SEQ ID NO: 367254 - DNA, 19 bp, Homo sapiens
  siRNA target sequence for ASPM (NM_018136.2,1783-1801).
gaagtgcgagaaatcaaaa

SEQ ID NO: 367255 - DNA, 19 bp, Homo sapiens
  siRNA target sequence for ASPM (NM_018136.2,1858-1876).
gtgacaacacccatctcaa

SEQ ID NO: 367256 - DNA, 19 bp, Homo sapiens
  siRNA target sequence for ASPM (NM_018136.2,1867-1885).
cccatctcaaaacgtatta

SEQ ID NO: 367257 - DNA, 19 bp, Homo sapiens
  siRNA target sequence for ASPM (NM_018136.2,2111-2129).
cttggtggttaaattttat

SEQ ID NO: 367258 - DNA, 19 bp, Homo sapiens
  siRNA target sequence for ASPM (NM_018136.2,2228-2246).
ctagagcacctacaaaaga

SEQ ID NO: 367259 - DNA, 19 bp, Homo sapiens
  siRNA target sequence for ASPM (NM_018136.2,2234-2252).
cacctacaaaagaggaaat

SEQ ID NO: 367260 - DNA, 19 bp, Homo sapiens
  siRNA target sequence for ASPM (NM_018136.2,2253-2271).
gtctctcagagcttatact

SEQ ID NO: 367261 - DNA, 19 bp, Homo sapiens
  siRNA target sequence for ASPM (NM_018136.2,2270-2288).
ctgctcggtgtaggttaaa

SEQ ID NO: 367262 - DNA, 19 bp, Homo sapiens
  siRNA target sequence for ASPM (NM_018136.2,2272-2290).
gctcggtgtaggttaaaca

SEQ ID NO: 367263 - DNA, 19 bp, Homo sapiens
  siRNA target sequence for ASPM (NM_018136.2,2300-2318).
gtgcagcatgccgtttgtt

SEQ ID NO: 367264 - DNA, 19 bp, Homo sapiens
  siRNA target sequence for ASPM (NM_018136.2,2305-2323).
gcatgccgtttgtttactt

SEQ ID NO: 367265 - DNA, 19 bp, Homo sapiens
  siRNA target sequence for ASPM (NM_018136.2,2311-2329).
cgtttgtttacttctgaaa

SEQ ID NO: 367266 - DNA, 19 bp, Homo sapiens
  siRNA target sequence for ASPM (NM_018136.2,2375-2393).
ggcggttaattgttcgaaa

SEQ ID NO: 367267 - DNA, 19 bp, Homo sapiens
  siRNA target sequence for ASPM (NM_018136.2,2376-2394).
gcggttaattgttcgaaaa

SEQ ID NO: 367268 - DNA, 19 bp, Homo sapiens
  siRNA target sequence for ASPM (NM_018136.2,2379-2397).
gttaattgttcgaaaagat

SEQ ID NO: 367269 - DNA, 19 bp, Homo sapiens
  siRNA target sequence for ASPM (NM_018136.2,2425-2443).
cgtcagaaagtcctgaatt

SEQ ID NO: 367270 - DNA, 19 bp, Homo sapiens
  siRNA target sequence for ASPM (NM_018136.2,2446-2464).
ctgttgtcctacaatcctt

SEQ ID NO: 367271 - DNA, 19 bp, Homo sapiens
  siRNA target sequence for ASPM (NM_018136.2,2532-2550).
cacagggttggctatgttt

SEQ ID NO: 367272 - DNA, 19 bp, Homo sapiens
  siRNA target sequence for ASPM (NM_018136.2,2556-2574).
gaatcgcctactttggaat

SEQ ID NO: 367273 - DNA, 19 bp, Homo sapiens
  siRNA target sequence for ASPM (NM_018136.2,2619-2637).
gtatagagatggtcatgaa

SEQ ID NO: 367274 - DNA, 19 bp, Homo sapiens
  siRNA target sequence for ASPM (NM_018136.2,2638-2656).
gaagctttgtccaagttta

SEQ ID NO: 367275 - DNA, 19 bp, Homo sapiens
  siRNA target sequence for ASPM (NM_018136.2,2689-2707).
cttgattatgctaaaattt

SEQ ID NO: 367276 - DNA, 19 bp, Homo sapiens
  siRNA target sequence for ASPM (NM_018136.2,2708-2726).
ccagactcattgatcatga

SEQ ID NO: 367277 - DNA, 19 bp, Homo sapiens
  siRNA target sequence for ASPM (NM_018136.2,2709-2727).
cagactcattgatcatgat

SEQ ID NO: 367278 - DNA, 19 bp, Homo sapiens
  siRNA target sequence for ASPM (NM_018136.2,2783-2801).
ctttttcacgagatttcct

SEQ ID NO: 367279 - DNA, 19 bp, Homo sapiens
  siRNA target sequence for ASPM (NM_018136.2,2841-2859).
gggattacctgttaaccat

SEQ ID NO: 367280 - DNA, 19 bp, Homo sapiens
  siRNA target sequence for ASPM (NM_018136.2,2863-2881).
cagacaccatttgatgaat

SEQ ID NO: 367281 - DNA, 19 bp, Homo sapiens
  siRNA target sequence for ASPM (NM_018136.2,2897-2915).
caaatcttgccgtagactt

SEQ ID NO: 367282 - DNA, 19 bp, Homo sapiens
  siRNA target sequence for ASPM (NM_018136.2,2966-2984).
gggacctctcaaagaaact

SEQ ID NO: 367283 - DNA, 19 bp, Homo sapiens
  siRNA target sequence for ASPM (NM_018136.2,2983-3001).
ctcaggattccggcaataa

SEQ ID NO: 367284 - DNA, 19 bp, Homo sapiens
  siRNA target sequence for ASPM (NM_018136.2,2985-3003).
caggattccggcaataagt

SEQ ID NO: 367285 - DNA, 19 bp, Homo sapiens
  siRNA target sequence for ASPM (NM_018136.2,2994-3012).
ggcaataagtcgtcttcaa

SEQ ID NO: 367286 - DNA, 19 bp, Homo sapiens
  siRNA target sequence for ASPM (NM_018136.2,3078-3096).
gcatggaaatacaattcta

SEQ ID NO: 367287 - DNA, 19 bp, Homo sapiens
  siRNA target sequence for ASPM (NM_018136.2,3089-3107).
caattctatctaaggatat

SEQ ID NO: 367288 - DNA, 19 bp, Homo sapiens
  siRNA target sequence for ASPM (NM_018136.2,3179-3197).
cccttaacttagatcaatt

SEQ ID NO: 367289 - DNA, 19 bp, Homo sapiens
  siRNA target sequence for ASPM (NM_018136.2,3181-3199).
cttaacttagatcaattaa

SEQ ID NO: 367290 - DNA, 19 bp, Homo sapiens
  siRNA target sequence for ASPM (NM_018136.2,3223-3241).
cacacaaagagtataaaga

SEQ ID NO: 367291 - DNA, 19 bp, Homo sapiens
  siRNA target sequence for ASPM (NM_018136.2,3260-3278).
catgccattctgatgatct

SEQ ID NO: 367292 - DNA, 19 bp, Homo sapiens
  siRNA target sequence for ASPM (NM_018136.2,3263-3281).
gccattctgatgatcttat

SEQ ID NO: 367293 - DNA, 19 bp, Homo sapiens
  siRNA target sequence for ASPM (NM_018136.2,3264-3282).
ccattctgatgatcttatt

SEQ ID NO: 367294 - DNA, 19 bp, Homo sapiens
  siRNA target sequence for ASPM (NM_018136.2,3310-3328).
ggttcctttgaacaatata

SEQ ID NO: 367295 - DNA, 19 bp, Homo sapiens
  siRNA target sequence for ASPM (NM_018136.2,3414-3432).
ctcagacggccgtgtgtta

SEQ ID NO: 367296 - DNA, 19 bp, Homo sapiens
  siRNA target sequence for ASPM (NM_018136.2,3418-3436).
gacggccgtgtgttatgtt

SEQ ID NO: 367297 - DNA, 19 bp, Homo sapiens
  siRNA target sequence for ASPM (NM_018136.2,3434-3452).
gttacctgatccaccatta

SEQ ID NO: 367298 - DNA, 19 bp, Homo sapiens
  siRNA target sequence for ASPM (NM_018136.2,3458-3476).
cttgctatgtgccatttga

SEQ ID NO: 367299 - DNA, 19 bp, Homo sapiens
  siRNA target sequence for ASPM (NM_018136.2,3466-3484).
gtgccatttgacgctatat

SEQ ID NO: 367300 - DNA, 19 bp, Homo sapiens
  siRNA target sequence for ASPM (NM_018136.2,3468-3486).
gccatttgacgctatatgt

SEQ ID NO: 367301 - DNA, 19 bp, Homo sapiens
  siRNA target sequence for ASPM (NM_018136.2,3470-3488).
catttgacgctatatgtca

SEQ ID NO: 367302 - DNA, 19 bp, Homo sapiens
  siRNA target sequence for ASPM (NM_018136.2,3605-3623).
cttcagagctatacaaaga

SEQ ID NO: 367303 - DNA, 19 bp, Homo sapiens
  siRNA target sequence for ASPM (NM_018136.2,3691-3709).
cctgctatgattaatcatt

SEQ ID NO: 367304 - DNA, 19 bp, Homo sapiens
  siRNA target sequence for ASPM (NM_018136.2,3733-3751).
gatgaaaaggtggttatta

SEQ ID NO: 367305 - DNA, 19 bp, Homo sapiens
  siRNA target sequence for ASPM (NM_018136.2,3736-3754).
gaaaaggtggttattacct

SEQ ID NO: 367306 - DNA, 19 bp, Homo sapiens
  siRNA target sequence for ASPM (NM_018136.2,3776-3794).
ggcttttggatcttcgtaa

SEQ ID NO: 367307 - DNA, 19 bp, Homo sapiens
  siRNA target sequence for ASPM (NM_018136.2,3777-3795).
gcttttggatcttcgtaaa

SEQ ID NO: 367308 - DNA, 19 bp, Homo sapiens
  siRNA target sequence for ASPM (NM_018136.2,3783-3801).
ggatcttcgtaaagaaata

SEQ ID NO: 367309 - DNA, 19 bp, Homo sapiens
  siRNA target sequence for ASPM (NM_018136.2,3784-3802).
gatcttcgtaaagaaataa

SEQ ID NO: 367310 - DNA, 19 bp, Homo sapiens
  siRNA target sequence for ASPM (NM_018136.2,3808-3826).
gctcgactcatacaaacaa

SEQ ID NO: 367311 - DNA, 19 bp, Homo sapiens
  siRNA target sequence for ASPM (NM_018136.2,3811-3829).
cgactcatacaaacaacat

SEQ ID NO: 367312 - DNA, 19 bp, Homo sapiens
  siRNA target sequence for ASPM (NM_018136.2,3883-3901).
gctgcaagaattattcaat

SEQ ID NO: 367313 - DNA, 19 bp, Homo sapiens
  siRNA target sequence for ASPM (NM_018136.2,3884-3902).
ctgcaagaattattcaatt

SEQ ID NO: 367314 - DNA, 19 bp, Homo sapiens
  siRNA target sequence for ASPM (NM_018136.2,3898-3916).
caattggctgtaatcaatt

SEQ ID NO: 367315 - DNA, 19 bp, Homo sapiens
  siRNA target sequence for ASPM (NM_018136.2,3919-3937).
ctagcaaaacaaagattga

SEQ ID NO: 367316 - DNA, 19 bp, Homo sapiens
  siRNA target sequence for ASPM (NM_018136.2,3952-3970).
gcagcactcgtcattcaga

SEQ ID NO: 367317 - DNA, 19 bp, Homo sapiens
  siRNA target sequence for ASPM (NM_018136.2,3953-3971).
cagcactcgtcattcagaa

SEQ ID NO: 367318 - DNA, 19 bp, Homo sapiens
  siRNA target sequence for ASPM (NM_018136.2,3955-3973).
gcactcgtcattcagaaat

SEQ ID NO: 367319 - DNA, 19 bp, Homo sapiens
  siRNA target sequence for ASPM (NM_018136.2,3956-3974).
cactcgtcattcagaaata

SEQ ID NO: 367320 - DNA, 19 bp, Homo sapiens
  siRNA target sequence for ASPM (NM_018136.2,3958-3976).
ctcgtcattcagaaatatt

SEQ ID NO: 367321 - DNA, 19 bp, Homo sapiens
  siRNA target sequence for ASPM (NM_018136.2,4057-4075).
cttattcagggatattgga

SEQ ID NO: 367322 - DNA, 19 bp, Homo sapiens
  siRNA target sequence for ASPM (NM_018136.2,4066-4084).
ggatattggagaagatatt

SEQ ID NO: 367323 - DNA, 19 bp, Homo sapiens
  siRNA target sequence for ASPM (NM_018136.2,4125-4143).
catcctgcaatctaggata

SEQ ID NO: 367324 - DNA, 19 bp, Homo sapiens
  siRNA target sequence for ASPM (NM_018136.2,4159-4177).
gttacatcttataaacgat

SEQ ID NO: 367325 - DNA, 19 bp, Homo sapiens
  siRNA target sequence for ASPM (NM_018136.2,4163-4181).
catcttataaacgatatct

SEQ ID NO: 367326 - DNA, 19 bp, Homo sapiens
  siRNA target sequence for ASPM (NM_018136.2,4207-4225).
cattggcgtgcttatttaa

SEQ ID NO: 367327 - DNA, 19 bp, Homo sapiens
  siRNA target sequence for ASPM (NM_018136.2,4212-4230).
gcgtgcttatttaagaaga

SEQ ID NO: 367328 - DNA, 19 bp, Homo sapiens
  siRNA target sequence for ASPM (NM_018136.2,4271-4289).
ctcttataatccaatctat

SEQ ID NO: 367329 - DNA, 19 bp, Homo sapiens
  siRNA target sequence for ASPM (NM_018136.2,4273-4291).
cttataatccaatctatgt

SEQ ID NO: 367330 - DNA, 19 bp, Homo sapiens
  siRNA target sequence for ASPM (NM_018136.2,4281-4299).
ccaatctatgttcagaaaa

SEQ ID NO: 367331 - DNA, 19 bp, Homo sapiens
  siRNA target sequence for ASPM (NM_018136.2,4302-4320).
gaagcaacgtaaaatgcaa

SEQ ID NO: 367332 - DNA, 19 bp, Homo sapiens
  siRNA target sequence for ASPM (NM_018136.2,4327-4345).
gtaaaagctacagtaatat

SEQ ID NO: 367333 - DNA, 19 bp, Homo sapiens
  siRNA target sequence for ASPM (NM_018136.2,4347-4365).
gcaaagagcttttagagaa

SEQ ID NO: 367334 - DNA, 19 bp, Homo sapiens
  siRNA target sequence for ASPM (NM_018136.2,4410-4428).
catacaatcatggtataga

SEQ ID NO: 367335 - DNA, 19 bp, Homo sapiens
  siRNA target sequence for ASPM (NM_018136.2,4421-4439).
ggtatagaatgcataaaga

SEQ ID NO: 367336 - DNA, 19 bp, Homo sapiens
  siRNA target sequence for ASPM (NM_018136.2,4469-4487).
gtgttgttatcattcagaa

SEQ ID NO: 367337 - DNA, 19 bp, Homo sapiens
  siRNA target sequence for ASPM (NM_018136.2,4499-4517).
gctttcaagcccaaaagtt

SEQ ID NO: 367338 - DNA, 19 bp, Homo sapiens
  siRNA target sequence for ASPM (NM_018136.2,4543-4561).
ctaaccatccagaagtact

SEQ ID NO: 367339 - DNA, 19 bp, Homo sapiens
  siRNA target sequence for ASPM (NM_018136.2,4548-4566).
catccagaagtactacaaa

SEQ ID NO: 367340 - DNA, 19 bp, Homo sapiens
  siRNA target sequence for ASPM (NM_018136.2,4554-4572).
gaagtactacaaagcatat

SEQ ID NO: 367341 - DNA, 19 bp, Homo sapiens
  siRNA target sequence for ASPM (NM_018136.2,4584-4602).
gattgagcgcaccaactat

SEQ ID NO: 367342 - DNA, 19 bp, Homo sapiens
  siRNA target sequence for ASPM (NM_018136.2,4684-4702).
gctgcttgtgttattcagt

SEQ ID NO: 367343 - DNA, 19 bp, Homo sapiens
  siRNA target sequence for ASPM (NM_018136.2,4688-4706).
cttgtgttattcagtcata

SEQ ID NO: 367344 - DNA, 19 bp, Homo sapiens
  siRNA target sequence for ASPM (NM_018136.2,4727-4745).
gagttcgatttttaaacct

SEQ ID NO: 367345 - DNA, 19 bp, Homo sapiens
  siRNA target sequence for ASPM (NM_018136.2,4729-4747).
gttcgatttttaaacctta

SEQ ID NO: 367346 - DNA, 19 bp, Homo sapiens
  siRNA target sequence for ASPM (NM_018136.2,4732-4750).
cgatttttaaaccttaaga

SEQ ID NO: 367347 - DNA, 19 bp, Homo sapiens
  siRNA target sequence for ASPM (NM_018136.2,4744-4762).
cttaagaagactattatca

SEQ ID NO: 367348 - DNA, 19 bp, Homo sapiens
  siRNA target sequence for ASPM (NM_018136.2,4828-4846).
gttataattcagactcatt

SEQ ID NO: 367349 - DNA, 19 bp, Homo sapiens
  siRNA target sequence for ASPM (NM_018136.2,4839-4857).
gactcatttccgagcttat

SEQ ID NO: 367350 - DNA, 19 bp, Homo sapiens
  siRNA target sequence for ASPM (NM_018136.2,4841-4859).
ctcatttccgagcttatat

SEQ ID NO: 367351 - DNA, 19 bp, Homo sapiens
  siRNA target sequence for ASPM (NM_018136.2,4843-4861).
catttccgagcttatattt

SEQ ID NO: 367352 - DNA, 19 bp, Homo sapiens
  siRNA target sequence for ASPM (NM_018136.2,4912-4930).
gtgctgcagtctgcatata

SEQ ID NO: 367353 - DNA, 19 bp, Homo sapiens
  siRNA target sequence for ASPM (NM_018136.2,4914-4932).
gctgcagtctgcatataga

SEQ ID NO: 367354 - DNA, 19 bp, Homo sapiens
  siRNA target sequence for ASPM (NM_018136.2,4933-4951).
gggatgcaagccaggaaaa

SEQ ID NO: 367355 - DNA, 19 bp, Homo sapiens
  siRNA target sequence for ASPM (NM_018136.2,4983-5001).
gattcaatcatattatcgt

SEQ ID NO: 367356 - DNA, 19 bp, Homo sapiens
  siRNA target sequence for ASPM (NM_018136.2,4999-5017).
cgtgcttatgtttctaaaa

SEQ ID NO: 367357 - DNA, 19 bp, Homo sapiens
  siRNA target sequence for ASPM (NM_018136.2,5056-5074).
cagtcaactgttaagatga

SEQ ID NO: 367358 - DNA, 19 bp, Homo sapiens
  siRNA target sequence for ASPM (NM_018136.2,5070-5088).
gatgaaacaaacacgtaaa

SEQ ID NO: 367359 - DNA, 19 bp, Homo sapiens
  siRNA target sequence for ASPM (NM_018136.2,5081-5099).
cacgtaaacaatatttgca

SEQ ID NO: 367360 - DNA, 19 bp, Homo sapiens
  siRNA target sequence for ASPM (NM_018136.2,5083-5101).
cgtaaacaatatttgcatt

SEQ ID NO: 367361 - DNA, 19 bp, Homo sapiens
  siRNA target sequence for ASPM (NM_018136.2,5127-5145).
gcaatgttaccgttccaaa

SEQ ID NO: 367362 - DNA, 19 bp, Homo sapiens
  siRNA target sequence for ASPM (NM_018136.2,5128-5146).
caatgttaccgttccaaaa

SEQ ID NO: 367363 - DNA, 19 bp, Homo sapiens
  siRNA target sequence for ASPM (NM_018136.2,5132-5150).
gttaccgttccaaaaaaat

SEQ ID NO: 367364 - DNA, 19 bp, Homo sapiens
  siRNA target sequence for ASPM (NM_018136.2,5136-5154).
ccgttccaaaaaaatagct

SEQ ID NO: 367365 - DNA, 19 bp, Homo sapiens
  siRNA target sequence for ASPM (NM_018136.2,5178-5196).
gcagatgcgggaatcttgt

SEQ ID NO: 367366 - DNA, 19 bp, Homo sapiens
  siRNA target sequence for ASPM (NM_018136.2,5179-5197).
cagatgcgggaatcttgta

SEQ ID NO: 367367 - DNA, 19 bp, Homo sapiens
  siRNA target sequence for ASPM (NM_018136.2,5184-5202).
gcgggaatcttgtatcaaa

SEQ ID NO: 367368 - DNA, 19 bp, Homo sapiens
  siRNA target sequence for ASPM (NM_018136.2,5186-5204).
gggaatcttgtatcaaact

SEQ ID NO: 367369 - DNA, 19 bp, Homo sapiens
  siRNA target sequence for ASPM (NM_018136.2,5238-5256).
gcagatgaggttacaaaga

SEQ ID NO: 367370 - DNA, 19 bp, Homo sapiens
  siRNA target sequence for ASPM (NM_018136.2,5294-5312).
gaaaggctcggcagtatta

SEQ ID NO: 367371 - DNA, 19 bp, Homo sapiens
  siRNA target sequence for ASPM (NM_018136.2,5299-5317).
gctcggcagtattatctga

SEQ ID NO: 367372 - DNA, 19 bp, Homo sapiens
  siRNA target sequence for ASPM (NM_018136.2,5300-5318).
ctcggcagtattatctgaa

SEQ ID NO: 367373 - DNA, 19 bp, Homo sapiens
  siRNA target sequence for ASPM (NM_018136.2,5302-5320).
cggcagtattatctgaaaa

SEQ ID NO: 367374 - DNA, 19 bp, Homo sapiens
  siRNA target sequence for ASPM (NM_018136.2,5329-5347).
gcaattattgtcattcaga

SEQ ID NO: 367375 - DNA, 19 bp, Homo sapiens
  siRNA target sequence for ASPM (NM_018136.2,5429-5447).
cagcttacagaggttataa

SEQ ID NO: 367376 - DNA, 19 bp, Homo sapiens
  siRNA target sequence for ASPM (NM_018136.2,5432-5450).
cttacagaggttataaagt

SEQ ID NO: 367377 - DNA, 19 bp, Homo sapiens
  siRNA target sequence for ASPM (NM_018136.2,5453-5471).
gccagctaatcaaacaaca

SEQ ID NO: 367378 - DNA, 19 bp, Homo sapiens
  siRNA target sequence for ASPM (NM_018136.2,5455-5473).
cagctaatcaaacaacaat

SEQ ID NO: 367379 - DNA, 19 bp, Homo sapiens
  siRNA target sequence for ASPM (NM_018136.2,5463-5481).
caaacaacaatctatagct

SEQ ID NO: 367380 - DNA, 19 bp, Homo sapiens
  siRNA target sequence for ASPM (NM_018136.2,5479-5497).
gctgctcttaaaattcagt

SEQ ID NO: 367381 - DNA, 19 bp, Homo sapiens
  siRNA target sequence for ASPM (NM_018136.2,5498-5516).
ctgcttttagaggctataa

SEQ ID NO: 367382 - DNA, 19 bp, Homo sapiens
  siRNA target sequence for ASPM (NM_018136.2,5539-5557).
gtgcttcaatctataataa

SEQ ID NO: 367383 - DNA, 19 bp, Homo sapiens
  siRNA target sequence for ASPM (NM_018136.2,5577-5595).
ggcgtacaagactcttcat

SEQ ID NO: 367384 - DNA, 19 bp, Homo sapiens
  siRNA target sequence for ASPM (NM_018136.2,5579-5597).
cgtacaagactcttcatga

SEQ ID NO: 367385 - DNA, 19 bp, Homo sapiens
  siRNA target sequence for ASPM (NM_018136.2,5580-5598).
gtacaagactcttcatgat

SEQ ID NO: 367386 - DNA, 19 bp, Homo sapiens
  siRNA target sequence for ASPM (NM_018136.2,5593-5611).
catgatacaagaacacatt

SEQ ID NO: 367387 - DNA, 19 bp, Homo sapiens
  siRNA target sequence for ASPM (NM_018136.2,5664-5682).
gaaggttcggaaacagatt

SEQ ID NO: 367388 - DNA, 19 bp, Homo sapiens
  siRNA target sequence for ASPM (NM_018136.2,5667-5685).
ggttcggaaacagattaga

SEQ ID NO: 367389 - DNA, 19 bp, Homo sapiens
  siRNA target sequence for ASPM (NM_018136.2,5679-5697).
gattagaagggaacatcaa

SEQ ID NO: 367390 - DNA, 19 bp, Homo sapiens
  siRNA target sequence for ASPM (NM_018136.2,5737-5755).
gcccagaaacagtttagat

SEQ ID NO: 367391 - DNA, 19 bp, Homo sapiens
  siRNA target sequence for ASPM (NM_018136.2,5740-5758).
cagaaacagtttagattgt

SEQ ID NO: 367392 - DNA, 19 bp, Homo sapiens
  siRNA target sequence for ASPM (NM_018136.2,5776-5794).
gtcatccagcaaaatttca

SEQ ID NO: 367393 - DNA, 19 bp, Homo sapiens
  siRNA target sequence for ASPM (NM_018136.2,5850-5868).
ggtactggtgcttcaatct

SEQ ID NO: 367394 - DNA, 19 bp, Homo sapiens
  siRNA target sequence for ASPM (NM_018136.2,5851-5869).
gtactggtgcttcaatcta

SEQ ID NO: 367395 - DNA, 19 bp, Homo sapiens
  siRNA target sequence for ASPM (NM_018136.2,5854-5872).
ctggtgcttcaatctatgt

SEQ ID NO: 367396 - DNA, 19 bp, Homo sapiens
  siRNA target sequence for ASPM (NM_018136.2,5921-5939).
ctatcatcatacagtcata

SEQ ID NO: 367397 - DNA, 19 bp, Homo sapiens
  siRNA target sequence for ASPM (NM_018136.2,5934-5952).
gtcatactatagaatgcat

SEQ ID NO: 367398 - DNA, 19 bp, Homo sapiens
  siRNA target sequence for ASPM (NM_018136.2,6006-6024).
gtattatagggcttacagt

SEQ ID NO: 367399 - DNA, 19 bp, Homo sapiens
  siRNA target sequence for ASPM (NM_018136.2,6089-6107).
cttatcgtggtatgaaagt

SEQ ID NO: 367400 - DNA, 19 bp, Homo sapiens
  siRNA target sequence for ASPM (NM_018136.2,6136-6154).
gcagcagtcactatacagt

SEQ ID NO: 367401 - DNA, 19 bp, Homo sapiens
  siRNA target sequence for ASPM (NM_018136.2,6140-6158).
cagtcactatacagtctaa

SEQ ID NO: 367402 - DNA, 19 bp, Homo sapiens
  siRNA target sequence for ASPM (NM_018136.2,6142-6160).
gtcactatacagtctaaat

SEQ ID NO: 367403 - DNA, 19 bp, Homo sapiens
  siRNA target sequence for ASPM (NM_018136.2,6162-6180).
cagagcttacaaaaccaaa

SEQ ID NO: 367404 - DNA, 19 bp, Homo sapiens
  siRNA target sequence for ASPM (NM_018136.2,6227-6245).
ggtatcgaggtattaaaat

SEQ ID NO: 367405 - DNA, 19 bp, Homo sapiens
  siRNA target sequence for ASPM (NM_018136.2,6228-6246).
gtatcgaggtattaaaatt

SEQ ID NO: 367406 - DNA, 19 bp, Homo sapiens
  siRNA target sequence for ASPM (NM_018136.2,6232-6250).
cgaggtattaaaattacaa

SEQ ID NO: 367407 - DNA, 19 bp, Homo sapiens
  siRNA target sequence for ASPM (NM_018136.2,6256-6274).
cagcataaggagtatctta

SEQ ID NO: 367408 - DNA, 19 bp, Homo sapiens
  siRNA target sequence for ASPM (NM_018136.2,6258-6276).
gcataaggagtatcttaat

SEQ ID NO: 367409 - DNA, 19 bp, Homo sapiens
  siRNA target sequence for ASPM (NM_018136.2,6259-6277).
cataaggagtatcttaatt

SEQ ID NO: 367410 - DNA, 19 bp, Homo sapiens
  siRNA target sequence for ASPM (NM_018136.2,6348-6366).
gcacagggcagccactttt

SEQ ID NO: 367411 - DNA, 19 bp, Homo sapiens
  siRNA target sequence for ASPM (NM_018136.2,6353-6371).
gggcagccacttttattaa

SEQ ID NO: 367412 - DNA, 19 bp, Homo sapiens
  siRNA target sequence for ASPM (NM_018136.2,6388-6406).
catcagtcaagaataagtt

SEQ ID NO: 367413 - DNA, 19 bp, Homo sapiens
  siRNA target sequence for ASPM (NM_018136.2,6393-6411).
gtcaagaataagttaccat

SEQ ID NO: 367414 - DNA, 19 bp, Homo sapiens
  siRNA target sequence for ASPM (NM_018136.2,6398-6416).
gaataagttaccatacaat

SEQ ID NO: 367415 - DNA, 19 bp, Homo sapiens
  siRNA target sequence for ASPM (NM_018136.2,6404-6422).
gttaccatacaatgagaaa

SEQ ID NO: 367416 - DNA, 19 bp, Homo sapiens
  siRNA target sequence for ASPM (NM_018136.2,6425-6443).
cagctattgttattcaagt

SEQ ID NO: 367417 - DNA, 19 bp, Homo sapiens
  siRNA target sequence for ASPM (NM_018136.2,6427-6445).
gctattgttattcaagtaa

SEQ ID NO: 367418 - DNA, 19 bp, Homo sapiens
  siRNA target sequence for ASPM (NM_018136.2,6433-6451).
gttattcaagtaagatgta

SEQ ID NO: 367419 - DNA, 19 bp, Homo sapiens
  siRNA target sequence for ASPM (NM_018136.2,6452-6470).
gagcatattatcaaggtaa

SEQ ID NO: 367420 - DNA, 19 bp, Homo sapiens
  siRNA target sequence for ASPM (NM_018136.2,6454-6472).
gcatattatcaaggtaaaa

SEQ ID NO: 367421 - DNA, 19 bp, Homo sapiens
  siRNA target sequence for ASPM (NM_018136.2,6544-6562).
gttagacggactcttagaa

SEQ ID NO: 367422 - DNA, 19 bp, Homo sapiens
  siRNA target sequence for ASPM (NM_018136.2,6548-6566).
gacggactcttagaaagat

SEQ ID NO: 367423 - DNA, 19 bp, Homo sapiens
  siRNA target sequence for ASPM (NM_018136.2,6572-6590).
ctgcagcaacactcattca

SEQ ID NO: 367424 - DNA, 19 bp, Homo sapiens
  siRNA target sequence for ASPM (NM_018136.2,6574-6592).
gcagcaacactcattcagt

SEQ ID NO: 367425 - DNA, 19 bp, Homo sapiens
  siRNA target sequence for ASPM (NM_018136.2,6581-6599).
cactcattcagtcaaacta

SEQ ID NO: 367426 - DNA, 19 bp, Homo sapiens
  siRNA target sequence for ASPM (NM_018136.2,6609-6627).
cagacagcaaacatacttt

SEQ ID NO: 367427 - DNA, 19 bp, Homo sapiens
  siRNA target sequence for ASPM (NM_018136.2,6611-6629).
gacagcaaacatactttaa

SEQ ID NO: 367428 - DNA, 19 bp, Homo sapiens
  siRNA target sequence for ASPM (NM_018136.2,6700-6718).
caaaggtataacaaactga

SEQ ID NO: 367429 - DNA, 19 bp, Homo sapiens
  siRNA target sequence for ASPM (NM_018136.2,6715-6733).
ctgaggcattctgtaatat

SEQ ID NO: 367430 - DNA, 19 bp, Homo sapiens
  siRNA target sequence for ASPM (NM_018136.2,6802-6820).
ctcattcagaggagattta

SEQ ID NO: 367431 - DNA, 19 bp, Homo sapiens
  siRNA target sequence for ASPM (NM_018136.2,6804-6822).
cattcagaggagatttaga

SEQ ID NO: 367432 - DNA, 19 bp, Homo sapiens
  siRNA target sequence for ASPM (NM_018136.2,6812-6830).
ggagatttagaactctaat

SEQ ID NO: 367433 - DNA, 19 bp, Homo sapiens
  siRNA target sequence for ASPM (NM_018136.2,6889-6907).
cgggcacatctttgtacaa

SEQ ID NO: 367434 - DNA, 19 bp, Homo sapiens
  siRNA target sequence for ASPM (NM_018136.2,6905-6923).
caaagcatcacttacagtt

SEQ ID NO: 367435 - DNA, 19 bp, Homo sapiens
  siRNA target sequence for ASPM (NM_018136.2,6924-6942).
ccttcaggtacaaaatgca

SEQ ID NO: 367436 - DNA, 19 bp, Homo sapiens
  siRNA target sequence for ASPM (NM_018136.2,7035-7053).
cagaatgcacagattacat

SEQ ID NO: 367437 - DNA, 19 bp, Homo sapiens
  siRNA target sequence for ASPM (NM_018136.2,7037-7055).
gaatgcacagattacatat

SEQ ID NO: 367438 - DNA, 19 bp, Homo sapiens
  siRNA target sequence for ASPM (NM_018136.2,7044-7062).
cagattacatatgagatat

SEQ ID NO: 367439 - DNA, 19 bp, Homo sapiens
  siRNA target sequence for ASPM (NM_018136.2,7185-7203).
caggggtatgaaaactaga

SEQ ID NO: 367440 - DNA, 19 bp, Homo sapiens
  siRNA target sequence for ASPM (NM_018136.2,7245-7263).
gagtaggtttagatcatta

SEQ ID NO: 367441 - DNA, 19 bp, Homo sapiens
  siRNA target sequence for ASPM (NM_018136.2,7247-7265).
gtaggtttagatcattact

SEQ ID NO: 367442 - DNA, 19 bp, Homo sapiens
  siRNA target sequence for ASPM (NM_018136.2,7264-7282).
ctggtgaggagaagattca

SEQ ID NO: 367443 - DNA, 19 bp, Homo sapiens
  siRNA target sequence for ASPM (NM_018136.2,7281-7299).
catttccctcaaaaaagct

SEQ ID NO: 367444 - DNA, 19 bp, Homo sapiens
  siRNA target sequence for ASPM (NM_018136.2,7331-7349).
ccatttgtgccaaacataa

SEQ ID NO: 367445 - DNA, 19 bp, Homo sapiens
  siRNA target sequence for ASPM (NM_018136.2,7345-7363).
cataaattgtaccaattct

SEQ ID NO: 367446 - DNA, 19 bp, Homo sapiens
  siRNA target sequence for ASPM (NM_018136.2,7373-7391).
gaaaggcagccattacaat

SEQ ID NO: 367447 - DNA, 19 bp, Homo sapiens
  siRNA target sequence for ASPM (NM_018136.2,7378-7396).
gcagccattacaatacagt

SEQ ID NO: 367448 - DNA, 19 bp, Homo sapiens
  siRNA target sequence for ASPM (NM_018136.2,7508-7526).
ggaaacatgcttcaattct

SEQ ID NO: 367449 - DNA, 19 bp, Homo sapiens
  siRNA target sequence for ASPM (NM_018136.2,7533-7551).
gcaacattatcgaacatat

SEQ ID NO: 367450 - DNA, 19 bp, Homo sapiens
  siRNA target sequence for ASPM (NM_018136.2,7606-7624).
gttattcaggctgcatata

SEQ ID NO: 367451 - DNA, 19 bp, Homo sapiens
  siRNA target sequence for ASPM (NM_018136.2,7660-7678).
cacaaagcttctatcgtaa

SEQ ID NO: 367452 - DNA, 19 bp, Homo sapiens
  siRNA target sequence for ASPM (NM_018136.2,7662-7680).
caaagcttctatcgtaata

SEQ ID NO: 367453 - DNA, 19 bp, Homo sapiens
  siRNA target sequence for ASPM (NM_018136.2,7705-7723).
cagtattgtttctaccaaa

SEQ ID NO: 367454 - DNA, 19 bp, Homo sapiens
  siRNA target sequence for ASPM (NM_018136.2,7831-7849).
ggttttcaggacatgaaca

SEQ ID NO: 367455 - DNA, 19 bp, Homo sapiens
  siRNA target sequence for ASPM (NM_018136.2,7872-7890).
gcaccaggctgccattatt

SEQ ID NO: 367456 - DNA, 19 bp, Homo sapiens
  siRNA target sequence for ASPM (NM_018136.2,7879-7897).
gctgccattattattcaga

SEQ ID NO: 367457 - DNA, 19 bp, Homo sapiens
  siRNA target sequence for ASPM (NM_018136.2,7992-8010).
gcgtacccaagcagttatt

SEQ ID NO: 367458 - DNA, 19 bp, Homo sapiens
  siRNA target sequence for ASPM (NM_018136.2,7993-8011).
cgtacccaagcagttattt

SEQ ID NO: 367459 - DNA, 19 bp, Homo sapiens
  siRNA target sequence for ASPM (NM_018136.2,7997-8015).
cccaagcagttatttgtat

SEQ ID NO: 367460 - DNA, 19 bp, Homo sapiens
  siRNA target sequence for ASPM (NM_018136.2,7998-8016).
ccaagcagttatttgtata

SEQ ID NO: 367461 - DNA, 19 bp, Homo sapiens
  siRNA target sequence for ASPM (NM_018136.2,8002-8020).
gcagttatttgtatacagt

SEQ ID NO: 367462 - DNA, 19 bp, Homo sapiens
  siRNA target sequence for ASPM (NM_018136.2,8021-8039).
cttattacagaggctttaa

SEQ ID NO: 367463 - DNA, 19 bp, Homo sapiens
  siRNA target sequence for ASPM (NM_018136.2,8030-8048).
gaggctttaaagtacgaaa

SEQ ID NO: 367464 - DNA, 19 bp, Homo sapiens
  siRNA target sequence for ASPM (NM_018136.2,8034-8052).
ctttaaagtacgaaaggat

SEQ ID NO: 367465 - DNA, 19 bp, Homo sapiens
  siRNA target sequence for ASPM (NM_018136.2,8041-8059).
gtacgaaaggatattcaaa

SEQ ID NO: 367466 - DNA, 19 bp, Homo sapiens
  siRNA target sequence for ASPM (NM_018136.2,8044-8062).
cgaaaggatattcaaaata

SEQ ID NO: 367467 - DNA, 19 bp, Homo sapiens
  siRNA target sequence for ASPM (NM_018136.2,8065-8083).
caccgggctgccacactaa

SEQ ID NO: 367468 - DNA, 19 bp, Homo sapiens
  siRNA target sequence for ASPM (NM_018136.2,8067-8085).
ccgggctgccacactaatt

SEQ ID NO: 367469 - DNA, 19 bp, Homo sapiens
  siRNA target sequence for ASPM (NM_018136.2,8069-8087).
gggctgccacactaattca

SEQ ID NO: 367470 - DNA, 19 bp, Homo sapiens
  siRNA target sequence for ASPM (NM_018136.2,8071-8089).
gctgccacactaattcagt

SEQ ID NO: 367471 - DNA, 19 bp, Homo sapiens
  siRNA target sequence for ASPM (NM_018136.2,8103-8121).
gcacagggccaaagttgat

SEQ ID NO: 367472 - DNA, 19 bp, Homo sapiens
  siRNA target sequence for ASPM (NM_018136.2,8108-8126).
gggccaaagttgattatga

SEQ ID NO: 367473 - DNA, 19 bp, Homo sapiens
  siRNA target sequence for ASPM (NM_018136.2,8112-8130).
caaagttgattatgaaaca

SEQ ID NO: 367474 - DNA, 19 bp, Homo sapiens
  siRNA target sequence for ASPM (NM_018136.2,8138-8156).
ctgcaattgtggttataca

SEQ ID NO: 367475 - DNA, 19 bp, Homo sapiens
  siRNA target sequence for ASPM (NM_018136.2,8148-8166).
ggttatacagaattattat

SEQ ID NO: 367476 - DNA, 19 bp, Homo sapiens
  siRNA target sequence for ASPM (NM_018136.2,8149-8167).
gttatacagaattattata

SEQ ID NO: 367477 - DNA, 19 bp, Homo sapiens
  siRNA target sequence for ASPM (NM_018136.2,8157-8175).
gaattattataggttgtat

SEQ ID NO: 367478 - DNA, 19 bp, Homo sapiens
  siRNA target sequence for ASPM (NM_018136.2,8217-8235).
gaaatctgtacgaactatt

SEQ ID NO: 367479 - DNA, 19 bp, Homo sapiens
  siRNA target sequence for ASPM (NM_018136.2,8249-8267).
gaggcatgaaagttagaca

SEQ ID NO: 367480 - DNA, 19 bp, Homo sapiens
  siRNA target sequence for ASPM (NM_018136.2,8251-8269).
ggcatgaaagttagacaaa

SEQ ID NO: 367481 - DNA, 19 bp, Homo sapiens
  siRNA target sequence for ASPM (NM_018136.2,8298-8316).
ggcagccattgttaaccaa

SEQ ID NO: 367482 - DNA, 19 bp, Homo sapiens
  siRNA target sequence for ASPM (NM_018136.2,8299-8317).
gcagccattgttaaccaat

SEQ ID NO: 367483 - DNA, 19 bp, Homo sapiens
  siRNA target sequence for ASPM (NM_018136.2,8320-8338).
gcactctgctgttacagaa

SEQ ID NO: 367484 - DNA, 19 bp, Homo sapiens
  siRNA target sequence for ASPM (NM_018136.2,8323-8341).
ctctgctgttacagaagta

SEQ ID NO: 367485 - DNA, 19 bp, Homo sapiens
  siRNA target sequence for ASPM (NM_018136.2,8336-8354).
gaagtaaaactcagtatga

SEQ ID NO: 367486 - DNA, 19 bp, Homo sapiens
  siRNA target sequence for ASPM (NM_018136.2,8362-8380).
caaagtgaaggtgttatga

SEQ ID NO: 367487 - DNA, 19 bp, Homo sapiens
  siRNA target sequence for ASPM (NM_018136.2,8379-8397).
gattcaagagtggtataaa

SEQ ID NO: 367488 - DNA, 19 bp, Homo sapiens
  siRNA target sequence for ASPM (NM_018136.2,8444-8462).
gtagggctgcagtaacaat

SEQ ID NO: 367489 - DNA, 19 bp, Homo sapiens
  siRNA target sequence for ASPM (NM_018136.2,8448-8466).
ggctgcagtaacaattcaa

SEQ ID NO: 367490 - DNA, 19 bp, Homo sapiens
  siRNA target sequence for ASPM (NM_018136.2,8449-8467).
gctgcagtaacaattcaaa

SEQ ID NO: 367491 - DNA, 19 bp, Homo sapiens
  siRNA target sequence for ASPM (NM_018136.2,8477-8495).
gtagaatggtcacaagaaa

SEQ ID NO: 367492 - DNA, 19 bp, Homo sapiens
  siRNA target sequence for ASPM (NM_018136.2,8516-8534).
ctgccctacggattcagtt

SEQ ID NO: 367493 - DNA, 19 bp, Homo sapiens
  siRNA target sequence for ASPM (NM_018136.2,8548-8566).
gctgtgtatcggagaagat

SEQ ID NO: 367494 - DNA, 19 bp, Homo sapiens
  siRNA target sequence for ASPM (NM_018136.2,8549-8567).
ctgtgtatcggagaagatt

SEQ ID NO: 367495 - DNA, 19 bp, Homo sapiens
  siRNA target sequence for ASPM (NM_018136.2,8553-8571).
gtatcggagaagatttgtt

SEQ ID NO: 367496 - DNA, 19 bp, Homo sapiens
  siRNA target sequence for ASPM (NM_018136.2,8577-8595).
gaaaagagctgctatcact

SEQ ID NO: 367497 - DNA, 19 bp, Homo sapiens
  siRNA target sequence for ASPM (NM_018136.2,8582-8600).
gagctgctatcactttaca

SEQ ID NO: 367498 - DNA, 19 bp, Homo sapiens
  siRNA target sequence for ASPM (NM_018136.2,8613-8631).
gacgtggcaaaccagaaaa

SEQ ID NO: 367499 - DNA, 19 bp, Homo sapiens
  siRNA target sequence for ASPM (NM_018136.2,8713-8731).
gtctatttacagatcagaa

SEQ ID NO: 367500 - DNA, 19 bp, Homo sapiens
  siRNA target sequence for ASPM (NM_018136.2,8752-8770).
gctagaagtaaaggattta

SEQ ID NO: 367501 - DNA, 19 bp, Homo sapiens
  siRNA target sequence for ASPM (NM_018136.2,8880-8898).
gattcaagcctggtataga

SEQ ID NO: 367502 - DNA, 19 bp, Homo sapiens
  siRNA target sequence for ASPM (NM_018136.2,8900-8918).
gttggagagcacacaaaga

SEQ ID NO: 367503 - DNA, 19 bp, Homo sapiens
  siRNA target sequence for ASPM (NM_018136.2,8953-8971).
caaggttgcttctatacca

SEQ ID NO: 367504 - DNA, 19 bp, Homo sapiens
  siRNA target sequence for ASPM (NM_018136.2,8977-8995).
gagagaacacggtttttga

SEQ ID NO: 367505 - DNA, 19 bp, Homo sapiens
  siRNA target sequence for ASPM (NM_018136.2,8979-8997).
gagaacacggtttttgaat

SEQ ID NO: 367506 - DNA, 19 bp, Homo sapiens
  siRNA target sequence for ASPM (NM_018136.2,8981-8999).
gaacacggtttttgaatgt

SEQ ID NO: 367507 - DNA, 19 bp, Homo sapiens
  siRNA target sequence for ASPM (NM_018136.2,9005-9023).
catcagcaattatcattca

SEQ ID NO: 367508 - DNA, 19 bp, Homo sapiens
  siRNA target sequence for ASPM (NM_018136.2,9038-9056).
ctatacttcctgcaaagat

SEQ ID NO: 367509 - DNA, 19 bp, Homo sapiens
  siRNA target sequence for ASPM (NM_018136.2,9050-9068).
caaagatagctcatgaaca

SEQ ID NO: 367510 - DNA, 19 bp, Homo sapiens
  siRNA target sequence for ASPM (NM_018136.2,9061-9079).
catgaacacttcttaatga

SEQ ID NO: 367511 - DNA, 19 bp, Homo sapiens
  siRNA target sequence for ASPM (NM_018136.2,9086-9104).
gacatcgagctgcttgttt

SEQ ID NO: 367512 - DNA, 19 bp, Homo sapiens
  siRNA target sequence for ASPM (NM_018136.2,9112-9130).
gcacattatagaggatata

SEQ ID NO: 367513 - DNA, 19 bp, Homo sapiens
  siRNA target sequence for ASPM (NM_018136.2,9113-9131).
cacattatagaggatataa

SEQ ID NO: 367514 - DNA, 19 bp, Homo sapiens
  siRNA target sequence for ASPM (NM_018136.2,9164-9182).
ctgctttgatcatacaaaa

SEQ ID NO: 367515 - DNA, 19 bp, Homo sapiens
  siRNA target sequence for ASPM (NM_018136.2,9272-9290).
gtggttggctagtacgaaa

SEQ ID NO: 367516 - DNA, 19 bp, Homo sapiens
  siRNA target sequence for ASPM (NM_018136.2,9274-9292).
ggttggctagtacgaaaaa

SEQ ID NO: 367517 - DNA, 19 bp, Homo sapiens
  siRNA target sequence for ASPM (NM_018136.2,9278-9296).
ggctagtacgaaaaagatt

SEQ ID NO: 367518 - DNA, 19 bp, Homo sapiens
  siRNA target sequence for ASPM (NM_018136.2,9354-9372).
cctgaatgctgttagaatt

SEQ ID NO: 367519 - DNA, 19 bp, Homo sapiens
  siRNA target sequence for ASPM (NM_018136.2,9377-9395).
gagcctataaactttacct

SEQ ID NO: 367520 - DNA, 19 bp, Homo sapiens
  siRNA target sequence for ASPM (NM_018136.2,9398-9416).
ctgtgaagaatgctaacaa

SEQ ID NO: 367521 - DNA, 19 bp, Homo sapiens
  siRNA target sequence for ASPM (NM_018136.2,9421-9439).
gttaattcagtcatctgta

SEQ ID NO: 367522 - DNA, 19 bp, Homo sapiens
  siRNA target sequence for ASPM (NM_018136.2,9446-9464).
gatggtttcgagcaagatt

SEQ ID NO: 367523 - DNA, 19 bp, Homo sapiens
  siRNA target sequence for ASPM (NM_018136.2,9449-9467).
ggtttcgagcaagattaca

SEQ ID NO: 367524 - DNA, 19 bp, Homo sapiens
  siRNA target sequence for ASPM (NM_018136.2,9450-9468).
gtttcgagcaagattacaa

SEQ ID NO: 367525 - DNA, 19 bp, Homo sapiens
  siRNA target sequence for ASPM (NM_018136.2,9550-9568).
gctgcatcagtaatacaga

SEQ ID NO: 367526 - DNA, 19 bp, Homo sapiens
  siRNA target sequence for ASPM (NM_018136.2,9567-9585).
gaaagcagtgcgccatttt

SEQ ID NO: 367527 - DNA, 19 bp, Homo sapiens
  siRNA target sequence for ASPM (NM_018136.2,9591-9609).
ccgtaaaaagcaggaaaaa

SEQ ID NO: 367528 - DNA, 19 bp, Homo sapiens
  siRNA target sequence for ASPM (NM_018136.2,9612-9630).
cactagtggaatcattaaa

SEQ ID NO: 367529 - DNA, 19 bp, Homo sapiens
  siRNA target sequence for ASPM (NM_018136.2,9614-9632).
ctagtggaatcattaaaat

SEQ ID NO: 367530 - DNA, 19 bp, Homo sapiens
  siRNA target sequence for ASPM (NM_018136.2,9698-9716).
gactaagtcttcaagttgt

SEQ ID NO: 367531 - DNA, 19 bp, Homo sapiens
  siRNA target sequence for ASPM (NM_018136.2,9766-9784).
gcacttcattaccttttga

SEQ ID NO: 367532 - DNA, 19 bp, Homo sapiens
  siRNA target sequence for ASPM (NM_018136.2,9792-9810).
gcacctttctgccattctt

SEQ ID NO: 367533 - DNA, 19 bp, Homo sapiens
  siRNA target sequence for ASPM (NM_018136.2,9803-9821).
ccattcttgaggccttaaa

SEQ ID NO: 367534 - DNA, 19 bp, Homo sapiens
  siRNA target sequence for ASPM (NM_018136.2,9804-9822).
cattcttgaggccttaaaa

SEQ ID NO: 367535 - DNA, 19 bp, Homo sapiens
  siRNA target sequence for ASPM (NM_018136.2,9823-9841).
cacctagaggtagttacta

SEQ ID NO: 367536 - DNA, 19 bp, Homo sapiens
  siRNA target sequence for ASPM (NM_018136.2,9825-9843).
cctagaggtagttactaga

SEQ ID NO: 367537 - DNA, 19 bp, Homo sapiens
  siRNA target sequence for ASPM (NM_018136.2,9826-9844).
ctagaggtagttactagat

SEQ ID NO: 367538 - DNA, 19 bp, Homo sapiens
  siRNA target sequence for ASPM (NM_018136.2,9829-9847).
gaggtagttactagattgt

SEQ ID NO: 367539 - DNA, 19 bp, Homo sapiens
  siRNA target sequence for ASPM (NM_018136.2,9831-9849).
ggtagttactagattgtct

SEQ ID NO: 367540 - DNA, 19 bp, Homo sapiens
  siRNA target sequence for ASPM (NM_018136.2,9870-9888).
ggcccagagtggagcaatt

SEQ ID NO: 367541 - DNA, 19 bp, Homo sapiens
  siRNA target sequence for ASPM (NM_018136.2,9901-9919).
gttttgatccgaagttgta

SEQ ID NO: 367542 - DNA, 19 bp, Homo sapiens
  siRNA target sequence for ASPM (NM_018136.2,9924-9942).
cagtattccttgtatggaa

SEQ ID NO: 367543 - DNA, 19 bp, Homo sapiens
  siRNA target sequence for ASPM (NM_018136.2,9950-9968).
gatatgctgtgcaagtctt

SEQ ID NO: 367544 - DNA, 19 bp, Homo sapiens
  siRNA target sequence for ASPM (NM_018136.2,9995-10013).
ctacttcagcagtttatga

SEQ ID NO: 367545 - DNA, 19 bp, Homo sapiens
  siRNA target sequence for ASPM (NM_018136.2,10025-10043).
gtatagatatactattgga

SEQ ID NO: 367546 - DNA, 19 bp, Homo sapiens
  siRNA target sequence for ASPM (NM_018136.2,10059-10077).
ccgagaaaagcctggtaat

SEQ ID NO: 367547 - DNA, 19 bp, Homo sapiens
  siRNA target sequence for ASPM (NM_018136.2,10087-10105).
gacaaaggcggaagcattt

SEQ ID NO: 367548 - DNA, 19 bp, Homo sapiens
  siRNA target sequence for ASPM (NM_018136.2,10093-10111).
ggcggaagcatttttacaa

SEQ ID NO: 367549 - DNA, 19 bp, Homo sapiens
  siRNA target sequence for ASPM (NM_018136.2,10121-10139).
gtttgttggctattttact

SEQ ID NO: 367550 - DNA, 19 bp, Homo sapiens
  siRNA target sequence for ASPM (NM_018136.2,10169-10187).
gaagtaggtccaaagttgt

SEQ ID NO: 367551 - DNA, 19 bp, Homo sapiens
  siRNA target sequence for ASPM (NM_018136.2,10172-10190).
gtaggtccaaagttgttga

SEQ ID NO: 367552 - DNA, 19 bp, Homo sapiens
  siRNA target sequence for ASPM (NM_018136.2,10193-10211).
gtatttacagtctctacaa

SEQ ID NO: 367553 - DNA, 19 bp, Homo sapiens
  siRNA target sequence for ASPM (NM_018136.2,10309-10327).
gtaaggaccagaatagttt

SEQ ID NO: 367554 - DNA, 19 bp, Homo sapiens
  siRNA target sequence for ASPM (NM_018136.2,10346-10364).
gggttttgagaagagataa

SEQ ID NO: 367555 - DNA, 19 bp, Homo sapiens
  siRNA target sequence for ASPM (NM_018136.2,10384-10402).
cccctgcaagctattcaaa

SEQ ID NO: 367556 - DNA, 19 bp, Homo sapiens
  siRNA target sequence for C14orf104 (NM_018139.1,433-451).
gtcctccgttactgtgtaa

SEQ ID NO: 367557 - DNA, 19 bp, Homo sapiens
  siRNA target sequence for C14orf104 (NM_018139.1,436-454).
ctccgttactgtgtaatca

SEQ ID NO: 367558 - DNA, 19 bp, Homo sapiens
  siRNA target sequence for C14orf104 (NM_018139.1,493-511).
ggatccagccgcaaagtct

SEQ ID NO: 367559 - DNA, 19 bp, Homo sapiens
  siRNA target sequence for C14orf104 (NM_018139.1,524-542).
gaatcccctctggtacaaa

SEQ ID NO: 367560 - DNA, 19 bp, Homo sapiens
  siRNA target sequence for C14orf104 (NM_018139.1,548-566).
cttctccgcacaagactta

SEQ ID NO: 367561 - DNA, 19 bp, Homo sapiens
  siRNA target sequence for C14orf104 (NM_018139.1,621-639).
cctgtgattagcatttctt

SEQ ID NO: 367562 - DNA, 19 bp, Homo sapiens
  siRNA target sequence for C14orf104 (NM_018139.1,692-710).
gagagagtggtattatggt

SEQ ID NO: 367563 - DNA, 19 bp, Homo sapiens
  siRNA target sequence for C14orf104 (NM_018139.1,700-718).
ggtattatggtgtaaacaa

SEQ ID NO: 367564 - DNA, 19 bp, Homo sapiens
  siRNA target sequence for C14orf104 (NM_018139.1,708-726).
ggtgtaaacaacgattctt

SEQ ID NO: 367565 - DNA, 19 bp, Homo sapiens
  siRNA target sequence for C14orf104 (NM_018139.1,709-727).
gtgtaaacaacgattcttt

SEQ ID NO: 367566 - DNA, 19 bp, Homo sapiens
  siRNA target sequence for C14orf104 (NM_018139.1,782-800).
cctgagctctccattcaaa

SEQ ID NO: 367567 - DNA, 19 bp, Homo sapiens
  siRNA target sequence for C14orf104 (NM_018139.1,792-810).
ccattcaaacagtctatgt

SEQ ID NO: 367568 - DNA, 19 bp, Homo sapiens
  siRNA target sequence for C14orf104 (NM_018139.1,809-827).
gtccttgaccccaccatta

SEQ ID NO: 367569 - DNA, 19 bp, Homo sapiens
  siRNA target sequence for C14orf104 (NM_018139.1,817-835).
ccccaccattaattgaagt

SEQ ID NO: 367570 - DNA, 19 bp, Homo sapiens
  siRNA target sequence for C14orf104 (NM_018139.1,818-836).
cccaccattaattgaagtt

SEQ ID NO: 367571 - DNA, 19 bp, Homo sapiens
  siRNA target sequence for C14orf104 (NM_018139.1,820-838).
caccattaattgaagttct

SEQ ID NO: 367572 - DNA, 19 bp, Homo sapiens
  siRNA target sequence for C14orf104 (NM_018139.1,823-841).
cattaattgaagttcttca

SEQ ID NO: 367573 - DNA, 19 bp, Homo sapiens
  siRNA target sequence for C14orf104 (NM_018139.1,834-852).
gttcttcaagttactgata

SEQ ID NO: 367574 - DNA, 19 bp, Homo sapiens
  siRNA target sequence for C14orf104 (NM_018139.1,837-855).
cttcaagttactgataata

SEQ ID NO: 367575 - DNA, 19 bp, Homo sapiens
  siRNA target sequence for C14orf104 (NM_018139.1,974-992).
cacccctacaactgattct

SEQ ID NO: 367576 - DNA, 19 bp, Homo sapiens
  siRNA target sequence for C14orf104 (NM_018139.1,977-995).
ccctacaactgattctgat

SEQ ID NO: 367577 - DNA, 19 bp, Homo sapiens
  siRNA target sequence for C14orf104 (NM_018139.1,978-996).
cctacaactgattctgatt

SEQ ID NO: 367578 - DNA, 19 bp, Homo sapiens
  siRNA target sequence for C14orf104 (NM_018139.1,1005-1023).
gcagttaaagcactacaaa

SEQ ID NO: 367579 - DNA, 19 bp, Homo sapiens
  siRNA target sequence for C14orf104 (NM_018139.1,1006-1024).
cagttaaagcactacaaat

SEQ ID NO: 367580 - DNA, 19 bp, Homo sapiens
  siRNA target sequence for C14orf104 (NM_018139.1,1098-1116).
cagcaacctgagtcaaaaa

SEQ ID NO: 367581 - DNA, 19 bp, Homo sapiens
  siRNA target sequence for C14orf104 (NM_018139.1,1137-1155).
gaaaaaagtgctacttgtt

SEQ ID NO: 367582 - DNA, 19 bp, Homo sapiens
  siRNA target sequence for C14orf104 (NM_018139.1,1175-1193).
cttaaacgagtcagtaata

SEQ ID NO: 367583 - DNA, 19 bp, Homo sapiens
  siRNA target sequence for C14orf104 (NM_018139.1,1212-1230).
gatggagatcacctatctt

SEQ ID NO: 367584 - DNA, 19 bp, Homo sapiens
  siRNA target sequence for C14orf104 (NM_018139.1,1216-1234).
gagatcacctatcttcatt

SEQ ID NO: 367585 - DNA, 19 bp, Homo sapiens
  siRNA target sequence for C14orf104 (NM_018139.1,1241-1259).
caaaactacggttcacaat

SEQ ID NO: 367586 - DNA, 19 bp, Homo sapiens
  siRNA target sequence for C14orf104 (NM_018139.1,1263-1281).
cctggattcgacagcataa

SEQ ID NO: 367587 - DNA, 19 bp, Homo sapiens
  siRNA target sequence for C14orf104 (NM_018139.1,1264-1282).
ctggattcgacagcataaa

SEQ ID NO: 367588 - DNA, 19 bp, Homo sapiens
  siRNA target sequence for C14orf104 (NM_018139.1,1302-1320).
ggtagtgtgcaggtcatta

SEQ ID NO: 367589 - DNA, 19 bp, Homo sapiens
  siRNA target sequence for C14orf104 (NM_018139.1,1303-1321).
gtagtgtgcaggtcattaa

SEQ ID NO: 367590 - DNA, 19 bp, Homo sapiens
  siRNA target sequence for C14orf104 (NM_018139.1,1331-1349).
gaccaattgtgcattcagt

SEQ ID NO: 367591 - DNA, 19 bp, Homo sapiens
  siRNA target sequence for C14orf104 (NM_018139.1,1339-1357).
gtgcattcagttttcagaa

SEQ ID NO: 367592 - DNA, 19 bp, Homo sapiens
  siRNA target sequence for FLJ10565 (NM_018140.1,725-743).
gcccgcagttggtacagta

SEQ ID NO: 367593 - DNA, 19 bp, Homo sapiens
  siRNA target sequence for FLJ10565 (NM_018140.1,1338-1356).
cagcaacgaggcattcctt

SEQ ID NO: 367594 - DNA, 19 bp, Homo sapiens
  siRNA target sequence for FLJ10565 (NM_018140.1,1360-1378).
caggcaagacacatcttgt

SEQ ID NO: 367595 - DNA, 19 bp, Homo sapiens
  siRNA target sequence for FLJ10565 (NM_018140.1,1371-1389).
catcttgtcatctgttgaa

SEQ ID NO: 367596 - DNA, 19 bp, Homo sapiens
  siRNA target sequence for FLJ10565 (NM_018140.1,1444-1462).
ctggctctggagagtaagt

SEQ ID NO: 367597 - DNA, 19 bp, Homo sapiens
  siRNA target sequence for FLJ10565 (NM_018140.1,1587-1605).
ggaagagaacagtaggtta

SEQ ID NO: 367598 - DNA, 19 bp, Homo sapiens
  siRNA target sequence for FLJ10565 (NM_018140.1,1601-1619).
ggttaaaatcgcttttgtt

SEQ ID NO: 367599 - DNA, 19 bp, Homo sapiens
  siRNA target sequence for FLJ10565 (NM_018140.1,1610-1628).
cgcttttgttgagtatgaa

SEQ ID NO: 367600 - DNA, 19 bp, Homo sapiens
  siRNA target sequence for FLJ10565 (NM_018140.1,1648-1666).
gacactgcagccacgttaa

SEQ ID NO: 367601 - DNA, 19 bp, Homo sapiens
  siRNA target sequence for FLJ10565 (NM_018140.1,1650-1668).
cactgcagccacgttaaat

SEQ ID NO: 367602 - DNA, 19 bp, Homo sapiens
  siRNA target sequence for FLJ10565 (NM_018140.1,1652-1670).
ctgcagccacgttaaattt

SEQ ID NO: 367603 - DNA, 19 bp, Homo sapiens
  siRNA target sequence for FLJ10565 (NM_018140.1,1655-1673).
cagccacgttaaatttgca

SEQ ID NO: 367604 - DNA, 19 bp, Homo sapiens
  siRNA target sequence for FLJ10565 (NM_018140.1,1674-1692).
gatcgctggacttcaaaca

SEQ ID NO: 367605 - DNA, 19 bp, Homo sapiens
  siRNA target sequence for FLJ10565 (NM_018140.1,1677-1695).
cgctggacttcaaacaagt

SEQ ID NO: 367606 - DNA, 19 bp, Homo sapiens
  siRNA target sequence for FLJ10565 (NM_018140.1,1797-1815).
cctggtcagcaccaatgaa

SEQ ID NO: 367607 - DNA, 19 bp, Homo sapiens
  siRNA target sequence for FLJ10569 (NM_018142.1,425-443).
cgttagaacgatcagaaat

SEQ ID NO: 367608 - DNA, 19 bp, Homo sapiens
  siRNA target sequence for FLJ10569 (NM_018142.1,511-529).
ctattagaggctgaaacta

SEQ ID NO: 367609 - DNA, 19 bp, Homo sapiens
  siRNA target sequence for FLJ10569 (NM_018142.1,580-598).
gatgtccttcctctaataa

SEQ ID NO: 367610 - DNA, 19 bp, Homo sapiens
  siRNA target sequence for FLJ10569 (NM_018142.1,583-601).
gtccttcctctaataatta

SEQ ID NO: 367611 - DNA, 19 bp, Homo sapiens
  siRNA target sequence for FLJ10569 (NM_018142.1,603-621).
caaccatgatgttcgatta

SEQ ID NO: 367612 - DNA, 19 bp, Homo sapiens
  siRNA target sequence for FLJ10569 (NM_018142.1,616-634).
cgattacctgccaatttat

SEQ ID NO: 367613 - DNA, 19 bp, Homo sapiens
  siRNA target sequence for FLJ10569 (NM_018142.1,617-635).
gattacctgccaatttatt

SEQ ID NO: 367614 - DNA, 19 bp, Homo sapiens
  siRNA target sequence for FLJ10569 (NM_018142.1,656-674).
cagctgaattttatatcaa

SEQ ID NO: 367615 - DNA, 19 bp, Homo sapiens
  siRNA target sequence for FLJ10569 (NM_018142.1,683-701).
ctaggtctactcaaataga

SEQ ID NO: 367616 - DNA, 19 bp, Homo sapiens
  siRNA target sequence for FLJ10569 (NM_018142.1,686-704).
ggtctactcaaatagaaaa

SEQ ID NO: 367617 - DNA, 19 bp, Homo sapiens
  siRNA target sequence for FLJ10569 (NM_018142.1,689-707).
ctactcaaatagaaaatca

SEQ ID NO: 367618 - DNA, 19 bp, Homo sapiens
  siRNA target sequence for FLJ10569 (NM_018142.1,754-772).
cgtagctctcagaagtaca

SEQ ID NO: 367619 - DNA, 19 bp, Homo sapiens
  siRNA target sequence for FLJ10569 (NM_018142.1,755-773).
gtagctctcagaagtacat

SEQ ID NO: 367620 - DNA, 19 bp, Homo sapiens
  siRNA target sequence for FLJ10569 (NM_018142.1,758-776).
gctctcagaagtacataat

SEQ ID NO: 367621 - DNA, 19 bp, Homo sapiens
  siRNA target sequence for FLJ10569 (NM_018142.1,759-777).
ctctcagaagtacataata

SEQ ID NO: 367622 - DNA, 19 bp, Homo sapiens
  siRNA target sequence for FLJ10569 (NM_018142.1,778-796).
gaagggctgacggaaaaat

SEQ ID NO: 367623 - DNA, 19 bp, Homo sapiens
  siRNA target sequence for FLJ10569 (NM_018142.1,781-799).
gggctgacggaaaaatcat

SEQ ID NO: 367624 - DNA, 19 bp, Homo sapiens
  siRNA target sequence for FLJ10569 (NM_018142.1,884-902).
gacgaagctatggagatat

SEQ ID NO: 367625 - DNA, 19 bp, Homo sapiens
  siRNA target sequence for FLJ10569 (NM_018142.1,886-904).
cgaagctatggagatattt

SEQ ID NO: 367626 - DNA, 19 bp, Homo sapiens
  siRNA target sequence for FLJ10569 (NM_018142.1,950-968).
gtgaagcacatgcaaaata

SEQ ID NO: 367627 - DNA, 19 bp, Homo sapiens
  siRNA target sequence for FLJ10569 (NM_018142.1,996-1014).
gctggtcttctttaagaat

SEQ ID NO: 367628 - DNA, 19 bp, Homo sapiens
  siRNA target sequence for FLJ10569 (NM_018142.1,1113-1131).
gtatggtgatgtagaaatt

SEQ ID NO: 367629 - DNA, 19 bp, Homo sapiens
  siRNA target sequence for FLJ10569 (NM_018142.1,1123-1141).
gtagaaattgatcgtaata

SEQ ID NO: 367630 - DNA, 19 bp, Homo sapiens
  siRNA target sequence for FLJ10569 (NM_018142.1,1135-1153).
cgtaataaacacatccata

SEQ ID NO: 367631 - DNA, 19 bp, Homo sapiens
  siRNA target sequence for FLJ10569 (NM_018142.1,1207-1225).
gactgttcggcgaaaggaa

SEQ ID NO: 367632 - DNA, 19 bp, Homo sapiens
  siRNA target sequence for FLJ10569 (NM_018142.1,1211-1229).
gttcggcgaaaggaagaaa

SEQ ID NO: 367633 - DNA, 19 bp, Homo sapiens
  siRNA target sequence for FLJ10569 (NM_018142.1,1223-1241).
gaagaaatcgtcacattgt

SEQ ID NO: 367634 - DNA, 19 bp, Homo sapiens
  siRNA target sequence for FLJ10569 (NM_018142.1,1226-1244).
gaaatcgtcacattgtagt

SEQ ID NO: 367635 - DNA, 19 bp, Homo sapiens
  siRNA target sequence for FLJ10569 (NM_018142.1,1231-1249).
cgtcacattgtagtcaata

SEQ ID NO: 367636 - DNA, 19 bp, Homo sapiens
  siRNA target sequence for FLJ10569 (NM_018142.1,1232-1250).
gtcacattgtagtcaataa

SEQ ID NO: 367637 - DNA, 19 bp, Homo sapiens
  siRNA target sequence for FLJ10569 (NM_018142.1,1262-1280).
ctaactccactgaagtgtt

SEQ ID NO: 367638 - DNA, 19 bp, Homo sapiens
  siRNA target sequence for FLJ10569 (NM_018142.1,1326-1344).
cctagaattccttgacaaa

SEQ ID NO: 367639 - DNA, 19 bp, Homo sapiens
  siRNA target sequence for FLJ10569 (NM_018142.1,1366-1384).
gcctggaagacggatactt

SEQ ID NO: 367640 - DNA, 19 bp, Homo sapiens
  siRNA target sequence for FLJ10569 (NM_018142.1,1376-1394).
cggatacttggctttggtt

SEQ ID NO: 367641 - DNA, 19 bp, Homo sapiens
  siRNA target sequence for FLJ10569 (NM_018142.1,1377-1395).
ggatacttggctttggtta

SEQ ID NO: 367642 - DNA, 19 bp, Homo sapiens
  siRNA target sequence for FLJ10569 (NM_018142.1,1378-1396).
gatacttggctttggttaa

SEQ ID NO: 367643 - DNA, 19 bp, Homo sapiens
  siRNA target sequence for FLJ10569 (NM_018142.1,1397-1415).
gaatcttcctcactgatat

SEQ ID NO: 367644 - DNA, 19 bp, Homo sapiens
  siRNA target sequence for FLJ10569 (NM_018142.1,1405-1423).
ctcactgatatgatcatct

SEQ ID NO: 367645 - DNA, 19 bp, Homo sapiens
  siRNA target sequence for FLJ10569 (NM_018142.1,1407-1425).
cactgatatgatcatctat

SEQ ID NO: 367646 - DNA, 19 bp, Homo sapiens
  siRNA target sequence for FLJ10569 (NM_018142.1,1409-1427).
ctgatatgatcatctatca

SEQ ID NO: 367647 - DNA, 19 bp, Homo sapiens
  siRNA target sequence for FLJ10569 (NM_018142.1,1422-1440).
ctatcagggtcaatataaa

SEQ ID NO: 367648 - DNA, 19 bp, Homo sapiens
  siRNA target sequence for FLJ10569 (NM_018142.1,1564-1582).
gcgctaggggagtacagaa

SEQ ID NO: 367649 - DNA, 19 bp, Homo sapiens
  siRNA target sequence for FLJ10569 (NM_018142.1,1565-1583).
cgctaggggagtacagaat

SEQ ID NO: 367650 - DNA, 19 bp, Homo sapiens
  siRNA target sequence for FLJ10569 (NM_018142.1,1620-1638).
ggtactccccattcaagat

SEQ ID NO: 367651 - DNA, 19 bp, Homo sapiens
  siRNA target sequence for FLJ10569 (NM_018142.1,1654-1672).
gaggaaccctcgaaagtaa

SEQ ID NO: 367652 - DNA, 19 bp, Homo sapiens
  siRNA target sequence for FLJ10569 (NM_018142.1,1685-1703).
gaaaaggttcggatctgaa

SEQ ID NO: 367653 - DNA, 19 bp, Homo sapiens
  siRNA target sequence for FLJ10569 (NM_018142.1,1715-1733).
gtaccagcaaggctatcat

SEQ ID NO: 367654 - DNA, 19 bp, Homo sapiens
  siRNA target sequence for FLJ10569 (NM_018142.1,1734-1752).
gccatactgcctccattta

SEQ ID NO: 367655 - DNA, 19 bp, Homo sapiens
  siRNA target sequence for FLJ10569 (NM_018142.1,1735-1753).
ccatactgcctccatttaa

SEQ ID NO: 367656 - DNA, 19 bp, Homo sapiens
  siRNA target sequence for FLJ10569 (NM_018142.1,1755-1773).
gttagcctgttttaagctt

SEQ ID NO: 367657 - DNA, 19 bp, Homo sapiens
  siRNA target sequence for FLJ10569 (NM_018142.1,1805-1823).
cattggggcatgtgattgt

SEQ ID NO: 367658 - DNA, 19 bp, Homo sapiens
  siRNA target sequence for FLJ10579 (NM_018145.1,327-345).
cccaactccctggactata

SEQ ID NO: 367659 - DNA, 19 bp, Homo sapiens
  siRNA target sequence for FLJ10579 (NM_018145.1,341-359).
ctatacgcagacttcagat

SEQ ID NO: 367660 - DNA, 19 bp, Homo sapiens
  siRNA target sequence for FLJ10579 (NM_018145.1,722-740).
caatgcggagtctgacaat

SEQ ID NO: 367661 - DNA, 19 bp, Homo sapiens
  siRNA target sequence for FLJ10579 (NM_018145.1,743-761).
gcgggactctgacaaagaa

SEQ ID NO: 367662 - DNA, 19 bp, Homo sapiens
  siRNA target sequence for FLJ10579 (NM_018145.1,806-824).
ggggagaaaggattctctt

SEQ ID NO: 367663 - DNA, 19 bp, Homo sapiens
  siRNA target sequence for FLJ10579 (NM_018145.1,997-1015).
gaagccggcaggactttct

SEQ ID NO: 367664 - DNA, 19 bp, Homo sapiens
  siRNA target sequence for FLJ10579 (NM_018145.1,1065-1083).
gtgagcgagaagaagtcat

SEQ ID NO: 367665 - DNA, 19 bp, Homo sapiens
  siRNA target sequence for FLJ10579 (NM_018145.1,1067-1085).
gagcgagaagaagtcatat

SEQ ID NO: 367666 - DNA, 19 bp, Homo sapiens
  siRNA target sequence for FLJ10579 (NM_018145.1,1081-1099).
catatgccctagatggaaa

SEQ ID NO: 367667 - DNA, 19 bp, Homo sapiens
  siRNA target sequence for FLJ10579 (NM_018145.1,1344-1362).
gctacagccttgcttgaaa

SEQ ID NO: 367668 - DNA, 19 bp, Homo sapiens
  siRNA target sequence for FLJ10579 (NM_018145.1,1419-1437).
ctacagccaggattttcca

SEQ ID NO: 367669 - DNA, 19 bp, Homo sapiens
  siRNA target sequence for FLJ10579 (NM_018145.1,1436-1454).
caaagcaggaagggtatat

SEQ ID NO: 367670 - DNA, 19 bp, Homo sapiens
  siRNA target sequence for FLJ10579 (NM_018145.1,1440-1458).
gcaggaagggtatatattt

SEQ ID NO: 367671 - DNA, 19 bp, Homo sapiens
  siRNA target sequence for FLJ10579 (NM_018145.1,1443-1461).
ggaagggtatatatttcca

SEQ ID NO: 367672 - DNA, 19 bp, Homo sapiens
  siRNA target sequence for FLJ10579 (NM_018145.1,1444-1462).
gaagggtatatatttccaa

SEQ ID NO: 367673 - DNA, 19 bp, Homo sapiens
  siRNA target sequence for FLJ10579 (NM_018145.1,1460-1478).
caagtgctacagagaacta

SEQ ID NO: 367674 - DNA, 19 bp, Homo sapiens
  siRNA target sequence for FLJ10579 (NM_018145.1,1494-1512).
gctagatggtggatgaagt

SEQ ID NO: 367675 - DNA, 19 bp, Homo sapiens
  siRNA target sequence for FAIM (NM_018147.1,135-153).
ggagtccacaagatcgaat

SEQ ID NO: 367676 - DNA, 19 bp, Homo sapiens
  siRNA target sequence for FAIM (NM_018147.1,136-154).
gagtccacaagatcgaatt

SEQ ID NO: 367677 - DNA, 19 bp, Homo sapiens
  siRNA target sequence for FAIM (NM_018147.1,172-190).
caggcaaacgagtagtata

SEQ ID NO: 367678 - DNA, 19 bp, Homo sapiens
  siRNA target sequence for FAIM (NM_018147.1,175-193).
gcaaacgagtagtatatgt

SEQ ID NO: 367679 - DNA, 19 bp, Homo sapiens
  siRNA target sequence for FAIM (NM_018147.1,176-194).
caaacgagtagtatatgta

SEQ ID NO: 367680 - DNA, 19 bp, Homo sapiens
  siRNA target sequence for FAIM (NM_018147.1,297-315).
gctatcagtggttttgctt

SEQ ID NO: 367681 - DNA, 19 bp, Homo sapiens
  siRNA target sequence for FAIM (NM_018147.1,298-316).
ctatcagtggttttgctta

SEQ ID NO: 367682 - DNA, 19 bp, Homo sapiens
  siRNA target sequence for WINS1 (NM_018148.3,119-137).
gaagttttagaagagttat

SEQ ID NO: 367683 - DNA, 19 bp, Homo sapiens
  siRNA target sequence for WINS1 (NM_018148.3,178-196).
ccatgattacatcttttat

SEQ ID NO: 367684 - DNA, 19 bp, Homo sapiens
  siRNA target sequence for WINS1 (NM_018148.3,209-227).
gtttcagatcaagattgtt

SEQ ID NO: 367685 - DNA, 19 bp, Homo sapiens
  siRNA target sequence for WINS1 (NM_018148.3,365-383).
gtaatgctccttcagttaa

SEQ ID NO: 367686 - DNA, 19 bp, Homo sapiens
  siRNA target sequence for WINS1 (NM_018148.3,400-418).
gacaacccggatattgtct

SEQ ID NO: 367687 - DNA, 19 bp, Homo sapiens
  siRNA target sequence for WINS1 (NM_018148.3,406-424).
ccggatattgtctgtcaaa

SEQ ID NO: 367688 - DNA, 19 bp, Homo sapiens
  siRNA target sequence for WINS1 (NM_018148.3,407-425).
cggatattgtctgtcaaaa

SEQ ID NO: 367689 - DNA, 19 bp, Homo sapiens
  siRNA target sequence for WINS1 (NM_018148.3,445-463).
gcagtacagagatgtaatt

SEQ ID NO: 367690 - DNA, 19 bp, Homo sapiens
  siRNA target sequence for WINS1 (NM_018148.3,446-464).
cagtacagagatgtaatta

SEQ ID NO: 367691 - DNA, 19 bp, Homo sapiens
  siRNA target sequence for WINS1 (NM_018148.3,480-498).
cagccaaagtcgattctaa

SEQ ID NO: 367692 - DNA, 19 bp, Homo sapiens
  siRNA target sequence for WINS1 (NM_018148.3,483-501).
ccaaagtcgattctaaatt

SEQ ID NO: 367693 - DNA, 19 bp, Homo sapiens
  siRNA target sequence for WINS1 (NM_018148.3,488-506).
gtcgattctaaattaatct

SEQ ID NO: 367694 - DNA, 19 bp, Homo sapiens
  siRNA target sequence for WINS1 (NM_018148.3,522-540).
cagataaattgttatctca

SEQ ID NO: 367695 - DNA, 19 bp, Homo sapiens
  siRNA target sequence for WINS1 (NM_018148.3,566-584).
cttctatatttccaattga

SEQ ID NO: 367696 - DNA, 19 bp, Homo sapiens
  siRNA target sequence for WINS1 (NM_018148.3,577-595).
ccaattgagagaaaagata

SEQ ID NO: 367697 - DNA, 19 bp, Homo sapiens
  siRNA target sequence for WINS1 (NM_018148.3,639-657).
ctgaatactctgagagtaa

SEQ ID NO: 367698 - DNA, 19 bp, Homo sapiens
  siRNA target sequence for WINS1 (NM_018148.3,681-699).
ctcttacagcaataataaa

SEQ ID NO: 367699 - DNA, 19 bp, Homo sapiens
  siRNA target sequence for WINS1 (NM_018148.3,713-731).
gattcatgttcacagaaaa

SEQ ID NO: 367700 - DNA, 19 bp, Homo sapiens
  siRNA target sequence for WINS1 (NM_018148.3,823-841).
ggatacttctaaaatagta

SEQ ID NO: 367701 - DNA, 19 bp, Homo sapiens
  siRNA target sequence for WINS1 (NM_018148.3,913-931).
cacttgccagaggatttta

SEQ ID NO: 367702 - DNA, 19 bp, Homo sapiens
  siRNA target sequence for WINS1 (NM_018148.3,1102-1120).
catgctggctttagctaat

SEQ ID NO: 367703 - DNA, 19 bp, Homo sapiens
  siRNA target sequence for WINS1 (NM_018148.3,1105-1123).
gctggctttagctaatgct

SEQ ID NO: 367704 - DNA, 19 bp, Homo sapiens
  siRNA target sequence for WINS1 (NM_018148.3,1110-1128).
ctttagctaatgctgtttt

SEQ ID NO: 367705 - DNA, 19 bp, Homo sapiens
  siRNA target sequence for WINS1 (NM_018148.3,1156-1174).
gacactgtctgtttatgaa

SEQ ID NO: 367706 - DNA, 19 bp, Homo sapiens
  siRNA target sequence for WINS1 (NM_018148.3,1158-1176).
cactgtctgtttatgaaaa

SEQ ID NO: 367707 - DNA, 19 bp, Homo sapiens
  siRNA target sequence for WINS1 (NM_018148.3,1208-1226).
cctgaatgtgaacttatca

SEQ ID NO: 367708 - DNA, 19 bp, Homo sapiens
  siRNA target sequence for WINS1 (NM_018148.3,1227-1245).
ctagtccagatcatgtgat

SEQ ID NO: 367709 - DNA, 19 bp, Homo sapiens
  siRNA target sequence for WINS1 (NM_018148.3,1251-1269).
gagcagcaagcttagttat

SEQ ID NO: 367710 - DNA, 19 bp, Homo sapiens
  siRNA target sequence for WINS1 (NM_018148.3,1254-1272).
cagcaagcttagttataat

SEQ ID NO: 367711 - DNA, 19 bp, Homo sapiens
  siRNA target sequence for WINS1 (NM_018148.3,1338-1356).
ggttcatgtctgagttact

SEQ ID NO: 367712 - DNA, 19 bp, Homo sapiens
  siRNA target sequence for WINS1 (NM_018148.3,1349-1367).
gagttactgaccttcttaa

SEQ ID NO: 367713 - DNA, 19 bp, Homo sapiens
  siRNA target sequence for WINS1 (NM_018148.3,1414-1432).
gctgtctcgggttttcata

SEQ ID NO: 367714 - DNA, 19 bp, Homo sapiens
  siRNA target sequence for WINS1 (NM_018148.3,1417-1435).
gtctcgggttttcatagaa

SEQ ID NO: 367715 - DNA, 19 bp, Homo sapiens
  siRNA target sequence for WINS1 (NM_018148.3,1419-1437).
ctcgggttttcatagaaca

SEQ ID NO: 367716 - DNA, 19 bp, Homo sapiens
  siRNA target sequence for WINS1 (NM_018148.3,1422-1440).
gggttttcatagaacaaga

SEQ ID NO: 367717 - DNA, 19 bp, Homo sapiens
  siRNA target sequence for WINS1 (NM_018148.3,1466-1484).
gcatcactgggcatctact

SEQ ID NO: 367718 - DNA, 19 bp, Homo sapiens
  siRNA target sequence for WINS1 (NM_018148.3,1467-1485).
catcactgggcatctactt

SEQ ID NO: 367719 - DNA, 19 bp, Homo sapiens
  siRNA target sequence for WINS1 (NM_018148.3,1518-1536).
gcttgactcagggaaaaga

SEQ ID NO: 367720 - DNA, 19 bp, Homo sapiens
  siRNA target sequence for WINS1 (NM_018148.3,1543-1561).
ggaccatcacacacatgaa

SEQ ID NO: 367721 - DNA, 19 bp, Homo sapiens
  siRNA target sequence for WINS1 (NM_018148.3,1722-1740).
ccatttgcaataactttga

SEQ ID NO: 367722 - DNA, 19 bp, Homo sapiens
  siRNA target sequence for WINS1 (NM_018148.3,1735-1753).
ctttgatgcaactgaatct

SEQ ID NO: 367723 - DNA, 19 bp, Homo sapiens
  siRNA target sequence for WINS1 (NM_018148.3,1746-1764).
ctgaatctaaatatgacat

SEQ ID NO: 367724 - DNA, 19 bp, Homo sapiens
  siRNA target sequence for WINS1 (NM_018148.3,1802-1820).
caaagctccaaccaaacaa

SEQ ID NO: 367725 - DNA, 19 bp, Homo sapiens
  siRNA target sequence for WINS1 (NM_018148.3,1933-1951).
caccatgtgtgcttctagt

SEQ ID NO: 367726 - DNA, 19 bp, Homo sapiens
  siRNA target sequence for WINS1 (NM_018148.3,1971-1989).
ctcaaagtctggtagatta

SEQ ID NO: 367727 - DNA, 19 bp, Homo sapiens
  siRNA target sequence for WINS1 (NM_018148.3,2026-2044).
gcagtgtttagctaacagt

SEQ ID NO: 367728 - DNA, 19 bp, Homo sapiens
  siRNA target sequence for WINS1 (NM_018148.3,2027-2045).
cagtgtttagctaacagta

SEQ ID NO: 367729 - DNA, 19 bp, Homo sapiens
  siRNA target sequence for WINS1 (NM_018148.3,2029-2047).
gtgtttagctaacagtaaa

SEQ ID NO: 367730 - DNA, 19 bp, Homo sapiens
  siRNA target sequence for WINS1 (NM_018148.3,2031-2049).
gtttagctaacagtaaaca

SEQ ID NO: 367731 - DNA, 19 bp, Homo sapiens
  siRNA target sequence for WINS1 (NM_018148.3,2096-2114).
gggacaagcagggataaaa

SEQ ID NO: 367732 - DNA, 19 bp, Homo sapiens
  siRNA target sequence for WINS1 (NM_018148.3,2097-2115).
ggacaagcagggataaaaa

SEQ ID NO: 367733 - DNA, 19 bp, Homo sapiens
  siRNA target sequence for WINS1 (NM_018148.3,2149-2167).
ggttctgaaagaatttgat

SEQ ID NO: 367734 - DNA, 19 bp, Homo sapiens
  siRNA target sequence for WINS1 (NM_018148.3,2223-2241).
gaatattttacagaatagt

SEQ ID NO: 367735 - DNA, 19 bp, Homo sapiens
  siRNA target sequence for WINS1 (NM_018148.3,2294-2312).
cttttcccatataatccaa

SEQ ID NO: 367736 - DNA, 19 bp, Homo sapiens
  siRNA target sequence for WINS1 (NM_018148.3,2338-2356).
catagaggtgataagtaat

SEQ ID NO: 367737 - DNA, 19 bp, Homo sapiens
  siRNA target sequence for FLJ10597 (NM_018150.1,540-558).
gagaaaatcaccgaagatt

SEQ ID NO: 367738 - DNA, 19 bp, Homo sapiens
  siRNA target sequence for FLJ10597 (NM_018150.1,542-560).
gaaaatcaccgaagattca

SEQ ID NO: 367739 - DNA, 19 bp, Homo sapiens
  siRNA target sequence for FLJ10597 (NM_018150.1,587-605).
ggctcgggtcagagaactt

SEQ ID NO: 367740 - DNA, 19 bp, Homo sapiens
  siRNA target sequence for FLJ10597 (NM_018150.1,619-637).
ctcgtggggaccgttacaa

SEQ ID NO: 367741 - DNA, 19 bp, Homo sapiens
  siRNA target sequence for FLJ10597 (NM_018150.1,621-639).
cgtggggaccgttacaaat

SEQ ID NO: 367742 - DNA, 19 bp, Homo sapiens
  siRNA target sequence for C20orf12 (NM_018152.2,548-566).
gtaagcggtcagaagtgtt

SEQ ID NO: 367743 - DNA, 19 bp, Homo sapiens
  siRNA target sequence for C20orf12 (NM_018152.2,553-571).
cggtcagaagtgtttgaca

SEQ ID NO: 367744 - DNA, 19 bp, Homo sapiens
  siRNA target sequence for C20orf12 (NM_018152.2,574-592).
cacggagataatgagaatt

SEQ ID NO: 367745 - DNA, 19 bp, Homo sapiens
  siRNA target sequence for C20orf12 (NM_018152.2,576-594).
cggagataatgagaattca

SEQ ID NO: 367746 - DNA, 19 bp, Homo sapiens
  siRNA target sequence for C20orf12 (NM_018152.2,656-674).
gctcgcttctgtcaagaat

SEQ ID NO: 367747 - DNA, 19 bp, Homo sapiens
  siRNA target sequence for C20orf12 (NM_018152.2,865-883).
ggcctgtggtacaggaaat

SEQ ID NO: 367748 - DNA, 19 bp, Homo sapiens
  siRNA target sequence for C20orf12 (NM_018152.2,884-902).
cctgctcacctgagatact

SEQ ID NO: 367749 - DNA, 19 bp, Homo sapiens
  siRNA target sequence for C20orf12 (NM_018152.2,1117-1135).
cctgtctgcccgattctgt

SEQ ID NO: 367750 - DNA, 19 bp, Homo sapiens
  siRNA target sequence for C20orf12 (NM_018152.2,1161-1179).
ccctagtgaaacttagctt

SEQ ID NO: 367751 - DNA, 19 bp, Homo sapiens
  siRNA target sequence for C20orf12 (NM_018152.2,1205-1223).
gaggaacctcgcccttttt

SEQ ID NO: 367752 - DNA, 19 bp, Homo sapiens
  siRNA target sequence for C20orf12 (NM_018152.2,1207-1225).
ggaacctcgccctttttct

SEQ ID NO: 367753 - DNA, 19 bp, Homo sapiens
  siRNA target sequence for C20orf12 (NM_018152.2,1240-1258).
ctggcagtccctgaatatt

SEQ ID NO: 367754 - DNA, 19 bp, Homo sapiens
  siRNA target sequence for C20orf12 (NM_018152.2,1329-1347).
ctggcaagctgctagcaaa

SEQ ID NO: 367755 - DNA, 19 bp, Homo sapiens
  siRNA target sequence for C20orf12 (NM_018152.2,1331-1349).
ggcaagctgctagcaaaaa

SEQ ID NO: 367756 - DNA, 19 bp, Homo sapiens
  siRNA target sequence for C20orf12 (NM_018152.2,1355-1373).
caggaactagcctctcaaa

SEQ ID NO: 367757 - DNA, 19 bp, Homo sapiens
  siRNA target sequence for C20orf12 (NM_018152.2,1387-1405).
gaaaatgagtgaccataaa

SEQ ID NO: 367758 - DNA, 19 bp, Homo sapiens
  siRNA target sequence for C20orf12 (NM_018152.2,1479-1497).
ggtgttatgctcagaacaa

SEQ ID NO: 367759 - DNA, 19 bp, Homo sapiens
  siRNA target sequence for C20orf12 (NM_018152.2,1561-1579).
cgaagatggttgtgaagtt

SEQ ID NO: 367760 - DNA, 19 bp, Homo sapiens
  siRNA target sequence for C20orf12 (NM_018152.2,1577-1595).
gttagcatcagactgaatt

SEQ ID NO: 367761 - DNA, 19 bp, Homo sapiens
  siRNA target sequence for C20orf12 (NM_018152.2,1585-1603).
cagactgaattatagtcaa

SEQ ID NO: 367762 - DNA, 19 bp, Homo sapiens
  siRNA target sequence for C20orf12 (NM_018152.2,1726-1744).
ccagagtacctcagatact

SEQ ID NO: 367763 - DNA, 19 bp, Homo sapiens
  siRNA target sequence for C20orf12 (NM_018152.2,1729-1747).
gagtacctcagatactatt

SEQ ID NO: 367764 - DNA, 19 bp, Homo sapiens
  siRNA target sequence for C20orf12 (NM_018152.2,1731-1749).
gtacctcagatactattga

SEQ ID NO: 367765 - DNA, 19 bp, Homo sapiens
  siRNA target sequence for C20orf12 (NM_018152.2,1798-1816).
gaaggagcagcttatacct

SEQ ID NO: 367766 - DNA, 19 bp, Homo sapiens
  siRNA target sequence for C20orf12 (NM_018152.2,1863-1881).
gagtctctgtgattgaaca

SEQ ID NO: 367767 - DNA, 19 bp, Homo sapiens
  siRNA target sequence for C20orf12 (NM_018152.2,1922-1940).
gacaatcgacccgtcataa

SEQ ID NO: 367768 - DNA, 19 bp, Homo sapiens
  siRNA target sequence for C20orf12 (NM_018152.2,1941-1959).
ccgtggctgttatgaataa

SEQ ID NO: 367769 - DNA, 19 bp, Homo sapiens
  siRNA target sequence for C20orf12 (NM_018152.2,2218-2236).
ggaccaactcgctcaaact

SEQ ID NO: 367770 - DNA, 19 bp, Homo sapiens
  siRNA target sequence for C20orf12 (NM_018152.2,2219-2237).
gaccaactcgctcaaacta

SEQ ID NO: 367771 - DNA, 19 bp, Homo sapiens
  siRNA target sequence for ASF1B (NM_018154.1,303-321).
cggctgagagtgaggaatt

SEQ ID NO: 367772 - DNA, 19 bp, Homo sapiens
  siRNA target sequence for ASF1B (NM_018154.1,304-322).
ggctgagagtgaggaattt

SEQ ID NO: 367773 - DNA, 19 bp, Homo sapiens
  siRNA target sequence for ASF1B (NM_018154.1,360-378).
cagcagggagacacatgtt

SEQ ID NO: 367774 - DNA, 19 bp, Homo sapiens
  siRNA target sequence for ASF1B (NM_018154.1,369-387).
gacacatgtttgtctttca

SEQ ID NO: 367775 - DNA, 19 bp, Homo sapiens
  siRNA target sequence for ASF1B (NM_018154.1,596-614).
cgggtgacccgcttccata

SEQ ID NO: 367776 - DNA, 19 bp, Homo sapiens
  siRNA target sequence for ASF1B (NM_018154.1,597-615).
gggtgacccgcttccatat

SEQ ID NO: 367777 - DNA, 19 bp, Homo sapiens
  siRNA target sequence for ASF1B (NM_018154.1,599-617).
gtgacccgcttccatatca

SEQ ID NO: 367778 - DNA, 19 bp, Homo sapiens
  siRNA target sequence for hSyn (NM_018157.1,172-190).
gtgaaggcatatttaaagt

SEQ ID NO: 367779 - DNA, 19 bp, Homo sapiens
  siRNA target sequence for hSyn (NM_018157.1,178-196).
gcatatttaaagtccttat

SEQ ID NO: 367780 - DNA, 19 bp, Homo sapiens
  siRNA target sequence for hSyn (NM_018157.1,234-252).
gaagtactccgcattctct

SEQ ID NO: 367781 - DNA, 19 bp, Homo sapiens
  siRNA target sequence for hSyn (NM_018157.1,245-263).
cattctctccagagacaaa

SEQ ID NO: 367782 - DNA, 19 bp, Homo sapiens
  siRNA target sequence for hSyn (NM_018157.1,309-327).
ctgcgactagccaagctaa

SEQ ID NO: 367783 - DNA, 19 bp, Homo sapiens
  siRNA target sequence for hSyn (NM_018157.1,311-329).
gcgactagccaagctaaat

SEQ ID NO: 367784 - DNA, 19 bp, Homo sapiens
  siRNA target sequence for hSyn (NM_018157.1,313-331).
gactagccaagctaaatga

SEQ ID NO: 367785 - DNA, 19 bp, Homo sapiens
  siRNA target sequence for hSyn (NM_018157.1,315-333).
ctagccaagctaaatgagt

SEQ ID NO: 367786 - DNA, 19 bp, Homo sapiens
  siRNA target sequence for hSyn (NM_018157.1,323-341).
gctaaatgagttagatgat

SEQ ID NO: 367787 - DNA, 19 bp, Homo sapiens
  siRNA target sequence for hSyn (NM_018157.1,367-385).
cagttattgtggagtcatt

SEQ ID NO: 367788 - DNA, 19 bp, Homo sapiens
  siRNA target sequence for hSyn (NM_018157.1,391-409).
gtctgtgtaatatagtgtt

SEQ ID NO: 367789 - DNA, 19 bp, Homo sapiens
  siRNA target sequence for hSyn (NM_018157.1,434-452).
cagcctggaacttaatctt

SEQ ID NO: 367790 - DNA, 19 bp, Homo sapiens
  siRNA target sequence for hSyn (NM_018157.1,488-506).
ggaccggaaatttatcaat

SEQ ID NO: 367791 - DNA, 19 bp, Homo sapiens
  siRNA target sequence for hSyn (NM_018157.1,507-525).
gacattaagtgctttgact

SEQ ID NO: 367792 - DNA, 19 bp, Homo sapiens
  siRNA target sequence for hSyn (NM_018157.1,559-577).
ccgacatcaggtcacaatt

SEQ ID NO: 367793 - DNA, 19 bp, Homo sapiens
  siRNA target sequence for hSyn (NM_018157.1,601-619).
cgctgctaacgcagatctt

SEQ ID NO: 367794 - DNA, 19 bp, Homo sapiens
  siRNA target sequence for hSyn (NM_018157.1,606-624).
ctaacgcagatcttggaaa

SEQ ID NO: 367795 - DNA, 19 bp, Homo sapiens
  siRNA target sequence for hSyn (NM_018157.1,641-659).
gtggaccgatgagtatgaa

SEQ ID NO: 367796 - DNA, 19 bp, Homo sapiens
  siRNA target sequence for hSyn (NM_018157.1,662-680).
ggccatagaccataatgga

SEQ ID NO: 367797 - DNA, 19 bp, Homo sapiens
  siRNA target sequence for hSyn (NM_018157.1,722-740).
cctcaaagctctcttcaat

SEQ ID NO: 367798 - DNA, 19 bp, Homo sapiens
  siRNA target sequence for hSyn (NM_018157.1,781-799).
ctcatcagttccgtgtaat

SEQ ID NO: 367799 - DNA, 19 bp, Homo sapiens
  siRNA target sequence for hSyn (NM_018157.1,814-832).
gtcattgtttactaatcgt

SEQ ID NO: 367800 - DNA, 19 bp, Homo sapiens
  siRNA target sequence for hSyn (NM_018157.1,868-886).
gcaatgcagtcaacctttt

SEQ ID NO: 367801 - DNA, 19 bp, Homo sapiens
  siRNA target sequence for hSyn (NM_018157.1,873-891).
gcagtcaaccttttaagca

SEQ ID NO: 367802 - DNA, 19 bp, Homo sapiens
  siRNA target sequence for hSyn (NM_018157.1,927-945).
ccgttaacccatgaagaaa

SEQ ID NO: 367803 - DNA, 19 bp, Homo sapiens
  siRNA target sequence for hSyn (NM_018157.1,956-974).
ggcaacgactctagatgaa

SEQ ID NO: 367804 - DNA, 19 bp, Homo sapiens
  siRNA target sequence for hSyn (NM_018157.1,958-976).
caacgactctagatgaact

SEQ ID NO: 367805 - DNA, 19 bp, Homo sapiens
  siRNA target sequence for hSyn (NM_018157.1,969-987).
gatgaactgcccagtaata

SEQ ID NO: 367806 - DNA, 19 bp, Homo sapiens
  siRNA target sequence for hSyn (NM_018157.1,1019-1037).
caataccatggtatacaat

SEQ ID NO: 367807 - DNA, 19 bp, Homo sapiens
  siRNA target sequence for hSyn (NM_018157.1,1024-1042).
ccatggtatacaatggtat

SEQ ID NO: 367808 - DNA, 19 bp, Homo sapiens
  siRNA target sequence for hSyn (NM_018157.1,1028-1046).
ggtatacaatggtatgaat

SEQ ID NO: 367809 - DNA, 19 bp, Homo sapiens
  siRNA target sequence for hSyn (NM_018157.1,1029-1047).
gtatacaatggtatgaata

SEQ ID NO: 367810 - DNA, 19 bp, Homo sapiens
  siRNA target sequence for hSyn (NM_018157.1,1092-1110).
gacaagggaagcagctata

SEQ ID NO: 367811 - DNA, 19 bp, Homo sapiens
  siRNA target sequence for hSyn (NM_018157.1,1106-1124).
ctatagagagggtctaact

SEQ ID NO: 367812 - DNA, 19 bp, Homo sapiens
  siRNA target sequence for hSyn (NM_018157.1,1150-1168).
gttcccgagcccatcgaaa

SEQ ID NO: 367813 - DNA, 19 bp, Homo sapiens
  siRNA target sequence for hSyn (NM_018157.1,1153-1171).
cccgagcccatcgaaacat

SEQ ID NO: 367814 - DNA, 19 bp, Homo sapiens
  siRNA target sequence for hSyn (NM_018157.1,1161-1179).
catcgaaacatccgaaaat

SEQ ID NO: 367815 - DNA, 19 bp, Homo sapiens
  siRNA target sequence for hSyn (NM_018157.1,1208-1226).
gagggatgtgacaaatcga

SEQ ID NO: 367816 - DNA, 19 bp, Homo sapiens
  siRNA target sequence for hSyn (NM_018157.1,1217-1235).
gacaaatcgacctgaagtt

SEQ ID NO: 367817 - DNA, 19 bp, Homo sapiens
  siRNA target sequence for hSyn (NM_018157.1,1283-1301).
ccttggagtcaagcaaatt

SEQ ID NO: 367818 - DNA, 19 bp, Homo sapiens
  siRNA target sequence for hSyn (NM_018157.1,1414-1432).
gaagaggagataattggta

SEQ ID NO: 367819 - DNA, 19 bp, Homo sapiens
  siRNA target sequence for hSyn (NM_018157.1,1450-1468).
cagacactgaagaatacaa

SEQ ID NO: 367820 - DNA, 19 bp, Homo sapiens
  siRNA target sequence for hSyn (NM_018157.1,1501-1519).
gtcatttagaggaaccaat

SEQ ID NO: 367821 - DNA, 19 bp, Homo sapiens
  siRNA target sequence for hSyn (NM_018157.1,1575-1593).
cttgtcaacatgcttgata

SEQ ID NO: 367822 - DNA, 19 bp, Homo sapiens
  siRNA target sequence for FLJ10637 (NM_018164.1,242-260).
gtggatcactgcccttata

SEQ ID NO: 367823 - DNA, 19 bp, Homo sapiens
  siRNA target sequence for FLJ10637 (NM_018164.1,253-271).
cccttatatggcagaatct

SEQ ID NO: 367824 - DNA, 19 bp, Homo sapiens
  siRNA target sequence for FLJ10637 (NM_018164.1,254-272).
ccttatatggcagaatctt

SEQ ID NO: 367825 - DNA, 19 bp, Homo sapiens
  siRNA target sequence for FLJ10637 (NM_018164.1,390-408).
gtagaataatgtatgatat

SEQ ID NO: 367826 - DNA, 19 bp, Homo sapiens
  siRNA target sequence for FLJ10637 (NM_018164.1,499-517).
ggagctaatggcagcatta

SEQ ID NO: 367827 - DNA, 19 bp, Homo sapiens
  siRNA target sequence for FLJ10637 (NM_018164.1,552-570).
cagagtgctgcagtattct

SEQ ID NO: 367828 - DNA, 19 bp, Homo sapiens
  siRNA target sequence for FLJ10637 (NM_018164.1,677-695).
cgaataatctgtattacta

SEQ ID NO: 367829 - DNA, 19 bp, Homo sapiens
  siRNA target sequence for FLJ10637 (NM_018164.1,733-751).
ctgtgtccaggaaacgatt

SEQ ID NO: 367830 - DNA, 19 bp, Homo sapiens
  siRNA target sequence for FLJ10637 (NM_018164.1,739-757).
ccaggaaacgattcatgaa

SEQ ID NO: 367831 - DNA, 19 bp, Homo sapiens
  siRNA target sequence for FLJ10637 (NM_018164.1,743-761).
gaaacgattcatgaacata

SEQ ID NO: 367832 - DNA, 19 bp, Homo sapiens
  siRNA target sequence for FLJ10637 (NM_018164.1,747-765).
cgattcatgaacataacaa

SEQ ID NO: 367833 - DNA, 19 bp, Homo sapiens
  siRNA target sequence for FLJ10637 (NM_018164.1,763-781).
caagcttgctgcaaattca

SEQ ID NO: 367834 - DNA, 19 bp, Homo sapiens
  siRNA target sequence for FLJ10637 (NM_018164.1,766-784).
gcttgctgcaaattcagat

SEQ ID NO: 367835 - DNA, 19 bp, Homo sapiens
  siRNA target sequence for FLJ10637 (NM_018164.1,790-808).
catgcagattcaaaaatgt

SEQ ID NO: 367836 - DNA, 19 bp, Homo sapiens
  siRNA target sequence for FLJ10637 (NM_018164.1,875-893).
gagttgtccccggttttaa

SEQ ID NO: 367837 - DNA, 19 bp, Homo sapiens
  siRNA target sequence for FLJ10637 (NM_018164.1,894-912).
ccagtgaagttcatagtgt

SEQ ID NO: 367838 - DNA, 19 bp, Homo sapiens
  siRNA target sequence for FLJ10637 (NM_018164.1,923-941).
cggcatcttgctaccaaat

SEQ ID NO: 367839 - DNA, 19 bp, Homo sapiens
  siRNA target sequence for FLJ10637 (NM_018164.1,973-991).
ggcttcaactactattaca

SEQ ID NO: 367840 - DNA, 19 bp, Homo sapiens
  siRNA target sequence for FLJ10637 (NM_018164.1,975-993).
cttcaactactattacaaa

SEQ ID NO: 367841 - DNA, 19 bp, Homo sapiens
  siRNA target sequence for FLJ10637 (NM_018164.1,1020-1038).
ctaacacatctgccaatta

SEQ ID NO: 367842 - DNA, 19 bp, Homo sapiens
  siRNA target sequence for FLJ10637 (NM_018164.1,1060-1078).
caaagatgcacatgtagat

SEQ ID NO: 367843 - DNA, 19 bp, Homo sapiens
  siRNA target sequence for FLJ10637 (NM_018164.1,1116-1134).
gtcgagaaggctcgtttaa

SEQ ID NO: 367844 - DNA, 19 bp, Homo sapiens
  siRNA target sequence for FLJ10637 (NM_018164.1,1119-1137).
gagaaggctcgtttaaaga

SEQ ID NO: 367845 - DNA, 19 bp, Homo sapiens
  siRNA target sequence for FLJ10637 (NM_018164.1,1124-1142).
ggctcgtttaaagaaacaa

SEQ ID NO: 367846 - DNA, 19 bp, Homo sapiens
  siRNA target sequence for FLJ10637 (NM_018164.1,1125-1143).
gctcgtttaaagaaacaat

SEQ ID NO: 367847 - DNA, 19 bp, Homo sapiens
  siRNA target sequence for FLJ10637 (NM_018164.1,1126-1144).
ctcgtttaaagaaacaata

SEQ ID NO: 367848 - DNA, 19 bp, Homo sapiens
  siRNA target sequence for FLJ10637 (NM_018164.1,1209-1227).
ggatttcacctgtagatgt

SEQ ID NO: 367849 - DNA, 19 bp, Homo sapiens
  siRNA target sequence for FLJ10637 (NM_018164.1,1265-1283).
ctaaatggtcgttctgttt

SEQ ID NO: 367850 - DNA, 19 bp, Homo sapiens
  siRNA target sequence for FLJ10637 (NM_018164.1,1296-1314).
cacgaaagtcaggttctaa

SEQ ID NO: 367851 - DNA, 19 bp, Homo sapiens
  siRNA target sequence for FLJ10637 (NM_018164.1,1372-1390).
cagttctcgatccattcta

SEQ ID NO: 367852 - DNA, 19 bp, Homo sapiens
  siRNA target sequence for FLJ10637 (NM_018164.1,1374-1392).
gttctcgatccattctaga

SEQ ID NO: 367853 - DNA, 19 bp, Homo sapiens
  siRNA target sequence for FLJ10637 (NM_018164.1,1391-1409).
gaagatccaccttcaatta

SEQ ID NO: 367854 - DNA, 19 bp, Homo sapiens
  siRNA target sequence for FLJ10637 (NM_018164.1,1434-1452).
cagactaccggattacaga

SEQ ID NO: 367855 - DNA, 19 bp, Homo sapiens
  siRNA target sequence for FLJ10637 (NM_018164.1,1436-1454).
gactaccggattacagatt

SEQ ID NO: 367856 - DNA, 19 bp, Homo sapiens
  siRNA target sequence for FLJ10637 (NM_018164.1,1438-1456).
ctaccggattacagatttt

SEQ ID NO: 367857 - DNA, 19 bp, Homo sapiens
  siRNA target sequence for FLJ10637 (NM_018164.1,1493-1511).
ctagaccccagatataaaa

SEQ ID NO: 367858 - DNA, 19 bp, Homo sapiens
  siRNA target sequence for FLJ10637 (NM_018164.1,1498-1516).
ccccagatataaaatcgat

SEQ ID NO: 367859 - DNA, 19 bp, Homo sapiens
  siRNA target sequence for FLJ10637 (NM_018164.1,1531-1549).
ccctttggaacgagcaaaa

SEQ ID NO: 367860 - DNA, 19 bp, Homo sapiens
  siRNA target sequence for FLJ10637 (NM_018164.1,1578-1596).
ggcctatgatcatttcaca

SEQ ID NO: 367861 - DNA, 19 bp, Homo sapiens
  siRNA target sequence for FLJ10637 (NM_018164.1,1579-1597).
gcctatgatcatttcacaa

SEQ ID NO: 367862 - DNA, 19 bp, Homo sapiens
  siRNA target sequence for FLJ10637 (NM_018164.1,1580-1598).
cctatgatcatttcacaaa

SEQ ID NO: 367863 - DNA, 19 bp, Homo sapiens
  siRNA target sequence for FLJ10637 (NM_018164.1,1615-1633).
gcaagcggtagttccatta

SEQ ID NO: 367864 - DNA, 19 bp, Homo sapiens
  siRNA target sequence for FLJ10637 (NM_018164.1,1625-1643).
gttccattagccagtgtta

SEQ ID NO: 367865 - DNA, 19 bp, Homo sapiens
  siRNA target sequence for FLJ10637 (NM_018164.1,1692-1710).
caatatacaacttagttga

SEQ ID NO: 367866 - DNA, 19 bp, Homo sapiens
  siRNA target sequence for FLJ10637 (NM_018164.1,1699-1717).
caacttagttgatatggaa

SEQ ID NO: 367867 - DNA, 19 bp, Homo sapiens
  siRNA target sequence for FLJ10637 (NM_018164.1,1727-1745).
gatcctctacctatttcca

SEQ ID NO: 367868 - DNA, 19 bp, Homo sapiens
  siRNA target sequence for FLJ10637 (NM_018164.1,1767-1785).
gccctaaaagagatgaaca

SEQ ID NO: 367869 - DNA, 19 bp, Homo sapiens
  siRNA target sequence for FLJ10637 (NM_018164.1,1781-1799).
gaacaataccgtatcatgt

SEQ ID NO: 367870 - DNA, 19 bp, Homo sapiens
  siRNA target sequence for FLJ10637 (NM_018164.1,1789-1807).
ccgtatcatgtggaatgaa

SEQ ID NO: 367871 - DNA, 19 bp, Homo sapiens
  siRNA target sequence for FLJ10637 (NM_018164.1,1790-1808).
cgtatcatgtggaatgaat

SEQ ID NO: 367872 - DNA, 19 bp, Homo sapiens
  siRNA target sequence for FLJ10637 (NM_018164.1,1817-1835).
cttgtcagagcccatatca

SEQ ID NO: 367873 - DNA, 19 bp, Homo sapiens
  siRNA target sequence for FLJ10637 (NM_018164.1,1850-1868).
catcaaagagtcttggaat

SEQ ID NO: 367874 - DNA, 19 bp, Homo sapiens
  siRNA target sequence for FLJ10637 (NM_018164.1,2020-2038).
cttagagcgtggaaaagaa

SEQ ID NO: 367875 - DNA, 19 bp, Homo sapiens
  siRNA target sequence for FLJ10637 (NM_018164.1,2044-2062).
ggctgaagctgagattata

SEQ ID NO: 367876 - DNA, 19 bp, Homo sapiens
  siRNA target sequence for FLJ10637 (NM_018164.1,2147-2165).
gggccagtgtcgttattat

SEQ ID NO: 367877 - DNA, 19 bp, Homo sapiens
  siRNA target sequence for FLJ10637 (NM_018164.1,2150-2168).
ccagtgtcgttattatcct

SEQ ID NO: 367878 - DNA, 19 bp, Homo sapiens
  siRNA target sequence for FLJ10637 (NM_018164.1,2151-2169).
cagtgtcgttattatcctt

SEQ ID NO: 367879 - DNA, 19 bp, Homo sapiens
  siRNA target sequence for FLJ10637 (NM_018164.1,2173-2191).
gagtaatagaatcaatact

SEQ ID NO: 367880 - DNA, 19 bp, Homo sapiens
  siRNA target sequence for FLJ10637 (NM_018164.1,2222-2240).
ggacgtttgaactctgtta

SEQ ID NO: 367881 - DNA, 19 bp, Homo sapiens
  siRNA target sequence for FLJ10637 (NM_018164.1,2245-2263).
cagagctgaactatatcaa

SEQ ID NO: 367882 - DNA, 19 bp, Homo sapiens
  siRNA target sequence for FLJ10637 (NM_018164.1,2247-2265).
gagctgaactatatcaaca

SEQ ID NO: 367883 - DNA, 19 bp, Homo sapiens
  siRNA target sequence for C14orf105 (NM_018168.1,141-159).
ggcctgagtcactctaaga

SEQ ID NO: 367884 - DNA, 19 bp, Homo sapiens
  siRNA target sequence for C14orf105 (NM_018168.1,164-182).
ccttagggtgatcaaagta

SEQ ID NO: 367885 - DNA, 19 bp, Homo sapiens
  siRNA target sequence for C14orf105 (NM_018168.1,254-272).
ggaagaaaagacttcatat

SEQ ID NO: 367886 - DNA, 19 bp, Homo sapiens
  siRNA target sequence for C14orf105 (NM_018168.1,459-477).
gacttgccacgagtaatta

SEQ ID NO: 367887 - DNA, 19 bp, Homo sapiens
  siRNA target sequence for C14orf105 (NM_018168.1,461-479).
cttgccacgagtaattact

SEQ ID NO: 367888 - DNA, 19 bp, Homo sapiens
  siRNA target sequence for C14orf105 (NM_018168.1,464-482).
gccacgagtaattacttca

SEQ ID NO: 367889 - DNA, 19 bp, Homo sapiens
  siRNA target sequence for C14orf105 (NM_018168.1,606-624).
ctggaaatgatccgtaaaa

SEQ ID NO: 367890 - DNA, 19 bp, Homo sapiens
  siRNA target sequence for C14orf105 (NM_018168.1,608-626).
ggaaatgatccgtaaaaga

SEQ ID NO: 367891 - DNA, 19 bp, Homo sapiens
  siRNA target sequence for C14orf105 (NM_018168.1,818-836).
gaaacatcaagcagtgaat

SEQ ID NO: 367892 - DNA, 19 bp, Homo sapiens
  siRNA target sequence for C14orf105 (NM_018168.1,989-1007).
gagaatcccacttttcgat

SEQ ID NO: 367893 - DNA, 19 bp, Homo sapiens
  siRNA target sequence for C14orf105 (NM_018168.1,1008-1026).
gagttttttgatcaagaat

SEQ ID NO: 367894 - DNA, 19 bp, Homo sapiens
  siRNA target sequence for FLJ10652 (NM_018169.1,97-115).
gtgtgggagctacattcaa

SEQ ID NO: 367895 - DNA, 19 bp, Homo sapiens
  siRNA target sequence for FLJ10652 (NM_018169.1,151-169).
ccattgttaaagaaaagat

SEQ ID NO: 367896 - DNA, 19 bp, Homo sapiens
  siRNA target sequence for FLJ10652 (NM_018169.1,170-188).
ggtatcaaatactaagtct

SEQ ID NO: 367897 - DNA, 19 bp, Homo sapiens
  siRNA target sequence for FLJ10652 (NM_018169.1,194-212).
cacgaaagcgagttcatct

SEQ ID NO: 367898 - DNA, 19 bp, Homo sapiens
  siRNA target sequence for FLJ10652 (NM_018169.1,196-214).
cgaaagcgagttcatctaa

SEQ ID NO: 367899 - DNA, 19 bp, Homo sapiens
  siRNA target sequence for FLJ10652 (NM_018169.1,197-215).
gaaagcgagttcatctaaa

SEQ ID NO: 367900 - DNA, 19 bp, Homo sapiens
  siRNA target sequence for FLJ10652 (NM_018169.1,201-219).
gcgagttcatctaaattta

SEQ ID NO: 367901 - DNA, 19 bp, Homo sapiens
  siRNA target sequence for FLJ10652 (NM_018169.1,208-226).
catctaaatttagtagaat

SEQ ID NO: 367902 - DNA, 19 bp, Homo sapiens
  siRNA target sequence for FLJ10652 (NM_018169.1,348-366).
cttgccgtgcaggttgaaa

SEQ ID NO: 367903 - DNA, 19 bp, Homo sapiens
  siRNA target sequence for FLJ10652 (NM_018169.1,353-371).
cgtgcaggttgaaagttgt

SEQ ID NO: 367904 - DNA, 19 bp, Homo sapiens
  siRNA target sequence for FLJ10652 (NM_018169.1,363-381).
gaaagttgtgggaaatcaa

SEQ ID NO: 367905 - DNA, 19 bp, Homo sapiens
  siRNA target sequence for FLJ10652 (NM_018169.1,398-416).
cggcgtgcagacctctaaa

SEQ ID NO: 367906 - DNA, 19 bp, Homo sapiens
  siRNA target sequence for FLJ10652 (NM_018169.1,400-418).
gcgtgcagacctctaaaga

SEQ ID NO: 367907 - DNA, 19 bp, Homo sapiens
  siRNA target sequence for FLJ10652 (NM_018169.1,401-419).
cgtgcagacctctaaagaa

SEQ ID NO: 367908 - DNA, 19 bp, Homo sapiens
  siRNA target sequence for FLJ10652 (NM_018169.1,430-448).
gcttgacaagccatggtaa

SEQ ID NO: 367909 - DNA, 19 bp, Homo sapiens
  siRNA target sequence for FLJ10652 (NM_018169.1,469-487).
ctcaggagtctaaaacata

SEQ ID NO: 367910 - DNA, 19 bp, Homo sapiens
  siRNA target sequence for FLJ10652 (NM_018169.1,484-502).
catacaacattctaaggaa

SEQ ID NO: 367911 - DNA, 19 bp, Homo sapiens
  siRNA target sequence for FLJ10652 (NM_018169.1,520-538).
gtgggaagcagcctgataa

SEQ ID NO: 367912 - DNA, 19 bp, Homo sapiens
  siRNA target sequence for FLJ10652 (NM_018169.1,545-563).
gattgataagactaaatta

SEQ ID NO: 367913 - DNA, 19 bp, Homo sapiens
  siRNA target sequence for FLJ10652 (NM_018169.1,549-567).
gataagactaaattagaca

SEQ ID NO: 367914 - DNA, 19 bp, Homo sapiens
  siRNA target sequence for FLJ10652 (NM_018169.1,679-697).
gcatttctctcaccaaatt

SEQ ID NO: 367915 - DNA, 19 bp, Homo sapiens
  siRNA target sequence for FLJ10652 (NM_018169.1,687-705).
ctcaccaaattagaaagtt

SEQ ID NO: 367916 - DNA, 19 bp, Homo sapiens
  siRNA target sequence for FLJ10652 (NM_018169.1,791-809).
catgctggagtttaaatta

SEQ ID NO: 367917 - DNA, 19 bp, Homo sapiens
  siRNA target sequence for FLJ10652 (NM_018169.1,894-912).
ctgcaagtttcaggaataa

SEQ ID NO: 367918 - DNA, 19 bp, Homo sapiens
  siRNA target sequence for FLJ10652 (NM_018169.1,896-914).
gcaagtttcaggaataaaa

SEQ ID NO: 367919 - DNA, 19 bp, Homo sapiens
  siRNA target sequence for FLJ10652 (NM_018169.1,974-992).
ccaagagagagataatgtt

SEQ ID NO: 367920 - DNA, 19 bp, Homo sapiens
  siRNA target sequence for FLJ10652 (NM_018169.1,1030-1048).
gatttgagatgctacaaaa

SEQ ID NO: 367921 - DNA, 19 bp, Homo sapiens
  siRNA target sequence for FLJ10652 (NM_018169.1,1044-1062).
caaaacccagtaaaagatt

SEQ ID NO: 367922 - DNA, 19 bp, Homo sapiens
  siRNA target sequence for FLJ10652 (NM_018169.1,1122-1140).
ggtagcagtcctgtaaaat

SEQ ID NO: 367923 - DNA, 19 bp, Homo sapiens
  siRNA target sequence for DIP13B (NM_018171.2,268-286).
cccagactcgctctttact

SEQ ID NO: 367924 - DNA, 19 bp, Homo sapiens
  siRNA target sequence for DIP13B (NM_018171.2,270-288).
cagactcgctctttactga

SEQ ID NO: 367925 - DNA, 19 bp, Homo sapiens
  siRNA target sequence for DIP13B (NM_018171.2,287-305).
gagcgtgtttgaagaagat

SEQ ID NO: 367926 - DNA, 19 bp, Homo sapiens
  siRNA target sequence for DIP13B (NM_018171.2,309-327).
ggcaccctcacagactata

SEQ ID NO: 367927 - DNA, 19 bp, Homo sapiens
  siRNA target sequence for DIP13B (NM_018171.2,313-331).
ccctcacagactataccaa

SEQ ID NO: 367928 - DNA, 19 bp, Homo sapiens
  siRNA target sequence for DIP13B (NM_018171.2,388-406).
ccacacaacagctttctaa

SEQ ID NO: 367929 - DNA, 19 bp, Homo sapiens
  siRNA target sequence for DIP13B (NM_018171.2,472-490).
cactccactatttttccaa

SEQ ID NO: 367930 - DNA, 19 bp, Homo sapiens
  siRNA target sequence for DIP13B (NM_018171.2,494-512).
ggtggatgagcttaatctt

SEQ ID NO: 367931 - DNA, 19 bp, Homo sapiens
  siRNA target sequence for DIP13B (NM_018171.2,551-569).
ggttctacctatcatacaa

SEQ ID NO: 367932 - DNA, 19 bp, Homo sapiens
  siRNA target sequence for DIP13B (NM_018171.2,552-570).
gttctacctatcatacaat

SEQ ID NO: 367933 - DNA, 19 bp, Homo sapiens
  siRNA target sequence for DIP13B (NM_018171.2,598-616).
gcactttaaaggatctatt

SEQ ID NO: 367934 - DNA, 19 bp, Homo sapiens
  siRNA target sequence for DIP13B (NM_018171.2,642-660).
ctctcaatggcaaaataca

SEQ ID NO: 367935 - DNA, 19 bp, Homo sapiens
  siRNA target sequence for DIP13B (NM_018171.2,879-897).
cgtatggacagctttttat

SEQ ID NO: 367936 - DNA, 19 bp, Homo sapiens
  siRNA target sequence for DIP13B (NM_018171.2,939-957).
gaagccgaggcggaaaaga

SEQ ID NO: 367937 - DNA, 19 bp, Homo sapiens
  siRNA target sequence for DIP13B (NM_018171.2,962-980).
ggtgtcccagcaagaatta

SEQ ID NO: 367938 - DNA, 19 bp, Homo sapiens
  siRNA target sequence for DIP13B (NM_018171.2,987-1005).
gttgatgaatctgtttaca

SEQ ID NO: 367939 - DNA, 19 bp, Homo sapiens
  siRNA target sequence for DIP13B (NM_018171.2,1053-1071).
cagaaggctggttacctta

SEQ ID NO: 367940 - DNA, 19 bp, Homo sapiens
  siRNA target sequence for DIP13B (NM_018171.2,1058-1076).
ggctggttaccttaatctt

SEQ ID NO: 367941 - DNA, 19 bp, Homo sapiens
  siRNA target sequence for DIP13B (NM_018171.2,1059-1077).
gctggttaccttaatctta

SEQ ID NO: 367942 - DNA, 19 bp, Homo sapiens
  siRNA target sequence for DIP13B (NM_018171.2,1062-1080).
ggttaccttaatcttagaa

SEQ ID NO: 367943 - DNA, 19 bp, Homo sapiens
  siRNA target sequence for DIP13B (NM_018171.2,1129-1147).
cccaaggcgggaatctcat

SEQ ID NO: 367944 - DNA, 19 bp, Homo sapiens
  siRNA target sequence for DIP13B (NM_018171.2,1165-1183).
ccgtggctggaggtttgat

SEQ ID NO: 367945 - DNA, 19 bp, Homo sapiens
  siRNA target sequence for DIP13B (NM_018171.2,1368-1386).
gaggcagtcgcgatcaagt

SEQ ID NO: 367946 - DNA, 19 bp, Homo sapiens
  siRNA target sequence for DIP13B (NM_018171.2,1372-1390).
cagtcgcgatcaagttgaa

SEQ ID NO: 367947 - DNA, 19 bp, Homo sapiens
  siRNA target sequence for DIP13B (NM_018171.2,1377-1395).
gcgatcaagttgaatcaga

SEQ ID NO: 367948 - DNA, 19 bp, Homo sapiens
  siRNA target sequence for DIP13B (NM_018171.2,1410-1428).
gtgactcccattacaagtt

SEQ ID NO: 367949 - DNA, 19 bp, Homo sapiens
  siRNA target sequence for DIP13B (NM_018171.2,1412-1430).
gactcccattacaagtttt

SEQ ID NO: 367950 - DNA, 19 bp, Homo sapiens
  siRNA target sequence for DIP13B (NM_018171.2,1416-1434).
cccattacaagttttggaa

SEQ ID NO: 367951 - DNA, 19 bp, Homo sapiens
  siRNA target sequence for DIP13B (NM_018171.2,1553-1571).
gcctggaacgccgattcaa

SEQ ID NO: 367952 - DNA, 19 bp, Homo sapiens
  siRNA target sequence for DIP13B (NM_018171.2,1554-1572).
cctggaacgccgattcaat

SEQ ID NO: 367953 - DNA, 19 bp, Homo sapiens
  siRNA target sequence for DIP13B (NM_018171.2,1555-1573).
ctggaacgccgattcaatt

SEQ ID NO: 367954 - DNA, 19 bp, Homo sapiens
  siRNA target sequence for DIP13B (NM_018171.2,1558-1576).
gaacgccgattcaattcga

SEQ ID NO: 367955 - DNA, 19 bp, Homo sapiens
  siRNA target sequence for DIP13B (NM_018171.2,1561-1579).
cgccgattcaattcgatat

SEQ ID NO: 367956 - DNA, 19 bp, Homo sapiens
  siRNA target sequence for DIP13B (NM_018171.2,1562-1580).
gccgattcaattcgatatt

SEQ ID NO: 367957 - DNA, 19 bp, Homo sapiens
  siRNA target sequence for DIP13B (NM_018171.2,1564-1582).
cgattcaattcgatattgt

SEQ ID NO: 367958 - DNA, 19 bp, Homo sapiens
  siRNA target sequence for DIP13B (NM_018171.2,1591-1609).
ctacagaattccttgatca

SEQ ID NO: 367959 - DNA, 19 bp, Homo sapiens
  siRNA target sequence for DIP13B (NM_018171.2,1625-1643).
gcgtaccaacccttttggt

SEQ ID NO: 367960 - DNA, 19 bp, Homo sapiens
  siRNA target sequence for DIP13B (NM_018171.2,1631-1649).
caacccttttggtgaaact

SEQ ID NO: 367961 - DNA, 19 bp, Homo sapiens
  siRNA target sequence for DIP13B (NM_018171.2,1739-1757).
cagcactactgaagtgatt

SEQ ID NO: 367962 - DNA, 19 bp, Homo sapiens
  siRNA target sequence for DIP13B (NM_018171.2,1741-1759).
gcactactgaagtgattta

SEQ ID NO: 367963 - DNA, 19 bp, Homo sapiens
  siRNA target sequence for DIP13B (NM_018171.2,1761-1779).
gaagcgatgagacaagtat

SEQ ID NO: 367964 - DNA, 19 bp, Homo sapiens
  siRNA target sequence for DIP13B (NM_018171.2,1782-1800).
gctgctcgggctattcata

SEQ ID NO: 367965 - DNA, 19 bp, Homo sapiens
  siRNA target sequence for DIP13B (NM_018171.2,1783-1801).
ctgctcgggctattcataa

SEQ ID NO: 367966 - DNA, 19 bp, Homo sapiens
  siRNA target sequence for DIP13B (NM_018171.2,1785-1803).
gctcgggctattcataaca

SEQ ID NO: 367967 - DNA, 19 bp, Homo sapiens
  siRNA target sequence for DIP13B (NM_018171.2,1786-1804).
ctcgggctattcataacat

SEQ ID NO: 367968 - DNA, 19 bp, Homo sapiens
  siRNA target sequence for DIP13B (NM_018171.2,1827-1845).
ctgatggtcaccagtcaat

SEQ ID NO: 367969 - DNA, 19 bp, Homo sapiens
  siRNA target sequence for DIP13B (NM_018171.2,1829-1847).
gatggtcaccagtcaatct

SEQ ID NO: 367970 - DNA, 19 bp, Homo sapiens
  siRNA target sequence for DIP13B (NM_018171.2,1833-1851).
gtcaccagtcaatctttga

SEQ ID NO: 367971 - DNA, 19 bp, Homo sapiens
  siRNA target sequence for DIP13B (NM_018171.2,1917-1935).
gctgctcatcaagaaaaca

SEQ ID NO: 367972 - DNA, 19 bp, Homo sapiens
  siRNA target sequence for DIP13B (NM_018171.2,2019-2037).
gaaggcgaaaagatatgtt

SEQ ID NO: 367973 - DNA, 19 bp, Homo sapiens
  siRNA target sequence for DIP13B (NM_018171.2,2024-2042).
cgaaaagatatgttatgct

SEQ ID NO: 367974 - DNA, 19 bp, Homo sapiens
  siRNA target sequence for DIP13B (NM_018171.2,2030-2048).
gatatgttatgctattaat

SEQ ID NO: 367975 - DNA, 19 bp, Homo sapiens
  siRNA target sequence for DIP13B (NM_018171.2,2041-2059).
ctattaatttgggaaaaga

SEQ ID NO: 367976 - DNA, 19 bp, Homo sapiens
  siRNA target sequence for DIP13B (NM_018171.2,2085-2103).
gaagcactggctcaattaa

SEQ ID NO: 367977 - DNA, 19 bp, Homo sapiens
  siRNA target sequence for DIP13B (NM_018171.2,2089-2107).
cactggctcaattaatgct

SEQ ID NO: 367978 - DNA, 19 bp, Homo sapiens
  siRNA target sequence for DIP13B (NM_018171.2,2108-2126).
gtccataccactaaccaat

SEQ ID NO: 367979 - DNA, 19 bp, Homo sapiens
  siRNA target sequence for DIP13B (NM_018171.2,2130-2148).
ggaaaatatgtactgttaa

SEQ ID NO: 367980 - DNA, 19 bp, Homo sapiens
  siRNA target sequence for FLJ10661 (NM_018172.1,339-357).
cgggctcctcaattctaca

SEQ ID NO: 367981 - DNA, 19 bp, Homo sapiens
  siRNA target sequence for FLJ10661 (NM_018172.1,340-358).
gggctcctcaattctacat

SEQ ID NO: 367982 - DNA, 19 bp, Homo sapiens
  siRNA target sequence for FLJ10665 (NM_018173.1,195-213).
gtggcctcccgcattgaga

SEQ ID NO: 367983 - DNA, 19 bp, Homo sapiens
  siRNA target sequence for FLJ10665 (NM_018173.1,200-218).
ctcccgcattgagacttat

SEQ ID NO: 367984 - DNA, 19 bp, Homo sapiens
  siRNA target sequence for FLJ10665 (NM_018173.1,798-816).
cgaacccaccggagctttt

SEQ ID NO: 367985 - DNA, 19 bp, Homo sapiens
  siRNA target sequence for FLJ10665 (NM_018173.1,971-989).
ccgagaacagcaagaaact

SEQ ID NO: 367986 - DNA, 19 bp, Homo sapiens
  siRNA target sequence for FLJ10665 (NM_018173.1,1154-1172).
cctgaatgccatgattgaa

SEQ ID NO: 367987 - DNA, 19 bp, Homo sapiens
  siRNA target sequence for FLJ10665 (NM_018173.1,1569-1587).
ctgatccacctcactgaat

SEQ ID NO: 367988 - DNA, 19 bp, Homo sapiens
  siRNA target sequence for FLJ10665 (NM_018173.1,1912-1930).
ctggctacggcactttgat

SEQ ID NO: 367989 - DNA, 19 bp, Homo sapiens
  siRNA target sequence for FLJ10665 (NM_018173.1,2089-2107).
ccgaactgccggaaggaat

SEQ ID NO: 367990 - DNA, 19 bp, Homo sapiens
  siRNA target sequence for FLJ10665 (NM_018173.1,2094-2112).
ctgccggaaggaatcctaa

SEQ ID NO: 367991 - DNA, 19 bp, Homo sapiens
  siRNA target sequence for FLJ10665 (NM_018173.1,2096-2114).
gccggaaggaatcctaaaa

SEQ ID NO: 367992 - DNA, 19 bp, Homo sapiens
  siRNA target sequence for FLJ10665 (NM_018173.1,2099-2117).
ggaaggaatcctaaaagga

SEQ ID NO: 367993 - DNA, 19 bp, Homo sapiens
  siRNA target sequence for FLJ10665 (NM_018173.1,2384-2402).
gctggccagccaaaggatt

SEQ ID NO: 367994 - DNA, 19 bp, Homo sapiens
  siRNA target sequence for VCY2IP1 (NM_018174.3,150-168).
cgtctgcaaccttgatgaa

SEQ ID NO: 367995 - DNA, 19 bp, Homo sapiens
  siRNA target sequence for VCY2IP1 (NM_018174.3,1408-1426).
cgagccgagagcaaagaga

SEQ ID NO: 367996 - DNA, 19 bp, Homo sapiens
  siRNA target sequence for LGI2 (NM_018176.2,202-220).
ctggtaaatgggacgtttt

SEQ ID NO: 367997 - DNA, 19 bp, Homo sapiens
  siRNA target sequence for LGI2 (NM_018176.2,204-222).
ggtaaatgggacgttttca

SEQ ID NO: 367998 - DNA, 19 bp, Homo sapiens
  siRNA target sequence for LGI2 (NM_018176.2,211-229).
gggacgttttcagaaatca

SEQ ID NO: 367999 - DNA, 19 bp, Homo sapiens
  siRNA target sequence for LGI2 (NM_018176.2,342-360).
gttcattgaagggaacaaa

SEQ ID NO: 368000 - DNA, 19 bp, Homo sapiens
  siRNA target sequence for LGI2 (NM_018176.2,492-510).
gaggggtaataaatttgaa

SEQ ID NO: 368001 - DNA, 19 bp, Homo sapiens
  siRNA target sequence for LGI2 (NM_018176.2,495-513).
gggtaataaatttgaatgt

SEQ ID NO: 368002 - DNA, 19 bp, Homo sapiens
  siRNA target sequence for LGI2 (NM_018176.2,540-558).
gtggttgaagatgacaaat

SEQ ID NO: 368003 - DNA, 19 bp, Homo sapiens
  siRNA target sequence for LGI2 (NM_018176.2,554-572).
caaattccaccgtttctga

SEQ ID NO: 368004 - DNA, 19 bp, Homo sapiens
  siRNA target sequence for LGI2 (NM_018176.2,621-639).
cgtgaccagctttgactat

SEQ ID NO: 368005 - DNA, 19 bp, Homo sapiens
  siRNA target sequence for LGI2 (NM_018176.2,634-652).
gactatgaatgcacaacta

SEQ ID NO: 368006 - DNA, 19 bp, Homo sapiens
  siRNA target sequence for LGI2 (NM_018176.2,644-662).
gcacaactacagattttgt

SEQ ID NO: 368007 - DNA, 19 bp, Homo sapiens
  siRNA target sequence for LGI2 (NM_018176.2,680-698).
cctaccagtcggtttcagt

SEQ ID NO: 368008 - DNA, 19 bp, Homo sapiens
  siRNA target sequence for LGI2 (NM_018176.2,689-707).
cggtttcagtggatacgtt

SEQ ID NO: 368009 - DNA, 19 bp, Homo sapiens
  siRNA target sequence for LGI2 (NM_018176.2,772-790).
gagtgggaccacattgaaa

SEQ ID NO: 368010 - DNA, 19 bp, Homo sapiens
  siRNA target sequence for LGI2 (NM_018176.2,836-854).
gctgtaaggccattctcat

SEQ ID NO: 368011 - DNA, 19 bp, Homo sapiens
  siRNA target sequence for LGI2 (NM_018176.2,845-863).
ccattctcatcgatgatca

SEQ ID NO: 368012 - DNA, 19 bp, Homo sapiens
  siRNA target sequence for LGI2 (NM_018176.2,899-917).
ctcacatttacaaatacga

SEQ ID NO: 368013 - DNA, 19 bp, Homo sapiens
  siRNA target sequence for LGI2 (NM_018176.2,916-934).
gacgagagttggaccaaat

SEQ ID NO: 368014 - DNA, 19 bp, Homo sapiens
  siRNA target sequence for LGI2 (NM_018176.2,918-936).
cgagagttggaccaaattt

SEQ ID NO: 368015 - DNA, 19 bp, Homo sapiens
  siRNA target sequence for LGI2 (NM_018176.2,955-973).
gaggtctctcgcatttcca

SEQ ID NO: 368016 - DNA, 19 bp, Homo sapiens
  siRNA target sequence for LGI2 (NM_018176.2,982-1000).
gacatcgagctgtttcaga

SEQ ID NO: 368017 - DNA, 19 bp, Homo sapiens
  siRNA target sequence for LGI2 (NM_018176.2,1002-1020).
cgacgacgagacgttcttt

SEQ ID NO: 368018 - DNA, 19 bp, Homo sapiens
  siRNA target sequence for LGI2 (NM_018176.2,1006-1024).
gacgagacgttctttgtca

SEQ ID NO: 368019 - DNA, 19 bp, Homo sapiens
  siRNA target sequence for LGI2 (NM_018176.2,1043-1061).
ctggtctgtccacagttta

SEQ ID NO: 368020 - DNA, 19 bp, Homo sapiens
  siRNA target sequence for LGI2 (NM_018176.2,1045-1063).
ggtctgtccacagtttata

SEQ ID NO: 368021 - DNA, 19 bp, Homo sapiens
  siRNA target sequence for LGI2 (NM_018176.2,1071-1089).
cagcaaaggattctattct

SEQ ID NO: 368022 - DNA, 19 bp, Homo sapiens
  siRNA target sequence for LGI2 (NM_018176.2,1121-1139).
cggatgcggagtttgttga

SEQ ID NO: 368023 - DNA, 19 bp, Homo sapiens
  siRNA target sequence for LGI2 (NM_018176.2,1127-1145).
cggagtttgttgatatcga

SEQ ID NO: 368024 - DNA, 19 bp, Homo sapiens
  siRNA target sequence for LGI2 (NM_018176.2,1272-1290).
gagcttccgaatgcaaaat

SEQ ID NO: 368025 - DNA, 19 bp, Homo sapiens
  siRNA target sequence for LGI2 (NM_018176.2,1438-1456).
ctggggagtgactatacat

SEQ ID NO: 368026 - DNA, 19 bp, Homo sapiens
  siRNA target sequence for LGI2 (NM_018176.2,1522-1540).
caggcgcctcgttcattca

SEQ ID NO: 368027 - DNA, 19 bp, Homo sapiens
  siRNA target sequence for LGI2 (NM_018176.2,1524-1542).
ggcgcctcgttcattcaca

SEQ ID NO: 368028 - DNA, 19 bp, Homo sapiens
  siRNA target sequence for LGI2 (NM_018176.2,1553-1571).
ccgacaggagagatttctt

SEQ ID NO: 368029 - DNA, 19 bp, Homo sapiens
  siRNA target sequence for LGI2 (NM_018176.2,1554-1572).
cgacaggagagatttcttt

SEQ ID NO: 368030 - DNA, 19 bp, Homo sapiens
  siRNA target sequence for GPP34R (NM_018178.3,203-221).
cgtcgcactgaaataagca

SEQ ID NO: 368031 - DNA, 19 bp, Homo sapiens
  siRNA target sequence for GPP34R (NM_018178.3,204-222).
gtcgcactgaaataagcaa

SEQ ID NO: 368032 - DNA, 19 bp, Homo sapiens
  siRNA target sequence for GPP34R (NM_018178.3,254-272).
gacagtaattgggagaaaa

SEQ ID NO: 368033 - DNA, 19 bp, Homo sapiens
  siRNA target sequence for GPP34R (NM_018178.3,256-274).
cagtaattgggagaaaagt

SEQ ID NO: 368034 - DNA, 19 bp, Homo sapiens
  siRNA target sequence for GPP34R (NM_018178.3,304-322).
ggatatccgccttactctt

SEQ ID NO: 368035 - DNA, 19 bp, Homo sapiens
  siRNA target sequence for GPP34R (NM_018178.3,305-323).
gatatccgccttactctta

SEQ ID NO: 368036 - DNA, 19 bp, Homo sapiens
  siRNA target sequence for GPP34R (NM_018178.3,310-328).
ccgccttactcttatggaa

SEQ ID NO: 368037 - DNA, 19 bp, Homo sapiens
  siRNA target sequence for GPP34R (NM_018178.3,337-355).
gcttctgggactaaaagat

SEQ ID NO: 368038 - DNA, 19 bp, Homo sapiens
  siRNA target sequence for GPP34R (NM_018178.3,353-371).
gataaagaggggtacacat

SEQ ID NO: 368039 - DNA, 19 bp, Homo sapiens
  siRNA target sequence for GPP34R (NM_018178.3,359-377).
gaggggtacacatctttct

SEQ ID NO: 368040 - DNA, 19 bp, Homo sapiens
  siRNA target sequence for GPP34R (NM_018178.3,429-447).
ccatgcggggtcgaatcta

SEQ ID NO: 368041 - DNA, 19 bp, Homo sapiens
  siRNA target sequence for GPP34R (NM_018178.3,430-448).
catgcggggtcgaatctat

SEQ ID NO: 368042 - DNA, 19 bp, Homo sapiens
  siRNA target sequence for GPP34R (NM_018178.3,456-474).
ccccgaccatgcgtaagaa

SEQ ID NO: 368043 - DNA, 19 bp, Homo sapiens
  siRNA target sequence for GPP34R (NM_018178.3,466-484).
gcgtaagaagcgactacta

SEQ ID NO: 368044 - DNA, 19 bp, Homo sapiens
  siRNA target sequence for GPP34R (NM_018178.3,468-486).
gtaagaagcgactactaga

SEQ ID NO: 368045 - DNA, 19 bp, Homo sapiens
  siRNA target sequence for GPP34R (NM_018178.3,511-529).
cagcccaacaggtgatgtt

SEQ ID NO: 368046 - DNA, 19 bp, Homo sapiens
  siRNA target sequence for GPP34R (NM_018178.3,513-531).
gcccaacaggtgatgtttt

SEQ ID NO: 368047 - DNA, 19 bp, Homo sapiens
  siRNA target sequence for GPP34R (NM_018178.3,545-563).
ctgaaacacatcaaagcaa

SEQ ID NO: 368048 - DNA, 19 bp, Homo sapiens
  siRNA target sequence for GPP34R (NM_018178.3,615-633).
cctggaaccccttcaaatt

SEQ ID NO: 368049 - DNA, 19 bp, Homo sapiens
  siRNA target sequence for GPP34R (NM_018178.3,616-634).
ctggaaccccttcaaatta

SEQ ID NO: 368050 - DNA, 19 bp, Homo sapiens
  siRNA target sequence for GPP34R (NM_018178.3,618-636).
ggaaccccttcaaattaca

SEQ ID NO: 368051 - DNA, 19 bp, Homo sapiens
  siRNA target sequence for GPP34R (NM_018178.3,657-675).
gagagcgcatcgcaaagaa

SEQ ID NO: 368052 - DNA, 19 bp, Homo sapiens
  siRNA target sequence for GPP34R (NM_018178.3,709-727).
gcagaatttcctgctattt

SEQ ID NO: 368053 - DNA, 19 bp, Homo sapiens
  siRNA target sequence for GPP34R (NM_018178.3,719-737).
ctgctatttgacatgacta

SEQ ID NO: 368054 - DNA, 19 bp, Homo sapiens
  siRNA target sequence for GPP34R (NM_018178.3,740-758).
catccagtgaccaatacaa

SEQ ID NO: 368055 - DNA, 19 bp, Homo sapiens
  siRNA target sequence for GPP34R (NM_018178.3,763-781).
gaaacagcgactagtgaaa

SEQ ID NO: 368056 - DNA, 19 bp, Homo sapiens
  siRNA target sequence for GPP34R (NM_018178.3,769-787).
gcgactagtgaaaaaactt

SEQ ID NO: 368057 - DNA, 19 bp, Homo sapiens
  siRNA target sequence for GPP34R (NM_018178.3,771-789).
gactagtgaaaaaacttca

SEQ ID NO: 368058 - DNA, 19 bp, Homo sapiens
  siRNA target sequence for GPP34R (NM_018178.3,904-922).
gacagatgacaagtatgat

SEQ ID NO: 368059 - DNA, 19 bp, Homo sapiens
  siRNA target sequence for GPP34R (NM_018178.3,984-1002).
ctagtgccacagaaatgat

SEQ ID NO: 368060 - DNA, 19 bp, Homo sapiens
  siRNA target sequence for GPP34R (NM_018178.3,1012-1030).
gctggcagccttcaataaa

SEQ ID NO: 368061 - DNA, 19 bp, Homo sapiens
  siRNA target sequence for GPP34R (NM_018178.3,1015-1033).
ggcagccttcaataaatct

SEQ ID NO: 368062 - DNA, 19 bp, Homo sapiens
  siRNA target sequence for FLJ10697 (NM_018181.3,939-957).
catttgacatcccagatat

SEQ ID NO: 368063 - DNA, 19 bp, Homo sapiens
  siRNA target sequence for FLJ10697 (NM_018181.3,951-969).
cagatatggtcgatcctaa

SEQ ID NO: 368064 - DNA, 19 bp, Homo sapiens
  siRNA target sequence for FLJ10697 (NM_018181.3,1045-1063).
cgcaccatcatcttctgat

SEQ ID NO: 368065 - DNA, 19 bp, Homo sapiens
  siRNA target sequence for FLJ10697 (NM_018181.3,1072-1090).
cagcgttatcgtcaagaat

SEQ ID NO: 368066 - DNA, 19 bp, Homo sapiens
  siRNA target sequence for FLJ10697 (NM_018181.3,1074-1092).
gcgttatcgtcaagaatgt

SEQ ID NO: 368067 - DNA, 19 bp, Homo sapiens
  siRNA target sequence for FLJ10697 (NM_018181.3,1075-1093).
cgttatcgtcaagaatgtt

SEQ ID NO: 368068 - DNA, 19 bp, Homo sapiens
  siRNA target sequence for FLJ10697 (NM_018181.3,1176-1194).
catcctcccttgacagtta

SEQ ID NO: 368069 - DNA, 19 bp, Homo sapiens
  siRNA target sequence for FLJ10697 (NM_018181.3,1182-1200).
cccttgacagttacagtaa

SEQ ID NO: 368070 - DNA, 19 bp, Homo sapiens
  siRNA target sequence for FLJ10697 (NM_018181.3,1241-1259).
gaggtgacactgaaagact

SEQ ID NO: 368071 - DNA, 19 bp, Homo sapiens
  siRNA target sequence for FLJ10697 (NM_018181.3,1362-1380).
gcttcaggtcgaatgtgtt

SEQ ID NO: 368072 - DNA, 19 bp, Homo sapiens
  siRNA target sequence for FLJ10697 (NM_018181.3,1394-1412).
ccccagcaggactacgata

SEQ ID NO: 368073 - DNA, 19 bp, Homo sapiens
  siRNA target sequence for FLJ10697 (NM_018181.3,1395-1413).
cccagcaggactacgataa

SEQ ID NO: 368074 - DNA, 19 bp, Homo sapiens
  siRNA target sequence for FLJ10697 (NM_018181.3,1421-1439).
gcactcggaggggaaaact

SEQ ID NO: 368075 - DNA, 19 bp, Homo sapiens
  siRNA target sequence for FLJ10697 (NM_018181.3,1525-1543).
gagtgtttatgaacctttt

SEQ ID NO: 368076 - DNA, 19 bp, Homo sapiens
  siRNA target sequence for FLJ10697 (NM_018181.3,1650-1668).
ccagcgttgcgccatcaaa

SEQ ID NO: 368077 - DNA, 19 bp, Homo sapiens
  siRNA target sequence for FLJ10697 (NM_018181.3,1654-1672).
cgttgcgccatcaaagaca

SEQ ID NO: 368078 - DNA, 19 bp, Homo sapiens
  siRNA target sequence for FLJ10697 (NM_018181.3,1655-1673).
gttgcgccatcaaagacaa

SEQ ID NO: 368079 - DNA, 19 bp, Homo sapiens
  siRNA target sequence for FLJ10697 (NM_018181.3,1658-1676).
gcgccatcaaagacaaagt

SEQ ID NO: 368080 - DNA, 19 bp, Homo sapiens
  siRNA target sequence for FLJ10697 (NM_018181.3,1712-1730).
gcggctctcagcgctaaaa

SEQ ID NO: 368081 - DNA, 19 bp, Homo sapiens
  siRNA target sequence for FLJ10697 (NM_018181.3,1713-1731).
cggctctcagcgctaaaaa

SEQ ID NO: 368082 - DNA, 19 bp, Homo sapiens
  siRNA target sequence for FLJ10697 (NM_018181.3,1754-1772).
gaaccagtggccaattcga

SEQ ID NO: 368083 - DNA, 19 bp, Homo sapiens
  siRNA target sequence for FLJ10697 (NM_018181.3,1775-1793).
gaatcctccccgttaccaa

SEQ ID NO: 368084 - DNA, 19 bp, Homo sapiens
  siRNA target sequence for FLJ10697 (NM_018181.3,1782-1800).
ccccgttaccaaaagaagt

SEQ ID NO: 368085 - DNA, 19 bp, Homo sapiens
  siRNA target sequence for FLJ10697 (NM_018181.3,1784-1802).
ccgttaccaaaagaagtaa

SEQ ID NO: 368086 - DNA, 19 bp, Homo sapiens
  siRNA target sequence for FLJ10697 (NM_018181.3,1785-1803).
cgttaccaaaagaagtaaa

SEQ ID NO: 368087 - DNA, 19 bp, Homo sapiens
  siRNA target sequence for FLJ10697 (NM_018181.3,1786-1804).
gttaccaaaagaagtaaat

SEQ ID NO: 368088 - DNA, 19 bp, Homo sapiens
  siRNA target sequence for FLJ10697 (NM_018181.3,1847-1865).
ctcatcgacgggaccaaaa

SEQ ID NO: 368089 - DNA, 19 bp, Homo sapiens
  siRNA target sequence for FLJ10697 (NM_018181.3,1849-1867).
catcgacgggaccaaaaaa

SEQ ID NO: 368090 - DNA, 19 bp, Homo sapiens
  siRNA target sequence for FLJ10697 (NM_018181.3,1852-1870).
cgacgggaccaaaaaacca

SEQ ID NO: 368091 - DNA, 19 bp, Homo sapiens
  siRNA target sequence for FLJ10697 (NM_018181.3,1853-1871).
gacgggaccaaaaaaccat

SEQ ID NO: 368092 - DNA, 19 bp, Homo sapiens
  siRNA target sequence for FLJ10697 (NM_018181.3,1963-1981).
ccccaaagtccgcataaaa

SEQ ID NO: 368093 - DNA, 19 bp, Homo sapiens
  siRNA target sequence for FLJ10697 (NM_018181.3,1964-1982).
cccaaagtccgcataaaaa

SEQ ID NO: 368094 - DNA, 19 bp, Homo sapiens
  siRNA target sequence for FLJ10697 (NM_018181.3,1973-1991).
cgcataaaaaccattaaga

SEQ ID NO: 368095 - DNA, 19 bp, Homo sapiens
  siRNA target sequence for FLJ10697 (NM_018181.3,2205-2223).
cccccaaacaggtcacaat

SEQ ID NO: 368096 - DNA, 19 bp, Homo sapiens
  siRNA target sequence for FLJ10697 (NM_018181.3,2315-2333).
gtgaaagccacggtcatat

SEQ ID NO: 368097 - DNA, 19 bp, Homo sapiens
  siRNA target sequence for FLJ10697 (NM_018181.3,2354-2372).
gccagcagcgccatcatta

SEQ ID NO: 368098 - DNA, 19 bp, Homo sapiens
  siRNA target sequence for FLJ10697 (NM_018181.3,2355-2373).
ccagcagcgccatcattaa

SEQ ID NO: 368099 - DNA, 19 bp, Homo sapiens
  siRNA target sequence for FLJ10697 (NM_018181.3,2356-2374).
cagcagcgccatcattaaa

SEQ ID NO: 368100 - DNA, 19 bp, Homo sapiens
  siRNA target sequence for FLJ10697 (NM_018181.3,2359-2377).
cagcgccatcattaaagct

SEQ ID NO: 368101 - DNA, 19 bp, Homo sapiens
  siRNA target sequence for FLJ10697 (NM_018181.3,2453-2471).
gtgcaccttgccaacctta

SEQ ID NO: 368102 - DNA, 19 bp, Homo sapiens
  siRNA target sequence for FLJ10697 (NM_018181.3,2509-2527).
ccgccaagtgctaaccaaa

SEQ ID NO: 368103 - DNA, 19 bp, Homo sapiens
  siRNA target sequence for FLJ10697 (NM_018181.3,2723-2741).
ccgacgcgtgggtacaagt

SEQ ID NO: 368104 - DNA, 19 bp, Homo sapiens
  siRNA target sequence for FLJ10697 (NM_018181.3,2919-2937).
gctcccacttaattttaaa

SEQ ID NO: 368105 - DNA, 19 bp, Homo sapiens
  siRNA target sequence for FLJ10697 (NM_018181.3,2963-2981).
gtttctccgtcaagcaata

SEQ ID NO: 368106 - DNA, 19 bp, Homo sapiens
  siRNA target sequence for FLJ10697 (NM_018181.3,3055-3073).
cataactgggacagtcata

SEQ ID NO: 368107 - DNA, 19 bp, Homo sapiens
  siRNA target sequence for FLJ10697 (NM_018181.3,3127-3145).
ctccaaactgtgtagacat

SEQ ID NO: 368108 - DNA, 19 bp, Homo sapiens
  siRNA target sequence for FLJ10697 (NM_018181.3,3134-3152).
ctgtgtagacatagtctaa

SEQ ID NO: 368109 - DNA, 19 bp, Homo sapiens
  siRNA target sequence for FLJ10697 (NM_018181.3,3136-3154).
gtgtagacatagtctaaaa

SEQ ID NO: 368110 - DNA, 19 bp, Homo sapiens
  siRNA target sequence for FLJ10697 (NM_018181.3,3141-3159).
gacatagtctaaaatgttt

SEQ ID NO: 368111 - DNA, 19 bp, Homo sapiens
  siRNA target sequence for FLJ10697 (NM_018181.3,3189-3207).
catcactggctacacattt

SEQ ID NO: 368112 - DNA, 19 bp, Homo sapiens
  siRNA target sequence for FLJ10697 (NM_018181.3,3219-3237).
cagatacgagtggacaaaa

SEQ ID NO: 368113 - DNA, 19 bp, Homo sapiens
  siRNA target sequence for FLJ10697 (NM_018181.3,3400-3418).
gaggagagttggttttcga

SEQ ID NO: 368114 - DNA, 19 bp, Homo sapiens
  siRNA target sequence for FLJ10697 (NM_018181.3,3420-3438).
gtgtgcattgcaatgttgt

SEQ ID NO: 368115 - DNA, 19 bp, Homo sapiens
  siRNA target sequence for FLJ10697 (NM_018181.3,3456-3474).
ctctgaagtctcacattca

SEQ ID NO: 368116 - DNA, 19 bp, Homo sapiens
  siRNA target sequence for FLJ10697 (NM_018181.3,3563-3581).
cagcatcctggcatcaaga

SEQ ID NO: 368117 - DNA, 19 bp, Homo sapiens
  siRNA target sequence for FLJ10697 (NM_018181.3,3565-3583).
gcatcctggcatcaagata

SEQ ID NO: 368118 - DNA, 19 bp, Homo sapiens
  siRNA target sequence for FLJ10697 (NM_018181.3,3585-3603).
gagaaccaaaaataatata

SEQ ID NO: 368119 - DNA, 19 bp, Homo sapiens
  siRNA target sequence for FLJ10697 (NM_018181.3,3655-3673).
ccactttgaccaacacatt

SEQ ID NO: 368120 - DNA, 19 bp, Homo sapiens
  siRNA target sequence for FLJ10697 (NM_018181.3,3658-3676).
ctttgaccaacacattgaa

SEQ ID NO: 368121 - DNA, 19 bp, Homo sapiens
  siRNA target sequence for FLJ10697 (NM_018181.3,3737-3755).
cttatgatggaccatatca

SEQ ID NO: 368122 - DNA, 19 bp, Homo sapiens
  siRNA target sequence for FLJ10697 (NM_018181.3,3748-3766).
ccatatcaagtctatgcat

SEQ ID NO: 368123 - DNA, 19 bp, Homo sapiens
  siRNA target sequence for FLJ10697 (NM_018181.3,3823-3841).
cattaagcctgcaactcaa

SEQ ID NO: 368124 - DNA, 19 bp, Homo sapiens
  siRNA target sequence for FLJ10697 (NM_018181.3,4061-4079).
cgccagtgtgacaagtctt

SEQ ID NO: 368125 - DNA, 19 bp, Homo sapiens
  siRNA target sequence for FLJ10697 (NM_018181.3,4062-4080).
gccagtgtgacaagtcttt

SEQ ID NO: 368126 - DNA, 19 bp, Homo sapiens
  siRNA target sequence for FLJ10697 (NM_018181.3,4163-4181).
gactccagacgtaccttta

SEQ ID NO: 368127 - DNA, 19 bp, Homo sapiens
  siRNA target sequence for FLJ10697 (NM_018181.3,4172-4190).
cgtacctttaccaaacgtt

SEQ ID NO: 368128 - DNA, 19 bp, Homo sapiens
  siRNA target sequence for FLJ10697 (NM_018181.3,4176-4194).
cctttaccaaacgtttgat

SEQ ID NO: 368129 - DNA, 19 bp, Homo sapiens
  siRNA target sequence for FLJ10697 (NM_018181.3,4428-4446).
gcttcaccaccgaaaacct

SEQ ID NO: 368130 - DNA, 19 bp, Homo sapiens
  siRNA target sequence for FLJ10697 (NM_018181.3,4437-4455).
ccgaaaacctgctgcaatt

SEQ ID NO: 368131 - DNA, 19 bp, Homo sapiens
  siRNA target sequence for FLJ10697 (NM_018181.3,4561-4579).
cgtacacaagttaaaggaa

SEQ ID NO: 368132 - DNA, 19 bp, Homo sapiens
  siRNA target sequence for FLJ10697 (NM_018181.3,4585-4603).
gccagtgtccaagcaaaat

SEQ ID NO: 368133 - DNA, 19 bp, Homo sapiens
  siRNA target sequence for FLJ10697 (NM_018181.3,4606-4624).
ggctggggaagataaccaa

SEQ ID NO: 368134 - DNA, 19 bp, Homo sapiens
  siRNA target sequence for FLJ10697 (NM_018181.3,4667-4685).
gccgtgtcagacagaaagt

SEQ ID NO: 368135 - DNA, 19 bp, Homo sapiens
  siRNA target sequence for FLJ10697 (NM_018181.3,4676-4694).
gacagaaagtgcaaagtgt

SEQ ID NO: 368136 - DNA, 19 bp, Homo sapiens
  siRNA target sequence for FLJ10697 (NM_018181.3,4693-4711).
gtgcgcaaaaacttttgaa

SEQ ID NO: 368137 - DNA, 19 bp, Homo sapiens
  siRNA target sequence for FLJ10697 (NM_018181.3,4696-4714).
cgcaaaaacttttgaaact

SEQ ID NO: 368138 - DNA, 19 bp, Homo sapiens
  siRNA target sequence for FLJ10700 (NM_018182.1,313-331).
gaattggatgcgtatgcta

SEQ ID NO: 368139 - DNA, 19 bp, Homo sapiens
  siRNA target sequence for FLJ10700 (NM_018182.1,329-347).
ctaagaaggtcgcaaacaa

SEQ ID NO: 368140 - DNA, 19 bp, Homo sapiens
  siRNA target sequence for FLJ10700 (NM_018182.1,483-501).
cctgcttgccattgtcaaa

SEQ ID NO: 368141 - DNA, 19 bp, Homo sapiens
  siRNA target sequence for FLJ10700 (NM_018182.1,911-929).
ccgtgtctacctcaactat

SEQ ID NO: 368142 - DNA, 19 bp, Homo sapiens
  siRNA target sequence for FLJ10700 (NM_018182.1,923-941).
caactatccccctttcaat

SEQ ID NO: 368143 - DNA, 19 bp, Homo sapiens
  siRNA target sequence for FLJ10700 (NM_018182.1,983-1001).
gcatcgtgcaccagatcaa

SEQ ID NO: 368144 - DNA, 19 bp, Homo sapiens
  siRNA target sequence for FLJ10700 (NM_018182.1,1534-1552).
caacccctgtggaacaaca

SEQ ID NO: 368145 - DNA, 19 bp, Homo sapiens
  siRNA target sequence for FLJ10700 (NM_018182.1,1831-1849).
gagagtcgaagtcttcata

SEQ ID NO: 368146 - DNA, 19 bp, Homo sapiens
  siRNA target sequence for FLJ10700 (NM_018182.1,1833-1851).
gagtcgaagtcttcatatt

SEQ ID NO: 368147 - DNA, 19 bp, Homo sapiens
  siRNA target sequence for C13orf17 (NM_018185.1,50-68).
gacaaggtccgccagttta

SEQ ID NO: 368148 - DNA, 19 bp, Homo sapiens
  siRNA target sequence for C13orf17 (NM_018185.1,89-107).
gagagaactgctatctact

SEQ ID NO: 368149 - DNA, 19 bp, Homo sapiens
  siRNA target sequence for C13orf17 (NM_018185.1,223-241).
gctgtacggcaggtacaaa

SEQ ID NO: 368150 - DNA, 19 bp, Homo sapiens
  siRNA target sequence for C13orf17 (NM_018185.1,226-244).
gtacggcaggtacaaagat

SEQ ID NO: 368151 - DNA, 19 bp, Homo sapiens
  siRNA target sequence for C13orf17 (NM_018185.1,235-253).
gtacaaagatccacaagat

SEQ ID NO: 368152 - DNA, 19 bp, Homo sapiens
  siRNA target sequence for C13orf17 (NM_018185.1,267-285).
gagtcgatgggattcaaca

SEQ ID NO: 368153 - DNA, 19 bp, Homo sapiens
  siRNA target sequence for C13orf17 (NM_018185.1,271-289).
cgatgggattcaacagttt

SEQ ID NO: 368154 - DNA, 19 bp, Homo sapiens
  siRNA target sequence for C13orf17 (NM_018185.1,276-294).
ggattcaacagttttgtga

SEQ ID NO: 368155 - DNA, 19 bp, Homo sapiens
  siRNA target sequence for C13orf17 (NM_018185.1,311-329).
cctgccagtatcagtgtat

SEQ ID NO: 368156 - DNA, 19 bp, Homo sapiens
  siRNA target sequence for C13orf17 (NM_018185.1,332-350).
gtcatagcgtggaagttca

SEQ ID NO: 368157 - DNA, 19 bp, Homo sapiens
  siRNA target sequence for C13orf17 (NM_018185.1,354-372).
cagcaactcagtgtgaatt

SEQ ID NO: 368158 - DNA, 19 bp, Homo sapiens
  siRNA target sequence for C13orf17 (NM_018185.1,549-567).
ctccatttctcaatgtgaa

SEQ ID NO: 368159 - DNA, 19 bp, Homo sapiens
  siRNA target sequence for FLJ10706 (NM_018186.2,757-775).
gttaccaaagactgtgaaa

SEQ ID NO: 368160 - DNA, 19 bp, Homo sapiens
  siRNA target sequence for FLJ10706 (NM_018186.2,781-799).
cgatgacatgatgtatgaa

SEQ ID NO: 368161 - DNA, 19 bp, Homo sapiens
  siRNA target sequence for FLJ10706 (NM_018186.2,819-837).
gactgtcaagccaaaattt

SEQ ID NO: 368162 - DNA, 19 bp, Homo sapiens
  siRNA target sequence for FLJ10706 (NM_018186.2,845-863).
cagaccactctaaggaata

SEQ ID NO: 368163 - DNA, 19 bp, Homo sapiens
  siRNA target sequence for FLJ10706 (NM_018186.2,847-865).
gaccactctaaggaatatt

SEQ ID NO: 368164 - DNA, 19 bp, Homo sapiens
  siRNA target sequence for FLJ10706 (NM_018186.2,932-950).
gaatccatcattttggaaa

SEQ ID NO: 368165 - DNA, 19 bp, Homo sapiens
  siRNA target sequence for FLJ10706 (NM_018186.2,1003-1021).
gcattgtaagaatagtgaa

SEQ ID NO: 368166 - DNA, 19 bp, Homo sapiens
  siRNA target sequence for FLJ10706 (NM_018186.2,1034-1052).
gggtgtttacacctagttt

SEQ ID NO: 368167 - DNA, 19 bp, Homo sapiens
  siRNA target sequence for FLJ10706 (NM_018186.2,1038-1056).
gtttacacctagtttcaga

SEQ ID NO: 368168 - DNA, 19 bp, Homo sapiens
  siRNA target sequence for FLJ10706 (NM_018186.2,1075-1093).
caaggaggcctattctctt

SEQ ID NO: 368169 - DNA, 19 bp, Homo sapiens
  siRNA target sequence for FLJ10706 (NM_018186.2,1128-1146).
gcatggaccctttagtaga

SEQ ID NO: 368170 - DNA, 19 bp, Homo sapiens
  siRNA target sequence for FLJ10706 (NM_018186.2,1195-1213).
ggatatctgctctgttatt

SEQ ID NO: 368171 - DNA, 19 bp, Homo sapiens
  siRNA target sequence for FLJ10706 (NM_018186.2,1215-1233).
ccagtatggaccatgcatt

SEQ ID NO: 368172 - DNA, 19 bp, Homo sapiens
  siRNA target sequence for FLJ10706 (NM_018186.2,1229-1247).
gcatttcatgccaatactt

SEQ ID NO: 368173 - DNA, 19 bp, Homo sapiens
  siRNA target sequence for FLJ10706 (NM_018186.2,1238-1256).
gccaatacttggaagttta

SEQ ID NO: 368174 - DNA, 19 bp, Homo sapiens
  siRNA target sequence for FLJ10706 (NM_018186.2,1245-1263).
cttggaagtttataattaa

SEQ ID NO: 368175 - DNA, 19 bp, Homo sapiens
  siRNA target sequence for FLJ10706 (NM_018186.2,1271-1289).
cttaagcaccagtccataa

SEQ ID NO: 368176 - DNA, 19 bp, Homo sapiens
  siRNA target sequence for FLJ10706 (NM_018186.2,1276-1294).
gcaccagtccataataaaa

SEQ ID NO: 368177 - DNA, 19 bp, Homo sapiens
  siRNA target sequence for FLJ10706 (NM_018186.2,1277-1295).
caccagtccataataaaaa

SEQ ID NO: 368178 - DNA, 19 bp, Homo sapiens
  siRNA target sequence for FLJ10706 (NM_018186.2,1307-1325).
cacaaagatataattacta

SEQ ID NO: 368179 - DNA, 19 bp, Homo sapiens
  siRNA target sequence for FLJ10706 (NM_018186.2,1354-1372).
ccattcttgtttacagtta

SEQ ID NO: 368180 - DNA, 19 bp, Homo sapiens
  siRNA target sequence for FLJ10706 (NM_018186.2,1429-1447).
gaaaacactcaaattgtgt

SEQ ID NO: 368181 - DNA, 19 bp, Homo sapiens
  siRNA target sequence for FLJ10706 (NM_018186.2,1503-1521).
ctgattcttgctgtacttt

SEQ ID NO: 368182 - DNA, 19 bp, Homo sapiens
  siRNA target sequence for FLJ10706 (NM_018186.2,1515-1533).
gtactttgcaccaactgta

SEQ ID NO: 368183 - DNA, 19 bp, Homo sapiens
  siRNA target sequence for FLJ10706 (NM_018186.2,1644-1662).
gtcagctgctcacatttca

SEQ ID NO: 368184 - DNA, 19 bp, Homo sapiens
  siRNA target sequence for FLJ10706 (NM_018186.2,1717-1735).
gtttccacaatgtcttctt

SEQ ID NO: 368185 - DNA, 19 bp, Homo sapiens
  siRNA target sequence for FLJ10706 (NM_018186.2,1759-1777).
gccatctcagcctaaggaa

SEQ ID NO: 368186 - DNA, 19 bp, Homo sapiens
  siRNA target sequence for FLJ10706 (NM_018186.2,1818-1836).
cgacaaccaggatatctct

SEQ ID NO: 368187 - DNA, 19 bp, Homo sapiens
  siRNA target sequence for FLJ10706 (NM_018186.2,1845-1863).
ccgttttctacagttttga

SEQ ID NO: 368188 - DNA, 19 bp, Homo sapiens
  siRNA target sequence for FLJ10706 (NM_018186.2,1884-1902).
ctctacctgttcatttaca

SEQ ID NO: 368189 - DNA, 19 bp, Homo sapiens
  siRNA target sequence for FLJ10706 (NM_018186.2,1942-1960).
cttgtatcagcatgtttgt

SEQ ID NO: 368190 - DNA, 19 bp, Homo sapiens
  siRNA target sequence for FLJ10706 (NM_018186.2,2026-2044).
gctgaatgctgtacttagt

SEQ ID NO: 368191 - DNA, 19 bp, Homo sapiens
  siRNA target sequence for FLJ10706 (NM_018186.2,2033-2051).
gctgtacttagtgctaata

SEQ ID NO: 368192 - DNA, 19 bp, Homo sapiens
  siRNA target sequence for FLJ10706 (NM_018186.2,2138-2156).
gtggctcatctgataaagt

SEQ ID NO: 368193 - DNA, 19 bp, Homo sapiens
  siRNA target sequence for FLJ10706 (NM_018186.2,2155-2173).
gtcatgccctggagaatgt

SEQ ID NO: 368194 - DNA, 19 bp, Homo sapiens
  siRNA target sequence for FLJ10706 (NM_018186.2,2157-2175).
catgccctggagaatgtta

SEQ ID NO: 368195 - DNA, 19 bp, Homo sapiens
  siRNA target sequence for FLJ10706 (NM_018186.2,2177-2195).
caactcatcaacctatcaa

SEQ ID NO: 368196 - DNA, 19 bp, Homo sapiens
  siRNA target sequence for FLJ10706 (NM_018186.2,2198-2216).
ctgttgaagcgtctctttt

SEQ ID NO: 368197 - DNA, 19 bp, Homo sapiens
  siRNA target sequence for FLJ10706 (NM_018186.2,2231-2249).
ccccatcagctggagttta

SEQ ID NO: 368198 - DNA, 19 bp, Homo sapiens
  siRNA target sequence for FLJ10706 (NM_018186.2,2232-2250).
cccatcagctggagtttat

SEQ ID NO: 368199 - DNA, 19 bp, Homo sapiens
  siRNA target sequence for FLJ10706 (NM_018186.2,2548-2566).
ggtagcagatcaaccttat

SEQ ID NO: 368200 - DNA, 19 bp, Homo sapiens
  siRNA target sequence for FLJ10706 (NM_018186.2,2619-2637).
ctctagatcctaaactgat

SEQ ID NO: 368201 - DNA, 19 bp, Homo sapiens
  siRNA target sequence for FLJ10706 (NM_018186.2,2635-2653).
gatacttcaggcagtaact

SEQ ID NO: 368202 - DNA, 19 bp, Homo sapiens
  siRNA target sequence for FLJ10706 (NM_018186.2,2657-2675).
cagacctcgctacttaaat

SEQ ID NO: 368203 - DNA, 19 bp, Homo sapiens
  siRNA target sequence for FLJ10706 (NM_018186.2,2659-2677).
gacctcgctacttaaatta

SEQ ID NO: 368204 - DNA, 19 bp, Homo sapiens
  siRNA target sequence for FLJ10706 (NM_018186.2,2661-2679).
cctcgctacttaaattaga

SEQ ID NO: 368205 - DNA, 19 bp, Homo sapiens
  siRNA target sequence for FLJ10706 (NM_018186.2,2696-2714).
cgtttggcaatgttggatt

SEQ ID NO: 368206 - DNA, 19 bp, Homo sapiens
  siRNA target sequence for FLJ10706 (NM_018186.2,2707-2725).
gttggattttgtatcttct

SEQ ID NO: 368207 - DNA, 19 bp, Homo sapiens
  siRNA target sequence for FLJ10706 (NM_018186.2,2771-2789).
cccaacctgtcctgtatgt

SEQ ID NO: 368208 - DNA, 19 bp, Homo sapiens
  siRNA target sequence for FLJ10706 (NM_018186.2,2811-2829).
ggagttggctgctagaaca

SEQ ID NO: 368209 - DNA, 19 bp, Homo sapiens
  siRNA target sequence for FLJ10706 (NM_018186.2,2812-2830).
gagttggctgctagaacaa

SEQ ID NO: 368210 - DNA, 19 bp, Homo sapiens
  siRNA target sequence for FLJ10706 (NM_018186.2,2835-2853).
ccttggaggcgtttactca

SEQ ID NO: 368211 - DNA, 19 bp, Homo sapiens
  siRNA target sequence for FLJ10706 (NM_018186.2,2854-2872).
gttcgctgagggaacaaat

SEQ ID NO: 368212 - DNA, 19 bp, Homo sapiens
  siRNA target sequence for FLJ10706 (NM_018186.2,2865-2883).
gaacaaatcatgaagagat

SEQ ID NO: 368213 - DNA, 19 bp, Homo sapiens
  siRNA target sequence for FLJ10706 (NM_018186.2,2941-2959).
gaagactgggtttgtagat

SEQ ID NO: 368214 - DNA, 19 bp, Homo sapiens
  siRNA target sequence for FLJ10706 (NM_018186.2,3114-3132).
ggtcagcgctgcatacaat

SEQ ID NO: 368215 - DNA, 19 bp, Homo sapiens
  siRNA target sequence for FLJ10706 (NM_018186.2,3115-3133).
gtcagcgctgcatacaata

SEQ ID NO: 368216 - DNA, 19 bp, Homo sapiens
  siRNA target sequence for FLJ10706 (NM_018186.2,3153-3171).
ctgagtcactactccaaaa

SEQ ID NO: 368217 - DNA, 19 bp, Homo sapiens
  siRNA target sequence for FLJ10706 (NM_018186.2,3223-3241).
gatggataagctaaaacgt

SEQ ID NO: 368218 - DNA, 19 bp, Homo sapiens
  siRNA target sequence for FLJ10706 (NM_018186.2,3232-3250).
gctaaaacgttacatacat

SEQ ID NO: 368219 - DNA, 19 bp, Homo sapiens
  siRNA target sequence for FLJ10706 (NM_018186.2,3233-3251).
ctaaaacgttacatacata

SEQ ID NO: 368220 - DNA, 19 bp, Homo sapiens
  siRNA target sequence for DPPA4 (NM_018189.1,81-99).
ggatcagcaggcttctaat

SEQ ID NO: 368221 - DNA, 19 bp, Homo sapiens
  siRNA target sequence for DPPA4 (NM_018189.1,90-108).
ggcttctaatcaaccaaat

SEQ ID NO: 368222 - DNA, 19 bp, Homo sapiens
  siRNA target sequence for DPPA4 (NM_018189.1,91-109).
gcttctaatcaaccaaatt

SEQ ID NO: 368223 - DNA, 19 bp, Homo sapiens
  siRNA target sequence for DPPA4 (NM_018189.1,231-249).
gataccaatccctccatta

SEQ ID NO: 368224 - DNA, 19 bp, Homo sapiens
  siRNA target sequence for DPPA4 (NM_018189.1,240-258).
ccctccattaccttctaaa

SEQ ID NO: 368225 - DNA, 19 bp, Homo sapiens
  siRNA target sequence for DPPA4 (NM_018189.1,259-277).
ctgccacctgttaatctga

SEQ ID NO: 368226 - DNA, 19 bp, Homo sapiens
  siRNA target sequence for DPPA4 (NM_018189.1,263-281).
cacctgttaatctgattca

SEQ ID NO: 368227 - DNA, 19 bp, Homo sapiens
  siRNA target sequence for DPPA4 (NM_018189.1,298-316).
gcctggtgccaacaattga

SEQ ID NO: 368228 - DNA, 19 bp, Homo sapiens
  siRNA target sequence for DPPA4 (NM_018189.1,323-341).
gctccaaaggccagaaatt

SEQ ID NO: 368229 - DNA, 19 bp, Homo sapiens
  siRNA target sequence for DPPA4 (NM_018189.1,332-350).
gccagaaattggatgcata

SEQ ID NO: 368230 - DNA, 19 bp, Homo sapiens
  siRNA target sequence for DPPA4 (NM_018189.1,412-430).
gccaaaatccggaaatcat

SEQ ID NO: 368231 - DNA, 19 bp, Homo sapiens
  siRNA target sequence for DPPA4 (NM_018189.1,460-478).
gaaacgtccctgcaaagtt

SEQ ID NO: 368232 - DNA, 19 bp, Homo sapiens
  siRNA target sequence for DPPA4 (NM_018189.1,522-540).
gccgcctgccctggaaaat

SEQ ID NO: 368233 - DNA, 19 bp, Homo sapiens
  siRNA target sequence for DPPA4 (NM_018189.1,548-566).
ctctccttgagggagttaa

SEQ ID NO: 368234 - DNA, 19 bp, Homo sapiens
  siRNA target sequence for DPPA4 (NM_018189.1,552-570).
ccttgagggagttaataca

SEQ ID NO: 368235 - DNA, 19 bp, Homo sapiens
  siRNA target sequence for DPPA4 (NM_018189.1,788-806).
gagtgagtgcactcttctt

SEQ ID NO: 368236 - DNA, 19 bp, Homo sapiens
  siRNA target sequence for DPPA4 (NM_018189.1,832-850).
ccgcaccttgaagacaata

SEQ ID NO: 368237 - DNA, 19 bp, Homo sapiens
  siRNA target sequence for DPPA4 (NM_018189.1,833-851).
cgcaccttgaagacaatat

SEQ ID NO: 368238 - DNA, 19 bp, Homo sapiens
  siRNA target sequence for BBS7 (NM_018190.2,183-201).
gattttaaaccgaatggat

SEQ ID NO: 368239 - DNA, 19 bp, Homo sapiens
  siRNA target sequence for BBS7 (NM_018190.2,266-284).
ctacacaaaaggtggttat

SEQ ID NO: 368240 - DNA, 19 bp, Homo sapiens
  siRNA target sequence for BBS7 (NM_018190.2,289-307).
gatcatgatggggtagtta

SEQ ID NO: 368241 - DNA, 19 bp, Homo sapiens
  siRNA target sequence for BBS7 (NM_018190.2,292-310).
catgatggggtagttatgt

SEQ ID NO: 368242 - DNA, 19 bp, Homo sapiens
  siRNA target sequence for BBS7 (NM_018190.2,309-327).
gtgctttggcatgaagaaa

SEQ ID NO: 368243 - DNA, 19 bp, Homo sapiens
  siRNA target sequence for BBS7 (NM_018190.2,439-457).
gagattagaggcttcacaa

SEQ ID NO: 368244 - DNA, 19 bp, Homo sapiens
  siRNA target sequence for BBS7 (NM_018190.2,526-544).
ggctcagacctctttctca

SEQ ID NO: 368245 - DNA, 19 bp, Homo sapiens
  siRNA target sequence for BBS7 (NM_018190.2,541-559).
ctcagtgcaagttacatct

SEQ ID NO: 368246 - DNA, 19 bp, Homo sapiens
  siRNA target sequence for BBS7 (NM_018190.2,545-563).
gtgcaagttacatctataa

SEQ ID NO: 368247 - DNA, 19 bp, Homo sapiens
  siRNA target sequence for BBS7 (NM_018190.2,548-566).
caagttacatctataacca

SEQ ID NO: 368248 - DNA, 19 bp, Homo sapiens
  siRNA target sequence for BBS7 (NM_018190.2,551-569).
gttacatctataaccatta

SEQ ID NO: 368249 - DNA, 19 bp, Homo sapiens
  siRNA target sequence for BBS7 (NM_018190.2,555-573).
catctataaccattattgt

SEQ ID NO: 368250 - DNA, 19 bp, Homo sapiens
  siRNA target sequence for BBS7 (NM_018190.2,598-616).
ctttctggggataaaatca

SEQ ID NO: 368251 - DNA, 19 bp, Homo sapiens
  siRNA target sequence for BBS7 (NM_018190.2,602-620).
ctggggataaaatcaatga

SEQ ID NO: 368252 - DNA, 19 bp, Homo sapiens
  siRNA target sequence for BBS7 (NM_018190.2,605-623).
gggataaaatcaatgatgt

SEQ ID NO: 368253 - DNA, 19 bp, Homo sapiens
  siRNA target sequence for BBS7 (NM_018190.2,629-647).
gccttccagtggaaagatt

SEQ ID NO: 368254 - DNA, 19 bp, Homo sapiens
  siRNA target sequence for BBS7 (NM_018190.2,650-668).
ctcgtatcacacctgtatt

SEQ ID NO: 368255 - DNA, 19 bp, Homo sapiens
  siRNA target sequence for BBS7 (NM_018190.2,702-720).
gggatctgatgtgatgtat

SEQ ID NO: 368256 - DNA, 19 bp, Homo sapiens
  siRNA target sequence for BBS7 (NM_018190.2,746-764).
ctgtcttagcactacacaa

SEQ ID NO: 368257 - DNA, 19 bp, Homo sapiens
  siRNA target sequence for BBS7 (NM_018190.2,804-822).
gacatcagacggaaaactt

SEQ ID NO: 368258 - DNA, 19 bp, Homo sapiens
  siRNA target sequence for BBS7 (NM_018190.2,813-831).
cggaaaacttgcgcttata

SEQ ID NO: 368259 - DNA, 19 bp, Homo sapiens
  siRNA target sequence for BBS7 (NM_018190.2,820-838).
cttgcgcttatacagatta

SEQ ID NO: 368260 - DNA, 19 bp, Homo sapiens
  siRNA target sequence for BBS7 (NM_018190.2,823-841).
gcgcttatacagattacta

SEQ ID NO: 368261 - DNA, 19 bp, Homo sapiens
  siRNA target sequence for BBS7 (NM_018190.2,825-843).
gcttatacagattactaca

SEQ ID NO: 368262 - DNA, 19 bp, Homo sapiens
  siRNA target sequence for BBS7 (NM_018190.2,925-943).
ggtgatggggttaaagatt

SEQ ID NO: 368263 - DNA, 19 bp, Homo sapiens
  siRNA target sequence for BBS7 (NM_018190.2,926-944).
gtgatggggttaaagattt

SEQ ID NO: 368264 - DNA, 19 bp, Homo sapiens
  siRNA target sequence for BBS7 (NM_018190.2,932-950).
gggttaaagatttacttgt

SEQ ID NO: 368265 - DNA, 19 bp, Homo sapiens
  siRNA target sequence for BBS7 (NM_018190.2,964-982).
ggaatggtggaagtgtata

SEQ ID NO: 368266 - DNA, 19 bp, Homo sapiens
  siRNA target sequence for BBS7 (NM_018190.2,1012-1030).
cgatttgatcagatgttgt

SEQ ID NO: 368267 - DNA, 19 bp, Homo sapiens
  siRNA target sequence for BBS7 (NM_018190.2,1089-1107).
cgtggtgtccacatattca

SEQ ID NO: 368268 - DNA, 19 bp, Homo sapiens
  siRNA target sequence for BBS7 (NM_018190.2,1130-1148).
cagagcccattcataagga

SEQ ID NO: 368269 - DNA, 19 bp, Homo sapiens
  siRNA target sequence for BBS7 (NM_018190.2,1132-1150).
gagcccattcataaggaaa

SEQ ID NO: 368270 - DNA, 19 bp, Homo sapiens
  siRNA target sequence for BBS7 (NM_018190.2,1202-1220).
cttccttacggaatgagtt

SEQ ID NO: 368271 - DNA, 19 bp, Homo sapiens
  siRNA target sequence for BBS7 (NM_018190.2,1210-1228).
cggaatgagttggaacatt

SEQ ID NO: 368272 - DNA, 19 bp, Homo sapiens
  siRNA target sequence for BBS7 (NM_018190.2,1297-1315).
gcagtaccttcctttggta

SEQ ID NO: 368273 - DNA, 19 bp, Homo sapiens
  siRNA target sequence for BBS7 (NM_018190.2,1298-1316).
cagtaccttcctttggtat

SEQ ID NO: 368274 - DNA, 19 bp, Homo sapiens
  siRNA target sequence for BBS7 (NM_018190.2,1304-1322).
cttcctttggtataaatga

SEQ ID NO: 368275 - DNA, 19 bp, Homo sapiens
  siRNA target sequence for BBS7 (NM_018190.2,1348-1366).
gccagttacagccttatct

SEQ ID NO: 368276 - DNA, 19 bp, Homo sapiens
  siRNA target sequence for BBS7 (NM_018190.2,1349-1367).
ccagttacagccttatctt

SEQ ID NO: 368277 - DNA, 19 bp, Homo sapiens
  siRNA target sequence for BBS7 (NM_018190.2,1379-1397).
ctgcaatagataatgtctt

SEQ ID NO: 368278 - DNA, 19 bp, Homo sapiens
  siRNA target sequence for BBS7 (NM_018190.2,1406-1424).
gtgatgttccaatagattt

SEQ ID NO: 368279 - DNA, 19 bp, Homo sapiens
  siRNA target sequence for BBS7 (NM_018190.2,1415-1433).
caatagatttacttgatgt

SEQ ID NO: 368280 - DNA, 19 bp, Homo sapiens
  siRNA target sequence for BBS7 (NM_018190.2,1426-1444).
cttgatgtggataaaaatt

SEQ ID NO: 368281 - DNA, 19 bp, Homo sapiens
  siRNA target sequence for BBS7 (NM_018190.2,1447-1465).
gctgttgttagctttagca

SEQ ID NO: 368282 - DNA, 19 bp, Homo sapiens
  siRNA target sequence for BBS7 (NM_018190.2,1475-1493).
ctgagtcaaacgacaactt

SEQ ID NO: 368283 - DNA, 19 bp, Homo sapiens
  siRNA target sequence for BBS7 (NM_018190.2,1542-1560).
caagattcgctcaattgaa

SEQ ID NO: 368284 - DNA, 19 bp, Homo sapiens
  siRNA target sequence for BBS7 (NM_018190.2,1563-1581).
ccagtatggcacactacaa

SEQ ID NO: 368285 - DNA, 19 bp, Homo sapiens
  siRNA target sequence for BBS7 (NM_018190.2,1571-1589).
gcacactacaagcatatgt

SEQ ID NO: 368286 - DNA, 19 bp, Homo sapiens
  siRNA target sequence for BBS7 (NM_018190.2,1664-1682).
ctcactttattgatcatga

SEQ ID NO: 368287 - DNA, 19 bp, Homo sapiens
  siRNA target sequence for BBS7 (NM_018190.2,1705-1723).
ctaacaggccagttcagtt

SEQ ID NO: 368288 - DNA, 19 bp, Homo sapiens
  siRNA target sequence for BBS7 (NM_018190.2,1778-1796).
ctccagcaggagaatgtgt

SEQ ID NO: 368289 - DNA, 19 bp, Homo sapiens
  siRNA target sequence for BBS7 (NM_018190.2,1784-1802).
caggagaatgtgtgacatt

SEQ ID NO: 368290 - DNA, 19 bp, Homo sapiens
  siRNA target sequence for BBS7 (NM_018190.2,1812-1830).
gaacacctttctagataca

SEQ ID NO: 368291 - DNA, 19 bp, Homo sapiens
  siRNA target sequence for BBS7 (NM_018190.2,1818-1836).
ctttctagatacacaactt

SEQ ID NO: 368292 - DNA, 19 bp, Homo sapiens
  siRNA target sequence for BBS7 (NM_018190.2,1822-1840).
ctagatacacaacttgaaa

SEQ ID NO: 368293 - DNA, 19 bp, Homo sapiens
  siRNA target sequence for BBS7 (NM_018190.2,1825-1843).
gatacacaacttgaaagta

SEQ ID NO: 368294 - DNA, 19 bp, Homo sapiens
  siRNA target sequence for BBS7 (NM_018190.2,1874-1892).
ctgacaacatttctactat

SEQ ID NO: 368295 - DNA, 19 bp, Homo sapiens
  siRNA target sequence for BBS7 (NM_018190.2,1934-1952).
ggaaaattaacctcaacat

SEQ ID NO: 368296 - DNA, 19 bp, Homo sapiens
  siRNA target sequence for BBS7 (NM_018190.2,1950-1968).
catatcatacgagataaat

SEQ ID NO: 368297 - DNA, 19 bp, Homo sapiens
  siRNA target sequence for BBS7 (NM_018190.2,1955-1973).
catacgagataaatgaagt

SEQ ID NO: 368298 - DNA, 19 bp, Homo sapiens
  siRNA target sequence for BBS7 (NM_018190.2,2032-2050).
gctaagaaagtgcagttaa

SEQ ID NO: 368299 - DNA, 19 bp, Homo sapiens
  siRNA target sequence for BBS7 (NM_018190.2,2033-2051).
ctaagaaagtgcagttaat

SEQ ID NO: 368300 - DNA, 19 bp, Homo sapiens
  siRNA target sequence for BBS7 (NM_018190.2,2037-2055).
gaaagtgcagttaattgat

SEQ ID NO: 368301 - DNA, 19 bp, Homo sapiens
  siRNA target sequence for BBS7 (NM_018190.2,2098-2116).
ctgataccagaatatcact

SEQ ID NO: 368302 - DNA, 19 bp, Homo sapiens
  siRNA target sequence for FLJ10724 (NM_018194.1,211-229).
ggaactggcactttaccta

SEQ ID NO: 368303 - DNA, 19 bp, Homo sapiens
  siRNA target sequence for FLJ10724 (NM_018194.1,331-349).
cactttatttggaggatta

SEQ ID NO: 368304 - DNA, 19 bp, Homo sapiens
  siRNA target sequence for FLJ10724 (NM_018194.1,356-374).
gatgcgaccgactttgagt

SEQ ID NO: 368305 - DNA, 19 bp, Homo sapiens
  siRNA target sequence for FLJ10724 (NM_018194.1,470-488).
cacagaccctggattctca

SEQ ID NO: 368306 - DNA, 19 bp, Homo sapiens
  siRNA target sequence for FLJ10724 (NM_018194.1,530-548).
cctggtgtggctatggttt

SEQ ID NO: 368307 - DNA, 19 bp, Homo sapiens
  siRNA target sequence for FLJ10724 (NM_018194.1,644-662).
cagggtgtggaagaagtta

SEQ ID NO: 368308 - DNA, 19 bp, Homo sapiens
  siRNA target sequence for FLJ10724 (NM_018194.1,672-690).
ggtacaagacagaaaacga

SEQ ID NO: 368309 - DNA, 19 bp, Homo sapiens
  siRNA target sequence for FLJ10724 (NM_018194.1,805-823).
gatgctggcctatgtcttt

SEQ ID NO: 368310 - DNA, 19 bp, Homo sapiens
  siRNA target sequence for FLJ10724 (NM_018194.1,814-832).
ctatgtcttttattatcca

SEQ ID NO: 368311 - DNA, 19 bp, Homo sapiens
  siRNA target sequence for FLJ10724 (NM_018194.1,858-876).
gcttctcggagttcatcaa

SEQ ID NO: 368312 - DNA, 19 bp, Homo sapiens
  siRNA target sequence for FLJ10724 (NM_018194.1,864-882).
cggagttcatcaaacagat

SEQ ID NO: 368313 - DNA, 19 bp, Homo sapiens
  siRNA target sequence for FLJ10724 (NM_018194.1,1192-1210).
cgggatgtggaggtatttt

SEQ ID NO: 368314 - DNA, 19 bp, Homo sapiens
  siRNA target sequence for FLJ10724 (NM_018194.1,1214-1232).
gttggactgcataatttct

SEQ ID NO: 368315 - DNA, 19 bp, Homo sapiens
  siRNA target sequence for FLJ10724 (NM_018194.1,1217-1235).
ggactgcataatttcttaa

SEQ ID NO: 368316 - DNA, 19 bp, Homo sapiens
  siRNA target sequence for FLJ10724 (NM_018194.1,1297-1315).
cacggcgatgacatttgca

SEQ ID NO: 368317 - DNA, 19 bp, Homo sapiens
  siRNA target sequence for FLJ10724 (NM_018194.1,1516-1534).
cctgtccaacctggtattt

SEQ ID NO: 368318 - DNA, 19 bp, Homo sapiens
  siRNA target sequence for FLJ10724 (NM_018194.1,1564-1582).
ctggaataggatcttcata

SEQ ID NO: 368319 - DNA, 19 bp, Homo sapiens
  siRNA target sequence for FLJ10724 (NM_018194.1,1566-1584).
ggaataggatcttcataca

SEQ ID NO: 368320 - DNA, 19 bp, Homo sapiens
  siRNA target sequence for FLJ10724 (NM_018194.1,1567-1585).
gaataggatcttcatacaa

SEQ ID NO: 368321 - DNA, 19 bp, Homo sapiens
  siRNA target sequence for FLJ10726 (NM_018195.2,854-872).
gatgcgcagtgatggtttt

SEQ ID NO: 368322 - DNA, 19 bp, Homo sapiens
  siRNA target sequence for FLJ10726 (NM_018195.2,857-875).
gcgcagtgatggttttgat

SEQ ID NO: 368323 - DNA, 19 bp, Homo sapiens
  siRNA target sequence for FLJ10726 (NM_018195.2,925-943).
cactggaagatgattttct

SEQ ID NO: 368324 - DNA, 19 bp, Homo sapiens
  siRNA target sequence for FLJ10726 (NM_018195.2,947-965).
ggctaaatcctggaataaa

SEQ ID NO: 368325 - DNA, 19 bp, Homo sapiens
  siRNA target sequence for FLJ10726 (NM_018195.2,948-966).
gctaaatcctggaataaaa

SEQ ID NO: 368326 - DNA, 19 bp, Homo sapiens
  siRNA target sequence for FLJ10726 (NM_018195.2,1025-1043).
gttataccctgaagaattt

SEQ ID NO: 368327 - DNA, 19 bp, Homo sapiens
  siRNA target sequence for FLJ10726 (NM_018195.2,1054-1072).
gtagtgatcagcaagatat

SEQ ID NO: 368328 - DNA, 19 bp, Homo sapiens
  siRNA target sequence for FLJ10726 (NM_018195.2,1259-1277).
ggcttctggtacaaggaaa

SEQ ID NO: 368329 - DNA, 19 bp, Homo sapiens
  siRNA target sequence for FLJ10726 (NM_018195.2,1288-1306).
cacataaacgcaagaaaaa

SEQ ID NO: 368330 - DNA, 19 bp, Homo sapiens
  siRNA target sequence for FLJ10726 (NM_018195.2,1290-1308).
cataaacgcaagaaaaaat

SEQ ID NO: 368331 - DNA, 19 bp, Homo sapiens
  siRNA target sequence for FLJ10726 (NM_018195.2,1463-1481).
ctctgtagccaacaatgaa

SEQ ID NO: 368332 - DNA, 19 bp, Homo sapiens
  siRNA target sequence for FLJ10726 (NM_018195.2,1499-1517).
caaacgcacaaattggaaa

SEQ ID NO: 368333 - DNA, 19 bp, Homo sapiens
  siRNA target sequence for FLJ10737 (NM_018198.1,113-131).
cctaccggaggctctgtat

SEQ ID NO: 368334 - DNA, 19 bp, Homo sapiens
  siRNA target sequence for FLJ10737 (NM_018198.1,175-193).
caggcggaacgactgttta

SEQ ID NO: 368335 - DNA, 19 bp, Homo sapiens
  siRNA target sequence for FLJ10737 (NM_018198.1,179-197).
cggaacgactgtttaacct

SEQ ID NO: 368336 - DNA, 19 bp, Homo sapiens
  siRNA target sequence for FLJ10737 (NM_018198.1,185-203).
gactgtttaaccttgttca

SEQ ID NO: 368337 - DNA, 19 bp, Homo sapiens
  siRNA target sequence for FLJ10737 (NM_018198.1,236-254).
ccagggccatctatgatat

SEQ ID NO: 368338 - DNA, 19 bp, Homo sapiens
  siRNA target sequence for FLJ10737 (NM_018198.1,237-255).
cagggccatctatgatata

SEQ ID NO: 368339 - DNA, 19 bp, Homo sapiens
  siRNA target sequence for FLJ10737 (NM_018198.1,239-257).
gggccatctatgatatata

SEQ ID NO: 368340 - DNA, 19 bp, Homo sapiens
  siRNA target sequence for FLJ10737 (NM_018198.1,306-324).
gagaacccctgctgaaatt

SEQ ID NO: 368341 - DNA, 19 bp, Homo sapiens
  siRNA target sequence for FLJ10737 (NM_018198.1,399-417).
gatcagcgttggagtagat

SEQ ID NO: 368342 - DNA, 19 bp, Homo sapiens
  siRNA target sequence for FLJ10737 (NM_018198.1,470-488).
gtagctttccgcagattga

SEQ ID NO: 368343 - DNA, 19 bp, Homo sapiens
  siRNA target sequence for FLJ10737 (NM_018198.1,473-491).
gctttccgcagattgaaat

SEQ ID NO: 368344 - DNA, 19 bp, Homo sapiens
  siRNA target sequence for FLJ10737 (NM_018198.1,474-492).
ctttccgcagattgaaatt

SEQ ID NO: 368345 - DNA, 19 bp, Homo sapiens
  siRNA target sequence for FLJ10737 (NM_018198.1,478-496).
ccgcagattgaaattaata

SEQ ID NO: 368346 - DNA, 19 bp, Homo sapiens
  siRNA target sequence for FLJ10737 (NM_018198.1,480-498).
gcagattgaaattaataaa

SEQ ID NO: 368347 - DNA, 19 bp, Homo sapiens
  siRNA target sequence for FLJ10737 (NM_018198.1,607-625).
gcgctcagacgagtaactt

SEQ ID NO: 368348 - DNA, 19 bp, Homo sapiens
  siRNA target sequence for FLJ10737 (NM_018198.1,720-738).
ctttgtgacaacaaactgt

SEQ ID NO: 368349 - DNA, 19 bp, Homo sapiens
  siRNA target sequence for FLJ10737 (NM_018198.1,793-811).
cggaacctagacaagaaca

SEQ ID NO: 368350 - DNA, 19 bp, Homo sapiens
  siRNA target sequence for FLJ10737 (NM_018198.1,864-882).
catcgtccgagacactaaa

SEQ ID NO: 368351 - DNA, 19 bp, Homo sapiens
  siRNA target sequence for FLJ10737 (NM_018198.1,868-886).
gtccgagacactaaaacca

SEQ ID NO: 368352 - DNA, 19 bp, Homo sapiens
  siRNA target sequence for FLJ10737 (NM_018198.1,966-984).
cgatcagactcgtgtgaaa

SEQ ID NO: 368353 - DNA, 19 bp, Homo sapiens
  siRNA target sequence for FLJ10737 (NM_018198.1,970-988).
cagactcgtgtgaaaggat

SEQ ID NO: 368354 - DNA, 19 bp, Homo sapiens
  siRNA target sequence for FLJ10737 (NM_018198.1,1121-1139).
gggccagtcagacatactt

SEQ ID NO: 368355 - DNA, 19 bp, Homo sapiens
  siRNA target sequence for FLJ10737 (NM_018198.1,1123-1141).
gccagtcagacatacttct

SEQ ID NO: 368356 - DNA, 19 bp, Homo sapiens
  siRNA target sequence for FLJ10737 (NM_018198.1,1124-1142).
ccagtcagacatacttctt

SEQ ID NO: 368357 - DNA, 19 bp, Homo sapiens
  siRNA target sequence for FLJ10737 (NM_018198.1,1133-1151).
catacttcttccctattca

SEQ ID NO: 368358 - DNA, 19 bp, Homo sapiens
  siRNA target sequence for FLJ10737 (NM_018198.1,1200-1218).
gcctctagtggtctacttt

SEQ ID NO: 368359 - DNA, 19 bp, Homo sapiens
  siRNA target sequence for FLJ10737 (NM_018198.1,1224-1242).
gcaccgtctgatcatcaaa

SEQ ID NO: 368360 - DNA, 19 bp, Homo sapiens
  siRNA target sequence for FLJ10737 (NM_018198.1,1228-1246).
cgtctgatcatcaaaccat

SEQ ID NO: 368361 - DNA, 19 bp, Homo sapiens
  siRNA target sequence for FLJ10737 (NM_018198.1,1229-1247).
gtctgatcatcaaaccata

SEQ ID NO: 368362 - DNA, 19 bp, Homo sapiens
  siRNA target sequence for FLJ10737 (NM_018198.1,1354-1372).
gaatctgtccgaaggataa

SEQ ID NO: 368363 - DNA, 19 bp, Homo sapiens
  siRNA target sequence for FLJ10737 (NM_018198.1,1358-1376).
ctgtccgaaggataattga

SEQ ID NO: 368364 - DNA, 19 bp, Homo sapiens
  siRNA target sequence for FLJ10737 (NM_018198.1,1415-1433).
cctggtacgggaagtttgt

SEQ ID NO: 368365 - DNA, 19 bp, Homo sapiens
  siRNA target sequence for FLJ10737 (NM_018198.1,1418-1436).
ggtacgggaagtttgtcaa

SEQ ID NO: 368366 - DNA, 19 bp, Homo sapiens
  siRNA target sequence for FLJ10737 (NM_018198.1,1588-1606).
ctgaaagtgctctatcagt

SEQ ID NO: 368367 - DNA, 19 bp, Homo sapiens
  siRNA target sequence for FLJ10737 (NM_018198.1,1645-1663).
gaggccctccggataccaa

SEQ ID NO: 368368 - DNA, 19 bp, Homo sapiens
  siRNA target sequence for FLJ10737 (NM_018198.1,1666-1684).
cagtcccacaggatcgata

SEQ ID NO: 368369 - DNA, 19 bp, Homo sapiens
  siRNA target sequence for FLJ10737 (NM_018198.1,1670-1688).
cccacaggatcgatacaga

SEQ ID NO: 368370 - DNA, 19 bp, Homo sapiens
  siRNA target sequence for FLJ10743 (NM_018201.2,34-52).
gcacaagagccgaattgca

SEQ ID NO: 368371 - DNA, 19 bp, Homo sapiens
  siRNA target sequence for FLJ10743 (NM_018201.2,67-85).
cctgaaggagccctcaatt

SEQ ID NO: 368372 - DNA, 19 bp, Homo sapiens
  siRNA target sequence for FLJ10743 (NM_018201.2,76-94).
gccctcaattgcattggaa

SEQ ID NO: 368373 - DNA, 19 bp, Homo sapiens
  siRNA target sequence for FLJ10743 (NM_018201.2,100-118).
gcgggaactcagctttagt

SEQ ID NO: 368374 - DNA, 19 bp, Homo sapiens
  siRNA target sequence for FLJ10743 (NM_018201.2,294-312).
ccagggaggatgtgacttt

SEQ ID NO: 368375 - DNA, 19 bp, Homo sapiens
  siRNA target sequence for FLJ10743 (NM_018201.2,297-315).
gggaggatgtgacttttga

SEQ ID NO: 368376 - DNA, 19 bp, Homo sapiens
  siRNA target sequence for FLJ10743 (NM_018201.2,347-365).
cggtggaacacgtacttca

SEQ ID NO: 368377 - DNA, 19 bp, Homo sapiens
  siRNA target sequence for FLJ10743 (NM_018201.2,348-366).
ggtggaacacgtacttcaa

SEQ ID NO: 368378 - DNA, 19 bp, Homo sapiens
  siRNA target sequence for FLJ10743 (NM_018201.2,382-400).
gctgcagatcgacaaagat

SEQ ID NO: 368379 - DNA, 19 bp, Homo sapiens
  siRNA target sequence for FLJ10743 (NM_018201.2,467-485).
ctggacccccagaatgagt

SEQ ID NO: 368380 - DNA, 19 bp, Homo sapiens
  siRNA target sequence for FLJ10743 (NM_018201.2,472-490).
cccccagaatgagtttgaa

SEQ ID NO: 368381 - DNA, 19 bp, Homo sapiens
  siRNA target sequence for FLJ10743 (NM_018201.2,547-565).
ccggagtggggtcacaaat

SEQ ID NO: 368382 - DNA, 19 bp, Homo sapiens
  siRNA target sequence for FLJ10743 (NM_018201.2,548-566).
cggagtggggtcacaaata

SEQ ID NO: 368383 - DNA, 19 bp, Homo sapiens
  siRNA target sequence for FLJ10743 (NM_018201.2,549-567).
ggagtggggtcacaaatat

SEQ ID NO: 368384 - DNA, 19 bp, Homo sapiens
  siRNA target sequence for FLJ10743 (NM_018201.2,750-768).
ccaccgaccccaatagtga

SEQ ID NO: 368385 - DNA, 19 bp, Homo sapiens
  siRNA target sequence for FLJ10743 (NM_018201.2,822-840).
ccgagatccgggacaactt

SEQ ID NO: 368386 - DNA, 19 bp, Homo sapiens
  siRNA target sequence for FLJ10743 (NM_018201.2,823-841).
cgagatccgggacaacttt

SEQ ID NO: 368387 - DNA, 19 bp, Homo sapiens
  siRNA target sequence for FLJ10743 (NM_018201.2,1205-1223).
gagctccaagactcaaagt

SEQ ID NO: 368388 - DNA, 19 bp, Homo sapiens
  siRNA target sequence for FLJ10747 (NM_018202.2,519-537).
ccattagatttaaagatct

SEQ ID NO: 368389 - DNA, 19 bp, Homo sapiens
  siRNA target sequence for FLJ10747 (NM_018202.2,556-574).
cctttgtcgtccatttgct

SEQ ID NO: 368390 - DNA, 19 bp, Homo sapiens
  siRNA target sequence for FLJ10747 (NM_018202.2,587-605).
gggtaccctgtggtaactt

SEQ ID NO: 368391 - DNA, 19 bp, Homo sapiens
  siRNA target sequence for FLJ10747 (NM_018202.2,588-606).
ggtaccctgtggtaacttt

SEQ ID NO: 368392 - DNA, 19 bp, Homo sapiens
  siRNA target sequence for FLJ10747 (NM_018202.2,607-625).
ggggtttggcttcaaaagt

SEQ ID NO: 368393 - DNA, 19 bp, Homo sapiens
  siRNA target sequence for FLJ10747 (NM_018202.2,608-626).
gggtttggcttcaaaagtt

SEQ ID NO: 368394 - DNA, 19 bp, Homo sapiens
  siRNA target sequence for FLJ10747 (NM_018202.2,609-627).
ggtttggcttcaaaagtta

SEQ ID NO: 368395 - DNA, 19 bp, Homo sapiens
  siRNA target sequence for FLJ10747 (NM_018202.2,614-632).
ggcttcaaaagttacgtaa

SEQ ID NO: 368396 - DNA, 19 bp, Homo sapiens
  siRNA target sequence for FLJ10747 (NM_018202.2,770-788).
ggattacctgatatggatt

SEQ ID NO: 368397 - DNA, 19 bp, Homo sapiens
  siRNA target sequence for FLJ10747 (NM_018202.2,815-833).
ggtatcccagccaacaaaa

SEQ ID NO: 368398 - DNA, 19 bp, Homo sapiens
  siRNA target sequence for FLJ10747 (NM_018202.2,816-834).
gtatcccagccaacaaaaa

SEQ ID NO: 368399 - DNA, 19 bp, Homo sapiens
  siRNA target sequence for FLJ10747 (NM_018202.2,846-864).
ctttgccagagatagaata

SEQ ID NO: 368400 - DNA, 19 bp, Homo sapiens
  siRNA target sequence for FLJ10747 (NM_018202.2,951-969).
ctaaaatacaagagattga

SEQ ID NO: 368401 - DNA, 19 bp, Homo sapiens
  siRNA target sequence for FLJ10747 (NM_018202.2,982-1000).
ccatatcaatagtaaaaga

SEQ ID NO: 368402 - DNA, 19 bp, Homo sapiens
  siRNA target sequence for FLJ10747 (NM_018202.2,983-1001).
catatcaatagtaaaagat

SEQ ID NO: 368403 - DNA, 19 bp, Homo sapiens
  siRNA target sequence for FLJ10747 (NM_018202.2,1194-1212).
gtacacacaaggacttaat

SEQ ID NO: 368404 - DNA, 19 bp, Homo sapiens
  siRNA target sequence for FLJ10747 (NM_018202.2,1365-1383).
gagggatccgctcagaaat

SEQ ID NO: 368405 - DNA, 19 bp, Homo sapiens
  siRNA target sequence for FLJ10747 (NM_018202.2,1414-1432).
gcagaacaagttacataat

SEQ ID NO: 368406 - DNA, 19 bp, Homo sapiens
  siRNA target sequence for FLJ10747 (NM_018202.2,1433-1451).
gctgtgcaaatgaagcaaa

SEQ ID NO: 368407 - DNA, 19 bp, Homo sapiens
  siRNA target sequence for FLJ10747 (NM_018202.2,1434-1452).
ctgtgcaaatgaagcaaaa

SEQ ID NO: 368408 - DNA, 19 bp, Homo sapiens
  siRNA target sequence for FLJ10747 (NM_018202.2,1498-1516).
gcaggaagcccgaagtttt

SEQ ID NO: 368409 - DNA, 19 bp, Homo sapiens
  siRNA target sequence for FLJ10747 (NM_018202.2,1501-1519).
ggaagcccgaagttttgta

SEQ ID NO: 368410 - DNA, 19 bp, Homo sapiens
  siRNA target sequence for FLJ10747 (NM_018202.2,1506-1524).
cccgaagttttgtagagaa

SEQ ID NO: 368411 - DNA, 19 bp, Homo sapiens
  siRNA target sequence for FLJ10747 (NM_018202.2,1630-1648).
gaatcggatcagagaacta

SEQ ID NO: 368412 - DNA, 19 bp, Homo sapiens
  siRNA target sequence for FLJ10747 (NM_018202.2,1723-1741).
ccaggagcttcggaaatat

SEQ ID NO: 368413 - DNA, 19 bp, Homo sapiens
  siRNA target sequence for FLJ10747 (NM_018202.2,1860-1878).
ccgcactgggcgatgcaaa

SEQ ID NO: 368414 - DNA, 19 bp, Homo sapiens
  siRNA target sequence for FLJ10747 (NM_018202.2,1964-1982).
gccgtcatgcccagcataa

SEQ ID NO: 368415 - DNA, 19 bp, Homo sapiens
  siRNA target sequence for FLJ10747 (NM_018202.2,1972-1990).
gcccagcataacatacagt

SEQ ID NO: 368416 - DNA, 19 bp, Homo sapiens
  siRNA target sequence for FLJ10747 (NM_018202.2,2021-2039).
ccccactactcttccaaat

SEQ ID NO: 368417 - DNA, 19 bp, Homo sapiens
  siRNA target sequence for FLJ10747 (NM_018202.2,2022-2040).
cccactactcttccaaatt

SEQ ID NO: 368418 - DNA, 19 bp, Homo sapiens
  siRNA target sequence for FLJ10747 (NM_018202.2,2023-2041).
ccactactcttccaaattt

SEQ ID NO: 368419 - DNA, 19 bp, Homo sapiens
  siRNA target sequence for FLJ10748 (NM_018203.1,930-948).
ctgtcacggccaaagatta

SEQ ID NO: 368420 - DNA, 19 bp, Homo sapiens
  siRNA target sequence for FLJ10748 (NM_018203.1,1082-1100).
ctccgaggctccaagatct

SEQ ID NO: 368421 - DNA, 19 bp, Homo sapiens
  siRNA target sequence for FLJ10748 (NM_018203.1,1174-1192).
gaccaagtttcccaacatt

SEQ ID NO: 368422 - DNA, 19 bp, Homo sapiens
  siRNA target sequence for FLJ10748 (NM_018203.1,1224-1242).
ccctggacaaccacttgta

SEQ ID NO: 368423 - DNA, 19 bp, Homo sapiens
  siRNA target sequence for FLJ10748 (NM_018203.1,1347-1365).
gatcgttcttcctcaagaa

SEQ ID NO: 368424 - DNA, 19 bp, Homo sapiens
  siRNA target sequence for FLJ10748 (NM_018203.1,1527-1545).
ccagcatagtcgtcaagaa

SEQ ID NO: 368425 - DNA, 19 bp, Homo sapiens
  siRNA target sequence for CKAP2 (NM_018204.2,146-164).
gggcgcagtccgcattcaa

SEQ ID NO: 368426 - DNA, 19 bp, Homo sapiens
  siRNA target sequence for CKAP2 (NM_018204.2,147-165).
ggcgcagtccgcattcaaa

SEQ ID NO: 368427 - DNA, 19 bp, Homo sapiens
  siRNA target sequence for CKAP2 (NM_018204.2,149-167).
cgcagtccgcattcaaaga

SEQ ID NO: 368428 - DNA, 19 bp, Homo sapiens
  siRNA target sequence for CKAP2 (NM_018204.2,193-211).
catctgttgagaagaaaaa

SEQ ID NO: 368429 - DNA, 19 bp, Homo sapiens
  siRNA target sequence for CKAP2 (NM_018204.2,228-246).
gcaggaaaatgagatgtta

SEQ ID NO: 368430 - DNA, 19 bp, Homo sapiens
  siRNA target sequence for CKAP2 (NM_018204.2,297-315).
gactaaagtgctgaaactt

SEQ ID NO: 368431 - DNA, 19 bp, Homo sapiens
  siRNA target sequence for CKAP2 (NM_018204.2,381-399).
ggggaaacattgtattcct

SEQ ID NO: 368432 - DNA, 19 bp, Homo sapiens
  siRNA target sequence for CKAP2 (NM_018204.2,422-440).
ccaattcaactgtagtaat

SEQ ID NO: 368433 - DNA, 19 bp, Homo sapiens
  siRNA target sequence for CKAP2 (NM_018204.2,423-441).
caattcaactgtagtaatt

SEQ ID NO: 368434 - DNA, 19 bp, Homo sapiens
  siRNA target sequence for CKAP2 (NM_018204.2,448-466).
cataaacctaaggatagta

SEQ ID NO: 368435 - DNA, 19 bp, Homo sapiens
  siRNA target sequence for CKAP2 (NM_018204.2,454-472).
cctaaggatagtaatcaaa

SEQ ID NO: 368436 - DNA, 19 bp, Homo sapiens
  siRNA target sequence for CKAP2 (NM_018204.2,476-494).
cgcatttgttactaactga

SEQ ID NO: 368437 - DNA, 19 bp, Homo sapiens
  siRNA target sequence for CKAP2 (NM_018204.2,483-501).
gttactaactgaagatgat

SEQ ID NO: 368438 - DNA, 19 bp, Homo sapiens
  siRNA target sequence for CKAP2 (NM_018204.2,502-520).
ccccaaagtcaacatatga

SEQ ID NO: 368439 - DNA, 19 bp, Homo sapiens
  siRNA target sequence for CKAP2 (NM_018204.2,528-546).
ccaggcatttcaccttaaa

SEQ ID NO: 368440 - DNA, 19 bp, Homo sapiens
  siRNA target sequence for CKAP2 (NM_018204.2,538-556).
caccttaaaaacaatagta

SEQ ID NO: 368441 - DNA, 19 bp, Homo sapiens
  siRNA target sequence for CKAP2 (NM_018204.2,626-644).
cttatcgtggccagattgt

SEQ ID NO: 368442 - DNA, 19 bp, Homo sapiens
  siRNA target sequence for CKAP2 (NM_018204.2,643-661).
gttcagtctaagattaatt

SEQ ID NO: 368443 - DNA, 19 bp, Homo sapiens
  siRNA target sequence for CKAP2 (NM_018204.2,668-686).
gaaaacctctacaagtcaa

SEQ ID NO: 368444 - DNA, 19 bp, Homo sapiens
  siRNA target sequence for CKAP2 (NM_018204.2,715-733).
ctttcagccactataccta

SEQ ID NO: 368445 - DNA, 19 bp, Homo sapiens
  siRNA target sequence for CKAP2 (NM_018204.2,782-800).
gtaatagatcctccaatat

SEQ ID NO: 368446 - DNA, 19 bp, Homo sapiens
  siRNA target sequence for CKAP2 (NM_018204.2,801-819).
gactgccactactaaattt

SEQ ID NO: 368447 - DNA, 19 bp, Homo sapiens
  siRNA target sequence for CKAP2 (NM_018204.2,803-821).
ctgccactactaaatttgt

SEQ ID NO: 368448 - DNA, 19 bp, Homo sapiens
  siRNA target sequence for CKAP2 (NM_018204.2,847-865).
cttgtgcgacctcctatta

SEQ ID NO: 368449 - DNA, 19 bp, Homo sapiens
  siRNA target sequence for CKAP2 (NM_018204.2,850-868).
gtgcgacctcctattagaa

SEQ ID NO: 368450 - DNA, 19 bp, Homo sapiens
  siRNA target sequence for CKAP2 (NM_018204.2,852-870).
gcgacctcctattagaagt

SEQ ID NO: 368451 - DNA, 19 bp, Homo sapiens
  siRNA target sequence for CKAP2 (NM_018204.2,884-902).
cccgggacactgtgaaaca

SEQ ID NO: 368452 - DNA, 19 bp, Homo sapiens
  siRNA target sequence for CKAP2 (NM_018204.2,885-903).
ccgggacactgtgaaacaa

SEQ ID NO: 368453 - DNA, 19 bp, Homo sapiens
  siRNA target sequence for CKAP2 (NM_018204.2,1001-1019).
gttcttctcaaggtataat

SEQ ID NO: 368454 - DNA, 19 bp, Homo sapiens
  siRNA target sequence for CKAP2 (NM_018204.2,1029-1047).
gactctatcaagatccata

SEQ ID NO: 368455 - DNA, 19 bp, Homo sapiens
  siRNA target sequence for CKAP2 (NM_018204.2,1033-1051).
ctatcaagatccatagcat

SEQ ID NO: 368456 - DNA, 19 bp, Homo sapiens
  siRNA target sequence for CKAP2 (NM_018204.2,1076-1094).
cattgtctaatgataaact

SEQ ID NO: 368457 - DNA, 19 bp, Homo sapiens
  siRNA target sequence for CKAP2 (NM_018204.2,1144-1162).
gcaattgttgatagtagat

SEQ ID NO: 368458 - DNA, 19 bp, Homo sapiens
  siRNA target sequence for CKAP2 (NM_018204.2,1314-1332).
gactaccatggcagaagaa

SEQ ID NO: 368459 - DNA, 19 bp, Homo sapiens
  siRNA target sequence for CKAP2 (NM_018204.2,1376-1394).
ctgaatgcctgaacttgat

SEQ ID NO: 368460 - DNA, 19 bp, Homo sapiens
  siRNA target sequence for CKAP2 (NM_018204.2,1406-1424).
gtccaaaagaagatatact

SEQ ID NO: 368461 - DNA, 19 bp, Homo sapiens
  siRNA target sequence for CKAP2 (NM_018204.2,1434-1452).
gaatgacctgattaaaaat

SEQ ID NO: 368462 - DNA, 19 bp, Homo sapiens
  siRNA target sequence for CKAP2 (NM_018204.2,1462-1480).
gccaaaaagcttgttaagt

SEQ ID NO: 368463 - DNA, 19 bp, Homo sapiens
  siRNA target sequence for CKAP2 (NM_018204.2,1470-1488).
gcttgttaagtattggata

SEQ ID NO: 368464 - DNA, 19 bp, Homo sapiens
  siRNA target sequence for CKAP2 (NM_018204.2,1471-1489).
cttgttaagtattggatat

SEQ ID NO: 368465 - DNA, 19 bp, Homo sapiens
  siRNA target sequence for CKAP2 (NM_018204.2,1484-1502).
ggatatgtcttgcacttat

SEQ ID NO: 368466 - DNA, 19 bp, Homo sapiens
  siRNA target sequence for CKAP2 (NM_018204.2,1498-1516).
cttattgaaccaatcacaa

SEQ ID NO: 368467 - DNA, 19 bp, Homo sapiens
  siRNA target sequence for CKAP2 (NM_018204.2,1508-1526).
caatcacaagtcctattga

SEQ ID NO: 368468 - DNA, 19 bp, Homo sapiens
  siRNA target sequence for CKAP2 (NM_018204.2,1584-1602).
gatgcgacacacgattgta

SEQ ID NO: 368469 - DNA, 19 bp, Homo sapiens
  siRNA target sequence for CKAP2 (NM_018204.2,1588-1606).
cgacacacgattgtagata

SEQ ID NO: 368470 - DNA, 19 bp, Homo sapiens
  siRNA target sequence for CKAP2 (NM_018204.2,1589-1607).
gacacacgattgtagatat

SEQ ID NO: 368471 - DNA, 19 bp, Homo sapiens
  siRNA target sequence for CKAP2 (NM_018204.2,1845-1863).
gaggacaagttgcttaatt

SEQ ID NO: 368472 - DNA, 19 bp, Homo sapiens
  siRNA target sequence for CKAP2 (NM_018204.2,1847-1865).
ggacaagttgcttaattaa

SEQ ID NO: 368473 - DNA, 19 bp, Homo sapiens
  siRNA target sequence for CKAP2 (NM_018204.2,1848-1866).
gacaagttgcttaattaaa

SEQ ID NO: 368474 - DNA, 19 bp, Homo sapiens
  siRNA target sequence for CKAP2 (NM_018204.2,1973-1991).
gttctcgacgtcttcaaga

SEQ ID NO: 368475 - DNA, 19 bp, Homo sapiens
  siRNA target sequence for CKAP2 (NM_018204.2,1976-1994).
ctcgacgtcttcaagagaa

SEQ ID NO: 368476 - DNA, 19 bp, Homo sapiens
  siRNA target sequence for CKAP2 (NM_018204.2,2016-2034).
gttaaaagatcattatcct

SEQ ID NO: 368477 - DNA, 19 bp, Homo sapiens
  siRNA target sequence for CKAP2 (NM_018204.2,2121-2139).
gtactatgaggctgataca

SEQ ID NO: 368478 - DNA, 19 bp, Homo sapiens
  siRNA target sequence for CKAP2 (NM_018204.2,2124-2142).
ctatgaggctgatacaaca

SEQ ID NO: 368479 - DNA, 19 bp, Homo sapiens
  siRNA target sequence for FLJ10751 (NM_018205.1,313-331).
gctaacaacgagcttaagt

SEQ ID NO: 368480 - DNA, 19 bp, Homo sapiens
  siRNA target sequence for ENAH (NM_018212.2,449-467).
gattcagcagagttcatat

SEQ ID NO: 368481 - DNA, 19 bp, Homo sapiens
  siRNA target sequence for ENAH (NM_018212.2,455-473).
gcagagttcatatctatca

SEQ ID NO: 368482 - DNA, 19 bp, Homo sapiens
  siRNA target sequence for ENAH (NM_018212.2,475-493).
catacaggcaacaacacat

SEQ ID NO: 368483 - DNA, 19 bp, Homo sapiens
  siRNA target sequence for ENAH (NM_018212.2,520-538).
gaccatcaggtcgtgataa

SEQ ID NO: 368484 - DNA, 19 bp, Homo sapiens
  siRNA target sequence for ENAH (NM_018212.2,523-541).
catcaggtcgtgataaact

SEQ ID NO: 368485 - DNA, 19 bp, Homo sapiens
  siRNA target sequence for ENAH (NM_018212.2,550-568).
cctaaagggttgaagtaca

SEQ ID NO: 368486 - DNA, 19 bp, Homo sapiens
  siRNA target sequence for ENAH (NM_018212.2,672-690).
gcatgccttagaagtgtta

SEQ ID NO: 368487 - DNA, 19 bp, Homo sapiens
  siRNA target sequence for ENAH (NM_018212.2,678-696).
cttagaagtgttaaattca

SEQ ID NO: 368488 - DNA, 19 bp, Homo sapiens
  siRNA target sequence for ENAH (NM_018212.2,836-854).
ggctggagcgagaaagaat

SEQ ID NO: 368489 - DNA, 19 bp, Homo sapiens
  siRNA target sequence for ENAH (NM_018212.2,851-869).
gaatggaaagagaaaggtt

SEQ ID NO: 368490 - DNA, 19 bp, Homo sapiens
  siRNA target sequence for ENAH (NM_018212.2,1095-1113).
gcgacaagagcagttagaa

SEQ ID NO: 368491 - DNA, 19 bp, Homo sapiens
  siRNA target sequence for ENAH (NM_018212.2,1096-1114).
cgacaagagcagttagaaa

SEQ ID NO: 368492 - DNA, 19 bp, Homo sapiens
  siRNA target sequence for ENAH (NM_018212.2,1132-1150).
gagagagagcgcagaatat

SEQ ID NO: 368493 - DNA, 19 bp, Homo sapiens
  siRNA target sequence for ENAH (NM_018212.2,1172-1190).
ctgttgagactcctctaaa

SEQ ID NO: 368494 - DNA, 19 bp, Homo sapiens
  siRNA target sequence for ENAH (NM_018212.2,1174-1192).
gttgagactcctctaaact

SEQ ID NO: 368495 - DNA, 19 bp, Homo sapiens
  siRNA target sequence for ENAH (NM_018212.2,1507-1525).
gaagacaatcgccctttaa

SEQ ID NO: 368496 - DNA, 19 bp, Homo sapiens
  siRNA target sequence for ENAH (NM_018212.2,1548-1566).
cggagcaaaacttaggaaa

SEQ ID NO: 368497 - DNA, 19 bp, Homo sapiens
  siRNA target sequence for ENAH (NM_018212.2,1594-1612).
ccaagtggagggaatgcta

SEQ ID NO: 368498 - DNA, 19 bp, Homo sapiens
  siRNA target sequence for ENAH (NM_018212.2,1595-1613).
caagtggagggaatgctat

SEQ ID NO: 368499 - DNA, 19 bp, Homo sapiens
  siRNA target sequence for ENAH (NM_018212.2,1618-1636).
gtgaactccgcctcatcta

SEQ ID NO: 368500 - DNA, 19 bp, Homo sapiens
  siRNA target sequence for ENAH (NM_018212.2,1625-1643).
ccgcctcatctaaaacaga

SEQ ID NO: 368501 - DNA, 19 bp, Homo sapiens
  siRNA target sequence for ENAH (NM_018212.2,1676-1694).
ggggtagtggtttaatgga

SEQ ID NO: 368502 - DNA, 19 bp, Homo sapiens
  siRNA target sequence for ENAH (NM_018212.2,1677-1695).
gggtagtggtttaatggaa

SEQ ID NO: 368503 - DNA, 19 bp, Homo sapiens
  siRNA target sequence for ENAH (NM_018212.2,1787-1805).
cagagcctgtaacttctaa

SEQ ID NO: 368504 - DNA, 19 bp, Homo sapiens
  siRNA target sequence for ENAH (NM_018212.2,1823-1841).
cacctgaaccaacaagaaa

SEQ ID NO: 368505 - DNA, 19 bp, Homo sapiens
  siRNA target sequence for ENAH (NM_018212.2,1885-1903).
gttatctccagaccaaaat

SEQ ID NO: 368506 - DNA, 19 bp, Homo sapiens
  siRNA target sequence for ENAH (NM_018212.2,1943-1961).
cggaaggacttgactatga

SEQ ID NO: 368507 - DNA, 19 bp, Homo sapiens
  siRNA target sequence for LRRC1 (NM_018214.3,789-807).
gagctgcccgagcaatttt

SEQ ID NO: 368508 - DNA, 19 bp, Homo sapiens
  siRNA target sequence for LRRC1 (NM_018214.3,809-827).
ccagctagtcaaattacga

SEQ ID NO: 368509 - DNA, 19 bp, Homo sapiens
  siRNA target sequence for LRRC1 (NM_018214.3,810-828).
cagctagtcaaattacgaa

SEQ ID NO: 368510 - DNA, 19 bp, Homo sapiens
  siRNA target sequence for LRRC1 (NM_018214.3,830-848).
gcttggacttagtgataat

SEQ ID NO: 368511 - DNA, 19 bp, Homo sapiens
  siRNA target sequence for LRRC1 (NM_018214.3,834-852).
ggacttagtgataatgaaa

SEQ ID NO: 368512 - DNA, 19 bp, Homo sapiens
  siRNA target sequence for LRRC1 (NM_018214.3,861-879).
ctccctccagaaatagcaa

SEQ ID NO: 368513 - DNA, 19 bp, Homo sapiens
  siRNA target sequence for LRRC1 (NM_018214.3,887-905).
gcagctggtggaactagat

SEQ ID NO: 368514 - DNA, 19 bp, Homo sapiens
  siRNA target sequence for LRRC1 (NM_018214.3,1160-1178).
gcgaagactagaagaactt

SEQ ID NO: 368515 - DNA, 19 bp, Homo sapiens
  siRNA target sequence for LRRC1 (NM_018214.3,1170-1188).
gaagaacttgatttaggaa

SEQ ID NO: 368516 - DNA, 19 bp, Homo sapiens
  siRNA target sequence for FLJ10781 (NM_018215.2,418-436).
cgtaccgcgtgctcaacaa

SEQ ID NO: 368517 - DNA, 19 bp, Homo sapiens
  siRNA target sequence for FLJ10781 (NM_018215.2,422-440).
ccgcgtgctcaacaagatt

SEQ ID NO: 368518 - DNA, 19 bp, Homo sapiens
  siRNA target sequence for FLJ10781 (NM_018215.2,423-441).
cgcgtgctcaacaagattt

SEQ ID NO: 368519 - DNA, 19 bp, Homo sapiens
  siRNA target sequence for FLJ10781 (NM_018215.2,425-443).
cgtgctcaacaagattttt

SEQ ID NO: 368520 - DNA, 19 bp, Homo sapiens
  siRNA target sequence for FLJ10781 (NM_018215.2,444-462).
gtgagggaagagaatgtta

SEQ ID NO: 368521 - DNA, 19 bp, Homo sapiens
  siRNA target sequence for FLJ10781 (NM_018215.2,479-497).
ggttggtgaaggtgtgaat

SEQ ID NO: 368522 - DNA, 19 bp, Homo sapiens
  siRNA target sequence for FLJ10781 (NM_018215.2,483-501).
ggtgaaggtgtgaatctga

SEQ ID NO: 368523 - DNA, 19 bp, Homo sapiens
  siRNA target sequence for FLJ10781 (NM_018215.2,502-520).
gcaccatcccccgtgaatt

SEQ ID NO: 368524 - DNA, 19 bp, Homo sapiens
  siRNA target sequence for FLJ10781 (NM_018215.2,569-587).
ggatgccgagtttttaaaa

SEQ ID NO: 368525 - DNA, 19 bp, Homo sapiens
  siRNA target sequence for FLJ10781 (NM_018215.2,727-745).
gagcagtggtgcagatcat

SEQ ID NO: 368526 - DNA, 19 bp, Homo sapiens
  siRNA target sequence for FLJ10781 (NM_018215.2,729-747).
gcagtggtgcagatcatct

SEQ ID NO: 368527 - DNA, 19 bp, Homo sapiens
  siRNA target sequence for FLJ10781 (NM_018215.2,730-748).
cagtggtgcagatcatctt

SEQ ID NO: 368528 - DNA, 19 bp, Homo sapiens
  siRNA target sequence for FLJ10781 (NM_018215.2,790-808).
cccaggaggccgctgaatt

SEQ ID NO: 368529 - DNA, 19 bp, Homo sapiens
  siRNA target sequence for FLJ10781 (NM_018215.2,932-950).
ccagcatgagcctaccaaa

SEQ ID NO: 368530 - DNA, 19 bp, Homo sapiens
  siRNA target sequence for FLJ10781 (NM_018215.2,979-997).
ctcgctccaggagaaagaa

SEQ ID NO: 368531 - DNA, 19 bp, Homo sapiens
  siRNA target sequence for FLJ10781 (NM_018215.2,1418-1436).
gccggtgatgccaaagaaa

SEQ ID NO: 368532 - DNA, 19 bp, Homo sapiens
  siRNA target sequence for FLJ10781 (NM_018215.2,1551-1569).
cggcgtgccaccaatgaat

SEQ ID NO: 368533 - DNA, 19 bp, Homo sapiens
  siRNA target sequence for FLJ10786 (NM_018219.1,74-92).
ctgagctccagcggtttta

SEQ ID NO: 368534 - DNA, 19 bp, Homo sapiens
  siRNA target sequence for FLJ10786 (NM_018219.1,352-370).
cttagtctgagccacaaaa

SEQ ID NO: 368535 - DNA, 19 bp, Homo sapiens
  siRNA target sequence for FLJ10786 (NM_018219.1,474-492).
gggggtcttcactgaatca

SEQ ID NO: 368536 - DNA, 19 bp, Homo sapiens
  siRNA target sequence for FLJ10786 (NM_018219.1,747-765).
cagccgtccaccagagttt

SEQ ID NO: 368537 - DNA, 19 bp, Homo sapiens
  siRNA target sequence for FLJ10786 (NM_018219.1,749-767).
gccgtccaccagagtttct

SEQ ID NO: 368538 - DNA, 19 bp, Homo sapiens
  siRNA target sequence for FLJ10786 (NM_018219.1,751-769).
cgtccaccagagtttctca

SEQ ID NO: 368539 - DNA, 19 bp, Homo sapiens
  siRNA target sequence for FLJ10786 (NM_018219.1,787-805).
gatccagtgaaggaattga

SEQ ID NO: 368540 - DNA, 19 bp, Homo sapiens
  siRNA target sequence for FLJ10786 (NM_018219.1,845-863).
ggctgccctccataggaaa

SEQ ID NO: 368541 - DNA, 19 bp, Homo sapiens
  siRNA target sequence for FLJ10786 (NM_018219.1,1324-1342).
ccacagccagtgaccatta

SEQ ID NO: 368542 - DNA, 19 bp, Homo sapiens
  siRNA target sequence for FLJ10786 (NM_018219.1,1381-1399).
gccgtacgggtctctgata

SEQ ID NO: 368543 - DNA, 19 bp, Homo sapiens
  siRNA target sequence for FLJ10786 (NM_018219.1,1383-1401).
cgtacgggtctctgataga

SEQ ID NO: 368544 - DNA, 19 bp, Homo sapiens
  siRNA target sequence for FLJ10786 (NM_018219.1,1384-1402).
gtacgggtctctgatagaa

SEQ ID NO: 368545 - DNA, 19 bp, Homo sapiens
  siRNA target sequence for FLJ10786 (NM_018219.1,1388-1406).
gggtctctgatagaaactt

SEQ ID NO: 368546 - DNA, 19 bp, Homo sapiens
  siRNA target sequence for FLJ10786 (NM_018219.1,1392-1410).
ctctgatagaaacttctta

SEQ ID NO: 368547 - DNA, 19 bp, Homo sapiens
  siRNA target sequence for FLJ10786 (NM_018219.1,1394-1412).
ctgatagaaacttcttaga

SEQ ID NO: 368548 - DNA, 19 bp, Homo sapiens
  siRNA target sequence for FLJ10786 (NM_018219.1,1433-1451).
ccggagccctgtataacca

SEQ ID NO: 368549 - DNA, 19 bp, Homo sapiens
  siRNA target sequence for FLJ10786 (NM_018219.1,1491-1509).
ggatattgataactttgtt

SEQ ID NO: 368550 - DNA, 19 bp, Homo sapiens
  siRNA target sequence for FLJ10786 (NM_018219.1,1517-1535).
ctaccagggaggtctacaa

SEQ ID NO: 368551 - DNA, 19 bp, Homo sapiens
  siRNA target sequence for FLJ10786 (NM_018219.1,1559-1577).
ctgaccacttacattttga

SEQ ID NO: 368552 - DNA, 19 bp, Homo sapiens
  siRNA target sequence for FLJ10786 (NM_018219.1,1563-1581).
ccacttacattttgatcaa

SEQ ID NO: 368553 - DNA, 19 bp, Homo sapiens
  siRNA target sequence for FLJ10786 (NM_018219.1,1597-1615).
cctgcagcagataaagact

SEQ ID NO: 368554 - DNA, 19 bp, Homo sapiens
  siRNA target sequence for FLJ10786 (NM_018219.1,1678-1696).
gagctggttggactttact

SEQ ID NO: 368555 - DNA, 19 bp, Homo sapiens
  siRNA target sequence for FLJ10786 (NM_018219.1,1717-1735).
cagtccaatactaagaaga

SEQ ID NO: 368556 - DNA, 19 bp, Homo sapiens
  siRNA target sequence for FLJ10786 (NM_018219.1,1828-1846).
gtggatgactacttcaagt

SEQ ID NO: 368557 - DNA, 19 bp, Homo sapiens
  siRNA target sequence for FLJ10786 (NM_018219.1,1848-1866).
cctcaccaaccatgaaaca

SEQ ID NO: 368558 - DNA, 19 bp, Homo sapiens
  siRNA target sequence for FLJ10786 (NM_018219.1,1931-1949).
ccagagagtccctagagat

SEQ ID NO: 368559 - DNA, 19 bp, Homo sapiens
  siRNA target sequence for FLJ10786 (NM_018219.1,1934-1952).
gagagtccctagagattca

SEQ ID NO: 368560 - DNA, 19 bp, Homo sapiens
  siRNA target sequence for FLJ10786 (NM_018219.1,1961-1979).
ccccattgctagaagatga

SEQ ID NO: 368561 - DNA, 19 bp, Homo sapiens
  siRNA target sequence for FLJ10786 (NM_018219.1,2140-2158).
caggtggacatgaccatta

SEQ ID NO: 368562 - DNA, 19 bp, Homo sapiens
  siRNA target sequence for FLJ10786 (NM_018219.1,2369-2387).
ggaagctcaacttaatgga

SEQ ID NO: 368563 - DNA, 19 bp, Homo sapiens
  siRNA target sequence for FLJ10786 (NM_018219.1,2410-2428).
gaggagatagagttaatct

SEQ ID NO: 368564 - DNA, 19 bp, Homo sapiens
  siRNA target sequence for C2orf6 (NM_018221.1,198-216).
cagcagccgctcttctaaa

SEQ ID NO: 368565 - DNA, 19 bp, Homo sapiens
  siRNA target sequence for C2orf6 (NM_018221.1,201-219).
cagccgctcttctaaaaca

SEQ ID NO: 368566 - DNA, 19 bp, Homo sapiens
  siRNA target sequence for C2orf6 (NM_018221.1,248-266).
gatctcatcagtatgaact

SEQ ID NO: 368567 - DNA, 19 bp, Homo sapiens
  siRNA target sequence for C2orf6 (NM_018221.1,289-307).
ctaggaagtgggaatctga

SEQ ID NO: 368568 - DNA, 19 bp, Homo sapiens
  siRNA target sequence for C2orf6 (NM_018221.1,381-399).
ccagatcaacatgttatat

SEQ ID NO: 368569 - DNA, 19 bp, Homo sapiens
  siRNA target sequence for C2orf6 (NM_018221.1,444-462).
gtctgcaggtccgagatat

SEQ ID NO: 368570 - DNA, 19 bp, Homo sapiens
  siRNA target sequence for C2orf6 (NM_018221.1,449-467).
caggtccgagatatgaata

SEQ ID NO: 368571 - DNA, 19 bp, Homo sapiens
  siRNA target sequence for C2orf6 (NM_018221.1,454-472).
ccgagatatgaatatcact

SEQ ID NO: 368572 - DNA, 19 bp, Homo sapiens
  siRNA target sequence for C2orf6 (NM_018221.1,475-493).
gcagatggtactaatatta

SEQ ID NO: 368573 - DNA, 19 bp, Homo sapiens
  siRNA target sequence for C2orf6 (NM_018221.1,553-571).
gatcagcttgatgatgaaa

SEQ ID NO: 368574 - DNA, 19 bp, Homo sapiens
  siRNA target sequence for C2orf6 (NM_018221.1,559-577).
cttgatgatgaaactcttt

SEQ ID NO: 368575 - DNA, 19 bp, Homo sapiens
  siRNA target sequence for C2orf6 (NM_018221.1,791-809).
ctcttcaagaattaataga

SEQ ID NO: 368576 - DNA, 19 bp, Homo sapiens
  siRNA target sequence for FLJ10803 (NM_018224.1,282-300).
gtgtattacctcattcaaa

SEQ ID NO: 368577 - DNA, 19 bp, Homo sapiens
  siRNA target sequence for FLJ10803 (NM_018224.1,290-308).
cctcattcaaaagtttcat

SEQ ID NO: 368578 - DNA, 19 bp, Homo sapiens
  siRNA target sequence for FLJ10803 (NM_018224.1,291-309).
ctcattcaaaagtttcatt

SEQ ID NO: 368579 - DNA, 19 bp, Homo sapiens
  siRNA target sequence for FLJ10803 (NM_018224.1,306-324).
cattccagggctttatatt

SEQ ID NO: 368580 - DNA, 19 bp, Homo sapiens
  siRNA target sequence for FLJ10803 (NM_018224.1,310-328).
ccagggctttatattacaa

SEQ ID NO: 368581 - DNA, 19 bp, Homo sapiens
  siRNA target sequence for FLJ10803 (NM_018224.1,408-426).
ctcatcgacagggaaaact

SEQ ID NO: 368582 - DNA, 19 bp, Homo sapiens
  siRNA target sequence for FLJ10803 (NM_018224.1,533-551).
ccttgacgaggtcttttta

SEQ ID NO: 368583 - DNA, 19 bp, Homo sapiens
  siRNA target sequence for FLJ10803 (NM_018224.1,595-613).
gggaaaacggtgatgaagt

SEQ ID NO: 368584 - DNA, 19 bp, Homo sapiens
  siRNA target sequence for SMU-1 (NM_018225.1,62-80).
ggatgtgatccgccttatt

SEQ ID NO: 368585 - DNA, 19 bp, Homo sapiens
  siRNA target sequence for SMU-1 (NM_018225.1,63-81).
gatgtgatccgccttatta

SEQ ID NO: 368586 - DNA, 19 bp, Homo sapiens
  siRNA target sequence for SMU-1 (NM_018225.1,73-91).
gccttattatgcagtactt

SEQ ID NO: 368587 - DNA, 19 bp, Homo sapiens
  siRNA target sequence for SMU-1 (NM_018225.1,92-110).
gaaggagaacagtttacat

SEQ ID NO: 368588 - DNA, 19 bp, Homo sapiens
  siRNA target sequence for SMU-1 (NM_018225.1,175-193).
gttttgtggctgacattaa

SEQ ID NO: 368589 - DNA, 19 bp, Homo sapiens
  siRNA target sequence for SMU-1 (NM_018225.1,275-293).
ggttgttctggaattgata

SEQ ID NO: 368590 - DNA, 19 bp, Homo sapiens
  siRNA target sequence for SMU-1 (NM_018225.1,312-330).
gctgccaggtcacttttga

SEQ ID NO: 368591 - DNA, 19 bp, Homo sapiens
  siRNA target sequence for SMU-1 (NM_018225.1,333-351).
cagactgatcccatgatca

SEQ ID NO: 368592 - DNA, 19 bp, Homo sapiens
  siRNA target sequence for SMU-1 (NM_018225.1,337-355).
ctgatcccatgatcatgtt

SEQ ID NO: 368593 - DNA, 19 bp, Homo sapiens
  siRNA target sequence for SMU-1 (NM_018225.1,343-361).
ccatgatcatgttaaaaca

SEQ ID NO: 368594 - DNA, 19 bp, Homo sapiens
  siRNA target sequence for SMU-1 (NM_018225.1,364-382).
cacagccagagcgatatat

SEQ ID NO: 368595 - DNA, 19 bp, Homo sapiens
  siRNA target sequence for SMU-1 (NM_018225.1,370-388).
cagagcgatatattcatct

SEQ ID NO: 368596 - DNA, 19 bp, Homo sapiens
  siRNA target sequence for SMU-1 (NM_018225.1,554-572).
gcagcatcagggattgctt

SEQ ID NO: 368597 - DNA, 19 bp, Homo sapiens
  siRNA target sequence for SMU-1 (NM_018225.1,579-597).
ggtatgaccatagatttgt

SEQ ID NO: 368598 - DNA, 19 bp, Homo sapiens
  siRNA target sequence for SMU-1 (NM_018225.1,651-669).
ctgagcaggcatattaagt

SEQ ID NO: 368599 - DNA, 19 bp, Homo sapiens
  siRNA target sequence for SMU-1 (NM_018225.1,687-705).
gtggagtgtgctcgatttt

SEQ ID NO: 368600 - DNA, 19 bp, Homo sapiens
  siRNA target sequence for SMU-1 (NM_018225.1,689-707).
ggagtgtgctcgattttct

SEQ ID NO: 368601 - DNA, 19 bp, Homo sapiens
  siRNA target sequence for FLJ10808 (NM_018227.3,82-100).
gggactggcagcacaaata

SEQ ID NO: 368602 - DNA, 19 bp, Homo sapiens
  siRNA target sequence for FLJ10808 (NM_018227.3,83-101).
ggactggcagcacaaataa

SEQ ID NO: 368603 - DNA, 19 bp, Homo sapiens
  siRNA target sequence for FLJ10808 (NM_018227.3,138-156).
cgatgatgcattgtatagt

SEQ ID NO: 368604 - DNA, 19 bp, Homo sapiens
  siRNA target sequence for FLJ10808 (NM_018227.3,204-222).
gtcccatgttttcttaagt

SEQ ID NO: 368605 - DNA, 19 bp, Homo sapiens
  siRNA target sequence for FLJ10808 (NM_018227.3,271-289).
gggattaaggcagttacaa

SEQ ID NO: 368606 - DNA, 19 bp, Homo sapiens
  siRNA target sequence for FLJ10808 (NM_018227.3,272-290).
ggattaaggcagttacaat

SEQ ID NO: 368607 - DNA, 19 bp, Homo sapiens
  siRNA target sequence for FLJ10808 (NM_018227.3,273-291).
gattaaggcagttacaatt

SEQ ID NO: 368608 - DNA, 19 bp, Homo sapiens
  siRNA target sequence for FLJ10808 (NM_018227.3,379-397).
gaagctgtacttaaacata

SEQ ID NO: 368609 - DNA, 19 bp, Homo sapiens
  siRNA target sequence for FLJ10808 (NM_018227.3,467-485).
cctttttagataaatacca

SEQ ID NO: 368610 - DNA, 19 bp, Homo sapiens
  siRNA target sequence for FLJ10808 (NM_018227.3,483-501).
ccagtgtgtagtattgact

SEQ ID NO: 368611 - DNA, 19 bp, Homo sapiens
  siRNA target sequence for FLJ10808 (NM_018227.3,550-568).
cagtgccctccaattaagt

SEQ ID NO: 368612 - DNA, 19 bp, Homo sapiens
  siRNA target sequence for FLJ10808 (NM_018227.3,567-585).
gtttatcagtgcagatgta

SEQ ID NO: 368613 - DNA, 19 bp, Homo sapiens
  siRNA target sequence for FLJ10808 (NM_018227.3,575-593).
gtgcagatgtacatggaat

SEQ ID NO: 368614 - DNA, 19 bp, Homo sapiens
  siRNA target sequence for FLJ10808 (NM_018227.3,738-756).
ggagacaggacaattccta

SEQ ID NO: 368615 - DNA, 19 bp, Homo sapiens
  siRNA target sequence for FLJ10808 (NM_018227.3,782-800).
caggtttaaatggatctat

SEQ ID NO: 368616 - DNA, 19 bp, Homo sapiens
  siRNA target sequence for FLJ10808 (NM_018227.3,802-820).
caacaaataacggtgatat

SEQ ID NO: 368617 - DNA, 19 bp, Homo sapiens
  siRNA target sequence for FLJ10808 (NM_018227.3,813-831).
ggtgatatcgccattttct

SEQ ID NO: 368618 - DNA, 19 bp, Homo sapiens
  siRNA target sequence for FLJ10808 (NM_018227.3,814-832).
gtgatatcgccattttctt

SEQ ID NO: 368619 - DNA, 19 bp, Homo sapiens
  siRNA target sequence for FLJ10808 (NM_018227.3,848-866).
ccacagaactggaaccata

SEQ ID NO: 368620 - DNA, 19 bp, Homo sapiens
  siRNA target sequence for FLJ10808 (NM_018227.3,877-895).
ggcatagctgtccaagtta

SEQ ID NO: 368621 - DNA, 19 bp, Homo sapiens
  siRNA target sequence for FLJ10808 (NM_018227.3,878-896).
gcatagctgtccaagttaa

SEQ ID NO: 368622 - DNA, 19 bp, Homo sapiens
  siRNA target sequence for FLJ10808 (NM_018227.3,888-906).
ccaagttaagactcctaaa

SEQ ID NO: 368623 - DNA, 19 bp, Homo sapiens
  siRNA target sequence for FLJ10808 (NM_018227.3,955-973).
cttattgtggattttagca

SEQ ID NO: 368624 - DNA, 19 bp, Homo sapiens
  siRNA target sequence for FLJ10808 (NM_018227.3,976-994).
cctgaggcacctttagaga

SEQ ID NO: 368625 - DNA, 19 bp, Homo sapiens
  siRNA target sequence for FLJ10808 (NM_018227.3,977-995).
ctgaggcacctttagagat

SEQ ID NO: 368626 - DNA, 19 bp, Homo sapiens
  siRNA target sequence for FLJ10808 (NM_018227.3,993-1011).
gattcacacagctatgctt

SEQ ID NO: 368627 - DNA, 19 bp, Homo sapiens
  siRNA target sequence for FLJ10808 (NM_018227.3,1083-1101).
gttgaaactagcaacatct

SEQ ID NO: 368628 - DNA, 19 bp, Homo sapiens
  siRNA target sequence for FLJ10808 (NM_018227.3,1210-1228).
gttgccagccaagaagtat

SEQ ID NO: 368629 - DNA, 19 bp, Homo sapiens
  siRNA target sequence for FLJ10808 (NM_018227.3,1215-1233).
cagccaagaagtattgaaa

SEQ ID NO: 368630 - DNA, 19 bp, Homo sapiens
  siRNA target sequence for FLJ10808 (NM_018227.3,1255-1273).
cctttgtgccagtggttat

SEQ ID NO: 368631 - DNA, 19 bp, Homo sapiens
  siRNA target sequence for FLJ10808 (NM_018227.3,1256-1274).
ctttgtgccagtggttata

SEQ ID NO: 368632 - DNA, 19 bp, Homo sapiens
  siRNA target sequence for FLJ10808 (NM_018227.3,1262-1280).
gccagtggttatatcttga

SEQ ID NO: 368633 - DNA, 19 bp, Homo sapiens
  siRNA target sequence for FLJ10808 (NM_018227.3,1334-1352).
cacgaggagatagatatga

SEQ ID NO: 368634 - DNA, 19 bp, Homo sapiens
  siRNA target sequence for FLJ10808 (NM_018227.3,1368-1386).
cattggagacactttgtgt

SEQ ID NO: 368635 - DNA, 19 bp, Homo sapiens
  siRNA target sequence for FLJ10808 (NM_018227.3,1385-1403).
gtcagaaactgcaaaattt

SEQ ID NO: 368636 - DNA, 19 bp, Homo sapiens
  siRNA target sequence for FLJ10808 (NM_018227.3,1429-1447).
gccataggctgtgaaatgt

SEQ ID NO: 368637 - DNA, 19 bp, Homo sapiens
  siRNA target sequence for FLJ10808 (NM_018227.3,1430-1448).
ccataggctgtgaaatgtt

SEQ ID NO: 368638 - DNA, 19 bp, Homo sapiens
  siRNA target sequence for FLJ10808 (NM_018227.3,1488-1506).
gaaaggaatgattacagtt

SEQ ID NO: 368639 - DNA, 19 bp, Homo sapiens
  siRNA target sequence for FLJ10808 (NM_018227.3,1516-1534).
gacttgatagagaaatcca

SEQ ID NO: 368640 - DNA, 19 bp, Homo sapiens
  siRNA target sequence for FLJ10808 (NM_018227.3,1567-1585).
cacatacagaaacctaaaa

SEQ ID NO: 368641 - DNA, 19 bp, Homo sapiens
  siRNA target sequence for FLJ10808 (NM_018227.3,1597-1615).
gctgatgctactctgaaaa

SEQ ID NO: 368642 - DNA, 19 bp, Homo sapiens
  siRNA target sequence for FLJ10808 (NM_018227.3,1639-1657).
gcacacctgaacaaagtat

SEQ ID NO: 368643 - DNA, 19 bp, Homo sapiens
  siRNA target sequence for FLJ10808 (NM_018227.3,1660-1678).
ccaaccactgagaccattt

SEQ ID NO: 368644 - DNA, 19 bp, Homo sapiens
  siRNA target sequence for FLJ10808 (NM_018227.3,1661-1679).
caaccactgagaccattta

SEQ ID NO: 368645 - DNA, 19 bp, Homo sapiens
  siRNA target sequence for FLJ10808 (NM_018227.3,1673-1691).
ccatttacaatgatgagtt

SEQ ID NO: 368646 - DNA, 19 bp, Homo sapiens
  siRNA target sequence for FLJ10808 (NM_018227.3,1680-1698).
caatgatgagttctatact

SEQ ID NO: 368647 - DNA, 19 bp, Homo sapiens
  siRNA target sequence for FLJ10808 (NM_018227.3,1689-1707).
gttctatactaaacaagat

SEQ ID NO: 368648 - DNA, 19 bp, Homo sapiens
  siRNA target sequence for FLJ10808 (NM_018227.3,1734-1752).
ggaagccaggagatacgta

SEQ ID NO: 368649 - DNA, 19 bp, Homo sapiens
  siRNA target sequence for FLJ10808 (NM_018227.3,1749-1767).
cgtagacagtcgttgctta

SEQ ID NO: 368650 - DNA, 19 bp, Homo sapiens
  siRNA target sequence for FLJ10808 (NM_018227.3,1753-1771).
gacagtcgttgcttagcaa

SEQ ID NO: 368651 - DNA, 19 bp, Homo sapiens
  siRNA target sequence for FLJ10808 (NM_018227.3,1755-1773).
cagtcgttgcttagcaaat

SEQ ID NO: 368652 - DNA, 19 bp, Homo sapiens
  siRNA target sequence for FLJ10808 (NM_018227.3,1759-1777).
cgttgcttagcaaatctaa

SEQ ID NO: 368653 - DNA, 19 bp, Homo sapiens
  siRNA target sequence for FLJ10808 (NM_018227.3,1774-1792).
ctaaggcctcttttagatt

SEQ ID NO: 368654 - DNA, 19 bp, Homo sapiens
  siRNA target sequence for FLJ10808 (NM_018227.3,1835-1853).
cgcatttgactgagtctta

SEQ ID NO: 368655 - DNA, 19 bp, Homo sapiens
  siRNA target sequence for FLJ10808 (NM_018227.3,1881-1899).
ggaaataccattttgtact

SEQ ID NO: 368656 - DNA, 19 bp, Homo sapiens
  siRNA target sequence for FLJ10808 (NM_018227.3,1970-1988).
cccacaaaccttcattgtt

SEQ ID NO: 368657 - DNA, 19 bp, Homo sapiens
  siRNA target sequence for FLJ10808 (NM_018227.3,2043-2061).
gagtggacacagtttagaa

SEQ ID NO: 368658 - DNA, 19 bp, Homo sapiens
  siRNA target sequence for FLJ10808 (NM_018227.3,2052-2070).
cagtttagaaggctgtttt

SEQ ID NO: 368659 - DNA, 19 bp, Homo sapiens
  siRNA target sequence for FLJ10808 (NM_018227.3,2054-2072).
gtttagaaggctgttttca

SEQ ID NO: 368660 - DNA, 19 bp, Homo sapiens
  siRNA target sequence for FLJ10808 (NM_018227.3,2112-2130).
ccagtgtgtagaattagca

SEQ ID NO: 368661 - DNA, 19 bp, Homo sapiens
  siRNA target sequence for FLJ10808 (NM_018227.3,2113-2131).
cagtgtgtagaattagcaa

SEQ ID NO: 368662 - DNA, 19 bp, Homo sapiens
  siRNA target sequence for FLJ10808 (NM_018227.3,2117-2135).
gtgtagaattagcaagatt

SEQ ID NO: 368663 - DNA, 19 bp, Homo sapiens
  siRNA target sequence for FLJ10808 (NM_018227.3,2119-2137).
gtagaattagcaagattaa

SEQ ID NO: 368664 - DNA, 19 bp, Homo sapiens
  siRNA target sequence for FLJ10808 (NM_018227.3,2296-2314).
cagaatgctgcaaaactat

SEQ ID NO: 368665 - DNA, 19 bp, Homo sapiens
  siRNA target sequence for FLJ10808 (NM_018227.3,2298-2316).
gaatgctgcaaaactatat

SEQ ID NO: 368666 - DNA, 19 bp, Homo sapiens
  siRNA target sequence for FLJ10808 (NM_018227.3,2406-2424).
caagccttccaataaggtt

SEQ ID NO: 368667 - DNA, 19 bp, Homo sapiens
  siRNA target sequence for FLJ10808 (NM_018227.3,2411-2429).
cttccaataaggttgttca

SEQ ID NO: 368668 - DNA, 19 bp, Homo sapiens
  siRNA target sequence for FLJ10808 (NM_018227.3,2415-2433).
caataaggttgttcaaaca

SEQ ID NO: 368669 - DNA, 19 bp, Homo sapiens
  siRNA target sequence for FLJ10808 (NM_018227.3,2452-2470).
ccagaccatgttcctatta

SEQ ID NO: 368670 - DNA, 19 bp, Homo sapiens
  siRNA target sequence for FLJ10808 (NM_018227.3,2455-2473).
gaccatgttcctattagca

SEQ ID NO: 368671 - DNA, 19 bp, Homo sapiens
  siRNA target sequence for FLJ10808 (NM_018227.3,2491-2509).
gcaattttccaactagaaa

SEQ ID NO: 368672 - DNA, 19 bp, Homo sapiens
  siRNA target sequence for FLJ10808 (NM_018227.3,2650-2668).
ccagctgaccgtttcaaaa

SEQ ID NO: 368673 - DNA, 19 bp, Homo sapiens
  siRNA target sequence for FLJ10808 (NM_018227.3,2742-2760).
ggagatgatcaaagtaact

SEQ ID NO: 368674 - DNA, 19 bp, Homo sapiens
  siRNA target sequence for FLJ10808 (NM_018227.3,2755-2773).
gtaactggtggctatccat

SEQ ID NO: 368675 - DNA, 19 bp, Homo sapiens
  siRNA target sequence for FLJ10808 (NM_018227.3,2765-2783).
gctatccatttgaagctta

SEQ ID NO: 368676 - DNA, 19 bp, Homo sapiens
  siRNA target sequence for FLJ10808 (NM_018227.3,2802-2820).
cttagccattccaattgta

SEQ ID NO: 368677 - DNA, 19 bp, Homo sapiens
  siRNA target sequence for FLJ10808 (NM_018227.3,2807-2825).
ccattccaattgtagtatt

SEQ ID NO: 368678 - DNA, 19 bp, Homo sapiens
  siRNA target sequence for FLJ10808 (NM_018227.3,2813-2831).
caattgtagtatttacaga

SEQ ID NO: 368679 - DNA, 19 bp, Homo sapiens
  siRNA target sequence for FLJ10808 (NM_018227.3,2891-2909).
gatggaccgtacatggaaa

SEQ ID NO: 368680 - DNA, 19 bp, Homo sapiens
  siRNA target sequence for FLJ10808 (NM_018227.3,2894-2912).
ggaccgtacatggaaaaga

SEQ ID NO: 368681 - DNA, 19 bp, Homo sapiens
  siRNA target sequence for FLJ10808 (NM_018227.3,2898-2916).
cgtacatggaaaagaagat

SEQ ID NO: 368682 - DNA, 19 bp, Homo sapiens
  siRNA target sequence for FLJ10808 (NM_018227.3,2925-2943).
cttggatttcataaatgca

SEQ ID NO: 368683 - DNA, 19 bp, Homo sapiens
  siRNA target sequence for FLJ10808 (NM_018227.3,3058-3076).
gtaaaacctactactgaaa

SEQ ID NO: 368684 - DNA, 19 bp, Homo sapiens
  siRNA target sequence for FLJ10808 (NM_018227.3,3064-3082).
cctactactgaaaagaaat

SEQ ID NO: 368685 - DNA, 19 bp, Homo sapiens
  siRNA target sequence for FLJ10808 (NM_018227.3,3078-3096).
gaaatatgtggatcttact

SEQ ID NO: 368686 - DNA, 19 bp, Homo sapiens
  siRNA target sequence for FLJ10808 (NM_018227.3,3099-3117).
gtcatttgctccagacatt

SEQ ID NO: 368687 - DNA, 19 bp, Homo sapiens
  siRNA target sequence for FLJ10808 (NM_018227.3,3137-3155).
cgggacctccagtaagata

SEQ ID NO: 368688 - DNA, 19 bp, Homo sapiens
  siRNA target sequence for FLJ10808 (NM_018227.3,3142-3160).
cctccagtaagatactact

SEQ ID NO: 368689 - DNA, 19 bp, Homo sapiens
  siRNA target sequence for FLJ10808 (NM_018227.3,3143-3161).
ctccagtaagatactactt

SEQ ID NO: 368690 - DNA, 19 bp, Homo sapiens
  siRNA target sequence for FLJ10808 (NM_018227.3,3145-3163).
ccagtaagatactacttca

SEQ ID NO: 368691 - DNA, 19 bp, Homo sapiens
  siRNA target sequence for C14orf115 (NM_018228.1,657-675).
ccaacgtgtggcacttgta

SEQ ID NO: 368692 - DNA, 19 bp, Homo sapiens
  siRNA target sequence for C14orf115 (NM_018228.1,658-676).
caacgtgtggcacttgtat

SEQ ID NO: 368693 - DNA, 19 bp, Homo sapiens
  siRNA target sequence for C14orf115 (NM_018228.1,689-707).
gtcctccagcggaacatct

SEQ ID NO: 368694 - DNA, 19 bp, Homo sapiens
  siRNA target sequence for C14orf115 (NM_018228.1,692-710).
ctccagcggaacatctact

SEQ ID NO: 368695 - DNA, 19 bp, Homo sapiens
  siRNA target sequence for C14orf115 (NM_018228.1,720-738).
ccatgcgcaacctcaagat

SEQ ID NO: 368696 - DNA, 19 bp, Homo sapiens
  siRNA target sequence for C14orf115 (NM_018228.1,789-807).
cctccacgctgcacatcat

SEQ ID NO: 368697 - DNA, 19 bp, Homo sapiens
  siRNA target sequence for C14orf115 (NM_018228.1,838-856).
cttccgccaccagtacttt

SEQ ID NO: 368698 - DNA, 19 bp, Homo sapiens
  siRNA target sequence for C14orf115 (NM_018228.1,1007-1025).
cgctacagcgtcaccaaaa

SEQ ID NO: 368699 - DNA, 19 bp, Homo sapiens
  siRNA target sequence for C14orf115 (NM_018228.1,1332-1350).
gccctggaatggtcttaat

SEQ ID NO: 368700 - DNA, 19 bp, Homo sapiens
  siRNA target sequence for C14orf115 (NM_018228.1,1335-1353).
ctggaatggtcttaatgca

SEQ ID NO: 368701 - DNA, 19 bp, Homo sapiens
  siRNA target sequence for C14orf115 (NM_018228.1,1435-1453).
catctcacggtccacttat

SEQ ID NO: 368702 - DNA, 19 bp, Homo sapiens
  siRNA target sequence for C14orf115 (NM_018228.1,1438-1456).
ctcacggtccacttattat

SEQ ID NO: 368703 - DNA, 19 bp, Homo sapiens
  siRNA target sequence for C14orf115 (NM_018228.1,1442-1460).
cggtccacttattataatt

SEQ ID NO: 368704 - DNA, 19 bp, Homo sapiens
  siRNA target sequence for C14orf115 (NM_018228.1,1549-1567).
ggaaggggctgtaattcct

SEQ ID NO: 368705 - DNA, 19 bp, Homo sapiens
  siRNA target sequence for C14orf115 (NM_018228.1,1550-1568).
gaaggggctgtaattcctt

SEQ ID NO: 368706 - DNA, 19 bp, Homo sapiens
  siRNA target sequence for C14orf115 (NM_018228.1,1803-1821).
gaggcctgtccaaacttca

SEQ ID NO: 368707 - DNA, 19 bp, Homo sapiens
  siRNA target sequence for C14orf115 (NM_018228.1,2187-2205).
ctgcccgctccacatacta

SEQ ID NO: 368708 - DNA, 19 bp, Homo sapiens
  siRNA target sequence for C14orf115 (NM_018228.1,2189-2207).
gcccgctccacatactaca

SEQ ID NO: 368709 - DNA, 19 bp, Homo sapiens
  siRNA target sequence for C14orf115 (NM_018228.1,2190-2208).
cccgctccacatactacat

SEQ ID NO: 368710 - DNA, 19 bp, Homo sapiens
  siRNA target sequence for C14orf115 (NM_018228.1,2192-2210).
cgctccacatactacatgt

SEQ ID NO: 368711 - DNA, 19 bp, Homo sapiens
  siRNA target sequence for C14orf115 (NM_018228.1,2211-2229).
ggaagcgagccctctatga

SEQ ID NO: 368712 - DNA, 19 bp, Homo sapiens
  siRNA target sequence for C14orf108 (NM_018229.2,478-496).
cagacggtatccaactgtt

SEQ ID NO: 368713 - DNA, 19 bp, Homo sapiens
  siRNA target sequence for C14orf108 (NM_018229.2,482-500).
cggtatccaactgttgaaa

SEQ ID NO: 368714 - DNA, 19 bp, Homo sapiens
  siRNA target sequence for C14orf108 (NM_018229.2,484-502).
gtatccaactgttgaaaaa

SEQ ID NO: 368715 - DNA, 19 bp, Homo sapiens
  siRNA target sequence for C14orf108 (NM_018229.2,514-532).
cttcaatggagcaagttat

SEQ ID NO: 368716 - DNA, 19 bp, Homo sapiens
  siRNA target sequence for C14orf108 (NM_018229.2,571-589).
gctctttgaacttagatta

SEQ ID NO: 368717 - DNA, 19 bp, Homo sapiens
  siRNA target sequence for C14orf108 (NM_018229.2,585-603).
gattattggatgatgataa

SEQ ID NO: 368718 - DNA, 19 bp, Homo sapiens
  siRNA target sequence for C14orf108 (NM_018229.2,627-645).
gctgttcacgcatcaataa

SEQ ID NO: 368719 - DNA, 19 bp, Homo sapiens
  siRNA target sequence for C14orf108 (NM_018229.2,706-724).
gaagaatgacatgatatat

SEQ ID NO: 368720 - DNA, 19 bp, Homo sapiens
  siRNA target sequence for C14orf108 (NM_018229.2,726-744).
cttgtgttccactagttga

SEQ ID NO: 368721 - DNA, 19 bp, Homo sapiens
  siRNA target sequence for C14orf108 (NM_018229.2,729-747).
gtgttccactagttgaaca

SEQ ID NO: 368722 - DNA, 19 bp, Homo sapiens
  siRNA target sequence for C14orf108 (NM_018229.2,735-753).
cactagttgaacaaactct

SEQ ID NO: 368723 - DNA, 19 bp, Homo sapiens
  siRNA target sequence for C14orf108 (NM_018229.2,756-774).
cccctcgtccgccactaat

SEQ ID NO: 368724 - DNA, 19 bp, Homo sapiens
  siRNA target sequence for C14orf108 (NM_018229.2,757-775).
ccctcgtccgccactaatt

SEQ ID NO: 368725 - DNA, 19 bp, Homo sapiens
  siRNA target sequence for C14orf108 (NM_018229.2,758-776).
cctcgtccgccactaatta

SEQ ID NO: 368726 - DNA, 19 bp, Homo sapiens
  siRNA target sequence for C14orf108 (NM_018229.2,762-780).
gtccgccactaattagtgt

SEQ ID NO: 368727 - DNA, 19 bp, Homo sapiens
  siRNA target sequence for C14orf108 (NM_018229.2,777-795).
gtgtcagtggagtttcaca

SEQ ID NO: 368728 - DNA, 19 bp, Homo sapiens
  siRNA target sequence for C14orf108 (NM_018229.2,830-848).
ctttattcaggtcaaaaaa

SEQ ID NO: 368729 - DNA, 19 bp, Homo sapiens
  siRNA target sequence for C14orf108 (NM_018229.2,898-916).
gcaggcttgtccatttggt

SEQ ID NO: 368730 - DNA, 19 bp, Homo sapiens
  siRNA target sequence for C14orf108 (NM_018229.2,899-917).
caggcttgtccatttggta

SEQ ID NO: 368731 - DNA, 19 bp, Homo sapiens
  siRNA target sequence for C14orf108 (NM_018229.2,906-924).
gtccatttggtactttatt

SEQ ID NO: 368732 - DNA, 19 bp, Homo sapiens
  siRNA target sequence for C14orf108 (NM_018229.2,931-949).
caacttacagaattcatta

SEQ ID NO: 368733 - DNA, 19 bp, Homo sapiens
  siRNA target sequence for C14orf108 (NM_018229.2,945-963).
cattagataataccaattt

SEQ ID NO: 368734 - DNA, 19 bp, Homo sapiens
  siRNA target sequence for C14orf108 (NM_018229.2,1025-1043).
ccacaagtttctatttcta

SEQ ID NO: 368735 - DNA, 19 bp, Homo sapiens
  siRNA target sequence for C14orf108 (NM_018229.2,1041-1059).
ctatcactgaaaaggtaaa

SEQ ID NO: 368736 - DNA, 19 bp, Homo sapiens
  siRNA target sequence for C14orf108 (NM_018229.2,1062-1080).
ccatgcaatatgataaaca

SEQ ID NO: 368737 - DNA, 19 bp, Homo sapiens
  siRNA target sequence for C14orf108 (NM_018229.2,1079-1097).
cagggtatagcagatacat

SEQ ID NO: 368738 - DNA, 19 bp, Homo sapiens
  siRNA target sequence for C14orf108 (NM_018229.2,1205-1223).
ctagttcacccttgtgtaa

SEQ ID NO: 368739 - DNA, 19 bp, Homo sapiens
  siRNA target sequence for C14orf108 (NM_018229.2,1208-1226).
gttcacccttgtgtaactt

SEQ ID NO: 368740 - DNA, 19 bp, Homo sapiens
  siRNA target sequence for C14orf108 (NM_018229.2,1229-1247).
cttgactctgcaattctga

SEQ ID NO: 368741 - DNA, 19 bp, Homo sapiens
  siRNA target sequence for C14orf108 (NM_018229.2,1251-1269).
ctagtagtattgatgcaat

SEQ ID NO: 368742 - DNA, 19 bp, Homo sapiens
  siRNA target sequence for C14orf108 (NM_018229.2,1270-1288).
ggatgactctgcatttagt

SEQ ID NO: 368743 - DNA, 19 bp, Homo sapiens
  siRNA target sequence for C14orf108 (NM_018229.2,1281-1299).
catttagtgggccttacaa

SEQ ID NO: 368744 - DNA, 19 bp, Homo sapiens
  siRNA target sequence for C14orf108 (NM_018229.2,1289-1307).
gggccttacaaatttccat

SEQ ID NO: 368745 - DNA, 19 bp, Homo sapiens
  siRNA target sequence for C14orf108 (NM_018229.2,1290-1308).
ggccttacaaatttccatt

SEQ ID NO: 368746 - DNA, 19 bp, Homo sapiens
  siRNA target sequence for C14orf108 (NM_018229.2,1311-1329).
ctccacctttagagtcatt

SEQ ID NO: 368747 - DNA, 19 bp, Homo sapiens
  siRNA target sequence for C14orf108 (NM_018229.2,1316-1334).
cctttagagtcattcaact

SEQ ID NO: 368748 - DNA, 19 bp, Homo sapiens
  siRNA target sequence for C14orf108 (NM_018229.2,1322-1340).
gagtcattcaacttatgct

SEQ ID NO: 368749 - DNA, 19 bp, Homo sapiens
  siRNA target sequence for C14orf108 (NM_018229.2,1393-1411).
ggaggaagaagtacaacta

SEQ ID NO: 368750 - DNA, 19 bp, Homo sapiens
  siRNA target sequence for C14orf108 (NM_018229.2,1433-1451).
cttcatgaaagtgtgaaaa

SEQ ID NO: 368751 - DNA, 19 bp, Homo sapiens
  siRNA target sequence for C14orf108 (NM_018229.2,1467-1485).
gtgaagcccatataccttt

SEQ ID NO: 368752 - DNA, 19 bp, Homo sapiens
  siRNA target sequence for C14orf108 (NM_018229.2,1469-1487).
gaagcccatataccttttt

SEQ ID NO: 368753 - DNA, 19 bp, Homo sapiens
  siRNA target sequence for C14orf108 (NM_018229.2,1494-1512).
gaggtccaattacacattt

SEQ ID NO: 368754 - DNA, 19 bp, Homo sapiens
  siRNA target sequence for C14orf108 (NM_018229.2,1513-1531).
ggaatacaaaactagtttt

SEQ ID NO: 368755 - DNA, 19 bp, Homo sapiens
  siRNA target sequence for C14orf108 (NM_018229.2,1527-1545).
gttttggccagcttgaagt

SEQ ID NO: 368756 - DNA, 19 bp, Homo sapiens
  siRNA target sequence for C14orf108 (NM_018229.2,1544-1562).
gtatttcgagagaaaagct

SEQ ID NO: 368757 - DNA, 19 bp, Homo sapiens
  siRNA target sequence for C14orf108 (NM_018229.2,1550-1568).
cgagagaaaagcttattga

SEQ ID NO: 368758 - DNA, 19 bp, Homo sapiens
  siRNA target sequence for C14orf108 (NM_018229.2,1560-1578).
gcttattgatctggattat

SEQ ID NO: 368759 - DNA, 19 bp, Homo sapiens
  siRNA target sequence for C14orf108 (NM_018229.2,1561-1579).
cttattgatctggattatt

SEQ ID NO: 368760 - DNA, 19 bp, Homo sapiens
  siRNA target sequence for C14orf108 (NM_018229.2,1572-1590).
ggattattggccagaagtt

SEQ ID NO: 368761 - DNA, 19 bp, Homo sapiens
  siRNA target sequence for C14orf108 (NM_018229.2,1580-1598).
ggccagaagttcccaaaat

SEQ ID NO: 368762 - DNA, 19 bp, Homo sapiens
  siRNA target sequence for C14orf108 (NM_018229.2,1582-1600).
ccagaagttcccaaaatca

SEQ ID NO: 368763 - DNA, 19 bp, Homo sapiens
  siRNA target sequence for C14orf108 (NM_018229.2,1657-1675).
gccatttgacccaatttgt

SEQ ID NO: 368764 - DNA, 19 bp, Homo sapiens
  siRNA target sequence for C14orf108 (NM_018229.2,1658-1676).
ccatttgacccaatttgta

SEQ ID NO: 368765 - DNA, 19 bp, Homo sapiens
  siRNA target sequence for C14orf108 (NM_018229.2,1688-1706).
gcatatttaaagcttcatt

SEQ ID NO: 368766 - DNA, 19 bp, Homo sapiens
  siRNA target sequence for C14orf108 (NM_018229.2,1699-1717).
gcttcattttaggatctta

SEQ ID NO: 368767 - DNA, 19 bp, Homo sapiens
  siRNA target sequence for C14orf108 (NM_018229.2,1714-1732).
cttagattacacacttact

SEQ ID NO: 368768 - DNA, 19 bp, Homo sapiens
  siRNA target sequence for C14orf108 (NM_018229.2,1791-1809).
gtgcacaccggaaactaat

SEQ ID NO: 368769 - DNA, 19 bp, Homo sapiens
  siRNA target sequence for C14orf108 (NM_018229.2,1796-1814).
caccggaaactaatttctt

SEQ ID NO: 368770 - DNA, 19 bp, Homo sapiens
  siRNA target sequence for C14orf108 (NM_018229.2,1798-1816).
ccggaaactaatttcttct

SEQ ID NO: 368771 - DNA, 19 bp, Homo sapiens
  siRNA target sequence for C14orf108 (NM_018229.2,1853-1871).
gtaacatatggatcattat

SEQ ID NO: 368772 - DNA, 19 bp, Homo sapiens
  siRNA target sequence for C14orf108 (NM_018229.2,1857-1875).
catatggatcattattatt

SEQ ID NO: 368773 - DNA, 19 bp, Homo sapiens
  siRNA target sequence for NUP133 (NM_018230.2,277-295).
gaacaccaacacgaatgtt

SEQ ID NO: 368774 - DNA, 19 bp, Homo sapiens
  siRNA target sequence for NUP133 (NM_018230.2,296-314).
cccacaccactccataact

SEQ ID NO: 368775 - DNA, 19 bp, Homo sapiens
  siRNA target sequence for NUP133 (NM_018230.2,401-419).
ccagctgaccattaacata

SEQ ID NO: 368776 - DNA, 19 bp, Homo sapiens
  siRNA target sequence for NUP133 (NM_018230.2,439-457).
gtctggtgtgcaaagagaa

SEQ ID NO: 368777 - DNA, 19 bp, Homo sapiens
  siRNA target sequence for NUP133 (NM_018230.2,448-466).
gcaaagagaagctcattat

SEQ ID NO: 368778 - DNA, 19 bp, Homo sapiens
  siRNA target sequence for NUP133 (NM_018230.2,493-511).
ctaagttatccgtttgcaa

SEQ ID NO: 368779 - DNA, 19 bp, Homo sapiens
  siRNA target sequence for NUP133 (NM_018230.2,497-515).
gttatccgtttgcaaagaa

SEQ ID NO: 368780 - DNA, 19 bp, Homo sapiens
  siRNA target sequence for NUP133 (NM_018230.2,552-570).
gacttagtggctctttctt

SEQ ID NO: 368781 - DNA, 19 bp, Homo sapiens
  siRNA target sequence for NUP133 (NM_018230.2,558-576).
gtggctctttcttactctt

SEQ ID NO: 368782 - DNA, 19 bp, Homo sapiens
  siRNA target sequence for NUP133 (NM_018230.2,581-599).
ctcaggtgaagcacattct

SEQ ID NO: 368783 - DNA, 19 bp, Homo sapiens
  siRNA target sequence for NUP133 (NM_018230.2,625-643).
ccaccagagaaggatctat

SEQ ID NO: 368784 - DNA, 19 bp, Homo sapiens
  siRNA target sequence for NUP133 (NM_018230.2,696-714).
gattcgggaggtgataaga

SEQ ID NO: 368785 - DNA, 19 bp, Homo sapiens
  siRNA target sequence for NUP133 (NM_018230.2,700-718).
cgggaggtgataagactta

SEQ ID NO: 368786 - DNA, 19 bp, Homo sapiens
  siRNA target sequence for NUP133 (NM_018230.2,702-720).
ggaggtgataagacttaca

SEQ ID NO: 368787 - DNA, 19 bp, Homo sapiens
  siRNA target sequence for NUP133 (NM_018230.2,763-781).
catcaggaagccaactaat

SEQ ID NO: 368788 - DNA, 19 bp, Homo sapiens
  siRNA target sequence for NUP133 (NM_018230.2,773-791).
ccaactaattcggttgata

SEQ ID NO: 368789 - DNA, 19 bp, Homo sapiens
  siRNA target sequence for NUP133 (NM_018230.2,842-860).
catgctttcaggaattggt

SEQ ID NO: 368790 - DNA, 19 bp, Homo sapiens
  siRNA target sequence for NUP133 (NM_018230.2,850-868).
caggaattggtcgaaaagt

SEQ ID NO: 368791 - DNA, 19 bp, Homo sapiens
  siRNA target sequence for NUP133 (NM_018230.2,852-870).
ggaattggtcgaaaagttt

SEQ ID NO: 368792 - DNA, 19 bp, Homo sapiens
  siRNA target sequence for NUP133 (NM_018230.2,919-937).
gtgttctctgggatagaga

SEQ ID NO: 368793 - DNA, 19 bp, Homo sapiens
  siRNA target sequence for NUP133 (NM_018230.2,934-952).
gagagagatcaagctttta

SEQ ID NO: 368794 - DNA, 19 bp, Homo sapiens
  siRNA target sequence for NUP133 (NM_018230.2,955-973).
gcctgacgagttcaaacat

SEQ ID NO: 368795 - DNA, 19 bp, Homo sapiens
  siRNA target sequence for NUP133 (NM_018230.2,957-975).
ctgacgagttcaaacatca

SEQ ID NO: 368796 - DNA, 19 bp, Homo sapiens
  siRNA target sequence for NUP133 (NM_018230.2,961-979).
cgagttcaaacatcagtaa

SEQ ID NO: 368797 - DNA, 19 bp, Homo sapiens
  siRNA target sequence for NUP133 (NM_018230.2,997-1015).
cttcagaaaagcatgcata

SEQ ID NO: 368798 - DNA, 19 bp, Homo sapiens
  siRNA target sequence for NUP133 (NM_018230.2,1002-1020).
gaaaagcatgcatacagtt

SEQ ID NO: 368799 - DNA, 19 bp, Homo sapiens
  siRNA target sequence for NUP133 (NM_018230.2,1067-1085).
gggatctgaaagtaactat

SEQ ID NO: 368800 - DNA, 19 bp, Homo sapiens
  siRNA target sequence for NUP133 (NM_018230.2,1098-1116).
gaaggagtcaacattcgat

SEQ ID NO: 368801 - DNA, 19 bp, Homo sapiens
  siRNA target sequence for NUP133 (NM_018230.2,1101-1119).
ggagtcaacattcgatatt

SEQ ID NO: 368802 - DNA, 19 bp, Homo sapiens
  siRNA target sequence for NUP133 (NM_018230.2,1102-1120).
gagtcaacattcgatattt

SEQ ID NO: 368803 - DNA, 19 bp, Homo sapiens
  siRNA target sequence for NUP133 (NM_018230.2,1204-1222).
ctctgataacaatagaaga

SEQ ID NO: 368804 - DNA, 19 bp, Homo sapiens
  siRNA target sequence for NUP133 (NM_018230.2,1208-1226).
gataacaatagaagataat

SEQ ID NO: 368805 - DNA, 19 bp, Homo sapiens
  siRNA target sequence for NUP133 (NM_018230.2,1221-1239).
gataatggttgccaaatgt

SEQ ID NO: 368806 - DNA, 19 bp, Homo sapiens
  siRNA target sequence for NUP133 (NM_018230.2,1252-1270).
ctgtagaagtcactcaata

SEQ ID NO: 368807 - DNA, 19 bp, Homo sapiens
  siRNA target sequence for NUP133 (NM_018230.2,1254-1272).
gtagaagtcactcaatata

SEQ ID NO: 368808 - DNA, 19 bp, Homo sapiens
  siRNA target sequence for NUP133 (NM_018230.2,1310-1328).
gttgacggtcccaaacttt

SEQ ID NO: 368809 - DNA, 19 bp, Homo sapiens
  siRNA target sequence for NUP133 (NM_018230.2,1315-1333).
cggtcccaaacttttcaaa

SEQ ID NO: 368810 - DNA, 19 bp, Homo sapiens
  siRNA target sequence for NUP133 (NM_018230.2,1334-1352).
ccagactgcctatctgtat

SEQ ID NO: 368811 - DNA, 19 bp, Homo sapiens
  siRNA target sequence for NUP133 (NM_018230.2,1335-1353).
cagactgcctatctgtata

SEQ ID NO: 368812 - DNA, 19 bp, Homo sapiens
  siRNA target sequence for NUP133 (NM_018230.2,1339-1357).
ctgcctatctgtataacga

SEQ ID NO: 368813 - DNA, 19 bp, Homo sapiens
  siRNA target sequence for NUP133 (NM_018230.2,1341-1359).
gcctatctgtataacgaaa

SEQ ID NO: 368814 - DNA, 19 bp, Homo sapiens
  siRNA target sequence for NUP133 (NM_018230.2,1428-1446).
gcacaaggagatagtgttt

SEQ ID NO: 368815 - DNA, 19 bp, Homo sapiens
  siRNA target sequence for NUP133 (NM_018230.2,1465-1483).
gtggtgttcctatcatttt

SEQ ID NO: 368816 - DNA, 19 bp, Homo sapiens
  siRNA target sequence for NUP133 (NM_018230.2,1473-1491).
cctatcattttttctagaa

SEQ ID NO: 368817 - DNA, 19 bp, Homo sapiens
  siRNA target sequence for NUP133 (NM_018230.2,1493-1511).
cagtggactggtgtctatt

SEQ ID NO: 368818 - DNA, 19 bp, Homo sapiens
  siRNA target sequence for NUP133 (NM_018230.2,1497-1515).
ggactggtgtctattactt

SEQ ID NO: 368819 - DNA, 19 bp, Homo sapiens
  siRNA target sequence for NUP133 (NM_018230.2,1531-1549).
ctatattggcagaagactt

SEQ ID NO: 368820 - DNA, 19 bp, Homo sapiens
  siRNA target sequence for NUP133 (NM_018230.2,1581-1599).
ccaaacagtgagagtatga

SEQ ID NO: 368821 - DNA, 19 bp, Homo sapiens
  siRNA target sequence for NUP133 (NM_018230.2,1582-1600).
caaacagtgagagtatgat

SEQ ID NO: 368822 - DNA, 19 bp, Homo sapiens
  siRNA target sequence for NUP133 (NM_018230.2,1662-1680).
gctgcctttctgcaatact

SEQ ID NO: 368823 - DNA, 19 bp, Homo sapiens
  siRNA target sequence for NUP133 (NM_018230.2,1854-1872).
cctgggttcagcaatacgt

SEQ ID NO: 368824 - DNA, 19 bp, Homo sapiens
  siRNA target sequence for NUP133 (NM_018230.2,1862-1880).
cagcaatacgtcactgatt

SEQ ID NO: 368825 - DNA, 19 bp, Homo sapiens
  siRNA target sequence for NUP133 (NM_018230.2,1864-1882).
gcaatacgtcactgattat

SEQ ID NO: 368826 - DNA, 19 bp, Homo sapiens
  siRNA target sequence for NUP133 (NM_018230.2,2014-2032).
gtgagcatgccgaaaagct

SEQ ID NO: 368827 - DNA, 19 bp, Homo sapiens
  siRNA target sequence for NUP133 (NM_018230.2,2035-2053).
cagccgccattgttctcaa

SEQ ID NO: 368828 - DNA, 19 bp, Homo sapiens
  siRNA target sequence for NUP133 (NM_018230.2,2038-2056).
ccgccattgttctcaagaa

SEQ ID NO: 368829 - DNA, 19 bp, Homo sapiens
  siRNA target sequence for NUP133 (NM_018230.2,2068-2086).
ggctttctgaccttgtcaa

SEQ ID NO: 368830 - DNA, 19 bp, Homo sapiens
  siRNA target sequence for NUP133 (NM_018230.2,2082-2100).
gtcaacacagccatattga

SEQ ID NO: 368831 - DNA, 19 bp, Homo sapiens
  siRNA target sequence for NUP133 (NM_018230.2,2164-2182).
gggaggtatcccaagtaga

SEQ ID NO: 368832 - DNA, 19 bp, Homo sapiens
  siRNA target sequence for NUP133 (NM_018230.2,2166-2184).
gaggtatcccaagtagata

SEQ ID NO: 368833 - DNA, 19 bp, Homo sapiens
  siRNA target sequence for NUP133 (NM_018230.2,2225-2243).
gagggatgcacctatggat

SEQ ID NO: 368834 - DNA, 19 bp, Homo sapiens
  siRNA target sequence for NUP133 (NM_018230.2,2235-2253).
cctatggattccattgaat

SEQ ID NO: 368835 - DNA, 19 bp, Homo sapiens
  siRNA target sequence for NUP133 (NM_018230.2,2264-2282).
ggtgatcaatgtgaacaat

SEQ ID NO: 368836 - DNA, 19 bp, Homo sapiens
  siRNA target sequence for NUP133 (NM_018230.2,2265-2283).
gtgatcaatgtgaacaata

SEQ ID NO: 368837 - DNA, 19 bp, Homo sapiens
  siRNA target sequence for NUP133 (NM_018230.2,2267-2285).
gatcaatgtgaacaatatt

SEQ ID NO: 368838 - DNA, 19 bp, Homo sapiens
  siRNA target sequence for NUP133 (NM_018230.2,2298-2316).
ctgcaggctgctagtcatt

SEQ ID NO: 368839 - DNA, 19 bp, Homo sapiens
  siRNA target sequence for NUP133 (NM_018230.2,2300-2318).
gcaggctgctagtcattat

SEQ ID NO: 368840 - DNA, 19 bp, Homo sapiens
  siRNA target sequence for NUP133 (NM_018230.2,2319-2337).
cgccaaaatagaaactctt

SEQ ID NO: 368841 - DNA, 19 bp, Homo sapiens
  siRNA target sequence for NUP133 (NM_018230.2,2409-2427).
ggcatccgaacggtaataa

SEQ ID NO: 368842 - DNA, 19 bp, Homo sapiens
  siRNA target sequence for NUP133 (NM_018230.2,2411-2429).
catccgaacggtaataata

SEQ ID NO: 368843 - DNA, 19 bp, Homo sapiens
  siRNA target sequence for NUP133 (NM_018230.2,2447-2465).
cctgaaggtggcttatcca

SEQ ID NO: 368844 - DNA, 19 bp, Homo sapiens
  siRNA target sequence for NUP133 (NM_018230.2,2505-2523).
ctggtagccctgatcgatt

SEQ ID NO: 368845 - DNA, 19 bp, Homo sapiens
  siRNA target sequence for NUP133 (NM_018230.2,2570-2588).
cagtaatcgggaaagatat

SEQ ID NO: 368846 - DNA, 19 bp, Homo sapiens
  siRNA target sequence for NUP133 (NM_018230.2,2572-2590).
gtaatcgggaaagatatga

SEQ ID NO: 368847 - DNA, 19 bp, Homo sapiens
  siRNA target sequence for NUP133 (NM_018230.2,2578-2596).
gggaaagatatgacaatct

SEQ ID NO: 368848 - DNA, 19 bp, Homo sapiens
  siRNA target sequence for NUP133 (NM_018230.2,2589-2607).
gacaatctggagatggaat

SEQ ID NO: 368849 - DNA, 19 bp, Homo sapiens
  siRNA target sequence for NUP133 (NM_018230.2,2660-2678).
cctgtgggctgcttctcta

SEQ ID NO: 368850 - DNA, 19 bp, Homo sapiens
  siRNA target sequence for NUP133 (NM_018230.2,2692-2710).
gtgactttgatatattggt

SEQ ID NO: 368851 - DNA, 19 bp, Homo sapiens
  siRNA target sequence for NUP133 (NM_018230.2,2742-2760).
cgactccagcgctacatga

SEQ ID NO: 368852 - DNA, 19 bp, Homo sapiens
  siRNA target sequence for NUP133 (NM_018230.2,2789-2807).
ctttctcttccgttggtat

SEQ ID NO: 368853 - DNA, 19 bp, Homo sapiens
  siRNA target sequence for NUP133 (NM_018230.2,2822-2840).
gcgaggcaaattattatct

SEQ ID NO: 368854 - DNA, 19 bp, Homo sapiens
  siRNA target sequence for NUP133 (NM_018230.2,2824-2842).
gaggcaaattattatctca

SEQ ID NO: 368855 - DNA, 19 bp, Homo sapiens
  siRNA target sequence for NUP133 (NM_018230.2,2895-2913).
ctcagctggttacatgaaa

SEQ ID NO: 368856 - DNA, 19 bp, Homo sapiens
  siRNA target sequence for NUP133 (NM_018230.2,2974-2992).
ctcgttactttgcaaagaa

SEQ ID NO: 368857 - DNA, 19 bp, Homo sapiens
  siRNA target sequence for NUP133 (NM_018230.2,2976-2994).
cgttactttgcaaagaaga

SEQ ID NO: 368858 - DNA, 19 bp, Homo sapiens
  siRNA target sequence for NUP133 (NM_018230.2,3011-3029).
gagtaaattggctgcatta

SEQ ID NO: 368859 - DNA, 19 bp, Homo sapiens
  siRNA target sequence for NUP133 (NM_018230.2,3131-3149).
ggcggagaaacagctaaat

SEQ ID NO: 368860 - DNA, 19 bp, Homo sapiens
  siRNA target sequence for NUP133 (NM_018230.2,3178-3196).
cacaactcattggtctata

SEQ ID NO: 368861 - DNA, 19 bp, Homo sapiens
  siRNA target sequence for NUP133 (NM_018230.2,3180-3198).
caactcattggtctatata

SEQ ID NO: 368862 - DNA, 19 bp, Homo sapiens
  siRNA target sequence for NUP133 (NM_018230.2,3248-3266).
ggacttgttggaatatatt

SEQ ID NO: 368863 - DNA, 19 bp, Homo sapiens
  siRNA target sequence for NUP133 (NM_018230.2,3355-3373).
gcaaagatgatccaattga

SEQ ID NO: 368864 - DNA, 19 bp, Homo sapiens
  siRNA target sequence for NUP133 (NM_018230.2,3356-3374).
caaagatgatccaattgaa

SEQ ID NO: 368865 - DNA, 19 bp, Homo sapiens
  siRNA target sequence for NUP133 (NM_018230.2,3363-3381).
gatccaattgaagtatcta

SEQ ID NO: 368866 - DNA, 19 bp, Homo sapiens
  siRNA target sequence for NUP133 (NM_018230.2,3367-3385).
caattgaagtatctaaaga

SEQ ID NO: 368867 - DNA, 19 bp, Homo sapiens
  siRNA target sequence for NUP133 (NM_018230.2,3401-3419).
gatcttacagaaactttta

SEQ ID NO: 368868 - DNA, 19 bp, Homo sapiens
  siRNA target sequence for NUP133 (NM_018230.2,3476-3494).
ggatcagcttggaagctta

SEQ ID NO: 368869 - DNA, 19 bp, Homo sapiens
  siRNA target sequence for NUP133 (NM_018230.2,3509-3527).
cttcgagtttgttttgaaa

SEQ ID NO: 368870 - DNA, 19 bp, Homo sapiens
  siRNA target sequence for KIRREL (NM_018240.3,807-825).
gggtgagcgtgttgtcttt

SEQ ID NO: 368871 - DNA, 19 bp, Homo sapiens
  siRNA target sequence for KIRREL (NM_018240.3,808-826).
ggtgagcgtgttgtcttta

SEQ ID NO: 368872 - DNA, 19 bp, Homo sapiens
  siRNA target sequence for KIRREL (NM_018240.3,811-829).
gagcgtgttgtctttacct

SEQ ID NO: 368873 - DNA, 19 bp, Homo sapiens
  siRNA target sequence for KIRREL (NM_018240.3,839-857).
cagccaaccccgagatctt

SEQ ID NO: 368874 - DNA, 19 bp, Homo sapiens
  siRNA target sequence for KIRREL (NM_018240.3,869-887).
gggccaaagggggtttctt

SEQ ID NO: 368875 - DNA, 19 bp, Homo sapiens
  siRNA target sequence for KIRREL (NM_018240.3,871-889).
gccaaagggggtttcttga

SEQ ID NO: 368876 - DNA, 19 bp, Homo sapiens
  siRNA target sequence for KIRREL (NM_018240.3,901-919).
cacgagagtcgctatgaga

SEQ ID NO: 368877 - DNA, 19 bp, Homo sapiens
  siRNA target sequence for KIRREL (NM_018240.3,906-924).
gagtcgctatgagacaaat

SEQ ID NO: 368878 - DNA, 19 bp, Homo sapiens
  siRNA target sequence for KIRREL (NM_018240.3,908-926).
gtcgctatgagacaaatgt

SEQ ID NO: 368879 - DNA, 19 bp, Homo sapiens
  siRNA target sequence for KIRREL (NM_018240.3,920-938).
caaatgtggattattcctt

SEQ ID NO: 368880 - DNA, 19 bp, Homo sapiens
  siRNA target sequence for KIRREL (NM_018240.3,1014-1032).
ctttgctccccggattgta

SEQ ID NO: 368881 - DNA, 19 bp, Homo sapiens
  siRNA target sequence for KIRREL (NM_018240.3,1112-1130).
ctctcacctggaccaaaaa

SEQ ID NO: 368882 - DNA, 19 bp, Homo sapiens
  siRNA target sequence for KIRREL (NM_018240.3,1121-1139).
ggaccaaaaaggactcaaa

SEQ ID NO: 368883 - DNA, 19 bp, Homo sapiens
  siRNA target sequence for KIRREL (NM_018240.3,1124-1142).
ccaaaaaggactcaaatat

SEQ ID NO: 368884 - DNA, 19 bp, Homo sapiens
  siRNA target sequence for KIRREL (NM_018240.3,1247-1265).
gggaggtgccgctctatgt

SEQ ID NO: 368885 - DNA, 19 bp, Homo sapiens
  siRNA target sequence for KIRREL (NM_018240.3,1407-1425).
gaccctggaacgctataca

SEQ ID NO: 368886 - DNA, 19 bp, Homo sapiens
  siRNA target sequence for KIRREL (NM_018240.3,1409-1427).
ccctggaacgctatacagt

SEQ ID NO: 368887 - DNA, 19 bp, Homo sapiens
  siRNA target sequence for KIRREL (NM_018240.3,1735-1753).
gagccacttacgatgcatt

SEQ ID NO: 368888 - DNA, 19 bp, Homo sapiens
  siRNA target sequence for KIRREL (NM_018240.3,1739-1757).
cacttacgatgcattctga

SEQ ID NO: 368889 - DNA, 19 bp, Homo sapiens
  siRNA target sequence for KIRREL (NM_018240.3,1787-1805).
cagcaacccgggtcatgaa

SEQ ID NO: 368890 - DNA, 19 bp, Homo sapiens
  siRNA target sequence for KIRREL (NM_018240.3,1807-1825).
gccatctactcgtcgttta

SEQ ID NO: 368891 - DNA, 19 bp, Homo sapiens
  siRNA target sequence for KIRREL (NM_018240.3,1808-1826).
ccatctactcgtcgtttaa

SEQ ID NO: 368892 - DNA, 19 bp, Homo sapiens
  siRNA target sequence for KIRREL (NM_018240.3,1812-1830).
ctactcgtcgtttaaggat

SEQ ID NO: 368893 - DNA, 19 bp, Homo sapiens
  siRNA target sequence for KIRREL (NM_018240.3,1817-1835).
cgtcgtttaaggatgatgt

SEQ ID NO: 368894 - DNA, 19 bp, Homo sapiens
  siRNA target sequence for KIRREL (NM_018240.3,2041-2059).
gcccagctcaacacctata

SEQ ID NO: 368895 - DNA, 19 bp, Homo sapiens
  siRNA target sequence for FLJ10846 (NM_018241.1,548-566).
gtggattcgacctttagta

SEQ ID NO: 368896 - DNA, 19 bp, Homo sapiens
  siRNA target sequence for FLJ10846 (NM_018241.1,559-577).
ctttagtagcggtcatcta

SEQ ID NO: 368897 - DNA, 19 bp, Homo sapiens
  siRNA target sequence for FLJ10846 (NM_018241.1,605-623).
cctatgcgtgtgggaatta

SEQ ID NO: 368898 - DNA, 19 bp, Homo sapiens
  siRNA target sequence for FLJ10846 (NM_018241.1,610-628).
gcgtgtgggaattacagaa

SEQ ID NO: 368899 - DNA, 19 bp, Homo sapiens
  siRNA target sequence for FLJ10846 (NM_018241.1,626-644).
gaaactggaggttggaata

SEQ ID NO: 368900 - DNA, 19 bp, Homo sapiens
  siRNA target sequence for FLJ10846 (NM_018241.1,645-663).
cacaccaaggcttggttta

SEQ ID NO: 368901 - DNA, 19 bp, Homo sapiens
  siRNA target sequence for FLJ10846 (NM_018241.1,680-698).
gctgttgactattcctata

SEQ ID NO: 368902 - DNA, 19 bp, Homo sapiens
  siRNA target sequence for FLJ10846 (NM_018241.1,683-701).
gttgactattcctatatca

SEQ ID NO: 368903 - DNA, 19 bp, Homo sapiens
  siRNA target sequence for FLJ10846 (NM_018241.1,706-724).
gggtgatattgcaacactt

SEQ ID NO: 368904 - DNA, 19 bp, Homo sapiens
  siRNA target sequence for FLJ10846 (NM_018241.1,717-735).
caacacttagtgcattata

SEQ ID NO: 368905 - DNA, 19 bp, Homo sapiens
  siRNA target sequence for FLJ10846 (NM_018241.1,756-774).
ccaataataaggattcttt

SEQ ID NO: 368906 - DNA, 19 bp, Homo sapiens
  siRNA target sequence for FLJ10846 (NM_018241.1,776-794).
gatggtacctatttacagt

SEQ ID NO: 368907 - DNA, 19 bp, Homo sapiens
  siRNA target sequence for FLJ10846 (NM_018241.1,815-833).
gaaatatcccggaattgca

SEQ ID NO: 368908 - DNA, 19 bp, Homo sapiens
  siRNA target sequence for FLJ10846 (NM_018241.1,823-841).
ccggaattgcaatatatgt

SEQ ID NO: 368909 - DNA, 19 bp, Homo sapiens
  siRNA target sequence for FLJ10846 (NM_018241.1,860-878).
ctatgaagcttatgtaatt

SEQ ID NO: 368910 - DNA, 19 bp, Homo sapiens
  siRNA target sequence for FLJ10846 (NM_018241.1,867-885).
gcttatgtaatttacaact

SEQ ID NO: 368911 - DNA, 19 bp, Homo sapiens
  siRNA target sequence for FLJ10846 (NM_018241.1,892-910).
gattccttaccaattatct

SEQ ID NO: 368912 - DNA, 19 bp, Homo sapiens
  siRNA target sequence for FLJ10846 (NM_018241.1,896-914).
ccttaccaattatctaact

SEQ ID NO: 368913 - DNA, 19 bp, Homo sapiens
  siRNA target sequence for FLJ10846 (NM_018241.1,897-915).
cttaccaattatctaacta

SEQ ID NO: 368914 - DNA, 19 bp, Homo sapiens
  siRNA target sequence for FLJ10846 (NM_018241.1,909-927).
ctaactaaccggtatccaa

SEQ ID NO: 368915 - DNA, 19 bp, Homo sapiens
  siRNA target sequence for FLJ10846 (NM_018241.1,913-931).
ctaaccggtatccaaatct

SEQ ID NO: 368916 - DNA, 19 bp, Homo sapiens
  siRNA target sequence for FLJ10846 (NM_018241.1,925-943).
caaatctggtattaatcct

SEQ ID NO: 368917 - DNA, 19 bp, Homo sapiens
  siRNA target sequence for FLJ10846 (NM_018241.1,1016-1034).
gctgtttaggtgcaaacta

SEQ ID NO: 368918 - DNA, 19 bp, Homo sapiens
  siRNA target sequence for FLJ10846 (NM_018241.1,1024-1042).
ggtgcaaactaggtgtatt

SEQ ID NO: 368919 - DNA, 19 bp, Homo sapiens
  siRNA target sequence for FLJ10846 (NM_018241.1,1025-1043).
gtgcaaactaggtgtatta

SEQ ID NO: 368920 - DNA, 19 bp, Homo sapiens
  siRNA target sequence for FLJ10846 (NM_018241.1,1067-1085).
caccaccatcgttgcttta

SEQ ID NO: 368921 - DNA, 19 bp, Homo sapiens
  siRNA target sequence for FLJ10846 (NM_018241.1,1069-1087).
ccaccatcgttgctttaat

SEQ ID NO: 368922 - DNA, 19 bp, Homo sapiens
  siRNA target sequence for FLJ10846 (NM_018241.1,1073-1091).
catcgttgctttaatctgt

SEQ ID NO: 368923 - DNA, 19 bp, Homo sapiens
  siRNA target sequence for FLJ10846 (NM_018241.1,1110-1128).
gacgaagggaactttagct

SEQ ID NO: 368924 - DNA, 19 bp, Homo sapiens
  siRNA target sequence for FLJ10846 (NM_018241.1,1175-1193).
gttgtttgccatgtattgt

SEQ ID NO: 368925 - DNA, 19 bp, Homo sapiens
  siRNA target sequence for FLJ10846 (NM_018241.1,1192-1210).
gtctcctgctcttttataa

SEQ ID NO: 368926 - DNA, 19 bp, Homo sapiens
  siRNA target sequence for FLJ10846 (NM_018241.1,1199-1217).
gctcttttataaagtacta

SEQ ID NO: 368927 - DNA, 19 bp, Homo sapiens
  siRNA target sequence for FLJ10846 (NM_018241.1,1238-1256).
ccaacctgttggcaaattt

SEQ ID NO: 368928 - DNA, 19 bp, Homo sapiens
  siRNA target sequence for FLJ10846 (NM_018241.1,1292-1310).
gcaagcagtagttattgct

SEQ ID NO: 368929 - DNA, 19 bp, Homo sapiens
  siRNA target sequence for FLJ10846 (NM_018241.1,1293-1311).
caagcagtagttattgctt

SEQ ID NO: 368930 - DNA, 19 bp, Homo sapiens
  siRNA target sequence for FLJ10846 (NM_018241.1,1316-1334).
ggtaaaagttggcgttatt

SEQ ID NO: 368931 - DNA, 19 bp, Homo sapiens
  siRNA target sequence for FLJ10846 (NM_018241.1,1323-1341).
gttggcgttatttctgaaa

SEQ ID NO: 368932 - DNA, 19 bp, Homo sapiens
  siRNA target sequence for FLJ10846 (NM_018241.1,1379-1397).
caccggactccaggatttt

SEQ ID NO: 368933 - DNA, 19 bp, Homo sapiens
  siRNA target sequence for FLJ10846 (NM_018241.1,1381-1399).
ccggactccaggattttat

SEQ ID NO: 368934 - DNA, 19 bp, Homo sapiens
  siRNA target sequence for FLJ10846 (NM_018241.1,1382-1400).
cggactccaggattttatt

SEQ ID NO: 368935 - DNA, 19 bp, Homo sapiens
  siRNA target sequence for FLJ10846 (NM_018241.1,1421-1439).
cgctgccattgctcatcat

SEQ ID NO: 368936 - DNA, 19 bp, Homo sapiens
  siRNA target sequence for FLJ10846 (NM_018241.1,1422-1440).
gctgccattgctcatcatt

SEQ ID NO: 368937 - DNA, 19 bp, Homo sapiens
  siRNA target sequence for FLJ10846 (NM_018241.1,1434-1452).
catcattacacattctcat

SEQ ID NO: 368938 - DNA, 19 bp, Homo sapiens
  siRNA target sequence for FLJ10846 (NM_018241.1,1479-1497).
gagggctcatgctttgatt

SEQ ID NO: 368939 - DNA, 19 bp, Homo sapiens
  siRNA target sequence for FLJ10846 (NM_018241.1,1483-1501).
gctcatgctttgattcctt

SEQ ID NO: 368940 - DNA, 19 bp, Homo sapiens
  siRNA target sequence for FLJ10846 (NM_018241.1,1511-1529).
gtgggatgtctcagatatt

SEQ ID NO: 368941 - DNA, 19 bp, Homo sapiens
  siRNA target sequence for FLJ10846 (NM_018241.1,1514-1532).
ggatgtctcagatattaga

SEQ ID NO: 368942 - DNA, 19 bp, Homo sapiens
  siRNA target sequence for FLJ10846 (NM_018241.1,1520-1538).
ctcagatattagagatgat

SEQ ID NO: 368943 - DNA, 19 bp, Homo sapiens
  siRNA target sequence for FLJ10846 (NM_018241.1,1536-1554).
gatatttctgaacaagtaa

SEQ ID NO: 368944 - DNA, 19 bp, Homo sapiens
  siRNA target sequence for FLJ10846 (NM_018241.1,1598-1616).
gtttcccgaggatcaagat

SEQ ID NO: 368945 - DNA, 19 bp, Homo sapiens
  siRNA target sequence for FLJ10846 (NM_018241.1,1602-1620).
cccgaggatcaagatcaaa

SEQ ID NO: 368946 - DNA, 19 bp, Homo sapiens
  siRNA target sequence for FLJ10846 (NM_018241.1,1604-1622).
cgaggatcaagatcaaaat

SEQ ID NO: 368947 - DNA, 19 bp, Homo sapiens
  siRNA target sequence for FLJ10846 (NM_018241.1,1651-1669).
cacaagatgcaatttccat

SEQ ID NO: 368948 - DNA, 19 bp, Homo sapiens
  siRNA target sequence for FLJ10846 (NM_018241.1,1741-1759).
cacctaccacagctaagat

SEQ ID NO: 368949 - DNA, 19 bp, Homo sapiens
  siRNA target sequence for FLJ10846 (NM_018241.1,1743-1761).
cctaccacagctaagatat

SEQ ID NO: 368950 - DNA, 19 bp, Homo sapiens
  siRNA target sequence for FLJ10846 (NM_018241.1,1748-1766).
cacagctaagatatctgat

SEQ ID NO: 368951 - DNA, 19 bp, Homo sapiens
  siRNA target sequence for FLJ10846 (NM_018241.1,1772-1790).
ccttagtgatactatagga

SEQ ID NO: 368952 - DNA, 19 bp, Homo sapiens
  siRNA target sequence for C20orf44 (NM_018244.2,235-253).
cagtatgcagccgattgat

SEQ ID NO: 368953 - DNA, 19 bp, Homo sapiens
  siRNA target sequence for C20orf44 (NM_018244.2,481-499).
gattcacgggacctttgaa

SEQ ID NO: 368954 - DNA, 19 bp, Homo sapiens
  siRNA target sequence for C20orf44 (NM_018244.2,490-508).
gacctttgaaatacagtaa

SEQ ID NO: 368955 - DNA, 19 bp, Homo sapiens
  siRNA target sequence for C20orf44 (NM_018244.2,528-546).
gccctgcgcatgtatacta

SEQ ID NO: 368956 - DNA, 19 bp, Homo sapiens
  siRNA target sequence for C20orf44 (NM_018244.2,562-580).
ctgacttcgaggaattctt

SEQ ID NO: 368957 - DNA, 19 bp, Homo sapiens
  siRNA target sequence for C20orf44 (NM_018244.2,566-584).
cttcgaggaattctttcta

SEQ ID NO: 368958 - DNA, 19 bp, Homo sapiens
  siRNA target sequence for C20orf44 (NM_018244.2,591-609).
cagatgcctgatacattca

SEQ ID NO: 368959 - DNA, 19 bp, Homo sapiens
  siRNA target sequence for C20orf44 (NM_018244.2,593-611).
gatgcctgatacattcaat

SEQ ID NO: 368960 - DNA, 19 bp, Homo sapiens
  siRNA target sequence for C20orf44 (NM_018244.2,673-691).
gccggagtgggaagtacat

SEQ ID NO: 368961 - DNA, 19 bp, Homo sapiens
  siRNA target sequence for C20orf44 (NM_018244.2,675-693).
cggagtgggaagtacatgt

SEQ ID NO: 368962 - DNA, 19 bp, Homo sapiens
  siRNA target sequence for C20orf44 (NM_018244.2,686-704).
gtacatgtgtcgtatcata

SEQ ID NO: 368963 - DNA, 19 bp, Homo sapiens
  siRNA target sequence for C20orf44 (NM_018244.2,689-707).
catgtgtcgtatcatagtt

SEQ ID NO: 368964 - DNA, 19 bp, Homo sapiens
  siRNA target sequence for C20orf44 (NM_018244.2,694-712).
gtcgtatcatagttcattt

SEQ ID NO: 368965 - DNA, 19 bp, Homo sapiens
  siRNA target sequence for C20orf44 (NM_018244.2,696-714).
cgtatcatagttcatttta

SEQ ID NO: 368966 - DNA, 19 bp, Homo sapiens
  siRNA target sequence for C20orf44 (NM_018244.2,740-758).
cagagtcatgggggttaat

SEQ ID NO: 368967 - DNA, 19 bp, Homo sapiens
  siRNA target sequence for C20orf44 (NM_018244.2,751-769).
gggttaatccctatatcct

SEQ ID NO: 368968 - DNA, 19 bp, Homo sapiens
  siRNA target sequence for C20orf44 (NM_018244.2,878-896).
cttcttcaaccggaaatgt

SEQ ID NO: 368969 - DNA, 19 bp, Homo sapiens
  siRNA target sequence for C20orf44 (NM_018244.2,881-899).
cttcaaccggaaatgtgaa

SEQ ID NO: 368970 - DNA, 19 bp, Homo sapiens
  siRNA target sequence for C20orf44 (NM_018244.2,904-922).
ctcgacatcttgaattgct

SEQ ID NO: 368971 - DNA, 19 bp, Homo sapiens
  siRNA target sequence for C20orf44 (NM_018244.2,1007-1025).
ccctctagtggagaagaat

SEQ ID NO: 368972 - DNA, 19 bp, Homo sapiens
  siRNA target sequence for C20orf44 (NM_018244.2,1044-1062).
ccccattctccgacttaca

SEQ ID NO: 368973 - DNA, 19 bp, Homo sapiens
  siRNA target sequence for C20orf44 (NM_018244.2,1045-1063).
cccattctccgacttacaa

SEQ ID NO: 368974 - DNA, 19 bp, Homo sapiens
  siRNA target sequence for FLJ10853 (NM_018246.1,309-327).
gcaagatgaacaacgttaa

SEQ ID NO: 368975 - DNA, 19 bp, Homo sapiens
  siRNA target sequence for FLJ10853 (NM_018246.1,310-328).
caagatgaacaacgttaat

SEQ ID NO: 368976 - DNA, 19 bp, Homo sapiens
  siRNA target sequence for FLJ10853 (NM_018246.1,319-337).
caacgttaatgtggtatat

SEQ ID NO: 368977 - DNA, 19 bp, Homo sapiens
  siRNA target sequence for FLJ10853 (NM_018246.1,342-360).
cgtggtctaacctgaagaa

SEQ ID NO: 368978 - DNA, 19 bp, Homo sapiens
  siRNA target sequence for FLJ10853 (NM_018246.1,343-361).
gtggtctaacctgaagaaa

SEQ ID NO: 368979 - DNA, 19 bp, Homo sapiens
  siRNA target sequence for FLJ10853 (NM_018246.1,612-630).
ggagctattcatcactaat

SEQ ID NO: 368980 - DNA, 19 bp, Homo sapiens
  siRNA target sequence for FLJ10853 (NM_018246.1,621-639).
catcactaatgaaagttga

SEQ ID NO: 368981 - DNA, 19 bp, Homo sapiens
  siRNA target sequence for CDK5RAP2 (NM_018249.3,285-303).
ggtctgctcccaaatgtgt

SEQ ID NO: 368982 - DNA, 19 bp, Homo sapiens
  siRNA target sequence for CDK5RAP2 (NM_018249.3,357-375).
caaatcactgaattgaaga

SEQ ID NO: 368983 - DNA, 19 bp, Homo sapiens
  siRNA target sequence for CDK5RAP2 (NM_018249.3,389-407).
cctaaagctccgcatctat

SEQ ID NO: 368984 - DNA, 19 bp, Homo sapiens
  siRNA target sequence for CDK5RAP2 (NM_018249.3,395-413).
gctccgcatctatttcctt

SEQ ID NO: 368985 - DNA, 19 bp, Homo sapiens
  siRNA target sequence for CDK5RAP2 (NM_018249.3,627-645).
gtggaagatctcctaacta

SEQ ID NO: 368986 - DNA, 19 bp, Homo sapiens
  siRNA target sequence for CDK5RAP2 (NM_018249.3,629-647).
ggaagatctcctaactaaa

SEQ ID NO: 368987 - DNA, 19 bp, Homo sapiens
  siRNA target sequence for CDK5RAP2 (NM_018249.3,630-648).
gaagatctcctaactaaaa

SEQ ID NO: 368988 - DNA, 19 bp, Homo sapiens
  siRNA target sequence for CDK5RAP2 (NM_018249.3,732-750).
cttcggttgcgtttggaaa

SEQ ID NO: 368989 - DNA, 19 bp, Homo sapiens
  siRNA target sequence for CDK5RAP2 (NM_018249.3,736-754).
ggttgcgtttggaaagcaa

SEQ ID NO: 368990 - DNA, 19 bp, Homo sapiens
  siRNA target sequence for CDK5RAP2 (NM_018249.3,741-759).
cgtttggaaagcaagcttt

SEQ ID NO: 368991 - DNA, 19 bp, Homo sapiens
  siRNA target sequence for CDK5RAP2 (NM_018249.3,845-863).
gtctttgaagagcaaagaa

SEQ ID NO: 368992 - DNA, 19 bp, Homo sapiens
  siRNA target sequence for CDK5RAP2 (NM_018249.3,1031-1049).
gaggatccaggcacttgaa

SEQ ID NO: 368993 - DNA, 19 bp, Homo sapiens
  siRNA target sequence for CDK5RAP2 (NM_018249.3,1116-1134).
gccattcagggtttaacca

SEQ ID NO: 368994 - DNA, 19 bp, Homo sapiens
  siRNA target sequence for CDK5RAP2 (NM_018249.3,1126-1144).
gtttaaccatggcattaaa

SEQ ID NO: 368995 - DNA, 19 bp, Homo sapiens
  siRNA target sequence for CDK5RAP2 (NM_018249.3,1265-1283).
ctatgagactgctctatca

SEQ ID NO: 368996 - DNA, 19 bp, Homo sapiens
  siRNA target sequence for CDK5RAP2 (NM_018249.3,1302-1320).
gctgcgctgcgctcacaaa

SEQ ID NO: 368997 - DNA, 19 bp, Homo sapiens
  siRNA target sequence for CDK5RAP2 (NM_018249.3,1303-1321).
ctgcgctgcgctcacaaaa

SEQ ID NO: 368998 - DNA, 19 bp, Homo sapiens
  siRNA target sequence for CDK5RAP2 (NM_018249.3,1306-1324).
cgctgcgctcacaaaacct

SEQ ID NO: 368999 - DNA, 19 bp, Homo sapiens
  siRNA target sequence for CDK5RAP2 (NM_018249.3,1317-1335).
caaaacctcaccaagagta

SEQ ID NO: 369000 - DNA, 19 bp, Homo sapiens
  siRNA target sequence for CDK5RAP2 (NM_018249.3,1346-1364).
cagactgcgtagaagcatt

SEQ ID NO: 369001 - DNA, 19 bp, Homo sapiens
  siRNA target sequence for CDK5RAP2 (NM_018249.3,1460-1478).
ctgcaccatccgtgatctt

SEQ ID NO: 369002 - DNA, 19 bp, Homo sapiens
  siRNA target sequence for CDK5RAP2 (NM_018249.3,1463-1481).
caccatccgtgatcttaga

SEQ ID NO: 369003 - DNA, 19 bp, Homo sapiens
  siRNA target sequence for CDK5RAP2 (NM_018249.3,1465-1483).
ccatccgtgatcttagaaa

SEQ ID NO: 369004 - DNA, 19 bp, Homo sapiens
  siRNA target sequence for CDK5RAP2 (NM_018249.3,1466-1484).
catccgtgatcttagaaat

SEQ ID NO: 369005 - DNA, 19 bp, Homo sapiens
  siRNA target sequence for CDK5RAP2 (NM_018249.3,1469-1487).
ccgtgatcttagaaatgaa

SEQ ID NO: 369006 - DNA, 19 bp, Homo sapiens
  siRNA target sequence for CDK5RAP2 (NM_018249.3,1549-1567).
gtcttctgagtgaaagcaa

SEQ ID NO: 369007 - DNA, 19 bp, Homo sapiens
  siRNA target sequence for CDK5RAP2 (NM_018249.3,1595-1613).
gatcaaacatctaacagaa

SEQ ID NO: 369008 - DNA, 19 bp, Homo sapiens
  siRNA target sequence for CDK5RAP2 (NM_018249.3,1598-1616).
caaacatctaacagaaagt

SEQ ID NO: 369009 - DNA, 19 bp, Homo sapiens
  siRNA target sequence for CDK5RAP2 (NM_018249.3,1628-1646).
ggacgtgttgcttcagaaa

SEQ ID NO: 369010 - DNA, 19 bp, Homo sapiens
  siRNA target sequence for CDK5RAP2 (NM_018249.3,1629-1647).
gacgtgttgcttcagaaat

SEQ ID NO: 369011 - DNA, 19 bp, Homo sapiens
  siRNA target sequence for CDK5RAP2 (NM_018249.3,1632-1650).
gtgttgcttcagaaattca

SEQ ID NO: 369012 - DNA, 19 bp, Homo sapiens
  siRNA target sequence for CDK5RAP2 (NM_018249.3,1718-1736).
gagtgaaggcttaataaca

SEQ ID NO: 369013 - DNA, 19 bp, Homo sapiens
  siRNA target sequence for CDK5RAP2 (NM_018249.3,1720-1738).
gtgaaggcttaataacaga

SEQ ID NO: 369014 - DNA, 19 bp, Homo sapiens
  siRNA target sequence for CDK5RAP2 (NM_018249.3,1815-1833).
gagctgattcaggtcttaa

SEQ ID NO: 369015 - DNA, 19 bp, Homo sapiens
  siRNA target sequence for CDK5RAP2 (NM_018249.3,1818-1836).
ctgattcaggtcttaaaga

SEQ ID NO: 369016 - DNA, 19 bp, Homo sapiens
  siRNA target sequence for CDK5RAP2 (NM_018249.3,1835-1853).
gaaagagcaggacatctat

SEQ ID NO: 369017 - DNA, 19 bp, Homo sapiens
  siRNA target sequence for CDK5RAP2 (NM_018249.3,1899-1917).
ctgcaggctgagttaaaca

SEQ ID NO: 369018 - DNA, 19 bp, Homo sapiens
  siRNA target sequence for CDK5RAP2 (NM_018249.3,1950-1968).
gatgtgctttcatatcaga

SEQ ID NO: 369019 - DNA, 19 bp, Homo sapiens
  siRNA target sequence for CDK5RAP2 (NM_018249.3,2012-2030).
gcgggaagaagaatcattt

SEQ ID NO: 369020 - DNA, 19 bp, Homo sapiens
  siRNA target sequence for CDK5RAP2 (NM_018249.3,2026-2044).
cattttcactttatagtga

SEQ ID NO: 369021 - DNA, 19 bp, Homo sapiens
  siRNA target sequence for CDK5RAP2 (NM_018249.3,2041-2059).
gtgatcaaacatcttatct

SEQ ID NO: 369022 - DNA, 19 bp, Homo sapiens
  siRNA target sequence for CDK5RAP2 (NM_018249.3,2043-2061).
gatcaaacatcttatctaa

SEQ ID NO: 369023 - DNA, 19 bp, Homo sapiens
  siRNA target sequence for CDK5RAP2 (NM_018249.3,2085-2103).
cggtttcaagtggaacatt

SEQ ID NO: 369024 - DNA, 19 bp, Homo sapiens
  siRNA target sequence for CDK5RAP2 (NM_018249.3,2244-2262).
cttgcgtctacagaacaaa

SEQ ID NO: 369025 - DNA, 19 bp, Homo sapiens
  siRNA target sequence for CDK5RAP2 (NM_018249.3,2285-2303).
ggacgaggacacgatcaaa

SEQ ID NO: 369026 - DNA, 19 bp, Homo sapiens
  siRNA target sequence for CDK5RAP2 (NM_018249.3,2286-2304).
gacgaggacacgatcaaaa

SEQ ID NO: 369027 - DNA, 19 bp, Homo sapiens
  siRNA target sequence for CDK5RAP2 (NM_018249.3,2288-2306).
cgaggacacgatcaaaatt

SEQ ID NO: 369028 - DNA, 19 bp, Homo sapiens
  siRNA target sequence for CDK5RAP2 (NM_018249.3,2309-2327).
ggaggatgacgagattaat

SEQ ID NO: 369029 - DNA, 19 bp, Homo sapiens
  siRNA target sequence for CDK5RAP2 (NM_018249.3,2342-2360).
gcatttgcagcagagtaat

SEQ ID NO: 369030 - DNA, 19 bp, Homo sapiens
  siRNA target sequence for CDK5RAP2 (NM_018249.3,2380-2398).
ccaaaggaggctgcaaaaa

SEQ ID NO: 369031 - DNA, 19 bp, Homo sapiens
  siRNA target sequence for CDK5RAP2 (NM_018249.3,2410-2428).
ggcacacggagtctaagat

SEQ ID NO: 369032 - DNA, 19 bp, Homo sapiens
  siRNA target sequence for CDK5RAP2 (NM_018249.3,2416-2434).
cggagtctaagatttcaga

SEQ ID NO: 369033 - DNA, 19 bp, Homo sapiens
  siRNA target sequence for CDK5RAP2 (NM_018249.3,2452-2470).
cacctggctgcctagaaga

SEQ ID NO: 369034 - DNA, 19 bp, Homo sapiens
  siRNA target sequence for CDK5RAP2 (NM_018249.3,2487-2505).
ctgcttgcccctttgttca

SEQ ID NO: 369035 - DNA, 19 bp, Homo sapiens
  siRNA target sequence for CDK5RAP2 (NM_018249.3,2504-2522).
caatgagaaggccacatta

SEQ ID NO: 369036 - DNA, 19 bp, Homo sapiens
  siRNA target sequence for CDK5RAP2 (NM_018249.3,2536-2554).
ggccagaccttctgaaagt

SEQ ID NO: 369037 - DNA, 19 bp, Homo sapiens
  siRNA target sequence for CDK5RAP2 (NM_018249.3,2608-2626).
gagaacaccttgatggtaa

SEQ ID NO: 369038 - DNA, 19 bp, Homo sapiens
  siRNA target sequence for CDK5RAP2 (NM_018249.3,2697-2715).
catgatgaactgaagttgt

SEQ ID NO: 369039 - DNA, 19 bp, Homo sapiens
  siRNA target sequence for CDK5RAP2 (NM_018249.3,2800-2818).
gcgacctgctgagattcaa

SEQ ID NO: 369040 - DNA, 19 bp, Homo sapiens
  siRNA target sequence for CDK5RAP2 (NM_018249.3,2928-2946).
ctttccctccctggtatta

SEQ ID NO: 369041 - DNA, 19 bp, Homo sapiens
  siRNA target sequence for CDK5RAP2 (NM_018249.3,2932-2950).
ccctccctggtattaccaa

SEQ ID NO: 369042 - DNA, 19 bp, Homo sapiens
  siRNA target sequence for CDK5RAP2 (NM_018249.3,2968-2986).
cccgcttgccaatcctaat

SEQ ID NO: 369043 - DNA, 19 bp, Homo sapiens
  siRNA target sequence for CDK5RAP2 (NM_018249.3,2970-2988).
cgcttgccaatcctaataa

SEQ ID NO: 369044 - DNA, 19 bp, Homo sapiens
  siRNA target sequence for CDK5RAP2 (NM_018249.3,2972-2990).
cttgccaatcctaataaaa

SEQ ID NO: 369045 - DNA, 19 bp, Homo sapiens
  siRNA target sequence for CDK5RAP2 (NM_018249.3,2992-3010).
catcccggtcattaggaaa

SEQ ID NO: 369046 - DNA, 19 bp, Homo sapiens
  siRNA target sequence for CDK5RAP2 (NM_018249.3,2995-3013).
cccggtcattaggaaatat

SEQ ID NO: 369047 - DNA, 19 bp, Homo sapiens
  siRNA target sequence for CDK5RAP2 (NM_018249.3,2997-3015).
cggtcattaggaaatatgt

SEQ ID NO: 369048 - DNA, 19 bp, Homo sapiens
  siRNA target sequence for CDK5RAP2 (NM_018249.3,3083-3101).
gctgaaggagtttaaaact

SEQ ID NO: 369049 - DNA, 19 bp, Homo sapiens
  siRNA target sequence for CDK5RAP2 (NM_018249.3,3084-3102).
ctgaaggagtttaaaactt

SEQ ID NO: 369050 - DNA, 19 bp, Homo sapiens
  siRNA target sequence for CDK5RAP2 (NM_018249.3,3111-3129).
caacttcaccaaaagttaa

SEQ ID NO: 369051 - DNA, 19 bp, Homo sapiens
  siRNA target sequence for CDK5RAP2 (NM_018249.3,3159-3177).
ccaacgcccgacaaaacgt

SEQ ID NO: 369052 - DNA, 19 bp, Homo sapiens
  siRNA target sequence for CDK5RAP2 (NM_018249.3,3160-3178).
caacgcccgacaaaacgtt

SEQ ID NO: 369053 - DNA, 19 bp, Homo sapiens
  siRNA target sequence for CDK5RAP2 (NM_018249.3,3341-3359).
cagcttgccatcatgcaaa

SEQ ID NO: 369054 - DNA, 19 bp, Homo sapiens
  siRNA target sequence for CDK5RAP2 (NM_018249.3,3453-3471).
gatcagtcagagagcatta

SEQ ID NO: 369055 - DNA, 19 bp, Homo sapiens
  siRNA target sequence for CDK5RAP2 (NM_018249.3,3478-3496).
caaatgagacagaatactt

SEQ ID NO: 369056 - DNA, 19 bp, Homo sapiens
  siRNA target sequence for CDK5RAP2 (NM_018249.3,3575-3593).
gtgcagtgaggccataatt

SEQ ID NO: 369057 - DNA, 19 bp, Homo sapiens
  siRNA target sequence for CDK5RAP2 (NM_018249.3,3580-3598).
gtgaggccataattacagt

SEQ ID NO: 369058 - DNA, 19 bp, Homo sapiens
  siRNA target sequence for CDK5RAP2 (NM_018249.3,3638-3656).
gcccaagaatggttctgat

SEQ ID NO: 369059 - DNA, 19 bp, Homo sapiens
  siRNA target sequence for CDK5RAP2 (NM_018249.3,3828-3846).
cttttcagtgagatccata

SEQ ID NO: 369060 - DNA, 19 bp, Homo sapiens
  siRNA target sequence for CDK5RAP2 (NM_018249.3,3872-3890).
ctcacctcccagatacgat

SEQ ID NO: 369061 - DNA, 19 bp, Homo sapiens
  siRNA target sequence for CDK5RAP2 (NM_018249.3,3876-3894).
cctcccagatacgattcat

SEQ ID NO: 369062 - DNA, 19 bp, Homo sapiens
  siRNA target sequence for CDK5RAP2 (NM_018249.3,3881-3899).
cagatacgattcattagtt

SEQ ID NO: 369063 - DNA, 19 bp, Homo sapiens
  siRNA target sequence for CDK5RAP2 (NM_018249.3,3924-3942).
cttcaacggcagcagatta

SEQ ID NO: 369064 - DNA, 19 bp, Homo sapiens
  siRNA target sequence for CDK5RAP2 (NM_018249.3,3978-3996).
cacatgaacaccatgatta

SEQ ID NO: 369065 - DNA, 19 bp, Homo sapiens
  siRNA target sequence for CDK5RAP2 (NM_018249.3,4056-4074).
caggaacagctgaatcaat

SEQ ID NO: 369066 - DNA, 19 bp, Homo sapiens
  siRNA target sequence for CDK5RAP2 (NM_018249.3,4058-4076).
ggaacagctgaatcaatgt

SEQ ID NO: 369067 - DNA, 19 bp, Homo sapiens
  siRNA target sequence for CDK5RAP2 (NM_018249.3,4104-4122).
ctatttctcaacggaaaat

SEQ ID NO: 369068 - DNA, 19 bp, Homo sapiens
  siRNA target sequence for CDK5RAP2 (NM_018249.3,4170-4188).
gaggaagacaacttaacct

SEQ ID NO: 369069 - DNA, 19 bp, Homo sapiens
  siRNA target sequence for CDK5RAP2 (NM_018249.3,4228-4246).
ctcatgcgctctctgatta

SEQ ID NO: 369070 - DNA, 19 bp, Homo sapiens
  siRNA target sequence for CDK5RAP2 (NM_018249.3,4233-4251).
gcgctctctgattatgaaa

SEQ ID NO: 369071 - DNA, 19 bp, Homo sapiens
  siRNA target sequence for CDK5RAP2 (NM_018249.3,4235-4253).
gctctctgattatgaaaca

SEQ ID NO: 369072 - DNA, 19 bp, Homo sapiens
  siRNA target sequence for CDK5RAP2 (NM_018249.3,4236-4254).
ctctctgattatgaaacat

SEQ ID NO: 369073 - DNA, 19 bp, Homo sapiens
  siRNA target sequence for CDK5RAP2 (NM_018249.3,4275-4293).
cgagaccagaagcaagata

SEQ ID NO: 369074 - DNA, 19 bp, Homo sapiens
  siRNA target sequence for CDK5RAP2 (NM_018249.3,4314-4332).
gttatggtgaacagttttt

SEQ ID NO: 369075 - DNA, 19 bp, Homo sapiens
  siRNA target sequence for CDK5RAP2 (NM_018249.3,4327-4345).
gtttttctcaagacttact

SEQ ID NO: 369076 - DNA, 19 bp, Homo sapiens
  siRNA target sequence for CDK5RAP2 (NM_018249.3,4333-4351).
ctcaagacttactaatgga

SEQ ID NO: 369077 - DNA, 19 bp, Homo sapiens
  siRNA target sequence for CDK5RAP2 (NM_018249.3,4340-4358).
cttactaatggaacacata

SEQ ID NO: 369078 - DNA, 19 bp, Homo sapiens
  siRNA target sequence for CDK5RAP2 (NM_018249.3,4359-4377).
caggaaattcgaactttga

SEQ ID NO: 369079 - DNA, 19 bp, Homo sapiens
  siRNA target sequence for CDK5RAP2 (NM_018249.3,4372-4390).
ctttgagaaagcgtttaga

SEQ ID NO: 369080 - DNA, 19 bp, Homo sapiens
  siRNA target sequence for CDK5RAP2 (NM_018249.3,4382-4400).
gcgtttagaagaatctatt

SEQ ID NO: 369081 - DNA, 19 bp, Homo sapiens
  siRNA target sequence for CDK5RAP2 (NM_018249.3,4431-4449).
gaacggcaaggatctgaat

SEQ ID NO: 369082 - DNA, 19 bp, Homo sapiens
  siRNA target sequence for CDK5RAP2 (NM_018249.3,4455-4473).
caaggttctacaagcattt

SEQ ID NO: 369083 - DNA, 19 bp, Homo sapiens
  siRNA target sequence for CDK5RAP2 (NM_018249.3,4491-4509).
cttcatagttctctaacat

SEQ ID NO: 369084 - DNA, 19 bp, Homo sapiens
  siRNA target sequence for CDK5RAP2 (NM_018249.3,4586-4604).
ggagaatgacaaattacga

SEQ ID NO: 369085 - DNA, 19 bp, Homo sapiens
  siRNA target sequence for CDK5RAP2 (NM_018249.3,4793-4811).
gcagctgctctcacagaat

SEQ ID NO: 369086 - DNA, 19 bp, Homo sapiens
  siRNA target sequence for CDK5RAP2 (NM_018249.3,4906-4924).
ggaaggggcaggatccttt

SEQ ID NO: 369087 - DNA, 19 bp, Homo sapiens
  siRNA target sequence for CDK5RAP2 (NM_018249.3,4960-4978).
ctctgcgcttgcaactaga

SEQ ID NO: 369088 - DNA, 19 bp, Homo sapiens
  siRNA target sequence for CDK5RAP2 (NM_018249.3,5185-5203).
cagtgacaccaaaatcagt

SEQ ID NO: 369089 - DNA, 19 bp, Homo sapiens
  siRNA target sequence for CDK5RAP2 (NM_018249.3,5187-5205).
gtgacaccaaaatcagttt

SEQ ID NO: 369090 - DNA, 19 bp, Homo sapiens
  siRNA target sequence for CDK5RAP2 (NM_018249.3,5217-5235).
ccactctctgggaatgaca

SEQ ID NO: 369091 - DNA, 19 bp, Homo sapiens
  siRNA target sequence for CDK5RAP2 (NM_018249.3,5633-5651).
ggtcaccaaactacataaa

SEQ ID NO: 369092 - DNA, 19 bp, Homo sapiens
  siRNA target sequence for CDK5RAP2 (NM_018249.3,5707-5725).
gcaagcgccaggaaaaagt

SEQ ID NO: 369093 - DNA, 19 bp, Homo sapiens
  siRNA target sequence for CDK5RAP2 (NM_018249.3,5744-5762).
cgtaacccacaaaatcctt

SEQ ID NO: 369094 - DNA, 19 bp, Homo sapiens
  siRNA target sequence for FLJ10871 (NM_018250.1,98-116).
gtcagggcacccaacctta

SEQ ID NO: 369095 - DNA, 19 bp, Homo sapiens
  siRNA target sequence for FLJ10871 (NM_018250.1,102-120).
gggcacccaaccttaccat

SEQ ID NO: 369096 - DNA, 19 bp, Homo sapiens
  siRNA target sequence for FLJ10871 (NM_018250.1,107-125).
cccaaccttaccatgcaat

SEQ ID NO: 369097 - DNA, 19 bp, Homo sapiens
  siRNA target sequence for FLJ10871 (NM_018250.1,117-135).
ccatgcaatgtgctcaaat

SEQ ID NO: 369098 - DNA, 19 bp, Homo sapiens
  siRNA target sequence for FLJ10871 (NM_018250.1,118-136).
catgcaatgtgctcaaatt

SEQ ID NO: 369099 - DNA, 19 bp, Homo sapiens
  siRNA target sequence for FLJ10871 (NM_018250.1,121-139).
gcaatgtgctcaaattcaa

SEQ ID NO: 369100 - DNA, 19 bp, Homo sapiens
  siRNA target sequence for FLJ10871 (NM_018250.1,122-140).
caatgtgctcaaattcaaa

SEQ ID NO: 369101 - DNA, 19 bp, Homo sapiens
  siRNA target sequence for FLJ10871 (NM_018250.1,287-305).
ggagtgctcgggtcatgta

SEQ ID NO: 369102 - DNA, 19 bp, Homo sapiens
  siRNA target sequence for FLJ10871 (NM_018250.1,290-308).
gtgctcgggtcatgtattt

SEQ ID NO: 369103 - DNA, 19 bp, Homo sapiens
  siRNA target sequence for FLJ10871 (NM_018250.1,292-310).
gctcgggtcatgtatttgt

SEQ ID NO: 369104 - DNA, 19 bp, Homo sapiens
  siRNA target sequence for FLJ10871 (NM_018250.1,320-338).
gccggaattctgtttacca

SEQ ID NO: 369105 - DNA, 19 bp, Homo sapiens
  siRNA target sequence for FLJ10871 (NM_018250.1,337-355).
cagagacggagctaataga

SEQ ID NO: 369106 - DNA, 19 bp, Homo sapiens
  siRNA target sequence for FLJ10871 (NM_018250.1,359-377).
gtctacagtagatgtgatt

SEQ ID NO: 369107 - DNA, 19 bp, Homo sapiens
  siRNA target sequence for FLJ10871 (NM_018250.1,374-392).
gattctcatctctaactat

SEQ ID NO: 369108 - DNA, 19 bp, Homo sapiens
  siRNA target sequence for FLJ10871 (NM_018250.1,603-621).
gtctcaacctggagaagat

SEQ ID NO: 369109 - DNA, 19 bp, Homo sapiens
  siRNA target sequence for FLJ10871 (NM_018250.1,613-631).
ggagaagatgctatacaat

SEQ ID NO: 369110 - DNA, 19 bp, Homo sapiens
  siRNA target sequence for FLJ10871 (NM_018250.1,671-689).
gggatattctcagaaaatt

SEQ ID NO: 369111 - DNA, 19 bp, Homo sapiens
  siRNA target sequence for FLJ10871 (NM_018250.1,754-772).
ggatcatccagtctcatta

SEQ ID NO: 369112 - DNA, 19 bp, Homo sapiens
  siRNA target sequence for FLJ10871 (NM_018250.1,774-792).
gagaaagtgtcttatgtct

SEQ ID NO: 369113 - DNA, 19 bp, Homo sapiens
  siRNA target sequence for FLJ10871 (NM_018250.1,830-848).
ggaccaagcttctctcaaa

SEQ ID NO: 369114 - DNA, 19 bp, Homo sapiens
  siRNA target sequence for FLJ10871 (NM_018250.1,845-863).
caaaaacagcgatgttctt

SEQ ID NO: 369115 - DNA, 19 bp, Homo sapiens
  siRNA target sequence for FLJ10871 (NM_018250.1,1001-1019).
cctcctggagtgcctatat

SEQ ID NO: 369116 - DNA, 19 bp, Homo sapiens
  siRNA target sequence for FLJ10871 (NM_018250.1,1005-1023).
ctggagtgcctatatcagt

SEQ ID NO: 369117 - DNA, 19 bp, Homo sapiens
  siRNA target sequence for FLJ10871 (NM_018250.1,1176-1194).
gagctcattcagaccaata

SEQ ID NO: 369118 - DNA, 19 bp, Homo sapiens
  siRNA target sequence for FLJ10871 (NM_018250.1,1224-1242).
gacttcagcaacgacttta

SEQ ID NO: 369119 - DNA, 19 bp, Homo sapiens
  siRNA target sequence for FLJ10871 (NM_018250.1,1226-1244).
cttcagcaacgactttaga

SEQ ID NO: 369120 - DNA, 19 bp, Homo sapiens
  siRNA target sequence for FLJ10871 (NM_018250.1,1288-1306).
gggacgtggtccacttcat

SEQ ID NO: 369121 - DNA, 19 bp, Homo sapiens
  siRNA target sequence for FLJ10871 (NM_018250.1,1307-1325).
ggagctctggggaaaatct

SEQ ID NO: 369122 - DNA, 19 bp, Homo sapiens
  siRNA target sequence for FLJ10871 (NM_018250.1,1308-1326).
gagctctggggaaaatcta

SEQ ID NO: 369123 - DNA, 19 bp, Homo sapiens
  siRNA target sequence for FLJ10871 (NM_018250.1,1310-1328).
gctctggggaaaatctagt

SEQ ID NO: 369124 - DNA, 19 bp, Homo sapiens
  siRNA target sequence for FLJ10871 (NM_018250.1,1317-1335).
ggaaaatctagtctcaata

SEQ ID NO: 369125 - DNA, 19 bp, Homo sapiens
  siRNA target sequence for FLJ10871 (NM_018250.1,1327-1345).
gtctcaataccgtcatatt

SEQ ID NO: 369126 - DNA, 19 bp, Homo sapiens
  siRNA target sequence for FLJ10871 (NM_018250.1,1329-1347).
ctcaataccgtcatattca

SEQ ID NO: 369127 - DNA, 19 bp, Homo sapiens
  siRNA target sequence for FLJ10871 (NM_018250.1,1707-1725).
gtgctgcacaccaaagata

SEQ ID NO: 369128 - DNA, 19 bp, Homo sapiens
  siRNA target sequence for FLJ10871 (NM_018250.1,1768-1786).
cgagcgggaagaagagaaa

SEQ ID NO: 369129 - DNA, 19 bp, Homo sapiens
  siRNA target sequence for FLJ10871 (NM_018250.1,1818-1836).
gtcctgaagcctttgttga

SEQ ID NO: 369130 - DNA, 19 bp, Homo sapiens
  siRNA target sequence for FLJ10871 (NM_018250.1,1885-1903).
gcttcagtgatattaaggt

SEQ ID NO: 369131 - DNA, 19 bp, Homo sapiens
  siRNA target sequence for FLJ10871 (NM_018250.1,1951-1969).
cgctcatccagattgaaga

SEQ ID NO: 369132 - DNA, 19 bp, Homo sapiens
  siRNA target sequence for FLJ10871 (NM_018250.1,1952-1970).
gctcatccagattgaagaa

SEQ ID NO: 369133 - DNA, 19 bp, Homo sapiens
  siRNA target sequence for FLJ10871 (NM_018250.1,1968-1986).
gaagactcgacccatatca

SEQ ID NO: 369134 - DNA, 19 bp, Homo sapiens
  siRNA target sequence for FLJ10871 (NM_018250.1,1971-1989).
gactcgacccatatcatct

SEQ ID NO: 369135 - DNA, 19 bp, Homo sapiens
  siRNA target sequence for FLJ10871 (NM_018250.1,2022-2040).
cgggaccttgtcctcaaat

SEQ ID NO: 369136 - DNA, 19 bp, Homo sapiens
  siRNA target sequence for FLJ10871 (NM_018250.1,2027-2045).
ccttgtcctcaaattctta

SEQ ID NO: 369137 - DNA, 19 bp, Homo sapiens
  siRNA target sequence for FLJ10874 (NM_018252.1,456-474).
ggaagtggatcgctatgat

SEQ ID NO: 369138 - DNA, 19 bp, Homo sapiens
  siRNA target sequence for FLJ10874 (NM_018252.1,518-536).
gctgtaagcaccattacga

SEQ ID NO: 369139 - DNA, 19 bp, Homo sapiens
  siRNA target sequence for FLJ10874 (NM_018252.1,564-582).
ccagccgggtgacatgaat

SEQ ID NO: 369140 - DNA, 19 bp, Homo sapiens
  siRNA target sequence for FLJ10874 (NM_018252.1,565-583).
cagccgggtgacatgaatt

SEQ ID NO: 369141 - DNA, 19 bp, Homo sapiens
  siRNA target sequence for FLJ10874 (NM_018252.1,618-636).
ctccaatcagactgtgaaa

SEQ ID NO: 369142 - DNA, 19 bp, Homo sapiens
  siRNA target sequence for FLJ10874 (NM_018252.1,847-865).
cgcacctgggtcaagatgt

SEQ ID NO: 369143 - DNA, 19 bp, Homo sapiens
  siRNA target sequence for FLJ10874 (NM_018252.1,923-941).
caagtgtggttaactacat

SEQ ID NO: 369144 - DNA, 19 bp, Homo sapiens
  siRNA target sequence for FLJ10874 (NM_018252.1,1041-1059).
caatccttggaacacaatt

SEQ ID NO: 369145 - DNA, 19 bp, Homo sapiens
  siRNA target sequence for FLJ10874 (NM_018252.1,1108-1126).
gccaaactgagtataaaat

SEQ ID NO: 369146 - DNA, 19 bp, Homo sapiens
  siRNA target sequence for FLJ10874 (NM_018252.1,1168-1186).
caggcaacgagccacataa

SEQ ID NO: 369147 - DNA, 19 bp, Homo sapiens
  siRNA target sequence for FLJ10874 (NM_018252.1,1171-1189).
gcaacgagccacataagct

SEQ ID NO: 369148 - DNA, 19 bp, Homo sapiens
  siRNA target sequence for STATIP1 (NM_018255.1,29-47).
gagacttctcacgtgtttt

SEQ ID NO: 369149 - DNA, 19 bp, Homo sapiens
  siRNA target sequence for STATIP1 (NM_018255.1,144-162).
ccctgaaaagggttgttgt

SEQ ID NO: 369150 - DNA, 19 bp, Homo sapiens
  siRNA target sequence for STATIP1 (NM_018255.1,145-163).
cctgaaaagggttgttgtt

SEQ ID NO: 369151 - DNA, 19 bp, Homo sapiens
  siRNA target sequence for STATIP1 (NM_018255.1,146-164).
ctgaaaagggttgttgtta

SEQ ID NO: 369152 - DNA, 19 bp, Homo sapiens
  siRNA target sequence for STATIP1 (NM_018255.1,155-173).
gttgttgttaccaacttga

SEQ ID NO: 369153 - DNA, 19 bp, Homo sapiens
  siRNA target sequence for STATIP1 (NM_018255.1,198-216).
gcatacagtggatttgtaa

SEQ ID NO: 369154 - DNA, 19 bp, Homo sapiens
  siRNA target sequence for STATIP1 (NM_018255.1,224-242).
ggctccccttctactgaat

SEQ ID NO: 369155 - DNA, 19 bp, Homo sapiens
  siRNA target sequence for STATIP1 (NM_018255.1,225-243).
gctccccttctactgaatt

SEQ ID NO: 369156 - DNA, 19 bp, Homo sapiens
  siRNA target sequence for STATIP1 (NM_018255.1,226-244).
ctccccttctactgaatta

SEQ ID NO: 369157 - DNA, 19 bp, Homo sapiens
  siRNA target sequence for STATIP1 (NM_018255.1,228-246).
ccccttctactgaattagt

SEQ ID NO: 369158 - DNA, 19 bp, Homo sapiens
  siRNA target sequence for STATIP1 (NM_018255.1,245-263).
gtttctggaggatctgata

SEQ ID NO: 369159 - DNA, 19 bp, Homo sapiens
  siRNA target sequence for STATIP1 (NM_018255.1,260-278).
gataatcaagtgattcact

SEQ ID NO: 369160 - DNA, 19 bp, Homo sapiens
  siRNA target sequence for STATIP1 (NM_018255.1,287-305).
gaggataatcagcttttaa

SEQ ID NO: 369161 - DNA, 19 bp, Homo sapiens
  siRNA target sequence for STATIP1 (NM_018255.1,345-363).
cggtgcatgctgtttacca

SEQ ID NO: 369162 - DNA, 19 bp, Homo sapiens
  siRNA target sequence for STATIP1 (NM_018255.1,370-388).
gacatcagatcctgcatta

SEQ ID NO: 369163 - DNA, 19 bp, Homo sapiens
  siRNA target sequence for STATIP1 (NM_018255.1,463-481).
ccttcagactttaaacttt

SEQ ID NO: 369164 - DNA, 19 bp, Homo sapiens
  siRNA target sequence for STATIP1 (NM_018255.1,522-540).
caaatactgatgtaccaat

SEQ ID NO: 369165 - DNA, 19 bp, Homo sapiens
  siRNA target sequence for STATIP1 (NM_018255.1,545-563).
gcatgtggcaatgatgatt

SEQ ID NO: 369166 - DNA, 19 bp, Homo sapiens
  siRNA target sequence for STATIP1 (NM_018255.1,582-600).
ctcaacaaaatgatcagtt

SEQ ID NO: 369167 - DNA, 19 bp, Homo sapiens
  siRNA target sequence for STATIP1 (NM_018255.1,587-605).
caaaatgatcagtttcaga

SEQ ID NO: 369168 - DNA, 19 bp, Homo sapiens
  siRNA target sequence for STATIP1 (NM_018255.1,623-641).
ggacatgaggattggatta

SEQ ID NO: 369169 - DNA, 19 bp, Homo sapiens
  siRNA target sequence for STATIP1 (NM_018255.1,650-668).
gaatgggcagcctttggta

SEQ ID NO: 369170 - DNA, 19 bp, Homo sapiens
  siRNA target sequence for STATIP1 (NM_018255.1,695-713).
caagattgcctgataagaa

SEQ ID NO: 369171 - DNA, 19 bp, Homo sapiens
  siRNA target sequence for STATIP1 (NM_018255.1,702-720).
gcctgataagaatatggaa

SEQ ID NO: 369172 - DNA, 19 bp, Homo sapiens
  siRNA target sequence for STATIP1 (NM_018255.1,733-751).
gtcaacatctttagaaact

SEQ ID NO: 369173 - DNA, 19 bp, Homo sapiens
  siRNA target sequence for STATIP1 (NM_018255.1,735-753).
caacatctttagaaactca

SEQ ID NO: 369174 - DNA, 19 bp, Homo sapiens
  siRNA target sequence for STATIP1 (NM_018255.1,750-768).
ctcaggatgacgataacat

SEQ ID NO: 369175 - DNA, 19 bp, Homo sapiens
  siRNA target sequence for STATIP1 (NM_018255.1,752-770).
caggatgacgataacataa

SEQ ID NO: 369176 - DNA, 19 bp, Homo sapiens
  siRNA target sequence for STATIP1 (NM_018255.1,754-772).
ggatgacgataacataaga

SEQ ID NO: 369177 - DNA, 19 bp, Homo sapiens
  siRNA target sequence for STATIP1 (NM_018255.1,842-860).
gtgctagccggtcatgaaa

SEQ ID NO: 369178 - DNA, 19 bp, Homo sapiens
  siRNA target sequence for STATIP1 (NM_018255.1,845-863).
ctagccggtcatgaaaact

SEQ ID NO: 369179 - DNA, 19 bp, Homo sapiens
  siRNA target sequence for STATIP1 (NM_018255.1,882-900).
ggcaacctgtgttttacaa

SEQ ID NO: 369180 - DNA, 19 bp, Homo sapiens
  siRNA target sequence for STATIP1 (NM_018255.1,883-901).
gcaacctgtgttttacaaa

SEQ ID NO: 369181 - DNA, 19 bp, Homo sapiens
  siRNA target sequence for STATIP1 (NM_018255.1,914-932).
cagcagccagtgagattat

SEQ ID NO: 369182 - DNA, 19 bp, Homo sapiens
  siRNA target sequence for STATIP1 (NM_018255.1,939-957).
cttccatggataaaaccat

SEQ ID NO: 369183 - DNA, 19 bp, Homo sapiens
  siRNA target sequence for STATIP1 (NM_018255.1,1003-1021).
ggttcgagtaggtgaagta

SEQ ID NO: 369184 - DNA, 19 bp, Homo sapiens
  siRNA target sequence for STATIP1 (NM_018255.1,1016-1034).
gaagtaggtgggaatactt

SEQ ID NO: 369185 - DNA, 19 bp, Homo sapiens
  siRNA target sequence for STATIP1 (NM_018255.1,1098-1116).
gagcgttgcacctttggaa

SEQ ID NO: 369186 - DNA, 19 bp, Homo sapiens
  siRNA target sequence for STATIP1 (NM_018255.1,1235-1253).
gatcagacaactagacttt

SEQ ID NO: 369187 - DNA, 19 bp, Homo sapiens
  siRNA target sequence for STATIP1 (NM_018255.1,1240-1258).
gacaactagactttttgct

SEQ ID NO: 369188 - DNA, 19 bp, Homo sapiens
  siRNA target sequence for STATIP1 (NM_018255.1,1257-1275).
ctccatggaagagaaaaga

SEQ ID NO: 369189 - DNA, 19 bp, Homo sapiens
  siRNA target sequence for STATIP1 (NM_018255.1,1288-1306).
gacttggcatgaaattgca

SEQ ID NO: 369190 - DNA, 19 bp, Homo sapiens
  siRNA target sequence for STATIP1 (NM_018255.1,1323-1341).
ggtatgacctgaaatgttt

SEQ ID NO: 369191 - DNA, 19 bp, Homo sapiens
  siRNA target sequence for STATIP1 (NM_018255.1,1348-1366).
gattaatcggtttcagttt

SEQ ID NO: 369192 - DNA, 19 bp, Homo sapiens
  siRNA target sequence for STATIP1 (NM_018255.1,1404-1422).
ctgcacctcggaattttgt

SEQ ID NO: 369193 - DNA, 19 bp, Homo sapiens
  siRNA target sequence for STATIP1 (NM_018255.1,1443-1461).
caggacaatcactgaatca

SEQ ID NO: 369194 - DNA, 19 bp, Homo sapiens
  siRNA target sequence for STATIP1 (NM_018255.1,1465-1483).
gctctgtaatcaagatagt

SEQ ID NO: 369195 - DNA, 19 bp, Homo sapiens
  siRNA target sequence for STATIP1 (NM_018255.1,1468-1486).
ctgtaatcaagatagtgat

SEQ ID NO: 369196 - DNA, 19 bp, Homo sapiens
  siRNA target sequence for STATIP1 (NM_018255.1,1505-1523).
gtccctgcattgggattat

SEQ ID NO: 369197 - DNA, 19 bp, Homo sapiens
  siRNA target sequence for STATIP1 (NM_018255.1,1508-1526).
cctgcattgggattatcaa

SEQ ID NO: 369198 - DNA, 19 bp, Homo sapiens
  siRNA target sequence for STATIP1 (NM_018255.1,1509-1527).
ctgcattgggattatcaaa

SEQ ID NO: 369199 - DNA, 19 bp, Homo sapiens
  siRNA target sequence for STATIP1 (NM_018255.1,1524-1542).
caaataaagctgtctttca

SEQ ID NO: 369200 - DNA, 19 bp, Homo sapiens
  siRNA target sequence for STATIP1 (NM_018255.1,1533-1551).
ctgtctttcagggagatat

SEQ ID NO: 369201 - DNA, 19 bp, Homo sapiens
  siRNA target sequence for STATIP1 (NM_018255.1,1574-1592).
gaggagctgttaactagta

SEQ ID NO: 369202 - DNA, 19 bp, Homo sapiens
  siRNA target sequence for STATIP1 (NM_018255.1,1582-1600).
gttaactagtactggtttt

SEQ ID NO: 369203 - DNA, 19 bp, Homo sapiens
  siRNA target sequence for STATIP1 (NM_018255.1,1587-1605).
ctagtactggttttgagta

SEQ ID NO: 369204 - DNA, 19 bp, Homo sapiens
  siRNA target sequence for STATIP1 (NM_018255.1,1644-1662).
ctcccactgaggatcatct

SEQ ID NO: 369205 - DNA, 19 bp, Homo sapiens
  siRNA target sequence for STATIP1 (NM_018255.1,1682-1700).
cctgaagttcaaaaactat

SEQ ID NO: 369206 - DNA, 19 bp, Homo sapiens
  siRNA target sequence for STATIP1 (NM_018255.1,1683-1701).
ctgaagttcaaaaactata

SEQ ID NO: 369207 - DNA, 19 bp, Homo sapiens
  siRNA target sequence for STATIP1 (NM_018255.1,1703-1721).
gggcacggttatgaaatat

SEQ ID NO: 369208 - DNA, 19 bp, Homo sapiens
  siRNA target sequence for STATIP1 (NM_018255.1,1704-1722).
ggcacggttatgaaatatt

SEQ ID NO: 369209 - DNA, 19 bp, Homo sapiens
  siRNA target sequence for STATIP1 (NM_018255.1,1705-1723).
gcacggttatgaaatattt

SEQ ID NO: 369210 - DNA, 19 bp, Homo sapiens
  siRNA target sequence for STATIP1 (NM_018255.1,1706-1724).
cacggttatgaaatatttt

SEQ ID NO: 369211 - DNA, 19 bp, Homo sapiens
  siRNA target sequence for STATIP1 (NM_018255.1,1708-1726).
cggttatgaaatattttgt

SEQ ID NO: 369212 - DNA, 19 bp, Homo sapiens
  siRNA target sequence for STATIP1 (NM_018255.1,1727-1745).
gttacttgtaacagttcaa

SEQ ID NO: 369213 - DNA, 19 bp, Homo sapiens
  siRNA target sequence for STATIP1 (NM_018255.1,1787-1805).
catgcagctatcattcttt

SEQ ID NO: 369214 - DNA, 19 bp, Homo sapiens
  siRNA target sequence for STATIP1 (NM_018255.1,1826-1844).
caggtgcagaatttagttt

SEQ ID NO: 369215 - DNA, 19 bp, Homo sapiens
  siRNA target sequence for STATIP1 (NM_018255.1,1867-1885).
gatggccttctcacctaat

SEQ ID NO: 369216 - DNA, 19 bp, Homo sapiens
  siRNA target sequence for STATIP1 (NM_018255.1,1871-1889).
gccttctcacctaatgaga

SEQ ID NO: 369217 - DNA, 19 bp, Homo sapiens
  siRNA target sequence for STATIP1 (NM_018255.1,1872-1890).
ccttctcacctaatgagaa

SEQ ID NO: 369218 - DNA, 19 bp, Homo sapiens
  siRNA target sequence for STATIP1 (NM_018255.1,1881-1899).
ctaatgagaagttcttact

SEQ ID NO: 369219 - DNA, 19 bp, Homo sapiens
  siRNA target sequence for STATIP1 (NM_018255.1,1913-1931).
gatcgaacctggtcattgt

SEQ ID NO: 369220 - DNA, 19 bp, Homo sapiens
  siRNA target sequence for STATIP1 (NM_018255.1,1956-1974).
ctgagttcgagccagtttt

SEQ ID NO: 369221 - DNA, 19 bp, Homo sapiens
  siRNA target sequence for STATIP1 (NM_018255.1,1958-1976).
gagttcgagccagttttta

SEQ ID NO: 369222 - DNA, 19 bp, Homo sapiens
  siRNA target sequence for STATIP1 (NM_018255.1,1960-1978).
gttcgagccagtttttagt

SEQ ID NO: 369223 - DNA, 19 bp, Homo sapiens
  siRNA target sequence for STATIP1 (NM_018255.1,1985-2003).
gccttcaccaacaaaatta

SEQ ID NO: 369224 - DNA, 19 bp, Homo sapiens
  siRNA target sequence for STATIP1 (NM_018255.1,1987-2005).
cttcaccaacaaaattact

SEQ ID NO: 369225 - DNA, 19 bp, Homo sapiens
  siRNA target sequence for STATIP1 (NM_018255.1,2043-2061).
gtcctgacagcaagtattt

SEQ ID NO: 369226 - DNA, 19 bp, Homo sapiens
  siRNA target sequence for STATIP1 (NM_018255.1,2045-2063).
cctgacagcaagtatttct

SEQ ID NO: 369227 - DNA, 19 bp, Homo sapiens
  siRNA target sequence for STATIP1 (NM_018255.1,2046-2064).
ctgacagcaagtatttctt

SEQ ID NO: 369228 - DNA, 19 bp, Homo sapiens
  siRNA target sequence for STATIP1 (NM_018255.1,2065-2083).
cactgggagtcgagacaaa

SEQ ID NO: 369229 - DNA, 19 bp, Homo sapiens
  siRNA target sequence for STATIP1 (NM_018255.1,2070-2088).
ggagtcgagacaaaaaggt

SEQ ID NO: 369230 - DNA, 19 bp, Homo sapiens
  siRNA target sequence for STATIP1 (NM_018255.1,2122-2140).
ctgtattgagcacaacatt

SEQ ID NO: 369231 - DNA, 19 bp, Homo sapiens
  siRNA target sequence for STATIP1 (NM_018255.1,2238-2256).
gattggagtgtggaaagat

SEQ ID NO: 369232 - DNA, 19 bp, Homo sapiens
  siRNA target sequence for STATIP1 (NM_018255.1,2259-2277).
gcttatatacctggaaaaa

SEQ ID NO: 369233 - DNA, 19 bp, Homo sapiens
  siRNA target sequence for STATIP1 (NM_018255.1,2305-2323).
ctggacccactgtgtagaa

SEQ ID NO: 369234 - DNA, 19 bp, Homo sapiens
  siRNA target sequence for STATIP1 (NM_018255.1,2314-2332).
ctgtgtagaaacaagtcaa

SEQ ID NO: 369235 - DNA, 19 bp, Homo sapiens
  siRNA target sequence for STATIP1 (NM_018255.1,2342-2360).
catacactggctatcagaa

SEQ ID NO: 369236 - DNA, 19 bp, Homo sapiens
  siRNA target sequence for STATIP1 (NM_018255.1,2346-2364).
cactggctatcagaaaatt

SEQ ID NO: 369237 - DNA, 19 bp, Homo sapiens
  siRNA target sequence for STATIP1 (NM_018255.1,2417-2435).
gagtggttacactttgcaa

SEQ ID NO: 369238 - DNA, 19 bp, Homo sapiens
  siRNA target sequence for STATIP1 (NM_018255.1,2458-2476).
gaagatacacagagtcaat

SEQ ID NO: 369239 - DNA, 19 bp, Homo sapiens
  siRNA target sequence for STATIP1 (NM_018255.1,2461-2479).
gatacacagagtcaataaa

SEQ ID NO: 369240 - DNA, 19 bp, Homo sapiens
  siRNA target sequence for WDR12 (NM_018256.2,214-232).
cgcttctacactgataaca

SEQ ID NO: 369241 - DNA, 19 bp, Homo sapiens
  siRNA target sequence for WDR12 (NM_018256.2,219-237).
ctacactgataacaagaaa

SEQ ID NO: 369242 - DNA, 19 bp, Homo sapiens
  siRNA target sequence for WDR12 (NM_018256.2,234-252).
gaaatatgccgtagatgat

SEQ ID NO: 369243 - DNA, 19 bp, Homo sapiens
  siRNA target sequence for WDR12 (NM_018256.2,286-304).
gccgaccttagtaacatca

SEQ ID NO: 369244 - DNA, 19 bp, Homo sapiens
  siRNA target sequence for WDR12 (NM_018256.2,287-305).
ccgaccttagtaacatcat

SEQ ID NO: 369245 - DNA, 19 bp, Homo sapiens
  siRNA target sequence for WDR12 (NM_018256.2,339-357).
caaacatgtggagtttgat

SEQ ID NO: 369246 - DNA, 19 bp, Homo sapiens
  siRNA target sequence for WDR12 (NM_018256.2,417-435).
catctcatcagaagaagtt

SEQ ID NO: 369247 - DNA, 19 bp, Homo sapiens
  siRNA target sequence for WDR12 (NM_018256.2,496-514).
gatgactggatcagttcaa

SEQ ID NO: 369248 - DNA, 19 bp, Homo sapiens
  siRNA target sequence for WDR12 (NM_018256.2,499-517).
gactggatcagttcaatta

SEQ ID NO: 369249 - DNA, 19 bp, Homo sapiens
  siRNA target sequence for WDR12 (NM_018256.2,533-551).
ggatcttgactggttctta

SEQ ID NO: 369250 - DNA, 19 bp, Homo sapiens
  siRNA target sequence for WDR12 (NM_018256.2,534-552).
gatcttgactggttcttat

SEQ ID NO: 369251 - DNA, 19 bp, Homo sapiens
  siRNA target sequence for WDR12 (NM_018256.2,537-555).
cttgactggttcttatgat

SEQ ID NO: 369252 - DNA, 19 bp, Homo sapiens
  siRNA target sequence for WDR12 (NM_018256.2,544-562).
ggttcttatgataagactt

SEQ ID NO: 369253 - DNA, 19 bp, Homo sapiens
  siRNA target sequence for WDR12 (NM_018256.2,573-591).
gtccttggaaggaaagtca

SEQ ID NO: 369254 - DNA, 19 bp, Homo sapiens
  siRNA target sequence for WDR12 (NM_018256.2,614-632).
cggatgttgtaaaagatgt

SEQ ID NO: 369255 - DNA, 19 bp, Homo sapiens
  siRNA target sequence for WDR12 (NM_018256.2,636-654).
ctgggtgaaaaaagatagt

SEQ ID NO: 369256 - DNA, 19 bp, Homo sapiens
  siRNA target sequence for WDR12 (NM_018256.2,649-667).
gatagtttgtcctgcttat

SEQ ID NO: 369257 - DNA, 19 bp, Homo sapiens
  siRNA target sequence for WDR12 (NM_018256.2,657-675).
gtcctgcttattattgagt

SEQ ID NO: 369258 - DNA, 19 bp, Homo sapiens
  siRNA target sequence for WDR12 (NM_018256.2,677-695).
cttctatggatcagactat

SEQ ID NO: 369259 - DNA, 19 bp, Homo sapiens
  siRNA target sequence for WDR12 (NM_018256.2,680-698).
ctatggatcagactattct

SEQ ID NO: 369260 - DNA, 19 bp, Homo sapiens
  siRNA target sequence for WDR12 (NM_018256.2,685-703).
gatcagactattctcttat

SEQ ID NO: 369261 - DNA, 19 bp, Homo sapiens
  siRNA target sequence for WDR12 (NM_018256.2,790-808).
ggctcaggaactaaatttt

SEQ ID NO: 369262 - DNA, 19 bp, Homo sapiens
  siRNA target sequence for WDR12 (NM_018256.2,823-841).
gataagatgctaaagatct

SEQ ID NO: 369263 - DNA, 19 bp, Homo sapiens
  siRNA target sequence for WDR12 (NM_018256.2,843-861).
gtctacagtccctacagat

SEQ ID NO: 369264 - DNA, 19 bp, Homo sapiens
  siRNA target sequence for WDR12 (NM_018256.2,876-894).
ggaggagtccacaaatcga

SEQ ID NO: 369265 - DNA, 19 bp, Homo sapiens
  siRNA target sequence for WDR12 (NM_018256.2,884-902).
ccacaaatcgaccaagaaa

SEQ ID NO: 369266 - DNA, 19 bp, Homo sapiens
  siRNA target sequence for WDR12 (NM_018256.2,887-905).
caaatcgaccaagaaagaa

SEQ ID NO: 369267 - DNA, 19 bp, Homo sapiens
  siRNA target sequence for WDR12 (NM_018256.2,1022-1040).
gggaccatacaattagagt

SEQ ID NO: 369268 - DNA, 19 bp, Homo sapiens
  siRNA target sequence for WDR12 (NM_018256.2,1070-1088).
caactttgacaggaaataa

SEQ ID NO: 369269 - DNA, 19 bp, Homo sapiens
  siRNA target sequence for WDR12 (NM_018256.2,1112-1130).
ctccactttgtaaacgttt

SEQ ID NO: 369270 - DNA, 19 bp, Homo sapiens
  siRNA target sequence for WDR12 (NM_018256.2,1132-1150).
gcatctggaagcacagata

SEQ ID NO: 369271 - DNA, 19 bp, Homo sapiens
  siRNA target sequence for WDR12 (NM_018256.2,1143-1161).
cacagataggcatatcaga

SEQ ID NO: 369272 - DNA, 19 bp, Homo sapiens
  siRNA target sequence for WDR12 (NM_018256.2,1164-1182).
gtgggatccccgaactaaa

SEQ ID NO: 369273 - DNA, 19 bp, Homo sapiens
  siRNA target sequence for WDR12 (NM_018256.2,1166-1184).
gggatccccgaactaaaga

SEQ ID NO: 369274 - DNA, 19 bp, Homo sapiens
  siRNA target sequence for WDR12 (NM_018256.2,1167-1185).
ggatccccgaactaaagat

SEQ ID NO: 369275 - DNA, 19 bp, Homo sapiens
  siRNA target sequence for WDR12 (NM_018256.2,1175-1193).
gaactaaagatggttcttt

SEQ ID NO: 369276 - DNA, 19 bp, Homo sapiens
  siRNA target sequence for WDR12 (NM_018256.2,1201-1219).
ctgtccctaacgtcacata

SEQ ID NO: 369277 - DNA, 19 bp, Homo sapiens
  siRNA target sequence for WDR12 (NM_018256.2,1203-1221).
gtccctaacgtcacatact

SEQ ID NO: 369278 - DNA, 19 bp, Homo sapiens
  siRNA target sequence for WDR12 (NM_018256.2,1222-1240).
ggttgggtgacatcagtaa

SEQ ID NO: 369279 - DNA, 19 bp, Homo sapiens
  siRNA target sequence for WDR12 (NM_018256.2,1244-1262).
ggtctcctacccatgaaca

SEQ ID NO: 369280 - DNA, 19 bp, Homo sapiens
  siRNA target sequence for WDR12 (NM_018256.2,1269-1287).
gatttcaggatctttagat

SEQ ID NO: 369281 - DNA, 19 bp, Homo sapiens
  siRNA target sequence for WDR12 (NM_018256.2,1274-1292).
caggatctttagataacat

SEQ ID NO: 369282 - DNA, 19 bp, Homo sapiens
  siRNA target sequence for WDR12 (NM_018256.2,1294-1312).
gttaagctgtgggatacaa

SEQ ID NO: 369283 - DNA, 19 bp, Homo sapiens
  siRNA target sequence for WDR12 (NM_018256.2,1299-1317).
gctgtgggatacaagaagt

SEQ ID NO: 369284 - DNA, 19 bp, Homo sapiens
  siRNA target sequence for WDR12 (NM_018256.2,1300-1318).
ctgtgggatacaagaagtt

SEQ ID NO: 369285 - DNA, 19 bp, Homo sapiens
  siRNA target sequence for WDR12 (NM_018256.2,1302-1320).
gtgggatacaagaagttgt

SEQ ID NO: 369286 - DNA, 19 bp, Homo sapiens
  siRNA target sequence for WDR12 (NM_018256.2,1379-1397).
cagacacagggctacttct

SEQ ID NO: 369287 - DNA, 19 bp, Homo sapiens
  siRNA target sequence for WDR12 (NM_018256.2,1400-1418).
gtggaggagcagacaataa

SEQ ID NO: 369288 - DNA, 19 bp, Homo sapiens
  siRNA target sequence for FLJ10890 (NM_018259.2,162-180).
cggaggacgggaaaatcca

SEQ ID NO: 369289 - DNA, 19 bp, Homo sapiens
  siRNA target sequence for FLJ10890 (NM_018259.2,823-841).
ggtcaacctggcaaacgtt

SEQ ID NO: 369290 - DNA, 19 bp, Homo sapiens
  siRNA target sequence for FLJ10890 (NM_018259.2,925-943).
cactttggggaatatatat

SEQ ID NO: 369291 - DNA, 19 bp, Homo sapiens
  siRNA target sequence for FLJ10890 (NM_018259.2,1007-1025).
gggtttgagcaagctataa

SEQ ID NO: 369292 - DNA, 19 bp, Homo sapiens
  siRNA target sequence for FLJ10890 (NM_018259.2,1096-1114).
gcgaacactgaatgagtta

SEQ ID NO: 369293 - DNA, 19 bp, Homo sapiens
  siRNA target sequence for FLJ10890 (NM_018259.2,1271-1289).
gtcaaccagcagcatagtt

SEQ ID NO: 369294 - DNA, 19 bp, Homo sapiens
  siRNA target sequence for FLJ10890 (NM_018259.2,1276-1294).
ccagcagcatagtttacat

SEQ ID NO: 369295 - DNA, 19 bp, Homo sapiens
  siRNA target sequence for FLJ10890 (NM_018259.2,1277-1295).
cagcagcatagtttacatt

SEQ ID NO: 369296 - DNA, 19 bp, Homo sapiens
  siRNA target sequence for FLJ10890 (NM_018259.2,1306-1324).
ccagcctgtacgctatcat

SEQ ID NO: 369297 - DNA, 19 bp, Homo sapiens
  siRNA target sequence for FLJ10890 (NM_018259.2,1317-1335).
gctatcatcgtggagatat

SEQ ID NO: 369298 - DNA, 19 bp, Homo sapiens
  siRNA target sequence for FLJ10890 (NM_018259.2,1325-1343).
cgtggagatatctttgaaa

SEQ ID NO: 369299 - DNA, 19 bp, Homo sapiens
  siRNA target sequence for FLJ10890 (NM_018259.2,1326-1344).
gtggagatatctttgaaaa

SEQ ID NO: 369300 - DNA, 19 bp, Homo sapiens
  siRNA target sequence for FLJ10890 (NM_018259.2,1358-1376).
cagtttggtgaggattcat

SEQ ID NO: 369301 - DNA, 19 bp, Homo sapiens
  siRNA target sequence for FLJ10890 (NM_018259.2,1360-1378).
gtttggtgaggattcatca

SEQ ID NO: 369302 - DNA, 19 bp, Homo sapiens
  siRNA target sequence for FLJ10890 (NM_018259.2,1406-1424).
gatgttcaatcaaatcaga

SEQ ID NO: 369303 - DNA, 19 bp, Homo sapiens
  siRNA target sequence for FLJ10890 (NM_018259.2,1421-1439).
cagagtgatatcaatgatt

SEQ ID NO: 369304 - DNA, 19 bp, Homo sapiens
  siRNA target sequence for FLJ10890 (NM_018259.2,1455-1473).
ccgtagcccattctattct

SEQ ID NO: 369305 - DNA, 19 bp, Homo sapiens
  siRNA target sequence for FLJ10890 (NM_018259.2,1506-1524).
gggacaaacagcatattct

SEQ ID NO: 369306 - DNA, 19 bp, Homo sapiens
  siRNA target sequence for FLJ10890 (NM_018259.2,1528-1546).
gcctaaaagagcagattgt

SEQ ID NO: 369307 - DNA, 19 bp, Homo sapiens
  siRNA target sequence for FLJ10890 (NM_018259.2,1529-1547).
cctaaaagagcagattgta

SEQ ID NO: 369308 - DNA, 19 bp, Homo sapiens
  siRNA target sequence for FLJ10890 (NM_018259.2,1577-1595).
ggggaattgccaacgtatt

SEQ ID NO: 369309 - DNA, 19 bp, Homo sapiens
  siRNA target sequence for FLJ10890 (NM_018259.2,1578-1596).
gggaattgccaacgtattt

SEQ ID NO: 369310 - DNA, 19 bp, Homo sapiens
  siRNA target sequence for FLJ10890 (NM_018259.2,1579-1597).
ggaattgccaacgtatttt

SEQ ID NO: 369311 - DNA, 19 bp, Homo sapiens
  siRNA target sequence for FLJ10890 (NM_018259.2,1630-1648).
cgaactcagcagtgatgat

SEQ ID NO: 369312 - DNA, 19 bp, Homo sapiens
  siRNA target sequence for FLJ10890 (NM_018259.2,1631-1649).
gaactcagcagtgatgatt

SEQ ID NO: 369313 - DNA, 19 bp, Homo sapiens
  siRNA target sequence for FLJ10890 (NM_018259.2,1675-1693).
ccctgactgttccataact

SEQ ID NO: 369314 - DNA, 19 bp, Homo sapiens
  siRNA target sequence for FLJ10890 (NM_018259.2,1677-1695).
ctgactgttccataactga

SEQ ID NO: 369315 - DNA, 19 bp, Homo sapiens
  siRNA target sequence for FLJ10890 (NM_018259.2,1708-1726).
ccacactctgtcctactta

SEQ ID NO: 369316 - DNA, 19 bp, Homo sapiens
  siRNA target sequence for FLJ10890 (NM_018259.2,1713-1731).
ctctgtcctacttagtcaa

SEQ ID NO: 369317 - DNA, 19 bp, Homo sapiens
  siRNA target sequence for FLJ10890 (NM_018259.2,1781-1799).
gcacgaaaaattttgcttt

SEQ ID NO: 369318 - DNA, 19 bp, Homo sapiens
  siRNA target sequence for FLJ10890 (NM_018259.2,1801-1819).
ccgtattaataactatact

SEQ ID NO: 369319 - DNA, 19 bp, Homo sapiens
  siRNA target sequence for FLJ10890 (NM_018259.2,1802-1820).
cgtattaataactatacta

SEQ ID NO: 369320 - DNA, 19 bp, Homo sapiens
  siRNA target sequence for FLJ10890 (NM_018259.2,1846-1864).
cttatttcatgctattaat

SEQ ID NO: 369321 - DNA, 19 bp, Homo sapiens
  siRNA target sequence for FLJ10890 (NM_018259.2,1875-1893).
ctcctatctggctcatact

SEQ ID NO: 369322 - DNA, 19 bp, Homo sapiens
  siRNA target sequence for FLJ10890 (NM_018259.2,1877-1895).
cctatctggctcatactca

SEQ ID NO: 369323 - DNA, 19 bp, Homo sapiens
  siRNA target sequence for FLJ10890 (NM_018259.2,1878-1896).
ctatctggctcatactcaa

SEQ ID NO: 369324 - DNA, 19 bp, Homo sapiens
  siRNA target sequence for FLJ10890 (NM_018259.2,1925-1943).
ggaaatagcacttttgcta

SEQ ID NO: 369325 - DNA, 19 bp, Homo sapiens
  siRNA target sequence for FLJ10890 (NM_018259.2,1926-1944).
gaaatagcacttttgctat

SEQ ID NO: 369326 - DNA, 19 bp, Homo sapiens
  siRNA target sequence for FLJ10890 (NM_018259.2,2003-2021).
gtcaacttggccaaccttt

SEQ ID NO: 369327 - DNA, 19 bp, Homo sapiens
  siRNA target sequence for FLJ10890 (NM_018259.2,2049-2067).
ccactaagctgctacttca

SEQ ID NO: 369328 - DNA, 19 bp, Homo sapiens
  siRNA target sequence for FLJ10890 (NM_018259.2,2050-2068).
cactaagctgctacttcaa

SEQ ID NO: 369329 - DNA, 19 bp, Homo sapiens
  siRNA target sequence for FLJ10890 (NM_018259.2,2066-2084).
caagctttggccatcaata

SEQ ID NO: 369330 - DNA, 19 bp, Homo sapiens
  siRNA target sequence for FLJ10890 (NM_018259.2,2224-2242).
ccgctgtatgcagttttat

SEQ ID NO: 369331 - DNA, 19 bp, Homo sapiens
  siRNA target sequence for FLJ10890 (NM_018259.2,2251-2269).
gtacaacatcacttcttct

SEQ ID NO: 369332 - DNA, 19 bp, Homo sapiens
  siRNA target sequence for FLJ10890 (NM_018259.2,2288-2306).
gttgaggagagcaatggtt

SEQ ID NO: 369333 - DNA, 19 bp, Homo sapiens
  siRNA target sequence for FLJ10890 (NM_018259.2,2293-2311).
ggagagcaatggttctgat

SEQ ID NO: 369334 - DNA, 19 bp, Homo sapiens
  siRNA target sequence for FLJ10890 (NM_018259.2,2403-2421).
ggggtgcactagagatgaa

SEQ ID NO: 369335 - DNA, 19 bp, Homo sapiens
  siRNA target sequence for FLJ10890 (NM_018259.2,2404-2422).
gggtgcactagagatgaaa

SEQ ID NO: 369336 - DNA, 19 bp, Homo sapiens
  siRNA target sequence for FLJ10890 (NM_018259.2,2445-2463).
gaatacgggtgctgaagaa

SEQ ID NO: 369337 - DNA, 19 bp, Homo sapiens
  siRNA target sequence for FLJ10890 (NM_018259.2,2525-2543).
gaagcaacagaatggatta

SEQ ID NO: 369338 - DNA, 19 bp, Homo sapiens
  siRNA target sequence for FLJ10890 (NM_018259.2,2549-2567).
caggtcaaacgtgtaaaga

SEQ ID NO: 369339 - DNA, 19 bp, Homo sapiens
  siRNA target sequence for FLJ10890 (NM_018259.2,2570-2588).
cccaaaggagatcataaga

SEQ ID NO: 369340 - DNA, 19 bp, Homo sapiens
  siRNA target sequence for FLJ10890 (NM_018259.2,2733-2751).
cggacgaatgcctcaaact

SEQ ID NO: 369341 - DNA, 19 bp, Homo sapiens
  siRNA target sequence for FLJ10890 (NM_018259.2,2815-2833).
catcacagaacacatagat

SEQ ID NO: 369342 - DNA, 19 bp, Homo sapiens
  siRNA target sequence for FLJ10890 (NM_018259.2,2950-2968).
cacaggggagagtcagtta

SEQ ID NO: 369343 - DNA, 19 bp, Homo sapiens
  siRNA target sequence for FLJ10890 (NM_018259.2,2961-2979).
gtcagttaacagaggtatt

SEQ ID NO: 369344 - DNA, 19 bp, Homo sapiens
  siRNA target sequence for FLJ10890 (NM_018259.2,2970-2988).
cagaggtattacaaaatct

SEQ ID NO: 369345 - DNA, 19 bp, Homo sapiens
  siRNA target sequence for FLJ10890 (NM_018259.2,2989-3007).
cggcaaagaccaatatcca

SEQ ID NO: 369346 - DNA, 19 bp, Homo sapiens
  siRNA target sequence for FLJ10890 (NM_018259.2,3031-3049).
cacccgaattgccaaagtt

SEQ ID NO: 369347 - DNA, 19 bp, Homo sapiens
  siRNA target sequence for FLJ10890 (NM_018259.2,3228-3246).
ggaatgacgccgtcatagt

SEQ ID NO: 369348 - DNA, 19 bp, Homo sapiens
  siRNA target sequence for FLJ10890 (NM_018259.2,3229-3247).
gaatgacgccgtcatagta

SEQ ID NO: 369349 - DNA, 19 bp, Homo sapiens
  siRNA target sequence for FLJ10890 (NM_018259.2,3348-3366).
ggtatgaatccacattgaa

SEQ ID NO: 369350 - DNA, 19 bp, Homo sapiens
  siRNA target sequence for WDR10 (NM_018262.2,293-311).
ggctgccggaagcagatta

SEQ ID NO: 369351 - DNA, 19 bp, Homo sapiens
  siRNA target sequence for WDR10 (NM_018262.2,295-313).
ctgccggaagcagattact

SEQ ID NO: 369352 - DNA, 19 bp, Homo sapiens
  siRNA target sequence for WDR10 (NM_018262.2,301-319).
gaagcagattactggttta

SEQ ID NO: 369353 - DNA, 19 bp, Homo sapiens
  siRNA target sequence for WDR10 (NM_018262.2,326-344).
ctctgatggcaccttactt

SEQ ID NO: 369354 - DNA, 19 bp, Homo sapiens
  siRNA target sequence for WDR10 (NM_018262.2,396-414).
gatggcaagcgctttgctt

SEQ ID NO: 369355 - DNA, 19 bp, Homo sapiens
  siRNA target sequence for WDR10 (NM_018262.2,423-441).
gctgacaaaagcgttatta

SEQ ID NO: 369356 - DNA, 19 bp, Homo sapiens
  siRNA target sequence for WDR10 (NM_018262.2,424-442).
ctgacaaaagcgttattat

SEQ ID NO: 369357 - DNA, 19 bp, Homo sapiens
  siRNA target sequence for WDR10 (NM_018262.2,426-444).
gacaaaagcgttattatct

SEQ ID NO: 369358 - DNA, 19 bp, Homo sapiens
  siRNA target sequence for WDR10 (NM_018262.2,470-488).
gaagtacacgcacaatgat

SEQ ID NO: 369359 - DNA, 19 bp, Homo sapiens
  siRNA target sequence for WDR10 (NM_018262.2,479-497).
gcacaatgatgctatacaa

SEQ ID NO: 369360 - DNA, 19 bp, Homo sapiens
  siRNA target sequence for WDR10 (NM_018262.2,480-498).
cacaatgatgctatacaat

SEQ ID NO: 369361 - DNA, 19 bp, Homo sapiens
  siRNA target sequence for WDR10 (NM_018262.2,501-519).
gtctcctacaatcctatta

SEQ ID NO: 369362 - DNA, 19 bp, Homo sapiens
  siRNA target sequence for WDR10 (NM_018262.2,503-521).
ctcctacaatcctattact

SEQ ID NO: 369363 - DNA, 19 bp, Homo sapiens
  siRNA target sequence for WDR10 (NM_018262.2,671-689).
catcagcatacggaacaaa

SEQ ID NO: 369364 - DNA, 19 bp, Homo sapiens
  siRNA target sequence for WDR10 (NM_018262.2,726-744).
ggctccctctcgccaatat

SEQ ID NO: 369365 - DNA, 19 bp, Homo sapiens
  siRNA target sequence for WDR10 (NM_018262.2,763-781).
cttcaagagaggaacgtaa

SEQ ID NO: 369366 - DNA, 19 bp, Homo sapiens
  siRNA target sequence for WDR10 (NM_018262.2,766-784).
caagagaggaacgtaatga

SEQ ID NO: 369367 - DNA, 19 bp, Homo sapiens
  siRNA target sequence for WDR10 (NM_018262.2,799-817).
ctgactggggacagaaagt

SEQ ID NO: 369368 - DNA, 19 bp, Homo sapiens
  siRNA target sequence for WDR10 (NM_018262.2,854-872).
ggatcgggcactgaacttt

SEQ ID NO: 369369 - DNA, 19 bp, Homo sapiens
  siRNA target sequence for WDR10 (NM_018262.2,930-948).
gacaagcaagtatctcttt

SEQ ID NO: 369370 - DNA, 19 bp, Homo sapiens
  siRNA target sequence for WDR10 (NM_018262.2,1016-1034).
gaaaccggattccaactat

SEQ ID NO: 369371 - DNA, 19 bp, Homo sapiens
  siRNA target sequence for WDR10 (NM_018262.2,1090-1108).
cagtccatgggctttacaa

SEQ ID NO: 369372 - DNA, 19 bp, Homo sapiens
  siRNA target sequence for WDR10 (NM_018262.2,1132-1150).
gcatgactgacgtcattgt

SEQ ID NO: 369373 - DNA, 19 bp, Homo sapiens
  siRNA target sequence for WDR10 (NM_018262.2,1169-1187).
gcagaaagttcggattaaa

SEQ ID NO: 369374 - DNA, 19 bp, Homo sapiens
  siRNA target sequence for WDR10 (NM_018262.2,1170-1188).
cagaaagttcggattaaat

SEQ ID NO: 369375 - DNA, 19 bp, Homo sapiens
  siRNA target sequence for WDR10 (NM_018262.2,1213-1231).
ccatctacagaaatcgatt

SEQ ID NO: 369376 - DNA, 19 bp, Homo sapiens
  siRNA target sequence for WDR10 (NM_018262.2,1347-1365).
gtggtgtgtgccaatcaca

SEQ ID NO: 369377 - DNA, 19 bp, Homo sapiens
  siRNA target sequence for WDR10 (NM_018262.2,1895-1913).
ccagtacctggataggaaa

SEQ ID NO: 369378 - DNA, 19 bp, Homo sapiens
  siRNA target sequence for WDR10 (NM_018262.2,1982-2000).
ggaagcgctagaaggttta

SEQ ID NO: 369379 - DNA, 19 bp, Homo sapiens
  siRNA target sequence for WDR10 (NM_018262.2,1986-2004).
gcgctagaaggtttagatt

SEQ ID NO: 369380 - DNA, 19 bp, Homo sapiens
  siRNA target sequence for WDR10 (NM_018262.2,1987-2005).
cgctagaaggtttagattt

SEQ ID NO: 369381 - DNA, 19 bp, Homo sapiens
  siRNA target sequence for WDR10 (NM_018262.2,2034-2052).
gtacaagacctccgatatt

SEQ ID NO: 369382 - DNA, 19 bp, Homo sapiens
  siRNA target sequence for WDR10 (NM_018262.2,2098-2116).
ccaacaatgacctgtttct

SEQ ID NO: 369383 - DNA, 19 bp, Homo sapiens
  siRNA target sequence for WDR10 (NM_018262.2,2184-2202).
gagaacctcgcgcttgaaa

SEQ ID NO: 369384 - DNA, 19 bp, Homo sapiens
  siRNA target sequence for WDR10 (NM_018262.2,2190-2208).
ctcgcgcttgaaatgtaca

SEQ ID NO: 369385 - DNA, 19 bp, Homo sapiens
  siRNA target sequence for WDR10 (NM_018262.2,2209-2227).
ccgacctctgcatgtttga

SEQ ID NO: 369386 - DNA, 19 bp, Homo sapiens
  siRNA target sequence for WDR10 (NM_018262.2,2265-2283).
gaaacaaagatgctaatca

SEQ ID NO: 369387 - DNA, 19 bp, Homo sapiens
  siRNA target sequence for WDR10 (NM_018262.2,2292-2310).
gctgactgggccagaaata

SEQ ID NO: 369388 - DNA, 19 bp, Homo sapiens
  siRNA target sequence for WDR10 (NM_018262.2,2293-2311).
ctgactgggccagaaatat

SEQ ID NO: 369389 - DNA, 19 bp, Homo sapiens
  siRNA target sequence for WDR10 (NM_018262.2,2295-2313).
gactgggccagaaatatca

SEQ ID NO: 369390 - DNA, 19 bp, Homo sapiens
  siRNA target sequence for WDR10 (NM_018262.2,2461-2479).
gcgctacctacctcaagaa

SEQ ID NO: 369391 - DNA, 19 bp, Homo sapiens
  siRNA target sequence for WDR10 (NM_018262.2,2597-2615).
gcatcctgagtttaaggat

SEQ ID NO: 369392 - DNA, 19 bp, Homo sapiens
  siRNA target sequence for WDR10 (NM_018262.2,2745-2763).
gtggcggagagcaggttta

SEQ ID NO: 369393 - DNA, 19 bp, Homo sapiens
  siRNA target sequence for WDR10 (NM_018262.2,2747-2765).
ggcggagagcaggtttaat

SEQ ID NO: 369394 - DNA, 19 bp, Homo sapiens
  siRNA target sequence for WDR10 (NM_018262.2,2749-2767).
cggagagcaggtttaatga

SEQ ID NO: 369395 - DNA, 19 bp, Homo sapiens
  siRNA target sequence for WDR10 (NM_018262.2,2794-2812).
ccatgcagtgcctcgatat

SEQ ID NO: 369396 - DNA, 19 bp, Homo sapiens
  siRNA target sequence for WDR10 (NM_018262.2,2795-2813).
catgcagtgcctcgatata

SEQ ID NO: 369397 - DNA, 19 bp, Homo sapiens
  siRNA target sequence for WDR10 (NM_018262.2,2798-2816).
gcagtgcctcgatatagct

SEQ ID NO: 369398 - DNA, 19 bp, Homo sapiens
  siRNA target sequence for WDR10 (NM_018262.2,2828-2846).
ccagaaggacacaatgctt

SEQ ID NO: 369399 - DNA, 19 bp, Homo sapiens
  siRNA target sequence for WDR10 (NM_018262.2,2875-2893).
cagagctgtaccatggtta

SEQ ID NO: 369400 - DNA, 19 bp, Homo sapiens
  siRNA target sequence for WDR10 (NM_018262.2,2933-2951).
ccatcgtcctgaaactctt

SEQ ID NO: 369401 - DNA, 19 bp, Homo sapiens
  siRNA target sequence for WDR10 (NM_018262.2,2995-3013).
ccccctcgggcatctctaa

SEQ ID NO: 369402 - DNA, 19 bp, Homo sapiens
  siRNA target sequence for WDR10 (NM_018262.2,2998-3016).
cctcgggcatctctaaagt

SEQ ID NO: 369403 - DNA, 19 bp, Homo sapiens
  siRNA target sequence for WDR10 (NM_018262.2,3001-3019).
cgggcatctctaaagtgaa

SEQ ID NO: 369404 - DNA, 19 bp, Homo sapiens
  siRNA target sequence for WDR10 (NM_018262.2,3594-3612).
cccctgaggtggcaatact

SEQ ID NO: 369405 - DNA, 19 bp, Homo sapiens
  siRNA target sequence for WDR10 (NM_018262.2,3595-3613).
ccctgaggtggcaatactt

SEQ ID NO: 369406 - DNA, 19 bp, Homo sapiens
  siRNA target sequence for WDR10 (NM_018262.2,3624-3642).
ctgcctgacgcctccatta

SEQ ID NO: 369407 - DNA, 19 bp, Homo sapiens
  siRNA target sequence for WDR10 (NM_018262.2,3627-3645).
cctgacgcctccattacca

SEQ ID NO: 369408 - DNA, 19 bp, Homo sapiens
  siRNA target sequence for WDR10 (NM_018262.2,3628-3646).
ctgacgcctccattaccat

SEQ ID NO: 369409 - DNA, 19 bp, Homo sapiens
  siRNA target sequence for ASXL2 (NM_018263.2,132-150).
cgccaagacggtcttagaa

SEQ ID NO: 369410 - DNA, 19 bp, Homo sapiens
  siRNA target sequence for ASXL2 (NM_018263.2,133-151).
gccaagacggtcttagaaa

SEQ ID NO: 369411 - DNA, 19 bp, Homo sapiens
  siRNA target sequence for ASXL2 (NM_018263.2,171-189).
gagtcataaagaaattctt

SEQ ID NO: 369412 - DNA, 19 bp, Homo sapiens
  siRNA target sequence for ASXL2 (NM_018263.2,283-301).
gaagagggcatcttctata

SEQ ID NO: 369413 - DNA, 19 bp, Homo sapiens
  siRNA target sequence for ASXL2 (NM_018263.2,288-306).
gggcatcttctataaggtt

SEQ ID NO: 369414 - DNA, 19 bp, Homo sapiens
  siRNA target sequence for ASXL2 (NM_018263.2,308-326).
caggtagaatgggagtata

SEQ ID NO: 369415 - DNA, 19 bp, Homo sapiens
  siRNA target sequence for ASXL2 (NM_018263.2,310-328).
ggtagaatgggagtatata

SEQ ID NO: 369416 - DNA, 19 bp, Homo sapiens
  siRNA target sequence for ASXL2 (NM_018263.2,525-543).
caccattccagcaggtaaa

SEQ ID NO: 369417 - DNA, 19 bp, Homo sapiens
  siRNA target sequence for ASXL2 (NM_018263.2,625-643).
caatgcaggccaagcatat

SEQ ID NO: 369418 - DNA, 19 bp, Homo sapiens
  siRNA target sequence for ASXL2 (NM_018263.2,629-647).
gcaggccaagcatatccat

SEQ ID NO: 369419 - DNA, 19 bp, Homo sapiens
  siRNA target sequence for ASXL2 (NM_018263.2,814-832).
ggcttggggaagaagtcat

SEQ ID NO: 369420 - DNA, 19 bp, Homo sapiens
  siRNA target sequence for ASXL2 (NM_018263.2,848-866).
gactccataccagacaaat

SEQ ID NO: 369421 - DNA, 19 bp, Homo sapiens
  siRNA target sequence for ASXL2 (NM_018263.2,850-868).
ctccataccagacaaatga

SEQ ID NO: 369422 - DNA, 19 bp, Homo sapiens
  siRNA target sequence for ASXL2 (NM_018263.2,905-923).
cggactccattctggttaa

SEQ ID NO: 369423 - DNA, 19 bp, Homo sapiens
  siRNA target sequence for ASXL2 (NM_018263.2,907-925).
gactccattctggttaata

SEQ ID NO: 369424 - DNA, 19 bp, Homo sapiens
  siRNA target sequence for ASXL2 (NM_018263.2,909-927).
ctccattctggttaataca

SEQ ID NO: 369425 - DNA, 19 bp, Homo sapiens
  siRNA target sequence for ASXL2 (NM_018263.2,931-949).
ctgcgagcactgatcaaca

SEQ ID NO: 369426 - DNA, 19 bp, Homo sapiens
  siRNA target sequence for ASXL2 (NM_018263.2,980-998).
gccagcaacgactgctttt

SEQ ID NO: 369427 - DNA, 19 bp, Homo sapiens
  siRNA target sequence for ASXL2 (NM_018263.2,1023-1041).
ggttggtccagatggttta

SEQ ID NO: 369428 - DNA, 19 bp, Homo sapiens
  siRNA target sequence for ASXL2 (NM_018263.2,1060-1078).
gcccttaacaatgaattct

SEQ ID NO: 369429 - DNA, 19 bp, Homo sapiens
  siRNA target sequence for ASXL2 (NM_018263.2,1111-1129).
ctctcagaaggtgagttta

SEQ ID NO: 369430 - DNA, 19 bp, Homo sapiens
  siRNA target sequence for ASXL2 (NM_018263.2,1146-1164).
gagaattcgacaagagatt

SEQ ID NO: 369431 - DNA, 19 bp, Homo sapiens
  siRNA target sequence for ASXL2 (NM_018263.2,1270-1288).
cccagtgatcccaaagtaa

SEQ ID NO: 369432 - DNA, 19 bp, Homo sapiens
  siRNA target sequence for ASXL2 (NM_018263.2,1301-1319).
ctgaacaaccaaaatccat

SEQ ID NO: 369433 - DNA, 19 bp, Homo sapiens
  siRNA target sequence for ASXL2 (NM_018263.2,1324-1342).
gtgtcagaggcctctctta

SEQ ID NO: 369434 - DNA, 19 bp, Homo sapiens
  siRNA target sequence for ASXL2 (NM_018263.2,1330-1348).
gaggcctctcttatcagaa

SEQ ID NO: 369435 - DNA, 19 bp, Homo sapiens
  siRNA target sequence for ASXL2 (NM_018263.2,1332-1350).
ggcctctcttatcagaata

SEQ ID NO: 369436 - DNA, 19 bp, Homo sapiens
  siRNA target sequence for ASXL2 (NM_018263.2,1365-1383).
ccagtcagagtgtaaagaa

SEQ ID NO: 369437 - DNA, 19 bp, Homo sapiens
  siRNA target sequence for ASXL2 (NM_018263.2,1398-1416).
gtcatcaccaggcagaaaa

SEQ ID NO: 369438 - DNA, 19 bp, Homo sapiens
  siRNA target sequence for ASXL2 (NM_018263.2,1438-1456).
gaagtgcagccgaacttct

SEQ ID NO: 369439 - DNA, 19 bp, Homo sapiens
  siRNA target sequence for ASXL2 (NM_018263.2,1600-1618).
ctcaccacagcttctaatt

SEQ ID NO: 369440 - DNA, 19 bp, Homo sapiens
  siRNA target sequence for ASXL2 (NM_018263.2,1602-1620).
caccacagcttctaattat

SEQ ID NO: 369441 - DNA, 19 bp, Homo sapiens
  siRNA target sequence for ASXL2 (NM_018263.2,1607-1625).
cagcttctaattataacaa

SEQ ID NO: 369442 - DNA, 19 bp, Homo sapiens
  siRNA target sequence for ASXL2 (NM_018263.2,1635-1653).
ccaagaatctttagttaca

SEQ ID NO: 369443 - DNA, 19 bp, Homo sapiens
  siRNA target sequence for ASXL2 (NM_018263.2,1636-1654).
caagaatctttagttacat

SEQ ID NO: 369444 - DNA, 19 bp, Homo sapiens
  siRNA target sequence for ASXL2 (NM_018263.2,1676-1694).
ctggggttgaaaaaccaat

SEQ ID NO: 369445 - DNA, 19 bp, Homo sapiens
  siRNA target sequence for ASXL2 (NM_018263.2,1679-1697).
gggttgaaaaaccaatagt

SEQ ID NO: 369446 - DNA, 19 bp, Homo sapiens
  siRNA target sequence for ASXL2 (NM_018263.2,1681-1699).
gttgaaaaaccaatagtga

SEQ ID NO: 369447 - DNA, 19 bp, Homo sapiens
  siRNA target sequence for ASXL2 (NM_018263.2,1715-1733).
cgggtccacaggagactaa

SEQ ID NO: 369448 - DNA, 19 bp, Homo sapiens
  siRNA target sequence for ASXL2 (NM_018263.2,1718-1736).
gtccacaggagactaatat

SEQ ID NO: 369449 - DNA, 19 bp, Homo sapiens
  siRNA target sequence for ASXL2 (NM_018263.2,1721-1739).
cacaggagactaatatgaa

SEQ ID NO: 369450 - DNA, 19 bp, Homo sapiens
  siRNA target sequence for ASXL2 (NM_018263.2,1745-1763).
ctctagcaactcttgttga

SEQ ID NO: 369451 - DNA, 19 bp, Homo sapiens
  siRNA target sequence for ASXL2 (NM_018263.2,1836-1854).
gccacgtgtcactgagaat

SEQ ID NO: 369452 - DNA, 19 bp, Homo sapiens
  siRNA target sequence for ASXL2 (NM_018263.2,1913-1931).
gaatccaggtgcgaaaagt

SEQ ID NO: 369453 - DNA, 19 bp, Homo sapiens
  siRNA target sequence for ASXL2 (NM_018263.2,2019-2037).
catcactagtcctaacaga

SEQ ID NO: 369454 - DNA, 19 bp, Homo sapiens
  siRNA target sequence for ASXL2 (NM_018263.2,2467-2485).
ccagcccacatagagaaat

SEQ ID NO: 369455 - DNA, 19 bp, Homo sapiens
  siRNA target sequence for ASXL2 (NM_018263.2,2471-2489).
cccacatagagaaattgga

SEQ ID NO: 369456 - DNA, 19 bp, Homo sapiens
  siRNA target sequence for ASXL2 (NM_018263.2,2545-2563).
ccacaagggcccagtagtt

SEQ ID NO: 369457 - DNA, 19 bp, Homo sapiens
  siRNA target sequence for ASXL2 (NM_018263.2,2588-2606).
caacaggtcctgctctaat

SEQ ID NO: 369458 - DNA, 19 bp, Homo sapiens
  siRNA target sequence for ASXL2 (NM_018263.2,2611-2629).
ggtgcctcacctgttcatt

SEQ ID NO: 369459 - DNA, 19 bp, Homo sapiens
  siRNA target sequence for ASXL2 (NM_018263.2,2659-2677).
gcaggtcctagtaagaata

SEQ ID NO: 369460 - DNA, 19 bp, Homo sapiens
  siRNA target sequence for ASXL2 (NM_018263.2,2660-2678).
caggtcctagtaagaatat

SEQ ID NO: 369461 - DNA, 19 bp, Homo sapiens
  siRNA target sequence for ASXL2 (NM_018263.2,2665-2683).
cctagtaagaatataccta

SEQ ID NO: 369462 - DNA, 19 bp, Homo sapiens
  siRNA target sequence for ASXL2 (NM_018263.2,2666-2684).
ctagtaagaatatacctaa

SEQ ID NO: 369463 - DNA, 19 bp, Homo sapiens
  siRNA target sequence for ASXL2 (NM_018263.2,2728-2746).
gtaactccctcccctttaa

SEQ ID NO: 369464 - DNA, 19 bp, Homo sapiens
  siRNA target sequence for ASXL2 (NM_018263.2,2734-2752).
ccctcccctttaacatctt

SEQ ID NO: 369465 - DNA, 19 bp, Homo sapiens
  siRNA target sequence for ASXL2 (NM_018263.2,2738-2756).
cccctttaacatctttatt

SEQ ID NO: 369466 - DNA, 19 bp, Homo sapiens
  siRNA target sequence for ASXL2 (NM_018263.2,2757-2775).
gaccacagccactttagaa

SEQ ID NO: 369467 - DNA, 19 bp, Homo sapiens
  siRNA target sequence for ASXL2 (NM_018263.2,2790-2808).
ccaggtcagtgcaactaca

SEQ ID NO: 369468 - DNA, 19 bp, Homo sapiens
  siRNA target sequence for ASXL2 (NM_018263.2,2913-2931).
ctctagtatccctgctaat

SEQ ID NO: 369469 - DNA, 19 bp, Homo sapiens
  siRNA target sequence for ASXL2 (NM_018263.2,2922-2940).
ccctgctaataatccttta

SEQ ID NO: 369470 - DNA, 19 bp, Homo sapiens
  siRNA target sequence for ASXL2 (NM_018263.2,2926-2944).
gctaataatcctttagtga

SEQ ID NO: 369471 - DNA, 19 bp, Homo sapiens
  siRNA target sequence for ASXL2 (NM_018263.2,3061-3079).
ctcatagctaccaacacaa

SEQ ID NO: 369472 - DNA, 19 bp, Homo sapiens
  siRNA target sequence for ASXL2 (NM_018263.2,3142-3160).
ctgggcaaaaccttgcaaa

SEQ ID NO: 369473 - DNA, 19 bp, Homo sapiens
  siRNA target sequence for ASXL2 (NM_018263.2,3145-3163).
ggcaaaaccttgcaaagta

SEQ ID NO: 369474 - DNA, 19 bp, Homo sapiens
  siRNA target sequence for ASXL2 (NM_018263.2,3246-3264).
ccacgaaggactaagtaaa

SEQ ID NO: 369475 - DNA, 19 bp, Homo sapiens
  siRNA target sequence for ASXL2 (NM_018263.2,3249-3267).
cgaaggactaagtaaagca

SEQ ID NO: 369476 - DNA, 19 bp, Homo sapiens
  siRNA target sequence for ASXL2 (NM_018263.2,3279-3297).
gatccttcagactctcatt

SEQ ID NO: 369477 - DNA, 19 bp, Homo sapiens
  siRNA target sequence for ASXL2 (NM_018263.2,3303-3321).
ggttcggaggcagaatctt

SEQ ID NO: 369478 - DNA, 19 bp, Homo sapiens
  siRNA target sequence for ASXL2 (NM_018263.2,3440-3458).
caatggcagggcactactt

SEQ ID NO: 369479 - DNA, 19 bp, Homo sapiens
  siRNA target sequence for ASXL2 (NM_018263.2,3445-3463).
gcagggcactacttactga

SEQ ID NO: 369480 - DNA, 19 bp, Homo sapiens
  siRNA target sequence for ASXL2 (NM_018263.2,3448-3466).
gggcactacttactgaata

SEQ ID NO: 369481 - DNA, 19 bp, Homo sapiens
  siRNA target sequence for ASXL2 (NM_018263.2,3449-3467).
ggcactacttactgaatat

SEQ ID NO: 369482 - DNA, 19 bp, Homo sapiens
  siRNA target sequence for ASXL2 (NM_018263.2,3519-3537).
ccctgaagatcgtttttgt

SEQ ID NO: 369483 - DNA, 19 bp, Homo sapiens
  siRNA target sequence for ASXL2 (NM_018263.2,3521-3539).
ctgaagatcgtttttgtct

SEQ ID NO: 369484 - DNA, 19 bp, Homo sapiens
  siRNA target sequence for ASXL2 (NM_018263.2,3523-3541).
gaagatcgtttttgtctaa

SEQ ID NO: 369485 - DNA, 19 bp, Homo sapiens
  siRNA target sequence for ASXL2 (NM_018263.2,3556-3574).
gccttgaaaatgggatata

SEQ ID NO: 369486 - DNA, 19 bp, Homo sapiens
  siRNA target sequence for ASXL2 (NM_018263.2,3700-3718).
ggcaagggtgacacaagtt

SEQ ID NO: 369487 - DNA, 19 bp, Homo sapiens
  siRNA target sequence for ASXL2 (NM_018263.2,3758-3776).
gcttagctagcaagaatgt

SEQ ID NO: 369488 - DNA, 19 bp, Homo sapiens
  siRNA target sequence for ASXL2 (NM_018263.2,3780-3798).
ggctgagataccattgaat

SEQ ID NO: 369489 - DNA, 19 bp, Homo sapiens
  siRNA target sequence for ASXL2 (NM_018263.2,3782-3800).
ctgagataccattgaatga

SEQ ID NO: 369490 - DNA, 19 bp, Homo sapiens
  siRNA target sequence for ASXL2 (NM_018263.2,3799-3817).
gagcaaaccactttaagta

SEQ ID NO: 369491 - DNA, 19 bp, Homo sapiens
  siRNA target sequence for ASXL2 (NM_018263.2,3809-3827).
ctttaagtaaggagaatta

SEQ ID NO: 369492 - DNA, 19 bp, Homo sapiens
  siRNA target sequence for ASXL2 (NM_018263.2,3834-3852).
cactagaggccaaacattt

SEQ ID NO: 369493 - DNA, 19 bp, Homo sapiens
  siRNA target sequence for ASXL2 (NM_018263.2,3839-3857).
gaggccaaacatttgatga

SEQ ID NO: 369494 - DNA, 19 bp, Homo sapiens
  siRNA target sequence for ASXL2 (NM_018263.2,3842-3860).
gccaaacatttgatgaaaa

SEQ ID NO: 369495 - DNA, 19 bp, Homo sapiens
  siRNA target sequence for ASXL2 (NM_018263.2,3864-3882).
cctagccagagatttaatt

SEQ ID NO: 369496 - DNA, 19 bp, Homo sapiens
  siRNA target sequence for ASXL2 (NM_018263.2,3932-3950).
gtagcagccccgagctttt

SEQ ID NO: 369497 - DNA, 19 bp, Homo sapiens
  siRNA target sequence for ASXL2 (NM_018263.2,3940-3958).
cccgagcttttcagttcta

SEQ ID NO: 369498 - DNA, 19 bp, Homo sapiens
  siRNA target sequence for ASXL2 (NM_018263.2,3942-3960).
cgagcttttcagttctact

SEQ ID NO: 369499 - DNA, 19 bp, Homo sapiens
  siRNA target sequence for ASXL2 (NM_018263.2,4015-4033).
ctgcaaaccccgaagttgt

SEQ ID NO: 369500 - DNA, 19 bp, Homo sapiens
  siRNA target sequence for ASXL2 (NM_018263.2,4017-4035).
gcaaaccccgaagttgtat

SEQ ID NO: 369501 - DNA, 19 bp, Homo sapiens
  siRNA target sequence for ASXL2 (NM_018263.2,4047-4065).
ccagatagggccaagctat

SEQ ID NO: 369502 - DNA, 19 bp, Homo sapiens
  siRNA target sequence for ASXL2 (NM_018263.2,4048-4066).
cagatagggccaagctata

SEQ ID NO: 369503 - DNA, 19 bp, Homo sapiens
  siRNA target sequence for ASXL2 (NM_018263.2,4061-4079).
gctatagaggcatgatcaa

SEQ ID NO: 369504 - DNA, 19 bp, Homo sapiens
  siRNA target sequence for ASXL2 (NM_018263.2,4062-4080).
ctatagaggcatgatcaat

SEQ ID NO: 369505 - DNA, 19 bp, Homo sapiens
  siRNA target sequence for ASXL2 (NM_018263.2,4128-4146).
ccaggtatctagcaatgta

SEQ ID NO: 369506 - DNA, 19 bp, Homo sapiens
  siRNA target sequence for ASXL2 (NM_018263.2,4139-4157).
gcaatgtaggtgatgtcat

SEQ ID NO: 369507 - DNA, 19 bp, Homo sapiens
  siRNA target sequence for ASXL2 (NM_018263.2,4144-4162).
gtaggtgatgtcatgtcat

SEQ ID NO: 369508 - DNA, 19 bp, Homo sapiens
  siRNA target sequence for ASXL2 (NM_018263.2,4266-4284).
gggcacgccttcgaaatgt

SEQ ID NO: 369509 - DNA, 19 bp, Homo sapiens
  siRNA target sequence for ASXL2 (NM_018263.2,4267-4285).
ggcacgccttcgaaatgtt

SEQ ID NO: 369510 - DNA, 19 bp, Homo sapiens
  siRNA target sequence for ASXL2 (NM_018263.2,4268-4286).
gcacgccttcgaaatgtta

SEQ ID NO: 369511 - DNA, 19 bp, Homo sapiens
  siRNA target sequence for FLJ10901 (NM_018265.1,3-21).
gctgcaaatgccgaagtta

SEQ ID NO: 369512 - DNA, 19 bp, Homo sapiens
  siRNA target sequence for FLJ10901 (NM_018265.1,6-24).
gcaaatgccgaagttaaat

SEQ ID NO: 369513 - DNA, 19 bp, Homo sapiens
  siRNA target sequence for FLJ10901 (NM_018265.1,12-30).
gccgaagttaaatgaaata

SEQ ID NO: 369514 - DNA, 19 bp, Homo sapiens
  siRNA target sequence for FLJ10901 (NM_018265.1,506-524).
ggatcggagcggcttacaa

SEQ ID NO: 369515 - DNA, 19 bp, Homo sapiens
  siRNA target sequence for FLJ10901 (NM_018265.1,507-525).
gatcggagcggcttacaaa

SEQ ID NO: 369516 - DNA, 19 bp, Homo sapiens
  siRNA target sequence for FLJ10902 (NM_018266.1,399-417).
gctaagccgttcagcttta

SEQ ID NO: 369517 - DNA, 19 bp, Homo sapiens
  siRNA target sequence for FLJ10902 (NM_018266.1,570-588).
ggatgggagcctactcttt

SEQ ID NO: 369518 - DNA, 19 bp, Homo sapiens
  siRNA target sequence for FLJ10902 (NM_018266.1,574-592).
gggagcctactctttgaat

SEQ ID NO: 369519 - DNA, 19 bp, Homo sapiens
  siRNA target sequence for FLJ10902 (NM_018266.1,610-628).
ctgttggttgctcttttca

SEQ ID NO: 369520 - DNA, 19 bp, Homo sapiens
  siRNA target sequence for FLJ10902 (NM_018266.1,620-638).
ctcttttcattcagtacat

SEQ ID NO: 369521 - DNA, 19 bp, Homo sapiens
  siRNA target sequence for FLJ10902 (NM_018266.1,653-671).
cagtgtggtggtatcctta

SEQ ID NO: 369522 - DNA, 19 bp, Homo sapiens
  siRNA target sequence for FLJ10902 (NM_018266.1,660-678).
gtggtatccttacaatcat

SEQ ID NO: 369523 - DNA, 19 bp, Homo sapiens
  siRNA target sequence for FLJ10902 (NM_018266.1,748-766).
cttgcgaggaggcttgtat

SEQ ID NO: 369524 - DNA, 19 bp, Homo sapiens
  siRNA target sequence for FLJ10902 (NM_018266.1,814-832).
cactacatggttctgatat

SEQ ID NO: 369525 - DNA, 19 bp, Homo sapiens
  siRNA target sequence for FLJ10902 (NM_018266.1,816-834).
ctacatggttctgatatca

SEQ ID NO: 369526 - DNA, 19 bp, Homo sapiens
  siRNA target sequence for FLJ10902 (NM_018266.1,833-851).
cagctcgcttggtactact

SEQ ID NO: 369527 - DNA, 19 bp, Homo sapiens
  siRNA target sequence for FLJ10902 (NM_018266.1,843-861).
ggtactactcactttgtgt

SEQ ID NO: 369528 - DNA, 19 bp, Homo sapiens
  siRNA target sequence for FLJ10902 (NM_018266.1,875-893).
gttggaccctcgtcaatct

SEQ ID NO: 369529 - DNA, 19 bp, Homo sapiens
  siRNA target sequence for FLJ10902 (NM_018266.1,878-896).
ggaccctcgtcaatctctt

SEQ ID NO: 369530 - DNA, 19 bp, Homo sapiens
  siRNA target sequence for FLJ10902 (NM_018266.1,879-897).
gaccctcgtcaatctcttt

SEQ ID NO: 369531 - DNA, 19 bp, Homo sapiens
  siRNA target sequence for FLJ10902 (NM_018266.1,883-901).
ctcgtcaatctctttcgaa

SEQ ID NO: 369532 - DNA, 19 bp, Homo sapiens
  siRNA target sequence for FLJ10902 (NM_018266.1,932-950).
gctacccgtttggtgttta

SEQ ID NO: 369533 - DNA, 19 bp, Homo sapiens
  siRNA target sequence for FLJ10902 (NM_018266.1,933-951).
ctacccgtttggtgtttat

SEQ ID NO: 369534 - DNA, 19 bp, Homo sapiens
  siRNA target sequence for FLJ10902 (NM_018266.1,936-954).
cccgtttggtgtttatgtt

SEQ ID NO: 369535 - DNA, 19 bp, Homo sapiens
  siRNA target sequence for FLJ10902 (NM_018266.1,1058-1076).
gaggcttggccaaatccaa

SEQ ID NO: 369536 - DNA, 19 bp, Homo sapiens
  siRNA target sequence for FLJ10902 (NM_018266.1,1092-1110).
gttgctggagtcgctaaaa

SEQ ID NO: 369537 - DNA, 19 bp, Homo sapiens
  siRNA target sequence for FLJ10902 (NM_018266.1,1095-1113).
gctggagtcgctaaaagaa

SEQ ID NO: 369538 - DNA, 19 bp, Homo sapiens
  siRNA target sequence for FLJ10902 (NM_018266.1,1167-1185).
cctcattcgcaatgaagta

SEQ ID NO: 369539 - DNA, 19 bp, Homo sapiens
  siRNA target sequence for FLJ10902 (NM_018266.1,1201-1219).
gatttcaaccacagaatca

SEQ ID NO: 369540 - DNA, 19 bp, Homo sapiens
  siRNA target sequence for FLJ10902 (NM_018266.1,1214-1232).
gaatcaaggaggttctctt

SEQ ID NO: 369541 - DNA, 19 bp, Homo sapiens
  siRNA target sequence for FLJ10902 (NM_018266.1,1250-1268).
cctactatgttgcatttct

SEQ ID NO: 369542 - DNA, 19 bp, Homo sapiens
  siRNA target sequence for FLJ10902 (NM_018266.1,1284-1302).
gaagagtacccagtactat

SEQ ID NO: 369543 - DNA, 19 bp, Homo sapiens
  siRNA target sequence for FLJ10902 (NM_018266.1,1319-1337).
gtgagcacctcattatggt

SEQ ID NO: 369544 - DNA, 19 bp, Homo sapiens
  siRNA target sequence for FLJ10902 (NM_018266.1,1329-1347).
cattatggtgtggatcaat

SEQ ID NO: 369545 - DNA, 19 bp, Homo sapiens
  siRNA target sequence for FLJ10902 (NM_018266.1,1374-1392).
gttgccatccaaatactgt

SEQ ID NO: 369546 - DNA, 19 bp, Homo sapiens
  siRNA target sequence for FLJ10902 (NM_018266.1,1513-1531).
gtgcggcacagcagatgtt

SEQ ID NO: 369547 - DNA, 19 bp, Homo sapiens
  siRNA target sequence for FLJ10902 (NM_018266.1,1516-1534).
cggcacagcagatgtttat

SEQ ID NO: 369548 - DNA, 19 bp, Homo sapiens
  siRNA target sequence for FLJ10902 (NM_018266.1,1517-1535).
ggcacagcagatgtttata

SEQ ID NO: 369549 - DNA, 19 bp, Homo sapiens
  siRNA target sequence for FLJ10902 (NM_018266.1,1518-1536).
gcacagcagatgtttatat

SEQ ID NO: 369550 - DNA, 19 bp, Homo sapiens
  siRNA target sequence for FLJ10902 (NM_018266.1,1538-1556).
gagccatggggccttacaa

SEQ ID NO: 369551 - DNA, 19 bp, Homo sapiens
  siRNA target sequence for FLJ10902 (NM_018266.1,1561-1579).
gcagtgccttcagatgtat

SEQ ID NO: 369552 - DNA, 19 bp, Homo sapiens
  siRNA target sequence for FLJ10902 (NM_018266.1,1582-1600).
catgcccgcttttatttct

SEQ ID NO: 369553 - DNA, 19 bp, Homo sapiens
  siRNA target sequence for FLJ10902 (NM_018266.1,1599-1617).
cttatttcatcgaccatta

SEQ ID NO: 369554 - DNA, 19 bp, Homo sapiens
  siRNA target sequence for FLJ10902 (NM_018266.1,1609-1627).
cgaccattaaggctgttaa

SEQ ID NO: 369555 - DNA, 19 bp, Homo sapiens
  siRNA target sequence for FLJ10902 (NM_018266.1,1610-1628).
gaccattaaggctgttaaa

SEQ ID NO: 369556 - DNA, 19 bp, Homo sapiens
  siRNA target sequence for FLJ10902 (NM_018266.1,1647-1665).
gggcagtgtcgtcttctat

SEQ ID NO: 369557 - DNA, 19 bp, Homo sapiens
  siRNA target sequence for FLJ10902 (NM_018266.1,1649-1667).
gcagtgtcgtcttctatca

SEQ ID NO: 369558 - DNA, 19 bp, Homo sapiens
  siRNA target sequence for FLJ10902 (NM_018266.1,1731-1749).
ctgcaactactatgtttta

SEQ ID NO: 369559 - DNA, 19 bp, Homo sapiens
  siRNA target sequence for FLJ10902 (NM_018266.1,1759-1777).
ctccgggacagaatagtat

SEQ ID NO: 369560 - DNA, 19 bp, Homo sapiens
  siRNA target sequence for FLJ10902 (NM_018266.1,1761-1779).
ccgggacagaatagtatta

SEQ ID NO: 369561 - DNA, 19 bp, Homo sapiens
  siRNA target sequence for FLJ10904 (NM_018268.1,305-323).
gggactggccgagaaatct

SEQ ID NO: 369562 - DNA, 19 bp, Homo sapiens
  siRNA target sequence for FLJ10904 (NM_018268.1,313-331).
ccgagaaatctcctttaca

SEQ ID NO: 369563 - DNA, 19 bp, Homo sapiens
  siRNA target sequence for FLJ10904 (NM_018268.1,332-350).
gacaataggtgaagaacaa

SEQ ID NO: 369564 - DNA, 19 bp, Homo sapiens
  siRNA target sequence for FLJ10904 (NM_018268.1,383-401).
gaaggctcatcatgatatt

SEQ ID NO: 369565 - DNA, 19 bp, Homo sapiens
  siRNA target sequence for FLJ10904 (NM_018268.1,386-404).
ggctcatcatgatattgta

SEQ ID NO: 369566 - DNA, 19 bp, Homo sapiens
  siRNA target sequence for FLJ10904 (NM_018268.1,423-441).
gatgactacagatttgcat

SEQ ID NO: 369567 - DNA, 19 bp, Homo sapiens
  siRNA target sequence for FLJ10904 (NM_018268.1,524-542).
gataacagctattattaca

SEQ ID NO: 369568 - DNA, 19 bp, Homo sapiens
  siRNA target sequence for FLJ10904 (NM_018268.1,587-605).
gacagcctctgctgataga

SEQ ID NO: 369569 - DNA, 19 bp, Homo sapiens
  siRNA target sequence for FLJ10904 (NM_018268.1,639-657).
caagttcagagaatatcat

SEQ ID NO: 369570 - DNA, 19 bp, Homo sapiens
  siRNA target sequence for FLJ10904 (NM_018268.1,662-680).
ccagtctactgtaaagtgt

SEQ ID NO: 369571 - DNA, 19 bp, Homo sapiens
  siRNA target sequence for FLJ10904 (NM_018268.1,663-681).
cagtctactgtaaagtgtt

SEQ ID NO: 369572 - DNA, 19 bp, Homo sapiens
  siRNA target sequence for FLJ10904 (NM_018268.1,665-683).
gtctactgtaaagtgttta

SEQ ID NO: 369573 - DNA, 19 bp, Homo sapiens
  siRNA target sequence for FLJ10904 (NM_018268.1,733-751).
gtgtgtggaaccgaaaatt

SEQ ID NO: 369574 - DNA, 19 bp, Homo sapiens
  siRNA target sequence for FLJ10904 (NM_018268.1,737-755).
gtggaaccgaaaattagat

SEQ ID NO: 369575 - DNA, 19 bp, Homo sapiens
  siRNA target sequence for FLJ10904 (NM_018268.1,739-757).
ggaaccgaaaattagatct

SEQ ID NO: 369576 - DNA, 19 bp, Homo sapiens
  siRNA target sequence for FLJ10904 (NM_018268.1,753-771).
gatctcctgtgtaagacta

SEQ ID NO: 369577 - DNA, 19 bp, Homo sapiens
  siRNA target sequence for FLJ10904 (NM_018268.1,776-794).
cctttctgatacaggtatt

SEQ ID NO: 369578 - DNA, 19 bp, Homo sapiens
  siRNA target sequence for FLJ10904 (NM_018268.1,777-795).
ctttctgatacaggtatta

SEQ ID NO: 369579 - DNA, 19 bp, Homo sapiens
  siRNA target sequence for FLJ10904 (NM_018268.1,804-822).
gttgaaatacctaagaact

SEQ ID NO: 369580 - DNA, 19 bp, Homo sapiens
  siRNA target sequence for FLJ10904 (NM_018268.1,921-939).
cttgatcaccaggataata

SEQ ID NO: 369581 - DNA, 19 bp, Homo sapiens
  siRNA target sequence for FLJ10904 (NM_018268.1,933-951).
gataatattctctcattga

SEQ ID NO: 369582 - DNA, 19 bp, Homo sapiens
  siRNA target sequence for FLJ10904 (NM_018268.1,942-960).
ctctcattgattaatgtca

SEQ ID NO: 369583 - DNA, 19 bp, Homo sapiens
  siRNA target sequence for FLJ10904 (NM_018268.1,944-962).
ctcattgattaatgtcaat

SEQ ID NO: 369584 - DNA, 19 bp, Homo sapiens
  siRNA target sequence for FLJ10904 (NM_018268.1,990-1008).
gtcggagagctgatcatct

SEQ ID NO: 369585 - DNA, 19 bp, Homo sapiens
  siRNA target sequence for FLJ10904 (NM_018268.1,1035-1053).
gcctatgaacgcaacttct

SEQ ID NO: 369586 - DNA, 19 bp, Homo sapiens
  siRNA target sequence for FLJ10904 (NM_018268.1,1113-1131).
gacatttctattcatcatt

SEQ ID NO: 369587 - DNA, 19 bp, Homo sapiens
  siRNA target sequence for FLJ10904 (NM_018268.1,1138-1156).
gtgatgaagagaatgtatt

SEQ ID NO: 369588 - DNA, 19 bp, Homo sapiens
  siRNA target sequence for FLJ10904 (NM_018268.1,1182-1200).
gtgtatagccttcaaatga

SEQ ID NO: 369589 - DNA, 19 bp, Homo sapiens
  siRNA target sequence for FLJ10904 (NM_018268.1,1263-1281).
ccaaacaggcagttaatct

SEQ ID NO: 369590 - DNA, 19 bp, Homo sapiens
  siRNA target sequence for FLJ10904 (NM_018268.1,1302-1320).
gtacgcatttgggagttaa

SEQ ID NO: 369591 - DNA, 19 bp, Homo sapiens
  siRNA target sequence for FLJ10904 (NM_018268.1,1348-1366).
ctgtaccaacaggtttttt

SEQ ID NO: 369592 - DNA, 19 bp, Homo sapiens
  siRNA target sequence for FLJ10904 (NM_018268.1,1350-1368).
gtaccaacaggttttttta

SEQ ID NO: 369593 - DNA, 19 bp, Homo sapiens
  siRNA target sequence for FLJ10904 (NM_018268.1,1401-1419).
gccagccaacctgttaaaa

SEQ ID NO: 369594 - DNA, 19 bp, Homo sapiens
  siRNA target sequence for FLJ10904 (NM_018268.1,1405-1423).
gccaacctgttaaaaagca

SEQ ID NO: 369595 - DNA, 19 bp, Homo sapiens
  siRNA target sequence for FLJ10904 (NM_018268.1,1441-1459).
catgttcactggagcttat

SEQ ID NO: 369596 - DNA, 19 bp, Homo sapiens
  siRNA target sequence for FLJ10904 (NM_018268.1,1452-1470).
gagcttattggagatttga

SEQ ID NO: 369597 - DNA, 19 bp, Homo sapiens
  siRNA target sequence for SIPL (NM_018269.1,210-228).
cgaagagagaggaactact

SEQ ID NO: 369598 - DNA, 19 bp, Homo sapiens
  siRNA target sequence for SIPL (NM_018269.1,227-245).
ctcctggatggacatcata

SEQ ID NO: 369599 - DNA, 19 bp, Homo sapiens
  siRNA target sequence for SIPL (NM_018269.1,451-469).
cggtggacgagaagaacta

SEQ ID NO: 369600 - DNA, 19 bp, Homo sapiens
  siRNA target sequence for SIPL (NM_018269.1,550-568).
ggcagtacgtgaaatttct

SEQ ID NO: 369601 - DNA, 19 bp, Homo sapiens
  siRNA target sequence for C20orf20 (NM_018270.3,194-212).
ccgacacttccacatgatt

SEQ ID NO: 369602 - DNA, 19 bp, Homo sapiens
  siRNA target sequence for C20orf20 (NM_018270.3,195-213).
cgacacttccacatgattt

SEQ ID NO: 369603 - DNA, 19 bp, Homo sapiens
  siRNA target sequence for C20orf20 (NM_018270.3,308-326).
gcatgagtctgagattctt

SEQ ID NO: 369604 - DNA, 19 bp, Homo sapiens
  siRNA target sequence for C20orf20 (NM_018270.3,455-473).
ggctgacgatgttttttca

SEQ ID NO: 369605 - DNA, 19 bp, Homo sapiens
  siRNA target sequence for LAS1 (NM_018272.1,178-196).
ggcacagaagtgttagatt

SEQ ID NO: 369606 - DNA, 19 bp, Homo sapiens
  siRNA target sequence for LAS1 (NM_018272.1,180-198).
cacagaagtgttagattct

SEQ ID NO: 369607 - DNA, 19 bp, Homo sapiens
  siRNA target sequence for LAS1 (NM_018272.1,197-215).
ctctgaaacacaaattgga

SEQ ID NO: 369608 - DNA, 19 bp, Homo sapiens
  siRNA target sequence for LAS1 (NM_018272.1,221-239).
gattccaaggatattagca

SEQ ID NO: 369609 - DNA, 19 bp, Homo sapiens
  siRNA target sequence for LAS1 (NM_018272.1,266-284).
gcatacccactatgatcat

SEQ ID NO: 369610 - DNA, 19 bp, Homo sapiens
  siRNA target sequence for LAS1 (NM_018272.1,345-363).
cttgtcaaagatgatgtta

SEQ ID NO: 369611 - DNA, 19 bp, Homo sapiens
  siRNA target sequence for LAS1 (NM_018272.1,507-525).
gaatctgaagccataaaat

SEQ ID NO: 369612 - DNA, 19 bp, Homo sapiens
  siRNA target sequence for LAS1 (NM_018272.1,543-561).
gtattaagtgaaactgttt

SEQ ID NO: 369613 - DNA, 19 bp, Homo sapiens
  siRNA target sequence for LAS1 (NM_018272.1,618-636).
gacaatgtggtggatttat

SEQ ID NO: 369614 - DNA, 19 bp, Homo sapiens
  siRNA target sequence for LAS1 (NM_018272.1,630-648).
gatttatgccagttcacaa

SEQ ID NO: 369615 - DNA, 19 bp, Homo sapiens
  siRNA target sequence for LAS1 (NM_018272.1,658-676).
gagtataccacttggatat

SEQ ID NO: 369616 - DNA, 19 bp, Homo sapiens
  siRNA target sequence for LAS1 (NM_018272.1,660-678).
gtataccacttggatattt

SEQ ID NO: 369617 - DNA, 19 bp, Homo sapiens
  siRNA target sequence for FLJ10922 (NM_018273.2,143-161).
catcgctggcagccaaaat

SEQ ID NO: 369618 - DNA, 19 bp, Homo sapiens
  siRNA target sequence for FLJ10922 (NM_018273.2,163-181).
ggggagtatcgcaagatgt

SEQ ID NO: 369619 - DNA, 19 bp, Homo sapiens
  siRNA target sequence for FLJ10922 (NM_018273.2,216-234).
gtaccgcgagcgcttcatt

SEQ ID NO: 369620 - DNA, 19 bp, Homo sapiens
  siRNA target sequence for FLJ10922 (NM_018273.2,252-270).
gctgctccgcctcctaata

SEQ ID NO: 369621 - DNA, 19 bp, Homo sapiens
  siRNA target sequence for FLJ10922 (NM_018273.2,371-389).
ggctgcaggccttatatga

SEQ ID NO: 369622 - DNA, 19 bp, Homo sapiens
  siRNA target sequence for FLJ10922 (NM_018273.2,414-432).
cctcgatcagccatcacta

SEQ ID NO: 369623 - DNA, 19 bp, Homo sapiens
  siRNA target sequence for FLJ10922 (NM_018273.2,415-433).
ctcgatcagccatcactaa

SEQ ID NO: 369624 - DNA, 19 bp, Homo sapiens
  siRNA target sequence for FLJ10922 (NM_018273.2,567-585).
ggtccaggtgacagtaaat

SEQ ID NO: 369625 - DNA, 19 bp, Homo sapiens
  siRNA target sequence for FLJ10922 (NM_018273.2,568-586).
gtccaggtgacagtaaatt

SEQ ID NO: 369626 - DNA, 19 bp, Homo sapiens
  siRNA target sequence for FLJ10922 (NM_018273.2,578-596).
cagtaaatttggatcagta

SEQ ID NO: 369627 - DNA, 19 bp, Homo sapiens
  siRNA target sequence for FLJ10922 (NM_018273.2,592-610).
cagtatgtctacattcact

SEQ ID NO: 369628 - DNA, 19 bp, Homo sapiens
  siRNA target sequence for FLJ10922 (NM_018273.2,695-713).
ctgcggagaggagatactt

SEQ ID NO: 369629 - DNA, 19 bp, Homo sapiens
  siRNA target sequence for FLJ10922 (NM_018273.2,698-716).
cggagaggagatactttaa

SEQ ID NO: 369630 - DNA, 19 bp, Homo sapiens
  siRNA target sequence for FLJ10922 (NM_018273.2,746-764).
ggggacacctggtactgaa

SEQ ID NO: 369631 - DNA, 19 bp, Homo sapiens
  siRNA target sequence for FLJ10922 (NM_018273.2,1042-1060).
cgcagtacgtccaacaact

SEQ ID NO: 369632 - DNA, 19 bp, Homo sapiens
  siRNA target sequence for FLJ10922 (NM_018273.2,1283-1301).
cccccagcatgggattgta

SEQ ID NO: 369633 - DNA, 19 bp, Homo sapiens
  siRNA target sequence for FLJ10922 (NM_018273.2,1310-1328).
cgggtttccccaaactaga

SEQ ID NO: 369634 - DNA, 19 bp, Homo sapiens
  siRNA target sequence for FLJ10922 (NM_018273.2,1330-1348).
ccagtggctccgatcactt

SEQ ID NO: 369635 - DNA, 19 bp, Homo sapiens
  siRNA target sequence for FLJ10922 (NM_018273.2,1364-1382).
ccacgcccagcagtaacat

SEQ ID NO: 369636 - DNA, 19 bp, Homo sapiens
  siRNA target sequence for C21orf77 (NM_018277.1,187-205).
cacgtcgctgccagcaaat

SEQ ID NO: 369637 - DNA, 19 bp, Homo sapiens
  siRNA target sequence for C21orf77 (NM_018277.1,189-207).
cgtcgctgccagcaaatga

SEQ ID NO: 369638 - DNA, 19 bp, Homo sapiens
  siRNA target sequence for C21orf77 (NM_018277.1,223-241).
gacctctgcaggaacctat

SEQ ID NO: 369639 - DNA, 19 bp, Homo sapiens
  siRNA target sequence for C21orf77 (NM_018277.1,231-249).
caggaacctatcttggtaa

SEQ ID NO: 369640 - DNA, 19 bp, Homo sapiens
  siRNA target sequence for KIF24 (NM_018278.1,19-37).
gaaggactactccaaatta

SEQ ID NO: 369641 - DNA, 19 bp, Homo sapiens
  siRNA target sequence for KIF24 (NM_018278.1,151-169).
cagcctgcgcatcaaatct

SEQ ID NO: 369642 - DNA, 19 bp, Homo sapiens
  siRNA target sequence for KIF24 (NM_018278.1,153-171).
gcctgcgcatcaaatctca

SEQ ID NO: 369643 - DNA, 19 bp, Homo sapiens
  siRNA target sequence for KIF24 (NM_018278.1,189-207).
ctcgcagacagctgaattt

SEQ ID NO: 369644 - DNA, 19 bp, Homo sapiens
  siRNA target sequence for KIF24 (NM_018278.1,192-210).
gcagacagctgaattttga

SEQ ID NO: 369645 - DNA, 19 bp, Homo sapiens
  siRNA target sequence for KIF24 (NM_018278.1,209-227).
gattctcctgctgacaata

SEQ ID NO: 369646 - DNA, 19 bp, Homo sapiens
  siRNA target sequence for KIF24 (NM_018278.1,232-250).
cagaaatgccagcaatgat

SEQ ID NO: 369647 - DNA, 19 bp, Homo sapiens
  siRNA target sequence for KIF24 (NM_018278.1,241-259).
cagcaatgatgggtttgaa

SEQ ID NO: 369648 - DNA, 19 bp, Homo sapiens
  siRNA target sequence for KIF24 (NM_018278.1,243-261).
gcaatgatgggtttgaaat

SEQ ID NO: 369649 - DNA, 19 bp, Homo sapiens
  siRNA target sequence for KIF24 (NM_018278.1,343-361).
ccagtaccatacaaaaaca

SEQ ID NO: 369650 - DNA, 19 bp, Homo sapiens
  siRNA target sequence for KIF24 (NM_018278.1,444-462).
caatactgggggattgtga

SEQ ID NO: 369651 - DNA, 19 bp, Homo sapiens
  siRNA target sequence for KIF24 (NM_018278.1,459-477).
gtgatattcccattattca

SEQ ID NO: 369652 - DNA, 19 bp, Homo sapiens
  siRNA target sequence for KIF24 (NM_018278.1,461-479).
gatattcccattattcaaa

SEQ ID NO: 369653 - DNA, 19 bp, Homo sapiens
  siRNA target sequence for FLJ10936 (NM_018279.2,588-606).
cagatcttaacgacaatat

SEQ ID NO: 369654 - DNA, 19 bp, Homo sapiens
  siRNA target sequence for FLJ10936 (NM_018279.2,590-608).
gatcttaacgacaatatat

SEQ ID NO: 369655 - DNA, 19 bp, Homo sapiens
  siRNA target sequence for FLJ10936 (NM_018279.2,655-673).
gatcatttgcatttcgtta

SEQ ID NO: 369656 - DNA, 19 bp, Homo sapiens
  siRNA target sequence for FLJ10936 (NM_018279.2,669-687).
cgttagctttctggattat

SEQ ID NO: 369657 - DNA, 19 bp, Homo sapiens
  siRNA target sequence for FLJ10936 (NM_018279.2,670-688).
gttagctttctggattata

SEQ ID NO: 369658 - DNA, 19 bp, Homo sapiens
  siRNA target sequence for FLJ10936 (NM_018279.2,674-692).
gctttctggattatatcaa

SEQ ID NO: 369659 - DNA, 19 bp, Homo sapiens
  siRNA target sequence for FLJ10936 (NM_018279.2,675-693).
ctttctggattatatcaat

SEQ ID NO: 369660 - DNA, 19 bp, Homo sapiens
  siRNA target sequence for FLJ10936 (NM_018279.2,679-697).
ctggattatatcaatgact

SEQ ID NO: 369661 - DNA, 19 bp, Homo sapiens
  siRNA target sequence for FLJ10936 (NM_018279.2,694-712).
gactgcaagcacctattat

SEQ ID NO: 369662 - DNA, 19 bp, Homo sapiens
  siRNA target sequence for FLJ10936 (NM_018279.2,698-716).
gcaagcacctattatggta

SEQ ID NO: 369663 - DNA, 19 bp, Homo sapiens
  siRNA target sequence for FLJ10936 (NM_018279.2,734-752).
ccgtggcgttggctgtttt

SEQ ID NO: 369664 - DNA, 19 bp, Homo sapiens
  siRNA target sequence for FLJ10936 (NM_018279.2,739-757).
gcgttggctgttttctgtt

SEQ ID NO: 369665 - DNA, 19 bp, Homo sapiens
  siRNA target sequence for FLJ10936 (NM_018279.2,765-783).
ctgttctgatcgtctctaa

SEQ ID NO: 369666 - DNA, 19 bp, Homo sapiens
  siRNA target sequence for FLJ10936 (NM_018279.2,825-843).
gagggctagtcgttggatt

SEQ ID NO: 369667 - DNA, 19 bp, Homo sapiens
  siRNA target sequence for FLJ10936 (NM_018279.2,827-845).
gggctagtcgttggattta

SEQ ID NO: 369668 - DNA, 19 bp, Homo sapiens
  siRNA target sequence for FLJ10936 (NM_018279.2,828-846).
ggctagtcgttggatttat

SEQ ID NO: 369669 - DNA, 19 bp, Homo sapiens
  siRNA target sequence for FLJ10936 (NM_018279.2,833-851).
gtcgttggatttatcctaa

SEQ ID NO: 369670 - DNA, 19 bp, Homo sapiens
  siRNA target sequence for FLJ10936 (NM_018279.2,857-875).
gcaaatttcagctttttta

SEQ ID NO: 369671 - DNA, 19 bp, Homo sapiens
  siRNA target sequence for FLJ10936 (NM_018279.2,906-924).
cgaaactcactaaatggaa

SEQ ID NO: 369672 - DNA, 19 bp, Homo sapiens
  siRNA target sequence for FLJ10936 (NM_018279.2,932-950).
gtgaagaagcgtctagatt

SEQ ID NO: 369673 - DNA, 19 bp, Homo sapiens
  siRNA target sequence for FLJ10936 (NM_018279.2,934-952).
gaagaagcgtctagattca

SEQ ID NO: 369674 - DNA, 19 bp, Homo sapiens
  siRNA target sequence for FLJ10936 (NM_018279.2,981-999).
gggttcaggtgttctgtaa

SEQ ID NO: 369675 - DNA, 19 bp, Homo sapiens
  siRNA target sequence for FLJ10936 (NM_018279.2,1053-1071).
gggaaatcccagtcgattt

SEQ ID NO: 369676 - DNA, 19 bp, Homo sapiens
  siRNA target sequence for FLJ10936 (NM_018279.2,1054-1072).
ggaaatcccagtcgatttt

SEQ ID NO: 369677 - DNA, 19 bp, Homo sapiens
  siRNA target sequence for FLJ10936 (NM_018279.2,1055-1073).
gaaatcccagtcgattttt

SEQ ID NO: 369678 - DNA, 19 bp, Homo sapiens
  siRNA target sequence for FLJ10936 (NM_018279.2,1163-1181).
ccagttctgagtaaaagtt

SEQ ID NO: 369679 - DNA, 19 bp, Homo sapiens
  siRNA target sequence for FLJ10936 (NM_018279.2,1224-1242).
ccaatggaggagttacagt

SEQ ID NO: 369680 - DNA, 19 bp, Homo sapiens
  siRNA target sequence for FLJ10936 (NM_018279.2,1342-1360).
gcagtggccaattattgca

SEQ ID NO: 369681 - DNA, 19 bp, Homo sapiens
  siRNA target sequence for FLJ10936 (NM_018279.2,1343-1361).
cagtggccaattattgcat

SEQ ID NO: 369682 - DNA, 19 bp, Homo sapiens
  siRNA target sequence for FLJ10936 (NM_018279.2,1348-1366).
gccaattattgcatttggt

SEQ ID NO: 369683 - DNA, 19 bp, Homo sapiens
  siRNA target sequence for FLJ10936 (NM_018279.2,1365-1383).
gtggtttagctggattact

SEQ ID NO: 369684 - DNA, 19 bp, Homo sapiens
  siRNA target sequence for FLJ10936 (NM_018279.2,1386-1404).
gatcaattgtggactcata

SEQ ID NO: 369685 - DNA, 19 bp, Homo sapiens
  siRNA target sequence for FLJ10936 (NM_018279.2,1389-1407).
caattgtggactcatactt

SEQ ID NO: 369686 - DNA, 19 bp, Homo sapiens
  siRNA target sequence for FLJ10936 (NM_018279.2,1401-1419).
catacttaggggctacaat

SEQ ID NO: 369687 - DNA, 19 bp, Homo sapiens
  siRNA target sequence for FLJ10936 (NM_018279.2,1409-1427).
ggggctacaatgcagtata

SEQ ID NO: 369688 - DNA, 19 bp, Homo sapiens
  siRNA target sequence for FLJ10936 (NM_018279.2,1411-1429).
ggctacaatgcagtatact

SEQ ID NO: 369689 - DNA, 19 bp, Homo sapiens
  siRNA target sequence for FLJ10936 (NM_018279.2,1456-1474).
ggtcaacagcccaacaaat

SEQ ID NO: 369690 - DNA, 19 bp, Homo sapiens
  siRNA target sequence for FLJ10936 (NM_018279.2,1516-1534).
cgcagtgaatctgttttct

SEQ ID NO: 369691 - DNA, 19 bp, Homo sapiens
  siRNA target sequence for NUDT15 (NM_018283.1,421-439).
gtgaattctttcattgaga

SEQ ID NO: 369692 - DNA, 19 bp, Homo sapiens
  siRNA target sequence for NUDT15 (NM_018283.1,483-501).
ggatgtgactcatgattca

SEQ ID NO: 369693 - DNA, 19 bp, Homo sapiens
  siRNA target sequence for NUDT15 (NM_018283.1,585-603).
ctggggactgcgttgttta

SEQ ID NO: 369694 - DNA, 19 bp, Homo sapiens
  siRNA target sequence for NUDT15 (NM_018283.1,587-605).
ggggactgcgttgtttaaa

SEQ ID NO: 369695 - DNA, 19 bp, Homo sapiens
  siRNA target sequence for NUDT15 (NM_018283.1,590-608).
gactgcgttgtttaaaaga

SEQ ID NO: 369696 - DNA, 19 bp, Homo sapiens
  siRNA target sequence for NUDT15 (NM_018283.1,610-628).
caaggctatgatccattta

SEQ ID NO: 369697 - DNA, 19 bp, Homo sapiens
  siRNA target sequence for NUDT15 (NM_018283.1,648-666).
ggtgggatacaaaggaaat

SEQ ID NO: 369698 - DNA, 19 bp, Homo sapiens
  siRNA target sequence for FLJ10970 (NM_018286.1,579-597).
gagacgggagagtcaaaca

SEQ ID NO: 369699 - DNA, 19 bp, Homo sapiens
  siRNA target sequence for FLJ10970 (NM_018286.1,596-614).
cagctctcgtggcaaatca

SEQ ID NO: 369700 - DNA, 19 bp, Homo sapiens
  siRNA target sequence for ARHGAP12 (NM_018287.4,358-376).
cagaaagattgtgataaaa

SEQ ID NO: 369701 - DNA, 19 bp, Homo sapiens
  siRNA target sequence for ARHGAP12 (NM_018287.4,377-395).
caaggggagaggtacatct

SEQ ID NO: 369702 - DNA, 19 bp, Homo sapiens
  siRNA target sequence for ARHGAP12 (NM_018287.4,428-446).
gtcaagccagatgaaaact

SEQ ID NO: 369703 - DNA, 19 bp, Homo sapiens
  siRNA target sequence for ARHGAP12 (NM_018287.4,498-516).
ctctcatgccacctgttaa

SEQ ID NO: 369704 - DNA, 19 bp, Homo sapiens
  siRNA target sequence for ARHGAP12 (NM_018287.4,521-539).
gtagctggtctgccaaata

SEQ ID NO: 369705 - DNA, 19 bp, Homo sapiens
  siRNA target sequence for ARHGAP12 (NM_018287.4,524-542).
gctggtctgccaaataact

SEQ ID NO: 369706 - DNA, 19 bp, Homo sapiens
  siRNA target sequence for ARHGAP12 (NM_018287.4,659-677).
cgtgatgccaatcagaatt

SEQ ID NO: 369707 - DNA, 19 bp, Homo sapiens
  siRNA target sequence for ARHGAP12 (NM_018287.4,757-775).
ctcacattctcctaaagtt

SEQ ID NO: 369708 - DNA, 19 bp, Homo sapiens
  siRNA target sequence for ARHGAP12 (NM_018287.4,773-791).
gtttccagccagaatagga

SEQ ID NO: 369709 - DNA, 19 bp, Homo sapiens
  siRNA target sequence for ARHGAP12 (NM_018287.4,784-802).
gaataggacacgctcattt

SEQ ID NO: 369710 - DNA, 19 bp, Homo sapiens
  siRNA target sequence for ARHGAP12 (NM_018287.4,850-868).
ctcccaggaacaatcttgt

SEQ ID NO: 369711 - DNA, 19 bp, Homo sapiens
  siRNA target sequence for ARHGAP12 (NM_018287.4,853-871).
ccaggaacaatcttgtgat

SEQ ID NO: 369712 - DNA, 19 bp, Homo sapiens
  siRNA target sequence for ARHGAP12 (NM_018287.4,885-903).
gctctgaaagaatacatca

SEQ ID NO: 369713 - DNA, 19 bp, Homo sapiens
  siRNA target sequence for ARHGAP12 (NM_018287.4,986-1004).
gattctcctgtctatgcta

SEQ ID NO: 369714 - DNA, 19 bp, Homo sapiens
  siRNA target sequence for ARHGAP12 (NM_018287.4,1101-1119).
gctcagggcgttgctatta

SEQ ID NO: 369715 - DNA, 19 bp, Homo sapiens
  siRNA target sequence for ARHGAP12 (NM_018287.4,1104-1122).
cagggcgttgctattacta

SEQ ID NO: 369716 - DNA, 19 bp, Homo sapiens
  siRNA target sequence for ARHGAP12 (NM_018287.4,1106-1124).
gggcgttgctattactata

SEQ ID NO: 369717 - DNA, 19 bp, Homo sapiens
  siRNA target sequence for ARHGAP12 (NM_018287.4,1107-1125).
ggcgttgctattactataa

SEQ ID NO: 369718 - DNA, 19 bp, Homo sapiens
  siRNA target sequence for ARHGAP12 (NM_018287.4,1109-1127).
cgttgctattactataaca

SEQ ID NO: 369719 - DNA, 19 bp, Homo sapiens
  siRNA target sequence for ARHGAP12 (NM_018287.4,1211-1229).
gatcaagagcttctttcat

SEQ ID NO: 369720 - DNA, 19 bp, Homo sapiens
  siRNA target sequence for ARHGAP12 (NM_018287.4,1220-1238).
cttctttcatcggaagaaa

SEQ ID NO: 369721 - DNA, 19 bp, Homo sapiens
  siRNA target sequence for ARHGAP12 (NM_018287.4,1227-1245).
catcggaagaaaactacta

SEQ ID NO: 369722 - DNA, 19 bp, Homo sapiens
  siRNA target sequence for ARHGAP12 (NM_018287.4,1293-1311).
ggggttggtcagaagagtt

SEQ ID NO: 369723 - DNA, 19 bp, Homo sapiens
  siRNA target sequence for ARHGAP12 (NM_018287.4,1316-1334).
gaacgtgggcataccttat

SEQ ID NO: 369724 - DNA, 19 bp, Homo sapiens
  siRNA target sequence for ARHGAP12 (NM_018287.4,1319-1337).
cgtgggcataccttatata

SEQ ID NO: 369725 - DNA, 19 bp, Homo sapiens
  siRNA target sequence for ARHGAP12 (NM_018287.4,1322-1340).
gggcataccttatatacca

SEQ ID NO: 369726 - DNA, 19 bp, Homo sapiens
  siRNA target sequence for ARHGAP12 (NM_018287.4,1330-1348).
cttatataccagtgactat

SEQ ID NO: 369727 - DNA, 19 bp, Homo sapiens
  siRNA target sequence for ARHGAP12 (NM_018287.4,1338-1356).
ccagtgactatactaatga

SEQ ID NO: 369728 - DNA, 19 bp, Homo sapiens
  siRNA target sequence for ARHGAP12 (NM_018287.4,1339-1357).
cagtgactatactaatgaa

SEQ ID NO: 369729 - DNA, 19 bp, Homo sapiens
  siRNA target sequence for ARHGAP12 (NM_018287.4,1343-1361).
gactatactaatgaaaagt

SEQ ID NO: 369730 - DNA, 19 bp, Homo sapiens
  siRNA target sequence for ARHGAP12 (NM_018287.4,1360-1378).
gtggctcaagcatgttgat

SEQ ID NO: 369731 - DNA, 19 bp, Homo sapiens
  siRNA target sequence for ARHGAP12 (NM_018287.4,1362-1380).
ggctcaagcatgttgatga

SEQ ID NO: 369732 - DNA, 19 bp, Homo sapiens
  siRNA target sequence for ARHGAP12 (NM_018287.4,1363-1381).
gctcaagcatgttgatgat

SEQ ID NO: 369733 - DNA, 19 bp, Homo sapiens
  siRNA target sequence for ARHGAP12 (NM_018287.4,1366-1384).
caagcatgttgatgatcaa

SEQ ID NO: 369734 - DNA, 19 bp, Homo sapiens
  siRNA target sequence for ARHGAP12 (NM_018287.4,1409-1427).
gacggatctcggtcagaat

SEQ ID NO: 369735 - DNA, 19 bp, Homo sapiens
  siRNA target sequence for ARHGAP12 (NM_018287.4,1428-1446).
gggaattgccaaagtataa

SEQ ID NO: 369736 - DNA, 19 bp, Homo sapiens
  siRNA target sequence for ARHGAP12 (NM_018287.4,1497-1515).
ggcggctgcaagaaccaat

SEQ ID NO: 369737 - DNA, 19 bp, Homo sapiens
  siRNA target sequence for ARHGAP12 (NM_018287.4,1501-1519).
gctgcaagaaccaatagta

SEQ ID NO: 369738 - DNA, 19 bp, Homo sapiens
  siRNA target sequence for ARHGAP12 (NM_018287.4,1502-1520).
ctgcaagaaccaatagtat

SEQ ID NO: 369739 - DNA, 19 bp, Homo sapiens
  siRNA target sequence for ARHGAP12 (NM_018287.4,1511-1529).
ccaatagtattaacaaagt

SEQ ID NO: 369740 - DNA, 19 bp, Homo sapiens
  siRNA target sequence for ARHGAP12 (NM_018287.4,1531-1549).
gagacatagcaccattgta

SEQ ID NO: 369741 - DNA, 19 bp, Homo sapiens
  siRNA target sequence for ARHGAP12 (NM_018287.4,1542-1560).
ccattgtattggacactaa

SEQ ID NO: 369742 - DNA, 19 bp, Homo sapiens
  siRNA target sequence for ARHGAP12 (NM_018287.4,1543-1561).
cattgtattggacactaat

SEQ ID NO: 369743 - DNA, 19 bp, Homo sapiens
  siRNA target sequence for ARHGAP12 (NM_018287.4,1745-1763).
gtgttgcagggttcatctt

SEQ ID NO: 369744 - DNA, 19 bp, Homo sapiens
  siRNA target sequence for ARHGAP12 (NM_018287.4,1865-1883).
gcttcaaaggataaatcca

SEQ ID NO: 369745 - DNA, 19 bp, Homo sapiens
  siRNA target sequence for ARHGAP12 (NM_018287.4,1930-1948).
gctaattcagtctgacaat

SEQ ID NO: 369746 - DNA, 19 bp, Homo sapiens
  siRNA target sequence for ARHGAP12 (NM_018287.4,1949-1967).
gacactgttattaatgatt

SEQ ID NO: 369747 - DNA, 19 bp, Homo sapiens
  siRNA target sequence for ARHGAP12 (NM_018287.4,1953-1971).
ctgttattaatgattggtt

SEQ ID NO: 369748 - DNA, 19 bp, Homo sapiens
  siRNA target sequence for ARHGAP12 (NM_018287.4,1955-1973).
gttattaatgattggttta

SEQ ID NO: 369749 - DNA, 19 bp, Homo sapiens
  siRNA target sequence for ARHGAP12 (NM_018287.4,1976-1994).
gttcttagtagtacaatca

SEQ ID NO: 369750 - DNA, 19 bp, Homo sapiens
  siRNA target sequence for ARHGAP12 (NM_018287.4,1979-1997).
cttagtagtacaatcaata

SEQ ID NO: 369751 - DNA, 19 bp, Homo sapiens
  siRNA target sequence for ARHGAP12 (NM_018287.4,1983-2001).
gtagtacaatcaataatca

SEQ ID NO: 369752 - DNA, 19 bp, Homo sapiens
  siRNA target sequence for ARHGAP12 (NM_018287.4,2040-2058).
cggattcaccaggaataga

SEQ ID NO: 369753 - DNA, 19 bp, Homo sapiens
  siRNA target sequence for ARHGAP12 (NM_018287.4,2098-2116).
gcttcgttcctttaaagta

SEQ ID NO: 369754 - DNA, 19 bp, Homo sapiens
  siRNA target sequence for ARHGAP12 (NM_018287.4,2099-2117).
cttcgttcctttaaagtat

SEQ ID NO: 369755 - DNA, 19 bp, Homo sapiens
  siRNA target sequence for ARHGAP12 (NM_018287.4,2102-2120).
cgttcctttaaagtatcta

SEQ ID NO: 369756 - DNA, 19 bp, Homo sapiens
  siRNA target sequence for ARHGAP12 (NM_018287.4,2114-2132).
gtatctagcatagattctt

SEQ ID NO: 369757 - DNA, 19 bp, Homo sapiens
  siRNA target sequence for ARHGAP12 (NM_018287.4,2195-2213).
gctgttcgtgaaaaaggtt

SEQ ID NO: 369758 - DNA, 19 bp, Homo sapiens
  siRNA target sequence for ARHGAP12 (NM_018287.4,2198-2216).
gttcgtgaaaaaggttata

SEQ ID NO: 369759 - DNA, 19 bp, Homo sapiens
  siRNA target sequence for ARHGAP12 (NM_018287.4,2201-2219).
cgtgaaaaaggttatatta

SEQ ID NO: 369760 - DNA, 19 bp, Homo sapiens
  siRNA target sequence for ARHGAP12 (NM_018287.4,2333-2351).
gatgggatatacagagtaa

SEQ ID NO: 369761 - DNA, 19 bp, Homo sapiens
  siRNA target sequence for ARHGAP12 (NM_018287.4,2362-2380).
cgcagtgatccagaaacta

SEQ ID NO: 369762 - DNA, 19 bp, Homo sapiens
  siRNA target sequence for ARHGAP12 (NM_018287.4,2420-2438).
gacagtaaatgggaagata

SEQ ID NO: 369763 - DNA, 19 bp, Homo sapiens
  siRNA target sequence for ARHGAP12 (NM_018287.4,2424-2442).
gtaaatgggaagatattca

SEQ ID NO: 369764 - DNA, 19 bp, Homo sapiens
  siRNA target sequence for ARHGAP12 (NM_018287.4,2453-2471).
ggagccctcaaaatgtttt

SEQ ID NO: 369765 - DNA, 19 bp, Homo sapiens
  siRNA target sequence for ARHGAP12 (NM_018287.4,2516-2534).
gattttgttaatgcaatta

SEQ ID NO: 369766 - DNA, 19 bp, Homo sapiens
  siRNA target sequence for ARHGAP12 (NM_018287.4,2559-2577).
ctgctgttaaggacctaat

SEQ ID NO: 369767 - DNA, 19 bp, Homo sapiens
  siRNA target sequence for ARHGAP12 (NM_018287.4,2561-2579).
gctgttaaggacctaatca

SEQ ID NO: 369768 - DNA, 19 bp, Homo sapiens
  siRNA target sequence for ARHGAP12 (NM_018287.4,2624-2642).
cgacatctcagaagagtta

SEQ ID NO: 369769 - DNA, 19 bp, Homo sapiens
  siRNA target sequence for ARHGAP12 (NM_018287.4,2664-2682).
gaatgacctatcagagtat

SEQ ID NO: 369770 - DNA, 19 bp, Homo sapiens
  siRNA target sequence for ARHGAP12 (NM_018287.4,2668-2686).
gacctatcagagtatagca

SEQ ID NO: 369771 - DNA, 19 bp, Homo sapiens
  siRNA target sequence for ARHGAP12 (NM_018287.4,2670-2688).
cctatcagagtatagcaat

SEQ ID NO: 369772 - DNA, 19 bp, Homo sapiens
  siRNA target sequence for ARHGAP12 (NM_018287.4,2671-2689).
ctatcagagtatagcaatt

SEQ ID NO: 369773 - DNA, 19 bp, Homo sapiens
  siRNA target sequence for ARHGAP12 (NM_018287.4,2675-2693).
cagagtatagcaattgttt

SEQ ID NO: 369774 - DNA, 19 bp, Homo sapiens
  siRNA target sequence for ARHGAP12 (NM_018287.4,2690-2708).
gtttttggtcccactctat

SEQ ID NO: 369775 - DNA, 19 bp, Homo sapiens
  siRNA target sequence for ARHGAP12 (NM_018287.4,2752-2770).
gtaccagaatcagattgta

SEQ ID NO: 369776 - DNA, 19 bp, Homo sapiens
  siRNA target sequence for ARHGAP12 (NM_018287.4,2756-2774).
cagaatcagattgtagaat

SEQ ID NO: 369777 - DNA, 19 bp, Homo sapiens
  siRNA target sequence for FLJ10979 (NM_018289.2,166-184).
ctctagatcgagcagattt

SEQ ID NO: 369778 - DNA, 19 bp, Homo sapiens
  siRNA target sequence for FLJ10979 (NM_018289.2,224-242).
gcaatctctggcgaacata

SEQ ID NO: 369779 - DNA, 19 bp, Homo sapiens
  siRNA target sequence for FLJ10979 (NM_018289.2,278-296).
gagactggatgacaatatt

SEQ ID NO: 369780 - DNA, 19 bp, Homo sapiens
  siRNA target sequence for FLJ10979 (NM_018289.2,332-350).
ggatggacggcaagtgaaa

SEQ ID NO: 369781 - DNA, 19 bp, Homo sapiens
  siRNA target sequence for FLJ10979 (NM_018289.2,358-376).
cccgtgatattaagcaatt

SEQ ID NO: 369782 - DNA, 19 bp, Homo sapiens
  siRNA target sequence for FLJ10979 (NM_018289.2,464-482).
catgaccaggcgaagacaa

SEQ ID NO: 369783 - DNA, 19 bp, Homo sapiens
  siRNA target sequence for FLJ10979 (NM_018289.2,528-546).
gagcacttccacaagtata

SEQ ID NO: 369784 - DNA, 19 bp, Homo sapiens
  siRNA target sequence for FLJ10979 (NM_018289.2,598-616).
ctgagttaggacagcaaat

SEQ ID NO: 369785 - DNA, 19 bp, Homo sapiens
  siRNA target sequence for FLJ10979 (NM_018289.2,701-719).
ggttgctaatattctagat

SEQ ID NO: 369786 - DNA, 19 bp, Homo sapiens
  siRNA target sequence for FLJ10979 (NM_018289.2,724-742).
ggatcaaacaggaaatcat

SEQ ID NO: 369787 - DNA, 19 bp, Homo sapiens
  siRNA target sequence for FLJ10979 (NM_018289.2,804-822).
gttgcctggctggacaaaa

SEQ ID NO: 369788 - DNA, 19 bp, Homo sapiens
  siRNA target sequence for FLJ10979 (NM_018289.2,850-868).
gccagcttgtggactatga

SEQ ID NO: 369789 - DNA, 19 bp, Homo sapiens
  siRNA target sequence for FLJ10979 (NM_018289.2,914-932).
gaggattgcggtggaattt

SEQ ID NO: 369790 - DNA, 19 bp, Homo sapiens
  siRNA target sequence for FLJ10979 (NM_018289.2,969-987).
cgtaccagagcgaaggaaa

SEQ ID NO: 369791 - DNA, 19 bp, Homo sapiens
  siRNA target sequence for FLJ10979 (NM_018289.2,970-988).
gtaccagagcgaaggaaat

SEQ ID NO: 369792 - DNA, 19 bp, Homo sapiens
  siRNA target sequence for FLJ10979 (NM_018289.2,973-991).
ccagagcgaaggaaattga

SEQ ID NO: 369793 - DNA, 19 bp, Homo sapiens
  siRNA target sequence for FLJ10979 (NM_018289.2,974-992).
cagagcgaaggaaattgaa

SEQ ID NO: 369794 - DNA, 19 bp, Homo sapiens
  siRNA target sequence for FLJ10979 (NM_018289.2,1177-1195).
gagatttagatcaaccaaa

SEQ ID NO: 369795 - DNA, 19 bp, Homo sapiens
  siRNA target sequence for FLJ10979 (NM_018289.2,1199-1217).
gcctaaagccccagacaat

SEQ ID NO: 369796 - DNA, 19 bp, Homo sapiens
  siRNA target sequence for FLJ10979 (NM_018289.2,1252-1270).
ctcatctctacgtgtatat

SEQ ID NO: 369797 - DNA, 19 bp, Homo sapiens
  siRNA target sequence for FLJ10979 (NM_018289.2,1257-1275).
ctctacgtgtatatcgaat

SEQ ID NO: 369798 - DNA, 19 bp, Homo sapiens
  siRNA target sequence for FLJ10979 (NM_018289.2,1289-1307).
cctcggagagctgatagat

SEQ ID NO: 369799 - DNA, 19 bp, Homo sapiens
  siRNA target sequence for FLJ10979 (NM_018289.2,1384-1402).
gcgccgacctctttgtcta

SEQ ID NO: 369800 - DNA, 19 bp, Homo sapiens
  siRNA target sequence for FLJ10979 (NM_018289.2,1711-1729).
gtctgattgaacgaatcaa

SEQ ID NO: 369801 - DNA, 19 bp, Homo sapiens
  siRNA target sequence for FLJ10979 (NM_018289.2,1880-1898).
ctacgtcacctctgtcatt

SEQ ID NO: 369802 - DNA, 19 bp, Homo sapiens
  siRNA target sequence for FLJ10979 (NM_018289.2,1891-1909).
ctgtcattctgcacatcaa

SEQ ID NO: 369803 - DNA, 19 bp, Homo sapiens
  siRNA target sequence for FLJ10979 (NM_018289.2,1941-1959).
gcttccacacgcaagtact

SEQ ID NO: 369804 - DNA, 19 bp, Homo sapiens
  siRNA target sequence for FLJ10979 (NM_018289.2,1942-1960).
cttccacacgcaagtactt

SEQ ID NO: 369805 - DNA, 19 bp, Homo sapiens
  siRNA target sequence for FLJ10979 (NM_018289.2,1961-1979).
cactcagttctgcgttaaa

SEQ ID NO: 369806 - DNA, 19 bp, Homo sapiens
  siRNA target sequence for FLJ10979 (NM_018289.2,1963-1981).
ctcagttctgcgttaaatt

SEQ ID NO: 369807 - DNA, 19 bp, Homo sapiens
  siRNA target sequence for FLJ10997 (NM_018293.1,197-215).
gaaataaattgttctagtt

SEQ ID NO: 369808 - DNA, 19 bp, Homo sapiens
  siRNA target sequence for FLJ10997 (NM_018293.1,238-256).
gaattctgatagtaaggat

SEQ ID NO: 369809 - DNA, 19 bp, Homo sapiens
  siRNA target sequence for FLJ10997 (NM_018293.1,243-261).
ctgatagtaaggatttgga

SEQ ID NO: 369810 - DNA, 19 bp, Homo sapiens
  siRNA target sequence for FLJ10997 (NM_018293.1,268-286).
gacacttactgcttctagt

SEQ ID NO: 369811 - DNA, 19 bp, Homo sapiens
  siRNA target sequence for FLJ10997 (NM_018293.1,311-329).
gagcatgtggctgaattca

SEQ ID NO: 369812 - DNA, 19 bp, Homo sapiens
  siRNA target sequence for FLJ10997 (NM_018293.1,328-346).
cattgaaattcccataagt

SEQ ID NO: 369813 - DNA, 19 bp, Homo sapiens
  siRNA target sequence for FLJ10997 (NM_018293.1,345-363).
gtgtaccagaagatgttat

SEQ ID NO: 369814 - DNA, 19 bp, Homo sapiens
  siRNA target sequence for FLJ10997 (NM_018293.1,385-403).
cagtcctaataattcttta

SEQ ID NO: 369815 - DNA, 19 bp, Homo sapiens
  siRNA target sequence for FLJ10997 (NM_018293.1,387-405).
gtcctaataattctttaaa

SEQ ID NO: 369816 - DNA, 19 bp, Homo sapiens
  siRNA target sequence for FLJ10997 (NM_018293.1,553-571).
catatatgccacagatcaa

SEQ ID NO: 369817 - DNA, 19 bp, Homo sapiens
  siRNA target sequence for FLJ10997 (NM_018293.1,599-617).
ggttgtgtccggatattta

SEQ ID NO: 369818 - DNA, 19 bp, Homo sapiens
  siRNA target sequence for FLJ10997 (NM_018293.1,607-625).
ccggatatttaaaagaatt

SEQ ID NO: 369819 - DNA, 19 bp, Homo sapiens
  siRNA target sequence for FLJ10997 (NM_018293.1,652-670).
cgtacatccaaccgattta

SEQ ID NO: 369820 - DNA, 19 bp, Homo sapiens
  siRNA target sequence for FLJ10997 (NM_018293.1,653-671).
gtacatccaaccgatttaa

SEQ ID NO: 369821 - DNA, 19 bp, Homo sapiens
  siRNA target sequence for FLJ10997 (NM_018293.1,677-695).
cgacaaacagtaatgaagt

SEQ ID NO: 369822 - DNA, 19 bp, Homo sapiens
  siRNA target sequence for FLJ10997 (NM_018293.1,838-856).
gcttgcccagcacacaaaa

SEQ ID NO: 369823 - DNA, 19 bp, Homo sapiens
  siRNA target sequence for FLJ10997 (NM_018293.1,839-857).
cttgcccagcacacaaaaa

SEQ ID NO: 369824 - DNA, 19 bp, Homo sapiens
  siRNA target sequence for FLJ10997 (NM_018293.1,935-953).
catgaagctcaacactatt

SEQ ID NO: 369825 - DNA, 19 bp, Homo sapiens
  siRNA target sequence for FLJ10998 (NM_018294.3,141-159).
ctgttgtgtgtaggaaatt

SEQ ID NO: 369826 - DNA, 19 bp, Homo sapiens
  siRNA target sequence for FLJ10998 (NM_018294.3,146-164).
gtgtgtaggaaatttcttt

SEQ ID NO: 369827 - DNA, 19 bp, Homo sapiens
  siRNA target sequence for FLJ10998 (NM_018294.3,181-199).
ctgaatgggaggagtataa

SEQ ID NO: 369828 - DNA, 19 bp, Homo sapiens
  siRNA target sequence for FLJ10998 (NM_018294.3,183-201).
gaatgggaggagtataaga

SEQ ID NO: 369829 - DNA, 19 bp, Homo sapiens
  siRNA target sequence for FLJ10998 (NM_018294.3,318-336).
ggtcgtaaaggtatcttca

SEQ ID NO: 369830 - DNA, 19 bp, Homo sapiens
  siRNA target sequence for FLJ10998 (NM_018294.3,368-386).
cagtgggacagaatcctta

SEQ ID NO: 369831 - DNA, 19 bp, Homo sapiens
  siRNA target sequence for FLJ10998 (NM_018294.3,370-388).
gtgggacagaatccttaaa

SEQ ID NO: 369832 - DNA, 19 bp, Homo sapiens
  siRNA target sequence for FLJ10998 (NM_018294.3,373-391).
ggacagaatccttaaatga

SEQ ID NO: 369833 - DNA, 19 bp, Homo sapiens
  siRNA target sequence for FLJ10998 (NM_018294.3,390-408).
gagccagtaccaggttata

SEQ ID NO: 369834 - DNA, 19 bp, Homo sapiens
  siRNA target sequence for FLJ10998 (NM_018294.3,392-410).
gccagtaccaggttatagt

SEQ ID NO: 369835 - DNA, 19 bp, Homo sapiens
  siRNA target sequence for FLJ10998 (NM_018294.3,393-411).
ccagtaccaggttatagtt

SEQ ID NO: 369836 - DNA, 19 bp, Homo sapiens
  siRNA target sequence for FLJ10998 (NM_018294.3,394-412).
cagtaccaggttatagttt

SEQ ID NO: 369837 - DNA, 19 bp, Homo sapiens
  siRNA target sequence for FLJ10998 (NM_018294.3,451-469).
gtacaacctcccagtttaa

SEQ ID NO: 369838 - DNA, 19 bp, Homo sapiens
  siRNA target sequence for FLJ10998 (NM_018294.3,535-553).
gagaagtggataccaaaaa

SEQ ID NO: 369839 - DNA, 19 bp, Homo sapiens
  siRNA target sequence for FLJ10998 (NM_018294.3,582-600).
gccacgggcttgaaaccaa

SEQ ID NO: 369840 - DNA, 19 bp, Homo sapiens
  siRNA target sequence for FLJ10998 (NM_018294.3,586-604).
cgggcttgaaaccaagata

SEQ ID NO: 369841 - DNA, 19 bp, Homo sapiens
  siRNA target sequence for FLJ10998 (NM_018294.3,590-608).
cttgaaaccaagataccat

SEQ ID NO: 369842 - DNA, 19 bp, Homo sapiens
  siRNA target sequence for FLJ10998 (NM_018294.3,593-611).
gaaaccaagataccatttt

SEQ ID NO: 369843 - DNA, 19 bp, Homo sapiens
  siRNA target sequence for FLJ10998 (NM_018294.3,636-654).
gagaggcttccatatcgaa

SEQ ID NO: 369844 - DNA, 19 bp, Homo sapiens
  siRNA target sequence for FLJ10998 (NM_018294.3,703-721).
ctctggcaaatgttggaaa

SEQ ID NO: 369845 - DNA, 19 bp, Homo sapiens
  siRNA target sequence for FLJ10998 (NM_018294.3,802-820).
ctccggatgtcactgaaaa

SEQ ID NO: 369846 - DNA, 19 bp, Homo sapiens
  siRNA target sequence for FLJ10998 (NM_018294.3,812-830).
cactgaaaacccttacaga

SEQ ID NO: 369847 - DNA, 19 bp, Homo sapiens
  siRNA target sequence for FLJ10998 (NM_018294.3,846-864).
gcatccataggaaagcaaa

SEQ ID NO: 369848 - DNA, 19 bp, Homo sapiens
  siRNA target sequence for FLJ10998 (NM_018294.3,941-959).
cacaggtagagatagcaaa

SEQ ID NO: 369849 - DNA, 19 bp, Homo sapiens
  siRNA target sequence for FLJ10998 (NM_018294.3,945-963).
ggtagagatagcaaatctt

SEQ ID NO: 369850 - DNA, 19 bp, Homo sapiens
  siRNA target sequence for FLJ10998 (NM_018294.3,1056-1074).
gtcaacatcggcacacatt

SEQ ID NO: 369851 - DNA, 19 bp, Homo sapiens
  siRNA target sequence for FLJ10998 (NM_018294.3,1090-1108).
ccaaaggaggcttatctga

SEQ ID NO: 369852 - DNA, 19 bp, Homo sapiens
  siRNA target sequence for FLJ10998 (NM_018294.3,1091-1109).
caaaggaggcttatctgat

SEQ ID NO: 369853 - DNA, 19 bp, Homo sapiens
  siRNA target sequence for FLJ10998 (NM_018294.3,1199-1217).
cactctgagacggttcttt

SEQ ID NO: 369854 - DNA, 19 bp, Homo sapiens
  siRNA target sequence for FLJ10998 (NM_018294.3,1203-1221).
ctgagacggttctttaaga

SEQ ID NO: 369855 - DNA, 19 bp, Homo sapiens
  siRNA target sequence for FLJ10998 (NM_018294.3,1205-1223).
gagacggttctttaagagt

SEQ ID NO: 369856 - DNA, 19 bp, Homo sapiens
  siRNA target sequence for FLJ10998 (NM_018294.3,1296-1314).
ccaatcagctgctctacta

SEQ ID NO: 369857 - DNA, 19 bp, Homo sapiens
  siRNA target sequence for FLJ10998 (NM_018294.3,1413-1431).
ccaggagcagcatattttt

SEQ ID NO: 369858 - DNA, 19 bp, Homo sapiens
  siRNA target sequence for FLJ10998 (NM_018294.3,1514-1532).
cagtgaagccatccttaat

SEQ ID NO: 369859 - DNA, 19 bp, Homo sapiens
  siRNA target sequence for FLJ10998 (NM_018294.3,1613-1631).
ctttgagccctatgacttt

SEQ ID NO: 369860 - DNA, 19 bp, Homo sapiens
  siRNA target sequence for FLJ11000 (NM_018295.1,259-277).
gctgttcatgagcatcata

SEQ ID NO: 369861 - DNA, 19 bp, Homo sapiens
  siRNA target sequence for FLJ11000 (NM_018295.1,293-311).
gtcatctgcctgatgttat

SEQ ID NO: 369862 - DNA, 19 bp, Homo sapiens
  siRNA target sequence for FLJ11000 (NM_018295.1,355-373).
cctgagaatcggcttctat

SEQ ID NO: 369863 - DNA, 19 bp, Homo sapiens
  siRNA target sequence for FLJ11000 (NM_018295.1,356-374).
ctgagaatcggcttctata

SEQ ID NO: 369864 - DNA, 19 bp, Homo sapiens
  siRNA target sequence for FLJ11000 (NM_018295.1,690-708).
gcgcccaggccttactcat

SEQ ID NO: 369865 - DNA, 19 bp, Homo sapiens
  siRNA target sequence for FLJ11004 (NM_018296.2,838-856).
gaagggtaccaagtatctt

SEQ ID NO: 369866 - DNA, 19 bp, Homo sapiens
  siRNA target sequence for FLJ11004 (NM_018296.2,842-860).
ggtaccaagtatctttttt

SEQ ID NO: 369867 - DNA, 19 bp, Homo sapiens
  siRNA target sequence for FLJ11004 (NM_018296.2,850-868).
gtatcttttttggacaata

SEQ ID NO: 369868 - DNA, 19 bp, Homo sapiens
  siRNA target sequence for FLJ11004 (NM_018296.2,884-902).
ctccagaaaaggaattgat

SEQ ID NO: 369869 - DNA, 19 bp, Homo sapiens
  siRNA target sequence for FLJ11004 (NM_018296.2,900-918).
gataccaaaacctgatact

SEQ ID NO: 369870 - DNA, 19 bp, Homo sapiens
  siRNA target sequence for FLJ11004 (NM_018296.2,930-948).
ccatgatgcctcattgagt

SEQ ID NO: 369871 - DNA, 19 bp, Homo sapiens
  siRNA target sequence for FLJ11004 (NM_018296.2,931-949).
catgatgcctcattgagta

SEQ ID NO: 369872 - DNA, 19 bp, Homo sapiens
  siRNA target sequence for FLJ11004 (NM_018296.2,934-952).
gatgcctcattgagtaaat

SEQ ID NO: 369873 - DNA, 19 bp, Homo sapiens
  siRNA target sequence for FLJ11004 (NM_018296.2,976-994).
cagatccatccctatcagt

SEQ ID NO: 369874 - DNA, 19 bp, Homo sapiens
  siRNA target sequence for FLJ11004 (NM_018296.2,982-1000).
catccctatcagttacctt

SEQ ID NO: 369875 - DNA, 19 bp, Homo sapiens
  siRNA target sequence for FLJ11004 (NM_018296.2,1080-1098).
gagaagcaagaactatcaa

SEQ ID NO: 369876 - DNA, 19 bp, Homo sapiens
  siRNA target sequence for FLJ11004 (NM_018296.2,1092-1110).
ctatcaagagtatagcata

SEQ ID NO: 369877 - DNA, 19 bp, Homo sapiens
  siRNA target sequence for FLJ11004 (NM_018296.2,1106-1124).
gcataaagccttcaaatga

SEQ ID NO: 369878 - DNA, 19 bp, Homo sapiens
  siRNA target sequence for FLJ11004 (NM_018296.2,1200-1218).
gcttttgaagcttagttca

SEQ ID NO: 369879 - DNA, 19 bp, Homo sapiens
  siRNA target sequence for FLJ11004 (NM_018296.2,1209-1227).
gcttagttcagatctgtat

SEQ ID NO: 369880 - DNA, 19 bp, Homo sapiens
  siRNA target sequence for FLJ11004 (NM_018296.2,1228-1246).
gccacaacccatttcaaca

SEQ ID NO: 369881 - DNA, 19 bp, Homo sapiens
  siRNA target sequence for FLJ11004 (NM_018296.2,1253-1271).
ctgctgtacttgtcaatgt

SEQ ID NO: 369882 - DNA, 19 bp, Homo sapiens
  siRNA target sequence for FLJ11004 (NM_018296.2,1256-1274).
ctgtacttgtcaatgtaga

SEQ ID NO: 369883 - DNA, 19 bp, Homo sapiens
  siRNA target sequence for FLJ11004 (NM_018296.2,1264-1282).
gtcaatgtagagcaacaat

SEQ ID NO: 369884 - DNA, 19 bp, Homo sapiens
  siRNA target sequence for FLJ11004 (NM_018296.2,1266-1284).
caatgtagagcaacaatta

SEQ ID NO: 369885 - DNA, 19 bp, Homo sapiens
  siRNA target sequence for FLJ11004 (NM_018296.2,1270-1288).
gtagagcaacaattatcta

SEQ ID NO: 369886 - DNA, 19 bp, Homo sapiens
  siRNA target sequence for FLJ11004 (NM_018296.2,1290-1308).
cagcctggatgatttaaca

SEQ ID NO: 369887 - DNA, 19 bp, Homo sapiens
  siRNA target sequence for FLJ11004 (NM_018296.2,1467-1485).
ccttgccaacctgaatcta

SEQ ID NO: 369888 - DNA, 19 bp, Homo sapiens
  siRNA target sequence for FLJ11004 (NM_018296.2,1468-1486).
cttgccaacctgaatctaa

SEQ ID NO: 369889 - DNA, 19 bp, Homo sapiens
  siRNA target sequence for FLJ11004 (NM_018296.2,1526-1544).
ctagtgacctgggtagttt

SEQ ID NO: 369890 - DNA, 19 bp, Homo sapiens
  siRNA target sequence for FLJ11004 (NM_018296.2,1685-1703).
gtcctgcccgagatttgct

SEQ ID NO: 369891 - DNA, 19 bp, Homo sapiens
  siRNA target sequence for FLJ11004 (NM_018296.2,1808-1826).
cgcagctggtccctaatga

SEQ ID NO: 369892 - DNA, 19 bp, Homo sapiens
  siRNA target sequence for FLJ11004 (NM_018296.2,1810-1828).
cagctggtccctaatgaca

SEQ ID NO: 369893 - DNA, 19 bp, Homo sapiens
  siRNA target sequence for FLJ11004 (NM_018296.2,1910-1928).
gtgctgccatctcaattgt

SEQ ID NO: 369894 - DNA, 19 bp, Homo sapiens
  siRNA target sequence for FLJ11004 (NM_018296.2,1912-1930).
gctgccatctcaattgtga

SEQ ID NO: 369895 - DNA, 19 bp, Homo sapiens
  siRNA target sequence for FLJ11004 (NM_018296.2,1933-1951).
gggcaacagtcacatactt

SEQ ID NO: 369896 - DNA, 19 bp, Homo sapiens
  siRNA target sequence for FLJ11004 (NM_018296.2,1954-1972).
gatgatcttctgcacaaaa

SEQ ID NO: 369897 - DNA, 19 bp, Homo sapiens
  siRNA target sequence for FLJ11004 (NM_018296.2,2044-2062).
gttgccattctccatgaaa

SEQ ID NO: 369898 - DNA, 19 bp, Homo sapiens
  siRNA target sequence for FLJ11004 (NM_018296.2,2048-2066).
ccattctccatgaaagtca

SEQ ID NO: 369899 - DNA, 19 bp, Homo sapiens
  siRNA target sequence for FLJ11004 (NM_018296.2,2069-2087).
gatccctggtggtaactaa

SEQ ID NO: 369900 - DNA, 19 bp, Homo sapiens
  siRNA target sequence for FLJ11004 (NM_018296.2,2074-2092).
ctggtggtaactaatgagt

SEQ ID NO: 369901 - DNA, 19 bp, Homo sapiens
  siRNA target sequence for FLJ11004 (NM_018296.2,2076-2094).
ggtggtaactaatgagtat

SEQ ID NO: 369902 - DNA, 19 bp, Homo sapiens
  siRNA target sequence for FLJ11004 (NM_018296.2,2109-2127).
gaataaggagccaaaaggt

SEQ ID NO: 369903 - DNA, 19 bp, Homo sapiens
  siRNA target sequence for FLJ11004 (NM_018296.2,2153-2171).
ctgagaagggtcatcatct

SEQ ID NO: 369904 - DNA, 19 bp, Homo sapiens
  siRNA target sequence for FLJ11004 (NM_018296.2,2191-2209).
gggaaaagcacgttgtctt

SEQ ID NO: 369905 - DNA, 19 bp, Homo sapiens
  siRNA target sequence for FLJ11004 (NM_018296.2,2230-2248).
gagactggtcagtatctaa

SEQ ID NO: 369906 - DNA, 19 bp, Homo sapiens
  siRNA target sequence for FLJ11004 (NM_018296.2,2232-2250).
gactggtcagtatctaata

SEQ ID NO: 369907 - DNA, 19 bp, Homo sapiens
  siRNA target sequence for FLJ11004 (NM_018296.2,2236-2254).
ggtcagtatctaatacaga

SEQ ID NO: 369908 - DNA, 19 bp, Homo sapiens
  siRNA target sequence for NGLY1 (NM_018297.2,215-233).
cacagccttttctactaga

SEQ ID NO: 369909 - DNA, 19 bp, Homo sapiens
  siRNA target sequence for NGLY1 (NM_018297.2,289-307).
gagaaacacatctcatctt

SEQ ID NO: 369910 - DNA, 19 bp, Homo sapiens
  siRNA target sequence for NGLY1 (NM_018297.2,329-347).
gcagctgcaaaaaattcgt

SEQ ID NO: 369911 - DNA, 19 bp, Homo sapiens
  siRNA target sequence for NGLY1 (NM_018297.2,581-599).
gcatgtgctggtctatgaa

SEQ ID NO: 369912 - DNA, 19 bp, Homo sapiens
  siRNA target sequence for NGLY1 (NM_018297.2,631-649).
gtattccggtccaagaact

SEQ ID NO: 369913 - DNA, 19 bp, Homo sapiens
  siRNA target sequence for NGLY1 (NM_018297.2,636-654).
ccggtccaagaactaaaaa

SEQ ID NO: 369914 - DNA, 19 bp, Homo sapiens
  siRNA target sequence for NGLY1 (NM_018297.2,676-694).
cgagagctagaaaattgga

SEQ ID NO: 369915 - DNA, 19 bp, Homo sapiens
  siRNA target sequence for NGLY1 (NM_018297.2,735-753).
gagcttttgcactggttta

SEQ ID NO: 369916 - DNA, 19 bp, Homo sapiens
  siRNA target sequence for NGLY1 (NM_018297.2,768-786).
cactgggtgaataacgttt

SEQ ID NO: 369917 - DNA, 19 bp, Homo sapiens
  siRNA target sequence for NGLY1 (NM_018297.2,782-800).
cgttttgtgcagcaaatgt

SEQ ID NO: 369918 - DNA, 19 bp, Homo sapiens
  siRNA target sequence for NGLY1 (NM_018297.2,809-827).
gactaggtctagagataga

SEQ ID NO: 369919 - DNA, 19 bp, Homo sapiens
  siRNA target sequence for NGLY1 (NM_018297.2,814-832).
ggtctagagatagatcatt

SEQ ID NO: 369920 - DNA, 19 bp, Homo sapiens
  siRNA target sequence for NGLY1 (NM_018297.2,815-833).
gtctagagatagatcatta

SEQ ID NO: 369921 - DNA, 19 bp, Homo sapiens
  siRNA target sequence for NGLY1 (NM_018297.2,898-916).
gccagttcagcaatcgatt

SEQ ID NO: 369922 - DNA, 19 bp, Homo sapiens
  siRNA target sequence for NGLY1 (NM_018297.2,912-930).
cgattcccaagatataata

SEQ ID NO: 369923 - DNA, 19 bp, Homo sapiens
  siRNA target sequence for NGLY1 (NM_018297.2,969-987).
ggcgagtgggccaattgtt

SEQ ID NO: 369924 - DNA, 19 bp, Homo sapiens
  siRNA target sequence for NGLY1 (NM_018297.2,970-988).
gcgagtgggccaattgttt

SEQ ID NO: 369925 - DNA, 19 bp, Homo sapiens
  siRNA target sequence for NGLY1 (NM_018297.2,971-989).
cgagtgggccaattgtttt

SEQ ID NO: 369926 - DNA, 19 bp, Homo sapiens
  siRNA target sequence for NGLY1 (NM_018297.2,972-990).
gagtgggccaattgtttta

SEQ ID NO: 369927 - DNA, 19 bp, Homo sapiens
  siRNA target sequence for NGLY1 (NM_018297.2,974-992).
gtgggccaattgttttaca

SEQ ID NO: 369928 - DNA, 19 bp, Homo sapiens
  siRNA target sequence for NGLY1 (NM_018297.2,976-994).
gggccaattgttttacact

SEQ ID NO: 369929 - DNA, 19 bp, Homo sapiens
  siRNA target sequence for NGLY1 (NM_018297.2,1013-1031).
gtttgaagctcgctatgtt

SEQ ID NO: 369930 - DNA, 19 bp, Homo sapiens
  siRNA target sequence for NGLY1 (NM_018297.2,1023-1041).
cgctatgtttgggattaca

SEQ ID NO: 369931 - DNA, 19 bp, Homo sapiens
  siRNA target sequence for NGLY1 (NM_018297.2,1025-1043).
ctatgtttgggattacaca

SEQ ID NO: 369932 - DNA, 19 bp, Homo sapiens
  siRNA target sequence for NGLY1 (NM_018297.2,1050-1068).
gtctggacagaagtctatt

SEQ ID NO: 369933 - DNA, 19 bp, Homo sapiens
  siRNA target sequence for NGLY1 (NM_018297.2,1052-1070).
ctggacagaagtctattct

SEQ ID NO: 369934 - DNA, 19 bp, Homo sapiens
  siRNA target sequence for NGLY1 (NM_018297.2,1117-1135).
gtgacaagccactccttta

SEQ ID NO: 369935 - DNA, 19 bp, Homo sapiens
  siRNA target sequence for NGLY1 (NM_018297.2,1121-1139).
caagccactcctttatgaa

SEQ ID NO: 369936 - DNA, 19 bp, Homo sapiens
  siRNA target sequence for NGLY1 (NM_018297.2,1128-1146).
ctcctttatgaaataggat

SEQ ID NO: 369937 - DNA, 19 bp, Homo sapiens
  siRNA target sequence for NGLY1 (NM_018297.2,1147-1165).
ggggcaagaagctttccta

SEQ ID NO: 369938 - DNA, 19 bp, Homo sapiens
  siRNA target sequence for NGLY1 (NM_018297.2,1154-1172).
gaagctttcctatgtcata

SEQ ID NO: 369939 - DNA, 19 bp, Homo sapiens
  siRNA target sequence for NGLY1 (NM_018297.2,1180-1198).
caaaagatgaggtagttga

SEQ ID NO: 369940 - DNA, 19 bp, Homo sapiens
  siRNA target sequence for NGLY1 (NM_018297.2,1197-1215).
gatgtcacttggcgatatt

SEQ ID NO: 369941 - DNA, 19 bp, Homo sapiens
  siRNA target sequence for NGLY1 (NM_018297.2,1208-1226).
gcgatattcctgcaaacat

SEQ ID NO: 369942 - DNA, 19 bp, Homo sapiens
  siRNA target sequence for NGLY1 (NM_018297.2,1232-1250).
ggtgattgccagaagaact

SEQ ID NO: 369943 - DNA, 19 bp, Homo sapiens
  siRNA target sequence for NGLY1 (NM_018297.2,1264-1282).
cattacttcgagacactat

SEQ ID NO: 369944 - DNA, 19 bp, Homo sapiens
  siRNA target sequence for NGLY1 (NM_018297.2,1356-1374).
gtggagcttgttgaattta

SEQ ID NO: 369945 - DNA, 19 bp, Homo sapiens
  siRNA target sequence for NGLY1 (NM_018297.2,1438-1456).
gagtagcccgaggtgaaat

SEQ ID NO: 369946 - DNA, 19 bp, Homo sapiens
  siRNA target sequence for NGLY1 (NM_018297.2,1517-1535).
gctccacctttgttacaat

SEQ ID NO: 369947 - DNA, 19 bp, Homo sapiens
  siRNA target sequence for NGLY1 (NM_018297.2,1518-1536).
ctccacctttgttacaata

SEQ ID NO: 369948 - DNA, 19 bp, Homo sapiens
  siRNA target sequence for NGLY1 (NM_018297.2,1528-1546).
gttacaatattgtgaaaga

SEQ ID NO: 369949 - DNA, 19 bp, Homo sapiens
  siRNA target sequence for NGLY1 (NM_018297.2,1548-1566).
cgttatgttcgagtttcaa

SEQ ID NO: 369950 - DNA, 19 bp, Homo sapiens
  siRNA target sequence for NGLY1 (NM_018297.2,1549-1567).
gttatgttcgagtttcaaa

SEQ ID NO: 369951 - DNA, 19 bp, Homo sapiens
  siRNA target sequence for NGLY1 (NM_018297.2,1554-1572).
gttcgagtttcaaataaca

SEQ ID NO: 369952 - DNA, 19 bp, Homo sapiens
  siRNA target sequence for NGLY1 (NM_018297.2,1664-1682).
ccgaaaggaaggatcatct

SEQ ID NO: 369953 - DNA, 19 bp, Homo sapiens
  siRNA target sequence for NGLY1 (NM_018297.2,1665-1683).
cgaaaggaaggatcatctt

SEQ ID NO: 369954 - DNA, 19 bp, Homo sapiens
  siRNA target sequence for NGLY1 (NM_018297.2,1670-1688).
ggaaggatcatcttttgct

SEQ ID NO: 369955 - DNA, 19 bp, Homo sapiens
  siRNA target sequence for NGLY1 (NM_018297.2,1674-1692).
ggatcatcttttgcttata

SEQ ID NO: 369956 - DNA, 19 bp, Homo sapiens
  siRNA target sequence for NGLY1 (NM_018297.2,1714-1732).
ggtcagttggcctaaaagt

SEQ ID NO: 369957 - DNA, 19 bp, Homo sapiens
  siRNA target sequence for NGLY1 (NM_018297.2,1715-1733).
gtcagttggcctaaaagta

SEQ ID NO: 369958 - DNA, 19 bp, Homo sapiens
  siRNA target sequence for NGLY1 (NM_018297.2,1717-1735).
cagttggcctaaaagtaga

SEQ ID NO: 369959 - DNA, 19 bp, Homo sapiens
  siRNA target sequence for NGLY1 (NM_018297.2,1719-1737).
gttggcctaaaagtagata

SEQ ID NO: 369960 - DNA, 19 bp, Homo sapiens
  siRNA target sequence for NGLY1 (NM_018297.2,1723-1741).
gcctaaaagtagatagcat

SEQ ID NO: 369961 - DNA, 19 bp, Homo sapiens
  siRNA target sequence for NGLY1 (NM_018297.2,1724-1742).
cctaaaagtagatagcatt

SEQ ID NO: 369962 - DNA, 19 bp, Homo sapiens
  siRNA target sequence for NGLY1 (NM_018297.2,1734-1752).
gatagcatttctattagaa

SEQ ID NO: 369963 - DNA, 19 bp, Homo sapiens
  siRNA target sequence for NGLY1 (NM_018297.2,1750-1768).
gaacaagtagtcaaacttt

SEQ ID NO: 369964 - DNA, 19 bp, Homo sapiens
  siRNA target sequence for NGLY1 (NM_018297.2,1790-1808).
gaaattgcgatctgataca

SEQ ID NO: 369965 - DNA, 19 bp, Homo sapiens
  siRNA target sequence for NGLY1 (NM_018297.2,1818-1836).
gaactgacaggcgataaca

SEQ ID NO: 369966 - DNA, 19 bp, Homo sapiens
  siRNA target sequence for NGLY1 (NM_018297.2,1844-1862).
ctcctatgctgatttttct

SEQ ID NO: 369967 - DNA, 19 bp, Homo sapiens
  siRNA target sequence for NGLY1 (NM_018297.2,1934-1952).
gctgtttagacaaagctta

SEQ ID NO: 369968 - DNA, 19 bp, Homo sapiens
  siRNA target sequence for NGLY1 (NM_018297.2,1965-1983).
gaaaattgtttggagataa

SEQ ID NO: 369969 - DNA, 19 bp, Homo sapiens
  siRNA target sequence for FLJ11017 (NM_018302.1,184-202).
gtgcaggtgctgtaaaata

SEQ ID NO: 369970 - DNA, 19 bp, Homo sapiens
  siRNA target sequence for FLJ11017 (NM_018302.1,186-204).
gcaggtgctgtaaaataat

SEQ ID NO: 369971 - DNA, 19 bp, Homo sapiens
  siRNA target sequence for FLJ11017 (NM_018302.1,237-255).
cctctcctggctatgtcaa

SEQ ID NO: 369972 - DNA, 19 bp, Homo sapiens
  siRNA target sequence for FLJ11017 (NM_018302.1,240-258).
ctcctggctatgtcaatga

SEQ ID NO: 369973 - DNA, 19 bp, Homo sapiens
  siRNA target sequence for FLJ11017 (NM_018302.1,243-261).
ctggctatgtcaatgaagt

SEQ ID NO: 369974 - DNA, 19 bp, Homo sapiens
  siRNA target sequence for FLJ11017 (NM_018302.1,265-283).
cagctgcaagctagatgaa

SEQ ID NO: 369975 - DNA, 19 bp, Homo sapiens
  siRNA target sequence for FLJ11017 (NM_018302.1,544-562).
ctgggccagtactgcaaat

SEQ ID NO: 369976 - DNA, 19 bp, Homo sapiens
  siRNA target sequence for FLJ11017 (NM_018302.1,547-565).
ggccagtactgcaaatact

SEQ ID NO: 369977 - DNA, 19 bp, Homo sapiens
  siRNA target sequence for FLJ11017 (NM_018302.1,549-567).
ccagtactgcaaatactgt

SEQ ID NO: 369978 - DNA, 19 bp, Homo sapiens
  siRNA target sequence for FLJ11017 (NM_018302.1,762-780).
ctggagacaacgttgatca

SEQ ID NO: 369979 - DNA, 19 bp, Homo sapiens
  siRNA target sequence for FLJ11017 (NM_018302.1,765-783).
gagacaacgttgatcataa

SEQ ID NO: 369980 - DNA, 19 bp, Homo sapiens
  siRNA target sequence for FLJ11017 (NM_018302.1,850-868).
gggggagcatggtttgaat

SEQ ID NO: 369981 - DNA, 19 bp, Homo sapiens
  siRNA target sequence for FLJ11017 (NM_018302.1,851-869).
ggggagcatggtttgaata

SEQ ID NO: 369982 - DNA, 19 bp, Homo sapiens
  siRNA target sequence for FLJ11017 (NM_018302.1,914-932).
gtggaaacagaagttctaa

SEQ ID NO: 369983 - DNA, 19 bp, Homo sapiens
  siRNA target sequence for FLJ11017 (NM_018302.1,933-951).
gcatctgctttaatgagaa

SEQ ID NO: 369984 - DNA, 19 bp, Homo sapiens
  siRNA target sequence for FLJ11017 (NM_018302.1,1063-1081).
ggaggcccttgcagcttta

SEQ ID NO: 369985 - DNA, 19 bp, Homo sapiens
  siRNA target sequence for FLJ11017 (NM_018302.1,1088-1106).
gctactgcaggagaagatt

SEQ ID NO: 369986 - DNA, 19 bp, Homo sapiens
  siRNA target sequence for FLJ11017 (NM_018302.1,1089-1107).
ctactgcaggagaagattt

SEQ ID NO: 369987 - DNA, 19 bp, Homo sapiens
  siRNA target sequence for FLJ11029 (NM_018304.1,81-99).
caacgaagacgaaagctaa

SEQ ID NO: 369988 - DNA, 19 bp, Homo sapiens
  siRNA target sequence for FLJ11029 (NM_018304.1,103-121).
ccaaagccgaaagattatt

SEQ ID NO: 369989 - DNA, 19 bp, Homo sapiens
  siRNA target sequence for FLJ11029 (NM_018304.1,108-126).
gccgaaagattattcaaaa

SEQ ID NO: 369990 - DNA, 19 bp, Homo sapiens
  siRNA target sequence for FLJ11029 (NM_018304.1,186-204).
ccagaaagagtcggtattt

SEQ ID NO: 369991 - DNA, 19 bp, Homo sapiens
  siRNA target sequence for FLJ11029 (NM_018304.1,197-215).
cggtatttcttcaatagat

SEQ ID NO: 369992 - DNA, 19 bp, Homo sapiens
  siRNA target sequence for FLJ11029 (NM_018304.1,205-223).
cttcaatagatatatctca

SEQ ID NO: 369993 - DNA, 19 bp, Homo sapiens
  siRNA target sequence for FLJ11029 (NM_018304.1,265-283).
ctaacatcagagatgcaat

SEQ ID NO: 369994 - DNA, 19 bp, Homo sapiens
  siRNA target sequence for FLJ11029 (NM_018304.1,269-287).
catcagagatgcaataaaa

SEQ ID NO: 369995 - DNA, 19 bp, Homo sapiens
  siRNA target sequence for FLJ11029 (NM_018304.1,288-306).
ctttggacaaatagagtat

SEQ ID NO: 369996 - DNA, 19 bp, Homo sapiens
  siRNA target sequence for FLJ11029 (NM_018304.1,389-407).
ccaccgagaactttacagt

SEQ ID NO: 369997 - DNA, 19 bp, Homo sapiens
  siRNA target sequence for FLJ11029 (NM_018304.1,393-411).
cgagaactttacagtgtaa

SEQ ID NO: 369998 - DNA, 19 bp, Homo sapiens
  siRNA target sequence for FLJ11029 (NM_018304.1,511-529).
gtcacatgagtggtaaact

SEQ ID NO: 369999 - DNA, 19 bp, Homo sapiens
  siRNA target sequence for FLJ11029 (NM_018304.1,513-531).
cacatgagtggtaaactta

SEQ ID NO: 370000 - DNA, 19 bp, Homo sapiens
  siRNA target sequence for FLJ11029 (NM_018304.1,515-533).
catgagtggtaaacttaca

SEQ ID NO: 370001 - DNA, 19 bp, Homo sapiens
  siRNA target sequence for FLJ11029 (NM_018304.1,518-536).
gagtggtaaacttacaaat

SEQ ID NO: 370002 - DNA, 19 bp, Homo sapiens
  siRNA target sequence for FLJ11029 (NM_018304.1,520-538).
gtggtaaacttacaaatgt

SEQ ID NO: 370003 - DNA, 19 bp, Homo sapiens
  siRNA target sequence for FLJ11029 (NM_018304.1,602-620).
gccagccagccattttcct

SEQ ID NO: 370004 - DNA, 19 bp, Homo sapiens
  siRNA target sequence for FLJ11029 (NM_018304.1,705-723).
cttcaggctggaccattaa

SEQ ID NO: 370005 - DNA, 19 bp, Homo sapiens
  siRNA target sequence for FLJ11029 (NM_018304.1,729-747).
gatggacccatgcagataa

SEQ ID NO: 370006 - DNA, 19 bp, Homo sapiens
  siRNA target sequence for FLJ11029 (NM_018304.1,733-751).
gacccatgcagataacagt

SEQ ID NO: 370007 - DNA, 19 bp, Homo sapiens
  siRNA target sequence for FLJ11029 (NM_018304.1,828-846).
gcacggaatccactagtta

SEQ ID NO: 370008 - DNA, 19 bp, Homo sapiens
  siRNA target sequence for FLJ11029 (NM_018304.1,893-911).
gttatcgactcgagttaca

SEQ ID NO: 370009 - DNA, 19 bp, Homo sapiens
  siRNA target sequence for FLJ11029 (NM_018304.1,903-921).
cgagttacaaacgtcttaa

SEQ ID NO: 370010 - DNA, 19 bp, Homo sapiens
  siRNA target sequence for FLJ11029 (NM_018304.1,904-922).
gagttacaaacgtcttaat

SEQ ID NO: 370011 - DNA, 19 bp, Homo sapiens
  siRNA target sequence for FLJ11029 (NM_018304.1,906-924).
gttacaaacgtcttaatca

SEQ ID NO: 370012 - DNA, 19 bp, Homo sapiens
  siRNA target sequence for FLJ11029 (NM_018304.1,917-935).
cttaatcactcctggaaaa

SEQ ID NO: 370013 - DNA, 19 bp, Homo sapiens
  siRNA target sequence for FLJ11029 (NM_018304.1,991-1009).
gtggaacccctcttaccaa

SEQ ID NO: 370014 - DNA, 19 bp, Homo sapiens
  siRNA target sequence for FLJ11029 (NM_018304.1,993-1011).
ggaacccctcttaccaata

SEQ ID NO: 370015 - DNA, 19 bp, Homo sapiens
  siRNA target sequence for FLJ11029 (NM_018304.1,994-1012).
gaacccctcttaccaataa

SEQ ID NO: 370016 - DNA, 19 bp, Homo sapiens
  siRNA target sequence for FLJ11029 (NM_018304.1,997-1015).
cccctcttaccaataagga

SEQ ID NO: 370017 - DNA, 19 bp, Homo sapiens
  siRNA target sequence for FLJ11029 (NM_018304.1,1056-1074).
caggccttaaggagaaagt

SEQ ID NO: 370018 - DNA, 19 bp, Homo sapiens
  siRNA target sequence for FLJ11029 (NM_018304.1,1058-1076).
ggccttaaggagaaagttt

SEQ ID NO: 370019 - DNA, 19 bp, Homo sapiens
  siRNA target sequence for FLJ11036 (NM_018306.2,240-258).
gactcttttcccaagaaca

SEQ ID NO: 370020 - DNA, 19 bp, Homo sapiens
  siRNA target sequence for FLJ11036 (NM_018306.2,440-458).
ggggagcctgacgttttga

SEQ ID NO: 370021 - DNA, 19 bp, Homo sapiens
  siRNA target sequence for FLJ11036 (NM_018306.2,441-459).
gggagcctgacgttttgaa

SEQ ID NO: 370022 - DNA, 19 bp, Homo sapiens
  siRNA target sequence for FLJ11036 (NM_018306.2,460-478).
ggatgagcttcaactctat

SEQ ID NO: 370023 - DNA, 19 bp, Homo sapiens
  siRNA target sequence for FLJ11036 (NM_018306.2,557-575).
gtggaggcctctcagttaa

SEQ ID NO: 370024 - DNA, 19 bp, Homo sapiens
  siRNA target sequence for FLJ11036 (NM_018306.2,559-577).
ggaggcctctcagttaaga

SEQ ID NO: 370025 - DNA, 19 bp, Homo sapiens
  siRNA target sequence for FLJ11036 (NM_018306.2,571-589).
gttaagaagactgaatata

SEQ ID NO: 370026 - DNA, 19 bp, Homo sapiens
  siRNA target sequence for FLJ11036 (NM_018306.2,642-660).
ccttgctggtgtgttatca

SEQ ID NO: 370027 - DNA, 19 bp, Homo sapiens
  siRNA target sequence for FLJ11036 (NM_018306.2,647-665).
ctggtgtgttatcactatt

SEQ ID NO: 370028 - DNA, 19 bp, Homo sapiens
  siRNA target sequence for FLJ11036 (NM_018306.2,719-737).
gaaaccgttggcatctact

SEQ ID NO: 370029 - DNA, 19 bp, Homo sapiens
  siRNA target sequence for FLJ11046 (NM_018309.1,51-69).
gcgacggctgggaaaaaga

SEQ ID NO: 370030 - DNA, 19 bp, Homo sapiens
  siRNA target sequence for FLJ11046 (NM_018309.1,52-70).
cgacggctgggaaaaagat

SEQ ID NO: 370031 - DNA, 19 bp, Homo sapiens
  siRNA target sequence for FLJ11046 (NM_018309.1,90-108).
caggaggttgtgatcttga

SEQ ID NO: 370032 - DNA, 19 bp, Homo sapiens
  siRNA target sequence for FLJ11046 (NM_018309.1,101-119).
gatcttgaaacgttgagaa

SEQ ID NO: 370033 - DNA, 19 bp, Homo sapiens
  siRNA target sequence for FLJ11046 (NM_018309.1,149-167).
gatctgagggccaaagttt

SEQ ID NO: 370034 - DNA, 19 bp, Homo sapiens
  siRNA target sequence for FLJ11046 (NM_018309.1,157-175).
ggccaaagtttggaagatt

SEQ ID NO: 370035 - DNA, 19 bp, Homo sapiens
  siRNA target sequence for FLJ11046 (NM_018309.1,208-226).
ggcatcatgggatggtatt

SEQ ID NO: 370036 - DNA, 19 bp, Homo sapiens
  siRNA target sequence for FLJ11046 (NM_018309.1,210-228).
catcatgggatggtatttt

SEQ ID NO: 370037 - DNA, 19 bp, Homo sapiens
  siRNA target sequence for FLJ11046 (NM_018309.1,216-234).
gggatggtattttagactt

SEQ ID NO: 370038 - DNA, 19 bp, Homo sapiens
  siRNA target sequence for FLJ11046 (NM_018309.1,235-253).
gccagaacagaacactatt

SEQ ID NO: 370039 - DNA, 19 bp, Homo sapiens
  siRNA target sequence for FLJ11046 (NM_018309.1,306-324).
cagcagaattacttttgga

SEQ ID NO: 370040 - DNA, 19 bp, Homo sapiens
  siRNA target sequence for FLJ11046 (NM_018309.1,308-326).
gcagaattacttttggata

SEQ ID NO: 370041 - DNA, 19 bp, Homo sapiens
  siRNA target sequence for FLJ11046 (NM_018309.1,381-399).
cccttagctggatacatct

SEQ ID NO: 370042 - DNA, 19 bp, Homo sapiens
  siRNA target sequence for FLJ11046 (NM_018309.1,382-400).
ccttagctggatacatcta

SEQ ID NO: 370043 - DNA, 19 bp, Homo sapiens
  siRNA target sequence for FLJ11046 (NM_018309.1,425-443).
ctgccacgcagcgatttat

SEQ ID NO: 370044 - DNA, 19 bp, Homo sapiens
  siRNA target sequence for FLJ11046 (NM_018309.1,428-446).
ccacgcagcgatttataca

SEQ ID NO: 370045 - DNA, 19 bp, Homo sapiens
  siRNA target sequence for FLJ11046 (NM_018309.1,429-447).
cacgcagcgatttatacaa

SEQ ID NO: 370046 - DNA, 19 bp, Homo sapiens
  siRNA target sequence for FLJ11046 (NM_018309.1,431-449).
cgcagcgatttatacaact

SEQ ID NO: 370047 - DNA, 19 bp, Homo sapiens
  siRNA target sequence for FLJ11046 (NM_018309.1,450-468).
gcttttatgccataatgaa

SEQ ID NO: 370048 - DNA, 19 bp, Homo sapiens
  siRNA target sequence for FLJ11046 (NM_018309.1,451-469).
cttttatgccataatgaat

SEQ ID NO: 370049 - DNA, 19 bp, Homo sapiens
  siRNA target sequence for FLJ11046 (NM_018309.1,458-476).
gccataatgaataagtaca

SEQ ID NO: 370050 - DNA, 19 bp, Homo sapiens
  siRNA target sequence for FLJ11046 (NM_018309.1,522-540).
ggttgctcatccaatacca

SEQ ID NO: 370051 - DNA, 19 bp, Homo sapiens
  siRNA target sequence for FLJ11046 (NM_018309.1,523-541).
gttgctcatccaataccat

SEQ ID NO: 370052 - DNA, 19 bp, Homo sapiens
  siRNA target sequence for FLJ11046 (NM_018309.1,555-573).
gttcttatcttgatacaaa

SEQ ID NO: 370053 - DNA, 19 bp, Homo sapiens
  siRNA target sequence for FLJ11046 (NM_018309.1,607-625).
gcttggaagtctttttgca

SEQ ID NO: 370054 - DNA, 19 bp, Homo sapiens
  siRNA target sequence for FLJ11046 (NM_018309.1,641-659).
gaagtcactcaggcaatat

SEQ ID NO: 370055 - DNA, 19 bp, Homo sapiens
  siRNA target sequence for FLJ11046 (NM_018309.1,652-670).
ggcaatatgggatggatat

SEQ ID NO: 370056 - DNA, 19 bp, Homo sapiens
  siRNA target sequence for FLJ11046 (NM_018309.1,677-695).
caagcagatccatttttta

SEQ ID NO: 370057 - DNA, 19 bp, Homo sapiens
  siRNA target sequence for FLJ11046 (NM_018309.1,709-727).
gttaattatccttgttaat

SEQ ID NO: 370058 - DNA, 19 bp, Homo sapiens
  siRNA target sequence for FLJ11046 (NM_018309.1,758-776).
gacagcaaagaagaagtta

SEQ ID NO: 370059 - DNA, 19 bp, Homo sapiens
  siRNA target sequence for FLJ11046 (NM_018309.1,795-813).
ctccatccagtctgaatat

SEQ ID NO: 370060 - DNA, 19 bp, Homo sapiens
  siRNA target sequence for FLJ11046 (NM_018309.1,802-820).
cagtctgaatatagaagat

SEQ ID NO: 370061 - DNA, 19 bp, Homo sapiens
  siRNA target sequence for FLJ11046 (NM_018309.1,835-853).
ctctctggctcagtattat

SEQ ID NO: 370062 - DNA, 19 bp, Homo sapiens
  siRNA target sequence for FLJ11046 (NM_018309.1,839-857).
ctggctcagtattattgca

SEQ ID NO: 370063 - DNA, 19 bp, Homo sapiens
  siRNA target sequence for FLJ11046 (NM_018309.1,858-876).
gcaaaacaccggcttcttt

SEQ ID NO: 370064 - DNA, 19 bp, Homo sapiens
  siRNA target sequence for FLJ11046 (NM_018309.1,864-882).
caccggcttcttttaggaa

SEQ ID NO: 370065 - DNA, 19 bp, Homo sapiens
  siRNA target sequence for FLJ11046 (NM_018309.1,869-887).
gcttcttttaggaaggata

SEQ ID NO: 370066 - DNA, 19 bp, Homo sapiens
  siRNA target sequence for FLJ11046 (NM_018309.1,873-891).
cttttaggaaggataatca

SEQ ID NO: 370067 - DNA, 19 bp, Homo sapiens
  siRNA target sequence for FLJ11046 (NM_018309.1,883-901).
ggataatcaccatctcttt

SEQ ID NO: 370068 - DNA, 19 bp, Homo sapiens
  siRNA target sequence for FLJ11046 (NM_018309.1,1006-1024).
ggaaggagtccggttcttt

SEQ ID NO: 370069 - DNA, 19 bp, Homo sapiens
  siRNA target sequence for FLJ11046 (NM_018309.1,1035-1053).
gccgtcctgcagaacaata

SEQ ID NO: 370070 - DNA, 19 bp, Homo sapiens
  siRNA target sequence for FLJ11046 (NM_018309.1,1036-1054).
ccgtcctgcagaacaatat

SEQ ID NO: 370071 - DNA, 19 bp, Homo sapiens
  siRNA target sequence for FLJ11046 (NM_018309.1,1125-1143).
cacagtcagtaaaatcctt

SEQ ID NO: 370072 - DNA, 19 bp, Homo sapiens
  siRNA target sequence for FLJ11046 (NM_018309.1,1190-1208).
ggggagcacctctgtttta

SEQ ID NO: 370073 - DNA, 19 bp, Homo sapiens
  siRNA target sequence for FLJ11046 (NM_018309.1,1191-1209).
gggagcacctctgttttat

SEQ ID NO: 370074 - DNA, 19 bp, Homo sapiens
  siRNA target sequence for FLJ11046 (NM_018309.1,1229-1247).
gaagacatgtatatgaaca

SEQ ID NO: 370075 - DNA, 19 bp, Homo sapiens
  siRNA target sequence for FLJ11046 (NM_018309.1,1321-1339).
gcagcacctggcagacatt

SEQ ID NO: 370076 - DNA, 19 bp, Homo sapiens
  siRNA target sequence for FLJ11046 (NM_018309.1,1391-1409).
ggctcaaggagcagtatca

SEQ ID NO: 370077 - DNA, 19 bp, Homo sapiens
  siRNA target sequence for FLJ11046 (NM_018309.1,1393-1411).
ctcaaggagcagtatcaat

SEQ ID NO: 370078 - DNA, 19 bp, Homo sapiens
  siRNA target sequence for FLJ11046 (NM_018309.1,1440-1458).
caagtgatagaggaatgaa

SEQ ID NO: 370079 - DNA, 19 bp, Homo sapiens
  siRNA target sequence for FLJ11046 (NM_018309.1,1489-1507).
gaagacaaaatccgttaat

SEQ ID NO: 370080 - DNA, 19 bp, Homo sapiens
  siRNA target sequence for FLJ11046 (NM_018309.1,1525-1543).
cagttttatagagaataca

SEQ ID NO: 370081 - DNA, 19 bp, Homo sapiens
  siRNA target sequence for FLJ11046 (NM_018309.1,1665-1683).
cttcaatgtcagatgatga

SEQ ID NO: 370082 - DNA, 19 bp, Homo sapiens
  siRNA target sequence for FLJ11046 (NM_018309.1,1792-1810).
gttggttactgcaacacat

SEQ ID NO: 370083 - DNA, 19 bp, Homo sapiens
  siRNA target sequence for FLJ11046 (NM_018309.1,1816-1834).
ctgtttaagggagattgtt

SEQ ID NO: 370084 - DNA, 19 bp, Homo sapiens
  siRNA target sequence for FLJ11046 (NM_018309.1,1838-1856).
cggaaaggattggcttata

SEQ ID NO: 370085 - DNA, 19 bp, Homo sapiens
  siRNA target sequence for FLJ11046 (NM_018309.1,1839-1857).
ggaaaggattggcttatat

SEQ ID NO: 370086 - DNA, 19 bp, Homo sapiens
  siRNA target sequence for FLJ11046 (NM_018309.1,1840-1858).
gaaaggattggcttatata

SEQ ID NO: 370087 - DNA, 19 bp, Homo sapiens
  siRNA target sequence for FLJ11046 (NM_018309.1,1871-1889).
gcgctgaattctgtagtta

SEQ ID NO: 370088 - DNA, 19 bp, Homo sapiens
  siRNA target sequence for FLJ11046 (NM_018309.1,1872-1890).
cgctgaattctgtagttaa

SEQ ID NO: 370089 - DNA, 19 bp, Homo sapiens
  siRNA target sequence for FLJ11046 (NM_018309.1,1944-1962).
gcagtgcttcaggaataga

SEQ ID NO: 370090 - DNA, 19 bp, Homo sapiens
  siRNA target sequence for FLJ11046 (NM_018309.1,1961-1979).
gaaatcttggcaatcgaaa

SEQ ID NO: 370091 - DNA, 19 bp, Homo sapiens
  siRNA target sequence for FLJ11046 (NM_018309.1,1966-1984).
cttggcaatcgaaaggtat

SEQ ID NO: 370092 - DNA, 19 bp, Homo sapiens
  siRNA target sequence for FLJ11046 (NM_018309.1,1971-1989).
caatcgaaaggtatttgat

SEQ ID NO: 370093 - DNA, 19 bp, Homo sapiens
  siRNA target sequence for FLJ11046 (NM_018309.1,1981-1999).
gtatttgattccaaatgca

SEQ ID NO: 370094 - DNA, 19 bp, Homo sapiens
  siRNA target sequence for FLJ11046 (NM_018309.1,2024-2042).
cagcagatcatgaaagttt

SEQ ID NO: 370095 - DNA, 19 bp, Homo sapiens
  siRNA target sequence for C11orf23 (NM_018312.2,400-418).
ccgcaaacttatagagttt

SEQ ID NO: 370096 - DNA, 19 bp, Homo sapiens
  siRNA target sequence for C11orf23 (NM_018312.2,402-420).
gcaaacttatagagtttct

SEQ ID NO: 370097 - DNA, 19 bp, Homo sapiens
  siRNA target sequence for C11orf23 (NM_018312.2,502-520).
caagtatccaaatatatct

SEQ ID NO: 370098 - DNA, 19 bp, Homo sapiens
  siRNA target sequence for C11orf23 (NM_018312.2,505-523).
gtatccaaatatatcttgt

SEQ ID NO: 370099 - DNA, 19 bp, Homo sapiens
  siRNA target sequence for C11orf23 (NM_018312.2,546-564).
cccagatgaatgatagact

SEQ ID NO: 370100 - DNA, 19 bp, Homo sapiens
  siRNA target sequence for C11orf23 (NM_018312.2,584-602).
ctaatgaaattatatagct

SEQ ID NO: 370101 - DNA, 19 bp, Homo sapiens
  siRNA target sequence for C11orf23 (NM_018312.2,619-637).
ccctttgaatccactactt

SEQ ID NO: 370102 - DNA, 19 bp, Homo sapiens
  siRNA target sequence for C11orf23 (NM_018312.2,629-647).
ccactacttgccagtttct

SEQ ID NO: 370103 - DNA, 19 bp, Homo sapiens
  siRNA target sequence for C11orf23 (NM_018312.2,630-648).
cactacttgccagtttctt

SEQ ID NO: 370104 - DNA, 19 bp, Homo sapiens
  siRNA target sequence for C11orf23 (NM_018312.2,651-669).
gcaaggtgctaagtattct

SEQ ID NO: 370105 - DNA, 19 bp, Homo sapiens
  siRNA target sequence for C11orf23 (NM_018312.2,652-670).
caaggtgctaagtattctt

SEQ ID NO: 370106 - DNA, 19 bp, Homo sapiens
  siRNA target sequence for C11orf23 (NM_018312.2,656-674).
gtgctaagtattcttatca

SEQ ID NO: 370107 - DNA, 19 bp, Homo sapiens
  siRNA target sequence for C11orf23 (NM_018312.2,675-693).
gcagaaaaccagaacagat

SEQ ID NO: 370108 - DNA, 19 bp, Homo sapiens
  siRNA target sequence for C11orf23 (NM_018312.2,719-737).
gattttgtagaccttatta

SEQ ID NO: 370109 - DNA, 19 bp, Homo sapiens
  siRNA target sequence for C11orf23 (NM_018312.2,781-799).
gctcctgacgtgtatcgaa

SEQ ID NO: 370110 - DNA, 19 bp, Homo sapiens
  siRNA target sequence for C11orf23 (NM_018312.2,818-836).
gatgtgctgaattggttaa

SEQ ID NO: 370111 - DNA, 19 bp, Homo sapiens
  siRNA target sequence for C11orf23 (NM_018312.2,856-874).
gaggcttgtggaaatagtt

SEQ ID NO: 370112 - DNA, 19 bp, Homo sapiens
  siRNA target sequence for C11orf23 (NM_018312.2,858-876).
ggcttgtggaaatagttca

SEQ ID NO: 370113 - DNA, 19 bp, Homo sapiens
  siRNA target sequence for C11orf23 (NM_018312.2,859-877).
gcttgtggaaatagttcat

SEQ ID NO: 370114 - DNA, 19 bp, Homo sapiens
  siRNA target sequence for C11orf23 (NM_018312.2,887-905).
gaagaagatcgacattcaa

SEQ ID NO: 370115 - DNA, 19 bp, Homo sapiens
  siRNA target sequence for C11orf23 (NM_018312.2,909-927).
catcacaatcactttgtga

SEQ ID NO: 370116 - DNA, 19 bp, Homo sapiens
  siRNA target sequence for C11orf23 (NM_018312.2,912-930).
cacaatcactttgtgaaat

SEQ ID NO: 370117 - DNA, 19 bp, Homo sapiens
  siRNA target sequence for C11orf23 (NM_018312.2,940-958).
gagcagagaccagatgtta

SEQ ID NO: 370118 - DNA, 19 bp, Homo sapiens
  siRNA target sequence for C11orf23 (NM_018312.2,942-960).
gcagagaccagatgttaca

SEQ ID NO: 370119 - DNA, 19 bp, Homo sapiens
  siRNA target sequence for C11orf23 (NM_018312.2,988-1006).
cctgcttgccactctagaa

SEQ ID NO: 370120 - DNA, 19 bp, Homo sapiens
  siRNA target sequence for C11orf23 (NM_018312.2,1024-1042).
gcagcttctatcaaatatt

SEQ ID NO: 370121 - DNA, 19 bp, Homo sapiens
  siRNA target sequence for C11orf23 (NM_018312.2,1073-1091).
gtcagtgcaatccagatat

SEQ ID NO: 370122 - DNA, 19 bp, Homo sapiens
  siRNA target sequence for C11orf23 (NM_018312.2,1077-1095).
gtgcaatccagatattgct

SEQ ID NO: 370123 - DNA, 19 bp, Homo sapiens
  siRNA target sequence for C11orf23 (NM_018312.2,1084-1102).
ccagatattgctgacttta

SEQ ID NO: 370124 - DNA, 19 bp, Homo sapiens
  siRNA target sequence for C11orf23 (NM_018312.2,1159-1177).
gagccattcagcttgttca

SEQ ID NO: 370125 - DNA, 19 bp, Homo sapiens
  siRNA target sequence for C11orf23 (NM_018312.2,1162-1180).
ccattcagcttgttcagta

SEQ ID NO: 370126 - DNA, 19 bp, Homo sapiens
  siRNA target sequence for C11orf23 (NM_018312.2,1241-1259).
gagccacccaagaacatgt

SEQ ID NO: 370127 - DNA, 19 bp, Homo sapiens
  siRNA target sequence for C11orf23 (NM_018312.2,1247-1265).
cccaagaacatgttcttca

SEQ ID NO: 370128 - DNA, 19 bp, Homo sapiens
  siRNA target sequence for C11orf23 (NM_018312.2,1252-1270).
gaacatgttcttcaagtat

SEQ ID NO: 370129 - DNA, 19 bp, Homo sapiens
  siRNA target sequence for C11orf23 (NM_018312.2,1353-1371).
ccacaattaccgatcaaga

SEQ ID NO: 370130 - DNA, 19 bp, Homo sapiens
  siRNA target sequence for C11orf23 (NM_018312.2,1370-1388).
gactccactggtgataatt

SEQ ID NO: 370131 - DNA, 19 bp, Homo sapiens
  siRNA target sequence for C11orf23 (NM_018312.2,1375-1393).
cactggtgataatttgtta

SEQ ID NO: 370132 - DNA, 19 bp, Homo sapiens
  siRNA target sequence for C11orf23 (NM_018312.2,1416-1434).
gtcaattaatagaacgaat

SEQ ID NO: 370133 - DNA, 19 bp, Homo sapiens
  siRNA target sequence for C11orf23 (NM_018312.2,1476-1494).
gaggaagacggcatggtta

SEQ ID NO: 370134 - DNA, 19 bp, Homo sapiens
  siRNA target sequence for C11orf23 (NM_018312.2,1502-1520).
cacctaacgaggatagcta

SEQ ID NO: 370135 - DNA, 19 bp, Homo sapiens
  siRNA target sequence for C11orf23 (NM_018312.2,1560-1578).
cattagtgcagcagcttat

SEQ ID NO: 370136 - DNA, 19 bp, Homo sapiens
  siRNA target sequence for C11orf23 (NM_018312.2,1651-1669).
gaggaacacggtagatcta

SEQ ID NO: 370137 - DNA, 19 bp, Homo sapiens
  siRNA target sequence for C11orf23 (NM_018312.2,1679-1697).
gattatcagatgcaacaaa

SEQ ID NO: 370138 - DNA, 19 bp, Homo sapiens
  siRNA target sequence for C11orf23 (NM_018312.2,1691-1709).
caacaaatgacgtccaatt

SEQ ID NO: 370139 - DNA, 19 bp, Homo sapiens
  siRNA target sequence for C11orf23 (NM_018312.2,1694-1712).
caaatgacgtccaatttta

SEQ ID NO: 370140 - DNA, 19 bp, Homo sapiens
  siRNA target sequence for C11orf23 (NM_018312.2,1773-1791).
cttttgatcgagtatcaga

SEQ ID NO: 370141 - DNA, 19 bp, Homo sapiens
  siRNA target sequence for C11orf23 (NM_018312.2,1781-1799).
cgagtatcagacatcaact

SEQ ID NO: 370142 - DNA, 19 bp, Homo sapiens
  siRNA target sequence for C11orf23 (NM_018312.2,1782-1800).
gagtatcagacatcaactt

SEQ ID NO: 370143 - DNA, 19 bp, Homo sapiens
  siRNA target sequence for C11orf23 (NM_018312.2,1795-1813).
caactttactctcaataca

SEQ ID NO: 370144 - DNA, 19 bp, Homo sapiens
  siRNA target sequence for C11orf23 (NM_018312.2,1798-1816).
ctttactctcaatacaaat

SEQ ID NO: 370145 - DNA, 19 bp, Homo sapiens
  siRNA target sequence for C11orf23 (NM_018312.2,1845-1863).
catgttgtaaggaaagaat

SEQ ID NO: 370146 - DNA, 19 bp, Homo sapiens
  siRNA target sequence for C11orf23 (NM_018312.2,2034-2052).
gtgccaacacggaggataa

SEQ ID NO: 370147 - DNA, 19 bp, Homo sapiens
  siRNA target sequence for C11orf23 (NM_018312.2,2095-2113).
ctttgatgtcccaatggaa

SEQ ID NO: 370148 - DNA, 19 bp, Homo sapiens
  siRNA target sequence for C11orf23 (NM_018312.2,2119-2137).
ccacggtgctccattggat

SEQ ID NO: 370149 - DNA, 19 bp, Homo sapiens
  siRNA target sequence for C11orf23 (NM_018312.2,2120-2138).
cacggtgctccattggatt

SEQ ID NO: 370150 - DNA, 19 bp, Homo sapiens
  siRNA target sequence for C11orf23 (NM_018312.2,2124-2142).
gtgctccattggattctgt

SEQ ID NO: 370151 - DNA, 19 bp, Homo sapiens
  siRNA target sequence for C11orf23 (NM_018312.2,2171-2189).
ccgatgccaactaaagaga

SEQ ID NO: 370152 - DNA, 19 bp, Homo sapiens
  siRNA target sequence for FBXW7 (NM_018315.2,105-123).
cccgagaagcggtttgata

SEQ ID NO: 370153 - DNA, 19 bp, Homo sapiens
  siRNA target sequence for FBXW7 (NM_018315.2,107-125).
cgagaagcggtttgatact

SEQ ID NO: 370154 - DNA, 19 bp, Homo sapiens
  siRNA target sequence for FBXW7 (NM_018315.2,137-155).
gcctttactgtggagtttt

SEQ ID NO: 370155 - DNA, 19 bp, Homo sapiens
  siRNA target sequence for FBXW7 (NM_018315.2,161-179).
cggttctgctccctaatct

SEQ ID NO: 370156 - DNA, 19 bp, Homo sapiens
  siRNA target sequence for FBXW7 (NM_018315.2,162-180).
ggttctgctccctaatctt

SEQ ID NO: 370157 - DNA, 19 bp, Homo sapiens
  siRNA target sequence for FBXW7 (NM_018315.2,168-186).
gctccctaatcttcctttt

SEQ ID NO: 370158 - DNA, 19 bp, Homo sapiens
  siRNA target sequence for FBXW7 (NM_018315.2,195-213).
cctgagcatgtccacatta

SEQ ID NO: 370159 - DNA, 19 bp, Homo sapiens
  siRNA target sequence for FBXW7 (NM_018315.2,198-216).
gagcatgtccacattagaa

SEQ ID NO: 370160 - DNA, 19 bp, Homo sapiens
  siRNA target sequence for FBXW7 (NM_018315.2,201-219).
catgtccacattagaatct

SEQ ID NO: 370161 - DNA, 19 bp, Homo sapiens
  siRNA target sequence for FBXW7 (NM_018315.2,228-246).
cctacctgaaaaaggttta

SEQ ID NO: 370162 - DNA, 19 bp, Homo sapiens
  siRNA target sequence for FBXW7 (NM_018315.2,311-329).
cagaaaatatgggtttcta

SEQ ID NO: 370163 - DNA, 19 bp, Homo sapiens
  siRNA target sequence for FBXW7 (NM_018315.2,321-339).
gggtttctacggcacatta

SEQ ID NO: 370164 - DNA, 19 bp, Homo sapiens
  siRNA target sequence for FBXW7 (NM_018315.2,322-340).
ggtttctacggcacattaa

SEQ ID NO: 370165 - DNA, 19 bp, Homo sapiens
  siRNA target sequence for FBXW7 (NM_018315.2,323-341).
gtttctacggcacattaaa

SEQ ID NO: 370166 - DNA, 19 bp, Homo sapiens
  siRNA target sequence for FBXW7 (NM_018315.2,385-403).
gaggtccgctctttttctt

SEQ ID NO: 370167 - DNA, 19 bp, Homo sapiens
  siRNA target sequence for FBXW7 (NM_018315.2,514-532).
caacaacgacgccgaatta

SEQ ID NO: 370168 - DNA, 19 bp, Homo sapiens
  siRNA target sequence for FBXW7 (NM_018315.2,517-535).
caacgacgccgaattacat

SEQ ID NO: 370169 - DNA, 19 bp, Homo sapiens
  siRNA target sequence for FBXW7 (NM_018315.2,616-634).
gatgaactcattgatagtt

SEQ ID NO: 370170 - DNA, 19 bp, Homo sapiens
  siRNA target sequence for FBXW7 (NM_018315.2,669-687).
gatagaaccccagtttcaa

SEQ ID NO: 370171 - DNA, 19 bp, Homo sapiens
  siRNA target sequence for FBXW7 (NM_018315.2,701-719).
cattgctccctaaagagtt

SEQ ID NO: 370172 - DNA, 19 bp, Homo sapiens
  siRNA target sequence for FBXW7 (NM_018315.2,850-868).
gaaccattgcacatcaaga

SEQ ID NO: 370173 - DNA, 19 bp, Homo sapiens
  siRNA target sequence for FBXW7 (NM_018315.2,894-912).
catacacagtccatggaaa

SEQ ID NO: 370174 - DNA, 19 bp, Homo sapiens
  siRNA target sequence for FBXW7 (NM_018315.2,931-949).
cacagaattgatactaact

SEQ ID NO: 370175 - DNA, 19 bp, Homo sapiens
  siRNA target sequence for FBXW7 (NM_018315.2,950-968).
ggaggcgaggagaactcaa

SEQ ID NO: 370176 - DNA, 19 bp, Homo sapiens
  siRNA target sequence for FBXW7 (NM_018315.2,951-969).
gaggcgaggagaactcaaa

SEQ ID NO: 370177 - DNA, 19 bp, Homo sapiens
  siRNA target sequence for FBXW7 (NM_018315.2,954-972).
gcgaggagaactcaaatct

SEQ ID NO: 370178 - DNA, 19 bp, Homo sapiens
  siRNA target sequence for FBXW7 (NM_018315.2,994-1012).
gatgatcatgtgatcacat

SEQ ID NO: 370179 - DNA, 19 bp, Homo sapiens
  siRNA target sequence for FBXW7 (NM_018315.2,1123-1141).
ggagtatggtcatcacaaa

SEQ ID NO: 370180 - DNA, 19 bp, Homo sapiens
  siRNA target sequence for FBXW7 (NM_018315.2,1124-1142).
gagtatggtcatcacaaat

SEQ ID NO: 370181 - DNA, 19 bp, Homo sapiens
  siRNA target sequence for FBXW7 (NM_018315.2,1126-1144).
gtatggtcatcacaaatga

SEQ ID NO: 370182 - DNA, 19 bp, Homo sapiens
  siRNA target sequence for FBXW7 (NM_018315.2,1155-1173).
catcattagtggatctaca

SEQ ID NO: 370183 - DNA, 19 bp, Homo sapiens
  siRNA target sequence for FBXW7 (NM_018315.2,1158-1176).
cattagtggatctacagat

SEQ ID NO: 370184 - DNA, 19 bp, Homo sapiens
  siRNA target sequence for FBXW7 (NM_018315.2,1172-1190).
cagatcggacactcaaagt

SEQ ID NO: 370185 - DNA, 19 bp, Homo sapiens
  siRNA target sequence for FBXW7 (NM_018315.2,1174-1192).
gatcggacactcaaagtgt

SEQ ID NO: 370186 - DNA, 19 bp, Homo sapiens
  siRNA target sequence for FBXW7 (NM_018315.2,1238-1256).
cttccactgtgcgttgtat

SEQ ID NO: 370187 - DNA, 19 bp, Homo sapiens
  siRNA target sequence for FBXW7 (NM_018315.2,1253-1271).
gtatgcatcttcatgaaaa

SEQ ID NO: 370188 - DNA, 19 bp, Homo sapiens
  siRNA target sequence for FBXW7 (NM_018315.2,1328-1346).
gccagtgtttacatgtttt

SEQ ID NO: 370189 - DNA, 19 bp, Homo sapiens
  siRNA target sequence for FBXW7 (NM_018315.2,1363-1381).
gcagtccgctgtgttcaat

SEQ ID NO: 370190 - DNA, 19 bp, Homo sapiens
  siRNA target sequence for FBXW7 (NM_018315.2,1364-1382).
cagtccgctgtgttcaata

SEQ ID NO: 370191 - DNA, 19 bp, Homo sapiens
  siRNA target sequence for FBXW7 (NM_018315.2,1368-1386).
ccgctgtgttcaatatgat

SEQ ID NO: 370192 - DNA, 19 bp, Homo sapiens
  siRNA target sequence for FBXW7 (NM_018315.2,1384-1402).
gatggcaggagggttgtta

SEQ ID NO: 370193 - DNA, 19 bp, Homo sapiens
  siRNA target sequence for FBXW7 (NM_018315.2,1403-1421).
gtggagcatatgattttat

SEQ ID NO: 370194 - DNA, 19 bp, Homo sapiens
  siRNA target sequence for FBXW7 (NM_018315.2,1408-1426).
gcatatgattttatggtaa

SEQ ID NO: 370195 - DNA, 19 bp, Homo sapiens
  siRNA target sequence for FBXW7 (NM_018315.2,1409-1427).
catatgattttatggtaaa

SEQ ID NO: 370196 - DNA, 19 bp, Homo sapiens
  siRNA target sequence for FBXW7 (NM_018315.2,1463-1481).
cgttgcaggggcatactaa

SEQ ID NO: 370197 - DNA, 19 bp, Homo sapiens
  siRNA target sequence for FBXW7 (NM_018315.2,1464-1482).
gttgcaggggcatactaat

SEQ ID NO: 370198 - DNA, 19 bp, Homo sapiens
  siRNA target sequence for FBXW7 (NM_018315.2,1473-1491).
gcatactaatagagtctat

SEQ ID NO: 370199 - DNA, 19 bp, Homo sapiens
  siRNA target sequence for FBXW7 (NM_018315.2,1474-1492).
catactaatagagtctatt

SEQ ID NO: 370200 - DNA, 19 bp, Homo sapiens
  siRNA target sequence for FBXW7 (NM_018315.2,1488-1506).
ctattcattacagtttgat

SEQ ID NO: 370201 - DNA, 19 bp, Homo sapiens
  siRNA target sequence for FBXW7 (NM_018315.2,1521-1539).
gagtggatctcttgataca

SEQ ID NO: 370202 - DNA, 19 bp, Homo sapiens
  siRNA target sequence for FBXW7 (NM_018315.2,1560-1578).
ggagacagggaattgcatt

SEQ ID NO: 370203 - DNA, 19 bp, Homo sapiens
  siRNA target sequence for FBXW7 (NM_018315.2,1591-1609).
gggcaccagtcgttaacaa

SEQ ID NO: 370204 - DNA, 19 bp, Homo sapiens
  siRNA target sequence for FBXW7 (NM_018315.2,1593-1611).
gcaccagtcgttaacaagt

SEQ ID NO: 370205 - DNA, 19 bp, Homo sapiens
  siRNA target sequence for FBXW7 (NM_018315.2,1602-1620).
gttaacaagtggaatggaa

SEQ ID NO: 370206 - DNA, 19 bp, Homo sapiens
  siRNA target sequence for FBXW7 (NM_018315.2,1647-1665).
gaatgcagattctacagtt

SEQ ID NO: 370207 - DNA, 19 bp, Homo sapiens
  siRNA target sequence for FBXW7 (NM_018315.2,1663-1681).
gttaaaatctgggatatca

SEQ ID NO: 370208 - DNA, 19 bp, Homo sapiens
  siRNA target sequence for FBXW7 (NM_018315.2,1730-1748).
gtgctgtgacctgtttaca

SEQ ID NO: 370209 - DNA, 19 bp, Homo sapiens
  siRNA target sequence for FBXW7 (NM_018315.2,1739-1757).
cctgtttacagttcaacaa

SEQ ID NO: 370210 - DNA, 19 bp, Homo sapiens
  siRNA target sequence for FBXW7 (NM_018315.2,1749-1767).
gttcaacaagaactttgta

SEQ ID NO: 370211 - DNA, 19 bp, Homo sapiens
  siRNA target sequence for FBXW7 (NM_018315.2,1876-1894).
cggatcagagcctcaaaca

SEQ ID NO: 370212 - DNA, 19 bp, Homo sapiens
  siRNA target sequence for FLJ11082 (NM_018317.1,221-239).
gagacctgagattaaactt

SEQ ID NO: 370213 - DNA, 19 bp, Homo sapiens
  siRNA target sequence for FLJ11082 (NM_018317.1,354-372).
gcacctcctgaacatctta

SEQ ID NO: 370214 - DNA, 19 bp, Homo sapiens
  siRNA target sequence for FLJ11082 (NM_018317.1,375-393).
gaacctttggtatacatga

SEQ ID NO: 370215 - DNA, 19 bp, Homo sapiens
  siRNA target sequence for FLJ11082 (NM_018317.1,564-582).
gtttatgcacctaaggatt

SEQ ID NO: 370216 - DNA, 19 bp, Homo sapiens
  siRNA target sequence for FLJ11082 (NM_018317.1,606-624).
cgcaacccaaattatgaaa

SEQ ID NO: 370217 - DNA, 19 bp, Homo sapiens
  siRNA target sequence for FLJ11082 (NM_018317.1,607-625).
gcaacccaaattatgaaaa

SEQ ID NO: 370218 - DNA, 19 bp, Homo sapiens
  siRNA target sequence for FLJ11082 (NM_018317.1,666-684).
caagttccactgaaagtaa

SEQ ID NO: 370219 - DNA, 19 bp, Homo sapiens
  siRNA target sequence for FLJ11082 (NM_018317.1,689-707).
catccctgaattgaaagaa

SEQ ID NO: 370220 - DNA, 19 bp, Homo sapiens
  siRNA target sequence for FLJ11082 (NM_018317.1,714-732).
gtggaacttggcttaaata

SEQ ID NO: 370221 - DNA, 19 bp, Homo sapiens
  siRNA target sequence for FLJ11082 (NM_018317.1,716-734).
ggaacttggcttaaatata

SEQ ID NO: 370222 - DNA, 19 bp, Homo sapiens
  siRNA target sequence for FLJ11082 (NM_018317.1,736-754).
gacaactgggtatagatga

SEQ ID NO: 370223 - DNA, 19 bp, Homo sapiens
  siRNA target sequence for FLJ11082 (NM_018317.1,738-756).
caactgggtatagatgatt

SEQ ID NO: 370224 - DNA, 19 bp, Homo sapiens
  siRNA target sequence for FLJ11082 (NM_018317.1,741-759).
ctgggtatagatgattcta

SEQ ID NO: 370225 - DNA, 19 bp, Homo sapiens
  siRNA target sequence for FLJ11082 (NM_018317.1,743-761).
gggtatagatgattctaca

SEQ ID NO: 370226 - DNA, 19 bp, Homo sapiens
  siRNA target sequence for FLJ11082 (NM_018317.1,799-817).
gtattgggcaaaaagttct

SEQ ID NO: 370227 - DNA, 19 bp, Homo sapiens
  siRNA target sequence for FLJ11082 (NM_018317.1,813-831).
gttctagcagaacaagata

SEQ ID NO: 370228 - DNA, 19 bp, Homo sapiens
  siRNA target sequence for FLJ11082 (NM_018317.1,835-853).
ctgctgctcaacagtacat

SEQ ID NO: 370229 - DNA, 19 bp, Homo sapiens
  siRNA target sequence for FLJ11082 (NM_018317.1,837-855).
gctgctcaacagtacatca

SEQ ID NO: 370230 - DNA, 19 bp, Homo sapiens
  siRNA target sequence for FLJ11082 (NM_018317.1,871-889).
cggcactgagagctgaatt

SEQ ID NO: 370231 - DNA, 19 bp, Homo sapiens
  siRNA target sequence for FLJ11082 (NM_018317.1,873-891).
gcactgagagctgaattgt

SEQ ID NO: 370232 - DNA, 19 bp, Homo sapiens
  siRNA target sequence for FLJ11082 (NM_018317.1,885-903).
gaattgtgggctctcattt

SEQ ID NO: 370233 - DNA, 19 bp, Homo sapiens
  siRNA target sequence for FLJ11082 (NM_018317.1,892-910).
gggctctcattttgaatat

SEQ ID NO: 370234 - DNA, 19 bp, Homo sapiens
  siRNA target sequence for FLJ11082 (NM_018317.1,893-911).
ggctctcattttgaatatt

SEQ ID NO: 370235 - DNA, 19 bp, Homo sapiens
  siRNA target sequence for FLJ11082 (NM_018317.1,921-939).
cctgaggatgtcttgtatt

SEQ ID NO: 370236 - DNA, 19 bp, Homo sapiens
  siRNA target sequence for FLJ11082 (NM_018317.1,922-940).
ctgaggatgtcttgtatta

SEQ ID NO: 370237 - DNA, 19 bp, Homo sapiens
  siRNA target sequence for FLJ11082 (NM_018317.1,953-971).
gaccaatgtgatacaacat

SEQ ID NO: 370238 - DNA, 19 bp, Homo sapiens
  siRNA target sequence for FLJ11082 (NM_018317.1,1007-1025).
gaagttgacagcaagcaat

SEQ ID NO: 370239 - DNA, 19 bp, Homo sapiens
  siRNA target sequence for FLJ11082 (NM_018317.1,1118-1136).
cagtgcctcgccaccaaaa

SEQ ID NO: 370240 - DNA, 19 bp, Homo sapiens
  siRNA target sequence for FLJ11082 (NM_018317.1,1178-1196).
cttttacccaccaaatggt

SEQ ID NO: 370241 - DNA, 19 bp, Homo sapiens
  siRNA target sequence for FLJ11082 (NM_018317.1,1203-1221).
ccttttcatggattttcaa

SEQ ID NO: 370242 - DNA, 19 bp, Homo sapiens
  siRNA target sequence for FLJ11082 (NM_018317.1,1274-1292).
gatattccgtgagatgtat

SEQ ID NO: 370243 - DNA, 19 bp, Homo sapiens
  siRNA target sequence for FLJ11082 (NM_018317.1,1327-1345).
ctcatccttctggtattgt

SEQ ID NO: 370244 - DNA, 19 bp, Homo sapiens
  siRNA target sequence for FLJ11082 (NM_018317.1,1329-1347).
catccttctggtattgtgt

SEQ ID NO: 370245 - DNA, 19 bp, Homo sapiens
  siRNA target sequence for FLJ11082 (NM_018317.1,1369-1387).
ctcttcttcaaacttatct

SEQ ID NO: 370246 - DNA, 19 bp, Homo sapiens
  siRNA target sequence for FLJ11082 (NM_018317.1,1425-1443).
caaccacttcgcatatcat

SEQ ID NO: 370247 - DNA, 19 bp, Homo sapiens
  siRNA target sequence for FLJ11082 (NM_018317.1,1428-1446).
ccacttcgcatatcattta

SEQ ID NO: 370248 - DNA, 19 bp, Homo sapiens
  siRNA target sequence for FLJ11082 (NM_018317.1,1429-1447).
cacttcgcatatcatttaa

SEQ ID NO: 370249 - DNA, 19 bp, Homo sapiens
  siRNA target sequence for FLJ11082 (NM_018317.1,1431-1449).
cttcgcatatcatttaagt

SEQ ID NO: 370250 - DNA, 19 bp, Homo sapiens
  siRNA target sequence for FLJ11082 (NM_018317.1,1451-1469).
gatggttcgagctttctct

SEQ ID NO: 370251 - DNA, 19 bp, Homo sapiens
  siRNA target sequence for FLJ11082 (NM_018317.1,1459-1477).
gagctttctctggatactt

SEQ ID NO: 370252 - DNA, 19 bp, Homo sapiens
  siRNA target sequence for FLJ11082 (NM_018317.1,1504-1522).
gggatagaatcctaggata

SEQ ID NO: 370253 - DNA, 19 bp, Homo sapiens
  siRNA target sequence for FLJ11088 (NM_018318.2,46-64).
ggctgcggagacttttgat

SEQ ID NO: 370254 - DNA, 19 bp, Homo sapiens
  siRNA target sequence for FLJ11088 (NM_018318.2,125-143).
gtatctggagtccatcttt

SEQ ID NO: 370255 - DNA, 19 bp, Homo sapiens
  siRNA target sequence for FLJ11088 (NM_018318.2,170-188).
gaccgtgaccactcttctt

SEQ ID NO: 370256 - DNA, 19 bp, Homo sapiens
  siRNA target sequence for FLJ11088 (NM_018318.2,237-255).
cacatgcagcaaatagcat

SEQ ID NO: 370257 - DNA, 19 bp, Homo sapiens
  siRNA target sequence for FLJ11088 (NM_018318.2,252-270).
gcattgtgagtcaaactat

SEQ ID NO: 370258 - DNA, 19 bp, Homo sapiens
  siRNA target sequence for FLJ11088 (NM_018318.2,311-329).
gatatctcactttttccat

SEQ ID NO: 370259 - DNA, 19 bp, Homo sapiens
  siRNA target sequence for FLJ11088 (NM_018318.2,390-408).
ctggagccaatgtatctaa

SEQ ID NO: 370260 - DNA, 19 bp, Homo sapiens
  siRNA target sequence for FLJ11088 (NM_018318.2,392-410).
ggagccaatgtatctaaca

SEQ ID NO: 370261 - DNA, 19 bp, Homo sapiens
  siRNA target sequence for FLJ11088 (NM_018318.2,393-411).
gagccaatgtatctaacat

SEQ ID NO: 370262 - DNA, 19 bp, Homo sapiens
  siRNA target sequence for FLJ11088 (NM_018318.2,432-450).
caagtctggagattaaact

SEQ ID NO: 370263 - DNA, 19 bp, Homo sapiens
  siRNA target sequence for FLJ11088 (NM_018318.2,439-457).
ggagattaaactcaaagta

SEQ ID NO: 370264 - DNA, 19 bp, Homo sapiens
  siRNA target sequence for FLJ11088 (NM_018318.2,564-582).
cttttcaagatagatacaa

SEQ ID NO: 370265 - DNA, 19 bp, Homo sapiens
  siRNA target sequence for FLJ11088 (NM_018318.2,635-653).
cacgaagccctcagcatta

SEQ ID NO: 370266 - DNA, 19 bp, Homo sapiens
  siRNA target sequence for FLJ11088 (NM_018318.2,637-655).
cgaagccctcagcattatt

SEQ ID NO: 370267 - DNA, 19 bp, Homo sapiens
  siRNA target sequence for FLJ11088 (NM_018318.2,674-692).
ctactgcagtcttcagtta

SEQ ID NO: 370268 - DNA, 19 bp, Homo sapiens
  siRNA target sequence for FLJ11088 (NM_018318.2,694-712).
gcaacaagtagaagctatt

SEQ ID NO: 370269 - DNA, 19 bp, Homo sapiens
  siRNA target sequence for FLJ11088 (NM_018318.2,784-802).
gaggctccttgaaatgcta

SEQ ID NO: 370270 - DNA, 19 bp, Homo sapiens
  siRNA target sequence for FLJ11088 (NM_018318.2,790-808).
ccttgaaatgctagataca

SEQ ID NO: 370271 - DNA, 19 bp, Homo sapiens
  siRNA target sequence for FLJ11088 (NM_018318.2,930-948).
ccgctgcaaagcttgaaaa

SEQ ID NO: 370272 - DNA, 19 bp, Homo sapiens
  siRNA target sequence for FLJ11088 (NM_018318.2,1016-1034).
gctgaagaaagggaattat

SEQ ID NO: 370273 - DNA, 19 bp, Homo sapiens
  siRNA target sequence for FLJ11088 (NM_018318.2,1199-1217).
gaattgatagagtatataa

SEQ ID NO: 370274 - DNA, 19 bp, Homo sapiens
  siRNA target sequence for FLJ11088 (NM_018318.2,1238-1256).
caagtcatccgccaaagaa

SEQ ID NO: 370275 - DNA, 19 bp, Homo sapiens
  siRNA target sequence for FLJ11088 (NM_018318.2,1300-1318).
gttaagtgctttaatagct

SEQ ID NO: 370276 - DNA, 19 bp, Homo sapiens
  siRNA target sequence for FLJ11088 (NM_018318.2,1317-1335).
ctacggaaccagttgacat

SEQ ID NO: 370277 - DNA, 19 bp, Homo sapiens
  siRNA target sequence for FLJ11088 (NM_018318.2,1320-1338).
cggaaccagttgacattga

SEQ ID NO: 370278 - DNA, 19 bp, Homo sapiens
  siRNA target sequence for FLJ11088 (NM_018318.2,1321-1339).
ggaaccagttgacattgaa

SEQ ID NO: 370279 - DNA, 19 bp, Homo sapiens
  siRNA target sequence for FLJ11088 (NM_018318.2,1322-1340).
gaaccagttgacattgaat

SEQ ID NO: 370280 - DNA, 19 bp, Homo sapiens
  siRNA target sequence for RNF121 (NM_018320.3,255-273).
cacgctcctacaatatggt

SEQ ID NO: 370281 - DNA, 19 bp, Homo sapiens
  siRNA target sequence for RNF121 (NM_018320.3,327-345).
ggtggaggttcctagtgat

SEQ ID NO: 370282 - DNA, 19 bp, Homo sapiens
  siRNA target sequence for RNF121 (NM_018320.3,385-403).
ccgagccacccgaaaacct

SEQ ID NO: 370283 - DNA, 19 bp, Homo sapiens
  siRNA target sequence for RNF121 (NM_018320.3,391-409).
cacccgaaaacctctagta

SEQ ID NO: 370284 - DNA, 19 bp, Homo sapiens
  siRNA target sequence for RNF121 (NM_018320.3,393-411).
cccgaaaacctctagtaca

SEQ ID NO: 370285 - DNA, 19 bp, Homo sapiens
  siRNA target sequence for RNF121 (NM_018320.3,414-432).
caaccccaaggttggttta

SEQ ID NO: 370286 - DNA, 19 bp, Homo sapiens
  siRNA target sequence for RNF121 (NM_018320.3,417-435).
ccccaaggttggtttataa

SEQ ID NO: 370287 - DNA, 19 bp, Homo sapiens
  siRNA target sequence for RNF121 (NM_018320.3,419-437).
ccaaggttggtttataagt

SEQ ID NO: 370288 - DNA, 19 bp, Homo sapiens
  siRNA target sequence for RNF121 (NM_018320.3,438-456).
ggttcctgctaatctataa

SEQ ID NO: 370289 - DNA, 19 bp, Homo sapiens
  siRNA target sequence for RNF121 (NM_018320.3,439-457).
gttcctgctaatctataaa

SEQ ID NO: 370290 - DNA, 19 bp, Homo sapiens
  siRNA target sequence for RNF121 (NM_018320.3,484-502).
ctacatggctgtcatgttt

SEQ ID NO: 370291 - DNA, 19 bp, Homo sapiens
  siRNA target sequence for RNF121 (NM_018320.3,505-523).
cctctttggtcttaactta

SEQ ID NO: 370292 - DNA, 19 bp, Homo sapiens
  siRNA target sequence for RNF121 (NM_018320.3,506-524).
ctctttggtcttaacttat

SEQ ID NO: 370293 - DNA, 19 bp, Homo sapiens
  siRNA target sequence for RNF121 (NM_018320.3,508-526).
ctttggtcttaacttatta

SEQ ID NO: 370294 - DNA, 19 bp, Homo sapiens
  siRNA target sequence for RNF121 (NM_018320.3,512-530).
ggtcttaacttattattca

SEQ ID NO: 370295 - DNA, 19 bp, Homo sapiens
  siRNA target sequence for RNF121 (NM_018320.3,513-531).
gtcttaacttattattcaa

SEQ ID NO: 370296 - DNA, 19 bp, Homo sapiens
  siRNA target sequence for RNF121 (NM_018320.3,515-533).
cttaacttattattcaaga

SEQ ID NO: 370297 - DNA, 19 bp, Homo sapiens
  siRNA target sequence for RNF121 (NM_018320.3,664-682).
gtcgggcatgcctaccaaa

SEQ ID NO: 370298 - DNA, 19 bp, Homo sapiens
  siRNA target sequence for RNF121 (NM_018320.3,895-913).
gaggcctcacgtcatgtat

SEQ ID NO: 370299 - DNA, 19 bp, Homo sapiens
  siRNA target sequence for RNF121 (NM_018320.3,971-989).
gtagtccaaggcatcaact

SEQ ID NO: 370300 - DNA, 19 bp, Homo sapiens
  siRNA target sequence for RNF121 (NM_018320.3,974-992).
gtccaaggcatcaactaca

SEQ ID NO: 370301 - DNA, 19 bp, Homo sapiens
  siRNA target sequence for BRIX (NM_018321.2,181-199).
cggattctcatcttttctt

SEQ ID NO: 370302 - DNA, 19 bp, Homo sapiens
  siRNA target sequence for BRIX (NM_018321.2,218-236).
gaacaagacatttaatgca

SEQ ID NO: 370303 - DNA, 19 bp, Homo sapiens
  siRNA target sequence for BRIX (NM_018321.2,249-267).
gttgatgcctcattctaaa

SEQ ID NO: 370304 - DNA, 19 bp, Homo sapiens
  siRNA target sequence for BRIX (NM_018321.2,252-270).
gatgcctcattctaaagca

SEQ ID NO: 370305 - DNA, 19 bp, Homo sapiens
  siRNA target sequence for BRIX (NM_018321.2,259-277).
cattctaaagcagatacta

SEQ ID NO: 370306 - DNA, 19 bp, Homo sapiens
  siRNA target sequence for BRIX (NM_018321.2,282-300).
ggatcgtaaggataagcta

SEQ ID NO: 370307 - DNA, 19 bp, Homo sapiens
  siRNA target sequence for BRIX (NM_018321.2,283-301).
gatcgtaaggataagctat

SEQ ID NO: 370308 - DNA, 19 bp, Homo sapiens
  siRNA target sequence for BRIX (NM_018321.2,306-324).
gattaacgaggtttgtgaa

SEQ ID NO: 370309 - DNA, 19 bp, Homo sapiens
  siRNA target sequence for BRIX (NM_018321.2,443-461).
ccctcgctgaactgaagat

SEQ ID NO: 370310 - DNA, 19 bp, Homo sapiens
  siRNA target sequence for BRIX (NM_018321.2,505-523).
gaccctgcttttgatgaat

SEQ ID NO: 370311 - DNA, 19 bp, Homo sapiens
  siRNA target sequence for BRIX (NM_018321.2,587-605).
ccaaaagccaaccatttgt

SEQ ID NO: 370312 - DNA, 19 bp, Homo sapiens
  siRNA target sequence for BRIX (NM_018321.2,604-622).
gtggaccacgtgtttactt

SEQ ID NO: 370313 - DNA, 19 bp, Homo sapiens
  siRNA target sequence for BRIX (NM_018321.2,620-638).
ctttcaccattttggataa

SEQ ID NO: 370314 - DNA, 19 bp, Homo sapiens
  siRNA target sequence for BRIX (NM_018321.2,633-651).
ggataataggatatggttt

SEQ ID NO: 370315 - DNA, 19 bp, Homo sapiens
  siRNA target sequence for BRIX (NM_018321.2,647-665).
ggtttcggaactttcagat

SEQ ID NO: 370316 - DNA, 19 bp, Homo sapiens
  siRNA target sequence for BRIX (NM_018321.2,697-715).
ggacctcgttttgtcttaa

SEQ ID NO: 370317 - DNA, 19 bp, Homo sapiens
  siRNA target sequence for BRIX (NM_018321.2,698-716).
gacctcgttttgtcttaaa

SEQ ID NO: 370318 - DNA, 19 bp, Homo sapiens
  siRNA target sequence for BRIX (NM_018321.2,701-719).
ctcgttttgtcttaaatct

SEQ ID NO: 370319 - DNA, 19 bp, Homo sapiens
  siRNA target sequence for BRIX (NM_018321.2,703-721).
cgttttgtcttaaatctca

SEQ ID NO: 370320 - DNA, 19 bp, Homo sapiens
  siRNA target sequence for BRIX (NM_018321.2,789-807).
catgcatcggcgtgtcata

SEQ ID NO: 370321 - DNA, 19 bp, Homo sapiens
  siRNA target sequence for BRIX (NM_018321.2,792-810).
gcatcggcgtgtcataaga

SEQ ID NO: 370322 - DNA, 19 bp, Homo sapiens
  siRNA target sequence for BRIX (NM_018321.2,793-811).
catcggcgtgtcataagat

SEQ ID NO: 370323 - DNA, 19 bp, Homo sapiens
  siRNA target sequence for BRIX (NM_018321.2,888-906).
gactcttcttccacatgat

SEQ ID NO: 370324 - DNA, 19 bp, Homo sapiens
  siRNA target sequence for BRIX (NM_018321.2,973-991).
gagccaaaagttgatttga

SEQ ID NO: 370325 - DNA, 19 bp, Homo sapiens
  siRNA target sequence for C6orf64 (NM_018322.1,106-124).
gaagcagcagcgactctaa

SEQ ID NO: 370326 - DNA, 19 bp, Homo sapiens
  siRNA target sequence for C6orf64 (NM_018322.1,147-165).
gcggttcctggtatggaaa

SEQ ID NO: 370327 - DNA, 19 bp, Homo sapiens
  siRNA target sequence for C6orf64 (NM_018322.1,296-314).
ccaatatcaccttcttgaa

SEQ ID NO: 370328 - DNA, 19 bp, Homo sapiens
  siRNA target sequence for C6orf64 (NM_018322.1,358-376).
gaatttggcctggcatatt

SEQ ID NO: 370329 - DNA, 19 bp, Homo sapiens
  siRNA target sequence for C6orf64 (NM_018322.1,382-400).
ctgtccttgttctattgga

SEQ ID NO: 370330 - DNA, 19 bp, Homo sapiens
  siRNA target sequence for C6orf64 (NM_018322.1,449-467).
gcgcctactctgtgttcaa

SEQ ID NO: 370331 - DNA, 19 bp, Homo sapiens
  siRNA target sequence for C9orf72 (NM_018325.1,129-147).
gccaagacagagattgctt

SEQ ID NO: 370332 - DNA, 19 bp, Homo sapiens
  siRNA target sequence for C9orf72 (NM_018325.1,151-169).
gtggcaaatcacctttatt

SEQ ID NO: 370333 - DNA, 19 bp, Homo sapiens
  siRNA target sequence for C9orf72 (NM_018325.1,155-173).
caaatcacctttattagca

SEQ ID NO: 370334 - DNA, 19 bp, Homo sapiens
  siRNA target sequence for C9orf72 (NM_018325.1,221-239).
catttgggctccaaagaca

SEQ ID NO: 370335 - DNA, 19 bp, Homo sapiens
  siRNA target sequence for C9orf72 (NM_018325.1,254-272).
cagtgatggagaaataact

SEQ ID NO: 370336 - DNA, 19 bp, Homo sapiens
  siRNA target sequence for C9orf72 (NM_018325.1,276-294).
cttgccaaccacactctaa

SEQ ID NO: 370337 - DNA, 19 bp, Homo sapiens
  siRNA target sequence for C9orf72 (NM_018325.1,289-307).
ctctaaatggagaaatcct

SEQ ID NO: 370338 - DNA, 19 bp, Homo sapiens
  siRNA target sequence for C9orf72 (NM_018325.1,325-343).
gtgctatagatgtaaagtt

SEQ ID NO: 370339 - DNA, 19 bp, Homo sapiens
  siRNA target sequence for C9orf72 (NM_018325.1,353-371).
gtctgaaaagggagtgatt

SEQ ID NO: 370340 - DNA, 19 bp, Homo sapiens
  siRNA target sequence for C9orf72 (NM_018325.1,363-381).
ggagtgattattgtttcat

SEQ ID NO: 370341 - DNA, 19 bp, Homo sapiens
  siRNA target sequence for C9orf72 (NM_018325.1,407-425).
ggatcgcagcacatatgga

SEQ ID NO: 370342 - DNA, 19 bp, Homo sapiens
  siRNA target sequence for C9orf72 (NM_018325.1,415-433).
gcacatatggactatcaat

SEQ ID NO: 370343 - DNA, 19 bp, Homo sapiens
  siRNA target sequence for C9orf72 (NM_018325.1,441-459).
ccacagacagaacttagtt

SEQ ID NO: 370344 - DNA, 19 bp, Homo sapiens
  siRNA target sequence for C9orf72 (NM_018325.1,442-460).
cacagacagaacttagttt

SEQ ID NO: 370345 - DNA, 19 bp, Homo sapiens
  siRNA target sequence for C9orf72 (NM_018325.1,444-462).
cagacagaacttagtttct

SEQ ID NO: 370346 - DNA, 19 bp, Homo sapiens
  siRNA target sequence for C9orf72 (NM_018325.1,480-498).
gtgtgtgttgatagattaa

SEQ ID NO: 370347 - DNA, 19 bp, Homo sapiens
  siRNA target sequence for C9orf72 (NM_018325.1,482-500).
gtgtgttgatagattaaca

SEQ ID NO: 370348 - DNA, 19 bp, Homo sapiens
  siRNA target sequence for C9orf72 (NM_018325.1,484-502).
gtgttgatagattaacaca

SEQ ID NO: 370349 - DNA, 19 bp, Homo sapiens
  siRNA target sequence for C9orf72 (NM_018325.1,501-519).
catataatccggaaaggaa

SEQ ID NO: 370350 - DNA, 19 bp, Homo sapiens
  siRNA target sequence for C9orf72 (NM_018325.1,516-534).
ggaagaatatggatgcata

SEQ ID NO: 370351 - DNA, 19 bp, Homo sapiens
  siRNA target sequence for C9orf72 (NM_018325.1,520-538).
gaatatggatgcataagga

SEQ ID NO: 370352 - DNA, 19 bp, Homo sapiens
  siRNA target sequence for C9orf72 (NM_018325.1,526-544).
ggatgcataaggaaagaca

SEQ ID NO: 370353 - DNA, 19 bp, Homo sapiens
  siRNA target sequence for C9orf72 (NM_018325.1,591-609).
gatcagggtcagagtatta

SEQ ID NO: 370354 - DNA, 19 bp, Homo sapiens
  siRNA target sequence for C9orf72 (NM_018325.1,596-614).
gggtcagagtattattcca

SEQ ID NO: 370355 - DNA, 19 bp, Homo sapiens
  siRNA target sequence for C9orf72 (NM_018325.1,597-615).
ggtcagagtattattccaa

SEQ ID NO: 370356 - DNA, 19 bp, Homo sapiens
  siRNA target sequence for C9orf72 (NM_018325.1,602-620).
gagtattattccaatgctt

SEQ ID NO: 370357 - DNA, 19 bp, Homo sapiens
  siRNA target sequence for C9orf72 (NM_018325.1,617-635).
gcttactggagaagtgatt

SEQ ID NO: 370358 - DNA, 19 bp, Homo sapiens
  siRNA target sequence for C9orf72 (NM_018325.1,625-643).
gagaagtgattcctgtaat

SEQ ID NO: 370359 - DNA, 19 bp, Homo sapiens
  siRNA target sequence for C9orf72 (NM_018325.1,697-715).
ctgatacagtactcaatga

SEQ ID NO: 370360 - DNA, 19 bp, Homo sapiens
  siRNA target sequence for C9orf72 (NM_018325.1,703-721).
cagtactcaatgatgatga

SEQ ID NO: 370361 - DNA, 19 bp, Homo sapiens
  siRNA target sequence for C9orf72 (NM_018325.1,814-832).
cagagaaagtaaataagat

SEQ ID NO: 370362 - DNA, 19 bp, Homo sapiens
  siRNA target sequence for C9orf72 (NM_018325.1,938-956).
cctgctaaaggattcaact

SEQ ID NO: 370363 - DNA, 19 bp, Homo sapiens
  siRNA target sequence for C9orf72 (NM_018325.1,973-991).
ctttccggcaagtcatgta

SEQ ID NO: 370364 - DNA, 19 bp, Homo sapiens
  siRNA target sequence for C9orf72 (NM_018325.1,1003-1021).
ccaccacacacatagatgt

SEQ ID NO: 370365 - DNA, 19 bp, Homo sapiens
  siRNA target sequence for C9orf72 (NM_018325.1,1043-1061).
gatgccaccctgtcatgaa

SEQ ID NO: 370366 - DNA, 19 bp, Homo sapiens
  siRNA target sequence for C9orf72 (NM_018325.1,1046-1064).
gccaccctgtcatgaacat

SEQ ID NO: 370367 - DNA, 19 bp, Homo sapiens
  siRNA target sequence for C9orf72 (NM_018325.1,1047-1065).
ccaccctgtcatgaacata

SEQ ID NO: 370368 - DNA, 19 bp, Homo sapiens
  siRNA target sequence for C9orf72 (NM_018325.1,1074-1092).
cagcgtagatacatgagat

SEQ ID NO: 370369 - DNA, 19 bp, Homo sapiens
  siRNA target sequence for C9orf72 (NM_018325.1,1138-1156).
ctcaggatacgatcatcta

SEQ ID NO: 370370 - DNA, 19 bp, Homo sapiens
  siRNA target sequence for C9orf72 (NM_018325.1,1140-1158).
caggatacgatcatctaca

SEQ ID NO: 370371 - DNA, 19 bp, Homo sapiens
  siRNA target sequence for C9orf72 (NM_018325.1,1154-1172).
ctacactgacgaaagcttt

SEQ ID NO: 370372 - DNA, 19 bp, Homo sapiens
  siRNA target sequence for C9orf72 (NM_018325.1,1250-1268).
gctgaaacctggcttatct

SEQ ID NO: 370373 - DNA, 19 bp, Homo sapiens
  siRNA target sequence for C9orf72 (NM_018325.1,1260-1278).
ggcttatctctcagaagta

SEQ ID NO: 370374 - DNA, 19 bp, Homo sapiens
  siRNA target sequence for C9orf72 (NM_018325.1,1262-1280).
cttatctctcagaagtact

SEQ ID NO: 370375 - DNA, 19 bp, Homo sapiens
  siRNA target sequence for C9orf72 (NM_018325.1,1394-1412).
gatagaccttgatttaaca

SEQ ID NO: 370376 - DNA, 19 bp, Homo sapiens
  siRNA target sequence for C9orf72 (NM_018325.1,1411-1429).
cagcagagggcgatcttaa

SEQ ID NO: 370377 - DNA, 19 bp, Homo sapiens
  siRNA target sequence for C9orf72 (NM_018325.1,1413-1431).
gcagagggcgatcttaaca

SEQ ID NO: 370378 - DNA, 19 bp, Homo sapiens
  siRNA target sequence for C9orf72 (NM_018325.1,1414-1432).
cagagggcgatcttaacat

SEQ ID NO: 370379 - DNA, 19 bp, Homo sapiens
  siRNA target sequence for C9orf72 (NM_018325.1,1416-1434).
gagggcgatcttaacataa

SEQ ID NO: 370380 - DNA, 19 bp, Homo sapiens
  siRNA target sequence for C9orf72 (NM_018325.1,1418-1436).
gggcgatcttaacataata

SEQ ID NO: 370381 - DNA, 19 bp, Homo sapiens
  siRNA target sequence for C9orf72 (NM_018325.1,1419-1437).
ggcgatcttaacataataa

SEQ ID NO: 370382 - DNA, 19 bp, Homo sapiens
  siRNA target sequence for C9orf72 (NM_018325.1,1420-1438).
gcgatcttaacataataat

SEQ ID NO: 370383 - DNA, 19 bp, Homo sapiens
  siRNA target sequence for C9orf72 (NM_018325.1,1440-1458).
gctctggctgagaaaatta

SEQ ID NO: 370384 - DNA, 19 bp, Homo sapiens
  siRNA target sequence for C9orf72 (NM_018325.1,1461-1479).
ccaggcctacactctttta

SEQ ID NO: 370385 - DNA, 19 bp, Homo sapiens
  siRNA target sequence for C9orf72 (NM_018325.1,1462-1480).
caggcctacactcttttat

SEQ ID NO: 370386 - DNA, 19 bp, Homo sapiens
  siRNA target sequence for C9orf72 (NM_018325.1,1515-1533).
cgagatgttctaatgactt

SEQ ID NO: 370387 - DNA, 19 bp, Homo sapiens
  siRNA target sequence for C9orf72 (NM_018325.1,1516-1534).
gagatgttctaatgacttt

SEQ ID NO: 370388 - DNA, 19 bp, Homo sapiens
  siRNA target sequence for HIMAP4 (NM_018326.2,89-107).
gcccaatacggcagtatga

SEQ ID NO: 370389 - DNA, 19 bp, Homo sapiens
  siRNA target sequence for HIMAP4 (NM_018326.2,121-139).
cacaccaggggccagttat

SEQ ID NO: 370390 - DNA, 19 bp, Homo sapiens
  siRNA target sequence for HIMAP4 (NM_018326.2,158-176).
cccagaaattcccaattga

SEQ ID NO: 370391 - DNA, 19 bp, Homo sapiens
  siRNA target sequence for HIMAP4 (NM_018326.2,160-178).
cagaaattcccaattgaga

SEQ ID NO: 370392 - DNA, 19 bp, Homo sapiens
  siRNA target sequence for HIMAP4 (NM_018326.2,168-186).
cccaattgagaattgtgtt

SEQ ID NO: 370393 - DNA, 19 bp, Homo sapiens
  siRNA target sequence for HIMAP4 (NM_018326.2,232-250).
ccttggccggaaagtgttt

SEQ ID NO: 370394 - DNA, 19 bp, Homo sapiens
  siRNA target sequence for HIMAP4 (NM_018326.2,236-254).
ggccggaaagtgtttcatt

SEQ ID NO: 370395 - DNA, 19 bp, Homo sapiens
  siRNA target sequence for HIMAP4 (NM_018326.2,238-256).
ccggaaagtgtttcattct

SEQ ID NO: 370396 - DNA, 19 bp, Homo sapiens
  siRNA target sequence for HIMAP4 (NM_018326.2,318-336).
cagaacttgtcgtagttga

SEQ ID NO: 370397 - DNA, 19 bp, Homo sapiens
  siRNA target sequence for HIMAP4 (NM_018326.2,535-553).
catattcacccggaaagat

SEQ ID NO: 370398 - DNA, 19 bp, Homo sapiens
  siRNA target sequence for HIMAP4 (NM_018326.2,541-559).
cacccggaaagatgactta

SEQ ID NO: 370399 - DNA, 19 bp, Homo sapiens
  siRNA target sequence for HIMAP4 (NM_018326.2,635-653).
cgctactgtgcgttaaaca

SEQ ID NO: 370400 - DNA, 19 bp, Homo sapiens
  siRNA target sequence for HIMAP4 (NM_018326.2,636-654).
gctactgtgcgttaaacaa

SEQ ID NO: 370401 - DNA, 19 bp, Homo sapiens
  siRNA target sequence for HIMAP4 (NM_018326.2,733-751).
ggaaggctgctacactaat

SEQ ID NO: 370402 - DNA, 19 bp, Homo sapiens
  siRNA target sequence for HIMAP4 (NM_018326.2,734-752).
gaaggctgctacactaata

SEQ ID NO: 370403 - DNA, 19 bp, Homo sapiens
  siRNA target sequence for HIMAP4 (NM_018326.2,737-755).
ggctgctacactaatagga

SEQ ID NO: 370404 - DNA, 19 bp, Homo sapiens
  siRNA target sequence for HIMAP4 (NM_018326.2,738-756).
gctgctacactaataggat

SEQ ID NO: 370405 - DNA, 19 bp, Homo sapiens
  siRNA target sequence for HIMAP4 (NM_018326.2,994-1012).
ggatgggatacttgaatta

SEQ ID NO: 370406 - DNA, 19 bp, Homo sapiens
  siRNA target sequence for HIMAP4 (NM_018326.2,995-1013).
gatgggatacttgaattaa

SEQ ID NO: 370407 - DNA, 19 bp, Homo sapiens
  siRNA target sequence for HIMAP4 (NM_018326.2,998-1016).
gggatacttgaattaatca

SEQ ID NO: 370408 - DNA, 19 bp, Homo sapiens
  siRNA target sequence for HIMAP4 (NM_018326.2,1015-1033).
catgacagcgttacagatt

SEQ ID NO: 370409 - DNA, 19 bp, Homo sapiens
  siRNA target sequence for HIMAP4 (NM_018326.2,1052-1070).
cgtctgttcgcggaagatt

SEQ ID NO: 370410 - DNA, 19 bp, Homo sapiens
  siRNA target sequence for C20orf38 (NM_018327.1,104-122).
ggaaacttcacaatcacaa

SEQ ID NO: 370411 - DNA, 19 bp, Homo sapiens
  siRNA target sequence for C20orf38 (NM_018327.1,155-173).
gcacaaagaatggaatagt

SEQ ID NO: 370412 - DNA, 19 bp, Homo sapiens
  siRNA target sequence for C20orf38 (NM_018327.1,216-234).
gctcattgttgaatcgttt

SEQ ID NO: 370413 - DNA, 19 bp, Homo sapiens
  siRNA target sequence for C20orf38 (NM_018327.1,238-256).
gaagcaccccttcatgtta

SEQ ID NO: 370414 - DNA, 19 bp, Homo sapiens
  siRNA target sequence for C20orf38 (NM_018327.1,242-260).
caccccttcatgttatggt

SEQ ID NO: 370415 - DNA, 19 bp, Homo sapiens
  siRNA target sequence for C20orf38 (NM_018327.1,244-262).
ccccttcatgttatggttt

SEQ ID NO: 370416 - DNA, 19 bp, Homo sapiens
  siRNA target sequence for C20orf38 (NM_018327.1,245-263).
cccttcatgttatggtttt

SEQ ID NO: 370417 - DNA, 19 bp, Homo sapiens
  siRNA target sequence for C20orf38 (NM_018327.1,266-284).
cttacatgggatatggaat

SEQ ID NO: 370418 - DNA, 19 bp, Homo sapiens
  siRNA target sequence for C20orf38 (NM_018327.1,382-400).
cgcacctccctggatcttt

SEQ ID NO: 370419 - DNA, 19 bp, Homo sapiens
  siRNA target sequence for C20orf38 (NM_018327.1,387-405).
ctccctggatctttgtcaa

SEQ ID NO: 370420 - DNA, 19 bp, Homo sapiens
  siRNA target sequence for C20orf38 (NM_018327.1,409-427).
ctactcctctctaaagtgt

SEQ ID NO: 370421 - DNA, 19 bp, Homo sapiens
  siRNA target sequence for C20orf38 (NM_018327.1,479-497).
gaactattcagggcaaatt

SEQ ID NO: 370422 - DNA, 19 bp, Homo sapiens
  siRNA target sequence for C20orf38 (NM_018327.1,533-551).
gggcttatggacctgtttt

SEQ ID NO: 370423 - DNA, 19 bp, Homo sapiens
  siRNA target sequence for C20orf38 (NM_018327.1,534-552).
ggcttatggacctgttttt

SEQ ID NO: 370424 - DNA, 19 bp, Homo sapiens
  siRNA target sequence for C20orf38 (NM_018327.1,558-576).
catctcatgggcaactact

SEQ ID NO: 370425 - DNA, 19 bp, Homo sapiens
  siRNA target sequence for C20orf38 (NM_018327.1,561-579).
ctcatgggcaactactatt

SEQ ID NO: 370426 - DNA, 19 bp, Homo sapiens
  siRNA target sequence for FLJ11117 (NM_018329.1,125-143).
ccccctacaaggaacttct

SEQ ID NO: 370427 - DNA, 19 bp, Homo sapiens
  siRNA target sequence for FLJ11117 (NM_018329.1,126-144).
cccctacaaggaacttctt

SEQ ID NO: 370428 - DNA, 19 bp, Homo sapiens
  siRNA target sequence for FLJ11117 (NM_018329.1,194-212).
ggagccaatccttcactta

SEQ ID NO: 370429 - DNA, 19 bp, Homo sapiens
  siRNA target sequence for FLJ11117 (NM_018329.1,197-215).
gccaatccttcacttaaat

SEQ ID NO: 370430 - DNA, 19 bp, Homo sapiens
  siRNA target sequence for FLJ11117 (NM_018329.1,199-217).
caatccttcacttaaatca

SEQ ID NO: 370431 - DNA, 19 bp, Homo sapiens
  siRNA target sequence for FLJ11117 (NM_018329.1,283-301).
ccgtgttactgctttctct

SEQ ID NO: 370432 - DNA, 19 bp, Homo sapiens
  siRNA target sequence for FLJ11117 (NM_018329.1,338-356).
ctccagggagagttactca

SEQ ID NO: 370433 - DNA, 19 bp, Homo sapiens
  siRNA target sequence for FLJ11117 (NM_018329.1,464-482).
cctccaggggttatttcca

SEQ ID NO: 370434 - DNA, 19 bp, Homo sapiens
  siRNA target sequence for KIAA1598 (NM_018330.2,361-379).
gccagtgttgggttctgta

SEQ ID NO: 370435 - DNA, 19 bp, Homo sapiens
  siRNA target sequence for KIAA1598 (NM_018330.2,371-389).
ggttctgtatccagtgtaa

SEQ ID NO: 370436 - DNA, 19 bp, Homo sapiens
  siRNA target sequence for KIAA1598 (NM_018330.2,492-510).
caagttccaaggttacgtt

SEQ ID NO: 370437 - DNA, 19 bp, Homo sapiens
  siRNA target sequence for KIAA1598 (NM_018330.2,566-584).
gccgaaccagttgtagttt

SEQ ID NO: 370438 - DNA, 19 bp, Homo sapiens
  siRNA target sequence for LRRN3 (NM_018334.3,745-763).
catgccactccgaattcat

SEQ ID NO: 370439 - DNA, 19 bp, Homo sapiens
  siRNA target sequence for LRRN3 (NM_018334.3,780-798).
ctatcactacactagtaca

SEQ ID NO: 370440 - DNA, 19 bp, Homo sapiens
  siRNA target sequence for LRRN3 (NM_018334.3,791-809).
ctagtacaagctgtagata

SEQ ID NO: 370441 - DNA, 19 bp, Homo sapiens
  siRNA target sequence for LRRN3 (NM_018334.3,817-835).
ggattgtccacggttatgt

SEQ ID NO: 370442 - DNA, 19 bp, Homo sapiens
  siRNA target sequence for LRRN3 (NM_018334.3,818-836).
gattgtccacggttatgta

SEQ ID NO: 370443 - DNA, 19 bp, Homo sapiens
  siRNA target sequence for LRRN3 (NM_018334.3,856-874).
gtttacacccagatccatt

SEQ ID NO: 370444 - DNA, 19 bp, Homo sapiens
  siRNA target sequence for LRRN3 (NM_018334.3,861-879).
cacccagatccatttatat

SEQ ID NO: 370445 - DNA, 19 bp, Homo sapiens
  siRNA target sequence for LRRN3 (NM_018334.3,884-902).
gcatctacagtggattgta

SEQ ID NO: 370446 - DNA, 19 bp, Homo sapiens
  siRNA target sequence for LRRN3 (NM_018334.3,885-903).
catctacagtggattgtaa

SEQ ID NO: 370447 - DNA, 19 bp, Homo sapiens
  siRNA target sequence for LRRN3 (NM_018334.3,888-906).
ctacagtggattgtaatga

SEQ ID NO: 370448 - DNA, 19 bp, Homo sapiens
  siRNA target sequence for LRRN3 (NM_018334.3,931-949).
cagattgccagctaacaca

SEQ ID NO: 370449 - DNA, 19 bp, Homo sapiens
  siRNA target sequence for LRRN3 (NM_018334.3,937-955).
gccagctaacacacagatt

SEQ ID NO: 370450 - DNA, 19 bp, Homo sapiens
  siRNA target sequence for LRRN3 (NM_018334.3,939-957).
cagctaacacacagattct

SEQ ID NO: 370451 - DNA, 19 bp, Homo sapiens
  siRNA target sequence for LRRN3 (NM_018334.3,965-983).
cagactaacaatattgcaa

SEQ ID NO: 370452 - DNA, 19 bp, Homo sapiens
  siRNA target sequence for LRRN3 (NM_018334.3,999-1017).
cagactttccagtaaacct

SEQ ID NO: 370453 - DNA, 19 bp, Homo sapiens
  siRNA target sequence for LRRN3 (NM_018334.3,1001-1019).
gactttccagtaaacctta

SEQ ID NO: 370454 - DNA, 19 bp, Homo sapiens
  siRNA target sequence for LRRN3 (NM_018334.3,1023-1041).
gcctggatttatctcaaaa

SEQ ID NO: 370455 - DNA, 19 bp, Homo sapiens
  siRNA target sequence for LRRN3 (NM_018334.3,1055-1073).
gtcaccaatattaatgtaa

SEQ ID NO: 370456 - DNA, 19 bp, Homo sapiens
  siRNA target sequence for LRRN3 (NM_018334.3,1097-1115).
gtgtacctagaggaaaaca

SEQ ID NO: 370457 - DNA, 19 bp, Homo sapiens
  siRNA target sequence for LRRN3 (NM_018334.3,1144-1162).
gtccgaactgagcaactta

SEQ ID NO: 370458 - DNA, 19 bp, Homo sapiens
  siRNA target sequence for LRRN3 (NM_018334.3,1146-1164).
ccgaactgagcaacttaca

SEQ ID NO: 370459 - DNA, 19 bp, Homo sapiens
  siRNA target sequence for LRRN3 (NM_018334.3,1147-1165).
cgaactgagcaacttacaa

SEQ ID NO: 370460 - DNA, 19 bp, Homo sapiens
  siRNA target sequence for LRRN3 (NM_018334.3,1156-1174).
caacttacaagaactctat

SEQ ID NO: 370461 - DNA, 19 bp, Homo sapiens
  siRNA target sequence for LRRN3 (NM_018334.3,1159-1177).
cttacaagaactctatatt

SEQ ID NO: 370462 - DNA, 19 bp, Homo sapiens
  siRNA target sequence for LRRN3 (NM_018334.3,1166-1184).
gaactctatattaatcaca

SEQ ID NO: 370463 - DNA, 19 bp, Homo sapiens
  siRNA target sequence for LRRN3 (NM_018334.3,1211-1229).
gcctttattggcctacata

SEQ ID NO: 370464 - DNA, 19 bp, Homo sapiens
  siRNA target sequence for LRRN3 (NM_018334.3,1212-1230).
cctttattggcctacataa

SEQ ID NO: 370465 - DNA, 19 bp, Homo sapiens
  siRNA target sequence for LRRN3 (NM_018334.3,1235-1253).
cttcgacttcatctcaatt

SEQ ID NO: 370466 - DNA, 19 bp, Homo sapiens
  siRNA target sequence for LRRN3 (NM_018334.3,1244-1262).
catctcaattcaaatagat

SEQ ID NO: 370467 - DNA, 19 bp, Homo sapiens
  siRNA target sequence for LRRN3 (NM_018334.3,1284-1302).
ggtttgatgctcttccaaa

SEQ ID NO: 370468 - DNA, 19 bp, Homo sapiens
  siRNA target sequence for LRRN3 (NM_018334.3,1384-1402).
cctggttatagctggtata

SEQ ID NO: 370469 - DNA, 19 bp, Homo sapiens
  siRNA target sequence for LRRN3 (NM_018334.3,1385-1403).
ctggttatagctggtataa

SEQ ID NO: 370470 - DNA, 19 bp, Homo sapiens
  siRNA target sequence for LRRN3 (NM_018334.3,1397-1415).
ggtataaacctcacagaaa

SEQ ID NO: 370471 - DNA, 19 bp, Homo sapiens
  siRNA target sequence for LRRN3 (NM_018334.3,1428-1446).
ccttggttggactggaaaa

SEQ ID NO: 370472 - DNA, 19 bp, Homo sapiens
  siRNA target sequence for LRRN3 (NM_018334.3,1432-1450).
ggttggactggaaaactta

SEQ ID NO: 370473 - DNA, 19 bp, Homo sapiens
  siRNA target sequence for LRRN3 (NM_018334.3,1455-1473).
gcatctctttttacgataa

SEQ ID NO: 370474 - DNA, 19 bp, Homo sapiens
  siRNA target sequence for LRRN3 (NM_018334.3,1491-1509).
cccatgttgctcttcaaaa

SEQ ID NO: 370475 - DNA, 19 bp, Homo sapiens
  siRNA target sequence for LRRN3 (NM_018334.3,1492-1510).
ccatgttgctcttcaaaaa

SEQ ID NO: 370476 - DNA, 19 bp, Homo sapiens
  siRNA target sequence for LRRN3 (NM_018334.3,1531-1549).
ggatctaaataaaaatcct

SEQ ID NO: 370477 - DNA, 19 bp, Homo sapiens
  siRNA target sequence for LRRN3 (NM_018334.3,1562-1580).
cgaaggggtgattttagca

SEQ ID NO: 370478 - DNA, 19 bp, Homo sapiens
  siRNA target sequence for LRRN3 (NM_018334.3,1569-1587).
gtgattttagcaatatgct

SEQ ID NO: 370479 - DNA, 19 bp, Homo sapiens
  siRNA target sequence for LRRN3 (NM_018334.3,1627-1645).
gatttccatcgatagtctt

SEQ ID NO: 370480 - DNA, 19 bp, Homo sapiens
  siRNA target sequence for LRRN3 (NM_018334.3,1651-1669).
ggataacctgccagattta

SEQ ID NO: 370481 - DNA, 19 bp, Homo sapiens
  siRNA target sequence for LRRN3 (NM_018334.3,1683-1701).
ctactaacaaccctagatt

SEQ ID NO: 370482 - DNA, 19 bp, Homo sapiens
  siRNA target sequence for LRRN3 (NM_018334.3,1693-1711).
ccctagattgtcttacatt

SEQ ID NO: 370483 - DNA, 19 bp, Homo sapiens
  siRNA target sequence for LRRN3 (NM_018334.3,1695-1713).
ctagattgtcttacattca

SEQ ID NO: 370484 - DNA, 19 bp, Homo sapiens
  siRNA target sequence for LRRN3 (NM_018334.3,1859-1877).
gtcatccgttggatgaaca

SEQ ID NO: 370485 - DNA, 19 bp, Homo sapiens
  siRNA target sequence for LRRN3 (NM_018334.3,1903-1921).
ggagccagattcactgttt

SEQ ID NO: 370486 - DNA, 19 bp, Homo sapiens
  siRNA target sequence for LRRN3 (NM_018334.3,1904-1922).
gagccagattcactgtttt

SEQ ID NO: 370487 - DNA, 19 bp, Homo sapiens
  siRNA target sequence for LRRN3 (NM_018334.3,1923-1941).
gcgtggacccacctgaatt

SEQ ID NO: 370488 - DNA, 19 bp, Homo sapiens
  siRNA target sequence for LRRN3 (NM_018334.3,1955-1973).
gttcggcaagtgcatttca

SEQ ID NO: 370489 - DNA, 19 bp, Homo sapiens
  siRNA target sequence for LRRN3 (NM_018334.3,2039-2057).
gaagctgggagctatgttt

SEQ ID NO: 370490 - DNA, 19 bp, Homo sapiens
  siRNA target sequence for LRRN3 (NM_018334.3,2109-2127).
caccttctggtcaaaaact

SEQ ID NO: 370491 - DNA, 19 bp, Homo sapiens
  siRNA target sequence for LRRN3 (NM_018334.3,2120-2138).
caaaaactcttgcctaata

SEQ ID NO: 370492 - DNA, 19 bp, Homo sapiens
  siRNA target sequence for LRRN3 (NM_018334.3,2140-2158).
cctgacagacaagttctat

SEQ ID NO: 370493 - DNA, 19 bp, Homo sapiens
  siRNA target sequence for LRRN3 (NM_018334.3,2168-2186).
gagggaacactagatataa

SEQ ID NO: 370494 - DNA, 19 bp, Homo sapiens
  siRNA target sequence for LRRN3 (NM_018334.3,2170-2188).
gggaacactagatataaat

SEQ ID NO: 370495 - DNA, 19 bp, Homo sapiens
  siRNA target sequence for LRRN3 (NM_018334.3,2200-2218).
caaagaagggggtttatat

SEQ ID NO: 370496 - DNA, 19 bp, Homo sapiens
  siRNA target sequence for LRRN3 (NM_018334.3,2204-2222).
gaagggggtttatatactt

SEQ ID NO: 370497 - DNA, 19 bp, Homo sapiens
  siRNA target sequence for LRRN3 (NM_018334.3,2207-2225).
gggggtttatatacttgta

SEQ ID NO: 370498 - DNA, 19 bp, Homo sapiens
  siRNA target sequence for LRRN3 (NM_018334.3,2208-2226).
ggggtttatatacttgtat

SEQ ID NO: 370499 - DNA, 19 bp, Homo sapiens
  siRNA target sequence for LRRN3 (NM_018334.3,2240-2258).
gttggcgctgacttgaagt

SEQ ID NO: 370500 - DNA, 19 bp, Homo sapiens
  siRNA target sequence for LRRN3 (NM_018334.3,2246-2264).
gctgacttgaagtctgtta

SEQ ID NO: 370501 - DNA, 19 bp, Homo sapiens
  siRNA target sequence for LRRN3 (NM_018334.3,2247-2265).
ctgacttgaagtctgttat

SEQ ID NO: 370502 - DNA, 19 bp, Homo sapiens
  siRNA target sequence for LRRN3 (NM_018334.3,2249-2267).
gacttgaagtctgttatga

SEQ ID NO: 370503 - DNA, 19 bp, Homo sapiens
  siRNA target sequence for LRRN3 (NM_018334.3,2294-2312).
gataacaatggctctttga

SEQ ID NO: 370504 - DNA, 19 bp, Homo sapiens
  siRNA target sequence for LRRN3 (NM_018334.3,2434-2452).
gcaaagtgctcgaatacca

SEQ ID NO: 370505 - DNA, 19 bp, Homo sapiens
  siRNA target sequence for LRRN3 (NM_018334.3,2451-2469).
catctgatgtcaaggtata

SEQ ID NO: 370506 - DNA, 19 bp, Homo sapiens
  siRNA target sequence for LRRN3 (NM_018334.3,2454-2472).
ctgatgtcaaggtatataa

SEQ ID NO: 370507 - DNA, 19 bp, Homo sapiens
  siRNA target sequence for LRRN3 (NM_018334.3,2459-2477).
gtcaaggtatataatctta

SEQ ID NO: 370508 - DNA, 19 bp, Homo sapiens
  siRNA target sequence for LRRN3 (NM_018334.3,2485-2503).
gaatccatcaactgagtat

SEQ ID NO: 370509 - DNA, 19 bp, Homo sapiens
  siRNA target sequence for LRRN3 (NM_018334.3,2647-2665).
ggggattattggtgtgata

SEQ ID NO: 370510 - DNA, 19 bp, Homo sapiens
  siRNA target sequence for LRRN3 (NM_018334.3,2648-2666).
gggattattggtgtgatat

SEQ ID NO: 370511 - DNA, 19 bp, Homo sapiens
  siRNA target sequence for LRRN3 (NM_018334.3,2657-2675).
ggtgtgatatgtcttatca

SEQ ID NO: 370512 - DNA, 19 bp, Homo sapiens
  siRNA target sequence for LRRN3 (NM_018334.3,2715-2733).
gctatgtgaggaattactt

SEQ ID NO: 370513 - DNA, 19 bp, Homo sapiens
  siRNA target sequence for LRRN3 (NM_018334.3,2720-2738).
gtgaggaattacttacaga

SEQ ID NO: 370514 - DNA, 19 bp, Homo sapiens
  siRNA target sequence for LRRN3 (NM_018334.3,2761-2779).
gctttatcctcctctgata

SEQ ID NO: 370515 - DNA, 19 bp, Homo sapiens
  siRNA target sequence for FLJ11155 (NM_018342.2,401-419).
ccttggttgtcaatctgat

SEQ ID NO: 370516 - DNA, 19 bp, Homo sapiens
  siRNA target sequence for FLJ11155 (NM_018342.2,402-420).
cttggttgtcaatctgata

SEQ ID NO: 370517 - DNA, 19 bp, Homo sapiens
  siRNA target sequence for FLJ11155 (NM_018342.2,409-427).
gtcaatctgatattacatt

SEQ ID NO: 370518 - DNA, 19 bp, Homo sapiens
  siRNA target sequence for FLJ11155 (NM_018342.2,488-506).
ctgttgtcccaattatcaa

SEQ ID NO: 370519 - DNA, 19 bp, Homo sapiens
  siRNA target sequence for FLJ11155 (NM_018342.2,493-511).
gtcccaattatcaaaacca

SEQ ID NO: 370520 - DNA, 19 bp, Homo sapiens
  siRNA target sequence for FLJ11155 (NM_018342.2,495-513).
cccaattatcaaaaccatt

SEQ ID NO: 370521 - DNA, 19 bp, Homo sapiens
  siRNA target sequence for FLJ11155 (NM_018342.2,515-533).
gtttaggccttggaatctt

SEQ ID NO: 370522 - DNA, 19 bp, Homo sapiens
  siRNA target sequence for FLJ11155 (NM_018342.2,520-538).
ggccttggaatcttaatct

SEQ ID NO: 370523 - DNA, 19 bp, Homo sapiens
  siRNA target sequence for FLJ11155 (NM_018342.2,531-549).
cttaatctggggatcattt

SEQ ID NO: 370524 - DNA, 19 bp, Homo sapiens
  siRNA target sequence for FLJ11155 (NM_018342.2,597-615).
ggatgcagaagaagtatca

SEQ ID NO: 370525 - DNA, 19 bp, Homo sapiens
  siRNA target sequence for FLJ11155 (NM_018342.2,640-658).
gctgggctatcagtagtaa

SEQ ID NO: 370526 - DNA, 19 bp, Homo sapiens
  siRNA target sequence for FLJ11155 (NM_018342.2,650-668).
cagtagtaagtgctttcat

SEQ ID NO: 370527 - DNA, 19 bp, Homo sapiens
  siRNA target sequence for FLJ11155 (NM_018342.2,652-670).
gtagtaagtgctttcatat

SEQ ID NO: 370528 - DNA, 19 bp, Homo sapiens
  siRNA target sequence for FLJ11155 (NM_018342.2,711-729).
catggataccactccatta

SEQ ID NO: 370529 - DNA, 19 bp, Homo sapiens
  siRNA target sequence for FLJ11155 (NM_018342.2,714-732).
ggataccactccattaata

SEQ ID NO: 370530 - DNA, 19 bp, Homo sapiens
  siRNA target sequence for FLJ11155 (NM_018342.2,715-733).
gataccactccattaataa

SEQ ID NO: 370531 - DNA, 19 bp, Homo sapiens
  siRNA target sequence for FLJ11155 (NM_018342.2,771-789).
ctgggtggataaactttct

SEQ ID NO: 370532 - DNA, 19 bp, Homo sapiens
  siRNA target sequence for FLJ11155 (NM_018342.2,774-792).
ggtggataaactttctaca

SEQ ID NO: 370533 - DNA, 19 bp, Homo sapiens
  siRNA target sequence for FLJ11155 (NM_018342.2,777-795).
ggataaactttctacagta

SEQ ID NO: 370534 - DNA, 19 bp, Homo sapiens
  siRNA target sequence for FLJ11155 (NM_018342.2,828-846).
gatatctggagtactctat

SEQ ID NO: 370535 - DNA, 19 bp, Homo sapiens
  siRNA target sequence for FLJ11155 (NM_018342.2,838-856).
gtactctatggatctacat

SEQ ID NO: 370536 - DNA, 19 bp, Homo sapiens
  siRNA target sequence for FLJ11155 (NM_018342.2,914-932).
gggcaagccaatatgattt

SEQ ID NO: 370537 - DNA, 19 bp, Homo sapiens
  siRNA target sequence for FLJ11155 (NM_018342.2,917-935).
caagccaatatgatttaga

SEQ ID NO: 370538 - DNA, 19 bp, Homo sapiens
  siRNA target sequence for FLJ11155 (NM_018342.2,921-939).
ccaatatgatttagactat

SEQ ID NO: 370539 - DNA, 19 bp, Homo sapiens
  siRNA target sequence for FLJ11155 (NM_018342.2,948-966).
gcacttcagtggcatcttt

SEQ ID NO: 370540 - DNA, 19 bp, Homo sapiens
  siRNA target sequence for FLJ11155 (NM_018342.2,958-976).
ggcatctttcttacaagta

SEQ ID NO: 370541 - DNA, 19 bp, Homo sapiens
  siRNA target sequence for FLJ11155 (NM_018342.2,1063-1081).
gtactttgggctatagcta

SEQ ID NO: 370542 - DNA, 19 bp, Homo sapiens
  siRNA target sequence for FLJ11155 (NM_018342.2,1085-1103).
gctgttggttcatagcaaa

SEQ ID NO: 370543 - DNA, 19 bp, Homo sapiens
  siRNA target sequence for FLJ11155 (NM_018342.2,1088-1106).
gttggttcatagcaaatca

SEQ ID NO: 370544 - DNA, 19 bp, Homo sapiens
  siRNA target sequence for FLJ11155 (NM_018342.2,1113-1131).
gagtgctgtggtcagtttt

SEQ ID NO: 370545 - DNA, 19 bp, Homo sapiens
  siRNA target sequence for FLJ11155 (NM_018342.2,1117-1135).
gctgtggtcagttttccaa

SEQ ID NO: 370546 - DNA, 19 bp, Homo sapiens
  siRNA target sequence for FLJ11155 (NM_018342.2,1163-1181).
ctgcaatgtggggtatctt

SEQ ID NO: 370547 - DNA, 19 bp, Homo sapiens
  siRNA target sequence for FLJ11155 (NM_018342.2,1165-1183).
gcaatgtggggtatcttca

SEQ ID NO: 370548 - DNA, 19 bp, Homo sapiens
  siRNA target sequence for FLJ11155 (NM_018342.2,1166-1184).
caatgtggggtatcttcat

SEQ ID NO: 370549 - DNA, 19 bp, Homo sapiens
  siRNA target sequence for FLJ11155 (NM_018342.2,1201-1219).
ggtctacaaaactacctat

SEQ ID NO: 370550 - DNA, 19 bp, Homo sapiens
  siRNA target sequence for FLJ11155 (NM_018342.2,1202-1220).
gtctacaaaactacctatt

SEQ ID NO: 370551 - DNA, 19 bp, Homo sapiens
  siRNA target sequence for FLJ11155 (NM_018342.2,1204-1222).
ctacaaaactacctattaa

SEQ ID NO: 370552 - DNA, 19 bp, Homo sapiens
  siRNA target sequence for FLJ11155 (NM_018342.2,1212-1230).
ctacctattaatgatactt

SEQ ID NO: 370553 - DNA, 19 bp, Homo sapiens
  siRNA target sequence for SLC29A3 (NM_018344.3,187-205).
gtggcacatacatcatctt

SEQ ID NO: 370554 - DNA, 19 bp, Homo sapiens
  siRNA target sequence for SLC29A3 (NM_018344.3,798-816).
gagtatgccaggtactaca

SEQ ID NO: 370555 - DNA, 19 bp, Homo sapiens
  siRNA target sequence for SLC29A3 (NM_018344.3,812-830).
ctacatgaggcctgttctt

SEQ ID NO: 370556 - DNA, 19 bp, Homo sapiens
  siRNA target sequence for SLC29A3 (NM_018344.3,889-907).
cggtggcctccagattcat

SEQ ID NO: 370557 - DNA, 19 bp, Homo sapiens
  siRNA target sequence for SLC29A3 (NM_018344.3,890-908).
ggtggcctccagattcatt

SEQ ID NO: 370558 - DNA, 19 bp, Homo sapiens
  siRNA target sequence for SLC29A3 (NM_018344.3,1053-1071).
ctgtggaccaccaagtttt

SEQ ID NO: 370559 - DNA, 19 bp, Homo sapiens
  siRNA target sequence for SLC29A3 (NM_018344.3,1337-1355).
cctctacgggcctaagatt

SEQ ID NO: 370560 - DNA, 19 bp, Homo sapiens
  siRNA target sequence for SLC29A3 (NM_018344.3,1384-1402).
gagtggtgatgtcctttta

SEQ ID NO: 370561 - DNA, 19 bp, Homo sapiens
  siRNA target sequence for C20orf29 (NM_018347.1,396-414).
gcaggtagagtcaatgtgt

SEQ ID NO: 370562 - DNA, 19 bp, Homo sapiens
  siRNA target sequence for C20orf29 (NM_018347.1,743-761).
cacatggtcagctgctttt

SEQ ID NO: 370563 - DNA, 19 bp, Homo sapiens
  siRNA target sequence for FLJ11171 (NM_018348.4,374-392).
gcaagtcccgcgtcattca

SEQ ID NO: 370564 - DNA, 19 bp, Homo sapiens
  siRNA target sequence for FLJ11171 (NM_018348.4,384-402).
cgtcattcagcccagatat

SEQ ID NO: 370565 - DNA, 19 bp, Homo sapiens
  siRNA target sequence for FLJ11171 (NM_018348.4,385-403).
gtcattcagcccagatatt

SEQ ID NO: 370566 - DNA, 19 bp, Homo sapiens
  siRNA target sequence for FLJ11171 (NM_018348.4,501-519).
gtgaccacactgaacttaa

SEQ ID NO: 370567 - DNA, 19 bp, Homo sapiens
  siRNA target sequence for FLJ11171 (NM_018348.4,506-524).
cacactgaacttaatgcat

SEQ ID NO: 370568 - DNA, 19 bp, Homo sapiens
  siRNA target sequence for FLJ11171 (NM_018348.4,541-559).
ctccctaaatgaagtaaaa

SEQ ID NO: 370569 - DNA, 19 bp, Homo sapiens
  siRNA target sequence for FLJ11171 (NM_018348.4,596-614).
gagcacactgctttcacta

SEQ ID NO: 370570 - DNA, 19 bp, Homo sapiens
  siRNA target sequence for FLJ11171 (NM_018348.4,598-616).
gcacactgctttcactaat

SEQ ID NO: 370571 - DNA, 19 bp, Homo sapiens
  siRNA target sequence for FLJ11171 (NM_018348.4,601-619).
cactgctttcactaataaa

SEQ ID NO: 370572 - DNA, 19 bp, Homo sapiens
  siRNA target sequence for FLJ11171 (NM_018348.4,612-630).
ctaataaagcggggaaaat

SEQ ID NO: 370573 - DNA, 19 bp, Homo sapiens
  siRNA target sequence for FLJ11171 (NM_018348.4,621-639).
cggggaaaatcatttctca

SEQ ID NO: 370574 - DNA, 19 bp, Homo sapiens
  siRNA target sequence for FLJ11171 (NM_018348.4,653-671).
gtgaatgctgaactttgta

SEQ ID NO: 370575 - DNA, 19 bp, Homo sapiens
  siRNA target sequence for FLJ11171 (NM_018348.4,776-794).
ccaggagcttttatagcta

SEQ ID NO: 370576 - DNA, 19 bp, Homo sapiens
  siRNA target sequence for FLJ11171 (NM_018348.4,792-810).
ctagtctcaaccactactt

SEQ ID NO: 370577 - DNA, 19 bp, Homo sapiens
  siRNA target sequence for FLJ11171 (NM_018348.4,795-813).
gtctcaaccactacttaaa

SEQ ID NO: 370578 - DNA, 19 bp, Homo sapiens
  siRNA target sequence for FLJ11171 (NM_018348.4,838-856).
gagttgggtagcgaatact

SEQ ID NO: 370579 - DNA, 19 bp, Homo sapiens
  siRNA target sequence for FLJ11171 (NM_018348.4,840-858).
gttgggtagcgaatactct

SEQ ID NO: 370580 - DNA, 19 bp, Homo sapiens
  siRNA target sequence for FLJ11171 (NM_018348.4,844-862).
ggtagcgaatactctgaat

SEQ ID NO: 370581 - DNA, 19 bp, Homo sapiens
  siRNA target sequence for FLJ11171 (NM_018348.4,848-866).
gcgaatactctgaatccat

SEQ ID NO: 370582 - DNA, 19 bp, Homo sapiens
  siRNA target sequence for FLJ11171 (NM_018348.4,864-882).
cataccatgaagcaaatga

SEQ ID NO: 370583 - DNA, 19 bp, Homo sapiens
  siRNA target sequence for FLJ11171 (NM_018348.4,876-894).
caaatgacgacctcatgat

SEQ ID NO: 370584 - DNA, 19 bp, Homo sapiens
  siRNA target sequence for FLJ11171 (NM_018348.4,881-899).
gacgacctcatgatgatta

SEQ ID NO: 370585 - DNA, 19 bp, Homo sapiens
  siRNA target sequence for FLJ11171 (NM_018348.4,902-920).
gatgaccggcttattgcaa

SEQ ID NO: 370586 - DNA, 19 bp, Homo sapiens
  siRNA target sequence for FLJ11171 (NM_018348.4,905-923).
gaccggcttattgcaaata

SEQ ID NO: 370587 - DNA, 19 bp, Homo sapiens
  siRNA target sequence for FLJ11171 (NM_018348.4,908-926).
cggcttattgcaaatacct

SEQ ID NO: 370588 - DNA, 19 bp, Homo sapiens
  siRNA target sequence for FLJ11171 (NM_018348.4,909-927).
ggcttattgcaaatacctt

SEQ ID NO: 370589 - DNA, 19 bp, Homo sapiens
  siRNA target sequence for FLJ11171 (NM_018348.4,925-943).
cttgcactggtggtacttt

SEQ ID NO: 370590 - DNA, 19 bp, Homo sapiens
  siRNA target sequence for FLJ11171 (NM_018348.4,936-954).
ggtactttggtccagataa

SEQ ID NO: 370591 - DNA, 19 bp, Homo sapiens
  siRNA target sequence for FLJ11171 (NM_018348.4,948-966).
cagataacactggtgatat

SEQ ID NO: 370592 - DNA, 19 bp, Homo sapiens
  siRNA target sequence for FLJ11171 (NM_018348.4,1011-1029).
gcatggctactgttcactt

SEQ ID NO: 370593 - DNA, 19 bp, Homo sapiens
  siRNA target sequence for FLJ11171 (NM_018348.4,1037-1055).
gcagatgggagttttgatt

SEQ ID NO: 370594 - DNA, 19 bp, Homo sapiens
  siRNA target sequence for FLJ11171 (NM_018348.4,1071-1089).
gtgaacaagaagctttagt

SEQ ID NO: 370595 - DNA, 19 bp, Homo sapiens
  siRNA target sequence for FLJ11171 (NM_018348.4,1141-1159).
cggtggctcttttgttcta

SEQ ID NO: 370596 - DNA, 19 bp, Homo sapiens
  siRNA target sequence for FLJ11171 (NM_018348.4,1146-1164).
gctcttttgttctaaagat

SEQ ID NO: 370597 - DNA, 19 bp, Homo sapiens
  siRNA target sequence for FLJ11171 (NM_018348.4,1157-1175).
ctaaagatgtttactatgt

SEQ ID NO: 370598 - DNA, 19 bp, Homo sapiens
  siRNA target sequence for FLJ11171 (NM_018348.4,1178-1196).
gaacattgttccataaact

SEQ ID NO: 370599 - DNA, 19 bp, Homo sapiens
  siRNA target sequence for FLJ11171 (NM_018348.4,1185-1203).
gttccataaacttgatgta

SEQ ID NO: 370600 - DNA, 19 bp, Homo sapiens
  siRNA target sequence for FLJ11171 (NM_018348.4,1198-1216).
gatgtacctgctaaactgt

SEQ ID NO: 370601 - DNA, 19 bp, Homo sapiens
  siRNA target sequence for FLJ11171 (NM_018348.4,1260-1278).
caggaaactccgaagtcta

SEQ ID NO: 370602 - DNA, 19 bp, Homo sapiens
  siRNA target sequence for FLJ11171 (NM_018348.4,1263-1281).
gaaactccgaagtctatgt

SEQ ID NO: 370603 - DNA, 19 bp, Homo sapiens
  siRNA target sequence for FLJ11171 (NM_018348.4,1312-1330).
catccatcctctgttatct

SEQ ID NO: 370604 - DNA, 19 bp, Homo sapiens
  siRNA target sequence for FLJ11171 (NM_018348.4,1527-1545).
gggattgtgctatacaata

SEQ ID NO: 370605 - DNA, 19 bp, Homo sapiens
  siRNA target sequence for FLJ11171 (NM_018348.4,1528-1546).
ggattgtgctatacaatat

SEQ ID NO: 370606 - DNA, 19 bp, Homo sapiens
  siRNA target sequence for FLJ11171 (NM_018348.4,1591-1609).
gctagtaaaaaaatctagt

SEQ ID NO: 370607 - DNA, 19 bp, Homo sapiens
  siRNA target sequence for FLJ11171 (NM_018348.4,1592-1610).
ctagtaaaaaaatctagta

SEQ ID NO: 370608 - DNA, 19 bp, Homo sapiens
  siRNA target sequence for FLJ11171 (NM_018348.4,1613-1631).
ggttgtagtacaaatacaa

SEQ ID NO: 370609 - DNA, 19 bp, Homo sapiens
  siRNA target sequence for FLJ11171 (NM_018348.4,1614-1632).
gttgtagtacaaatacaaa

SEQ ID NO: 370610 - DNA, 19 bp, Homo sapiens
  siRNA target sequence for FLJ11171 (NM_018348.4,1640-1658).
gggcagaggaacaaatatt

SEQ ID NO: 370611 - DNA, 19 bp, Homo sapiens
  siRNA target sequence for FLJ11171 (NM_018348.4,1642-1660).
gcagaggaacaaatatttt

SEQ ID NO: 370612 - DNA, 19 bp, Homo sapiens
  siRNA target sequence for FLJ11171 (NM_018348.4,1712-1730).
gtagccaaaggatacttta

SEQ ID NO: 370613 - DNA, 19 bp, Homo sapiens
  siRNA target sequence for FLJ11171 (NM_018348.4,1715-1733).
gccaaaggatactttaata

SEQ ID NO: 370614 - DNA, 19 bp, Homo sapiens
  siRNA target sequence for FLJ11171 (NM_018348.4,1717-1735).
caaaggatactttaatagt

SEQ ID NO: 370615 - DNA, 19 bp, Homo sapiens
  siRNA target sequence for FLJ11171 (NM_018348.4,1760-1778).
catcctgggcagagttcta

SEQ ID NO: 370616 - DNA, 19 bp, Homo sapiens
  siRNA target sequence for FLJ11171 (NM_018348.4,1798-1816).
caatcttgagtgtcactta

SEQ ID NO: 370617 - DNA, 19 bp, Homo sapiens
  siRNA target sequence for FLJ11171 (NM_018348.4,1809-1827).
gtcacttatggcatatttt

SEQ ID NO: 370618 - DNA, 19 bp, Homo sapiens
  siRNA target sequence for FLJ11171 (NM_018348.4,1914-1932).
cattaggaggagcttttaa

SEQ ID NO: 370619 - DNA, 19 bp, Homo sapiens
  siRNA target sequence for FLJ11171 (NM_018348.4,1951-1969).
gccaaaacagcagtattct

SEQ ID NO: 370620 - DNA, 19 bp, Homo sapiens
  siRNA target sequence for FLJ11171 (NM_018348.4,2054-2072).
gtacccagcaatcaaataa

SEQ ID NO: 370621 - DNA, 19 bp, Homo sapiens
  siRNA target sequence for FLJ11171 (NM_018348.4,2057-2075).
cccagcaatcaaataaagt

SEQ ID NO: 370622 - DNA, 19 bp, Homo sapiens
  siRNA target sequence for FLJ11171 (NM_018348.4,2078-2096).
ctgctggtgggcttttcga

SEQ ID NO: 370623 - DNA, 19 bp, Homo sapiens
  siRNA target sequence for FLJ11171 (NM_018348.4,2094-2112).
cgactctccgtaatatcaa

SEQ ID NO: 370624 - DNA, 19 bp, Homo sapiens
  siRNA target sequence for FLJ11171 (NM_018348.4,2095-2113).
gactctccgtaatatcaaa

SEQ ID NO: 370625 - DNA, 19 bp, Homo sapiens
  siRNA target sequence for FLJ11171 (NM_018348.4,2097-2115).
ctctccgtaatatcaaaat

SEQ ID NO: 370626 - DNA, 19 bp, Homo sapiens
  siRNA target sequence for FLJ11171 (NM_018348.4,2129-2147).
gaagttcgactcctagaat

SEQ ID NO: 370627 - DNA, 19 bp, Homo sapiens
  siRNA target sequence for FLJ11171 (NM_018348.4,2148-2166).
cagctgaactcacaacttt

SEQ ID NO: 370628 - DNA, 19 bp, Homo sapiens
  siRNA target sequence for FLJ11171 (NM_018348.4,2150-2168).
gctgaactcacaactttta

SEQ ID NO: 370629 - DNA, 19 bp, Homo sapiens
  siRNA target sequence for FLJ11171 (NM_018348.4,2153-2171).
gaactcacaacttttagct

SEQ ID NO: 370630 - DNA, 19 bp, Homo sapiens
  siRNA target sequence for FLJ11171 (NM_018348.4,2195-2213).
ccaacttaccagcgtttat

SEQ ID NO: 370631 - DNA, 19 bp, Homo sapiens
  siRNA target sequence for FLJ11171 (NM_018348.4,2245-2263).
gcttcatacaggagatgtt

SEQ ID NO: 370632 - DNA, 19 bp, Homo sapiens
  siRNA target sequence for FLJ11171 (NM_018348.4,2249-2267).
catacaggagatgttatga

SEQ ID NO: 370633 - DNA, 19 bp, Homo sapiens
  siRNA target sequence for FLJ11171 (NM_018348.4,2283-2301).
cttgcttcacaagatttat

SEQ ID NO: 370634 - DNA, 19 bp, Homo sapiens
  siRNA target sequence for FLJ11171 (NM_018348.4,2318-2336).
gtactccacagttgtttta

SEQ ID NO: 370635 - DNA, 19 bp, Homo sapiens
  siRNA target sequence for FLJ11171 (NM_018348.4,2321-2339).
ctccacagttgttttagat

SEQ ID NO: 370636 - DNA, 19 bp, Homo sapiens
  siRNA target sequence for FLJ11171 (NM_018348.4,2385-2403).
gcgcagtcctgctatgtgt

SEQ ID NO: 370637 - DNA, 19 bp, Homo sapiens
  siRNA target sequence for FLJ11171 (NM_018348.4,2392-2410).
cctgctatgtgttggttat

SEQ ID NO: 370638 - DNA, 19 bp, Homo sapiens
  siRNA target sequence for FLJ11171 (NM_018348.4,2489-2507).
ccccagcaggttttacagt

SEQ ID NO: 370639 - DNA, 19 bp, Homo sapiens
  siRNA target sequence for FLJ11171 (NM_018348.4,2514-2532).
caatggaggtactccttaa

SEQ ID NO: 370640 - DNA, 19 bp, Homo sapiens
  siRNA target sequence for FLJ11171 (NM_018348.4,2537-2555).
gccctgcttgattttttgt

SEQ ID NO: 370641 - DNA, 19 bp, Homo sapiens
  siRNA target sequence for FLJ11184 (NM_018352.1,158-176).
gtcatccatccatatagta

SEQ ID NO: 370642 - DNA, 19 bp, Homo sapiens
  siRNA target sequence for FLJ11184 (NM_018352.1,160-178).
catccatccatatagtaga

SEQ ID NO: 370643 - DNA, 19 bp, Homo sapiens
  siRNA target sequence for FLJ11184 (NM_018352.1,332-350).
gcttgtgaactaattgaaa

SEQ ID NO: 370644 - DNA, 19 bp, Homo sapiens
  siRNA target sequence for FLJ11184 (NM_018352.1,347-365).
gaaaggtacttaaatcgat

SEQ ID NO: 370645 - DNA, 19 bp, Homo sapiens
  siRNA target sequence for FLJ11184 (NM_018352.1,435-453).
cccgggagaccgtcatcaa

SEQ ID NO: 370646 - DNA, 19 bp, Homo sapiens
  siRNA target sequence for FLJ11184 (NM_018352.1,487-505).
gggatatggccttgagatt

SEQ ID NO: 370647 - DNA, 19 bp, Homo sapiens
  siRNA target sequence for FLJ11184 (NM_018352.1,502-520).
gattccagacattctaaat

SEQ ID NO: 370648 - DNA, 19 bp, Homo sapiens
  siRNA target sequence for FLJ11184 (NM_018352.1,543-561).
gggaatgggactttgatct

SEQ ID NO: 370649 - DNA, 19 bp, Homo sapiens
  siRNA target sequence for FLJ11184 (NM_018352.1,588-606).
gaaaaatttgcgctaatga

SEQ ID NO: 370650 - DNA, 19 bp, Homo sapiens
  siRNA target sequence for FLJ11184 (NM_018352.1,663-681).
gggaattggaactaaacga

SEQ ID NO: 370651 - DNA, 19 bp, Homo sapiens
  siRNA target sequence for FLJ11184 (NM_018352.1,664-682).
ggaattggaactaaacgat

SEQ ID NO: 370652 - DNA, 19 bp, Homo sapiens
  siRNA target sequence for FLJ11184 (NM_018352.1,679-697).
cgatgaatcaagtgattca

SEQ ID NO: 370653 - DNA, 19 bp, Homo sapiens
  siRNA target sequence for FLJ11193 (NM_018356.1,192-210).
ggaggttctaccctttata

SEQ ID NO: 370654 - DNA, 19 bp, Homo sapiens
  siRNA target sequence for FLJ11193 (NM_018356.1,193-211).
gaggttctaccctttatat

SEQ ID NO: 370655 - DNA, 19 bp, Homo sapiens
  siRNA target sequence for FLJ11193 (NM_018356.1,231-249).
gcatcttcctgccagtaat

SEQ ID NO: 370656 - DNA, 19 bp, Homo sapiens
  siRNA target sequence for FLJ11193 (NM_018356.1,238-256).
cctgccagtaatgtaagtt

SEQ ID NO: 370657 - DNA, 19 bp, Homo sapiens
  siRNA target sequence for FLJ11193 (NM_018356.1,307-325).
gcagacaccgtgtttgata

SEQ ID NO: 370658 - DNA, 19 bp, Homo sapiens
  siRNA target sequence for FLJ11193 (NM_018356.1,308-326).
cagacaccgtgtttgataa

SEQ ID NO: 370659 - DNA, 19 bp, Homo sapiens
  siRNA target sequence for FLJ11193 (NM_018356.1,312-330).
caccgtgtttgataaggaa

SEQ ID NO: 370660 - DNA, 19 bp, Homo sapiens
  siRNA target sequence for FLJ11193 (NM_018356.1,362-380).
ggattatgcctgcagttta

SEQ ID NO: 370661 - DNA, 19 bp, Homo sapiens
  siRNA target sequence for FLJ11193 (NM_018356.1,363-381).
gattatgcctgcagtttat

SEQ ID NO: 370662 - DNA, 19 bp, Homo sapiens
  siRNA target sequence for FLJ11193 (NM_018356.1,376-394).
gtttatgctggccattttt

SEQ ID NO: 370663 - DNA, 19 bp, Homo sapiens
  siRNA target sequence for FLJ11193 (NM_018356.1,439-457).
gagggcagacaccactttt

SEQ ID NO: 370664 - DNA, 19 bp, Homo sapiens
  siRNA target sequence for FLJ11193 (NM_018356.1,443-461).
gcagacaccactttttagt

SEQ ID NO: 370665 - DNA, 19 bp, Homo sapiens
  siRNA target sequence for FLJ11193 (NM_018356.1,444-462).
cagacaccactttttagta

SEQ ID NO: 370666 - DNA, 19 bp, Homo sapiens
  siRNA target sequence for FLJ11193 (NM_018356.1,460-478).
gtaggcaaagacacttcta

SEQ ID NO: 370667 - DNA, 19 bp, Homo sapiens
  siRNA target sequence for FLJ11193 (NM_018356.1,489-507).
cagggttacaagtacagat

SEQ ID NO: 370668 - DNA, 19 bp, Homo sapiens
  siRNA target sequence for FLJ11193 (NM_018356.1,516-534).
cctaagtgatggtctgtat

SEQ ID NO: 370669 - DNA, 19 bp, Homo sapiens
  siRNA target sequence for FLJ11193 (NM_018356.1,550-568).
ctagagaaccaaaaacctt

SEQ ID NO: 370670 - DNA, 19 bp, Homo sapiens
  siRNA target sequence for FLJ11193 (NM_018356.1,759-777).
cctagaaccatcatgttca

SEQ ID NO: 370671 - DNA, 19 bp, Homo sapiens
  siRNA target sequence for FLJ11193 (NM_018356.1,921-939).
ggaagagtacaaaatctta

SEQ ID NO: 370672 - DNA, 19 bp, Homo sapiens
  siRNA target sequence for FLJ11193 (NM_018356.1,940-958).
caagagctgtaccaattta

SEQ ID NO: 370673 - DNA, 19 bp, Homo sapiens
  siRNA target sequence for FLJ11193 (NM_018356.1,943-961).
gagctgtaccaatttaaga

SEQ ID NO: 370674 - DNA, 19 bp, Homo sapiens
  siRNA target sequence for FLJ11193 (NM_018356.1,945-963).
gctgtaccaatttaagaaa

SEQ ID NO: 370675 - DNA, 19 bp, Homo sapiens
  siRNA target sequence for FLJ11193 (NM_018356.1,1006-1024).
gatactcgaattcatcaat

SEQ ID NO: 370676 - DNA, 19 bp, Homo sapiens
  siRNA target sequence for FLJ11193 (NM_018356.1,1010-1028).
ctcgaattcatcaattaga

SEQ ID NO: 370677 - DNA, 19 bp, Homo sapiens
  siRNA target sequence for FLJ11193 (NM_018356.1,1041-1059).
cactttcgctgatttgtgt

SEQ ID NO: 370678 - DNA, 19 bp, Homo sapiens
  siRNA target sequence for FLJ11193 (NM_018356.1,1115-1133).
cactagttccccttgtaca

SEQ ID NO: 370679 - DNA, 19 bp, Homo sapiens
  siRNA target sequence for FLJ11193 (NM_018356.1,1123-1141).
ccccttgtacagagtttga

SEQ ID NO: 370680 - DNA, 19 bp, Homo sapiens
  siRNA target sequence for FLJ11193 (NM_018356.1,1152-1170).
ggaagtaccagactatgaa

SEQ ID NO: 370681 - DNA, 19 bp, Homo sapiens
  siRNA target sequence for FLJ11193 (NM_018356.1,1177-1195).
caccaggctggtttaacct

SEQ ID NO: 370682 - DNA, 19 bp, Homo sapiens
  siRNA target sequence for FLJ11193 (NM_018356.1,1186-1204).
ggtttaacctgcgattatt

SEQ ID NO: 370683 - DNA, 19 bp, Homo sapiens
  siRNA target sequence for FLJ11193 (NM_018356.1,1205-1223).
cagaacttcctcaccatat

SEQ ID NO: 370684 - DNA, 19 bp, Homo sapiens
  siRNA target sequence for FLJ11193 (NM_018356.1,1313-1331).
ggtcaagtctggatgatta

SEQ ID NO: 370685 - DNA, 19 bp, Homo sapiens
  siRNA target sequence for FLJ11193 (NM_018356.1,1344-1362).
ccaagttgacactattcaa

SEQ ID NO: 370686 - DNA, 19 bp, Homo sapiens
  siRNA target sequence for FLJ11193 (NM_018356.1,1360-1378).
caagaaaaggtcctcaata

SEQ ID NO: 370687 - DNA, 19 bp, Homo sapiens
  siRNA target sequence for FLJ11193 (NM_018356.1,1381-1399).
ctacgtgccctctatggaa

SEQ ID NO: 370688 - DNA, 19 bp, Homo sapiens
  siRNA target sequence for FLJ11193 (NM_018356.1,1388-1406).
ccctctatggaaatctaga

SEQ ID NO: 370689 - DNA, 19 bp, Homo sapiens
  siRNA target sequence for FLJ11200 (NM_018359.1,112-130).
gctagctactcctaatgaa

SEQ ID NO: 370690 - DNA, 19 bp, Homo sapiens
  siRNA target sequence for FLJ11200 (NM_018359.1,113-131).
ctagctactcctaatgaaa

SEQ ID NO: 370691 - DNA, 19 bp, Homo sapiens
  siRNA target sequence for FLJ11200 (NM_018359.1,116-134).
gctactcctaatgaaattt

SEQ ID NO: 370692 - DNA, 19 bp, Homo sapiens
  siRNA target sequence for FLJ11200 (NM_018359.1,174-192).
caactaagctgtcttcaaa

SEQ ID NO: 370693 - DNA, 19 bp, Homo sapiens
  siRNA target sequence for FLJ11200 (NM_018359.1,186-204).
cttcaaacgcccttgtgtt

SEQ ID NO: 370694 - DNA, 19 bp, Homo sapiens
  siRNA target sequence for FLJ11200 (NM_018359.1,193-211).
cgcccttgtgttcagaatt

SEQ ID NO: 370695 - DNA, 19 bp, Homo sapiens
  siRNA target sequence for FLJ11200 (NM_018359.1,275-293).
gatgcttctgcttgtaaga

SEQ ID NO: 370696 - DNA, 19 bp, Homo sapiens
  siRNA target sequence for FLJ11200 (NM_018359.1,278-296).
gcttctgcttgtaagaaca

SEQ ID NO: 370697 - DNA, 19 bp, Homo sapiens
  siRNA target sequence for FLJ11200 (NM_018359.1,279-297).
cttctgcttgtaagaacat

SEQ ID NO: 370698 - DNA, 19 bp, Homo sapiens
  siRNA target sequence for FLJ11200 (NM_018359.1,282-300).
ctgcttgtaagaacatact

SEQ ID NO: 370699 - DNA, 19 bp, Homo sapiens
  siRNA target sequence for FLJ11200 (NM_018359.1,432-450).
ctgtaacgcccatcattga

SEQ ID NO: 370700 - DNA, 19 bp, Homo sapiens
  siRNA target sequence for FLJ11200 (NM_018359.1,434-452).
gtaacgcccatcattgaaa

SEQ ID NO: 370701 - DNA, 19 bp, Homo sapiens
  siRNA target sequence for FLJ11200 (NM_018359.1,459-477).
gcggaggacaccattatgt

SEQ ID NO: 370702 - DNA, 19 bp, Homo sapiens
  siRNA target sequence for FLJ11200 (NM_018359.1,460-478).
cggaggacaccattatgtt

SEQ ID NO: 370703 - DNA, 19 bp, Homo sapiens
  siRNA target sequence for FLJ11200 (NM_018359.1,461-479).
ggaggacaccattatgtta

SEQ ID NO: 370704 - DNA, 19 bp, Homo sapiens
  siRNA target sequence for FLJ11200 (NM_018359.1,467-485).
caccattatgttaatatga

SEQ ID NO: 370705 - DNA, 19 bp, Homo sapiens
  siRNA target sequence for FLJ11200 (NM_018359.1,491-509).
cctgtcgatgcagttatat

SEQ ID NO: 370706 - DNA, 19 bp, Homo sapiens
  siRNA target sequence for FLJ11200 (NM_018359.1,528-546).
catggggaaaagttcgtaa

SEQ ID NO: 370707 - DNA, 19 bp, Homo sapiens
  siRNA target sequence for FLJ11200 (NM_018359.1,531-549).
ggggaaaagttcgtaaact

SEQ ID NO: 370708 - DNA, 19 bp, Homo sapiens
  siRNA target sequence for FLJ11200 (NM_018359.1,550-568).
cctggttgatgcaattcat

SEQ ID NO: 370709 - DNA, 19 bp, Homo sapiens
  siRNA target sequence for FLJ11200 (NM_018359.1,553-571).
ggttgatgcaattcataat

SEQ ID NO: 370710 - DNA, 19 bp, Homo sapiens
  siRNA target sequence for FLJ11200 (NM_018359.1,632-650).
cctgaaccactgcactttt

SEQ ID NO: 370711 - DNA, 19 bp, Homo sapiens
  siRNA target sequence for FLJ11200 (NM_018359.1,674-692).
gtaacaatttcatatcctt

SEQ ID NO: 370712 - DNA, 19 bp, Homo sapiens
  siRNA target sequence for FLJ11200 (NM_018359.1,756-774).
ctcacgacagaccctattt

SEQ ID NO: 370713 - DNA, 19 bp, Homo sapiens
  siRNA target sequence for FLJ11200 (NM_018359.1,758-776).
cacgacagaccctatttca

SEQ ID NO: 370714 - DNA, 19 bp, Homo sapiens
  siRNA target sequence for FLJ11200 (NM_018359.1,760-778).
cgacagaccctatttcaaa

SEQ ID NO: 370715 - DNA, 19 bp, Homo sapiens
  siRNA target sequence for FLJ11200 (NM_018359.1,775-793).
caaaaggtctaatgcttat

SEQ ID NO: 370716 - DNA, 19 bp, Homo sapiens
  siRNA target sequence for FLJ11200 (NM_018359.1,862-880).
catggagactggtatgatt

SEQ ID NO: 370717 - DNA, 19 bp, Homo sapiens
  siRNA target sequence for FLJ11200 (NM_018359.1,865-883).
ggagactggtatgatttat

SEQ ID NO: 370718 - DNA, 19 bp, Homo sapiens
  siRNA target sequence for FLJ11200 (NM_018359.1,892-910).
gggcatatatggctatcat

SEQ ID NO: 370719 - DNA, 19 bp, Homo sapiens
  siRNA target sequence for FLJ11200 (NM_018359.1,903-921).
gctatcatcattatatgca

SEQ ID NO: 370720 - DNA, 19 bp, Homo sapiens
  siRNA target sequence for FLJ11200 (NM_018359.1,922-940).
ggatcgcatagatgacaat

SEQ ID NO: 370721 - DNA, 19 bp, Homo sapiens
  siRNA target sequence for FLJ11200 (NM_018359.1,943-961).
ctggggctgtgcttatcga

SEQ ID NO: 370722 - DNA, 19 bp, Homo sapiens
  siRNA target sequence for FLJ11200 (NM_018359.1,1081-1099).
cggatcgcggcaatggatt

SEQ ID NO: 370723 - DNA, 19 bp, Homo sapiens
  siRNA target sequence for FLJ11200 (NM_018359.1,1089-1107).
ggcaatggattggatctat

SEQ ID NO: 370724 - DNA, 19 bp, Homo sapiens
  siRNA target sequence for FLJ11200 (NM_018359.1,1090-1108).
gcaatggattggatctatt

SEQ ID NO: 370725 - DNA, 19 bp, Homo sapiens
  siRNA target sequence for FLJ11200 (NM_018359.1,1115-1133).
cagctggtactaaaccaat

SEQ ID NO: 370726 - DNA, 19 bp, Homo sapiens
  siRNA target sequence for FLJ11200 (NM_018359.1,1130-1148).
caattgatcggtataacgt

SEQ ID NO: 370727 - DNA, 19 bp, Homo sapiens
  siRNA target sequence for FLJ11200 (NM_018359.1,1135-1153).
gatcggtataacgtcaaaa

SEQ ID NO: 370728 - DNA, 19 bp, Homo sapiens
  siRNA target sequence for FLJ11200 (NM_018359.1,1146-1164).
cgtcaaaaatcctgtttgt

SEQ ID NO: 370729 - DNA, 19 bp, Homo sapiens
  siRNA target sequence for FLJ11200 (NM_018359.1,1196-1214).
cgggaactggctaatcatt

SEQ ID NO: 370730 - DNA, 19 bp, Homo sapiens
  siRNA target sequence for FLJ11200 (NM_018359.1,1223-1241).
gaaggaactccagttatga

SEQ ID NO: 370731 - DNA, 19 bp, Homo sapiens
  siRNA target sequence for FLJ11200 (NM_018359.1,1251-1269).
gagttttggcccacacaat

SEQ ID NO: 370732 - DNA, 19 bp, Homo sapiens
  siRNA target sequence for FLJ11200 (NM_018359.1,1298-1316).
gggcagataaagtttctga

SEQ ID NO: 370733 - DNA, 19 bp, Homo sapiens
  siRNA target sequence for FLJ11200 (NM_018359.1,1299-1317).
ggcagataaagtttctgat

SEQ ID NO: 370734 - DNA, 19 bp, Homo sapiens
  siRNA target sequence for FLJ11200 (NM_018359.1,1340-1358).
gctgaagacctgcaagtta

SEQ ID NO: 370735 - DNA, 19 bp, Homo sapiens
  siRNA target sequence for FLJ11200 (NM_018359.1,1341-1359).
ctgaagacctgcaagttat

SEQ ID NO: 370736 - DNA, 19 bp, Homo sapiens
  siRNA target sequence for FLJ11200 (NM_018359.1,1401-1419).
ggaacaaggatgcatacta

SEQ ID NO: 370737 - DNA, 19 bp, Homo sapiens
  siRNA target sequence for FLJ11200 (NM_018359.1,1402-1420).
gaacaaggatgcatactat

SEQ ID NO: 370738 - DNA, 19 bp, Homo sapiens
  siRNA target sequence for FLJ11200 (NM_018359.1,1408-1426).
ggatgcatactataactta

SEQ ID NO: 370739 - DNA, 19 bp, Homo sapiens
  siRNA target sequence for FLJ11200 (NM_018359.1,1430-1448).
cttcctcagcgaccaaata

SEQ ID NO: 370740 - DNA, 19 bp, Homo sapiens
  siRNA target sequence for FLJ11200 (NM_018359.1,1433-1451).
cctcagcgaccaaatatga

SEQ ID NO: 370741 - DNA, 19 bp, Homo sapiens
  siRNA target sequence for FLJ11200 (NM_018359.1,1434-1452).
ctcagcgaccaaatatgat

SEQ ID NO: 370742 - DNA, 19 bp, Homo sapiens
  siRNA target sequence for FLJ11200 (NM_018359.1,1436-1454).
cagcgaccaaatatgattt

SEQ ID NO: 370743 - DNA, 19 bp, Homo sapiens
  siRNA target sequence for CXorf15 (NM_018360.1,263-281).
gtggtggcacaagtaacaa

SEQ ID NO: 370744 - DNA, 19 bp, Homo sapiens
  siRNA target sequence for CXorf15 (NM_018360.1,346-364).
gcatactgcacgcaagaat

SEQ ID NO: 370745 - DNA, 19 bp, Homo sapiens
  siRNA target sequence for CXorf15 (NM_018360.1,384-402).
gggagaagctcgaacagat

SEQ ID NO: 370746 - DNA, 19 bp, Homo sapiens
  siRNA target sequence for CXorf15 (NM_018360.1,563-581).
ggagtgttcagaagcaaat

SEQ ID NO: 370747 - DNA, 19 bp, Homo sapiens
  siRNA target sequence for CXorf15 (NM_018360.1,628-646).
cacttgcagagtgaacata

SEQ ID NO: 370748 - DNA, 19 bp, Homo sapiens
  siRNA target sequence for CXorf15 (NM_018360.1,661-679).
gcaagaagcaagctagaat

SEQ ID NO: 370749 - DNA, 19 bp, Homo sapiens
  siRNA target sequence for CXorf15 (NM_018360.1,691-709).
gaacttcagcgtcacaata

SEQ ID NO: 370750 - DNA, 19 bp, Homo sapiens
  siRNA target sequence for CXorf15 (NM_018360.1,694-712).
cttcagcgtcacaataaga

SEQ ID NO: 370751 - DNA, 19 bp, Homo sapiens
  siRNA target sequence for CXorf15 (NM_018360.1,700-718).
cgtcacaataagacgttaa

SEQ ID NO: 370752 - DNA, 19 bp, Homo sapiens
  siRNA target sequence for CXorf15 (NM_018360.1,747-765).
ggaagaagaacgacgtaaa

SEQ ID NO: 370753 - DNA, 19 bp, Homo sapiens
  siRNA target sequence for CXorf15 (NM_018360.1,1304-1322).
cagtccgtgataaagagta

SEQ ID NO: 370754 - DNA, 19 bp, Homo sapiens
  siRNA target sequence for CXorf15 (NM_018360.1,1318-1336).
gagtacaaggcccttcaaa

SEQ ID NO: 370755 - DNA, 19 bp, Homo sapiens
  siRNA target sequence for CXorf15 (NM_018360.1,1431-1449).
catcaaagcggccatcaaa

SEQ ID NO: 370756 - DNA, 19 bp, Homo sapiens
  siRNA target sequence for CXorf15 (NM_018360.1,1452-1470).
ggcgaacagggatttagca

SEQ ID NO: 370757 - DNA, 19 bp, Homo sapiens
  siRNA target sequence for CXorf15 (NM_018360.1,1453-1471).
gcgaacagggatttagcaa

SEQ ID NO: 370758 - DNA, 19 bp, Homo sapiens
  siRNA target sequence for CXorf15 (NM_018360.1,1507-1525).
cacaaggagctgaacactt

SEQ ID NO: 370759 - DNA, 19 bp, Homo sapiens
  siRNA target sequence for LIN7C (NM_018362.2,26-44).
gtgcggctggagagagata

SEQ ID NO: 370760 - DNA, 19 bp, Homo sapiens
  siRNA target sequence for LIN7C (NM_018362.2,118-136).
gcaaagagtccttcaaagt

SEQ ID NO: 370761 - DNA, 19 bp, Homo sapiens
  siRNA target sequence for LIN7C (NM_018362.2,123-141).
gagtccttcaaagtgaatt

SEQ ID NO: 370762 - DNA, 19 bp, Homo sapiens
  siRNA target sequence for LIN7C (NM_018362.2,125-143).
gtccttcaaagtgaattct

SEQ ID NO: 370763 - DNA, 19 bp, Homo sapiens
  siRNA target sequence for LIN7C (NM_018362.2,160-178).
ggtatatgaacatgtctat

SEQ ID NO: 370764 - DNA, 19 bp, Homo sapiens
  siRNA target sequence for LIN7C (NM_018362.2,232-250).
ggctactgttgctgcattt

SEQ ID NO: 370765 - DNA, 19 bp, Homo sapiens
  siRNA target sequence for LIN7C (NM_018362.2,270-288).
ctcatcctcgagttgttga

SEQ ID NO: 370766 - DNA, 19 bp, Homo sapiens
  siRNA target sequence for LIN7C (NM_018362.2,355-373).
ctatatatcccgaataatt

SEQ ID NO: 370767 - DNA, 19 bp, Homo sapiens
  siRNA target sequence for LIN7C (NM_018362.2,416-434).
gatcaactcctctctgtta

SEQ ID NO: 370768 - DNA, 19 bp, Homo sapiens
  siRNA target sequence for LIN7C (NM_018362.2,488-506).
gccgcacaaggaaaggtta

SEQ ID NO: 370769 - DNA, 19 bp, Homo sapiens
  siRNA target sequence for LIN7C (NM_018362.2,518-536).
cgatacacacccaaagtct

SEQ ID NO: 370770 - DNA, 19 bp, Homo sapiens
  siRNA target sequence for LIN7C (NM_018362.2,527-545).
cccaaagtcttagaagaaa

SEQ ID NO: 370771 - DNA, 19 bp, Homo sapiens
  siRNA target sequence for LIN7C (NM_018362.2,547-565).
ggagtcgcgctttgaaaaa

SEQ ID NO: 370772 - DNA, 19 bp, Homo sapiens
  siRNA target sequence for LIN7C (NM_018362.2,548-566).
gagtcgcgctttgaaaaaa

SEQ ID NO: 370773 - DNA, 19 bp, Homo sapiens
  siRNA target sequence for FLJ11218 (NM_018363.1,259-277).
ctcctcattatgccaaaaa

SEQ ID NO: 370774 - DNA, 19 bp, Homo sapiens
  siRNA target sequence for FLJ11218 (NM_018363.1,271-289).
ccaaaaaacaccaacgttt

SEQ ID NO: 370775 - DNA, 19 bp, Homo sapiens
  siRNA target sequence for FLJ11218 (NM_018363.1,325-343).
ctctaagctcgcctattga

SEQ ID NO: 370776 - DNA, 19 bp, Homo sapiens
  siRNA target sequence for FLJ11218 (NM_018363.1,331-349).
gctcgcctattgaaggaat

SEQ ID NO: 370777 - DNA, 19 bp, Homo sapiens
  siRNA target sequence for FLJ11218 (NM_018363.1,397-415).
cttcaattattaagcatta

SEQ ID NO: 370778 - DNA, 19 bp, Homo sapiens
  siRNA target sequence for FLJ11218 (NM_018363.1,427-445).
caggtgcagaagtctactt

SEQ ID NO: 370779 - DNA, 19 bp, Homo sapiens
  siRNA target sequence for FLJ11218 (NM_018363.1,456-474).
gtgacacagatcaacctaa

SEQ ID NO: 370780 - DNA, 19 bp, Homo sapiens
  siRNA target sequence for FLJ11218 (NM_018363.1,467-485).
caacctaagagatgacaaa

SEQ ID NO: 370781 - DNA, 19 bp, Homo sapiens
  siRNA target sequence for FLJ11218 (NM_018363.1,477-495).
gatgacaaatgggaagtat

SEQ ID NO: 370782 - DNA, 19 bp, Homo sapiens
  siRNA target sequence for FLJ11218 (NM_018363.1,518-536).
gcagtttgatcttattgtt

SEQ ID NO: 370783 - DNA, 19 bp, Homo sapiens
  siRNA target sequence for FLJ11218 (NM_018363.1,573-591).
ggtgacatcaccaccttaa

SEQ ID NO: 370784 - DNA, 19 bp, Homo sapiens
  siRNA target sequence for FLJ11218 (NM_018363.1,574-592).
gtgacatcaccaccttaat

SEQ ID NO: 370785 - DNA, 19 bp, Homo sapiens
  siRNA target sequence for FLJ11218 (NM_018363.1,576-594).
gacatcaccaccttaatta

SEQ ID NO: 370786 - DNA, 19 bp, Homo sapiens
  siRNA target sequence for FLJ11218 (NM_018363.1,578-596).
catcaccaccttaattagt

SEQ ID NO: 370787 - DNA, 19 bp, Homo sapiens
  siRNA target sequence for FLJ11218 (NM_018363.1,626-644).
gagctactcctctcgatat

SEQ ID NO: 370788 - DNA, 19 bp, Homo sapiens
  siRNA target sequence for FLJ11218 (NM_018363.1,667-685).
ctggtacgaagattgatgt

SEQ ID NO: 370789 - DNA, 19 bp, Homo sapiens
  siRNA target sequence for FLJ11218 (NM_018363.1,688-706).
cttgggctgggcagtacat

SEQ ID NO: 370790 - DNA, 19 bp, Homo sapiens
  siRNA target sequence for FLJ11218 (NM_018363.1,698-716).
gcagtacatcaccagtaat

SEQ ID NO: 370791 - DNA, 19 bp, Homo sapiens
  siRNA target sequence for FLJ11218 (NM_018363.1,726-744).
cgcttcgtctccattgata

SEQ ID NO: 370792 - DNA, 19 bp, Homo sapiens
  siRNA target sequence for FLJ11218 (NM_018363.1,727-745).
gcttcgtctccattgataa

SEQ ID NO: 370793 - DNA, 19 bp, Homo sapiens
  siRNA target sequence for FLJ11218 (NM_018363.1,728-746).
cttcgtctccattgataat

SEQ ID NO: 370794 - DNA, 19 bp, Homo sapiens
  siRNA target sequence for FLJ11218 (NM_018363.1,778-796).
ggccttccctcgtgattca

SEQ ID NO: 370795 - DNA, 19 bp, Homo sapiens
  siRNA target sequence for FLJ11218 (NM_018363.1,780-798).
ccttccctcgtgattcaca

SEQ ID NO: 370796 - DNA, 19 bp, Homo sapiens
  siRNA target sequence for FLJ11218 (NM_018363.1,804-822).
gtcccatttggagttacat

SEQ ID NO: 370797 - DNA, 19 bp, Homo sapiens
  siRNA target sequence for FLJ11218 (NM_018363.1,982-1000).
ggatgatggcgattggatt

SEQ ID NO: 370798 - DNA, 19 bp, Homo sapiens
  siRNA target sequence for FLJ11220 (NM_018364.2,145-163).
gcggtcgggccatttaaat

SEQ ID NO: 370799 - DNA, 19 bp, Homo sapiens
  siRNA target sequence for FLJ11220 (NM_018364.2,147-165).
ggtcgggccatttaaatgt

SEQ ID NO: 370800 - DNA, 19 bp, Homo sapiens
  siRNA target sequence for FLJ11220 (NM_018364.2,653-671).
cctgcggaaccgatctcaa

SEQ ID NO: 370801 - DNA, 19 bp, Homo sapiens
  siRNA target sequence for FLJ11220 (NM_018364.2,765-783).
ccagagagccgatgatttt

SEQ ID NO: 370802 - DNA, 19 bp, Homo sapiens
  siRNA target sequence for FLJ11220 (NM_018364.2,834-852).
gcgaggaagacgccttaaa

SEQ ID NO: 370803 - DNA, 19 bp, Homo sapiens
  siRNA target sequence for FLJ11220 (NM_018364.2,835-853).
cgaggaagacgccttaaaa

SEQ ID NO: 370804 - DNA, 19 bp, Homo sapiens
  siRNA target sequence for FLJ11220 (NM_018364.2,836-854).
gaggaagacgccttaaaat

SEQ ID NO: 370805 - DNA, 19 bp, Homo sapiens
  siRNA target sequence for FLJ11220 (NM_018364.2,838-856).
ggaagacgccttaaaatgt

SEQ ID NO: 370806 - DNA, 19 bp, Homo sapiens
  siRNA target sequence for FLJ11220 (NM_018364.2,842-860).
gacgccttaaaatgtacaa

SEQ ID NO: 370807 - DNA, 19 bp, Homo sapiens
  siRNA target sequence for FLJ11220 (NM_018364.2,855-873).
gtacaataaggaagtacaa

SEQ ID NO: 370808 - DNA, 19 bp, Homo sapiens
  siRNA target sequence for FLJ11220 (NM_018364.2,886-904).
ggcctgacccgcatcagta

SEQ ID NO: 370809 - DNA, 19 bp, Homo sapiens
  siRNA target sequence for FLJ11220 (NM_018364.2,887-905).
gcctgacccgcatcagtaa

SEQ ID NO: 370810 - DNA, 19 bp, Homo sapiens
  siRNA target sequence for FLJ11220 (NM_018364.2,888-906).
cctgacccgcatcagtaaa

SEQ ID NO: 370811 - DNA, 19 bp, Homo sapiens
  siRNA target sequence for FLJ11220 (NM_018364.2,891-909).
gacccgcatcagtaaagaa

SEQ ID NO: 370812 - DNA, 19 bp, Homo sapiens
  siRNA target sequence for FLJ11220 (NM_018364.2,893-911).
cccgcatcagtaaagaaat

SEQ ID NO: 370813 - DNA, 19 bp, Homo sapiens
  siRNA target sequence for FLJ11220 (NM_018364.2,935-953).
gcacttcaggacttaataa

SEQ ID NO: 370814 - DNA, 19 bp, Homo sapiens
  siRNA target sequence for FLJ11220 (NM_018364.2,938-956).
cttcaggacttaataagga

SEQ ID NO: 370815 - DNA, 19 bp, Homo sapiens
  siRNA target sequence for FLJ11220 (NM_018364.2,1020-1038).
ggtaccccagggagtacaa

SEQ ID NO: 370816 - DNA, 19 bp, Homo sapiens
  siRNA target sequence for FLJ11220 (NM_018364.2,1021-1039).
gtaccccagggagtacaaa

SEQ ID NO: 370817 - DNA, 19 bp, Homo sapiens
  siRNA target sequence for FLJ11220 (NM_018364.2,1029-1047).
gggagtacaaacacctttt

SEQ ID NO: 370818 - DNA, 19 bp, Homo sapiens
  siRNA target sequence for FLJ11220 (NM_018364.2,1030-1048).
ggagtacaaacacctttta

SEQ ID NO: 370819 - DNA, 19 bp, Homo sapiens
  siRNA target sequence for FLJ11220 (NM_018364.2,1031-1049).
gagtacaaacaccttttat

SEQ ID NO: 370820 - DNA, 19 bp, Homo sapiens
  siRNA target sequence for FLJ11220 (NM_018364.2,1057-1075).
caggaacattctattcgta

SEQ ID NO: 370821 - DNA, 19 bp, Homo sapiens
  siRNA target sequence for FLJ11220 (NM_018364.2,1063-1081).
cattctattcgtagaaatt

SEQ ID NO: 370822 - DNA, 19 bp, Homo sapiens
  siRNA target sequence for FLJ11220 (NM_018364.2,1215-1233).
ggagtttcttgctttgaca

SEQ ID NO: 370823 - DNA, 19 bp, Homo sapiens
  siRNA target sequence for FLJ11220 (NM_018364.2,1216-1234).
gagtttcttgctttgacat

SEQ ID NO: 370824 - DNA, 19 bp, Homo sapiens
  siRNA target sequence for FLJ11220 (NM_018364.2,1281-1299).
gcatggagcggctgcttat

SEQ ID NO: 370825 - DNA, 19 bp, Homo sapiens
  siRNA target sequence for FLJ11220 (NM_018364.2,1411-1429).
caggtcaacaggacatact

SEQ ID NO: 370826 - DNA, 19 bp, Homo sapiens
  siRNA target sequence for FLJ11220 (NM_018364.2,1473-1491).
cgttggagcagtagatgaa

SEQ ID NO: 370827 - DNA, 19 bp, Homo sapiens
  siRNA target sequence for FLJ11220 (NM_018364.2,1607-1625).
gtgatgatgggcctataat

SEQ ID NO: 370828 - DNA, 19 bp, Homo sapiens
  siRNA target sequence for FLJ11220 (NM_018364.2,1609-1627).
gatgatgggcctataatgt

SEQ ID NO: 370829 - DNA, 19 bp, Homo sapiens
  siRNA target sequence for FLJ11220 (NM_018364.2,1688-1706).
gacgacgatcaatgaatga

SEQ ID NO: 370830 - DNA, 19 bp, Homo sapiens
  siRNA target sequence for FLJ11220 (NM_018364.2,1690-1708).
cgacgatcaatgaatgaaa

SEQ ID NO: 370831 - DNA, 19 bp, Homo sapiens
  siRNA target sequence for FLJ11220 (NM_018364.2,1691-1709).
gacgatcaatgaatgaaat

SEQ ID NO: 370832 - DNA, 19 bp, Homo sapiens
  siRNA target sequence for FLJ11220 (NM_018364.2,1748-1766).
gcgaagttctctttgaaga

SEQ ID NO: 370833 - DNA, 19 bp, Homo sapiens
  siRNA target sequence for FLJ11220 (NM_018364.2,1792-1810).
gtcggtcaggggtttgact

SEQ ID NO: 370834 - DNA, 19 bp, Homo sapiens
  siRNA target sequence for FLJ11220 (NM_018364.2,1839-1857).
gaaagctgtacaatttggt

SEQ ID NO: 370835 - DNA, 19 bp, Homo sapiens
  siRNA target sequence for FLJ11220 (NM_018364.2,1867-1885).
gaccaacctcgcataacca

SEQ ID NO: 370836 - DNA, 19 bp, Homo sapiens
  siRNA target sequence for FLJ11220 (NM_018364.2,1869-1887).
ccaacctcgcataaccaaa

SEQ ID NO: 370837 - DNA, 19 bp, Homo sapiens
  siRNA target sequence for FLJ11220 (NM_018364.2,1980-1998).
gtgggtagatgaagctaaa

SEQ ID NO: 370838 - DNA, 19 bp, Homo sapiens
  siRNA target sequence for FLJ11220 (NM_018364.2,2021-2039).
gcattcgttatgctagaat

SEQ ID NO: 370839 - DNA, 19 bp, Homo sapiens
  siRNA target sequence for FLJ11220 (NM_018364.2,2022-2040).
cattcgttatgctagaatt

SEQ ID NO: 370840 - DNA, 19 bp, Homo sapiens
  siRNA target sequence for FLJ11220 (NM_018364.2,2041-2059).
cagctttgcgacaatgata

SEQ ID NO: 370841 - DNA, 19 bp, Homo sapiens
  siRNA target sequence for FLJ11220 (NM_018364.2,2044-2062).
ctttgcgacaatgatatct

SEQ ID NO: 370842 - DNA, 19 bp, Homo sapiens
  siRNA target sequence for FLJ11220 (NM_018364.2,2048-2066).
gcgacaatgatatctactt

SEQ ID NO: 370843 - DNA, 19 bp, Homo sapiens
  siRNA target sequence for FLJ11220 (NM_018364.2,2115-2133).
cagcttagcctggcatata

SEQ ID NO: 370844 - DNA, 19 bp, Homo sapiens
  siRNA target sequence for FLJ11220 (NM_018364.2,2124-2142).
ctggcatataaggcttaaa

SEQ ID NO: 370845 - DNA, 19 bp, Homo sapiens
  siRNA target sequence for FLJ11220 (NM_018364.2,2128-2146).
catataaggcttaaacagt

SEQ ID NO: 370846 - DNA, 19 bp, Homo sapiens
  siRNA target sequence for FLJ11220 (NM_018364.2,2155-2173).
gttgtggaagccactcaaa

SEQ ID NO: 370847 - DNA, 19 bp, Homo sapiens
  siRNA target sequence for FLJ11220 (NM_018364.2,2158-2176).
gtggaagccactcaaaaca

SEQ ID NO: 370848 - DNA, 19 bp, Homo sapiens
  siRNA target sequence for FLJ11220 (NM_018364.2,2193-2211).
catggactgtggtttaact

SEQ ID NO: 370849 - DNA, 19 bp, Homo sapiens
  siRNA target sequence for FLJ11220 (NM_018364.2,2237-2255).
cccaatgtgtgaggataaa

SEQ ID NO: 370850 - DNA, 19 bp, Homo sapiens
  siRNA target sequence for FLJ11220 (NM_018364.2,2317-2335).
ccacctgcatcagaactta

SEQ ID NO: 370851 - DNA, 19 bp, Homo sapiens
  siRNA target sequence for FLJ11220 (NM_018364.2,2321-2339).
ctgcatcagaacttaatct

SEQ ID NO: 370852 - DNA, 19 bp, Homo sapiens
  siRNA target sequence for FLJ11220 (NM_018364.2,2352-2370).
gaagactcagcctattcca

SEQ ID NO: 370853 - DNA, 19 bp, Homo sapiens
  siRNA target sequence for FLJ11220 (NM_018364.2,2397-2415).
ctctgaccagcaacacaat

SEQ ID NO: 370854 - DNA, 19 bp, Homo sapiens
  siRNA target sequence for FLJ11220 (NM_018364.2,2410-2428).
cacaatctgcaagaacatt

SEQ ID NO: 370855 - DNA, 19 bp, Homo sapiens
  siRNA target sequence for FLJ11220 (NM_018364.2,2412-2430).
caatctgcaagaacattca

SEQ ID NO: 370856 - DNA, 19 bp, Homo sapiens
  siRNA target sequence for MNS1 (NM_018365.1,194-212).
gtagtgaaaggcatcagaa

SEQ ID NO: 370857 - DNA, 19 bp, Homo sapiens
  siRNA target sequence for MNS1 (NM_018365.1,197-215).
gtgaaaggcatcagaaatt

SEQ ID NO: 370858 - DNA, 19 bp, Homo sapiens
  siRNA target sequence for MNS1 (NM_018365.1,204-222).
gcatcagaaattagtagat

SEQ ID NO: 370859 - DNA, 19 bp, Homo sapiens
  siRNA target sequence for MNS1 (NM_018365.1,228-246).
ctactgcaaaaaattacat

SEQ ID NO: 370860 - DNA, 19 bp, Homo sapiens
  siRNA target sequence for MNS1 (NM_018365.1,291-309).
ggtgcagaatgaaaatgat

SEQ ID NO: 370861 - DNA, 19 bp, Homo sapiens
  siRNA target sequence for MNS1 (NM_018365.1,313-331).
cgtgttcagcgcaagcaat

SEQ ID NO: 370862 - DNA, 19 bp, Homo sapiens
  siRNA target sequence for MNS1 (NM_018365.1,314-332).
gtgttcagcgcaagcaatt

SEQ ID NO: 370863 - DNA, 19 bp, Homo sapiens
  siRNA target sequence for MNS1 (NM_018365.1,352-370).
gaacaatttgagttggata

SEQ ID NO: 370864 - DNA, 19 bp, Homo sapiens
  siRNA target sequence for MNS1 (NM_018365.1,478-496).
ctaaaggacgaaaagatga

SEQ ID NO: 370865 - DNA, 19 bp, Homo sapiens
  siRNA target sequence for MNS1 (NM_018365.1,518-536).
gcattgagcttagagaatt

SEQ ID NO: 370866 - DNA, 19 bp, Homo sapiens
  siRNA target sequence for MNS1 (NM_018365.1,554-572).
cagcttacatgaataaaga

SEQ ID NO: 370867 - DNA, 19 bp, Homo sapiens
  siRNA target sequence for MNS1 (NM_018365.1,578-596).
cagctcagattgctgaaaa

SEQ ID NO: 370868 - DNA, 19 bp, Homo sapiens
  siRNA target sequence for MNS1 (NM_018365.1,621-639).
gaaacgtgatgctgaaata

SEQ ID NO: 370869 - DNA, 19 bp, Homo sapiens
  siRNA target sequence for MNS1 (NM_018365.1,713-731).
cgaaagcacagtactatct

SEQ ID NO: 370870 - DNA, 19 bp, Homo sapiens
  siRNA target sequence for MNS1 (NM_018365.1,714-732).
gaaagcacagtactatctt

SEQ ID NO: 370871 - DNA, 19 bp, Homo sapiens
  siRNA target sequence for MNS1 (NM_018365.1,827-845).
ggaagatctatgaagaaga

SEQ ID NO: 370872 - DNA, 19 bp, Homo sapiens
  siRNA target sequence for MNS1 (NM_018365.1,879-897).
gaatgcaatgcgaaggtat

SEQ ID NO: 370873 - DNA, 19 bp, Homo sapiens
  siRNA target sequence for MNS1 (NM_018365.1,884-902).
caatgcgaaggtatataga

SEQ ID NO: 370874 - DNA, 19 bp, Homo sapiens
  siRNA target sequence for MNS1 (NM_018365.1,893-911).
ggtatatagaagagtttca

SEQ ID NO: 370875 - DNA, 19 bp, Homo sapiens
  siRNA target sequence for MNS1 (NM_018365.1,1062-1080).
gaatgcgttgacacagaaa

SEQ ID NO: 370876 - DNA, 19 bp, Homo sapiens
  siRNA target sequence for MNS1 (NM_018365.1,1147-1165).
caagctgaaatatataaga

SEQ ID NO: 370877 - DNA, 19 bp, Homo sapiens
  siRNA target sequence for MNS1 (NM_018365.1,1320-1338).
ggatgatcgaatagaatta

SEQ ID NO: 370878 - DNA, 19 bp, Homo sapiens
  siRNA target sequence for MNS1 (NM_018365.1,1321-1339).
gatgatcgaatagaattaa

SEQ ID NO: 370879 - DNA, 19 bp, Homo sapiens
  siRNA target sequence for MNS1 (NM_018365.1,1345-1363).
gctcagaaacaaagaatga

SEQ ID NO: 370880 - DNA, 19 bp, Homo sapiens
  siRNA target sequence for MNS1 (NM_018365.1,1402-1420).
gaagagcgtcgccaacaat

SEQ ID NO: 370881 - DNA, 19 bp, Homo sapiens
  siRNA target sequence for MNS1 (NM_018365.1,1407-1425).
gcgtcgccaacaattcctt

SEQ ID NO: 370882 - DNA, 19 bp, Homo sapiens
  siRNA target sequence for MNS1 (NM_018365.1,1469-1487).
ggcggcaaggatttattaa

SEQ ID NO: 370883 - DNA, 19 bp, Homo sapiens
  siRNA target sequence for MNS1 (NM_018365.1,1470-1488).
gcggcaaggatttattaat

SEQ ID NO: 370884 - DNA, 19 bp, Homo sapiens
  siRNA target sequence for MNS1 (NM_018365.1,1473-1491).
gcaaggatttattaatgca

SEQ ID NO: 370885 - DNA, 19 bp, Homo sapiens
  siRNA target sequence for MNS1 (NM_018365.1,1474-1492).
caaggatttattaatgcaa

SEQ ID NO: 370886 - DNA, 19 bp, Homo sapiens
  siRNA target sequence for MNS1 (NM_018365.1,1478-1496).
gatttattaatgcaattat

SEQ ID NO: 370887 - DNA, 19 bp, Homo sapiens
  siRNA target sequence for MNS1 (NM_018365.1,1504-1522).
gaaaggctaaaacttctta

SEQ ID NO: 370888 - DNA, 19 bp, Homo sapiens
  siRNA target sequence for CNO (NM_018366.2,630-648).
gtgccctcgctctttagca

SEQ ID NO: 370889 - DNA, 19 bp, Homo sapiens
  siRNA target sequence for FLJ11259 (NM_018370.1,90-108).
gggcattgtcgccaatttt

SEQ ID NO: 370890 - DNA, 19 bp, Homo sapiens
  siRNA target sequence for FLJ11259 (NM_018370.1,92-110).
gcattgtcgccaattttca

SEQ ID NO: 370891 - DNA, 19 bp, Homo sapiens
  siRNA target sequence for FLJ11259 (NM_018370.1,305-323).
cactaatttccataaccaa

SEQ ID NO: 370892 - DNA, 19 bp, Homo sapiens
  siRNA target sequence for FLJ11259 (NM_018370.1,367-385).
gtgagtgcgatctgtgaat

SEQ ID NO: 370893 - DNA, 19 bp, Homo sapiens
  siRNA target sequence for FLJ11259 (NM_018370.1,451-469).
ctaaggatatccacagaaa

SEQ ID NO: 370894 - DNA, 19 bp, Homo sapiens
  siRNA target sequence for FLJ11259 (NM_018370.1,455-473).
ggatatccacagaaatcaa

SEQ ID NO: 370895 - DNA, 19 bp, Homo sapiens
  siRNA target sequence for FLJ11259 (NM_018370.1,456-474).
gatatccacagaaatcaat

SEQ ID NO: 370896 - DNA, 19 bp, Homo sapiens
  siRNA target sequence for FLJ11273 (NM_018374.2,380-398).
ggagtcacatctgaaaaca

SEQ ID NO: 370897 - DNA, 19 bp, Homo sapiens
  siRNA target sequence for FLJ11273 (NM_018374.2,556-574).
ggtggcattgattccatat

SEQ ID NO: 370898 - DNA, 19 bp, Homo sapiens
  siRNA target sequence for FLJ11273 (NM_018374.2,561-579).
cattgattccatatagtga

SEQ ID NO: 370899 - DNA, 19 bp, Homo sapiens
  siRNA target sequence for FLJ11273 (NM_018374.2,600-618).
gaacaaagctgtatgtgat

SEQ ID NO: 370900 - DNA, 19 bp, Homo sapiens
  siRNA target sequence for FLJ11273 (NM_018374.2,677-695).
cgctctatcgacgtgaaat

SEQ ID NO: 370901 - DNA, 19 bp, Homo sapiens
  siRNA target sequence for FLJ11273 (NM_018374.2,678-696).
gctctatcgacgtgaaata

SEQ ID NO: 370902 - DNA, 19 bp, Homo sapiens
  siRNA target sequence for FLJ11273 (NM_018374.2,691-709).
gaaatacattggtgtaaaa

SEQ ID NO: 370903 - DNA, 19 bp, Homo sapiens
  siRNA target sequence for FLJ11273 (NM_018374.2,711-729).
cagcctatgtcagttatga

SEQ ID NO: 370904 - DNA, 19 bp, Homo sapiens
  siRNA target sequence for FLJ11273 (NM_018374.2,731-749).
gttcagaagcgtacaattt

SEQ ID NO: 370905 - DNA, 19 bp, Homo sapiens
  siRNA target sequence for FLJ11273 (NM_018374.2,736-754).
gaagcgtacaatttattta

SEQ ID NO: 370906 - DNA, 19 bp, Homo sapiens
  siRNA target sequence for FLJ11273 (NM_018374.2,739-757).
gcgtacaatttatttaaat

SEQ ID NO: 370907 - DNA, 19 bp, Homo sapiens
  siRNA target sequence for FLJ11273 (NM_018374.2,851-869).
ggaaaggcacgcttaaaca

SEQ ID NO: 370908 - DNA, 19 bp, Homo sapiens
  siRNA target sequence for FLJ11273 (NM_018374.2,856-874).
ggcacgcttaaacaacata

SEQ ID NO: 370909 - DNA, 19 bp, Homo sapiens
  siRNA target sequence for FLJ11273 (NM_018374.2,857-875).
gcacgcttaaacaacataa

SEQ ID NO: 370910 - DNA, 19 bp, Homo sapiens
  siRNA target sequence for FLJ11273 (NM_018374.2,862-880).
cttaaacaacataaccatt

SEQ ID NO: 370911 - DNA, 19 bp, Homo sapiens
  siRNA target sequence for FLJ11273 (NM_018374.2,885-903).
gtccacttgatatgaaaca

SEQ ID NO: 370912 - DNA, 19 bp, Homo sapiens
  siRNA target sequence for FLJ11273 (NM_018374.2,898-916).
gaaacaaattgattacaca

SEQ ID NO: 370913 - DNA, 19 bp, Homo sapiens
  siRNA target sequence for FLJ11273 (NM_018374.2,913-931).
cacagtacctaccgttata

SEQ ID NO: 370914 - DNA, 19 bp, Homo sapiens
  siRNA target sequence for FLJ11273 (NM_018374.2,1053-1071).
cccaggagaggtatcagta

SEQ ID NO: 370915 - DNA, 19 bp, Homo sapiens
  siRNA target sequence for FLJ11273 (NM_018374.2,1054-1072).
ccaggagaggtatcagtat

SEQ ID NO: 370916 - DNA, 19 bp, Homo sapiens
  siRNA target sequence for FLJ11273 (NM_018374.2,1105-1123).
ggggcagtctgaatattta

SEQ ID NO: 370917 - DNA, 19 bp, Homo sapiens
  siRNA target sequence for NIPSNAP3B (NM_018376.2,222-240).
gcgttcatggaaaatctta

SEQ ID NO: 370918 - DNA, 19 bp, Homo sapiens
  siRNA target sequence for NIPSNAP3B (NM_018376.2,223-241).
cgttcatggaaaatcttaa

SEQ ID NO: 370919 - DNA, 19 bp, Homo sapiens
  siRNA target sequence for NIPSNAP3B (NM_018376.2,393-411).
gaatggcaagaacaatcta

SEQ ID NO: 370920 - DNA, 19 bp, Homo sapiens
  siRNA target sequence for NIPSNAP3B (NM_018376.2,506-524).
ctatgaactagctgttttt

SEQ ID NO: 370921 - DNA, 19 bp, Homo sapiens
  siRNA target sequence for NIPSNAP3B (NM_018376.2,615-633).
ggtgttttccacacagaat

SEQ ID NO: 370922 - DNA, 19 bp, Homo sapiens
  siRNA target sequence for FBXL8 (NM_018378.2,248-266).
ccgtgtggcacgacacaaa

SEQ ID NO: 370923 - DNA, 19 bp, Homo sapiens
  siRNA target sequence for FBXL8 (NM_018378.2,249-267).
cgtgtggcacgacacaaaa

SEQ ID NO: 370924 - DNA, 19 bp, Homo sapiens
  siRNA target sequence for FBXL8 (NM_018378.2,320-338).
gcctcgaccacattcacaa

SEQ ID NO: 370925 - DNA, 19 bp, Homo sapiens
  siRNA target sequence for FBXL8 (NM_018378.2,336-354).
caacctacggctggaattt

SEQ ID NO: 370926 - DNA, 19 bp, Homo sapiens
  siRNA target sequence for FBXL8 (NM_018378.2,606-624).
cgagctccacagccttttt

SEQ ID NO: 370927 - DNA, 19 bp, Homo sapiens
  siRNA target sequence for FBXL8 (NM_018378.2,1108-1126).
ctgcgcgaggtgcattgtt

SEQ ID NO: 370928 - DNA, 19 bp, Homo sapiens
  siRNA target sequence for FBXL8 (NM_018378.2,1111-1129).
cgcgaggtgcattgtttct

SEQ ID NO: 370929 - DNA, 19 bp, Homo sapiens
  siRNA target sequence for FLJ11280 (NM_018379.2,700-718).
cctgaagtagagacaataa

SEQ ID NO: 370930 - DNA, 19 bp, Homo sapiens
  siRNA target sequence for FLJ11280 (NM_018379.2,764-782).
gacagcctgagccagattt

SEQ ID NO: 370931 - DNA, 19 bp, Homo sapiens
  siRNA target sequence for FLJ11280 (NM_018379.2,814-832).
gaacagacacccatcatca

SEQ ID NO: 370932 - DNA, 19 bp, Homo sapiens
  siRNA target sequence for FLJ11280 (NM_018379.2,992-1010).
cagagggacttcagcttaa

SEQ ID NO: 370933 - DNA, 19 bp, Homo sapiens
  siRNA target sequence for FLJ11280 (NM_018379.2,1058-1076).
ccacaggtctggatgtcaa

SEQ ID NO: 370934 - DNA, 19 bp, Homo sapiens
  siRNA target sequence for FLJ11280 (NM_018379.2,1059-1077).
cacaggtctggatgtcaat

SEQ ID NO: 370935 - DNA, 19 bp, Homo sapiens
  siRNA target sequence for FLJ11280 (NM_018379.2,1088-1106).
caggcgtctctgattttga

SEQ ID NO: 370936 - DNA, 19 bp, Homo sapiens
  siRNA target sequence for FLJ11280 (NM_018379.2,1155-1173).
ccatggctggcttgttgat

SEQ ID NO: 370937 - DNA, 19 bp, Homo sapiens
  siRNA target sequence for FLJ11280 (NM_018379.2,1360-1378).
gctaaggagggtgaactta

SEQ ID NO: 370938 - DNA, 19 bp, Homo sapiens
  siRNA target sequence for FLJ11280 (NM_018379.2,1369-1387).
ggtgaacttagcgtctttt

SEQ ID NO: 370939 - DNA, 19 bp, Homo sapiens
  siRNA target sequence for FLJ11280 (NM_018379.2,1379-1397).
gcgtctttttccgaaacaa

SEQ ID NO: 370940 - DNA, 19 bp, Homo sapiens
  siRNA target sequence for DDX28 (NM_018380.2,1835-1853).
gctggtaggagccacattt

SEQ ID NO: 370941 - DNA, 19 bp, Homo sapiens
  siRNA target sequence for DDX28 (NM_018380.2,1863-1881).
gtaggccagttgctgaata

SEQ ID NO: 370942 - DNA, 19 bp, Homo sapiens
  siRNA target sequence for DDX28 (NM_018380.2,1933-1951).
gtatcatgcctcatgtgaa

SEQ ID NO: 370943 - DNA, 19 bp, Homo sapiens
  siRNA target sequence for DDX28 (NM_018380.2,2084-2102).
gaactggctgggatatatt

SEQ ID NO: 370944 - DNA, 19 bp, Homo sapiens
  siRNA target sequence for DDX28 (NM_018380.2,2105-2123).
ggatgaccacaaaatccaa

SEQ ID NO: 370945 - DNA, 19 bp, Homo sapiens
  siRNA target sequence for DDX28 (NM_018380.2,2189-2207).
gagctcccgagacatactt

SEQ ID NO: 370946 - DNA, 19 bp, Homo sapiens
  siRNA target sequence for DDX28 (NM_018380.2,2191-2209).
gctcccgagacatacttct

SEQ ID NO: 370947 - DNA, 19 bp, Homo sapiens
  siRNA target sequence for DDX28 (NM_018380.2,2278-2296).
ccccaacgctgcaagatta

SEQ ID NO: 370948 - DNA, 19 bp, Homo sapiens
  siRNA target sequence for DDX28 (NM_018380.2,2280-2298).
ccaacgctgcaagattaca

SEQ ID NO: 370949 - DNA, 19 bp, Homo sapiens
  siRNA target sequence for DDX28 (NM_018380.2,2281-2299).
caacgctgcaagattacat

SEQ ID NO: 370950 - DNA, 19 bp, Homo sapiens
  siRNA target sequence for DDX28 (NM_018380.2,2340-2358).
ccaggcaccgtcatcagtt

SEQ ID NO: 370951 - DNA, 19 bp, Homo sapiens
  siRNA target sequence for FLJ11286 (NM_018381.1,233-251).
cgtgtacggggtaaagcaa

SEQ ID NO: 370952 - DNA, 19 bp, Homo sapiens
  siRNA target sequence for FLJ11286 (NM_018381.1,234-252).
gtgtacggggtaaagcaaa

SEQ ID NO: 370953 - DNA, 19 bp, Homo sapiens
  siRNA target sequence for FLJ11286 (NM_018381.1,236-254).
gtacggggtaaagcaaaaa

SEQ ID NO: 370954 - DNA, 19 bp, Homo sapiens
  siRNA target sequence for FLJ11286 (NM_018381.1,239-257).
cggggtaaagcaaaaagat

SEQ ID NO: 370955 - DNA, 19 bp, Homo sapiens
  siRNA target sequence for FLJ11286 (NM_018381.1,255-273).
gatggccaagaactaagta

SEQ ID NO: 370956 - DNA, 19 bp, Homo sapiens
  siRNA target sequence for FLJ11286 (NM_018381.1,260-278).
ccaagaactaagtaacgat

SEQ ID NO: 370957 - DNA, 19 bp, Homo sapiens
  siRNA target sequence for FLJ11286 (NM_018381.1,288-306).
caggatccaccagaagata

SEQ ID NO: 370958 - DNA, 19 bp, Homo sapiens
  siRNA target sequence for FLJ11286 (NM_018381.1,291-309).
gatccaccagaagatatga

SEQ ID NO: 370959 - DNA, 19 bp, Homo sapiens
  siRNA target sequence for FLJ11286 (NM_018381.1,364-382).
ccaacctacgcatgtttca

SEQ ID NO: 370960 - DNA, 19 bp, Homo sapiens
  siRNA target sequence for FLJ11286 (NM_018381.1,365-383).
caacctacgcatgtttcaa

SEQ ID NO: 370961 - DNA, 19 bp, Homo sapiens
  siRNA target sequence for FLJ11286 (NM_018381.1,385-403).
gtgcccaggacgaccttat

SEQ ID NO: 370962 - DNA, 19 bp, Homo sapiens
  siRNA target sequence for FLJ11286 (NM_018381.1,562-580).
cgaagtgtcggcacaactt

SEQ ID NO: 370963 - DNA, 19 bp, Homo sapiens
  siRNA target sequence for FLJ11286 (NM_018381.1,813-831).
cccagcaaccctcacatta

SEQ ID NO: 370964 - DNA, 19 bp, Homo sapiens
  siRNA target sequence for FLJ11292 (NM_018382.1,154-172).
ggactctggcagcaaattt

SEQ ID NO: 370965 - DNA, 19 bp, Homo sapiens
  siRNA target sequence for FLJ11292 (NM_018382.1,162-180).
gcagcaaatttcaaactgt

SEQ ID NO: 370966 - DNA, 19 bp, Homo sapiens
  siRNA target sequence for FLJ11292 (NM_018382.1,163-181).
cagcaaatttcaaactgta

SEQ ID NO: 370967 - DNA, 19 bp, Homo sapiens
  siRNA target sequence for FLJ11292 (NM_018382.1,192-210).
ggccctttgcagtgatata

SEQ ID NO: 370968 - DNA, 19 bp, Homo sapiens
  siRNA target sequence for FLJ11292 (NM_018382.1,196-214).
ctttgcagtgatataaaat

SEQ ID NO: 370969 - DNA, 19 bp, Homo sapiens
  siRNA target sequence for IAN4L1 (NM_018384.2,311-329).
gattccagaggggcaaata

SEQ ID NO: 370970 - DNA, 19 bp, Homo sapiens
  siRNA target sequence for IAN4L1 (NM_018384.2,320-338).
ggggcaaatatggaactat

SEQ ID NO: 370971 - DNA, 19 bp, Homo sapiens
  siRNA target sequence for IAN4L1 (NM_018384.2,339-357).
ggctgaaggtagatcagaa

SEQ ID NO: 370972 - DNA, 19 bp, Homo sapiens
  siRNA target sequence for IAN4L1 (NM_018384.2,346-364).
ggtagatcagaagataact

SEQ ID NO: 370973 - DNA, 19 bp, Homo sapiens
  siRNA target sequence for IAN4L1 (NM_018384.2,347-365).
gtagatcagaagataactt

SEQ ID NO: 370974 - DNA, 19 bp, Homo sapiens
  siRNA target sequence for IAN4L1 (NM_018384.2,376-394).
ccaccggcattgaggatta

SEQ ID NO: 370975 - DNA, 19 bp, Homo sapiens
  siRNA target sequence for IAN4L1 (NM_018384.2,377-395).
caccggcattgaggattat

SEQ ID NO: 370976 - DNA, 19 bp, Homo sapiens
  siRNA target sequence for IAN4L1 (NM_018384.2,380-398).
cggcattgaggattatcct

SEQ ID NO: 370977 - DNA, 19 bp, Homo sapiens
  siRNA target sequence for IAN4L1 (NM_018384.2,495-513).
gacgtgccaggtgaaaaca

SEQ ID NO: 370978 - DNA, 19 bp, Homo sapiens
  siRNA target sequence for IAN4L1 (NM_018384.2,583-601).
caagagctgtacaagaaca

SEQ ID NO: 370979 - DNA, 19 bp, Homo sapiens
  siRNA target sequence for FLJ11301 (NM_018385.1,269-287).
gcctgctgaggctagaact

SEQ ID NO: 370980 - DNA, 19 bp, Homo sapiens
  siRNA target sequence for FLJ11301 (NM_018385.1,283-301).
gaactggactactgtcttt

SEQ ID NO: 370981 - DNA, 19 bp, Homo sapiens
  siRNA target sequence for FLJ11301 (NM_018385.1,341-359).
caaacagttcttgtgtata

SEQ ID NO: 370982 - DNA, 19 bp, Homo sapiens
  siRNA target sequence for FLJ11301 (NM_018385.1,388-406).
ctaccccagaagaactcaa

SEQ ID NO: 370983 - DNA, 19 bp, Homo sapiens
  siRNA target sequence for FLJ11301 (NM_018385.1,462-480).
gaggaacagaagctgatat

SEQ ID NO: 370984 - DNA, 19 bp, Homo sapiens
  siRNA target sequence for FLJ11301 (NM_018385.1,492-510).
gaacgaaatttggactttt

SEQ ID NO: 370985 - DNA, 19 bp, Homo sapiens
  siRNA target sequence for FLJ11301 (NM_018385.1,602-620).
ggaatgttatgtgaaagaa

SEQ ID NO: 370986 - DNA, 19 bp, Homo sapiens
  siRNA target sequence for FLJ11301 (NM_018385.1,835-853).
gtttcgaccaggctgaaat

SEQ ID NO: 370987 - DNA, 19 bp, Homo sapiens
  siRNA target sequence for FLJ11301 (NM_018385.1,887-905).
ggattctccttcacttagt

SEQ ID NO: 370988 - DNA, 19 bp, Homo sapiens
  siRNA target sequence for FLJ11301 (NM_018385.1,1122-1140).
gagttactggagctcttta

SEQ ID NO: 370989 - DNA, 19 bp, Homo sapiens
  siRNA target sequence for FLJ11301 (NM_018385.1,1164-1182).
gtgaaagatgggcaactta

SEQ ID NO: 370990 - DNA, 19 bp, Homo sapiens
  siRNA target sequence for FLJ11301 (NM_018385.1,1198-1216).
gctaccctaatgttggtaa

SEQ ID NO: 370991 - DNA, 19 bp, Homo sapiens
  siRNA target sequence for FLJ11301 (NM_018385.1,1213-1231).
gtaagagttcaacaatcaa

SEQ ID NO: 370992 - DNA, 19 bp, Homo sapiens
  siRNA target sequence for FLJ11301 (NM_018385.1,1241-1259).
gggcaacaagaaagtatct

SEQ ID NO: 370993 - DNA, 19 bp, Homo sapiens
  siRNA target sequence for FLJ11301 (NM_018385.1,1243-1261).
gcaacaagaaagtatctgt

SEQ ID NO: 370994 - DNA, 19 bp, Homo sapiens
  siRNA target sequence for FLJ11301 (NM_018385.1,1387-1405).
gcggaatcctcccaattga

SEQ ID NO: 370995 - DNA, 19 bp, Homo sapiens
  siRNA target sequence for FLJ11301 (NM_018385.1,1388-1406).
cggaatcctcccaattgat

SEQ ID NO: 370996 - DNA, 19 bp, Homo sapiens
  siRNA target sequence for FLJ11301 (NM_018385.1,1390-1408).
gaatcctcccaattgatca

SEQ ID NO: 370997 - DNA, 19 bp, Homo sapiens
  siRNA target sequence for FLJ11301 (NM_018385.1,1425-1443).
cctcctgtatcactagttt

SEQ ID NO: 370998 - DNA, 19 bp, Homo sapiens
  siRNA target sequence for FLJ11301 (NM_018385.1,1435-1453).
cactagtttgccagaatat

SEQ ID NO: 370999 - DNA, 19 bp, Homo sapiens
  siRNA target sequence for FLJ11301 (NM_018385.1,1473-1491).
gctacctatggcattaaca

SEQ ID NO: 371000 - DNA, 19 bp, Homo sapiens
  siRNA target sequence for FLJ11301 (NM_018385.1,1561-1579).
gatacatgcgaggattcat

SEQ ID NO: 371001 - DNA, 19 bp, Homo sapiens
  siRNA target sequence for FLJ11301 (NM_018385.1,1709-1727).
gcgactcctagagaacaaa

SEQ ID NO: 371002 - DNA, 19 bp, Homo sapiens
  siRNA target sequence for FLJ11301 (NM_018385.1,1785-1803).
gaaaatatcgttgacaaaa

SEQ ID NO: 371003 - DNA, 19 bp, Homo sapiens
  siRNA target sequence for FLJ11305 (NM_018386.1,40-58).
cgcacattaccattaacca

SEQ ID NO: 371004 - DNA, 19 bp, Homo sapiens
  siRNA target sequence for FLJ11305 (NM_018386.1,109-127).
gtgcagagttggtgtcttt

SEQ ID NO: 371005 - DNA, 19 bp, Homo sapiens
  siRNA target sequence for FLJ11305 (NM_018386.1,144-162).
gcaaacccacgacttcaaa

SEQ ID NO: 371006 - DNA, 19 bp, Homo sapiens
  siRNA target sequence for FLJ11305 (NM_018386.1,145-163).
caaacccacgacttcaaat

SEQ ID NO: 371007 - DNA, 19 bp, Homo sapiens
  siRNA target sequence for FLJ11305 (NM_018386.1,194-212).
cttggaacccccttatgat

SEQ ID NO: 371008 - DNA, 19 bp, Homo sapiens
  siRNA target sequence for FLJ11305 (NM_018386.1,197-215).
ggaacccccttatgatgaa

SEQ ID NO: 371009 - DNA, 19 bp, Homo sapiens
  siRNA target sequence for FLJ11305 (NM_018386.1,198-216).
gaacccccttatgatgaaa

SEQ ID NO: 371010 - DNA, 19 bp, Homo sapiens
  siRNA target sequence for FLJ11305 (NM_018386.1,287-305).
gaccgtgatagtccaatat

SEQ ID NO: 371011 - DNA, 19 bp, Homo sapiens
  siRNA target sequence for FLJ11305 (NM_018386.1,290-308).
cgtgatagtccaatatcct

SEQ ID NO: 371012 - DNA, 19 bp, Homo sapiens
  siRNA target sequence for FLJ11305 (NM_018386.1,291-309).
gtgatagtccaatatcctt

SEQ ID NO: 371013 - DNA, 19 bp, Homo sapiens
  siRNA target sequence for FLJ11305 (NM_018386.1,321-339).
gcagctgtcccgcatagaa

SEQ ID NO: 371014 - DNA, 19 bp, Homo sapiens
  siRNA target sequence for FLJ11305 (NM_018386.1,437-455).
gctcgtttcagctctttca

SEQ ID NO: 371015 - DNA, 19 bp, Homo sapiens
  siRNA target sequence for FLJ11305 (NM_018386.1,659-677).
cgacacccgtgctggtata

SEQ ID NO: 371016 - DNA, 19 bp, Homo sapiens
  siRNA target sequence for FLJ11305 (NM_018386.1,740-758).
gatcaacaaactccattta

SEQ ID NO: 371017 - DNA, 19 bp, Homo sapiens
  siRNA target sequence for FLJ11305 (NM_018386.1,766-784).
ccctaattagagcaattga

SEQ ID NO: 371018 - DNA, 19 bp, Homo sapiens
  siRNA target sequence for FLJ11305 (NM_018386.1,768-786).
ctaattagagcaattgaca

SEQ ID NO: 371019 - DNA, 19 bp, Homo sapiens
  siRNA target sequence for FLJ11305 (NM_018386.1,812-830).
cactgcacagagagtaaca

SEQ ID NO: 371020 - DNA, 19 bp, Homo sapiens
  siRNA target sequence for FLJ11305 (NM_018386.1,823-841).
gagtaacatacaaatacta

SEQ ID NO: 371021 - DNA, 19 bp, Homo sapiens
  siRNA target sequence for FLJ11305 (NM_018386.1,847-865).
gacgcaaggctatgtttga

SEQ ID NO: 371022 - DNA, 19 bp, Homo sapiens
  siRNA target sequence for FLJ11305 (NM_018386.1,849-867).
cgcaaggctatgtttgaca

SEQ ID NO: 371023 - DNA, 19 bp, Homo sapiens
  siRNA target sequence for FLJ11305 (NM_018386.1,911-929).
gcattgtcaccgttctagt

SEQ ID NO: 371024 - DNA, 19 bp, Homo sapiens
  siRNA target sequence for FLJ11305 (NM_018386.1,922-940).
gttctagtcagaagaacaa

SEQ ID NO: 371025 - DNA, 19 bp, Homo sapiens
  siRNA target sequence for FLJ11305 (NM_018386.1,943-961).
ggatgattctgatctattt

SEQ ID NO: 371026 - DNA, 19 bp, Homo sapiens
  siRNA target sequence for FLJ11305 (NM_018386.1,1165-1183).
ggaacctctttaagaaagt

SEQ ID NO: 371027 - DNA, 19 bp, Homo sapiens
  siRNA target sequence for FLJ11305 (NM_018386.1,1182-1200).
gtgtatttgttactgaaaa

SEQ ID NO: 371028 - DNA, 19 bp, Homo sapiens
  siRNA target sequence for FLJ11305 (NM_018386.1,1282-1300).
gtattctggctaacttgat

SEQ ID NO: 371029 - DNA, 19 bp, Homo sapiens
  siRNA target sequence for FLJ11305 (NM_018386.1,1311-1329).
cacgtcaaaggctacatat

SEQ ID NO: 371030 - DNA, 19 bp, Homo sapiens
  siRNA target sequence for FLJ11331 (NM_018392.3,252-270).
gagagtctgtttcttaaat

SEQ ID NO: 371031 - DNA, 19 bp, Homo sapiens
  siRNA target sequence for FLJ11331 (NM_018392.3,339-357).
gttgctggagccataggta

SEQ ID NO: 371032 - DNA, 19 bp, Homo sapiens
  siRNA target sequence for FLJ11331 (NM_018392.3,345-363).
ggagccataggtattgtta

SEQ ID NO: 371033 - DNA, 19 bp, Homo sapiens
  siRNA target sequence for FLJ11331 (NM_018392.3,349-367).
ccataggtattgttaagca

SEQ ID NO: 371034 - DNA, 19 bp, Homo sapiens
  siRNA target sequence for FLJ11331 (NM_018392.3,392-410).
gttaaattcaaggacattt

SEQ ID NO: 371035 - DNA, 19 bp, Homo sapiens
  siRNA target sequence for FLJ11331 (NM_018392.3,436-454).
gtcagccctctggcttaaa

SEQ ID NO: 371036 - DNA, 19 bp, Homo sapiens
  siRNA target sequence for FLJ11331 (NM_018392.3,478-496).
gaccacgtcaggttccaaa

SEQ ID NO: 371037 - DNA, 19 bp, Homo sapiens
  siRNA target sequence for FLJ11331 (NM_018392.3,481-499).
cacgtcaggttccaaagaa

SEQ ID NO: 371038 - DNA, 19 bp, Homo sapiens
  siRNA target sequence for FLJ11331 (NM_018392.3,532-550).
catcacatgaggctaagaa

SEQ ID NO: 371039 - DNA, 19 bp, Homo sapiens
  siRNA target sequence for FLJ11331 (NM_018392.3,548-566).
gaaaactggccctactatt

SEQ ID NO: 371040 - DNA, 19 bp, Homo sapiens
  siRNA target sequence for FLJ11331 (NM_018392.3,809-827).
gcctgtgaaaagagatagt

SEQ ID NO: 371041 - DNA, 19 bp, Homo sapiens
  siRNA target sequence for FLJ11331 (NM_018392.3,869-887).
caaagcacagatattagct

SEQ ID NO: 371042 - DNA, 19 bp, Homo sapiens
  siRNA target sequence for FLJ11331 (NM_018392.3,891-909).
ctgaagtccgaatcatcta

SEQ ID NO: 371043 - DNA, 19 bp, Homo sapiens
  siRNA target sequence for FLJ11331 (NM_018392.3,893-911).
gaagtccgaatcatctagt

SEQ ID NO: 371044 - DNA, 19 bp, Homo sapiens
  siRNA target sequence for FLJ11331 (NM_018392.3,896-914).
gtccgaatcatctagttca

SEQ ID NO: 371045 - DNA, 19 bp, Homo sapiens
  siRNA target sequence for FLJ11331 (NM_018392.3,899-917).
cgaatcatctagttcatgt

SEQ ID NO: 371046 - DNA, 19 bp, Homo sapiens
  siRNA target sequence for FLJ11331 (NM_018392.3,988-1006).
ctaaaccaaagtacctaat

SEQ ID NO: 371047 - DNA, 19 bp, Homo sapiens
  siRNA target sequence for FLJ11331 (NM_018392.3,994-1012).
caaagtacctaattcaaca

SEQ ID NO: 371048 - DNA, 19 bp, Homo sapiens
  siRNA target sequence for FLJ11331 (NM_018392.3,1031-1049).
gaagagcacagaaaattta

SEQ ID NO: 371049 - DNA, 19 bp, Homo sapiens
  siRNA target sequence for FLJ11331 (NM_018392.3,1036-1054).
gcacagaaaatttatacta

SEQ ID NO: 371050 - DNA, 19 bp, Homo sapiens
  siRNA target sequence for FLJ11331 (NM_018392.3,1112-1130).
ctcacagagttcacctata

SEQ ID NO: 371051 - DNA, 19 bp, Homo sapiens
  siRNA target sequence for FLJ11331 (NM_018392.3,1114-1132).
cacagagttcacctataca

SEQ ID NO: 371052 - DNA, 19 bp, Homo sapiens
  siRNA target sequence for FLJ11331 (NM_018392.3,1116-1134).
cagagttcacctatacatt

SEQ ID NO: 371053 - DNA, 19 bp, Homo sapiens
  siRNA target sequence for FLJ11331 (NM_018392.3,1182-1200).
gaagatgatgtaaattcta

SEQ ID NO: 371054 - DNA, 19 bp, Homo sapiens
  siRNA target sequence for FLJ11331 (NM_018392.3,1205-1223).
gaaagacctttcattacaa

SEQ ID NO: 371055 - DNA, 19 bp, Homo sapiens
  siRNA target sequence for FLJ11331 (NM_018392.3,1278-1296).
gaccagtcagtcggtaata

SEQ ID NO: 371056 - DNA, 19 bp, Homo sapiens
  siRNA target sequence for FLJ11331 (NM_018392.3,1283-1301).
gtcagtcggtaataatgat

SEQ ID NO: 371057 - DNA, 19 bp, Homo sapiens
  siRNA target sequence for FLJ11331 (NM_018392.3,1309-1327).
ggaatcaggaagtaaaatt

SEQ ID NO: 371058 - DNA, 19 bp, Homo sapiens
  siRNA target sequence for FLJ11331 (NM_018392.3,1566-1584).
catctccaaattgaatcta

SEQ ID NO: 371059 - DNA, 19 bp, Homo sapiens
  siRNA target sequence for FLJ11331 (NM_018392.3,1569-1587).
ctccaaattgaatctagta

SEQ ID NO: 371060 - DNA, 19 bp, Homo sapiens
  siRNA target sequence for FLJ11331 (NM_018392.3,1571-1589).
ccaaattgaatctagtaat

SEQ ID NO: 371061 - DNA, 19 bp, Homo sapiens
  siRNA target sequence for FLJ11331 (NM_018392.3,1578-1596).
gaatctagtaataattcta

SEQ ID NO: 371062 - DNA, 19 bp, Homo sapiens
  siRNA target sequence for FLJ11331 (NM_018392.3,1594-1612).
ctaggatctctgatgacat

SEQ ID NO: 371063 - DNA, 19 bp, Homo sapiens
  siRNA target sequence for FLJ11331 (NM_018392.3,1598-1616).
gatctctgatgacattaca

SEQ ID NO: 371064 - DNA, 19 bp, Homo sapiens
  siRNA target sequence for FLJ11331 (NM_018392.3,1610-1628).
cattacagacatgatttct

SEQ ID NO: 371065 - DNA, 19 bp, Homo sapiens
  siRNA target sequence for FLJ11331 (NM_018392.3,1708-1726).
cttttaatctgaacaattt

SEQ ID NO: 371066 - DNA, 19 bp, Homo sapiens
  siRNA target sequence for FLJ11331 (NM_018392.3,1808-1826).
ggttaatgatggcaattca

SEQ ID NO: 371067 - DNA, 19 bp, Homo sapiens
  siRNA target sequence for FLJ11331 (NM_018392.3,1863-1881).
gagattgagggtgaacatt

SEQ ID NO: 371068 - DNA, 19 bp, Homo sapiens
  siRNA target sequence for FLJ11331 (NM_018392.3,1944-1962).
ccatcacagttttgtgata

SEQ ID NO: 371069 - DNA, 19 bp, Homo sapiens
  siRNA target sequence for FLJ11331 (NM_018392.3,1945-1963).
catcacagttttgtgataa

SEQ ID NO: 371070 - DNA, 19 bp, Homo sapiens
  siRNA target sequence for FLJ11331 (NM_018392.3,1974-1992).
ggttttgacatgggaatat

SEQ ID NO: 371071 - DNA, 19 bp, Homo sapiens
  siRNA target sequence for FLJ11331 (NM_018392.3,1985-2003).
gggaatatgtaaaactgaa

SEQ ID NO: 371072 - DNA, 19 bp, Homo sapiens
  siRNA target sequence for FLJ11331 (NM_018392.3,2024-2042).
ggagtatagtgacacatta

SEQ ID NO: 371073 - DNA, 19 bp, Homo sapiens
  siRNA target sequence for FLJ11331 (NM_018392.3,2025-2043).
gagtatagtgacacattaa

SEQ ID NO: 371074 - DNA, 19 bp, Homo sapiens
  siRNA target sequence for FLJ11331 (NM_018392.3,2073-2091).
gctgtatacggagataata

SEQ ID NO: 371075 - DNA, 19 bp, Homo sapiens
  siRNA target sequence for FLJ11331 (NM_018392.3,2115-2133).
caagaagtcagaattaact

SEQ ID NO: 371076 - DNA, 19 bp, Homo sapiens
  siRNA target sequence for FLJ11331 (NM_018392.3,2121-2139).
gtcagaattaactatgatt

SEQ ID NO: 371077 - DNA, 19 bp, Homo sapiens
  siRNA target sequence for FLJ11331 (NM_018392.3,2142-2160).
gctttacccccgaataaat

SEQ ID NO: 371078 - DNA, 19 bp, Homo sapiens
  siRNA target sequence for FLJ11331 (NM_018392.3,2150-2168).
cccgaataaatctaaaggt

SEQ ID NO: 371079 - DNA, 19 bp, Homo sapiens
  siRNA target sequence for FLJ11331 (NM_018392.3,2151-2169).
ccgaataaatctaaaggta

SEQ ID NO: 371080 - DNA, 19 bp, Homo sapiens
  siRNA target sequence for FLJ11331 (NM_018392.3,2152-2170).
cgaataaatctaaaggtat

SEQ ID NO: 371081 - DNA, 19 bp, Homo sapiens
  siRNA target sequence for FLJ11331 (NM_018392.3,2204-2222).
ccagattgctgaaaacagt

SEQ ID NO: 371082 - DNA, 19 bp, Homo sapiens
  siRNA target sequence for FLJ11331 (NM_018392.3,2214-2232).
gaaaacagtaatctatttt

SEQ ID NO: 371083 - DNA, 19 bp, Homo sapiens
  siRNA target sequence for FLJ11331 (NM_018392.3,2319-2337).
gacaacagtgtccaactat

SEQ ID NO: 371084 - DNA, 19 bp, Homo sapiens
  siRNA target sequence for FLJ11331 (NM_018392.3,2321-2339).
caacagtgtccaactatta

SEQ ID NO: 371085 - DNA, 19 bp, Homo sapiens
  siRNA target sequence for FLJ11331 (NM_018392.3,2328-2346).
gtccaactattaaatacca

SEQ ID NO: 371086 - DNA, 19 bp, Homo sapiens
  siRNA target sequence for FLJ11331 (NM_018392.3,2361-2379).
gaatgtattgcacttgata

SEQ ID NO: 371087 - DNA, 19 bp, Homo sapiens
  siRNA target sequence for FLJ11331 (NM_018392.3,2391-2409).
cacatttccaattctttgt

SEQ ID NO: 371088 - DNA, 19 bp, Homo sapiens
  siRNA target sequence for FLJ11331 (NM_018392.3,2445-2463).
gacacagaagcacatatat

SEQ ID NO: 371089 - DNA, 19 bp, Homo sapiens
  siRNA target sequence for FLJ11331 (NM_018392.3,2507-2525).
ccatgttgaggttgaaact

SEQ ID NO: 371090 - DNA, 19 bp, Homo sapiens
  siRNA target sequence for FLJ11331 (NM_018392.3,2568-2586).
gaactttctggattagtaa

SEQ ID NO: 371091 - DNA, 19 bp, Homo sapiens
  siRNA target sequence for FLJ11331 (NM_018392.3,2619-2637).
cacagtactgctttagaca

SEQ ID NO: 371092 - DNA, 19 bp, Homo sapiens
  siRNA target sequence for FLJ11331 (NM_018392.3,2634-2652).
gacagcttggaaatattga

SEQ ID NO: 371093 - DNA, 19 bp, Homo sapiens
  siRNA target sequence for FLJ11331 (NM_018392.3,2715-2733).
gaagtgaggaaaccattta

SEQ ID NO: 371094 - DNA, 19 bp, Homo sapiens
  siRNA target sequence for FLJ11331 (NM_018392.3,2718-2736).
gtgaggaaaccatttatta

SEQ ID NO: 371095 - DNA, 19 bp, Homo sapiens
  siRNA target sequence for FLJ11331 (NM_018392.3,2722-2740).
ggaaaccatttattacagt

SEQ ID NO: 371096 - DNA, 19 bp, Homo sapiens
  siRNA target sequence for FLJ11331 (NM_018392.3,2768-2786).
caaggattctcaacagata

SEQ ID NO: 371097 - DNA, 19 bp, Homo sapiens
  siRNA target sequence for FLJ11331 (NM_018392.3,2771-2789).
ggattctcaacagatacta

SEQ ID NO: 371098 - DNA, 19 bp, Homo sapiens
  siRNA target sequence for FLJ11331 (NM_018392.3,2823-2841).
cagtctgtgcagttctctt

SEQ ID NO: 371099 - DNA, 19 bp, Homo sapiens
  siRNA target sequence for FLJ11331 (NM_018392.3,2914-2932).
ctaagcctgttgagtttca

SEQ ID NO: 371100 - DNA, 19 bp, Homo sapiens
  siRNA target sequence for FLJ11331 (NM_018392.3,2953-2971).
cagctactagtggtgtaat

SEQ ID NO: 371101 - DNA, 19 bp, Homo sapiens
  siRNA target sequence for FLJ11331 (NM_018392.3,2956-2974).
ctactagtggtgtaatggt

SEQ ID NO: 371102 - DNA, 19 bp, Homo sapiens
  siRNA target sequence for FLJ11331 (NM_018392.3,3019-3037).
gcactgagtatgaaaactt

SEQ ID NO: 371103 - DNA, 19 bp, Homo sapiens
  siRNA target sequence for FLJ11331 (NM_018392.3,3024-3042).
gagtatgaaaactttatga

SEQ ID NO: 371104 - DNA, 19 bp, Homo sapiens
  siRNA target sequence for FLJ11331 (NM_018392.3,3026-3044).
gtatgaaaactttatgaca

SEQ ID NO: 371105 - DNA, 19 bp, Homo sapiens
  siRNA target sequence for FLJ11331 (NM_018392.3,3067-3085).
cgtgtatgcagattgactt

SEQ ID NO: 371106 - DNA, 19 bp, Homo sapiens
  siRNA target sequence for FLJ11331 (NM_018392.3,3070-3088).
gtatgcagattgacttctt

SEQ ID NO: 371107 - DNA, 19 bp, Homo sapiens
  siRNA target sequence for FLJ11331 (NM_018392.3,3128-3146).
ccctgtttctaccttttct

SEQ ID NO: 371108 - DNA, 19 bp, Homo sapiens
  siRNA target sequence for FLJ11331 (NM_018392.3,3186-3204).
gagacgtccctgaaagcaa

SEQ ID NO: 371109 - DNA, 19 bp, Homo sapiens
  siRNA target sequence for FLJ11331 (NM_018392.3,3193-3211).
ccctgaaagcaagaacttt

SEQ ID NO: 371110 - DNA, 19 bp, Homo sapiens
  siRNA target sequence for FLJ11331 (NM_018392.3,3250-3268).
gttaccacattgctctaat

SEQ ID NO: 371111 - DNA, 19 bp, Homo sapiens
  siRNA target sequence for FLJ11331 (NM_018392.3,3261-3279).
gctctaatatctgtctatt

SEQ ID NO: 371112 - DNA, 19 bp, Homo sapiens
  siRNA target sequence for FLJ11331 (NM_018392.3,3271-3289).
ctgtctattcatttaagat

SEQ ID NO: 371113 - DNA, 19 bp, Homo sapiens
  siRNA target sequence for FLJ11331 (NM_018392.3,3273-3291).
gtctattcatttaagatga

SEQ ID NO: 371114 - DNA, 19 bp, Homo sapiens
  siRNA target sequence for FLJ11336 (NM_018393.2,231-249).
ccttgacaagtccaatgta

SEQ ID NO: 371115 - DNA, 19 bp, Homo sapiens
  siRNA target sequence for FLJ11336 (NM_018393.2,232-250).
cttgacaagtccaatgtaa

SEQ ID NO: 371116 - DNA, 19 bp, Homo sapiens
  siRNA target sequence for FLJ11336 (NM_018393.2,447-465).
ggctctagcccatgaaatt

SEQ ID NO: 371117 - DNA, 19 bp, Homo sapiens
  siRNA target sequence for FLJ11336 (NM_018393.2,484-502).
cagattaaaccagttgaat

SEQ ID NO: 371118 - DNA, 19 bp, Homo sapiens
  siRNA target sequence for FLJ11336 (NM_018393.2,527-545).
gagtaaaggagattgtaca

SEQ ID NO: 371119 - DNA, 19 bp, Homo sapiens
  siRNA target sequence for FLJ11336 (NM_018393.2,567-585).
gagtgtgcagctaagtgaa

SEQ ID NO: 371120 - DNA, 19 bp, Homo sapiens
  siRNA target sequence for FLJ11336 (NM_018393.2,603-621).
ccatgctatcaaacttgta

SEQ ID NO: 371121 - DNA, 19 bp, Homo sapiens
  siRNA target sequence for FLJ11336 (NM_018393.2,892-910).
gacatggccaactttgcta

SEQ ID NO: 371122 - DNA, 19 bp, Homo sapiens
  siRNA target sequence for FLJ11336 (NM_018393.2,897-915).
ggccaactttgctatcagt

SEQ ID NO: 371123 - DNA, 19 bp, Homo sapiens
  siRNA target sequence for FLJ11336 (NM_018393.2,898-916).
gccaactttgctatcagta

SEQ ID NO: 371124 - DNA, 19 bp, Homo sapiens
  siRNA target sequence for FLJ11336 (NM_018393.2,940-958).
cagtcagttgaatacgaaa

SEQ ID NO: 371125 - DNA, 19 bp, Homo sapiens
  siRNA target sequence for FLJ11336 (NM_018393.2,944-962).
cagttgaatacgaaaggaa

SEQ ID NO: 371126 - DNA, 19 bp, Homo sapiens
  siRNA target sequence for FLJ11336 (NM_018393.2,1042-1060).
cttatgactcagaagtata

SEQ ID NO: 371127 - DNA, 19 bp, Homo sapiens
  siRNA target sequence for FLJ11336 (NM_018393.2,1178-1196).
ggccgttccccgaaacagt

SEQ ID NO: 371128 - DNA, 19 bp, Homo sapiens
  siRNA target sequence for FLJ11336 (NM_018393.2,1180-1198).
ccgttccccgaaacagttt

SEQ ID NO: 371129 - DNA, 19 bp, Homo sapiens
  siRNA target sequence for FLJ11336 (NM_018393.2,1181-1199).
cgttccccgaaacagtttt

SEQ ID NO: 371130 - DNA, 19 bp, Homo sapiens
  siRNA target sequence for FLJ11336 (NM_018393.2,1182-1200).
gttccccgaaacagtttta

SEQ ID NO: 371131 - DNA, 19 bp, Homo sapiens
  siRNA target sequence for FLJ11336 (NM_018393.2,1187-1205).
ccgaaacagttttaatgga

SEQ ID NO: 371132 - DNA, 19 bp, Homo sapiens
  siRNA target sequence for FLJ11336 (NM_018393.2,1284-1302).
catggcagcgccaggaatt

SEQ ID NO: 371133 - DNA, 19 bp, Homo sapiens
  siRNA target sequence for FLJ11336 (NM_018393.2,1288-1306).
gcagcgccaggaatttcca

SEQ ID NO: 371134 - DNA, 19 bp, Homo sapiens
  siRNA target sequence for FLJ11336 (NM_018393.2,1321-1339).
gctgagaaactcaagatga

SEQ ID NO: 371135 - DNA, 19 bp, Homo sapiens
  siRNA target sequence for FLJ11336 (NM_018393.2,1553-1571).
gaatcctgaccttcttaga

SEQ ID NO: 371136 - DNA, 19 bp, Homo sapiens
  siRNA target sequence for FLJ11336 (NM_018393.2,1669-1687).
gctcgcctggtcaactata

SEQ ID NO: 371137 - DNA, 19 bp, Homo sapiens
  siRNA target sequence for FLJ11336 (NM_018393.2,1670-1688).
ctcgcctggtcaactataa

SEQ ID NO: 371138 - DNA, 19 bp, Homo sapiens
  siRNA target sequence for FLJ11336 (NM_018393.2,1672-1690).
cgcctggtcaactataaca

SEQ ID NO: 371139 - DNA, 19 bp, Homo sapiens
  siRNA target sequence for FLJ11336 (NM_018393.2,1703-1721).
gtccctactacgatgcaat

SEQ ID NO: 371140 - DNA, 19 bp, Homo sapiens
  siRNA target sequence for HSA275986 (NM_018403.1,227-245).
gggagaagactgatataga

SEQ ID NO: 371141 - DNA, 19 bp, Homo sapiens
  siRNA target sequence for HSA275986 (NM_018403.1,238-256).
gatatagaagggaccttat

SEQ ID NO: 371142 - DNA, 19 bp, Homo sapiens
  siRNA target sequence for HSA275986 (NM_018403.1,244-262).
gaagggaccttattcgtat

SEQ ID NO: 371143 - DNA, 19 bp, Homo sapiens
  siRNA target sequence for HSA275986 (NM_018403.1,249-267).
gaccttattcgtatatcga

SEQ ID NO: 371144 - DNA, 19 bp, Homo sapiens
  siRNA target sequence for HSA275986 (NM_018403.1,280-298).
ccttaccatggttttacca

SEQ ID NO: 371145 - DNA, 19 bp, Homo sapiens
  siRNA target sequence for HSA275986 (NM_018403.1,281-299).
cttaccatggttttaccat

SEQ ID NO: 371146 - DNA, 19 bp, Homo sapiens
  siRNA target sequence for HSA275986 (NM_018403.1,286-304).
catggttttaccattgtga

SEQ ID NO: 371147 - DNA, 19 bp, Homo sapiens
  siRNA target sequence for HSA275986 (NM_018403.1,296-314).
ccattgtgaatcgactaaa

SEQ ID NO: 371148 - DNA, 19 bp, Homo sapiens
  siRNA target sequence for HSA275986 (NM_018403.1,360-378).
gctccatgaaccatttctt

SEQ ID NO: 371149 - DNA, 19 bp, Homo sapiens
  siRNA target sequence for HSA275986 (NM_018403.1,391-409).
gcaagcttgtcgatatata

SEQ ID NO: 371150 - DNA, 19 bp, Homo sapiens
  siRNA target sequence for HSA275986 (NM_018403.1,395-413).
gcttgtcgatatatagtat

SEQ ID NO: 371151 - DNA, 19 bp, Homo sapiens
  siRNA target sequence for HSA275986 (NM_018403.1,433-451).
gactgtcaccgcatagcaa

SEQ ID NO: 371152 - DNA, 19 bp, Homo sapiens
  siRNA target sequence for HSA275986 (NM_018403.1,607-625).
cagatgggtgactcaaata

SEQ ID NO: 371153 - DNA, 19 bp, Homo sapiens
  siRNA target sequence for HSA275986 (NM_018403.1,674-692).
gcaccgagactctagaaga

SEQ ID NO: 371154 - DNA, 19 bp, Homo sapiens
  siRNA target sequence for HSA275986 (NM_018403.1,675-693).
caccgagactctagaagaa

SEQ ID NO: 371155 - DNA, 19 bp, Homo sapiens
  siRNA target sequence for HSA275986 (NM_018403.1,702-720).
cgggtcacaggataagtct

SEQ ID NO: 371156 - DNA, 19 bp, Homo sapiens
  siRNA target sequence for HSA275986 (NM_018403.1,748-766).
gtagaagagttatttggaa

SEQ ID NO: 371157 - DNA, 19 bp, Homo sapiens
  siRNA target sequence for HSA275986 (NM_018403.1,843-861).
ccagaaagagcccaattca

SEQ ID NO: 371158 - DNA, 19 bp, Homo sapiens
  siRNA target sequence for HSA275986 (NM_018403.1,854-872).
ccaattcattcctaccatt

SEQ ID NO: 371159 - DNA, 19 bp, Homo sapiens
  siRNA target sequence for HSA275986 (NM_018403.1,855-873).
caattcattcctaccattt

SEQ ID NO: 371160 - DNA, 19 bp, Homo sapiens
  siRNA target sequence for HSA275986 (NM_018403.1,890-908).
gaggagcccctcaatcaga

SEQ ID NO: 371161 - DNA, 19 bp, Homo sapiens
  siRNA target sequence for HSA275986 (NM_018403.1,960-978).
caccccggtgctaatcact

SEQ ID NO: 371162 - DNA, 19 bp, Homo sapiens
  siRNA target sequence for HSA275986 (NM_018403.1,1257-1275).
cctcccaagcgttgatctt

SEQ ID NO: 371163 - DNA, 19 bp, Homo sapiens
  siRNA target sequence for HSA275986 (NM_018403.1,1298-1316).
cacagcatgaccaaataca

SEQ ID NO: 371164 - DNA, 19 bp, Homo sapiens
  siRNA target sequence for HSA275986 (NM_018403.1,1510-1528).
gtgcagcctaaggtgttat

SEQ ID NO: 371165 - DNA, 19 bp, Homo sapiens
  siRNA target sequence for HSA275986 (NM_018403.1,1513-1531).
cagcctaaggtgttatcca

SEQ ID NO: 371166 - DNA, 19 bp, Homo sapiens
  siRNA target sequence for HSA275986 (NM_018403.1,1614-1632).
ccagcagacagttacaaga

SEQ ID NO: 371167 - DNA, 19 bp, Homo sapiens
  siRNA target sequence for HSA275986 (NM_018403.1,1615-1633).
cagcagacagttacaagat

SEQ ID NO: 371168 - DNA, 19 bp, Homo sapiens
  siRNA target sequence for HSA275986 (NM_018403.1,1731-1749).
gctccaggatacattaata

SEQ ID NO: 371169 - DNA, 19 bp, Homo sapiens
  siRNA target sequence for HSA275986 (NM_018403.1,1750-1768).
catctaataaagaatgatt

SEQ ID NO: 371170 - DNA, 19 bp, Homo sapiens
  siRNA target sequence for HSA275986 (NM_018403.1,1773-1791).
cttcctcagtacacttcat

SEQ ID NO: 371171 - DNA, 19 bp, Homo sapiens
  siRNA target sequence for HSA275986 (NM_018403.1,1776-1794).
cctcagtacacttcatgaa

SEQ ID NO: 371172 - DNA, 19 bp, Homo sapiens
  siRNA target sequence for HSA275986 (NM_018403.1,1781-1799).
gtacacttcatgaagtcta

SEQ ID NO: 371173 - DNA, 19 bp, Homo sapiens
  siRNA target sequence for HSA275986 (NM_018403.1,1784-1802).
cacttcatgaagtctactt

SEQ ID NO: 371174 - DNA, 19 bp, Homo sapiens
  siRNA target sequence for DKFZp761O0113 (NM_018409.2,916-934).
ctgattacacccatgctaa

SEQ ID NO: 371175 - DNA, 19 bp, Homo sapiens
  siRNA target sequence for DKFZp761O0113 (NM_018409.2,918-936).
gattacacccatgctaatt

SEQ ID NO: 371176 - DNA, 19 bp, Homo sapiens
  siRNA target sequence for DKFZp761O0113 (NM_018409.2,986-1004).
cactctggcatatttccta

SEQ ID NO: 371177 - DNA, 19 bp, Homo sapiens
  siRNA target sequence for DKFZp761O0113 (NM_018409.2,1001-1019).
cctacgaggtcaactatat

SEQ ID NO: 371178 - DNA, 19 bp, Homo sapiens
  siRNA target sequence for DKFZp761O0113 (NM_018409.2,1002-1020).
ctacgaggtcaactatatt

SEQ ID NO: 371179 - DNA, 19 bp, Homo sapiens
  siRNA target sequence for DKFZp761O0113 (NM_018409.2,1095-1113).
cagctaggagtgatgtact

SEQ ID NO: 371180 - DNA, 19 bp, Homo sapiens
  siRNA target sequence for DKFZp761O0113 (NM_018409.2,1097-1115).
gctaggagtgatgtactat

SEQ ID NO: 371181 - DNA, 19 bp, Homo sapiens
  siRNA target sequence for DKFZp761O0113 (NM_018409.2,1149-1167).
ggggtggactatatgaaga

SEQ ID NO: 371182 - DNA, 19 bp, Homo sapiens
  siRNA target sequence for DKFZp761O0113 (NM_018409.2,1150-1168).
gggtggactatatgaagaa

SEQ ID NO: 371183 - DNA, 19 bp, Homo sapiens
  siRNA target sequence for DKFZp761O0113 (NM_018409.2,1223-1241).
caacctcggaagagcttat

SEQ ID NO: 371184 - DNA, 19 bp, Homo sapiens
  siRNA target sequence for DKFZp761O0113 (NM_018409.2,1226-1244).
cctcggaagagcttattat

SEQ ID NO: 371185 - DNA, 19 bp, Homo sapiens
  siRNA target sequence for DKFZp761O0113 (NM_018409.2,1229-1247).
cggaagagcttattatgaa

SEQ ID NO: 371186 - DNA, 19 bp, Homo sapiens
  siRNA target sequence for DKFZp761O0113 (NM_018409.2,1248-1266).
ggaaaaggtgttaaacgat

SEQ ID NO: 371187 - DNA, 19 bp, Homo sapiens
  siRNA target sequence for DKFZp761O0113 (NM_018409.2,1255-1273).
gtgttaaacgatcaaatga

SEQ ID NO: 371188 - DNA, 19 bp, Homo sapiens
  siRNA target sequence for DKFZp761O0113 (NM_018409.2,1292-1310).
gcttatcgcagcagacaat

SEQ ID NO: 371189 - DNA, 19 bp, Homo sapiens
  siRNA target sequence for DKFZp761O0113 (NM_018409.2,1342-1360).
gtatgctcgggctgtatta

SEQ ID NO: 371190 - DNA, 19 bp, Homo sapiens
  siRNA target sequence for DKFZp761O0113 (NM_018409.2,1346-1364).
gctcgggctgtattactca

SEQ ID NO: 371191 - DNA, 19 bp, Homo sapiens
  siRNA target sequence for DKFZp761O0113 (NM_018409.2,1444-1462).
gtgcacttgggctcatgta

SEQ ID NO: 371192 - DNA, 19 bp, Homo sapiens
  siRNA target sequence for DKFZp761O0113 (NM_018409.2,1446-1464).
gcacttgggctcatgtact

SEQ ID NO: 371193 - DNA, 19 bp, Homo sapiens
  siRNA target sequence for DKFZp761O0113 (NM_018409.2,1447-1465).
cacttgggctcatgtactt

SEQ ID NO: 371194 - DNA, 19 bp, Homo sapiens
  siRNA target sequence for DKFZp761O0113 (NM_018409.2,1449-1467).
cttgggctcatgtacttgt

SEQ ID NO: 371195 - DNA, 19 bp, Homo sapiens
  siRNA target sequence for DKFZp761O0113 (NM_018409.2,1497-1515).
gctgccctgcagtgcttaa

SEQ ID NO: 371196 - DNA, 19 bp, Homo sapiens
  siRNA target sequence for DKFZp761O0113 (NM_018409.2,1501-1519).
ccctgcagtgcttaagaga

SEQ ID NO: 371197 - DNA, 19 bp, Homo sapiens
  siRNA target sequence for DKFZp761O0113 (NM_018409.2,1551-1569).
gggaatctcgtggagtatt

SEQ ID NO: 371198 - DNA, 19 bp, Homo sapiens
  siRNA target sequence for DKFZp761O0113 (NM_018409.2,1552-1570).
ggaatctcgtggagtatta

SEQ ID NO: 371199 - DNA, 19 bp, Homo sapiens
  siRNA target sequence for DKFZp761O0113 (NM_018409.2,1610-1628).
caaaaggatcgctgactat

SEQ ID NO: 371200 - DNA, 19 bp, Homo sapiens
  siRNA target sequence for DKFZp761O0113 (NM_018409.2,1615-1633).
ggatcgctgactatgatga

SEQ ID NO: 371201 - DNA, 19 bp, Homo sapiens
  siRNA target sequence for DKFZp761O0113 (NM_018409.2,1761-1779).
gaaacaaccgctaaacact

SEQ ID NO: 371202 - DNA, 19 bp, Homo sapiens
  siRNA target sequence for DKFZp761O0113 (NM_018409.2,1765-1783).
caaccgctaaacactatta

SEQ ID NO: 371203 - DNA, 19 bp, Homo sapiens
  siRNA target sequence for DKFZp761O0113 (NM_018409.2,1769-1787).
cgctaaacactattattct

SEQ ID NO: 371204 - DNA, 19 bp, Homo sapiens
  siRNA target sequence for DKFZp761O0113 (NM_018409.2,1808-1826).
cgcattggcagatgaactt

SEQ ID NO: 371205 - DNA, 19 bp, Homo sapiens
  siRNA target sequence for DKFZp761O0113 (NM_018409.2,1832-1850).
cttacttattcgtcaaaga

SEQ ID NO: 371206 - DNA, 19 bp, Homo sapiens
  siRNA target sequence for DKFZp762E1312 (NM_018410.2,851-869).
ccaccaaaacgttcatcat

SEQ ID NO: 371207 - DNA, 19 bp, Homo sapiens
  siRNA target sequence for DKFZp762E1312 (NM_018410.2,1004-1022).
gggcattaagagattgcaa

SEQ ID NO: 371208 - DNA, 19 bp, Homo sapiens
  siRNA target sequence for DKFZp762E1312 (NM_018410.2,1020-1038).
caagaacgtattagatgtt

SEQ ID NO: 371209 - DNA, 19 bp, Homo sapiens
  siRNA target sequence for DKFZp762E1312 (NM_018410.2,1043-1061).
gccgtaagacaggtttaaa

SEQ ID NO: 371210 - DNA, 19 bp, Homo sapiens
  siRNA target sequence for DKFZp762E1312 (NM_018410.2,1050-1068).
gacaggtttaaaattggaa

SEQ ID NO: 371211 - DNA, 19 bp, Homo sapiens
  siRNA target sequence for DKFZp762E1312 (NM_018410.2,1094-1112).
cccaaatccataagttaga

SEQ ID NO: 371212 - DNA, 19 bp, Homo sapiens
  siRNA target sequence for DKFZp762E1312 (NM_018410.2,1095-1113).
ccaaatccataagttagat

SEQ ID NO: 371213 - DNA, 19 bp, Homo sapiens
  siRNA target sequence for DKFZp762E1312 (NM_018410.2,1137-1155).
gacaccctcgaagtattct

SEQ ID NO: 371214 - DNA, 19 bp, Homo sapiens
  siRNA target sequence for DKFZp762E1312 (NM_018410.2,1176-1194).
cagtgcaacatataatctt

SEQ ID NO: 371215 - DNA, 19 bp, Homo sapiens
  siRNA target sequence for DKFZp762E1312 (NM_018410.2,1178-1196).
gtgcaacatataatcttga

SEQ ID NO: 371216 - DNA, 19 bp, Homo sapiens
  siRNA target sequence for DKFZp762E1312 (NM_018410.2,1287-1305).
ccgtcagagggagattgaa

SEQ ID NO: 371217 - DNA, 19 bp, Homo sapiens
  siRNA target sequence for DKFZp762E1312 (NM_018410.2,1288-1306).
cgtcagagggagattgaaa

SEQ ID NO: 371218 - DNA, 19 bp, Homo sapiens
  siRNA target sequence for DKFZp762E1312 (NM_018410.2,1299-1317).
gattgaaatccgatttgat

SEQ ID NO: 371219 - DNA, 19 bp, Homo sapiens
  siRNA target sequence for DKFZp762E1312 (NM_018410.2,1382-1400).
cctgggccatgaacatgta

SEQ ID NO: 371220 - DNA, 19 bp, Homo sapiens
  siRNA target sequence for DKFZp762E1312 (NM_018410.2,1426-1444).
ggccttcagggcttagaaa

SEQ ID NO: 371221 - DNA, 19 bp, Homo sapiens
  siRNA target sequence for DKFZp762E1312 (NM_018410.2,1446-1464).
ccgcaggctgagtttacct

SEQ ID NO: 371222 - DNA, 19 bp, Homo sapiens
  siRNA target sequence for DKFZp762E1312 (NM_018410.2,1447-1465).
cgcaggctgagtttacctt

SEQ ID NO: 371223 - DNA, 19 bp, Homo sapiens
  siRNA target sequence for DKFZp762E1312 (NM_018410.2,1487-1505).
gtttaagtgaggcttttga

SEQ ID NO: 371224 - DNA, 19 bp, Homo sapiens
  siRNA target sequence for DKFZp762E1312 (NM_018410.2,1543-1561).
ctgcccaagagcgattcat

SEQ ID NO: 371225 - DNA, 19 bp, Homo sapiens
  siRNA target sequence for DKFZp762E1312 (NM_018410.2,1545-1563).
gcccaagagcgattcatct

SEQ ID NO: 371226 - DNA, 19 bp, Homo sapiens
  siRNA target sequence for DKFZp762E1312 (NM_018410.2,1554-1572).
cgattcatcttcatcactt

SEQ ID NO: 371227 - DNA, 19 bp, Homo sapiens
  siRNA target sequence for DKFZp762E1312 (NM_018410.2,1624-1642).
cttcacgttcagggaaata

SEQ ID NO: 371228 - DNA, 19 bp, Homo sapiens
  siRNA target sequence for DKFZp762E1312 (NM_018410.2,1629-1647).
cgttcagggaaatagttct

SEQ ID NO: 371229 - DNA, 19 bp, Homo sapiens
  siRNA target sequence for DKFZp762E1312 (NM_018410.2,1636-1654).
ggaaatagttctggaatat

SEQ ID NO: 371230 - DNA, 19 bp, Homo sapiens
  siRNA target sequence for DKFZp762E1312 (NM_018410.2,1668-1686).
gtcacccagcaaaactctt

SEQ ID NO: 371231 - DNA, 19 bp, Homo sapiens
  siRNA target sequence for DKFZp762E1312 (NM_018410.2,1707-1725).
gccaggccacggaaggaat

SEQ ID NO: 371232 - DNA, 19 bp, Homo sapiens
  siRNA target sequence for DKFZp762E1312 (NM_018410.2,1711-1729).
ggccacggaaggaatcgtt

SEQ ID NO: 371233 - DNA, 19 bp, Homo sapiens
  siRNA target sequence for DKFZp762E1312 (NM_018410.2,1712-1730).
gccacggaaggaatcgtta

SEQ ID NO: 371234 - DNA, 19 bp, Homo sapiens
  siRNA target sequence for DKFZp762E1312 (NM_018410.2,1721-1739).
ggaatcgttacgatgaaat

SEQ ID NO: 371235 - DNA, 19 bp, Homo sapiens
  siRNA target sequence for DKFZp762E1312 (NM_018410.2,1722-1740).
gaatcgttacgatgaaatt

SEQ ID NO: 371236 - DNA, 19 bp, Homo sapiens
  siRNA target sequence for DKFZp762E1312 (NM_018410.2,1842-1860).
ggaagttcgatatcaaaca

SEQ ID NO: 371237 - DNA, 19 bp, Homo sapiens
  siRNA target sequence for DKFZp762E1312 (NM_018410.2,1932-1950).
ggggtgcagaaaaagtcta

SEQ ID NO: 371238 - DNA, 19 bp, Homo sapiens
  siRNA target sequence for DKFZp762E1312 (NM_018410.2,2015-2033).
gcacgagggaccatcagtt

SEQ ID NO: 371239 - DNA, 19 bp, Homo sapiens
  siRNA target sequence for DKFZp762E1312 (NM_018410.2,2173-2191).
ggagagaacacgtcttaca

SEQ ID NO: 371240 - DNA, 19 bp, Homo sapiens
  siRNA target sequence for DKFZp762E1312 (NM_018410.2,2190-2208).
caggatggaagagaaaagt

SEQ ID NO: 371241 - DNA, 19 bp, Homo sapiens
  siRNA target sequence for ST7 (NM_018412.2,231-249).
gctcaagtcctgcatagtt

SEQ ID NO: 371242 - DNA, 19 bp, Homo sapiens
  siRNA target sequence for ST7 (NM_018412.2,232-250).
ctcaagtcctgcatagttt

SEQ ID NO: 371243 - DNA, 19 bp, Homo sapiens
  siRNA target sequence for ST7 (NM_018412.2,368-386).
cattaacaccgaagttcta

SEQ ID NO: 371244 - DNA, 19 bp, Homo sapiens
  siRNA target sequence for ST7 (NM_018412.2,400-418).
ggcacttcctcactaatat

SEQ ID NO: 371245 - DNA, 19 bp, Homo sapiens
  siRNA target sequence for ST7 (NM_018412.2,443-461).
ggtggtattttcgcaaata

SEQ ID NO: 371246 - DNA, 19 bp, Homo sapiens
  siRNA target sequence for ST7 (NM_018412.2,454-472).
cgcaaatacggaacttcat

SEQ ID NO: 371247 - DNA, 19 bp, Homo sapiens
  siRNA target sequence for ST7 (NM_018412.2,455-473).
gcaaatacggaacttcatt

SEQ ID NO: 371248 - DNA, 19 bp, Homo sapiens
  siRNA target sequence for ST7 (NM_018412.2,462-480).
cggaacttcattcattgaa

SEQ ID NO: 371249 - DNA, 19 bp, Homo sapiens
  siRNA target sequence for ST7 (NM_018412.2,514-532).
ggaggggttgacaacaact

SEQ ID NO: 371250 - DNA, 19 bp, Homo sapiens
  siRNA target sequence for ST7 (NM_018412.2,517-535).
ggggttgacaacaactctt

SEQ ID NO: 371251 - DNA, 19 bp, Homo sapiens
  siRNA target sequence for ST7 (NM_018412.2,559-577).
ggggactcagattccaata

SEQ ID NO: 371252 - DNA, 19 bp, Homo sapiens
  siRNA target sequence for ST7 (NM_018412.2,586-604).
gtctcagaatgcaaagtat

SEQ ID NO: 371253 - DNA, 19 bp, Homo sapiens
  siRNA target sequence for ST7 (NM_018412.2,597-615).
caaagtatggcgaaatcca

SEQ ID NO: 371254 - DNA, 19 bp, Homo sapiens
  siRNA target sequence for ST7 (NM_018412.2,605-623).
ggcgaaatccactaaattt

SEQ ID NO: 371255 - DNA, 19 bp, Homo sapiens
  siRNA target sequence for ST7 (NM_018412.2,606-624).
gcgaaatccactaaattta

SEQ ID NO: 371256 - DNA, 19 bp, Homo sapiens
  siRNA target sequence for ST7 (NM_018412.2,637-655).
gaatacaatcggtatactt

SEQ ID NO: 371257 - DNA, 19 bp, Homo sapiens
  siRNA target sequence for ST7 (NM_018412.2,664-682).
ggacgagagcctcttactt

SEQ ID NO: 371258 - DNA, 19 bp, Homo sapiens
  siRNA target sequence for ST7 (NM_018412.2,665-683).
gacgagagcctcttactta

SEQ ID NO: 371259 - DNA, 19 bp, Homo sapiens
  siRNA target sequence for ST7 (NM_018412.2,667-685).
cgagagcctcttacttact

SEQ ID NO: 371260 - DNA, 19 bp, Homo sapiens
  siRNA target sequence for ST7 (NM_018412.2,668-686).
gagagcctcttacttacta

SEQ ID NO: 371261 - DNA, 19 bp, Homo sapiens
  siRNA target sequence for ST7 (NM_018412.2,706-724).
caagaccaccagacattct

SEQ ID NO: 371262 - DNA, 19 bp, Homo sapiens
  siRNA target sequence for ST7 (NM_018412.2,714-732).
ccagacattctttacttgt

SEQ ID NO: 371263 - DNA, 19 bp, Homo sapiens
  siRNA target sequence for ST7 (NM_018412.2,748-766).
cgtcccgcagatgcaataa

SEQ ID NO: 371264 - DNA, 19 bp, Homo sapiens
  siRNA target sequence for ST7 (NM_018412.2,749-767).
gtcccgcagatgcaataat

SEQ ID NO: 371265 - DNA, 19 bp, Homo sapiens
  siRNA target sequence for ST7 (NM_018412.2,752-770).
ccgcagatgcaataatgca

SEQ ID NO: 371266 - DNA, 19 bp, Homo sapiens
  siRNA target sequence for ST7 (NM_018412.2,792-810).
cccccaagctaggatttct

SEQ ID NO: 371267 - DNA, 19 bp, Homo sapiens
  siRNA target sequence for ST7 (NM_018412.2,840-858).
gtgtgcaactgcttatatt

SEQ ID NO: 371268 - DNA, 19 bp, Homo sapiens
  siRNA target sequence for ST7 (NM_018412.2,842-860).
gtgcaactgcttatattct

SEQ ID NO: 371269 - DNA, 19 bp, Homo sapiens
  siRNA target sequence for ST7 (NM_018412.2,976-994).
cagtatgaagcccaacata

SEQ ID NO: 371270 - DNA, 19 bp, Homo sapiens
  siRNA target sequence for ST7 (NM_018412.2,978-996).
gtatgaagcccaacataga

SEQ ID NO: 371271 - DNA, 19 bp, Homo sapiens
  siRNA target sequence for ST7 (NM_018412.2,1109-1127).
cccttctgagtatgttcaa

SEQ ID NO: 371272 - DNA, 19 bp, Homo sapiens
  siRNA target sequence for ST7 (NM_018412.2,1110-1128).
ccttctgagtatgttcaat

SEQ ID NO: 371273 - DNA, 19 bp, Homo sapiens
  siRNA target sequence for ST7 (NM_018412.2,1111-1129).
cttctgagtatgttcaata

SEQ ID NO: 371274 - DNA, 19 bp, Homo sapiens
  siRNA target sequence for ST7 (NM_018412.2,1333-1351).
gcagtagaggccattcata

SEQ ID NO: 371275 - DNA, 19 bp, Homo sapiens
  siRNA target sequence for ST7 (NM_018412.2,1441-1459).
gacagtgaagcaatagcat

SEQ ID NO: 371276 - DNA, 19 bp, Homo sapiens
  siRNA target sequence for ST7 (NM_018412.2,1447-1465).
gaagcaatagcatatgcat

SEQ ID NO: 371277 - DNA, 19 bp, Homo sapiens
  siRNA target sequence for ST7 (NM_018412.2,1560-1578).
ggaaaaggggcacctattt

SEQ ID NO: 371278 - DNA, 19 bp, Homo sapiens
  siRNA target sequence for ST7 (NM_018412.2,1561-1579).
gaaaaggggcacctatttt

SEQ ID NO: 371279 - DNA, 19 bp, Homo sapiens
  siRNA target sequence for ST7 (NM_018412.2,1567-1585).
gggcacctattttatcctt

SEQ ID NO: 371280 - DNA, 19 bp, Homo sapiens
  siRNA target sequence for ST7 (NM_018412.2,1568-1586).
ggcacctattttatcctta

SEQ ID NO: 371281 - DNA, 19 bp, Homo sapiens
  siRNA target sequence for ST7 (NM_018412.2,1587-1605).
cccaatctgtacagaaaca

SEQ ID NO: 371282 - DNA, 19 bp, Homo sapiens
  siRNA target sequence for ST7 (NM_018412.2,1729-1747).
catcagttcccggaactta

SEQ ID NO: 371283 - DNA, 19 bp, Homo sapiens
  siRNA target sequence for ST7 (NM_018412.2,1749-1767).
gggggtcttcgcaaaagct

SEQ ID NO: 371284 - DNA, 19 bp, Homo sapiens
  siRNA target sequence for ST7 (NM_018412.2,1786-1804).
gcccccttaaactttgtca

SEQ ID NO: 371285 - DNA, 19 bp, Homo sapiens
  siRNA target sequence for SPATA7 (NM_018418.1,204-222).
ggtccaccgtgcctattta

SEQ ID NO: 371286 - DNA, 19 bp, Homo sapiens
  siRNA target sequence for SPATA7 (NM_018418.1,205-223).
gtccaccgtgcctatttaa

SEQ ID NO: 371287 - DNA, 19 bp, Homo sapiens
  siRNA target sequence for SPATA7 (NM_018418.1,233-251).
gagcaccaaaagtaatgct

SEQ ID NO: 371288 - DNA, 19 bp, Homo sapiens
  siRNA target sequence for SPATA7 (NM_018418.1,235-253).
gcaccaaaagtaatgcttt

SEQ ID NO: 371289 - DNA, 19 bp, Homo sapiens
  siRNA target sequence for SPATA7 (NM_018418.1,306-324).
cacatggctgttcactata

SEQ ID NO: 371290 - DNA, 19 bp, Homo sapiens
  siRNA target sequence for SPATA7 (NM_018418.1,308-326).
catggctgttcactataat

SEQ ID NO: 371291 - DNA, 19 bp, Homo sapiens
  siRNA target sequence for SPATA7 (NM_018418.1,312-330).
gctgttcactataataaaa

SEQ ID NO: 371292 - DNA, 19 bp, Homo sapiens
  siRNA target sequence for SPATA7 (NM_018418.1,373-391).
gcgtgagtaccagcataaa

SEQ ID NO: 371293 - DNA, 19 bp, Homo sapiens
  siRNA target sequence for SPATA7 (NM_018418.1,375-393).
gtgagtaccagcataaagt

SEQ ID NO: 371294 - DNA, 19 bp, Homo sapiens
  siRNA target sequence for SPATA7 (NM_018418.1,377-395).
gagtaccagcataaagtat

SEQ ID NO: 371295 - DNA, 19 bp, Homo sapiens
  siRNA target sequence for SPATA7 (NM_018418.1,469-487).
ctgcaatgcgagccaatta

SEQ ID NO: 371296 - DNA, 19 bp, Homo sapiens
  siRNA target sequence for SPATA7 (NM_018418.1,471-489).
gcaatgcgagccaattata

SEQ ID NO: 371297 - DNA, 19 bp, Homo sapiens
  siRNA target sequence for SPATA7 (NM_018418.1,472-490).
caatgcgagccaattataa

SEQ ID NO: 371298 - DNA, 19 bp, Homo sapiens
  siRNA target sequence for SPATA7 (NM_018418.1,476-494).
gcgagccaattataaaaat

SEQ ID NO: 371299 - DNA, 19 bp, Homo sapiens
  siRNA target sequence for SPATA7 (NM_018418.1,477-495).
cgagccaattataaaaata

SEQ ID NO: 371300 - DNA, 19 bp, Homo sapiens
  siRNA target sequence for SPATA7 (NM_018418.1,530-548).
ctcaggcgaaccgcaaatt

SEQ ID NO: 371301 - DNA, 19 bp, Homo sapiens
  siRNA target sequence for SPATA7 (NM_018418.1,532-550).
caggcgaaccgcaaattga

SEQ ID NO: 371302 - DNA, 19 bp, Homo sapiens
  siRNA target sequence for SPATA7 (NM_018418.1,541-559).
cgcaaattgaggatgacat

SEQ ID NO: 371303 - DNA, 19 bp, Homo sapiens
  siRNA target sequence for SPATA7 (NM_018418.1,620-638).
gagactacacctaagtcta

SEQ ID NO: 371304 - DNA, 19 bp, Homo sapiens
  siRNA target sequence for SPATA7 (NM_018418.1,630-648).
ctaagtctacataaatcca

SEQ ID NO: 371305 - DNA, 19 bp, Homo sapiens
  siRNA target sequence for SPATA7 (NM_018418.1,639-657).
cataaatccagtaaagtca

SEQ ID NO: 371306 - DNA, 19 bp, Homo sapiens
  siRNA target sequence for SPATA7 (NM_018418.1,647-665).
cagtaaagtcatcacaaat

SEQ ID NO: 371307 - DNA, 19 bp, Homo sapiens
  siRNA target sequence for SPATA7 (NM_018418.1,691-709).
ccccgtccagtgtggatta

SEQ ID NO: 371308 - DNA, 19 bp, Homo sapiens
  siRNA target sequence for SPATA7 (NM_018418.1,692-710).
cccgtccagtgtggattat

SEQ ID NO: 371309 - DNA, 19 bp, Homo sapiens
  siRNA target sequence for SPATA7 (NM_018418.1,695-713).
gtccagtgtggattatgca

SEQ ID NO: 371310 - DNA, 19 bp, Homo sapiens
  siRNA target sequence for SPATA7 (NM_018418.1,784-802).
cccaccggtttcagttagt

SEQ ID NO: 371311 - DNA, 19 bp, Homo sapiens
  siRNA target sequence for SPATA7 (NM_018418.1,786-804).
caccggtttcagttagtca

SEQ ID NO: 371312 - DNA, 19 bp, Homo sapiens
  siRNA target sequence for SPATA7 (NM_018418.1,817-835).
ccagtggggatcttttgga

SEQ ID NO: 371313 - DNA, 19 bp, Homo sapiens
  siRNA target sequence for SPATA7 (NM_018418.1,818-836).
cagtggggatcttttggat

SEQ ID NO: 371314 - DNA, 19 bp, Homo sapiens
  siRNA target sequence for SPATA7 (NM_018418.1,820-838).
gtggggatcttttggataa

SEQ ID NO: 371315 - DNA, 19 bp, Homo sapiens
  siRNA target sequence for SPATA7 (NM_018418.1,823-841).
gggatcttttggataaaca

SEQ ID NO: 371316 - DNA, 19 bp, Homo sapiens
  siRNA target sequence for SPATA7 (NM_018418.1,825-843).
gatcttttggataaacatt

SEQ ID NO: 371317 - DNA, 19 bp, Homo sapiens
  siRNA target sequence for SPATA7 (NM_018418.1,914-932).
gtcacagtatcgctattat

SEQ ID NO: 371318 - DNA, 19 bp, Homo sapiens
  siRNA target sequence for SPATA7 (NM_018418.1,978-996).
gctgaaacccagactgaat

SEQ ID NO: 371319 - DNA, 19 bp, Homo sapiens
  siRNA target sequence for SPATA7 (NM_018418.1,1058-1076).
cataaagcaggcatctaat

SEQ ID NO: 371320 - DNA, 19 bp, Homo sapiens
  siRNA target sequence for SPATA7 (NM_018418.1,1069-1087).
catctaattgtgtgacata

SEQ ID NO: 371321 - DNA, 19 bp, Homo sapiens
  siRNA target sequence for SPATA7 (NM_018418.1,1138-1156).
catgggatgagattaagga

SEQ ID NO: 371322 - DNA, 19 bp, Homo sapiens
  siRNA target sequence for SPATA7 (NM_018418.1,1208-1226).
gcccccttcaactcgtaaa

SEQ ID NO: 371323 - DNA, 19 bp, Homo sapiens
  siRNA target sequence for SPATA7 (NM_018418.1,1209-1227).
cccccttcaactcgtaaaa

SEQ ID NO: 371324 - DNA, 19 bp, Homo sapiens
  siRNA target sequence for SPATA7 (NM_018418.1,1210-1228).
ccccttcaactcgtaaaat

SEQ ID NO: 371325 - DNA, 19 bp, Homo sapiens
  siRNA target sequence for SPATA7 (NM_018418.1,1212-1230).
ccttcaactcgtaaaatct

SEQ ID NO: 371326 - DNA, 19 bp, Homo sapiens
  siRNA target sequence for SPATA7 (NM_018418.1,1213-1231).
cttcaactcgtaaaatcta

SEQ ID NO: 371327 - DNA, 19 bp, Homo sapiens
  siRNA target sequence for SPATA7 (NM_018418.1,1327-1345).
gactgttcgagcgacatat

SEQ ID NO: 371328 - DNA, 19 bp, Homo sapiens
  siRNA target sequence for SPATA7 (NM_018418.1,1329-1347).
ctgttcgagcgacatataa

SEQ ID NO: 371329 - DNA, 19 bp, Homo sapiens
  siRNA target sequence for SPATA7 (NM_018418.1,1331-1349).
gttcgagcgacatataaaa

SEQ ID NO: 371330 - DNA, 19 bp, Homo sapiens
  siRNA target sequence for SPATA7 (NM_018418.1,1388-1406).
gctgcatgtcctgaaagta

SEQ ID NO: 371331 - DNA, 19 bp, Homo sapiens
  siRNA target sequence for SPATA7 (NM_018418.1,1427-1445).
ggaaaactcggtaaagcaa

SEQ ID NO: 371332 - DNA, 19 bp, Homo sapiens
  siRNA target sequence for SPATA7 (NM_018418.1,1435-1453).
cggtaaagcaaaatgatgt

SEQ ID NO: 371333 - DNA, 19 bp, Homo sapiens
  siRNA target sequence for SPATA7 (NM_018418.1,1436-1454).
ggtaaagcaaaatgatgtt

SEQ ID NO: 371334 - DNA, 19 bp, Homo sapiens
  siRNA target sequence for SPATA7 (NM_018418.1,1443-1461).
caaaatgatgttgatatgt

SEQ ID NO: 371335 - DNA, 19 bp, Homo sapiens
  siRNA target sequence for SPATA7 (NM_018418.1,1623-1641).
gaatttttcatgcctattt

SEQ ID NO: 371336 - DNA, 19 bp, Homo sapiens
  siRNA target sequence for SPATA7 (NM_018418.1,1652-1670).
gcattcagaaggggttata

SEQ ID NO: 371337 - DNA, 19 bp, Homo sapiens
  siRNA target sequence for SPATA7 (NM_018418.1,1682-1700).
gaatgatgaaacaaatctt

SEQ ID NO: 371338 - DNA, 19 bp, Homo sapiens
  siRNA target sequence for SPATA7 (NM_018418.1,1793-1811).
ccctgaaaaggttgagatt

SEQ ID NO: 371339 - DNA, 19 bp, Homo sapiens
  siRNA target sequence for SPATA7 (NM_018418.1,1794-1812).
cctgaaaaggttgagattt

SEQ ID NO: 371340 - DNA, 19 bp, Homo sapiens
  siRNA target sequence for SPATA7 (NM_018418.1,1837-1855).
catcaccctcccaatctgt

SEQ ID NO: 371341 - DNA, 19 bp, Homo sapiens
  siRNA target sequence for SPATA7 (NM_018418.1,1887-1905).
catgacatggagttatcaa

SEQ ID NO: 371342 - DNA, 19 bp, Homo sapiens
  siRNA target sequence for SPATA7 (NM_018418.1,1892-1910).
catggagttatcaactctt

SEQ ID NO: 371343 - DNA, 19 bp, Homo sapiens
  siRNA target sequence for SPATA7 (NM_018418.1,1935-1953).
gactgccctttggatgttt

SEQ ID NO: 371344 - DNA, 19 bp, Homo sapiens
  siRNA target sequence for DKFZp761K1423 (NM_018422.1,1419-1437).
cccatcggtcgccataaat

SEQ ID NO: 371345 - DNA, 19 bp, Homo sapiens
  siRNA target sequence for DKFZp761K1423 (NM_018422.1,1420-1438).
ccatcggtcgccataaata

SEQ ID NO: 371346 - DNA, 19 bp, Homo sapiens
  siRNA target sequence for DKFZp761K1423 (NM_018422.1,1421-1439).
catcggtcgccataaataa

SEQ ID NO: 371347 - DNA, 19 bp, Homo sapiens
  siRNA target sequence for DKFZp761K1423 (NM_018422.1,1425-1443).
ggtcgccataaataagtct

SEQ ID NO: 371348 - DNA, 19 bp, Homo sapiens
  siRNA target sequence for DKFZp761K1423 (NM_018422.1,1426-1444).
gtcgccataaataagtctt

SEQ ID NO: 371349 - DNA, 19 bp, Homo sapiens
  siRNA target sequence for DKFZp761K1423 (NM_018422.1,1465-1483).
ccagcccaaggctcgatta

SEQ ID NO: 371350 - DNA, 19 bp, Homo sapiens
  siRNA target sequence for DKFZp761K1423 (NM_018422.1,1466-1484).
cagcccaaggctcgattaa

SEQ ID NO: 371351 - DNA, 19 bp, Homo sapiens
  siRNA target sequence for DKFZp761K1423 (NM_018422.1,1540-1558).
gcagagagtggtgataaca

SEQ ID NO: 371352 - DNA, 19 bp, Homo sapiens
  siRNA target sequence for DKFZp761K1423 (NM_018422.1,1543-1561).
gagagtggtgataacacat

SEQ ID NO: 371353 - DNA, 19 bp, Homo sapiens
  siRNA target sequence for TSNAXIP1 (NM_018430.1,1079-1097).
ggaccaagtgcaaagatgt

SEQ ID NO: 371354 - DNA, 19 bp, Homo sapiens
  siRNA target sequence for TSNAXIP1 (NM_018430.1,1416-1434).
ggcctgggcttatactatt

SEQ ID NO: 371355 - DNA, 19 bp, Homo sapiens
  siRNA target sequence for TSNAXIP1 (NM_018430.1,1421-1439).
gggcttatactatttttga

SEQ ID NO: 371356 - DNA, 19 bp, Homo sapiens
  siRNA target sequence for TSNAXIP1 (NM_018430.1,1467-1485).
ggttatgagtcagttctat

SEQ ID NO: 371357 - DNA, 19 bp, Homo sapiens
  siRNA target sequence for TSNAXIP1 (NM_018430.1,1503-1521).
gcggagtgagaatgtgtat

SEQ ID NO: 371358 - DNA, 19 bp, Homo sapiens
  siRNA target sequence for TSNAXIP1 (NM_018430.1,1551-1569).
gctgaaggagatgacaaat

SEQ ID NO: 371359 - DNA, 19 bp, Homo sapiens
  siRNA target sequence for TSNAXIP1 (NM_018430.1,1579-1597).
cagaacgaggggctactaa

SEQ ID NO: 371360 - DNA, 19 bp, Homo sapiens
  siRNA target sequence for TSNAXIP1 (NM_018430.1,1716-1734).
caactaccgctcactgttt

SEQ ID NO: 371361 - DNA, 19 bp, Homo sapiens
  siRNA target sequence for TSNAXIP1 (NM_018430.1,2029-2047).
cggcttcaggtgattgaca

SEQ ID NO: 371362 - DNA, 19 bp, Homo sapiens
  siRNA target sequence for JMJD1 (NM_018433.2,110-128).
gctcacgctcggagaaagt

SEQ ID NO: 371363 - DNA, 19 bp, Homo sapiens
  siRNA target sequence for JMJD1 (NM_018433.2,111-129).
ctcacgctcggagaaagtt

SEQ ID NO: 371364 - DNA, 19 bp, Homo sapiens
  siRNA target sequence for JMJD1 (NM_018433.2,141-159).
gtggggaggaggtttctca

SEQ ID NO: 371365 - DNA, 19 bp, Homo sapiens
  siRNA target sequence for JMJD1 (NM_018433.2,328-346).
gaagatggatagaagtcta

SEQ ID NO: 371366 - DNA, 19 bp, Homo sapiens
  siRNA target sequence for JMJD1 (NM_018433.2,339-357).
gaagtctacagccttctaa

SEQ ID NO: 371367 - DNA, 19 bp, Homo sapiens
  siRNA target sequence for JMJD1 (NM_018433.2,358-376).
ggagagcatttttagtaga

SEQ ID NO: 371368 - DNA, 19 bp, Homo sapiens
  siRNA target sequence for JMJD1 (NM_018433.2,399-417).
cgaaagtcacctgaaattt

SEQ ID NO: 371369 - DNA, 19 bp, Homo sapiens
  siRNA target sequence for JMJD1 (NM_018433.2,409-427).
ctgaaatttctgaacgaat

SEQ ID NO: 371370 - DNA, 19 bp, Homo sapiens
  siRNA target sequence for JMJD1 (NM_018433.2,432-450).
cagtggcctgcaataacgt

SEQ ID NO: 371371 - DNA, 19 bp, Homo sapiens
  siRNA target sequence for JMJD1 (NM_018433.2,437-455).
gcctgcaataacgtacaaa

SEQ ID NO: 371372 - DNA, 19 bp, Homo sapiens
  siRNA target sequence for JMJD1 (NM_018433.2,471-489).
gctggtttgggatccataa

SEQ ID NO: 371373 - DNA, 19 bp, Homo sapiens
  siRNA target sequence for JMJD1 (NM_018433.2,474-492).
ggtttgggatccataactt

SEQ ID NO: 371374 - DNA, 19 bp, Homo sapiens
  siRNA target sequence for JMJD1 (NM_018433.2,479-497).
gggatccataacttctgtt

SEQ ID NO: 371375 - DNA, 19 bp, Homo sapiens
  siRNA target sequence for JMJD1 (NM_018433.2,499-517).
gctttctgggagatcaaca

SEQ ID NO: 371376 - DNA, 19 bp, Homo sapiens
  siRNA target sequence for JMJD1 (NM_018433.2,506-524).
gggagatcaacaaagagta

SEQ ID NO: 371377 - DNA, 19 bp, Homo sapiens
  siRNA target sequence for JMJD1 (NM_018433.2,507-525).
ggagatcaacaaagagtat

SEQ ID NO: 371378 - DNA, 19 bp, Homo sapiens
  siRNA target sequence for JMJD1 (NM_018433.2,508-526).
gagatcaacaaagagtatt

SEQ ID NO: 371379 - DNA, 19 bp, Homo sapiens
  siRNA target sequence for JMJD1 (NM_018433.2,520-538).
gagtatttctttctaaaga

SEQ ID NO: 371380 - DNA, 19 bp, Homo sapiens
  siRNA target sequence for JMJD1 (NM_018433.2,549-567).
cctatacaggatgtaaaca

SEQ ID NO: 371381 - DNA, 19 bp, Homo sapiens
  siRNA target sequence for JMJD1 (NM_018433.2,671-689).
cttagttggttcagaagta

SEQ ID NO: 371382 - DNA, 19 bp, Homo sapiens
  siRNA target sequence for JMJD1 (NM_018433.2,722-740).
gttttcagcaaccgttata

SEQ ID NO: 371383 - DNA, 19 bp, Homo sapiens
  siRNA target sequence for JMJD1 (NM_018433.2,730-748).
caaccgttataaatggaaa

SEQ ID NO: 371384 - DNA, 19 bp, Homo sapiens
  siRNA target sequence for JMJD1 (NM_018433.2,782-800).
ggagattccagcactgaaa

SEQ ID NO: 371385 - DNA, 19 bp, Homo sapiens
  siRNA target sequence for JMJD1 (NM_018433.2,790-808).
cagcactgaaaattgttga

SEQ ID NO: 371386 - DNA, 19 bp, Homo sapiens
  siRNA target sequence for JMJD1 (NM_018433.2,811-829).
cgtcactgattcatgttga

SEQ ID NO: 371387 - DNA, 19 bp, Homo sapiens
  siRNA target sequence for JMJD1 (NM_018433.2,818-836).
gattcatgttgaagttgta

SEQ ID NO: 371388 - DNA, 19 bp, Homo sapiens
  siRNA target sequence for JMJD1 (NM_018433.2,879-897).
gctgtaaaacgcaagtctt

SEQ ID NO: 371389 - DNA, 19 bp, Homo sapiens
  siRNA target sequence for JMJD1 (NM_018433.2,888-906).
cgcaagtcttctgagaata

SEQ ID NO: 371390 - DNA, 19 bp, Homo sapiens
  siRNA target sequence for JMJD1 (NM_018433.2,889-907).
gcaagtcttctgagaataa

SEQ ID NO: 371391 - DNA, 19 bp, Homo sapiens
  siRNA target sequence for JMJD1 (NM_018433.2,917-935).
ggtttccaaacaagcaaaa

SEQ ID NO: 371392 - DNA, 19 bp, Homo sapiens
  siRNA target sequence for JMJD1 (NM_018433.2,971-989).
gcagtctgtacctacaaca

SEQ ID NO: 371393 - DNA, 19 bp, Homo sapiens
  siRNA target sequence for JMJD1 (NM_018433.2,976-994).
ctgtacctacaacagtttt

SEQ ID NO: 371394 - DNA, 19 bp, Homo sapiens
  siRNA target sequence for JMJD1 (NM_018433.2,982-1000).
ctacaacagtttttaagga

SEQ ID NO: 371395 - DNA, 19 bp, Homo sapiens
  siRNA target sequence for JMJD1 (NM_018433.2,1021-1039).
cggcaactccacctagtaa

SEQ ID NO: 371396 - DNA, 19 bp, Homo sapiens
  siRNA target sequence for JMJD1 (NM_018433.2,1043-1061).
cccaagacagcaaagtact

SEQ ID NO: 371397 - DNA, 19 bp, Homo sapiens
  siRNA target sequence for JMJD1 (NM_018433.2,1073-1091).
caactctccacctaacctt

SEQ ID NO: 371398 - DNA, 19 bp, Homo sapiens
  siRNA target sequence for JMJD1 (NM_018433.2,1148-1166).
ctgtctaaatacaaagtct

SEQ ID NO: 371399 - DNA, 19 bp, Homo sapiens
  siRNA target sequence for JMJD1 (NM_018433.2,1200-1218).
gcagggttgctctcaaagt

SEQ ID NO: 371400 - DNA, 19 bp, Homo sapiens
  siRNA target sequence for JMJD1 (NM_018433.2,1344-1362).
cctaaggagtgcttaccta

SEQ ID NO: 371401 - DNA, 19 bp, Homo sapiens
  siRNA target sequence for JMJD1 (NM_018433.2,1438-1456).
ccccatcggatgtttcaaa

SEQ ID NO: 371402 - DNA, 19 bp, Homo sapiens
  siRNA target sequence for JMJD1 (NM_018433.2,1439-1457).
cccatcggatgtttcaaat

SEQ ID NO: 371403 - DNA, 19 bp, Homo sapiens
  siRNA target sequence for JMJD1 (NM_018433.2,1473-1491).
gcaggtgtcaatagtgata

SEQ ID NO: 371404 - DNA, 19 bp, Homo sapiens
  siRNA target sequence for JMJD1 (NM_018433.2,1488-1506).
gatagccctaataactgtt

SEQ ID NO: 371405 - DNA, 19 bp, Homo sapiens
  siRNA target sequence for JMJD1 (NM_018433.2,1517-1535).
ggtagaaccttcagcttta

SEQ ID NO: 371406 - DNA, 19 bp, Homo sapiens
  siRNA target sequence for JMJD1 (NM_018433.2,1537-1555).
cttgccgatcacagaattt

SEQ ID NO: 371407 - DNA, 19 bp, Homo sapiens
  siRNA target sequence for JMJD1 (NM_018433.2,1564-1582).
cttcagtaaaagtagataa

SEQ ID NO: 371408 - DNA, 19 bp, Homo sapiens
  siRNA target sequence for JMJD1 (NM_018433.2,1600-1618).
gaagcaacaataaaatcca

SEQ ID NO: 371409 - DNA, 19 bp, Homo sapiens
  siRNA target sequence for JMJD1 (NM_018433.2,1631-1649).
caggaagtcggttttgaca

SEQ ID NO: 371410 - DNA, 19 bp, Homo sapiens
  siRNA target sequence for JMJD1 (NM_018433.2,1650-1668).
gacccagctaaactcaaaa

SEQ ID NO: 371411 - DNA, 19 bp, Homo sapiens
  siRNA target sequence for JMJD1 (NM_018433.2,1689-1707).
gccttcgtacaggatgatt

SEQ ID NO: 371412 - DNA, 19 bp, Homo sapiens
  siRNA target sequence for JMJD1 (NM_018433.2,1758-1776).
gacagtctccgcaaggata

SEQ ID NO: 371413 - DNA, 19 bp, Homo sapiens
  siRNA target sequence for JMJD1 (NM_018433.2,1762-1780).
gtctccgcaaggataagga

SEQ ID NO: 371414 - DNA, 19 bp, Homo sapiens
  siRNA target sequence for JMJD1 (NM_018433.2,1828-1846).
ggttacaattcaacaaaca

SEQ ID NO: 371415 - DNA, 19 bp, Homo sapiens
  siRNA target sequence for JMJD1 (NM_018433.2,1829-1847).
gttacaattcaacaaacat

SEQ ID NO: 371416 - DNA, 19 bp, Homo sapiens
  siRNA target sequence for JMJD1 (NM_018433.2,1857-1875).
cgggtagaaggcttcttaa

SEQ ID NO: 371417 - DNA, 19 bp, Homo sapiens
  siRNA target sequence for JMJD1 (NM_018433.2,1871-1889).
cttaacaccaaacaagtat

SEQ ID NO: 371418 - DNA, 19 bp, Homo sapiens
  siRNA target sequence for JMJD1 (NM_018433.2,1879-1897).
caaacaagtatgacaatga

SEQ ID NO: 371419 - DNA, 19 bp, Homo sapiens
  siRNA target sequence for JMJD1 (NM_018433.2,1905-1923).
ggcttgtggttacctttaa

SEQ ID NO: 371420 - DNA, 19 bp, Homo sapiens
  siRNA target sequence for JMJD1 (NM_018433.2,1910-1928).
gtggttacctttaaccaaa

SEQ ID NO: 371421 - DNA, 19 bp, Homo sapiens
  siRNA target sequence for JMJD1 (NM_018433.2,1912-1930).
ggttacctttaaccaaaaa

SEQ ID NO: 371422 - DNA, 19 bp, Homo sapiens
  siRNA target sequence for JMJD1 (NM_018433.2,2010-2028).
gaaaaggaagctatgtcaa

SEQ ID NO: 371423 - DNA, 19 bp, Homo sapiens
  siRNA target sequence for JMJD1 (NM_018433.2,2140-2158).
gtgggtttggagtatgtgt

SEQ ID NO: 371424 - DNA, 19 bp, Homo sapiens
  siRNA target sequence for JMJD1 (NM_018433.2,2304-2322).
gttggagacattgttcatt

SEQ ID NO: 371425 - DNA, 19 bp, Homo sapiens
  siRNA target sequence for JMJD1 (NM_018433.2,2310-2328).
gacattgttcattctgtaa

SEQ ID NO: 371426 - DNA, 19 bp, Homo sapiens
  siRNA target sequence for JMJD1 (NM_018433.2,2329-2347).
gagcgaaatggggaataaa

SEQ ID NO: 371427 - DNA, 19 bp, Homo sapiens
  siRNA target sequence for JMJD1 (NM_018433.2,2350-2368).
caaactgcccttgttcaaa

SEQ ID NO: 371428 - DNA, 19 bp, Homo sapiens
  siRNA target sequence for JMJD1 (NM_018433.2,2372-2390).
gcaattcaaactcttttca

SEQ ID NO: 371429 - DNA, 19 bp, Homo sapiens
  siRNA target sequence for JMJD1 (NM_018433.2,2551-2569).
ccagcacatctcctctaaa

SEQ ID NO: 371430 - DNA, 19 bp, Homo sapiens
  siRNA target sequence for JMJD1 (NM_018433.2,2587-2605).
ccagcgggaatgtcaacaa

SEQ ID NO: 371431 - DNA, 19 bp, Homo sapiens
  siRNA target sequence for JMJD1 (NM_018433.2,2692-2710).
gcacagtcctccatacgtt

SEQ ID NO: 371432 - DNA, 19 bp, Homo sapiens
  siRNA target sequence for JMJD1 (NM_018433.2,2693-2711).
cacagtcctccatacgttt

SEQ ID NO: 371433 - DNA, 19 bp, Homo sapiens
  siRNA target sequence for JMJD1 (NM_018433.2,2697-2715).
gtcctccatacgtttaaca

SEQ ID NO: 371434 - DNA, 19 bp, Homo sapiens
  siRNA target sequence for JMJD1 (NM_018433.2,2728-2746).
cacccgtaagcaacaacaa

SEQ ID NO: 371435 - DNA, 19 bp, Homo sapiens
  siRNA target sequence for JMJD1 (NM_018433.2,2730-2748).
cccgtaagcaacaacaatt

SEQ ID NO: 371436 - DNA, 19 bp, Homo sapiens
  siRNA target sequence for JMJD1 (NM_018433.2,2732-2750).
cgtaagcaacaacaattct

SEQ ID NO: 371437 - DNA, 19 bp, Homo sapiens
  siRNA target sequence for JMJD1 (NM_018433.2,2751-2769).
ggtttcctccggaatctct

SEQ ID NO: 371438 - DNA, 19 bp, Homo sapiens
  siRNA target sequence for JMJD1 (NM_018433.2,2752-2770).
gtttcctccggaatctctt

SEQ ID NO: 371439 - DNA, 19 bp, Homo sapiens
  siRNA target sequence for JMJD1 (NM_018433.2,2756-2774).
cctccggaatctcttgaat

SEQ ID NO: 371440 - DNA, 19 bp, Homo sapiens
  siRNA target sequence for JMJD1 (NM_018433.2,2757-2775).
ctccggaatctcttgaatt

SEQ ID NO: 371441 - DNA, 19 bp, Homo sapiens
  siRNA target sequence for JMJD1 (NM_018433.2,2791-2809).
cagaaaatggactcaagaa

SEQ ID NO: 371442 - DNA, 19 bp, Homo sapiens
  siRNA target sequence for JMJD1 (NM_018433.2,2793-2811).
gaaaatggactcaagaata

SEQ ID NO: 371443 - DNA, 19 bp, Homo sapiens
  siRNA target sequence for JMJD1 (NM_018433.2,2860-2878).
cgacttctgatttatctaa

SEQ ID NO: 371444 - DNA, 19 bp, Homo sapiens
  siRNA target sequence for JMJD1 (NM_018433.2,2881-2899).
ggcctcaaggactaaccat

SEQ ID NO: 371445 - DNA, 19 bp, Homo sapiens
  siRNA target sequence for JMJD1 (NM_018433.2,3042-3060).
ggagtgcatcataaattga

SEQ ID NO: 371446 - DNA, 19 bp, Homo sapiens
  siRNA target sequence for JMJD1 (NM_018433.2,3043-3061).
gagtgcatcataaattgaa

SEQ ID NO: 371447 - DNA, 19 bp, Homo sapiens
  siRNA target sequence for JMJD1 (NM_018433.2,3110-3128).
ggaagtagacctagttaat

SEQ ID NO: 371448 - DNA, 19 bp, Homo sapiens
  siRNA target sequence for JMJD1 (NM_018433.2,3111-3129).
gaagtagacctagttaatt

SEQ ID NO: 371449 - DNA, 19 bp, Homo sapiens
  siRNA target sequence for JMJD1 (NM_018433.2,3114-3132).
gtagacctagttaattgta

SEQ ID NO: 371450 - DNA, 19 bp, Homo sapiens
  siRNA target sequence for JMJD1 (NM_018433.2,3196-3214).
caaatcgtttgaaaaatga

SEQ ID NO: 371451 - DNA, 19 bp, Homo sapiens
  siRNA target sequence for JMJD1 (NM_018433.2,3222-3240).
ccaatggtgttgaaactta

SEQ ID NO: 371452 - DNA, 19 bp, Homo sapiens
  siRNA target sequence for JMJD1 (NM_018433.2,3275-3293).
gatgccttccaggtttgat

SEQ ID NO: 371453 - DNA, 19 bp, Homo sapiens
  siRNA target sequence for JMJD1 (NM_018433.2,3278-3296).
gccttccaggtttgatgat

SEQ ID NO: 371454 - DNA, 19 bp, Homo sapiens
  siRNA target sequence for JMJD1 (NM_018433.2,3312-3330).
ccactgcccgagtacacaa

SEQ ID NO: 371455 - DNA, 19 bp, Homo sapiens
  siRNA target sequence for JMJD1 (NM_018433.2,3331-3349).
ggcgagatggcaaactgaa

SEQ ID NO: 371456 - DNA, 19 bp, Homo sapiens
  siRNA target sequence for JMJD1 (NM_018433.2,3332-3350).
gcgagatggcaaactgaat

SEQ ID NO: 371457 - DNA, 19 bp, Homo sapiens
  siRNA target sequence for JMJD1 (NM_018433.2,3355-3373).
cctctaggctgccaaacta

SEQ ID NO: 371458 - DNA, 19 bp, Homo sapiens
  siRNA target sequence for JMJD1 (NM_018433.2,3358-3376).
ctaggctgccaaactactt

SEQ ID NO: 371459 - DNA, 19 bp, Homo sapiens
  siRNA target sequence for JMJD1 (NM_018433.2,3361-3379).
ggctgccaaactactttgt

SEQ ID NO: 371460 - DNA, 19 bp, Homo sapiens
  siRNA target sequence for JMJD1 (NM_018433.2,3396-3414).
cccaagatgtataatgctt

SEQ ID NO: 371461 - DNA, 19 bp, Homo sapiens
  siRNA target sequence for JMJD1 (NM_018433.2,3401-3419).
gatgtataatgcttatgga

SEQ ID NO: 371462 - DNA, 19 bp, Homo sapiens
  siRNA target sequence for JMJD1 (NM_018433.2,3484-3502).
ctaatgtcatggtctatgt

SEQ ID NO: 371463 - DNA, 19 bp, Homo sapiens
  siRNA target sequence for JMJD1 (NM_018433.2,3568-3586).
ctgacgaactcacaataaa

SEQ ID NO: 371464 - DNA, 19 bp, Homo sapiens
  siRNA target sequence for JMJD1 (NM_018433.2,3578-3596).
cacaataaagcgatttatt

SEQ ID NO: 371465 - DNA, 19 bp, Homo sapiens
  siRNA target sequence for JMJD1 (NM_018433.2,3615-3633).
ggagcactgtggcacatat

SEQ ID NO: 371466 - DNA, 19 bp, Homo sapiens
  siRNA target sequence for JMJD1 (NM_018433.2,3709-3727).
cagaccacgatcctattca

SEQ ID NO: 371467 - DNA, 19 bp, Homo sapiens
  siRNA target sequence for JMJD1 (NM_018433.2,3713-3731).
ccacgatcctattcatgat

SEQ ID NO: 371468 - DNA, 19 bp, Homo sapiens
  siRNA target sequence for JMJD1 (NM_018433.2,3716-3734).
cgatcctattcatgatcaa

SEQ ID NO: 371469 - DNA, 19 bp, Homo sapiens
  siRNA target sequence for JMJD1 (NM_018433.2,3717-3735).
gatcctattcatgatcaaa

SEQ ID NO: 371470 - DNA, 19 bp, Homo sapiens
  siRNA target sequence for JMJD1 (NM_018433.2,3739-3757).
ggtatttagaccgatcatt

SEQ ID NO: 371471 - DNA, 19 bp, Homo sapiens
  siRNA target sequence for JMJD1 (NM_018433.2,3740-3758).
gtatttagaccgatcatta

SEQ ID NO: 371472 - DNA, 19 bp, Homo sapiens
  siRNA target sequence for JMJD1 (NM_018433.2,3749-3767).
ccgatcattaagaaaacgt

SEQ ID NO: 371473 - DNA, 19 bp, Homo sapiens
  siRNA target sequence for JMJD1 (NM_018433.2,3843-3861).
gctccacatcaggttcata

SEQ ID NO: 371474 - DNA, 19 bp, Homo sapiens
  siRNA target sequence for JMJD1 (NM_018433.2,3855-3873).
gttcataacttatatagct

SEQ ID NO: 371475 - DNA, 19 bp, Homo sapiens
  siRNA target sequence for JMJD1 (NM_018433.2,3863-3881).
cttatatagctgcatcaaa

SEQ ID NO: 371476 - DNA, 19 bp, Homo sapiens
  siRNA target sequence for JMJD1 (NM_018433.2,3903-3921).
ccagagcatgttaaacact

SEQ ID NO: 371477 - DNA, 19 bp, Homo sapiens
  siRNA target sequence for JMJD1 (NM_018433.2,3934-3952).
ctcaggaattccgatatct

SEQ ID NO: 371478 - DNA, 19 bp, Homo sapiens
  siRNA target sequence for JMJD1 (NM_018433.2,3936-3954).
caggaattccgatatctgt

SEQ ID NO: 371479 - DNA, 19 bp, Homo sapiens
  siRNA target sequence for JMJD1 (NM_018433.2,3963-3981).
cataccaatcacgaagata

SEQ ID NO: 371480 - DNA, 19 bp, Homo sapiens
  siRNA target sequence for JMJD1 (NM_018433.2,3967-3985).
ccaatcacgaagataaatt

SEQ ID NO: 371481 - DNA, 19 bp, Homo sapiens
  siRNA target sequence for JMJD1 (NM_018433.2,3968-3986).
caatcacgaagataaatta

SEQ ID NO: 371482 - DNA, 19 bp, Homo sapiens
  siRNA target sequence for ALLC (NM_018436.2,158-176).
cgtaggaggaaaaatttta

SEQ ID NO: 371483 - DNA, 19 bp, Homo sapiens
  siRNA target sequence for ALLC (NM_018436.2,204-222).
gcagaaaacctcataaaga

SEQ ID NO: 371484 - DNA, 19 bp, Homo sapiens
  siRNA target sequence for ALLC (NM_018436.2,256-274).
cggagtttgggaaatggat

SEQ ID NO: 371485 - DNA, 19 bp, Homo sapiens
  siRNA target sequence for ALLC (NM_018436.2,363-381).
gacgtggacgtttcttact

SEQ ID NO: 371486 - DNA, 19 bp, Homo sapiens
  siRNA target sequence for ALLC (NM_018436.2,366-384).
gtggacgtttcttacttca

SEQ ID NO: 371487 - DNA, 19 bp, Homo sapiens
  siRNA target sequence for ALLC (NM_018436.2,376-394).
cttacttcacgggagatta

SEQ ID NO: 371488 - DNA, 19 bp, Homo sapiens
  siRNA target sequence for ALLC (NM_018436.2,504-522).
gccattgctgagctaaaat

SEQ ID NO: 371489 - DNA, 19 bp, Homo sapiens
  siRNA target sequence for ALLC (NM_018436.2,523-541).
ccgacgactggagttactt

SEQ ID NO: 371490 - DNA, 19 bp, Homo sapiens
  siRNA target sequence for ALLC (NM_018436.2,576-594).
gcttccggccacaactatt

SEQ ID NO: 371491 - DNA, 19 bp, Homo sapiens
  siRNA target sequence for ALLC (NM_018436.2,581-599).
cggccacaactattttctt

SEQ ID NO: 371492 - DNA, 19 bp, Homo sapiens
  siRNA target sequence for ALLC (NM_018436.2,587-605).
caactattttcttgtcaat

SEQ ID NO: 371493 - DNA, 19 bp, Homo sapiens
  siRNA target sequence for ALLC (NM_018436.2,655-673).
gaattgcacgacttagagt

SEQ ID NO: 371494 - DNA, 19 bp, Homo sapiens
  siRNA target sequence for ALLC (NM_018436.2,748-766).
ggggtgtctgtgtaggatt

SEQ ID NO: 371495 - DNA, 19 bp, Homo sapiens
  siRNA target sequence for ALLC (NM_018436.2,750-768).
ggtgtctgtgtaggattta

SEQ ID NO: 371496 - DNA, 19 bp, Homo sapiens
  siRNA target sequence for ALLC (NM_018436.2,753-771).
gtctgtgtaggatttagta

SEQ ID NO: 371497 - DNA, 19 bp, Homo sapiens
  siRNA target sequence for ALLC (NM_018436.2,759-777).
gtaggatttagtaatgcta

SEQ ID NO: 371498 - DNA, 19 bp, Homo sapiens
  siRNA target sequence for ALLC (NM_018436.2,783-801).
gggcacccaaacaatataa

SEQ ID NO: 371499 - DNA, 19 bp, Homo sapiens
  siRNA target sequence for ALLC (NM_018436.2,854-872).
gctggaccggccaccaata

SEQ ID NO: 371500 - DNA, 19 bp, Homo sapiens
  siRNA target sequence for ALLC (NM_018436.2,855-873).
ctggaccggccaccaatat

SEQ ID NO: 371501 - DNA, 19 bp, Homo sapiens
  siRNA target sequence for ALLC (NM_018436.2,857-875).
ggaccggccaccaatatta

SEQ ID NO: 371502 - DNA, 19 bp, Homo sapiens
  siRNA target sequence for ALLC (NM_018436.2,860-878).
ccggccaccaatattagaa

SEQ ID NO: 371503 - DNA, 19 bp, Homo sapiens
  siRNA target sequence for ALLC (NM_018436.2,861-879).
cggccaccaatattagaaa

SEQ ID NO: 371504 - DNA, 19 bp, Homo sapiens
  siRNA target sequence for ALLC (NM_018436.2,862-880).
ggccaccaatattagaaaa

SEQ ID NO: 371505 - DNA, 19 bp, Homo sapiens
  siRNA target sequence for ALLC (NM_018436.2,936-954).
gcacatcctggagtaataa

SEQ ID NO: 371506 - DNA, 19 bp, Homo sapiens
  siRNA target sequence for ALLC (NM_018436.2,946-964).
gagtaataactcgaattga

SEQ ID NO: 371507 - DNA, 19 bp, Homo sapiens
  siRNA target sequence for ALLC (NM_018436.2,994-1012).
ctcctgacagctgtaaagt

SEQ ID NO: 371508 - DNA, 19 bp, Homo sapiens
  siRNA target sequence for ALLC (NM_018436.2,1112-1130).
gtctcccaaccaaagtcat

SEQ ID NO: 371509 - DNA, 19 bp, Homo sapiens
  siRNA target sequence for ALLC (NM_018436.2,1147-1165).
ccctagagctccaagatgt

SEQ ID NO: 371510 - DNA, 19 bp, Homo sapiens
  siRNA target sequence for ALLC (NM_018436.2,1260-1278).
cgggagaagcccatgttga

SEQ ID NO: 371511 - DNA, 19 bp, Homo sapiens
  siRNA target sequence for ALLC (NM_018436.2,1261-1279).
gggagaagcccatgttgaa

SEQ ID NO: 371512 - DNA, 19 bp, Homo sapiens
  siRNA target sequence for ALLC (NM_018436.2,1280-1298).
gttctcggtgagcttcaaa

SEQ ID NO: 371513 - DNA, 19 bp, Homo sapiens
  siRNA target sequence for ALLC (NM_018436.2,1285-1303).
cggtgagcttcaaagcaaa

SEQ ID NO: 371514 - DNA, 19 bp, Homo sapiens
  siRNA target sequence for HEMGN (NM_018437.3,150-168).
ggaaaggaccaatctcatt

SEQ ID NO: 371515 - DNA, 19 bp, Homo sapiens
  siRNA target sequence for HEMGN (NM_018437.3,151-169).
gaaaggaccaatctcattt

SEQ ID NO: 371516 - DNA, 19 bp, Homo sapiens
  siRNA target sequence for HEMGN (NM_018437.3,182-200).
gacacctgaccctcatcaa

SEQ ID NO: 371517 - DNA, 19 bp, Homo sapiens
  siRNA target sequence for HEMGN (NM_018437.3,279-297).
gtgcatgaaaaggaaacat

SEQ ID NO: 371518 - DNA, 19 bp, Homo sapiens
  siRNA target sequence for HEMGN (NM_018437.3,398-416).
ggagcctcagccacagata

SEQ ID NO: 371519 - DNA, 19 bp, Homo sapiens
  siRNA target sequence for HEMGN (NM_018437.3,465-483).
gagccacctgggagcataa

SEQ ID NO: 371520 - DNA, 19 bp, Homo sapiens
  siRNA target sequence for HEMGN (NM_018437.3,469-487).
cacctgggagcataaccaa

SEQ ID NO: 371521 - DNA, 19 bp, Homo sapiens
  siRNA target sequence for HEMGN (NM_018437.3,522-540).
gtgcctgaggaacactttt

SEQ ID NO: 371522 - DNA, 19 bp, Homo sapiens
  siRNA target sequence for HEMGN (NM_018437.3,651-669).
gacctctctcctaaaatgt

SEQ ID NO: 371523 - DNA, 19 bp, Homo sapiens
  siRNA target sequence for HEMGN (NM_018437.3,684-702).
gtacttcaagacaattctt

SEQ ID NO: 371524 - DNA, 19 bp, Homo sapiens
  siRNA target sequence for HEMGN (NM_018437.3,735-753).
gacaactctcctaacacat

SEQ ID NO: 371525 - DNA, 19 bp, Homo sapiens
  siRNA target sequence for HEMGN (NM_018437.3,744-762).
cctaacacatgccaagtaa

SEQ ID NO: 371526 - DNA, 19 bp, Homo sapiens
  siRNA target sequence for HEMGN (NM_018437.3,745-763).
ctaacacatgccaagtaat

SEQ ID NO: 371527 - DNA, 19 bp, Homo sapiens
  siRNA target sequence for HEMGN (NM_018437.3,797-815).
ccaagatatggctaaacga

SEQ ID NO: 371528 - DNA, 19 bp, Homo sapiens
  siRNA target sequence for HEMGN (NM_018437.3,816-834).
gaagatctggctcctaaaa

SEQ ID NO: 371529 - DNA, 19 bp, Homo sapiens
  siRNA target sequence for HEMGN (NM_018437.3,819-837).
gatctggctcctaaaatgt

SEQ ID NO: 371530 - DNA, 19 bp, Homo sapiens
  siRNA target sequence for HEMGN (NM_018437.3,847-865).
ctgctgtacccaaaatcct

SEQ ID NO: 371531 - DNA, 19 bp, Homo sapiens
  siRNA target sequence for HEMGN (NM_018437.3,904-922).
gatgctctcttcaagcata

SEQ ID NO: 371532 - DNA, 19 bp, Homo sapiens
  siRNA target sequence for HEMGN (NM_018437.3,938-956).
gcctaaaggctatattctt

SEQ ID NO: 371533 - DNA, 19 bp, Homo sapiens
  siRNA target sequence for HEMGN (NM_018437.3,1089-1107).
gaatcagctgaacctaaat

SEQ ID NO: 371534 - DNA, 19 bp, Homo sapiens
  siRNA target sequence for HEMGN (NM_018437.3,1123-1141).
catgtaacgaaattattgt

SEQ ID NO: 371535 - DNA, 19 bp, Homo sapiens
  siRNA target sequence for HEMGN (NM_018437.3,1150-1168).
ccccctctcataaaacaat

SEQ ID NO: 371536 - DNA, 19 bp, Homo sapiens
  siRNA target sequence for HEMGN (NM_018437.3,1240-1258).
cacctgaaacgtatcaaga

SEQ ID NO: 371537 - DNA, 19 bp, Homo sapiens
  siRNA target sequence for HEMGN (NM_018437.3,1263-1281).
cctgggcttgaagaatatt

SEQ ID NO: 371538 - DNA, 19 bp, Homo sapiens
  siRNA target sequence for HEMGN (NM_018437.3,1366-1384).
ctactgagacatataaaaa

SEQ ID NO: 371539 - DNA, 19 bp, Homo sapiens
  siRNA target sequence for HEMGN (NM_018437.3,1473-1491).
gctaaagatgcttatactt

SEQ ID NO: 371540 - DNA, 19 bp, Homo sapiens
  siRNA target sequence for HEMGN (NM_018437.3,1531-1549).
gaataccagcaattctgaa

SEQ ID NO: 371541 - DNA, 19 bp, Homo sapiens
  siRNA target sequence for FBXO6 (NM_018438.2,157-175).
gcagccctggacagcatta

SEQ ID NO: 371542 - DNA, 19 bp, Homo sapiens
  siRNA target sequence for FBXO6 (NM_018438.2,410-428).
cgtgtgctgaagaggatat

SEQ ID NO: 371543 - DNA, 19 bp, Homo sapiens
  siRNA target sequence for FBXO6 (NM_018438.2,434-452).
catggcaaattgatttcaa

SEQ ID NO: 371544 - DNA, 19 bp, Homo sapiens
  siRNA target sequence for FBXO6 (NM_018438.2,492-510).
ccacgggacagattttcct

SEQ ID NO: 371545 - DNA, 19 bp, Homo sapiens
  siRNA target sequence for FBXO6 (NM_018438.2,520-538).
gtcaagaagtattttgtca

SEQ ID NO: 371546 - DNA, 19 bp, Homo sapiens
  siRNA target sequence for FBXO6 (NM_018438.2,535-553).
gtcacatcctacgaaatgt

SEQ ID NO: 371547 - DNA, 19 bp, Homo sapiens
  siRNA target sequence for FBXO6 (NM_018438.2,668-686).
gctgcacctaccaactcaa

SEQ ID NO: 371548 - DNA, 19 bp, Homo sapiens
  siRNA target sequence for FBXO6 (NM_018438.2,669-687).
ctgcacctaccaactcaaa

SEQ ID NO: 371549 - DNA, 19 bp, Homo sapiens
  siRNA target sequence for FBXO6 (NM_018438.2,671-689).
gcacctaccaactcaaagt

SEQ ID NO: 371550 - DNA, 19 bp, Homo sapiens
  siRNA target sequence for FBXO6 (NM_018438.2,747-765).
catccaacagtggaacaat

SEQ ID NO: 371551 - DNA, 19 bp, Homo sapiens
  siRNA target sequence for FBXO6 (NM_018438.2,994-1012).
cgagctgttgtccagattt

SEQ ID NO: 371552 - DNA, 19 bp, Homo sapiens
  siRNA target sequence for LOC55831 (NM_018447.1,328-346).
ctgacagtcaagtcctaat

SEQ ID NO: 371553 - DNA, 19 bp, Homo sapiens
  siRNA target sequence for LOC55831 (NM_018447.1,332-350).
cagtcaagtcctaattcga

SEQ ID NO: 371554 - DNA, 19 bp, Homo sapiens
  siRNA target sequence for LOC55831 (NM_018447.1,392-410).
gtctttcttgacacgaaaa

SEQ ID NO: 371555 - DNA, 19 bp, Homo sapiens
  siRNA target sequence for LOC55831 (NM_018447.1,398-416).
cttgacacgaaaatattat

SEQ ID NO: 371556 - DNA, 19 bp, Homo sapiens
  siRNA target sequence for LOC55831 (NM_018447.1,478-496).
ctatgactgatcctactat

SEQ ID NO: 371557 - DNA, 19 bp, Homo sapiens
  siRNA target sequence for LOC55831 (NM_018447.1,509-527).
gatgaaagggaatgtaaca

SEQ ID NO: 371558 - DNA, 19 bp, Homo sapiens
  siRNA target sequence for LOC55831 (NM_018447.1,526-544).
caaatgtcctccctatgat

SEQ ID NO: 371559 - DNA, 19 bp, Homo sapiens
  siRNA target sequence for LOC55831 (NM_018447.1,533-551).
cctccctatgattcttatt

SEQ ID NO: 371560 - DNA, 19 bp, Homo sapiens
  siRNA target sequence for LOC55831 (NM_018447.1,536-554).
ccctatgattcttattggt

SEQ ID NO: 371561 - DNA, 19 bp, Homo sapiens
  siRNA target sequence for LOC55831 (NM_018447.1,552-570).
ggtggatggatcaacatga

SEQ ID NO: 371562 - DNA, 19 bp, Homo sapiens
  siRNA target sequence for LOC55831 (NM_018447.1,555-573).
ggatggatcaacatgacat

SEQ ID NO: 371563 - DNA, 19 bp, Homo sapiens
  siRNA target sequence for LOC55831 (NM_018447.1,556-574).
gatggatcaacatgacatt

SEQ ID NO: 371564 - DNA, 19 bp, Homo sapiens
  siRNA target sequence for LOC55831 (NM_018447.1,606-624).
ccactgaccctccgtttta

SEQ ID NO: 371565 - DNA, 19 bp, Homo sapiens
  siRNA target sequence for LOC55831 (NM_018447.1,607-625).
cactgaccctccgttttaa

SEQ ID NO: 371566 - DNA, 19 bp, Homo sapiens
  siRNA target sequence for LOC55831 (NM_018447.1,617-635).
ccgttttaagcctatgtta

SEQ ID NO: 371567 - DNA, 19 bp, Homo sapiens
  siRNA target sequence for LOC55831 (NM_018447.1,643-661).
gaatcgagctactcacatt

SEQ ID NO: 371568 - DNA, 19 bp, Homo sapiens
  siRNA target sequence for LOC55831 (NM_018447.1,647-665).
cgagctactcacattagat

SEQ ID NO: 371569 - DNA, 19 bp, Homo sapiens
  siRNA target sequence for LOC55831 (NM_018447.1,688-706).
cctggtacttcctcaatgt

SEQ ID NO: 371570 - DNA, 19 bp, Homo sapiens
  siRNA target sequence for LOC55831 (NM_018447.1,692-710).
gtacttcctcaatgtattt

SEQ ID NO: 371571 - DNA, 19 bp, Homo sapiens
  siRNA target sequence for LOC55831 (NM_018447.1,711-729).
gggcttcggagcatttact

SEQ ID NO: 371572 - DNA, 19 bp, Homo sapiens
  siRNA target sequence for LOC55831 (NM_018447.1,713-731).
gcttcggagcatttactct

SEQ ID NO: 371573 - DNA, 19 bp, Homo sapiens
  siRNA target sequence for LOC55831 (NM_018447.1,719-737).
gagcatttactctctgatt

SEQ ID NO: 371574 - DNA, 19 bp, Homo sapiens
  siRNA target sequence for LOC55831 (NM_018447.1,734-752).
gattctgggccaagataat

SEQ ID NO: 371575 - DNA, 19 bp, Homo sapiens
  siRNA target sequence for LOC55831 (NM_018447.1,757-775).
ctgaccaatcacgaatgat

SEQ ID NO: 371576 - DNA, 19 bp, Homo sapiens
  siRNA target sequence for LOC55831 (NM_018447.1,805-823).
ccatgcccgcagacacaaa

SEQ ID NO: 371577 - DNA, 19 bp, Homo sapiens
  siRNA target sequence for LOC55831 (NM_018447.1,813-831).
gcagacacaaacaaagctt

SEQ ID NO: 371578 - DNA, 19 bp, Homo sapiens
  siRNA target sequence for LOC55831 (NM_018447.1,918-936).
cacttcgaaggcatgttca

SEQ ID NO: 371579 - DNA, 19 bp, Homo sapiens
  siRNA target sequence for LOC55831 (NM_018447.1,920-938).
cttcgaaggcatgttcaaa

SEQ ID NO: 371580 - DNA, 19 bp, Homo sapiens
  siRNA target sequence for TIP120A (NM_018448.2,425-443).
gctacaaatgatttgatga

SEQ ID NO: 371581 - DNA, 19 bp, Homo sapiens
  siRNA target sequence for TIP120A (NM_018448.2,567-585).
gtcctttagtgagtaaagt

SEQ ID NO: 371582 - DNA, 19 bp, Homo sapiens
  siRNA target sequence for TIP120A (NM_018448.2,569-587).
cctttagtgagtaaagtga

SEQ ID NO: 371583 - DNA, 19 bp, Homo sapiens
  siRNA target sequence for TIP120A (NM_018448.2,614-632).
gataccctctgcactaaca

SEQ ID NO: 371584 - DNA, 19 bp, Homo sapiens
  siRNA target sequence for TIP120A (NM_018448.2,624-642).
gcactaacatgctttctga

SEQ ID NO: 371585 - DNA, 19 bp, Homo sapiens
  siRNA target sequence for TIP120A (NM_018448.2,625-643).
cactaacatgctttctgat

SEQ ID NO: 371586 - DNA, 19 bp, Homo sapiens
  siRNA target sequence for TIP120A (NM_018448.2,653-671).
cttcgagacatttcaagta

SEQ ID NO: 371587 - DNA, 19 bp, Homo sapiens
  siRNA target sequence for TIP120A (NM_018448.2,720-738).
ctgcattagctgctaatgt

SEQ ID NO: 371588 - DNA, 19 bp, Homo sapiens
  siRNA target sequence for TIP120A (NM_018448.2,722-740).
gcattagctgctaatgtat

SEQ ID NO: 371589 - DNA, 19 bp, Homo sapiens
  siRNA target sequence for TIP120A (NM_018448.2,728-746).
gctgctaatgtatgtaaaa

SEQ ID NO: 371590 - DNA, 19 bp, Homo sapiens
  siRNA target sequence for TIP120A (NM_018448.2,731-749).
gctaatgtatgtaaaaaga

SEQ ID NO: 371591 - DNA, 19 bp, Homo sapiens
  siRNA target sequence for TIP120A (NM_018448.2,748-766).
gattactggacgtcttaca

SEQ ID NO: 371592 - DNA, 19 bp, Homo sapiens
  siRNA target sequence for TIP120A (NM_018448.2,761-779).
cttacaagtgcaatagcaa

SEQ ID NO: 371593 - DNA, 19 bp, Homo sapiens
  siRNA target sequence for TIP120A (NM_018448.2,800-818).
cagctagaagccttggata

SEQ ID NO: 371594 - DNA, 19 bp, Homo sapiens
  siRNA target sequence for TIP120A (NM_018448.2,815-833).
gatattatggctgatatgt

SEQ ID NO: 371595 - DNA, 19 bp, Homo sapiens
  siRNA target sequence for TIP120A (NM_018448.2,849-867).
gacttcttgttaatttcca

SEQ ID NO: 371596 - DNA, 19 bp, Homo sapiens
  siRNA target sequence for TIP120A (NM_018448.2,898-916).
gttgaccagccctagactt

SEQ ID NO: 371597 - DNA, 19 bp, Homo sapiens
  siRNA target sequence for TIP120A (NM_018448.2,944-962).
cttggccatctggttatga

SEQ ID NO: 371598 - DNA, 19 bp, Homo sapiens
  siRNA target sequence for TIP120A (NM_018448.2,1006-1024).
gtcagagttgtccaaaaat

SEQ ID NO: 371599 - DNA, 19 bp, Homo sapiens
  siRNA target sequence for TIP120A (NM_018448.2,1010-1028).
gagttgtccaaaaatgatt

SEQ ID NO: 371600 - DNA, 19 bp, Homo sapiens
  siRNA target sequence for TIP120A (NM_018448.2,1048-1066).
ctacatacaatgtattgct

SEQ ID NO: 371601 - DNA, 19 bp, Homo sapiens
  siRNA target sequence for TIP120A (NM_018448.2,1157-1175).
gaattaagagagtactgta

SEQ ID NO: 371602 - DNA, 19 bp, Homo sapiens
  siRNA target sequence for TIP120A (NM_018448.2,1171-1189).
ctgtattcaagcctttgaa

SEQ ID NO: 371603 - DNA, 19 bp, Homo sapiens
  siRNA target sequence for TIP120A (NM_018448.2,1181-1199).
gcctttgaatcatttgtaa

SEQ ID NO: 371604 - DNA, 19 bp, Homo sapiens
  siRNA target sequence for TIP120A (NM_018448.2,1251-1269).
gtcttaaatatcttaccta

SEQ ID NO: 371605 - DNA, 19 bp, Homo sapiens
  siRNA target sequence for TIP120A (NM_018448.2,1414-1432).
gtgcttggatgctgtagtt

SEQ ID NO: 371606 - DNA, 19 bp, Homo sapiens
  siRNA target sequence for TIP120A (NM_018448.2,1430-1448).
gttagcacaaggcatgaaa

SEQ ID NO: 371607 - DNA, 19 bp, Homo sapiens
  siRNA target sequence for TIP120A (NM_018448.2,1434-1452).
gcacaaggcatgaaatgct

SEQ ID NO: 371608 - DNA, 19 bp, Homo sapiens
  siRNA target sequence for TIP120A (NM_018448.2,1445-1463).
gaaatgcttccagaattct

SEQ ID NO: 371609 - DNA, 19 bp, Homo sapiens
  siRNA target sequence for TIP120A (NM_018448.2,1502-1520).
gagcgtgaagagaatgtaa

SEQ ID NO: 371610 - DNA, 19 bp, Homo sapiens
  siRNA target sequence for TIP120A (NM_018448.2,1558-1576).
gcaaactcgtcctgtacaa

SEQ ID NO: 371611 - DNA, 19 bp, Homo sapiens
  siRNA target sequence for TIP120A (NM_018448.2,1559-1577).
caaactcgtcctgtacaaa

SEQ ID NO: 371612 - DNA, 19 bp, Homo sapiens
  siRNA target sequence for TIP120A (NM_018448.2,1636-1654).
gagtcaggttcccaacatt

SEQ ID NO: 371613 - DNA, 19 bp, Homo sapiens
  siRNA target sequence for TIP120A (NM_018448.2,1696-1714).
gacccgacagtgttgtttt

SEQ ID NO: 371614 - DNA, 19 bp, Homo sapiens
  siRNA target sequence for TIP120A (NM_018448.2,1698-1716).
cccgacagtgttgttttaa

SEQ ID NO: 371615 - DNA, 19 bp, Homo sapiens
  siRNA target sequence for TIP120A (NM_018448.2,1700-1718).
cgacagtgttgttttaaca

SEQ ID NO: 371616 - DNA, 19 bp, Homo sapiens
  siRNA target sequence for TIP120A (NM_018448.2,1701-1719).
gacagtgttgttttaacat

SEQ ID NO: 371617 - DNA, 19 bp, Homo sapiens
  siRNA target sequence for TIP120A (NM_018448.2,1795-1813).
ctcactgaatgataaatca

SEQ ID NO: 371618 - DNA, 19 bp, Homo sapiens
  siRNA target sequence for TIP120A (NM_018448.2,1812-1830).
caagctcatcgaatttgaa

SEQ ID NO: 371619 - DNA, 19 bp, Homo sapiens
  siRNA target sequence for TIP120A (NM_018448.2,1815-1833).
gctcatcgaatttgaagat

SEQ ID NO: 371620 - DNA, 19 bp, Homo sapiens
  siRNA target sequence for TIP120A (NM_018448.2,1828-1846).
gaagatcgatgctttgtca

SEQ ID NO: 371621 - DNA, 19 bp, Homo sapiens
  siRNA target sequence for TIP120A (NM_018448.2,1834-1852).
cgatgctttgtcatgtcta

SEQ ID NO: 371622 - DNA, 19 bp, Homo sapiens
  siRNA target sequence for TIP120A (NM_018448.2,1835-1853).
gatgctttgtcatgtctat

SEQ ID NO: 371623 - DNA, 19 bp, Homo sapiens
  siRNA target sequence for TIP120A (NM_018448.2,1839-1857).
ctttgtcatgtctatacgt

SEQ ID NO: 371624 - DNA, 19 bp, Homo sapiens
  siRNA target sequence for TIP120A (NM_018448.2,1845-1863).
catgtctatacgtaatcct

SEQ ID NO: 371625 - DNA, 19 bp, Homo sapiens
  siRNA target sequence for TIP120A (NM_018448.2,1855-1873).
cgtaatcctctgtaaccat

SEQ ID NO: 371626 - DNA, 19 bp, Homo sapiens
  siRNA target sequence for TIP120A (NM_018448.2,1856-1874).
gtaatcctctgtaaccatt

SEQ ID NO: 371627 - DNA, 19 bp, Homo sapiens
  siRNA target sequence for TIP120A (NM_018448.2,1931-1949).
gttggagacccattttaca

SEQ ID NO: 371628 - DNA, 19 bp, Homo sapiens
  siRNA target sequence for TIP120A (NM_018448.2,1977-1995).
ctcaacagcttgtcaaagt

SEQ ID NO: 371629 - DNA, 19 bp, Homo sapiens
  siRNA target sequence for TIP120A (NM_018448.2,1984-2002).
gcttgtcaaagtaattcgt

SEQ ID NO: 371630 - DNA, 19 bp, Homo sapiens
  siRNA target sequence for TIP120A (NM_018448.2,1990-2008).
caaagtaattcgtccttta

SEQ ID NO: 371631 - DNA, 19 bp, Homo sapiens
  siRNA target sequence for TIP120A (NM_018448.2,2023-2041).
gtttgatgcaactccttat

SEQ ID NO: 371632 - DNA, 19 bp, Homo sapiens
  siRNA target sequence for TIP120A (NM_018448.2,2027-2045).
gatgcaactccttatatca

SEQ ID NO: 371633 - DNA, 19 bp, Homo sapiens
  siRNA target sequence for TIP120A (NM_018448.2,2034-2052).
ctccttatatcaaagatct

SEQ ID NO: 371634 - DNA, 19 bp, Homo sapiens
  siRNA target sequence for TIP120A (NM_018448.2,2051-2069).
ctatttacctgtaccatta

SEQ ID NO: 371635 - DNA, 19 bp, Homo sapiens
  siRNA target sequence for TIP120A (NM_018448.2,2058-2076).
cctgtaccattaagagatt

SEQ ID NO: 371636 - DNA, 19 bp, Homo sapiens
  siRNA target sequence for TIP120A (NM_018448.2,2061-2079).
gtaccattaagagattaaa

SEQ ID NO: 371637 - DNA, 19 bp, Homo sapiens
  siRNA target sequence for TIP120A (NM_018448.2,2121-2139).
cctgtatgggacaaattat

SEQ ID NO: 371638 - DNA, 19 bp, Homo sapiens
  siRNA target sequence for TIP120A (NM_018448.2,2174-2192).
cctaatacacttcagattt

SEQ ID NO: 371639 - DNA, 19 bp, Homo sapiens
  siRNA target sequence for TIP120A (NM_018448.2,2366-2384).
gcccttgatattctaataa

SEQ ID NO: 371640 - DNA, 19 bp, Homo sapiens
  siRNA target sequence for TIP120A (NM_018448.2,2367-2385).
cccttgatattctaataaa

SEQ ID NO: 371641 - DNA, 19 bp, Homo sapiens
  siRNA target sequence for TIP120A (NM_018448.2,2435-2453).
gagctcccacctcttatca

SEQ ID NO: 371642 - DNA, 19 bp, Homo sapiens
  siRNA target sequence for TIP120A (NM_018448.2,2447-2465).
cttatcagcgaaagtgata

SEQ ID NO: 371643 - DNA, 19 bp, Homo sapiens
  siRNA target sequence for TIP120A (NM_018448.2,2452-2470).
cagcgaaagtgatatgcat

SEQ ID NO: 371644 - DNA, 19 bp, Homo sapiens
  siRNA target sequence for TIP120A (NM_018448.2,2456-2474).
gaaagtgatatgcatgttt

SEQ ID NO: 371645 - DNA, 19 bp, Homo sapiens
  siRNA target sequence for TIP120A (NM_018448.2,2460-2478).
gtgatatgcatgtttcaca

SEQ ID NO: 371646 - DNA, 19 bp, Homo sapiens
  siRNA target sequence for TIP120A (NM_018448.2,2462-2480).
gatatgcatgtttcacaaa

SEQ ID NO: 371647 - DNA, 19 bp, Homo sapiens
  siRNA target sequence for TIP120A (NM_018448.2,2499-2517).
ccactttggcaaaagtata

SEQ ID NO: 371648 - DNA, 19 bp, Homo sapiens
  siRNA target sequence for TIP120A (NM_018448.2,2524-2542).
ctccctttcaaagataagt

SEQ ID NO: 371649 - DNA, 19 bp, Homo sapiens
  siRNA target sequence for TIP120A (NM_018448.2,2541-2559).
gtggatccattctcaatga

SEQ ID NO: 371650 - DNA, 19 bp, Homo sapiens
  siRNA target sequence for TIP120A (NM_018448.2,2544-2562).
gatccattctcaatgaact

SEQ ID NO: 371651 - DNA, 19 bp, Homo sapiens
  siRNA target sequence for TIP120A (NM_018448.2,2547-2565).
ccattctcaatgaacttat

SEQ ID NO: 371652 - DNA, 19 bp, Homo sapiens
  siRNA target sequence for TIP120A (NM_018448.2,2548-2566).
cattctcaatgaacttatt

SEQ ID NO: 371653 - DNA, 19 bp, Homo sapiens
  siRNA target sequence for TIP120A (NM_018448.2,2590-2608).
gcaggggggagctcttagt

SEQ ID NO: 371654 - DNA, 19 bp, Homo sapiens
  siRNA target sequence for TIP120A (NM_018448.2,2607-2625).
gtgccatgctagacttttt

SEQ ID NO: 371655 - DNA, 19 bp, Homo sapiens
  siRNA target sequence for TIP120A (NM_018448.2,2636-2654).
gttgtcactggaacaaata

SEQ ID NO: 371656 - DNA, 19 bp, Homo sapiens
  siRNA target sequence for TIP120A (NM_018448.2,2795-2813).
gctgtagtaggtcagttta

SEQ ID NO: 371657 - DNA, 19 bp, Homo sapiens
  siRNA target sequence for TIP120A (NM_018448.2,2832-2850).
caaggtctacagattccat

SEQ ID NO: 371658 - DNA, 19 bp, Homo sapiens
  siRNA target sequence for TIP120A (NM_018448.2,2852-2870).
cgtctcttagctctacttt

SEQ ID NO: 371659 - DNA, 19 bp, Homo sapiens
  siRNA target sequence for TIP120A (NM_018448.2,2904-2922).
gtggacagttggaactaaa

SEQ ID NO: 371660 - DNA, 19 bp, Homo sapiens
  siRNA target sequence for TIP120A (NM_018448.2,2906-2924).
ggacagttggaactaaaat

SEQ ID NO: 371661 - DNA, 19 bp, Homo sapiens
  siRNA target sequence for TIP120A (NM_018448.2,2914-2932).
ggaactaaaatctgtaata

SEQ ID NO: 371662 - DNA, 19 bp, Homo sapiens
  siRNA target sequence for TIP120A (NM_018448.2,2925-2943).
ctgtaatactagaagcttt

SEQ ID NO: 371663 - DNA, 19 bp, Homo sapiens
  siRNA target sequence for TIP120A (NM_018448.2,2970-2988).
cagctgcatcctatgcatt

SEQ ID NO: 371664 - DNA, 19 bp, Homo sapiens
  siRNA target sequence for TIP120A (NM_018448.2,2985-3003).
cattaggcagcattagtgt

SEQ ID NO: 371665 - DNA, 19 bp, Homo sapiens
  siRNA target sequence for TIP120A (NM_018448.2,3004-3022).
gggcaaccttcctgaatat

SEQ ID NO: 371666 - DNA, 19 bp, Homo sapiens
  siRNA target sequence for TIP120A (NM_018448.2,3026-3044).
ccgtttgtcctgcaagaaa

SEQ ID NO: 371667 - DNA, 19 bp, Homo sapiens
  siRNA target sequence for TIP120A (NM_018448.2,3027-3045).
cgtttgtcctgcaagaaat

SEQ ID NO: 371668 - DNA, 19 bp, Homo sapiens
  siRNA target sequence for TIP120A (NM_018448.2,3028-3046).
gtttgtcctgcaagaaata

SEQ ID NO: 371669 - DNA, 19 bp, Homo sapiens
  siRNA target sequence for TIP120A (NM_018448.2,3056-3074).
cccaaaaggcagtatcttt

SEQ ID NO: 371670 - DNA, 19 bp, Homo sapiens
  siRNA target sequence for TIP120A (NM_018448.2,3063-3081).
ggcagtatcttttacttca

SEQ ID NO: 371671 - DNA, 19 bp, Homo sapiens
  siRNA target sequence for TIP120A (NM_018448.2,3115-3133).
ggtgggccttaaaccatat

SEQ ID NO: 371672 - DNA, 19 bp, Homo sapiens
  siRNA target sequence for TIP120A (NM_018448.2,3118-3136).
gggccttaaaccatatgtt

SEQ ID NO: 371673 - DNA, 19 bp, Homo sapiens
  siRNA target sequence for TIP120A (NM_018448.2,3120-3138).
gccttaaaccatatgttga

SEQ ID NO: 371674 - DNA, 19 bp, Homo sapiens
  siRNA target sequence for TIP120A (NM_018448.2,3142-3160).
catctgggccttattacta

SEQ ID NO: 371675 - DNA, 19 bp, Homo sapiens
  siRNA target sequence for TIP120A (NM_018448.2,3254-3272).
cggcttaaggggtacttga

SEQ ID NO: 371676 - DNA, 19 bp, Homo sapiens
  siRNA target sequence for TIP120A (NM_018448.2,3257-3275).
cttaaggggtacttgatat

SEQ ID NO: 371677 - DNA, 19 bp, Homo sapiens
  siRNA target sequence for TIP120A (NM_018448.2,3271-3289).
gatatcaggctcatcatat

SEQ ID NO: 371678 - DNA, 19 bp, Homo sapiens
  siRNA target sequence for TIP120A (NM_018448.2,3302-3320).
gtggttacggctgtgaaat

SEQ ID NO: 371679 - DNA, 19 bp, Homo sapiens
  siRNA target sequence for TIP120A (NM_018448.2,3304-3322).
ggttacggctgtgaaattt

SEQ ID NO: 371680 - DNA, 19 bp, Homo sapiens
  siRNA target sequence for TIP120A (NM_018448.2,3305-3323).
gttacggctgtgaaattta

SEQ ID NO: 371681 - DNA, 19 bp, Homo sapiens
  siRNA target sequence for TIP120A (NM_018448.2,3309-3327).
cggctgtgaaatttacaat

SEQ ID NO: 371682 - DNA, 19 bp, Homo sapiens
  siRNA target sequence for TIP120A (NM_018448.2,3310-3328).
ggctgtgaaatttacaatt

SEQ ID NO: 371683 - DNA, 19 bp, Homo sapiens
  siRNA target sequence for TIP120A (NM_018448.2,3311-3329).
gctgtgaaatttacaattt

SEQ ID NO: 371684 - DNA, 19 bp, Homo sapiens
  siRNA target sequence for TIP120A (NM_018448.2,3422-3440).
gtagccttggtcacattta

SEQ ID NO: 371685 - DNA, 19 bp, Homo sapiens
  siRNA target sequence for TIP120A (NM_018448.2,3452-3470).
cataacaagccatcattaa

SEQ ID NO: 371686 - DNA, 19 bp, Homo sapiens
  siRNA target sequence for TIP120A (NM_018448.2,3533-3551).
cttataagagaggtagaaa

SEQ ID NO: 371687 - DNA, 19 bp, Homo sapiens
  siRNA target sequence for TIP120A (NM_018448.2,3612-3630).
gtatgtacacacttctaga

SEQ ID NO: 371688 - DNA, 19 bp, Homo sapiens
  siRNA target sequence for TIP120A (NM_018448.2,3626-3644).
ctagacagttgtcttgata

SEQ ID NO: 371689 - DNA, 19 bp, Homo sapiens
  siRNA target sequence for TIP120A (NM_018448.2,3636-3654).
gtcttgatagacttgatat

SEQ ID NO: 371690 - DNA, 19 bp, Homo sapiens
  siRNA target sequence for TIP120A (NM_018448.2,3769-3787).
gaggttggaccgacttgtt

SEQ ID NO: 371691 - DNA, 19 bp, Homo sapiens
  siRNA target sequence for TIP120A (NM_018448.2,3771-3789).
ggttggaccgacttgttga

SEQ ID NO: 371692 - DNA, 19 bp, Homo sapiens
  siRNA target sequence for TIP120A (NM_018448.2,3790-3808).
gccattacgtgcaacatgt

SEQ ID NO: 371693 - DNA, 19 bp, Homo sapiens
  siRNA target sequence for TIP120A (NM_018448.2,3791-3809).
ccattacgtgcaacatgta

SEQ ID NO: 371694 - DNA, 19 bp, Homo sapiens
  siRNA target sequence for TIP120A (NM_018448.2,3797-3815).
cgtgcaacatgtacaacta

SEQ ID NO: 371695 - DNA, 19 bp, Homo sapiens
  siRNA target sequence for TIP120A (NM_018448.2,3798-3816).
gtgcaacatgtacaactaa

SEQ ID NO: 371696 - DNA, 19 bp, Homo sapiens
  siRNA target sequence for TIP120A (NM_018448.2,3804-3822).
catgtacaactaaggtaaa

SEQ ID NO: 371697 - DNA, 19 bp, Homo sapiens
  siRNA target sequence for TIP120A (NM_018448.2,3924-3942).
gtccactgatgagtgaatt

SEQ ID NO: 371698 - DNA, 19 bp, Homo sapiens
  siRNA target sequence for TIP120A (NM_018448.2,3927-3945).
cactgatgagtgaattcca

SEQ ID NO: 371699 - DNA, 19 bp, Homo sapiens
  siRNA target sequence for TIP120A (NM_018448.2,3944-3962).
cagtcacagatcagttcta

SEQ ID NO: 371700 - DNA, 19 bp, Homo sapiens
  siRNA target sequence for TIP120A (NM_018448.2,3966-3984).
ctgagctggcggctatctt

SEQ ID NO: 371701 - DNA, 19 bp, Homo sapiens
  siRNA target sequence for TIP120A (NM_018448.2,3970-3988).
gctggcggctatctttgaa

SEQ ID NO: 371702 - DNA, 19 bp, Homo sapiens
  siRNA target sequence for TIP120A (NM_018448.2,3971-3989).
ctggcggctatctttgaaa

SEQ ID NO: 371703 - DNA, 19 bp, Homo sapiens
  siRNA target sequence for TIP120A (NM_018448.2,3973-3991).
ggcggctatctttgaaagt

SEQ ID NO: 371704 - DNA, 19 bp, Homo sapiens
  siRNA target sequence for TIP120A (NM_018448.2,3974-3992).
gcggctatctttgaaagta

SEQ ID NO: 371705 - DNA, 19 bp, Homo sapiens
  siRNA target sequence for TIP120A (NM_018448.2,3975-3993).
cggctatctttgaaagtat

SEQ ID NO: 371706 - DNA, 19 bp, Homo sapiens
  siRNA target sequence for TIP120A (NM_018448.2,4011-4029).
ctactaacttggaatcaat

SEQ ID NO: 371707 - DNA, 19 bp, Homo sapiens
  siRNA target sequence for UBAP2 (NM_018449.2,153-171).
cgggaaaaaccacagattt

SEQ ID NO: 371708 - DNA, 19 bp, Homo sapiens
  siRNA target sequence for UBAP2 (NM_018449.2,167-185).
gatttcagcagcacaatca

SEQ ID NO: 371709 - DNA, 19 bp, Homo sapiens
  siRNA target sequence for UBAP2 (NM_018449.2,232-250).
gtctcgctcaagtgatctt

SEQ ID NO: 371710 - DNA, 19 bp, Homo sapiens
  siRNA target sequence for UBAP2 (NM_018449.2,236-254).
cgctcaagtgatctttgat

SEQ ID NO: 371711 - DNA, 19 bp, Homo sapiens
  siRNA target sequence for UBAP2 (NM_018449.2,238-256).
ctcaagtgatctttgataa

SEQ ID NO: 371712 - DNA, 19 bp, Homo sapiens
  siRNA target sequence for UBAP2 (NM_018449.2,325-343).
gcatagtggccctacatga

SEQ ID NO: 371713 - DNA, 19 bp, Homo sapiens
  siRNA target sequence for UBAP2 (NM_018449.2,326-344).
catagtggccctacatgat

SEQ ID NO: 371714 - DNA, 19 bp, Homo sapiens
  siRNA target sequence for UBAP2 (NM_018449.2,330-348).
gtggccctacatgattgta

SEQ ID NO: 371715 - DNA, 19 bp, Homo sapiens
  siRNA target sequence for UBAP2 (NM_018449.2,332-350).
ggccctacatgattgtaat

SEQ ID NO: 371716 - DNA, 19 bp, Homo sapiens
  siRNA target sequence for UBAP2 (NM_018449.2,335-353).
cctacatgattgtaatgga

SEQ ID NO: 371717 - DNA, 19 bp, Homo sapiens
  siRNA target sequence for UBAP2 (NM_018449.2,346-364).
gtaatggagatgtgaacaa

SEQ ID NO: 371718 - DNA, 19 bp, Homo sapiens
  siRNA target sequence for UBAP2 (NM_018449.2,357-375).
gtgaacaaagctatcaata

SEQ ID NO: 371719 - DNA, 19 bp, Homo sapiens
  siRNA target sequence for UBAP2 (NM_018449.2,411-429).
gagactgtagggtgtaaga

SEQ ID NO: 371720 - DNA, 19 bp, Homo sapiens
  siRNA target sequence for UBAP2 (NM_018449.2,413-431).
gactgtagggtgtaagaaa

SEQ ID NO: 371721 - DNA, 19 bp, Homo sapiens
  siRNA target sequence for UBAP2 (NM_018449.2,501-519).
cgtggacgtggaaacaaca

SEQ ID NO: 371722 - DNA, 19 bp, Homo sapiens
  siRNA target sequence for UBAP2 (NM_018449.2,537-555).
ggcaatcgtggcagagaat

SEQ ID NO: 371723 - DNA, 19 bp, Homo sapiens
  siRNA target sequence for UBAP2 (NM_018449.2,538-556).
gcaatcgtggcagagaatt

SEQ ID NO: 371724 - DNA, 19 bp, Homo sapiens
  siRNA target sequence for UBAP2 (NM_018449.2,539-557).
caatcgtggcagagaattt

SEQ ID NO: 371725 - DNA, 19 bp, Homo sapiens
  siRNA target sequence for UBAP2 (NM_018449.2,574-592).
gaattgattgcaatcaagt

SEQ ID NO: 371726 - DNA, 19 bp, Homo sapiens
  siRNA target sequence for UBAP2 (NM_018449.2,702-720).
gcagactattcagattcta

SEQ ID NO: 371727 - DNA, 19 bp, Homo sapiens
  siRNA target sequence for UBAP2 (NM_018449.2,705-723).
gactattcagattctacat

SEQ ID NO: 371728 - DNA, 19 bp, Homo sapiens
  siRNA target sequence for UBAP2 (NM_018449.2,707-725).
ctattcagattctacatct

SEQ ID NO: 371729 - DNA, 19 bp, Homo sapiens
  siRNA target sequence for UBAP2 (NM_018449.2,736-754).
gtgggacaaagctagtagt

SEQ ID NO: 371730 - DNA, 19 bp, Homo sapiens
  siRNA target sequence for UBAP2 (NM_018449.2,787-805).
gaactgaactggcatcaaa

SEQ ID NO: 371731 - DNA, 19 bp, Homo sapiens
  siRNA target sequence for UBAP2 (NM_018449.2,819-837).
gctcaggatctgtcaaaca

SEQ ID NO: 371732 - DNA, 19 bp, Homo sapiens
  siRNA target sequence for UBAP2 (NM_018449.2,945-963).
gctccagcagagaatcaca

SEQ ID NO: 371733 - DNA, 19 bp, Homo sapiens
  siRNA target sequence for UBAP2 (NM_018449.2,965-983).
cttacctgggcaaagcatt

SEQ ID NO: 371734 - DNA, 19 bp, Homo sapiens
  siRNA target sequence for UBAP2 (NM_018449.2,1032-1050).
gaagccaactcctttgaaa

SEQ ID NO: 371735 - DNA, 19 bp, Homo sapiens
  siRNA target sequence for UBAP2 (NM_018449.2,1077-1095).
gcccttgtcttcacaaatt

SEQ ID NO: 371736 - DNA, 19 bp, Homo sapiens
  siRNA target sequence for UBAP2 (NM_018449.2,1090-1108).
caaattcgcaacacaacaa

SEQ ID NO: 371737 - DNA, 19 bp, Homo sapiens
  siRNA target sequence for UBAP2 (NM_018449.2,1175-1193).
cgtccttggctcaggattt

SEQ ID NO: 371738 - DNA, 19 bp, Homo sapiens
  siRNA target sequence for UBAP2 (NM_018449.2,1197-1215).
gagcttgcaccaccaaaaa

SEQ ID NO: 371739 - DNA, 19 bp, Homo sapiens
  siRNA target sequence for UBAP2 (NM_018449.2,1260-1278).
ccgagtttgggccagttta

SEQ ID NO: 371740 - DNA, 19 bp, Homo sapiens
  siRNA target sequence for UBAP2 (NM_018449.2,1373-1391).
cagtcatcttgacttcaaa

SEQ ID NO: 371741 - DNA, 19 bp, Homo sapiens
  siRNA target sequence for UBAP2 (NM_018449.2,1500-1518).
gcaaaacttcgagaatcaa

SEQ ID NO: 371742 - DNA, 19 bp, Homo sapiens
  siRNA target sequence for UBAP2 (NM_018449.2,1563-1581).
cccagcacgaccattgaaa

SEQ ID NO: 371743 - DNA, 19 bp, Homo sapiens
  siRNA target sequence for UBAP2 (NM_018449.2,1565-1583).
cagcacgaccattgaaaat

SEQ ID NO: 371744 - DNA, 19 bp, Homo sapiens
  siRNA target sequence for UBAP2 (NM_018449.2,1567-1585).
gcacgaccattgaaaatat

SEQ ID NO: 371745 - DNA, 19 bp, Homo sapiens
  siRNA target sequence for UBAP2 (NM_018449.2,1692-1710).
gcagatgtcacaggattaa

SEQ ID NO: 371746 - DNA, 19 bp, Homo sapiens
  siRNA target sequence for UBAP2 (NM_018449.2,1718-1736).
gtttggggctctggaattt

SEQ ID NO: 371747 - DNA, 19 bp, Homo sapiens
  siRNA target sequence for UBAP2 (NM_018449.2,1768-1786).
cagctccaagcagtgaaaa

SEQ ID NO: 371748 - DNA, 19 bp, Homo sapiens
  siRNA target sequence for UBAP2 (NM_018449.2,1811-1829).
gtattcgaagtctttaagt

SEQ ID NO: 371749 - DNA, 19 bp, Homo sapiens
  siRNA target sequence for UBAP2 (NM_018449.2,1830-1848).
gagcctttgaatacatctt

SEQ ID NO: 371750 - DNA, 19 bp, Homo sapiens
  siRNA target sequence for UBAP2 (NM_018449.2,1866-1884).
gtacagaactccacatata

SEQ ID NO: 371751 - DNA, 19 bp, Homo sapiens
  siRNA target sequence for UBAP2 (NM_018449.2,1933-1951).
ctgctagtccagtagcaat

SEQ ID NO: 371752 - DNA, 19 bp, Homo sapiens
  siRNA target sequence for UBAP2 (NM_018449.2,2025-2043).
gctccaggaaccatcatga

SEQ ID NO: 371753 - DNA, 19 bp, Homo sapiens
  siRNA target sequence for UBAP2 (NM_018449.2,2026-2044).
ctccaggaaccatcatgaa

SEQ ID NO: 371754 - DNA, 19 bp, Homo sapiens
  siRNA target sequence for UBAP2 (NM_018449.2,2346-2364).
gcgacctccgtctcaagtt

SEQ ID NO: 371755 - DNA, 19 bp, Homo sapiens
  siRNA target sequence for UBAP2 (NM_018449.2,2385-2403).
ctgtccagtagcatgaaca

SEQ ID NO: 371756 - DNA, 19 bp, Homo sapiens
  siRNA target sequence for UBAP2 (NM_018449.2,2614-2632).
ggctgccagtggactacta

SEQ ID NO: 371757 - DNA, 19 bp, Homo sapiens
  siRNA target sequence for UBAP2 (NM_018449.2,2619-2637).
ccagtggactactatggaa

SEQ ID NO: 371758 - DNA, 19 bp, Homo sapiens
  siRNA target sequence for UBAP2 (NM_018449.2,2620-2638).
cagtggactactatggaat

SEQ ID NO: 371759 - DNA, 19 bp, Homo sapiens
  siRNA target sequence for UBAP2 (NM_018449.2,2673-2691).
gatgggagcctagctaata

SEQ ID NO: 371760 - DNA, 19 bp, Homo sapiens
  siRNA target sequence for UBAP2 (NM_018449.2,2678-2696).
gagcctagctaataatcca

SEQ ID NO: 371761 - DNA, 19 bp, Homo sapiens
  siRNA target sequence for UBAP2 (NM_018449.2,2680-2698).
gcctagctaataatccata

SEQ ID NO: 371762 - DNA, 19 bp, Homo sapiens
  siRNA target sequence for UBAP2 (NM_018449.2,2681-2699).
cctagctaataatccatat

SEQ ID NO: 371763 - DNA, 19 bp, Homo sapiens
  siRNA target sequence for UBAP2 (NM_018449.2,2700-2718).
ccaggtgatgtcacaaagt

SEQ ID NO: 371764 - DNA, 19 bp, Homo sapiens
  siRNA target sequence for UBAP2 (NM_018449.2,2891-2909).
gtatggccccaccatgttt

SEQ ID NO: 371765 - DNA, 19 bp, Homo sapiens
  siRNA target sequence for UBAP2 (NM_018449.2,2988-3006).
ggccagcacggctacagta

SEQ ID NO: 371766 - DNA, 19 bp, Homo sapiens
  siRNA target sequence for UBAP2 (NM_018449.2,2998-3016).
gctacagtacaggttatga

SEQ ID NO: 371767 - DNA, 19 bp, Homo sapiens
  siRNA target sequence for UBAP2 (NM_018449.2,3158-3176).
gactggttctgtctacaat

SEQ ID NO: 371768 - DNA, 19 bp, Homo sapiens
  siRNA target sequence for C14orf11 (NM_018453.2,204-222).
ctgaccaaaaacgaaaact

SEQ ID NO: 371769 - DNA, 19 bp, Homo sapiens
  siRNA target sequence for C14orf11 (NM_018453.2,206-224).
gaccaaaaacgaaaactca

SEQ ID NO: 371770 - DNA, 19 bp, Homo sapiens
  siRNA target sequence for C14orf11 (NM_018453.2,221-239).
ctcatcagagaatgtctta

SEQ ID NO: 371771 - DNA, 19 bp, Homo sapiens
  siRNA target sequence for C14orf11 (NM_018453.2,234-252).
gtcttaccggagaaagtga

SEQ ID NO: 371772 - DNA, 19 bp, Homo sapiens
  siRNA target sequence for C14orf11 (NM_018453.2,281-299).
gagatggaagctgaattaa

SEQ ID NO: 371773 - DNA, 19 bp, Homo sapiens
  siRNA target sequence for C14orf11 (NM_018453.2,387-405).
caaggtactacgatgatat

SEQ ID NO: 371774 - DNA, 19 bp, Homo sapiens
  siRNA target sequence for C14orf11 (NM_018453.2,390-408).
ggtactacgatgatatata

SEQ ID NO: 371775 - DNA, 19 bp, Homo sapiens
  siRNA target sequence for C14orf11 (NM_018453.2,391-409).
gtactacgatgatatatat

SEQ ID NO: 371776 - DNA, 19 bp, Homo sapiens
  siRNA target sequence for C14orf11 (NM_018453.2,397-415).
cgatgatatatattttgat

SEQ ID NO: 371777 - DNA, 19 bp, Homo sapiens
  siRNA target sequence for C14orf11 (NM_018453.2,486-504).
caacaaatgacgaattact

SEQ ID NO: 371778 - DNA, 19 bp, Homo sapiens
  siRNA target sequence for C14orf11 (NM_018453.2,489-507).
caaatgacgaattactgta

SEQ ID NO: 371779 - DNA, 19 bp, Homo sapiens
  siRNA target sequence for C14orf11 (NM_018453.2,670-688).
caaaggcatgaatcataca

SEQ ID NO: 371780 - DNA, 19 bp, Homo sapiens
  siRNA target sequence for C14orf11 (NM_018453.2,693-711).
ctcaatatagagcaatgtt

SEQ ID NO: 371781 - DNA, 19 bp, Homo sapiens
  siRNA target sequence for C14orf11 (NM_018453.2,739-757).
ggaggttctaagatataaa

SEQ ID NO: 371782 - DNA, 19 bp, Homo sapiens
  siRNA target sequence for BM039 (NM_018455.3,908-926).
gaaaagcgtgcaagtatca

SEQ ID NO: 371783 - DNA, 19 bp, Homo sapiens
  siRNA target sequence for BM039 (NM_018455.3,929-947).
gatgctgccctgttagaca

SEQ ID NO: 371784 - DNA, 19 bp, Homo sapiens
  siRNA target sequence for BM039 (NM_018455.3,933-951).
ctgccctgttagacatcat

SEQ ID NO: 371785 - DNA, 19 bp, Homo sapiens
  siRNA target sequence for BM039 (NM_018455.3,1008-1026).
gaccaggtgaagatgttga

SEQ ID NO: 371786 - DNA, 19 bp, Homo sapiens
  siRNA target sequence for BM039 (NM_018455.3,1022-1040).
gttgacctttttgatatga

SEQ ID NO: 371787 - DNA, 19 bp, Homo sapiens
  siRNA target sequence for BM039 (NM_018455.3,1182-1200).
ctacctacgtggtgtacta

SEQ ID NO: 371788 - DNA, 19 bp, Homo sapiens
  siRNA target sequence for BM039 (NM_018455.3,1297-1315).
ccgacaagaggagatcatt

SEQ ID NO: 371789 - DNA, 19 bp, Homo sapiens
  siRNA target sequence for BM039 (NM_018455.3,1304-1322).
gaggagatcattttagata

SEQ ID NO: 371790 - DNA, 19 bp, Homo sapiens
  siRNA target sequence for EAF2 (NM_018456.3,104-122).
gcgagcgggttctcaagtt

SEQ ID NO: 371791 - DNA, 19 bp, Homo sapiens
  siRNA target sequence for EAF2 (NM_018456.3,105-123).
cgagcgggttctcaagtta

SEQ ID NO: 371792 - DNA, 19 bp, Homo sapiens
  siRNA target sequence for EAF2 (NM_018456.3,160-178).
cacactgtgcgctatgact

SEQ ID NO: 371793 - DNA, 19 bp, Homo sapiens
  siRNA target sequence for EAF2 (NM_018456.3,245-263).
ccataactctgccaaatat

SEQ ID NO: 371794 - DNA, 19 bp, Homo sapiens
  siRNA target sequence for EAF2 (NM_018456.3,275-293).
ctccaccagtaactgtttt

SEQ ID NO: 371795 - DNA, 19 bp, Homo sapiens
  siRNA target sequence for EAF2 (NM_018456.3,277-295).
ccaccagtaactgttttca

SEQ ID NO: 371796 - DNA, 19 bp, Homo sapiens
  siRNA target sequence for EAF2 (NM_018456.3,278-296).
caccagtaactgttttcaa

SEQ ID NO: 371797 - DNA, 19 bp, Homo sapiens
  siRNA target sequence for EAF2 (NM_018456.3,342-360).
ccatgatactggagaatgt

SEQ ID NO: 371798 - DNA, 19 bp, Homo sapiens
  siRNA target sequence for EAF2 (NM_018456.3,352-370).
ggagaatgtcggctagaaa

SEQ ID NO: 371799 - DNA, 19 bp, Homo sapiens
  siRNA target sequence for EAF2 (NM_018456.3,353-371).
gagaatgtcggctagaaaa

SEQ ID NO: 371800 - DNA, 19 bp, Homo sapiens
  siRNA target sequence for EAF2 (NM_018456.3,470-488).
ccaggactcccaatcttgt

SEQ ID NO: 371801 - DNA, 19 bp, Homo sapiens
  siRNA target sequence for EAF2 (NM_018456.3,471-489).
caggactcccaatcttgta

SEQ ID NO: 371802 - DNA, 19 bp, Homo sapiens
  siRNA target sequence for EAF2 (NM_018456.3,473-491).
ggactcccaatcttgtaaa

SEQ ID NO: 371803 - DNA, 19 bp, Homo sapiens
  siRNA target sequence for EAF2 (NM_018456.3,478-496).
cccaatcttgtaaaacatt

SEQ ID NO: 371804 - DNA, 19 bp, Homo sapiens
  siRNA target sequence for EAF2 (NM_018456.3,516-534).
gtccccagcatctccaata

SEQ ID NO: 371805 - DNA, 19 bp, Homo sapiens
  siRNA target sequence for EAF2 (NM_018456.3,518-536).
ccccagcatctccaataga

SEQ ID NO: 371806 - DNA, 19 bp, Homo sapiens
  siRNA target sequence for EAF2 (NM_018456.3,527-545).
ctccaatagatgatatcga

SEQ ID NO: 371807 - DNA, 19 bp, Homo sapiens
  siRNA target sequence for EAF2 (NM_018456.3,529-547).
ccaatagatgatatcgaaa

SEQ ID NO: 371808 - DNA, 19 bp, Homo sapiens
  siRNA target sequence for EAF2 (NM_018456.3,555-573).
gaaggcagaagctagtcta

SEQ ID NO: 371809 - DNA, 19 bp, Homo sapiens
  siRNA target sequence for EAF2 (NM_018456.3,571-589).
ctaatggaccagatgagta

SEQ ID NO: 371810 - DNA, 19 bp, Homo sapiens
  siRNA target sequence for EAF2 (NM_018456.3,579-597).
ccagatgagtagttgtgat

SEQ ID NO: 371811 - DNA, 19 bp, Homo sapiens
  siRNA target sequence for EAF2 (NM_018456.3,585-603).
gagtagttgtgatagttca

SEQ ID NO: 371812 - DNA, 19 bp, Homo sapiens
  siRNA target sequence for EAF2 (NM_018456.3,612-630).
caaaagttcatcatcttca

SEQ ID NO: 371813 - DNA, 19 bp, Homo sapiens
  siRNA target sequence for EAF2 (NM_018456.3,672-690).
caaatcctctacttctgat

SEQ ID NO: 371814 - DNA, 19 bp, Homo sapiens
  siRNA target sequence for EAF2 (NM_018456.3,732-750).
caggattcctgatatagat

SEQ ID NO: 371815 - DNA, 19 bp, Homo sapiens
  siRNA target sequence for EAF2 (NM_018456.3,742-760).
gatatagatgccagtcata

SEQ ID NO: 371816 - DNA, 19 bp, Homo sapiens
  siRNA target sequence for EAF2 (NM_018456.3,753-771).
cagtcataatagatttcga

SEQ ID NO: 371817 - DNA, 19 bp, Homo sapiens
  siRNA target sequence for EAF2 (NM_018456.3,787-805).
ctgatgaatactttaagaa

SEQ ID NO: 371818 - DNA, 19 bp, Homo sapiens
  siRNA target sequence for ARHGAP15 (NM_018460.2,148-166).
gcacaggagctgtgcaaat

SEQ ID NO: 371819 - DNA, 19 bp, Homo sapiens
  siRNA target sequence for ARHGAP15 (NM_018460.2,154-172).
gagctgtgcaaatgagaat

SEQ ID NO: 371820 - DNA, 19 bp, Homo sapiens
  siRNA target sequence for ARHGAP15 (NM_018460.2,195-213).
gacaggctcagccaaagta

SEQ ID NO: 371821 - DNA, 19 bp, Homo sapiens
  siRNA target sequence for ARHGAP15 (NM_018460.2,238-256).
ggaaggtcactgaacctat

SEQ ID NO: 371822 - DNA, 19 bp, Homo sapiens
  siRNA target sequence for ARHGAP15 (NM_018460.2,239-257).
gaaggtcactgaacctata

SEQ ID NO: 371823 - DNA, 19 bp, Homo sapiens
  siRNA target sequence for ARHGAP15 (NM_018460.2,243-261).
gtcactgaacctatatcca

SEQ ID NO: 371824 - DNA, 19 bp, Homo sapiens
  siRNA target sequence for ARHGAP15 (NM_018460.2,276-294).
cattcacagcatatcttga

SEQ ID NO: 371825 - DNA, 19 bp, Homo sapiens
  siRNA target sequence for ARHGAP15 (NM_018460.2,307-325).
ctccattggaacaactgat

SEQ ID NO: 371826 - DNA, 19 bp, Homo sapiens
  siRNA target sequence for ARHGAP15 (NM_018460.2,339-357).
ggttatctgcaaaaagcta

SEQ ID NO: 371827 - DNA, 19 bp, Homo sapiens
  siRNA target sequence for ARHGAP15 (NM_018460.2,340-358).
gttatctgcaaaaagctaa

SEQ ID NO: 371828 - DNA, 19 bp, Homo sapiens
  siRNA target sequence for ARHGAP15 (NM_018460.2,421-439).
gtcgaagaattgaatttta

SEQ ID NO: 371829 - DNA, 19 bp, Homo sapiens
  siRNA target sequence for ARHGAP15 (NM_018460.2,506-524).
gtgtggagcacacattgaa

SEQ ID NO: 371830 - DNA, 19 bp, Homo sapiens
  siRNA target sequence for ARHGAP15 (NM_018460.2,541-559).
cgagcagaaagaatgtctt

SEQ ID NO: 371831 - DNA, 19 bp, Homo sapiens
  siRNA target sequence for ARHGAP15 (NM_018460.2,580-598).
gaaatgagttccttctaca

SEQ ID NO: 371832 - DNA, 19 bp, Homo sapiens
  siRNA target sequence for ARHGAP15 (NM_018460.2,590-608).
ccttctacagtcagatatt

SEQ ID NO: 371833 - DNA, 19 bp, Homo sapiens
  siRNA target sequence for ARHGAP15 (NM_018460.2,601-619).
cagatattgacttcatcat

SEQ ID NO: 371834 - DNA, 19 bp, Homo sapiens
  siRNA target sequence for ARHGAP15 (NM_018460.2,628-646).
ggttccacgctatcaaaaa

SEQ ID NO: 371835 - DNA, 19 bp, Homo sapiens
  siRNA target sequence for ARHGAP15 (NM_018460.2,633-651).
cacgctatcaaaaatgcaa

SEQ ID NO: 371836 - DNA, 19 bp, Homo sapiens
  siRNA target sequence for ARHGAP15 (NM_018460.2,719-737).
ctctagcactgaattgcta

SEQ ID NO: 371837 - DNA, 19 bp, Homo sapiens
  siRNA target sequence for ARHGAP15 (NM_018460.2,724-742).
gcactgaattgctaagtca

SEQ ID NO: 371838 - DNA, 19 bp, Homo sapiens
  siRNA target sequence for ARHGAP15 (NM_018460.2,807-825).
cacagtgcttccgatacaa

SEQ ID NO: 371839 - DNA, 19 bp, Homo sapiens
  siRNA target sequence for ARHGAP15 (NM_018460.2,817-835).
ccgatacaagcgacaaaaa

SEQ ID NO: 371840 - DNA, 19 bp, Homo sapiens
  siRNA target sequence for ARHGAP15 (NM_018460.2,818-836).
cgatacaagcgacaaaaat

SEQ ID NO: 371841 - DNA, 19 bp, Homo sapiens
  siRNA target sequence for ARHGAP15 (NM_018460.2,826-844).
gcgacaaaaatcgagttaa

SEQ ID NO: 371842 - DNA, 19 bp, Homo sapiens
  siRNA target sequence for ARHGAP15 (NM_018460.2,837-855).
cgagttaaaagcagattaa

SEQ ID NO: 371843 - DNA, 19 bp, Homo sapiens
  siRNA target sequence for ARHGAP15 (NM_018460.2,903-921).
ggacttattaaagatcaaa

SEQ ID NO: 371844 - DNA, 19 bp, Homo sapiens
  siRNA target sequence for ARHGAP15 (NM_018460.2,928-946).
gctctcatctgcacaaagt

SEQ ID NO: 371845 - DNA, 19 bp, Homo sapiens
  siRNA target sequence for ARHGAP15 (NM_018460.2,965-983).
cacagttccgtggtttgta

SEQ ID NO: 371846 - DNA, 19 bp, Homo sapiens
  siRNA target sequence for ARHGAP15 (NM_018460.2,967-985).
cagttccgtggtttgtaaa

SEQ ID NO: 371847 - DNA, 19 bp, Homo sapiens
  siRNA target sequence for ARHGAP15 (NM_018460.2,972-990).
ccgtggtttgtaaagcaat

SEQ ID NO: 371848 - DNA, 19 bp, Homo sapiens
  siRNA target sequence for ARHGAP15 (NM_018460.2,976-994).
ggtttgtaaagcaatgcat

SEQ ID NO: 371849 - DNA, 19 bp, Homo sapiens
  siRNA target sequence for ARHGAP15 (NM_018460.2,1060-1078).
caatacagaagttaagatt

SEQ ID NO: 371850 - DNA, 19 bp, Homo sapiens
  siRNA target sequence for ARHGAP15 (NM_018460.2,1144-1162).
ccggagcactgaagatgtt

SEQ ID NO: 371851 - DNA, 19 bp, Homo sapiens
  siRNA target sequence for ARHGAP15 (NM_018460.2,1145-1163).
cggagcactgaagatgttt

SEQ ID NO: 371852 - DNA, 19 bp, Homo sapiens
  siRNA target sequence for ARHGAP15 (NM_018460.2,1181-1199).
gccgctcttcccttacagt

SEQ ID NO: 371853 - DNA, 19 bp, Homo sapiens
  siRNA target sequence for ARHGAP15 (NM_018460.2,1182-1200).
ccgctcttcccttacagtt

SEQ ID NO: 371854 - DNA, 19 bp, Homo sapiens
  siRNA target sequence for ARHGAP15 (NM_018460.2,1183-1201).
cgctcttcccttacagttt

SEQ ID NO: 371855 - DNA, 19 bp, Homo sapiens
  siRNA target sequence for ARHGAP15 (NM_018460.2,1222-1240).
cgatcaaaaagcaagacaa

SEQ ID NO: 371856 - DNA, 19 bp, Homo sapiens
  siRNA target sequence for ARHGAP15 (NM_018460.2,1311-1329).
gtcctctttggacatctaa

SEQ ID NO: 371857 - DNA, 19 bp, Homo sapiens
  siRNA target sequence for ARHGAP15 (NM_018460.2,1313-1331).
cctctttggacatctaact

SEQ ID NO: 371858 - DNA, 19 bp, Homo sapiens
  siRNA target sequence for ARHGAP15 (NM_018460.2,1314-1332).
ctctttggacatctaacta

SEQ ID NO: 371859 - DNA, 19 bp, Homo sapiens
  siRNA target sequence for ARHGAP15 (NM_018460.2,1321-1339).
gacatctaactaagatagt

SEQ ID NO: 371860 - DNA, 19 bp, Homo sapiens
  siRNA target sequence for ARHGAP15 (NM_018460.2,1370-1388).
gcaaagcttggggattgta

SEQ ID NO: 371861 - DNA, 19 bp, Homo sapiens
  siRNA target sequence for ARHGAP15 (NM_018460.2,1376-1394).
cttggggattgtatttgga

SEQ ID NO: 371862 - DNA, 19 bp, Homo sapiens
  siRNA target sequence for ARHGAP15 (NM_018460.2,1399-1417).
cccttctgcgagctgaaaa

SEQ ID NO: 371863 - DNA, 19 bp, Homo sapiens
  siRNA target sequence for ARHGAP15 (NM_018460.2,1480-1498).
gtgagtacagtaagatctt

SEQ ID NO: 371864 - DNA, 19 bp, Homo sapiens
  siRNA target sequence for MDS027 (NM_018462.3,40-58).
cggtgcagcgggagattca

SEQ ID NO: 371865 - DNA, 19 bp, Homo sapiens
  siRNA target sequence for MDS027 (NM_018462.3,68-86).
ggctaaccgggagtacatt

SEQ ID NO: 371866 - DNA, 19 bp, Homo sapiens
  siRNA target sequence for MDS027 (NM_018462.3,70-88).
ctaaccgggagtacattga

SEQ ID NO: 371867 - DNA, 19 bp, Homo sapiens
  siRNA target sequence for MDS027 (NM_018462.3,74-92).
ccgggagtacattgagata

SEQ ID NO: 371868 - DNA, 19 bp, Homo sapiens
  siRNA target sequence for MDS027 (NM_018462.3,75-93).
cgggagtacattgagataa

SEQ ID NO: 371869 - DNA, 19 bp, Homo sapiens
  siRNA target sequence for MDS027 (NM_018462.3,76-94).
gggagtacattgagataat

SEQ ID NO: 371870 - DNA, 19 bp, Homo sapiens
  siRNA target sequence for MDS027 (NM_018462.3,126-144).
ctcaactcgttcgatatgt

SEQ ID NO: 371871 - DNA, 19 bp, Homo sapiens
  siRNA target sequence for MDS027 (NM_018462.3,128-146).
caactcgttcgatatgtct

SEQ ID NO: 371872 - DNA, 19 bp, Homo sapiens
  siRNA target sequence for MDS027 (NM_018462.3,143-161).
gtcttgtcgttcaagactt

SEQ ID NO: 371873 - DNA, 19 bp, Homo sapiens
  siRNA target sequence for MDS027 (NM_018462.3,154-172).
caagacttgcaacactaaa

SEQ ID NO: 371874 - DNA, 19 bp, Homo sapiens
  siRNA target sequence for MDS027 (NM_018462.3,157-175).
gacttgcaacactaaacga

SEQ ID NO: 371875 - DNA, 19 bp, Homo sapiens
  siRNA target sequence for MDS027 (NM_018462.3,162-180).
gcaacactaaacgagaaat

SEQ ID NO: 371876 - DNA, 19 bp, Homo sapiens
  siRNA target sequence for MDS027 (NM_018462.3,163-181).
caacactaaacgagaaatt

SEQ ID NO: 371877 - DNA, 19 bp, Homo sapiens
  siRNA target sequence for MDS027 (NM_018462.3,187-205).
cccttgaacggagaataga

SEQ ID NO: 371878 - DNA, 19 bp, Homo sapiens
  siRNA target sequence for MDS027 (NM_018462.3,189-207).
cttgaacggagaatagagt

SEQ ID NO: 371879 - DNA, 19 bp, Homo sapiens
  siRNA target sequence for MDS027 (NM_018462.3,196-214).
ggagaatagagtacattga

SEQ ID NO: 371880 - DNA, 19 bp, Homo sapiens
  siRNA target sequence for MDS029 (NM_018464.1,149-167).
ggatcgcagcagttaccat

SEQ ID NO: 371881 - DNA, 19 bp, Homo sapiens
  siRNA target sequence for MDS029 (NM_018464.1,150-168).
gatcgcagcagttaccatt

SEQ ID NO: 371882 - DNA, 19 bp, Homo sapiens
  siRNA target sequence for MDS029 (NM_018464.1,217-235).
gttaaagatcatcgaaata

SEQ ID NO: 371883 - DNA, 19 bp, Homo sapiens
  siRNA target sequence for MDS029 (NM_018464.1,229-247).
cgaaataaagctatgataa

SEQ ID NO: 371884 - DNA, 19 bp, Homo sapiens
  siRNA target sequence for MDS029 (NM_018464.1,328-346).
cgttgttggaggtccaaaa

SEQ ID NO: 371885 - DNA, 19 bp, Homo sapiens
  siRNA target sequence for MDS029 (NM_018464.1,329-347).
gttgttggaggtccaaaaa

SEQ ID NO: 371886 - DNA, 19 bp, Homo sapiens
  siRNA target sequence for C9orf46 (NM_018465.1,240-258).
gcatgaaaaatcaaaagga

SEQ ID NO: 371887 - DNA, 19 bp, Homo sapiens
  siRNA target sequence for C9orf46 (NM_018465.1,312-330).
gtgaaatgagggaaagaca

SEQ ID NO: 371888 - DNA, 19 bp, Homo sapiens
  siRNA target sequence for C9orf46 (NM_018465.1,354-372).
ctcgggaattcctcaaata

SEQ ID NO: 371889 - DNA, 19 bp, Homo sapiens
  siRNA target sequence for C9orf46 (NM_018465.1,356-374).
cgggaattcctcaaatatt

SEQ ID NO: 371890 - DNA, 19 bp, Homo sapiens
  siRNA target sequence for C9orf46 (NM_018465.1,442-460).
cttcctggtcccgattgtt

SEQ ID NO: 371891 - DNA, 19 bp, Homo sapiens
  siRNA target sequence for C9orf46 (NM_018465.1,448-466).
ggtcccgattgttccatta

SEQ ID NO: 371892 - DNA, 19 bp, Homo sapiens
  siRNA target sequence for C9orf46 (NM_018465.1,449-467).
gtcccgattgttccattaa

SEQ ID NO: 371893 - DNA, 19 bp, Homo sapiens
  siRNA target sequence for C9orf46 (NM_018465.1,452-470).
ccgattgttccattaagct

SEQ ID NO: 371894 - DNA, 19 bp, Homo sapiens
  siRNA target sequence for C9orf46 (NM_018465.1,453-471).
cgattgttccattaagctt

SEQ ID NO: 371895 - DNA, 19 bp, Homo sapiens
  siRNA target sequence for C9orf46 (NM_018465.1,576-594).
caagaggaatgatcacttt

SEQ ID NO: 371896 - DNA, 19 bp, Homo sapiens
  siRNA target sequence for C9orf46 (NM_018465.1,586-604).
gatcacttttgaaagcatt

SEQ ID NO: 371897 - DNA, 19 bp, Homo sapiens
  siRNA target sequence for MDS031 (NM_018466.2,132-150).
gttacaaccgacttatcct

SEQ ID NO: 371898 - DNA, 19 bp, Homo sapiens
  siRNA target sequence for MDS031 (NM_018466.2,143-161).
cttatcctgcaaattggta

SEQ ID NO: 371899 - DNA, 19 bp, Homo sapiens
  siRNA target sequence for MDS031 (NM_018466.2,173-191).
gtacctgaacccttcagta

SEQ ID NO: 371900 - DNA, 19 bp, Homo sapiens
  siRNA target sequence for MDS031 (NM_018466.2,187-205).
cagtactgagtcgtttact

SEQ ID NO: 371901 - DNA, 19 bp, Homo sapiens
  siRNA target sequence for MDS031 (NM_018466.2,189-207).
gtactgagtcgtttactct

SEQ ID NO: 371902 - DNA, 19 bp, Homo sapiens
  siRNA target sequence for MDS031 (NM_018466.2,198-216).
cgtttactctggatgttta

SEQ ID NO: 371903 - DNA, 19 bp, Homo sapiens
  siRNA target sequence for MDS031 (NM_018466.2,255-273).
cagatcttgttattagtca

SEQ ID NO: 371904 - DNA, 19 bp, Homo sapiens
  siRNA target sequence for MDS031 (NM_018466.2,316-334).
gccactcgtagtggttata

SEQ ID NO: 371905 - DNA, 19 bp, Homo sapiens
  siRNA target sequence for MDS031 (NM_018466.2,317-335).
ccactcgtagtggttataa

SEQ ID NO: 371906 - DNA, 19 bp, Homo sapiens
  siRNA target sequence for MDS031 (NM_018466.2,318-336).
cactcgtagtggttataaa

SEQ ID NO: 371907 - DNA, 19 bp, Homo sapiens
  siRNA target sequence for MDS031 (NM_018466.2,322-340).
cgtagtggttataaacgaa

SEQ ID NO: 371908 - DNA, 19 bp, Homo sapiens
  siRNA target sequence for MDS031 (NM_018466.2,323-341).
gtagtggttataaacgaaa

SEQ ID NO: 371909 - DNA, 19 bp, Homo sapiens
  siRNA target sequence for MDS031 (NM_018466.2,326-344).
gtggttataaacgaaaagt

SEQ ID NO: 371910 - DNA, 19 bp, Homo sapiens
  siRNA target sequence for MDS031 (NM_018466.2,329-347).
gttataaacgaaaagttga

SEQ ID NO: 371911 - DNA, 19 bp, Homo sapiens
  siRNA target sequence for MDS031 (NM_018466.2,337-355).
cgaaaagttgatgaacaat

SEQ ID NO: 371912 - DNA, 19 bp, Homo sapiens
  siRNA target sequence for MDS031 (NM_018466.2,391-409).
gggtcatctcttctattgt

SEQ ID NO: 371913 - DNA, 19 bp, Homo sapiens
  siRNA target sequence for MDS031 (NM_018466.2,392-410).
ggtcatctcttctattgta

SEQ ID NO: 371914 - DNA, 19 bp, Homo sapiens
  siRNA target sequence for MDS031 (NM_018466.2,474-492).
ctggccagccagaaaaatt

SEQ ID NO: 371915 - DNA, 19 bp, Homo sapiens
  siRNA target sequence for MDS032 (NM_018467.1,39-57).
cgtcgaggctggagctaaa

SEQ ID NO: 371916 - DNA, 19 bp, Homo sapiens
  siRNA target sequence for MDS032 (NM_018467.1,42-60).
cgaggctggagctaaacct

SEQ ID NO: 371917 - DNA, 19 bp, Homo sapiens
  siRNA target sequence for MDS032 (NM_018467.1,190-208).
ggcctctgaggtgatcaat

SEQ ID NO: 371918 - DNA, 19 bp, Homo sapiens
  siRNA target sequence for MDS032 (NM_018467.1,192-210).
cctctgaggtgatcaatga

SEQ ID NO: 371919 - DNA, 19 bp, Homo sapiens
  siRNA target sequence for MDS032 (NM_018467.1,195-213).
ctgaggtgatcaatgaata

SEQ ID NO: 371920 - DNA, 19 bp, Homo sapiens
  siRNA target sequence for MDS032 (NM_018467.1,731-749).
ctctgggccatgctcatta

SEQ ID NO: 371921 - DNA, 19 bp, Homo sapiens
  siRNA target sequence for MDS032 (NM_018467.1,788-806).
cgaatcatgcctaaactca

SEQ ID NO: 371922 - DNA, 19 bp, Homo sapiens
  siRNA target sequence for HT009 (NM_018470.1,310-328).
cctttccggcagtcaagtt

SEQ ID NO: 371923 - DNA, 19 bp, Homo sapiens
  siRNA target sequence for HT009 (NM_018470.1,330-348).
cctatcaaggacattcagt

SEQ ID NO: 371924 - DNA, 19 bp, Homo sapiens
  siRNA target sequence for HT009 (NM_018470.1,399-417).
ccactctctagaaatatta

SEQ ID NO: 371925 - DNA, 19 bp, Homo sapiens
  siRNA target sequence for HT009 (NM_018470.1,487-505).
cgagtaacaggcatgaagt

SEQ ID NO: 371926 - DNA, 19 bp, Homo sapiens
  siRNA target sequence for HT009 (NM_018470.1,497-515).
gcatgaagtgaagagaaat

SEQ ID NO: 371927 - DNA, 19 bp, Homo sapiens
  siRNA target sequence for HT009 (NM_018470.1,545-563).
gctaatgaccacactattt

SEQ ID NO: 371928 - DNA, 19 bp, Homo sapiens
  siRNA target sequence for HT009 (NM_018470.1,551-569).
gaccacactatttaacgaa

SEQ ID NO: 371929 - DNA, 19 bp, Homo sapiens
  siRNA target sequence for HT009 (NM_018470.1,642-660).
cggaaatgcctacacaaat

SEQ ID NO: 371930 - DNA, 19 bp, Homo sapiens
  siRNA target sequence for HT011 (NM_018472.1,258-276).
ggagtcgggctgatcgaaa

SEQ ID NO: 371931 - DNA, 19 bp, Homo sapiens
  siRNA target sequence for HT011 (NM_018472.1,259-277).
gagtcgggctgatcgaaaa

SEQ ID NO: 371932 - DNA, 19 bp, Homo sapiens
  siRNA target sequence for HT011 (NM_018472.1,322-340).
cgacagccacattaaggaa

SEQ ID NO: 371933 - DNA, 19 bp, Homo sapiens
  siRNA target sequence for HT011 (NM_018472.1,381-399).
cttctccatccctttgtct

SEQ ID NO: 371934 - DNA, 19 bp, Homo sapiens
  siRNA target sequence for HT011 (NM_018472.1,402-420).
ggtcagtacagaagaacat

SEQ ID NO: 371935 - DNA, 19 bp, Homo sapiens
  siRNA target sequence for HT011 (NM_018472.1,489-507).
gtcctgaccgccaaagatt

SEQ ID NO: 371936 - DNA, 19 bp, Homo sapiens
  siRNA target sequence for HT011 (NM_018472.1,526-544).
ctgccttcactaggatatt

SEQ ID NO: 371937 - DNA, 19 bp, Homo sapiens
  siRNA target sequence for HT011 (NM_018472.1,528-546).
gccttcactaggatattgt

SEQ ID NO: 371938 - DNA, 19 bp, Homo sapiens
  siRNA target sequence for HT011 (NM_018472.1,538-556).
ggatattgtgtagaatgta

SEQ ID NO: 371939 - DNA, 19 bp, Homo sapiens
  siRNA target sequence for HT011 (NM_018472.1,547-565).
gtagaatgtacctgaaaca

SEQ ID NO: 371940 - DNA, 19 bp, Homo sapiens
  siRNA target sequence for HT011 (NM_018472.1,584-602).
gatggagagttatattgca

SEQ ID NO: 371941 - DNA, 19 bp, Homo sapiens
  siRNA target sequence for HT011 (NM_018472.1,617-635).
gatatgccagagtgaagaa

SEQ ID NO: 371942 - DNA, 19 bp, Homo sapiens
  siRNA target sequence for HT011 (NM_018472.1,643-661).
ctttccttagtaaggattt

SEQ ID NO: 371943 - DNA, 19 bp, Homo sapiens
  siRNA target sequence for HT011 (NM_018472.1,647-665).
ccttagtaaggattttgat

SEQ ID NO: 371944 - DNA, 19 bp, Homo sapiens
  siRNA target sequence for HT011 (NM_018472.1,680-698).
cccggctggctccatcaaa

SEQ ID NO: 371945 - DNA, 19 bp, Homo sapiens
  siRNA target sequence for HT011 (NM_018472.1,682-700).
cggctggctccatcaaaga

SEQ ID NO: 371946 - DNA, 19 bp, Homo sapiens
  siRNA target sequence for HT011 (NM_018472.1,738-756).
cacacagcactgatgctaa

SEQ ID NO: 371947 - DNA, 19 bp, Homo sapiens
  siRNA target sequence for HT011 (NM_018472.1,742-760).
cagcactgatgctaaagaa

SEQ ID NO: 371948 - DNA, 19 bp, Homo sapiens
  siRNA target sequence for HT011 (NM_018472.1,744-762).
gcactgatgctaaagaaaa

SEQ ID NO: 371949 - DNA, 19 bp, Homo sapiens
  siRNA target sequence for HT011 (NM_018472.1,770-788).
ggtgtatcaccccaagata

SEQ ID NO: 371950 - DNA, 19 bp, Homo sapiens
  siRNA target sequence for HT011 (NM_018472.1,773-791).
gtatcaccccaagatagaa

SEQ ID NO: 371951 - DNA, 19 bp, Homo sapiens
  siRNA target sequence for HT011 (NM_018472.1,1260-1278).
ctagcagcagccgaacaaa

SEQ ID NO: 371952 - DNA, 19 bp, Homo sapiens
  siRNA target sequence for C20orf19 (NM_018474.2,143-161).
ctgcgggacagtgaaaaga

SEQ ID NO: 371953 - DNA, 19 bp, Homo sapiens
  siRNA target sequence for C20orf19 (NM_018474.2,191-209).
gaatataatcagtctgata

SEQ ID NO: 371954 - DNA, 19 bp, Homo sapiens
  siRNA target sequence for C20orf19 (NM_018474.2,218-236).
gttaagctgaaatatgtaa

SEQ ID NO: 371955 - DNA, 19 bp, Homo sapiens
  siRNA target sequence for C20orf19 (NM_018474.2,280-298).
ggctcatactcgaaaccaa

SEQ ID NO: 371956 - DNA, 19 bp, Homo sapiens
  siRNA target sequence for C20orf19 (NM_018474.2,284-302).
catactcgaaaccaagaat

SEQ ID NO: 371957 - DNA, 19 bp, Homo sapiens
  siRNA target sequence for C20orf19 (NM_018474.2,288-306).
ctcgaaaccaagaatattt

SEQ ID NO: 371958 - DNA, 19 bp, Homo sapiens
  siRNA target sequence for C20orf19 (NM_018474.2,338-356).
gtacacttcaccacaaata

SEQ ID NO: 371959 - DNA, 19 bp, Homo sapiens
  siRNA target sequence for C20orf19 (NM_018474.2,406-424).
gatgctatgctcaaaagat

SEQ ID NO: 371960 - DNA, 19 bp, Homo sapiens
  siRNA target sequence for C20orf19 (NM_018474.2,474-492).
cagtgcacgaggggattaa

SEQ ID NO: 371961 - DNA, 19 bp, Homo sapiens
  siRNA target sequence for C20orf19 (NM_018474.2,476-494).
gtgcacgaggggattaact

SEQ ID NO: 371962 - DNA, 19 bp, Homo sapiens
  siRNA target sequence for C20orf19 (NM_018474.2,551-569).
caaatgtcagccatcttaa

SEQ ID NO: 371963 - DNA, 19 bp, Homo sapiens
  siRNA target sequence for C20orf19 (NM_018474.2,608-626).
cccacaaagaacttttcaa

SEQ ID NO: 371964 - DNA, 19 bp, Homo sapiens
  siRNA target sequence for C20orf19 (NM_018474.2,609-627).
ccacaaagaacttttcaat

SEQ ID NO: 371965 - DNA, 19 bp, Homo sapiens
  siRNA target sequence for C20orf19 (NM_018474.2,675-693).
cagacagctgtgtagtaca

SEQ ID NO: 371966 - DNA, 19 bp, Homo sapiens
  siRNA target sequence for C20orf19 (NM_018474.2,677-695).
gacagctgtgtagtacaaa

SEQ ID NO: 371967 - DNA, 19 bp, Homo sapiens
  siRNA target sequence for C20orf19 (NM_018474.2,684-702).
gtgtagtacaaactagtaa

SEQ ID NO: 371968 - DNA, 19 bp, Homo sapiens
  siRNA target sequence for C20orf19 (NM_018474.2,773-791).
ccagtcacagccagtgtat

SEQ ID NO: 371969 - DNA, 19 bp, Homo sapiens
  siRNA target sequence for C20orf19 (NM_018474.2,774-792).
cagtcacagccagtgtatt

SEQ ID NO: 371970 - DNA, 19 bp, Homo sapiens
  siRNA target sequence for C20orf19 (NM_018474.2,812-830).
cattgcttggagataggaa

SEQ ID NO: 371971 - DNA, 19 bp, Homo sapiens
  siRNA target sequence for C20orf19 (NM_018474.2,837-855).
cacgtcatggcaagagtaa

SEQ ID NO: 371972 - DNA, 19 bp, Homo sapiens
  siRNA target sequence for C20orf19 (NM_018474.2,839-857).
cgtcatggcaagagtaatt

SEQ ID NO: 371973 - DNA, 19 bp, Homo sapiens
  siRNA target sequence for C20orf19 (NM_018474.2,842-860).
catggcaagagtaatttat

SEQ ID NO: 371974 - DNA, 19 bp, Homo sapiens
  siRNA target sequence for C20orf19 (NM_018474.2,846-864).
gcaagagtaatttatctga

SEQ ID NO: 371975 - DNA, 19 bp, Homo sapiens
  siRNA target sequence for C20orf19 (NM_018474.2,847-865).
caagagtaatttatctgaa

SEQ ID NO: 371976 - DNA, 19 bp, Homo sapiens
  siRNA target sequence for C20orf19 (NM_018474.2,892-910).
cccgttacgggaaagatta

SEQ ID NO: 371977 - DNA, 19 bp, Homo sapiens
  siRNA target sequence for C20orf19 (NM_018474.2,893-911).
ccgttacgggaaagattaa

SEQ ID NO: 371978 - DNA, 19 bp, Homo sapiens
  siRNA target sequence for C20orf19 (NM_018474.2,954-972).
gcggatcagagggagaaat

SEQ ID NO: 371979 - DNA, 19 bp, Homo sapiens
  siRNA target sequence for C20orf19 (NM_018474.2,955-973).
cggatcagagggagaaata

SEQ ID NO: 371980 - DNA, 19 bp, Homo sapiens
  siRNA target sequence for C20orf19 (NM_018474.2,976-994).
gacacgggaacatattgaa

SEQ ID NO: 371981 - DNA, 19 bp, Homo sapiens
  siRNA target sequence for C20orf19 (NM_018474.2,978-996).
cacgggaacatattgaagt

SEQ ID NO: 371982 - DNA, 19 bp, Homo sapiens
  siRNA target sequence for C20orf19 (NM_018474.2,981-999).
gggaacatattgaagttga

SEQ ID NO: 371983 - DNA, 19 bp, Homo sapiens
  siRNA target sequence for C20orf19 (NM_018474.2,1026-1044).
ctccgataccagtttcaga

SEQ ID NO: 371984 - DNA, 19 bp, Homo sapiens
  siRNA target sequence for C20orf19 (NM_018474.2,1028-1046).
ccgataccagtttcagaat

SEQ ID NO: 371985 - DNA, 19 bp, Homo sapiens
  siRNA target sequence for C20orf19 (NM_018474.2,1195-1213).
ccttaccatttcaataagt

SEQ ID NO: 371986 - DNA, 19 bp, Homo sapiens
  siRNA target sequence for C20orf19 (NM_018474.2,1206-1224).
caataagtgaagatgatct

SEQ ID NO: 371987 - DNA, 19 bp, Homo sapiens
  siRNA target sequence for C20orf19 (NM_018474.2,1217-1235).
gatgatctgattttagaga

SEQ ID NO: 371988 - DNA, 19 bp, Homo sapiens
  siRNA target sequence for C20orf19 (NM_018474.2,1291-1309).
ggccttaaaattaatccat

SEQ ID NO: 371989 - DNA, 19 bp, Homo sapiens
  siRNA target sequence for C20orf19 (NM_018474.2,1325-1343).
gttgccctatccactgaaa

SEQ ID NO: 371990 - DNA, 19 bp, Homo sapiens
  siRNA target sequence for C20orf19 (NM_018474.2,1363-1381).
cctaagctctcctgattca

SEQ ID NO: 371991 - DNA, 19 bp, Homo sapiens
  siRNA target sequence for C20orf19 (NM_018474.2,1473-1491).
ccaccttgaaagaacatga

SEQ ID NO: 371992 - DNA, 19 bp, Homo sapiens
  siRNA target sequence for C20orf19 (NM_018474.2,1474-1492).
caccttgaaagaacatgat

SEQ ID NO: 371993 - DNA, 19 bp, Homo sapiens
  siRNA target sequence for C20orf19 (NM_018474.2,1551-1569).
gccgtaggtcagctattca

SEQ ID NO: 371994 - DNA, 19 bp, Homo sapiens
  siRNA target sequence for C20orf19 (NM_018474.2,1553-1571).
cgtaggtcagctattcaca

SEQ ID NO: 371995 - DNA, 19 bp, Homo sapiens
  siRNA target sequence for C20orf19 (NM_018474.2,1584-1602).
cttgcagcttgccatctat

SEQ ID NO: 371996 - DNA, 19 bp, Homo sapiens
  siRNA target sequence for C20orf19 (NM_018474.2,1587-1605).
gcagcttgccatctattct

SEQ ID NO: 371997 - DNA, 19 bp, Homo sapiens
  siRNA target sequence for C20orf19 (NM_018474.2,1591-1609).
cttgccatctattctgaat

SEQ ID NO: 371998 - DNA, 19 bp, Homo sapiens
  siRNA target sequence for C20orf19 (NM_018474.2,1606-1624).
gaatgacaatagtggaata

SEQ ID NO: 371999 - DNA, 19 bp, Homo sapiens
  siRNA target sequence for C20orf19 (NM_018474.2,1662-1680).
ctacaagggaacaagaagt

SEQ ID NO: 372000 - DNA, 19 bp, Homo sapiens
  siRNA target sequence for C20orf19 (NM_018474.2,1774-1792).
cacccttcaggataataca

SEQ ID NO: 372001 - DNA, 19 bp, Homo sapiens
  siRNA target sequence for C20orf19 (NM_018474.2,1776-1794).
cccttcaggataatacaaa

SEQ ID NO: 372002 - DNA, 19 bp, Homo sapiens
  siRNA target sequence for C20orf19 (NM_018474.2,1777-1795).
ccttcaggataatacaaat

SEQ ID NO: 372003 - DNA, 19 bp, Homo sapiens
  siRNA target sequence for C20orf19 (NM_018474.2,1863-1881).
gcggtgcattcgagacaaa

SEQ ID NO: 372004 - DNA, 19 bp, Homo sapiens
  siRNA target sequence for C20orf19 (NM_018474.2,1865-1883).
ggtgcattcgagacaaaga

SEQ ID NO: 372005 - DNA, 19 bp, Homo sapiens
  siRNA target sequence for C20orf19 (NM_018474.2,1898-1916).
gcttcggaagctagttttt

SEQ ID NO: 372006 - DNA, 19 bp, Homo sapiens
  siRNA target sequence for C20orf19 (NM_018474.2,1939-1957).
gtcaaggcatgaaaacaaa

SEQ ID NO: 372007 - DNA, 19 bp, Homo sapiens
  siRNA target sequence for C20orf19 (NM_018474.2,2002-2020).
gtctgatgacagtaactca

SEQ ID NO: 372008 - DNA, 19 bp, Homo sapiens
  siRNA target sequence for BEX1 (NM_018476.2,281-299).
ctttggatgctggtgaata

SEQ ID NO: 372009 - DNA, 19 bp, Homo sapiens
  siRNA target sequence for C20orf35 (NM_018478.1,235-253).
ggtgcgggtaactttttga

SEQ ID NO: 372010 - DNA, 19 bp, Homo sapiens
  siRNA target sequence for C20orf35 (NM_018478.1,576-594).
ccttcgggagcggcaaaaa

SEQ ID NO: 372011 - DNA, 19 bp, Homo sapiens
  siRNA target sequence for C20orf35 (NM_018478.1,577-595).
cttcgggagcggcaaaaat

SEQ ID NO: 372012 - DNA, 19 bp, Homo sapiens
  siRNA target sequence for C20orf35 (NM_018478.1,580-598).
cgggagcggcaaaaattct

SEQ ID NO: 372013 - DNA, 19 bp, Homo sapiens
  siRNA target sequence for C20orf35 (NM_018478.1,581-599).
gggagcggcaaaaattctt

SEQ ID NO: 372014 - DNA, 19 bp, Homo sapiens
  siRNA target sequence for C20orf35 (NM_018478.1,664-682).
cagagaccccccataggta

SEQ ID NO: 372015 - DNA, 19 bp, Homo sapiens
  siRNA target sequence for C20orf35 (NM_018478.1,668-686).
gaccccccataggtagtat

SEQ ID NO: 372016 - DNA, 19 bp, Homo sapiens
  siRNA target sequence for C20orf35 (NM_018478.1,670-688).
ccccccataggtagtatct

SEQ ID NO: 372017 - DNA, 19 bp, Homo sapiens
  siRNA target sequence for C20orf35 (NM_018478.1,717-735).
ggagcaagtagaacttatt

SEQ ID NO: 372018 - DNA, 19 bp, Homo sapiens
  siRNA target sequence for HT007 (NM_018480.2,287-305).
ctctagaagatgcaaaact

SEQ ID NO: 372019 - DNA, 19 bp, Homo sapiens
  siRNA target sequence for HT007 (NM_018480.2,318-336).
ggtcatagaaatcatagaa

SEQ ID NO: 372020 - DNA, 19 bp, Homo sapiens
  siRNA target sequence for HT007 (NM_018480.2,387-405).
ggcgacatttggaacaaca

SEQ ID NO: 372021 - DNA, 19 bp, Homo sapiens
  siRNA target sequence for HT007 (NM_018480.2,443-461).
gacgctgcttcaaggttaa

SEQ ID NO: 372022 - DNA, 19 bp, Homo sapiens
  siRNA target sequence for HT007 (NM_018480.2,447-465).
ctgcttcaaggttaaacat

SEQ ID NO: 372023 - DNA, 19 bp, Homo sapiens
  siRNA target sequence for HT007 (NM_018480.2,449-467).
gcttcaaggttaaacatga

SEQ ID NO: 372024 - DNA, 19 bp, Homo sapiens
  siRNA target sequence for HT007 (NM_018480.2,450-468).
cttcaaggttaaacatgat

SEQ ID NO: 372025 - DNA, 19 bp, Homo sapiens
  siRNA target sequence for HT007 (NM_018480.2,594-612).
ctcactgattggcatagtt

SEQ ID NO: 372026 - DNA, 19 bp, Homo sapiens
  siRNA target sequence for HT007 (NM_018480.2,659-677).
gcctggcaaccaagtatca

SEQ ID NO: 372027 - DNA, 19 bp, Homo sapiens
  siRNA target sequence for HT007 (NM_018480.2,660-678).
cctggcaaccaagtatcat

SEQ ID NO: 372028 - DNA, 19 bp, Homo sapiens
  siRNA target sequence for HT007 (NM_018480.2,661-679).
ctggcaaccaagtatcata

SEQ ID NO: 372029 - DNA, 19 bp, Homo sapiens
  siRNA target sequence for HT007 (NM_018480.2,681-699).
cgttccactgccaccaaaa

SEQ ID NO: 372030 - DNA, 19 bp, Homo sapiens
  siRNA target sequence for HT007 (NM_018480.2,725-743).
cgctttgtcaaacacaaat

SEQ ID NO: 372031 - DNA, 19 bp, Homo sapiens
  siRNA target sequence for HT007 (NM_018480.2,753-771).
ggcgattcctctagtcttt

SEQ ID NO: 372032 - DNA, 19 bp, Homo sapiens
  siRNA target sequence for HT007 (NM_018480.2,755-773).
cgattcctctagtctttca

SEQ ID NO: 372033 - DNA, 19 bp, Homo sapiens
  siRNA target sequence for HT007 (NM_018480.2,761-779).
ctctagtctttcagattat

SEQ ID NO: 372034 - DNA, 19 bp, Homo sapiens
  siRNA target sequence for HT007 (NM_018480.2,827-845).
cacttgagaaaactataca

SEQ ID NO: 372035 - DNA, 19 bp, Homo sapiens
  siRNA target sequence for HCA112 (NM_018487.2,86-104).
cagccgacagtgatgagat

SEQ ID NO: 372036 - DNA, 19 bp, Homo sapiens
  siRNA target sequence for HCA112 (NM_018487.2,283-301).
gcagtcctaggaggatttt

SEQ ID NO: 372037 - DNA, 19 bp, Homo sapiens
  siRNA target sequence for HCA112 (NM_018487.2,289-307).
ctaggaggatttttctaca

SEQ ID NO: 372038 - DNA, 19 bp, Homo sapiens
  siRNA target sequence for HCA112 (NM_018487.2,380-398).
ctgctgccttcatttacga

SEQ ID NO: 372039 - DNA, 19 bp, Homo sapiens
  siRNA target sequence for HCA112 (NM_018487.2,464-482).
ccatcgctgccctcaaact

SEQ ID NO: 372040 - DNA, 19 bp, Homo sapiens
  siRNA target sequence for HCA112 (NM_018487.2,498-516).
ccgatatggctactcttat

SEQ ID NO: 372041 - DNA, 19 bp, Homo sapiens
  siRNA target sequence for HCA112 (NM_018487.2,499-517).
cgatatggctactcttatt

SEQ ID NO: 372042 - DNA, 19 bp, Homo sapiens
  siRNA target sequence for HCA112 (NM_018487.2,628-646).
ctgaaggccttgttcagaa

SEQ ID NO: 372043 - DNA, 19 bp, Homo sapiens
  siRNA target sequence for HCA112 (NM_018487.2,732-750).
cccaaccaaagggaaaaga

SEQ ID NO: 372044 - DNA, 19 bp, Homo sapiens
  siRNA target sequence for PRO1580 (NM_018502.2,969-987).
ccccgtgcttcgatgtcta

SEQ ID NO: 372045 - DNA, 19 bp, Homo sapiens
  siRNA target sequence for PRO1580 (NM_018502.2,970-988).
cccgtgcttcgatgtctaa

SEQ ID NO: 372046 - DNA, 19 bp, Homo sapiens
  siRNA target sequence for PRO1580 (NM_018502.2,1054-1072).
gttgtggcagccttattta

SEQ ID NO: 372047 - DNA, 19 bp, Homo sapiens
  siRNA target sequence for PRO1580 (NM_018502.2,1121-1139).
gcctttggctcctcaacaa

SEQ ID NO: 372048 - DNA, 19 bp, Homo sapiens
  siRNA target sequence for PRO1580 (NM_018502.2,1147-1165).
gcaaacagtcctagtttct

SEQ ID NO: 372049 - DNA, 19 bp, Homo sapiens
  siRNA target sequence for PRO1580 (NM_018502.2,1207-1225).
cagctgttgccagtatcta

SEQ ID NO: 372050 - DNA, 19 bp, Homo sapiens
  siRNA target sequence for PRO1855 (NM_018509.2,462-480).
gctttgctcagctcaagaa

SEQ ID NO: 372051 - DNA, 19 bp, Homo sapiens
  siRNA target sequence for PRO1855 (NM_018509.2,489-507).
ggttggacctgaaggataa

SEQ ID NO: 372052 - DNA, 19 bp, Homo sapiens
  siRNA target sequence for PRO1855 (NM_018509.2,573-591).
gtgcaaacaaggtgttaca

SEQ ID NO: 372053 - DNA, 19 bp, Homo sapiens
  siRNA target sequence for PRO1855 (NM_018509.2,748-766).
ccggagaaaggagtatgat

SEQ ID NO: 372054 - DNA, 19 bp, Homo sapiens
  siRNA target sequence for PRO1855 (NM_018509.2,988-1006).
cagcgtgaacaccatctat

SEQ ID NO: 372055 - DNA, 19 bp, Homo sapiens
  siRNA target sequence for PRO1855 (NM_018509.2,990-1008).
gcgtgaacaccatctatga

SEQ ID NO: 372056 - DNA, 19 bp, Homo sapiens
  siRNA target sequence for MCM10 (NM_018518.3,156-174).
gagtcagccttggattgta

SEQ ID NO: 372057 - DNA, 19 bp, Homo sapiens
  siRNA target sequence for MCM10 (NM_018518.3,158-176).
gtcagccttggattgtaat

SEQ ID NO: 372058 - DNA, 19 bp, Homo sapiens
  siRNA target sequence for MCM10 (NM_018518.3,167-185).
ggattgtaattcagaagaa

SEQ ID NO: 372059 - DNA, 19 bp, Homo sapiens
  siRNA target sequence for MCM10 (NM_018518.3,211-229).
gcgagcccgacgcatttga

SEQ ID NO: 372060 - DNA, 19 bp, Homo sapiens
  siRNA target sequence for MCM10 (NM_018518.3,245-263).
cgacggcgacggtgaatct

SEQ ID NO: 372061 - DNA, 19 bp, Homo sapiens
  siRNA target sequence for MCM10 (NM_018518.3,248-266).
cggcgacggtgaatcttat

SEQ ID NO: 372062 - DNA, 19 bp, Homo sapiens
  siRNA target sequence for MCM10 (NM_018518.3,249-267).
ggcgacggtgaatcttata

SEQ ID NO: 372063 - DNA, 19 bp, Homo sapiens
  siRNA target sequence for MCM10 (NM_018518.3,251-269).
cgacggtgaatcttataca

SEQ ID NO: 372064 - DNA, 19 bp, Homo sapiens
  siRNA target sequence for MCM10 (NM_018518.3,254-272).
cggtgaatcttatacagaa

SEQ ID NO: 372065 - DNA, 19 bp, Homo sapiens
  siRNA target sequence for MCM10 (NM_018518.3,328-346).
ctctctttggagatatgga

SEQ ID NO: 372066 - DNA, 19 bp, Homo sapiens
  siRNA target sequence for MCM10 (NM_018518.3,344-362).
ggaggacttaacagatgaa

SEQ ID NO: 372067 - DNA, 19 bp, Homo sapiens
  siRNA target sequence for MCM10 (NM_018518.3,417-435).
cccaggcgagagaaaacga

SEQ ID NO: 372068 - DNA, 19 bp, Homo sapiens
  siRNA target sequence for MCM10 (NM_018518.3,418-436).
ccaggcgagagaaaacgaa

SEQ ID NO: 372069 - DNA, 19 bp, Homo sapiens
  siRNA target sequence for MCM10 (NM_018518.3,492-510).
gagcagctaaaagtaacaa

SEQ ID NO: 372070 - DNA, 19 bp, Homo sapiens
  siRNA target sequence for MCM10 (NM_018518.3,494-512).
gcagctaaaagtaacaaca

SEQ ID NO: 372071 - DNA, 19 bp, Homo sapiens
  siRNA target sequence for MCM10 (NM_018518.3,504-522).
gtaacaacaattaaacaga

SEQ ID NO: 372072 - DNA, 19 bp, Homo sapiens
  siRNA target sequence for MCM10 (NM_018518.3,529-547).
gcccagcccgtctgcaaaa

SEQ ID NO: 372073 - DNA, 19 bp, Homo sapiens
  siRNA target sequence for MCM10 (NM_018518.3,531-549).
ccagcccgtctgcaaaaat

SEQ ID NO: 372074 - DNA, 19 bp, Homo sapiens
  siRNA target sequence for MCM10 (NM_018518.3,735-753).
caacccctacagacgattt

SEQ ID NO: 372075 - DNA, 19 bp, Homo sapiens
  siRNA target sequence for MCM10 (NM_018518.3,746-764).
gacgatttctcggaacaaa

SEQ ID NO: 372076 - DNA, 19 bp, Homo sapiens
  siRNA target sequence for MCM10 (NM_018518.3,761-779).
caaacctagtgggataact

SEQ ID NO: 372077 - DNA, 19 bp, Homo sapiens
  siRNA target sequence for MCM10 (NM_018518.3,772-790).
ggataactagaggtcaaat

SEQ ID NO: 372078 - DNA, 19 bp, Homo sapiens
  siRNA target sequence for MCM10 (NM_018518.3,773-791).
gataactagaggtcaaatt

SEQ ID NO: 372079 - DNA, 19 bp, Homo sapiens
  siRNA target sequence for MCM10 (NM_018518.3,794-812).
ggggaccccaggaagttct

SEQ ID NO: 372080 - DNA, 19 bp, Homo sapiens
  siRNA target sequence for MCM10 (NM_018518.3,873-891).
cgagtatcctccacagaaa

SEQ ID NO: 372081 - DNA, 19 bp, Homo sapiens
  siRNA target sequence for MCM10 (NM_018518.3,874-892).
gagtatcctccacagaaat

SEQ ID NO: 372082 - DNA, 19 bp, Homo sapiens
  siRNA target sequence for MCM10 (NM_018518.3,876-894).
gtatcctccacagaaatga

SEQ ID NO: 372083 - DNA, 19 bp, Homo sapiens
  siRNA target sequence for MCM10 (NM_018518.3,880-898).
cctccacagaaatgaacaa

SEQ ID NO: 372084 - DNA, 19 bp, Homo sapiens
  siRNA target sequence for MCM10 (NM_018518.3,1013-1031).
gccacagagtgtgaatagt

SEQ ID NO: 372085 - DNA, 19 bp, Homo sapiens
  siRNA target sequence for MCM10 (NM_018518.3,1023-1041).
gtgaatagtggaaaaacct

SEQ ID NO: 372086 - DNA, 19 bp, Homo sapiens
  siRNA target sequence for MCM10 (NM_018518.3,1046-1064).
catatggaaactgaatgat

SEQ ID NO: 372087 - DNA, 19 bp, Homo sapiens
  siRNA target sequence for MCM10 (NM_018518.3,1199-1217).
ggtgtgtttatctatcgat

SEQ ID NO: 372088 - DNA, 19 bp, Homo sapiens
  siRNA target sequence for MCM10 (NM_018518.3,1295-1313).
gtgcacgcagactgtgaat

SEQ ID NO: 372089 - DNA, 19 bp, Homo sapiens
  siRNA target sequence for MCM10 (NM_018518.3,1297-1315).
gcacgcagactgtgaattt

SEQ ID NO: 372090 - DNA, 19 bp, Homo sapiens
  siRNA target sequence for MCM10 (NM_018518.3,1405-1423).
gaggacgaattccaaagaa

SEQ ID NO: 372091 - DNA, 19 bp, Homo sapiens
  siRNA target sequence for MCM10 (NM_018518.3,1407-1425).
ggacgaattccaaagaagt

SEQ ID NO: 372092 - DNA, 19 bp, Homo sapiens
  siRNA target sequence for MCM10 (NM_018518.3,1462-1480).
gccaagatggcttttacta

SEQ ID NO: 372093 - DNA, 19 bp, Homo sapiens
  siRNA target sequence for MCM10 (NM_018518.3,1499-1517).
ctcgtatgcagcttcaatt

SEQ ID NO: 372094 - DNA, 19 bp, Homo sapiens
  siRNA target sequence for MCM10 (NM_018518.3,1502-1520).
gtatgcagcttcaattgca

SEQ ID NO: 372095 - DNA, 19 bp, Homo sapiens
  siRNA target sequence for MCM10 (NM_018518.3,1527-1545).
gtggctcctaagaagaaga

SEQ ID NO: 372096 - DNA, 19 bp, Homo sapiens
  siRNA target sequence for MCM10 (NM_018518.3,1557-1575).
ctgagtaatctggttgtta

SEQ ID NO: 372097 - DNA, 19 bp, Homo sapiens
  siRNA target sequence for MCM10 (NM_018518.3,1679-1697).
gtgtggagccaggaactta

SEQ ID NO: 372098 - DNA, 19 bp, Homo sapiens
  siRNA target sequence for MCM10 (NM_018518.3,1681-1699).
gtggagccaggaacttaaa

SEQ ID NO: 372099 - DNA, 19 bp, Homo sapiens
  siRNA target sequence for MCM10 (NM_018518.3,1777-1795).
cactcttgaagcaacagaa

SEQ ID NO: 372100 - DNA, 19 bp, Homo sapiens
  siRNA target sequence for MCM10 (NM_018518.3,1853-1871).
gcagagctcaagtgaagtt

SEQ ID NO: 372101 - DNA, 19 bp, Homo sapiens
  siRNA target sequence for MCM10 (NM_018518.3,2130-2148).
ccaaacagcattaagaaga

SEQ ID NO: 372102 - DNA, 19 bp, Homo sapiens
  siRNA target sequence for MCM10 (NM_018518.3,2351-2369).
gatgcaggagcgctacttt

SEQ ID NO: 372103 - DNA, 19 bp, Homo sapiens
  siRNA target sequence for MCM10 (NM_018518.3,2524-2542).
gtgtgaagaggtttttcaa

SEQ ID NO: 372104 - DNA, 19 bp, Homo sapiens
  siRNA target sequence for MCM10 (NM_018518.3,2588-2606).
caagcactgcagtaactgt

SEQ ID NO: 372105 - DNA, 19 bp, Homo sapiens
  siRNA target sequence for MCM10 (NM_018518.3,2621-2639).
ggaacgggacggaatgcta

SEQ ID NO: 372106 - DNA, 19 bp, Homo sapiens
  siRNA target sequence for MCM10 (NM_018518.3,2622-2640).
gaacgggacggaatgctaa

SEQ ID NO: 372107 - DNA, 19 bp, Homo sapiens
  siRNA target sequence for MCM10 (NM_018518.3,2627-2645).
ggacggaatgctaaaggaa

SEQ ID NO: 372108 - DNA, 19 bp, Homo sapiens
  siRNA target sequence for MCM10 (NM_018518.3,2628-2646).
gacggaatgctaaaggaaa

SEQ ID NO: 372109 - DNA, 19 bp, Homo sapiens
  siRNA target sequence for MCM10 (NM_018518.3,2667-2685).
ggagaaactctgttaccaa

SEQ ID NO: 372110 - DNA, 19 bp, Homo sapiens
  siRNA target sequence for PRO2268 (NM_018520.2,216-234).
gccaaacaggattagactt

SEQ ID NO: 372111 - DNA, 19 bp, Homo sapiens
  siRNA target sequence for PRO2268 (NM_018520.2,217-235).
ccaaacaggattagacttt

SEQ ID NO: 372112 - DNA, 19 bp, Homo sapiens
  siRNA target sequence for PRO2268 (NM_018520.2,377-395).
ccctccccgctaaaatact

SEQ ID NO: 372113 - DNA, 19 bp, Homo sapiens
  siRNA target sequence for PRO2268 (NM_018520.2,378-396).
cctccccgctaaaatacta

SEQ ID NO: 372114 - DNA, 19 bp, Homo sapiens
  siRNA target sequence for FLJ22054 (NM_018527.2,286-304).
cttcaaacgcatcttgaaa

SEQ ID NO: 372115 - DNA, 19 bp, Homo sapiens
  siRNA target sequence for FLJ22054 (NM_018527.2,294-312).
gcatcttgaaatgttatga

SEQ ID NO: 372116 - DNA, 19 bp, Homo sapiens
  siRNA target sequence for FLJ22054 (NM_018527.2,335-353).
ctcaagttttgcaagatga

SEQ ID NO: 372117 - DNA, 19 bp, Homo sapiens
  siRNA target sequence for FLJ22054 (NM_018527.2,358-376).
gtcgaacccaaaatttgct

SEQ ID NO: 372118 - DNA, 19 bp, Homo sapiens
  siRNA target sequence for FLJ22054 (NM_018527.2,462-480).
gacttcgtaatgatgtcaa

SEQ ID NO: 372119 - DNA, 19 bp, Homo sapiens
  siRNA target sequence for FLJ22054 (NM_018527.2,490-508).
ctgttggcatgtatatgga

SEQ ID NO: 372120 - DNA, 19 bp, Homo sapiens
  siRNA target sequence for FLJ22054 (NM_018527.2,509-527).
ctcttgcagcgttctgata

SEQ ID NO: 372121 - DNA, 19 bp, Homo sapiens
  siRNA target sequence for FLJ22054 (NM_018527.2,511-529).
cttgcagcgttctgataaa

SEQ ID NO: 372122 - DNA, 19 bp, Homo sapiens
  siRNA target sequence for FLJ22054 (NM_018527.2,514-532).
gcagcgttctgataaaaaa

SEQ ID NO: 372123 - DNA, 19 bp, Homo sapiens
  siRNA target sequence for FLJ22054 (NM_018527.2,517-535).
gcgttctgataaaaaatat

SEQ ID NO: 372124 - DNA, 19 bp, Homo sapiens
  siRNA target sequence for FLJ22054 (NM_018527.2,519-537).
gttctgataaaaaatatga

SEQ ID NO: 372125 - DNA, 19 bp, Homo sapiens
  siRNA target sequence for FLJ22054 (NM_018527.2,642-660).
gttaccgagagacaagata

SEQ ID NO: 372126 - DNA, 19 bp, Homo sapiens
  siRNA target sequence for FLJ22054 (NM_018527.2,657-675).
gataccagcttcttcagtt

SEQ ID NO: 372127 - DNA, 19 bp, Homo sapiens
  siRNA target sequence for FLJ22054 (NM_018527.2,689-707).
cgtgcctcctggattggat

SEQ ID NO: 372128 - DNA, 19 bp, Homo sapiens
  siRNA target sequence for FLJ22054 (NM_018527.2,694-712).
ctcctggattggatatgct

SEQ ID NO: 372129 - DNA, 19 bp, Homo sapiens
  siRNA target sequence for FLJ22054 (NM_018527.2,711-729).
ctattgcataccatttgct

SEQ ID NO: 372130 - DNA, 19 bp, Homo sapiens
  siRNA target sequence for FLJ22054 (NM_018527.2,717-735).
cataccatttgctgaaaga

SEQ ID NO: 372131 - DNA, 19 bp, Homo sapiens
  siRNA target sequence for FLJ22054 (NM_018527.2,740-758).
gatatggccctaaaactgt

SEQ ID NO: 372132 - DNA, 19 bp, Homo sapiens
  siRNA target sequence for FLJ22054 (NM_018527.2,757-775).
gttggaagaatttagacaa

SEQ ID NO: 372133 - DNA, 19 bp, Homo sapiens
  siRNA target sequence for FLJ22054 (NM_018527.2,809-827).
gaatatagtgaattgatat

SEQ ID NO: 372134 - DNA, 19 bp, Homo sapiens
  siRNA target sequence for FLJ22054 (NM_018527.2,816-834).
gtgaattgatattatacca

SEQ ID NO: 372135 - DNA, 19 bp, Homo sapiens
  siRNA target sequence for FLJ22054 (NM_018527.2,873-891).
ctttggaacatatagaaat

SEQ ID NO: 372136 - DNA, 19 bp, Homo sapiens
  siRNA target sequence for FLJ22054 (NM_018527.2,994-1012).
cttgattgatcgaaatgca

SEQ ID NO: 372137 - DNA, 19 bp, Homo sapiens
  siRNA target sequence for FLJ22054 (NM_018527.2,1115-1133).
gcaattacacccagaagat

SEQ ID NO: 372138 - DNA, 19 bp, Homo sapiens
  siRNA target sequence for FLJ22054 (NM_018527.2,1145-1163).
cttgtcccaggtttctata

SEQ ID NO: 372139 - DNA, 19 bp, Homo sapiens
  siRNA target sequence for FLJ22054 (NM_018527.2,1159-1177).
ctataatccaggaacttgt

SEQ ID NO: 372140 - DNA, 19 bp, Homo sapiens
  siRNA target sequence for GSDML (NM_018530.1,233-251).
cgtatttgaggaaatcaca

SEQ ID NO: 372141 - DNA, 19 bp, Homo sapiens
  siRNA target sequence for GSDML (NM_018530.1,242-260).
ggaaatcacaagaattgta

SEQ ID NO: 372142 - DNA, 19 bp, Homo sapiens
  siRNA target sequence for GSDML (NM_018530.1,306-324).
cttgttgatgctgatagat

SEQ ID NO: 372143 - DNA, 19 bp, Homo sapiens
  siRNA target sequence for GSDML (NM_018530.1,448-466).
ctgggctccaaggtcaaaa

SEQ ID NO: 372144 - DNA, 19 bp, Homo sapiens
  siRNA target sequence for GSDML (NM_018530.1,497-515).
ctcaacgggagagttgata

SEQ ID NO: 372145 - DNA, 19 bp, Homo sapiens
  siRNA target sequence for GSDML (NM_018530.1,499-517).
caacgggagagttgatagt

SEQ ID NO: 372146 - DNA, 19 bp, Homo sapiens
  siRNA target sequence for GSDML (NM_018530.1,557-575).
gggcttccaccatcagaaa

SEQ ID NO: 372147 - DNA, 19 bp, Homo sapiens
  siRNA target sequence for GSDML (NM_018530.1,559-577).
gcttccaccatcagaaaat

SEQ ID NO: 372148 - DNA, 19 bp, Homo sapiens
  siRNA target sequence for GSDML (NM_018530.1,595-613).
ggatatcccagcagtatct

SEQ ID NO: 372149 - DNA, 19 bp, Homo sapiens
  siRNA target sequence for GSDML (NM_018530.1,643-661).
gggaactacccttttcatt

SEQ ID NO: 372150 - DNA, 19 bp, Homo sapiens
  siRNA target sequence for GSDML (NM_018530.1,653-671).
cttttcattccgatcaatt

SEQ ID NO: 372151 - DNA, 19 bp, Homo sapiens
  siRNA target sequence for GSDML (NM_018530.1,667-685).
caattaatacgagagaaaa

SEQ ID NO: 372152 - DNA, 19 bp, Homo sapiens
  siRNA target sequence for GSDML (NM_018530.1,676-694).
cgagagaaaacctgtatct

SEQ ID NO: 372153 - DNA, 19 bp, Homo sapiens
  siRNA target sequence for GSDML (NM_018530.1,734-752).
gaaaagcgaccggcaatat

SEQ ID NO: 372154 - DNA, 19 bp, Homo sapiens
  siRNA target sequence for GSDML (NM_018530.1,739-757).
gcgaccggcaatataaatt

SEQ ID NO: 372155 - DNA, 19 bp, Homo sapiens
  siRNA target sequence for GSDML (NM_018530.1,740-758).
cgaccggcaatataaattt

SEQ ID NO: 372156 - DNA, 19 bp, Homo sapiens
  siRNA target sequence for GSDML (NM_018530.1,744-762).
cggcaatataaattttgga

SEQ ID NO: 372157 - DNA, 19 bp, Homo sapiens
  siRNA target sequence for GSDML (NM_018530.1,876-894).
gagacgatgagaaagtctt

SEQ ID NO: 372158 - DNA, 19 bp, Homo sapiens
  siRNA target sequence for GSDML (NM_018530.1,1007-1025).
cctcggcaaggaggatatt

SEQ ID NO: 372159 - DNA, 19 bp, Homo sapiens
  siRNA target sequence for GSDML (NM_018530.1,1032-1050).
gatctagagcaaagagtat

SEQ ID NO: 372160 - DNA, 19 bp, Homo sapiens
  siRNA target sequence for GSDML (NM_018530.1,1047-1065).
gtatctgaggtcctgattt

SEQ ID NO: 372161 - DNA, 19 bp, Homo sapiens
  siRNA target sequence for GSDML (NM_018530.1,1136-1154).
ggtagaagcgcgtgcaaaa

SEQ ID NO: 372162 - DNA, 19 bp, Homo sapiens
  siRNA target sequence for GSDML (NM_018530.1,1303-1321).
ctcctgacatggactatga

SEQ ID NO: 372163 - DNA, 19 bp, Homo sapiens
  siRNA target sequence for GSDML (NM_018530.1,1340-1358).
ctgtgcgctgtatgttgtt

SEQ ID NO: 372164 - DNA, 19 bp, Homo sapiens
  siRNA target sequence for GSDML (NM_018530.1,1342-1360).
gtgcgctgtatgttgttgt

SEQ ID NO: 372165 - DNA, 19 bp, Homo sapiens
  siRNA target sequence for ERMAP (NM_018538.2,431-449).
gatctgatgccggaatata

SEQ ID NO: 372166 - DNA, 19 bp, Homo sapiens
  siRNA target sequence for ERMAP (NM_018538.2,543-561).
gtctgatccaagttggaaa

SEQ ID NO: 372167 - DNA, 19 bp, Homo sapiens
  siRNA target sequence for ERMAP (NM_018538.2,745-763).
ggtggacaatcttctttca

SEQ ID NO: 372168 - DNA, 19 bp, Homo sapiens
  siRNA target sequence for ERMAP (NM_018538.2,812-830).
cggagtgaactgaagttga

SEQ ID NO: 372169 - DNA, 19 bp, Homo sapiens
  siRNA target sequence for ERMAP (NM_018538.2,861-879).
gagcccggttgcattttgt

SEQ ID NO: 372170 - DNA, 19 bp, Homo sapiens
  siRNA target sequence for ERMAP (NM_018538.2,908-926).
catcccaaactcatccttt

SEQ ID NO: 372171 - DNA, 19 bp, Homo sapiens
  siRNA target sequence for ERMAP (NM_018538.2,1065-1083).
gagacaagaccaaatggat

SEQ ID NO: 372172 - DNA, 19 bp, Homo sapiens
  siRNA target sequence for ERMAP (NM_018538.2,1163-1181).
cagagtcgtgggaatgagt

SEQ ID NO: 372173 - DNA, 19 bp, Homo sapiens
  siRNA target sequence for ERMAP (NM_018538.2,1165-1183).
gagtcgtgggaatgagtat

SEQ ID NO: 372174 - DNA, 19 bp, Homo sapiens
  siRNA target sequence for ERMAP (NM_018538.2,1167-1185).
gtcgtgggaatgagtatga

SEQ ID NO: 372175 - DNA, 19 bp, Homo sapiens
  siRNA target sequence for ERMAP (NM_018538.2,1204-1222).
gacctccttccgccttaaa

SEQ ID NO: 372176 - DNA, 19 bp, Homo sapiens
  siRNA target sequence for ERMAP (NM_018538.2,1206-1224).
cctccttccgccttaaaga

SEQ ID NO: 372177 - DNA, 19 bp, Homo sapiens
  siRNA target sequence for ERMAP (NM_018538.2,1294-1312).
caagtcccacatctttact

SEQ ID NO: 372178 - DNA, 19 bp, Homo sapiens
  siRNA target sequence for ERMAP (NM_018538.2,1385-1403).
gcacctctagtcatttgtt

SEQ ID NO: 372179 - DNA, 19 bp, Homo sapiens
  siRNA target sequence for ERMAP (NM_018538.2,1412-1430).
cacaaatcagaggaatcaa

SEQ ID NO: 372180 - DNA, 19 bp, Homo sapiens
  siRNA target sequence for ERMAP (NM_018538.2,1450-1468).
gaaaggccatgctaatgga

SEQ ID NO: 372181 - DNA, 19 bp, Homo sapiens
  siRNA target sequence for ERMAP (NM_018538.2,1480-1498).
caaggtgaactcttcttta

SEQ ID NO: 372182 - DNA, 19 bp, Homo sapiens
  siRNA target sequence for ERMAP (NM_018538.2,1573-1591).
gctcaaggctccttctttt

SEQ ID NO: 372183 - DNA, 19 bp, Homo sapiens
  siRNA target sequence for PRO2964 (NM_018547.1,645-663).
cttggagaatactgttaat

SEQ ID NO: 372184 - DNA, 19 bp, Homo sapiens
  siRNA target sequence for PRO2964 (NM_018547.1,648-666).
ggagaatactgttaattca

SEQ ID NO: 372185 - DNA, 19 bp, Homo sapiens
  siRNA target sequence for PRO2964 (NM_018547.1,651-669).
gaatactgttaattcagtt

SEQ ID NO: 372186 - DNA, 19 bp, Homo sapiens
  siRNA target sequence for PRO2964 (NM_018547.1,690-708).
ggtactacagaataaaata

SEQ ID NO: 372187 - DNA, 19 bp, Homo sapiens
  siRNA target sequence for PRO2964 (NM_018547.1,691-709).
gtactacagaataaaatat

SEQ ID NO: 372188 - DNA, 19 bp, Homo sapiens
  siRNA target sequence for PRO2964 (NM_018547.1,697-715).
cagaataaaatataacgat

SEQ ID NO: 372189 - DNA, 19 bp, Homo sapiens
  siRNA target sequence for HSA277841 (NM_018553.1,193-211).
ggcatgaaaggaattctta

SEQ ID NO: 372190 - DNA, 19 bp, Homo sapiens
  siRNA target sequence for HSA277841 (NM_018553.1,218-236).
catggaagcgaagatatca

SEQ ID NO: 372191 - DNA, 19 bp, Homo sapiens
  siRNA target sequence for HSA277841 (NM_018553.1,292-310).
gttggcttgacgtcgtata

SEQ ID NO: 372192 - DNA, 19 bp, Homo sapiens
  siRNA target sequence for HSA277841 (NM_018553.1,296-314).
gcttgacgtcgtataaaca

SEQ ID NO: 372193 - DNA, 19 bp, Homo sapiens
  siRNA target sequence for HSA277841 (NM_018553.1,297-315).
cttgacgtcgtataaacat

SEQ ID NO: 372194 - DNA, 19 bp, Homo sapiens
  siRNA target sequence for HSA277841 (NM_018553.1,306-324).
gtataaacatcgacattct

SEQ ID NO: 372195 - DNA, 19 bp, Homo sapiens
  siRNA target sequence for HSA277841 (NM_018553.1,317-335).
gacattctgggctagtgaa

SEQ ID NO: 372196 - DNA, 19 bp, Homo sapiens
  siRNA target sequence for HSA277841 (NM_018553.1,648-666).
ggcagatagtgtatcttca

SEQ ID NO: 372197 - DNA, 19 bp, Homo sapiens
  siRNA target sequence for HSA277841 (NM_018553.1,681-699).
ccgaattggtaacaaatta

SEQ ID NO: 372198 - DNA, 19 bp, Homo sapiens
  siRNA target sequence for HSA277841 (NM_018553.1,715-733).
gcagatgtccgacatctat

SEQ ID NO: 372199 - DNA, 19 bp, Homo sapiens
  siRNA target sequence for HSA277841 (NM_018553.1,716-734).
cagatgtccgacatctatt

SEQ ID NO: 372200 - DNA, 19 bp, Homo sapiens
  siRNA target sequence for HSA277841 (NM_018553.1,766-784).
ccaccagtcagcagtacta

SEQ ID NO: 372201 - DNA, 19 bp, Homo sapiens
  siRNA target sequence for HSA277841 (NM_018553.1,774-792).
cagcagtactaaatcagat

SEQ ID NO: 372202 - DNA, 19 bp, Homo sapiens
  siRNA target sequence for HSA277841 (NM_018553.1,776-794).
gcagtactaaatcagatat

SEQ ID NO: 372203 - DNA, 19 bp, Homo sapiens
  siRNA target sequence for HSA277841 (NM_018553.1,777-795).
cagtactaaatcagatata

SEQ ID NO: 372204 - DNA, 19 bp, Homo sapiens
  siRNA target sequence for HSA277841 (NM_018553.1,796-814).
cgccagcggttaggaaaaa

SEQ ID NO: 372205 - DNA, 19 bp, Homo sapiens
  siRNA target sequence for HSA277841 (NM_018553.1,898-916).
gttcccaggcaggatagta

SEQ ID NO: 372206 - DNA, 19 bp, Homo sapiens
  siRNA target sequence for HSA277841 (NM_018553.1,929-947).
ccgatactcgggagaagaa

SEQ ID NO: 372207 - DNA, 19 bp, Homo sapiens
  siRNA target sequence for HSA277841 (NM_018553.1,930-948).
cgatactcgggagaagaaa

SEQ ID NO: 372208 - DNA, 19 bp, Homo sapiens
  siRNA target sequence for HSA277841 (NM_018553.1,931-949).
gatactcgggagaagaaat

SEQ ID NO: 372209 - DNA, 19 bp, Homo sapiens
  siRNA target sequence for HSA277841 (NM_018553.1,1110-1128).
gagccggttagataactta

SEQ ID NO: 372210 - DNA, 19 bp, Homo sapiens
  siRNA target sequence for HSA277841 (NM_018553.1,1114-1132).
cggttagataacttaccat

SEQ ID NO: 372211 - DNA, 19 bp, Homo sapiens
  siRNA target sequence for SIRPB2 (NM_018556.2,912-930).
cgtgtgccagagagaaaca

SEQ ID NO: 372212 - DNA, 19 bp, Homo sapiens
  siRNA target sequence for SIRPB2 (NM_018556.2,929-947).
cagcctcgacccttacaga

SEQ ID NO: 372213 - DNA, 19 bp, Homo sapiens
  siRNA target sequence for LSR7 (NM_018559.2,201-219).
cagctctgccccctaatta

SEQ ID NO: 372214 - DNA, 19 bp, Homo sapiens
  siRNA target sequence for LSR7 (NM_018559.2,203-221).
gctctgccccctaattata

SEQ ID NO: 372215 - DNA, 19 bp, Homo sapiens
  siRNA target sequence for LSR7 (NM_018559.2,204-222).
ctctgccccctaattataa

SEQ ID NO: 372216 - DNA, 19 bp, Homo sapiens
  siRNA target sequence for LSR7 (NM_018559.2,309-327).
gtggtccaactgcaagaaa

SEQ ID NO: 372217 - DNA, 19 bp, Homo sapiens
  siRNA target sequence for LSR7 (NM_018559.2,444-462).
cattgccacctggtttcat

SEQ ID NO: 372218 - DNA, 19 bp, Homo sapiens
  siRNA target sequence for LSR7 (NM_018559.2,448-466).
gccacctggtttcattaaa

SEQ ID NO: 372219 - DNA, 19 bp, Homo sapiens
  siRNA target sequence for LSR7 (NM_018559.2,557-575).
gcaaaaggaccagttaact

SEQ ID NO: 372220 - DNA, 19 bp, Homo sapiens
  siRNA target sequence for LSR7 (NM_018559.2,558-576).
caaaaggaccagttaacta

SEQ ID NO: 372221 - DNA, 19 bp, Homo sapiens
  siRNA target sequence for LSR7 (NM_018559.2,564-582).
gaccagttaactataatgt

SEQ ID NO: 372222 - DNA, 19 bp, Homo sapiens
  siRNA target sequence for LSR7 (NM_018559.2,603-621).
gggcccagagaatgaaaga

SEQ ID NO: 372223 - DNA, 19 bp, Homo sapiens
  siRNA target sequence for LSR7 (NM_018559.2,651-669).
ctaaacccattgtaagaga

SEQ ID NO: 372224 - DNA, 19 bp, Homo sapiens
  siRNA target sequence for LSR7 (NM_018559.2,670-688).
gtcatggatgactgaactt

SEQ ID NO: 372225 - DNA, 19 bp, Homo sapiens
  siRNA target sequence for LSR7 (NM_018559.2,750-768).
catctggagatcgatcaat

SEQ ID NO: 372226 - DNA, 19 bp, Homo sapiens
  siRNA target sequence for LSR7 (NM_018559.2,761-779).
cgatcaatctggacagata

SEQ ID NO: 372227 - DNA, 19 bp, Homo sapiens
  siRNA target sequence for LSR7 (NM_018559.2,884-902).
gctgagcaggtatcttcat

SEQ ID NO: 372228 - DNA, 19 bp, Homo sapiens
  siRNA target sequence for LSR7 (NM_018559.2,887-905).
gagcaggtatcttcataca

SEQ ID NO: 372229 - DNA, 19 bp, Homo sapiens
  siRNA target sequence for LSR7 (NM_018559.2,889-907).
gcaggtatcttcatacaat

SEQ ID NO: 372230 - DNA, 19 bp, Homo sapiens
  siRNA target sequence for LSR7 (NM_018559.2,912-930).
caaaaagatcagaatctct

SEQ ID NO: 372231 - DNA, 19 bp, Homo sapiens
  siRNA target sequence for LSR7 (NM_018559.2,927-945).
ctcttatggacatacatca

SEQ ID NO: 372232 - DNA, 19 bp, Homo sapiens
  siRNA target sequence for LSR7 (NM_018559.2,929-947).
cttatggacatacatcata

SEQ ID NO: 372233 - DNA, 19 bp, Homo sapiens
  siRNA target sequence for LSR7 (NM_018559.2,960-978).
gtaaggctgctgaagacaa

SEQ ID NO: 372234 - DNA, 19 bp, Homo sapiens
  siRNA target sequence for LSR7 (NM_018559.2,985-1003).
gcctcaagagagaatacca

SEQ ID NO: 372235 - DNA, 19 bp, Homo sapiens
  siRNA target sequence for LSR7 (NM_018559.2,987-1005).
ctcaagagagaataccatt

SEQ ID NO: 372236 - DNA, 19 bp, Homo sapiens
  siRNA target sequence for LSR7 (NM_018559.2,1013-1031).
gataaagatctcaaggtta

SEQ ID NO: 372237 - DNA, 19 bp, Homo sapiens
  siRNA target sequence for LSR7 (NM_018559.2,1024-1042).
caaggttaatcggtttgat

SEQ ID NO: 372238 - DNA, 19 bp, Homo sapiens
  siRNA target sequence for LSR7 (NM_018559.2,1098-1116).
cacacggcaaaggcaatat

SEQ ID NO: 372239 - DNA, 19 bp, Homo sapiens
  siRNA target sequence for LSR7 (NM_018559.2,1100-1118).
cacggcaaaggcaatatgt

SEQ ID NO: 372240 - DNA, 19 bp, Homo sapiens
  siRNA target sequence for LSR7 (NM_018559.2,1102-1120).
cggcaaaggcaatatgttt

SEQ ID NO: 372241 - DNA, 19 bp, Homo sapiens
  siRNA target sequence for PRO0971 (NM_018569.2,348-366).
gcggaggatccaagtattt

SEQ ID NO: 372242 - DNA, 19 bp, Homo sapiens
  siRNA target sequence for PRO0971 (NM_018569.2,349-367).
cggaggatccaagtatttt

SEQ ID NO: 372243 - DNA, 19 bp, Homo sapiens
  siRNA target sequence for PRO0971 (NM_018569.2,571-589).
gaagttaagactagaagaa

SEQ ID NO: 372244 - DNA, 19 bp, Homo sapiens
  siRNA target sequence for PRO0971 (NM_018569.2,664-682).
gagaattgtgcagcaatat

SEQ ID NO: 372245 - DNA, 19 bp, Homo sapiens
  siRNA target sequence for PRO0971 (NM_018569.2,666-684).
gaattgtgcagcaatatca

SEQ ID NO: 372246 - DNA, 19 bp, Homo sapiens
  siRNA target sequence for PRO0971 (NM_018569.2,719-737).
ccagaagatgacttcgaat

SEQ ID NO: 372247 - DNA, 19 bp, Homo sapiens
  siRNA target sequence for PRO0971 (NM_018569.2,722-740).
gaagatgacttcgaatctt

SEQ ID NO: 372248 - DNA, 19 bp, Homo sapiens
  siRNA target sequence for PRO0971 (NM_018569.2,725-743).
gatgacttcgaatcttgtt

SEQ ID NO: 372249 - DNA, 19 bp, Homo sapiens
  siRNA target sequence for PRO0971 (NM_018569.2,728-746).
gacttcgaatcttgtttga

SEQ ID NO: 372250 - DNA, 19 bp, Homo sapiens
  siRNA target sequence for PRO0971 (NM_018569.2,730-748).
cttcgaatcttgtttgaga

SEQ ID NO: 372251 - DNA, 19 bp, Homo sapiens
  siRNA target sequence for PRO0971 (NM_018569.2,761-779).
cagtatgaagtttttcgaa

SEQ ID NO: 372252 - DNA, 19 bp, Homo sapiens
  siRNA target sequence for PRO0971 (NM_018569.2,767-785).
gaagtttttcgaagtagta

SEQ ID NO: 372253 - DNA, 19 bp, Homo sapiens
  siRNA target sequence for PRO0971 (NM_018569.2,939-957).
gagaacgttccaaaacaga

SEQ ID NO: 372254 - DNA, 19 bp, Homo sapiens
  siRNA target sequence for PRO0971 (NM_018569.2,968-986).
ctacgggcagcacttaagt

SEQ ID NO: 372255 - DNA, 19 bp, Homo sapiens
  siRNA target sequence for PRO0971 (NM_018569.2,971-989).
cgggcagcacttaagtata

SEQ ID NO: 372256 - DNA, 19 bp, Homo sapiens
  siRNA target sequence for PRO0971 (NM_018569.2,975-993).
cagcacttaagtatagcaa

SEQ ID NO: 372257 - DNA, 19 bp, Homo sapiens
  siRNA target sequence for PRO0971 (NM_018569.2,1068-1086).
gtgccgaaatggatgataa

SEQ ID NO: 372258 - DNA, 19 bp, Homo sapiens
  siRNA target sequence for PRO0971 (NM_018569.2,1095-1113).
ccgagtattctggatttgt

SEQ ID NO: 372259 - DNA, 19 bp, Homo sapiens
  siRNA target sequence for PRO0971 (NM_018569.2,1096-1114).
cgagtattctggatttgta

SEQ ID NO: 372260 - DNA, 19 bp, Homo sapiens
  siRNA target sequence for PRO0971 (NM_018569.2,1121-1139).
gtattagaactgtctgatt

SEQ ID NO: 372261 - DNA, 19 bp, Homo sapiens
  siRNA target sequence for CaMKIINalpha (NM_018584.4,456-474).
gcgacgtgggccagatctt

SEQ ID NO: 372262 - DNA, 19 bp, Homo sapiens
  siRNA target sequence for CaMKIINalpha (NM_018584.4,458-476).
gacgtgggccagatcttct

SEQ ID NO: 372263 - DNA, 19 bp, Homo sapiens
  siRNA target sequence for CaMKIINalpha (NM_018584.4,554-572).
cggagcaagcgggttgtta

SEQ ID NO: 372264 - DNA, 19 bp, Homo sapiens
  siRNA target sequence for CaMKIINalpha (NM_018584.4,558-576).
gcaagcgggttgttattga

SEQ ID NO: 372265 - DNA, 19 bp, Homo sapiens
  siRNA target sequence for CaMKIINalpha (NM_018584.4,559-577).
caagcgggttgttattgaa

SEQ ID NO: 372266 - DNA, 19 bp, Homo sapiens
  siRNA target sequence for CaMKIINalpha (NM_018584.4,562-580).
gcgggttgttattgaagat

SEQ ID NO: 372267 - DNA, 19 bp, Homo sapiens
  siRNA target sequence for CaMKIINalpha (NM_018584.4,564-582).
gggttgttattgaagatga

SEQ ID NO: 372268 - DNA, 19 bp, Homo sapiens
  siRNA target sequence for CaMKIINalpha (NM_018584.4,565-583).
ggttgttattgaagatgat

SEQ ID NO: 372269 - DNA, 19 bp, Homo sapiens
  siRNA target sequence for CaMKIINalpha (NM_018584.4,593-611).
gacgtgctgaaaaatatga

SEQ ID NO: 372270 - DNA, 19 bp, Homo sapiens
  siRNA target sequence for C14orf116 (NM_018589.2,306-324).
gatctgcctacctttgtga

SEQ ID NO: 372271 - DNA, 19 bp, Homo sapiens
  siRNA target sequence for C14orf116 (NM_018589.2,358-376).
caccggcgatggtggttaa

SEQ ID NO: 372272 - DNA, 19 bp, Homo sapiens
  siRNA target sequence for C14orf116 (NM_018589.2,360-378).
ccggcgatggtggttaact

SEQ ID NO: 372273 - DNA, 19 bp, Homo sapiens
  siRNA target sequence for C14orf116 (NM_018589.2,369-387).
gtggttaactccttgtgtt

SEQ ID NO: 372274 - DNA, 19 bp, Homo sapiens
  siRNA target sequence for C14orf116 (NM_018589.2,402-420).
ctggttattcttgaattaa

SEQ ID NO: 372275 - DNA, 19 bp, Homo sapiens
  siRNA target sequence for C14orf116 (NM_018589.2,430-448).
cgtcagctcggttgcttta

SEQ ID NO: 372276 - DNA, 19 bp, Homo sapiens
  siRNA target sequence for C14orf116 (NM_018589.2,431-449).
gtcagctcggttgctttat

SEQ ID NO: 372277 - DNA, 19 bp, Homo sapiens
  siRNA target sequence for C14orf116 (NM_018589.2,433-451).
cagctcggttgctttatca

SEQ ID NO: 372278 - DNA, 19 bp, Homo sapiens
  siRNA target sequence for C14orf116 (NM_018589.2,436-454).
ctcggttgctttatcatga

SEQ ID NO: 372279 - DNA, 19 bp, Homo sapiens
  siRNA target sequence for C14orf116 (NM_018589.2,438-456).
cggttgctttatcatgaat

SEQ ID NO: 372280 - DNA, 19 bp, Homo sapiens
  siRNA target sequence for SLC16A10 (NM_018593.2,573-591).
gcgtcttcacagacctatt

SEQ ID NO: 372281 - DNA, 19 bp, Homo sapiens
  siRNA target sequence for SLC16A10 (NM_018593.2,618-636).
gtgctgctgttggatttgt

SEQ ID NO: 372282 - DNA, 19 bp, Homo sapiens
  siRNA target sequence for SLC16A10 (NM_018593.2,638-656).
gggctcatgtccagttctt

SEQ ID NO: 372283 - DNA, 19 bp, Homo sapiens
  siRNA target sequence for SLC16A10 (NM_018593.2,673-691).
gcctctgtaccttacctat

SEQ ID NO: 372284 - DNA, 19 bp, Homo sapiens
  siRNA target sequence for SLC16A10 (NM_018593.2,677-695).
ctgtaccttacctatggaa

SEQ ID NO: 372285 - DNA, 19 bp, Homo sapiens
  siRNA target sequence for SLC16A10 (NM_018593.2,708-726).
gcggctgctcctttgcata

SEQ ID NO: 372286 - DNA, 19 bp, Homo sapiens
  siRNA target sequence for SLC16A10 (NM_018593.2,728-746).
cagccttcattggtcattt

SEQ ID NO: 372287 - DNA, 19 bp, Homo sapiens
  siRNA target sequence for SLC16A10 (NM_018593.2,851-869).
gacagcgtgggcctctttt

SEQ ID NO: 372288 - DNA, 19 bp, Homo sapiens
  siRNA target sequence for SLC16A10 (NM_018593.2,857-875).
gtgggcctcttttacacat

SEQ ID NO: 372289 - DNA, 19 bp, Homo sapiens
  siRNA target sequence for SLC16A10 (NM_018593.2,938-956).
gctaccagtaccaaagata

SEQ ID NO: 372290 - DNA, 19 bp, Homo sapiens
  siRNA target sequence for SLC16A10 (NM_018593.2,1060-1078).
gtgggcagttggaatacca

SEQ ID NO: 372291 - DNA, 19 bp, Homo sapiens
  siRNA target sequence for SLC16A10 (NM_018593.2,1071-1089).
gaataccacttgcactttt

SEQ ID NO: 372292 - DNA, 19 bp, Homo sapiens
  siRNA target sequence for SLC16A10 (NM_018593.2,1077-1095).
cacttgcactttttggata

SEQ ID NO: 372293 - DNA, 19 bp, Homo sapiens
  siRNA target sequence for SLC16A10 (NM_018593.2,1092-1110).
gatactttgtgccttatgt

SEQ ID NO: 372294 - DNA, 19 bp, Homo sapiens
  siRNA target sequence for SLC16A10 (NM_018593.2,1215-1233).
gccggattgcagattatgt

SEQ ID NO: 372295 - DNA, 19 bp, Homo sapiens
  siRNA target sequence for SLC16A10 (NM_018593.2,1262-1280).
gtactctcctttttcttca

SEQ ID NO: 372296 - DNA, 19 bp, Homo sapiens
  siRNA target sequence for SLC16A10 (NM_018593.2,1361-1379).
gatggatgcttcatttcca

SEQ ID NO: 372297 - DNA, 19 bp, Homo sapiens
  siRNA target sequence for SLC16A10 (NM_018593.2,1385-1403).
gctcccatagcctttgagt

SEQ ID NO: 372298 - DNA, 19 bp, Homo sapiens
  siRNA target sequence for SLC16A10 (NM_018593.2,1386-1404).
ctcccatagcctttgagtt

SEQ ID NO: 372299 - DNA, 19 bp, Homo sapiens
  siRNA target sequence for SLC16A10 (NM_018593.2,1389-1407).
ccatagcctttgagttagt

SEQ ID NO: 372300 - DNA, 19 bp, Homo sapiens
  siRNA target sequence for SLC16A10 (NM_018593.2,1390-1408).
catagcctttgagttagtt

SEQ ID NO: 372301 - DNA, 19 bp, Homo sapiens
  siRNA target sequence for SLC16A10 (NM_018593.2,1421-1439).
gtctcccaagcaattggat

SEQ ID NO: 372302 - DNA, 19 bp, Homo sapiens
  siRNA target sequence for SLC16A10 (NM_018593.2,1423-1441).
ctcccaagcaattggattt

SEQ ID NO: 372303 - DNA, 19 bp, Homo sapiens
  siRNA target sequence for SLC16A10 (NM_018593.2,1425-1443).
cccaagcaattggatttct

SEQ ID NO: 372304 - DNA, 19 bp, Homo sapiens
  siRNA target sequence for SLC16A10 (NM_018593.2,1437-1455).
gatttctgctcggattcat

SEQ ID NO: 372305 - DNA, 19 bp, Homo sapiens
  siRNA target sequence for SLC16A10 (NM_018593.2,1442-1460).
ctgctcggattcatgtcta

SEQ ID NO: 372306 - DNA, 19 bp, Homo sapiens
  siRNA target sequence for SLC16A10 (NM_018593.2,1444-1462).
gctcggattcatgtctata

SEQ ID NO: 372307 - DNA, 19 bp, Homo sapiens
  siRNA target sequence for SLC16A10 (NM_018593.2,1504-1522).
caaactgggctcctatgat

SEQ ID NO: 372308 - DNA, 19 bp, Homo sapiens
  siRNA target sequence for SLC16A10 (NM_018593.2,1562-1580).
ggtgctgtgctttgtttta

SEQ ID NO: 372309 - DNA, 19 bp, Homo sapiens
  siRNA target sequence for SLC16A10 (NM_018593.2,1583-1601).
ccgtggatccatagtaaga

SEQ ID NO: 372310 - DNA, 19 bp, Homo sapiens
  siRNA target sequence for SLC16A10 (NM_018593.2,1584-1602).
cgtggatccatagtaagaa

SEQ ID NO: 372311 - DNA, 19 bp, Homo sapiens
  siRNA target sequence for SLC16A10 (NM_018593.2,1603-1621).
gcaaagagagatcagtaaa

SEQ ID NO: 372312 - DNA, 19 bp, Homo sapiens
  siRNA target sequence for PRO1853 (NM_018607.4,485-503).
cctctctgggcccaataaa

SEQ ID NO: 372313 - DNA, 19 bp, Homo sapiens
  siRNA target sequence for PRO1853 (NM_018607.4,486-504).
ctctctgggcccaataaaa

SEQ ID NO: 372314 - DNA, 19 bp, Homo sapiens
  siRNA target sequence for PRO1853 (NM_018607.4,540-558).
ccggctgaaggttctttta

SEQ ID NO: 372315 - DNA, 19 bp, Homo sapiens
  siRNA target sequence for PRO1853 (NM_018607.4,542-560).
ggctgaaggttcttttaga

SEQ ID NO: 372316 - DNA, 19 bp, Homo sapiens
  siRNA target sequence for PRO1853 (NM_018607.4,578-596).
cagtgaggcagcagttact

SEQ ID NO: 372317 - DNA, 19 bp, Homo sapiens
  siRNA target sequence for PRO1853 (NM_018607.4,591-609).
gttacttcaaggatatgat

SEQ ID NO: 372318 - DNA, 19 bp, Homo sapiens
  siRNA target sequence for PRO1853 (NM_018607.4,699-717).
gaatgcacgtcagtcaaaa

SEQ ID NO: 372319 - DNA, 19 bp, Homo sapiens
  siRNA target sequence for PRO1853 (NM_018607.4,709-727).
cagtcaaaaccctttgcat

SEQ ID NO: 372320 - DNA, 19 bp, Homo sapiens
  siRNA target sequence for PSARL (NM_018622.3,141-159).
ctcctcggacgcaggttta

SEQ ID NO: 372321 - DNA, 19 bp, Homo sapiens
  siRNA target sequence for PSARL (NM_018622.3,144-162).
ctcggacgcaggtttaact

SEQ ID NO: 372322 - DNA, 19 bp, Homo sapiens
  siRNA target sequence for PSARL (NM_018622.3,150-168).
cgcaggtttaacttcttta

SEQ ID NO: 372323 - DNA, 19 bp, Homo sapiens
  siRNA target sequence for PSARL (NM_018622.3,151-169).
gcaggtttaacttctttat

SEQ ID NO: 372324 - DNA, 19 bp, Homo sapiens
  siRNA target sequence for PSARL (NM_018622.3,232-250).
ggacaagtggtgaagcata

SEQ ID NO: 372325 - DNA, 19 bp, Homo sapiens
  siRNA target sequence for PSARL (NM_018622.3,235-253).
caagtggtgaagcatacaa

SEQ ID NO: 372326 - DNA, 19 bp, Homo sapiens
  siRNA target sequence for PSARL (NM_018622.3,240-258).
ggtgaagcatacaagagaa

SEQ ID NO: 372327 - DNA, 19 bp, Homo sapiens
  siRNA target sequence for PSARL (NM_018622.3,297-315).
ccttctccctatcctataa

SEQ ID NO: 372328 - DNA, 19 bp, Homo sapiens
  siRNA target sequence for PSARL (NM_018622.3,309-327).
cctataaggagtctcataa

SEQ ID NO: 372329 - DNA, 19 bp, Homo sapiens
  siRNA target sequence for PSARL (NM_018622.3,310-328).
ctataaggagtctcataaa

SEQ ID NO: 372330 - DNA, 19 bp, Homo sapiens
  siRNA target sequence for PSARL (NM_018622.3,316-334).
ggagtctcataaaaccttt

SEQ ID NO: 372331 - DNA, 19 bp, Homo sapiens
  siRNA target sequence for PSARL (NM_018622.3,387-405).
caatatgaatcactgaaat

SEQ ID NO: 372332 - DNA, 19 bp, Homo sapiens
  siRNA target sequence for PSARL (NM_018622.3,407-425).
cagggtccagagttatttt

SEQ ID NO: 372333 - DNA, 19 bp, Homo sapiens
  siRNA target sequence for PSARL (NM_018622.3,409-427).
gggtccagagttattttga

SEQ ID NO: 372334 - DNA, 19 bp, Homo sapiens
  siRNA target sequence for PSARL (NM_018622.3,416-434).
gagttattttgatggtata

SEQ ID NO: 372335 - DNA, 19 bp, Homo sapiens
  siRNA target sequence for PSARL (NM_018622.3,502-520).
ggtggaataacctaagtga

SEQ ID NO: 372336 - DNA, 19 bp, Homo sapiens
  siRNA target sequence for PSARL (NM_018622.3,503-521).
gtggaataacctaagtgat

SEQ ID NO: 372337 - DNA, 19 bp, Homo sapiens
  siRNA target sequence for PSARL (NM_018622.3,527-545).
gcggactgtgacaggtatt

SEQ ID NO: 372338 - DNA, 19 bp, Homo sapiens
  siRNA target sequence for PSARL (NM_018622.3,528-546).
cggactgtgacaggtatta

SEQ ID NO: 372339 - DNA, 19 bp, Homo sapiens
  siRNA target sequence for PSARL (NM_018622.3,552-570).
gcaaatgtccttgtattct

SEQ ID NO: 372340 - DNA, 19 bp, Homo sapiens
  siRNA target sequence for PSARL (NM_018622.3,594-612).
cagcggacaatgatcagat

SEQ ID NO: 372341 - DNA, 19 bp, Homo sapiens
  siRNA target sequence for PSARL (NM_018622.3,596-614).
gcggacaatgatcagatat

SEQ ID NO: 372342 - DNA, 19 bp, Homo sapiens
  siRNA target sequence for PSARL (NM_018622.3,597-615).
cggacaatgatcagatatt

SEQ ID NO: 372343 - DNA, 19 bp, Homo sapiens
  siRNA target sequence for PSARL (NM_018622.3,598-616).
ggacaatgatcagatattt

SEQ ID NO: 372344 - DNA, 19 bp, Homo sapiens
  siRNA target sequence for PSARL (NM_018622.3,608-626).
cagatatttcacatcgaat

SEQ ID NO: 372345 - DNA, 19 bp, Homo sapiens
  siRNA target sequence for PSARL (NM_018622.3,651-669).
ccaatgttgctgtcaacat

SEQ ID NO: 372346 - DNA, 19 bp, Homo sapiens
  siRNA target sequence for PSARL (NM_018622.3,660-678).
ctgtcaacattcagtcatt

SEQ ID NO: 372347 - DNA, 19 bp, Homo sapiens
  siRNA target sequence for PSARL (NM_018622.3,673-691).
gtcatttctccttatttca

SEQ ID NO: 372348 - DNA, 19 bp, Homo sapiens
  siRNA target sequence for GPRC5C (NM_018653.3,588-606).
ggtagaggtcatcatcaat

SEQ ID NO: 372349 - DNA, 19 bp, Homo sapiens
  siRNA target sequence for GPRC5C (NM_018653.3,589-607).
gtagaggtcatcatcaata

SEQ ID NO: 372350 - DNA, 19 bp, Homo sapiens
  siRNA target sequence for GPRC5C (NM_018653.3,706-724).
gccaacatggactttgtca

SEQ ID NO: 372351 - DNA, 19 bp, Homo sapiens
  siRNA target sequence for GPRC5C (NM_018653.3,798-816).
caagcgctggcgtaagcat

SEQ ID NO: 372352 - DNA, 19 bp, Homo sapiens
  siRNA target sequence for GPRC5C (NM_018653.3,864-882).
ggtgtggatcgtcatgtat

SEQ ID NO: 372353 - DNA, 19 bp, Homo sapiens
  siRNA target sequence for GPRC5C (NM_018653.3,865-883).
gtgtggatcgtcatgtata

SEQ ID NO: 372354 - DNA, 19 bp, Homo sapiens
  siRNA target sequence for GPRC5C (NM_018653.3,867-885).
gtggatcgtcatgtatact

SEQ ID NO: 372355 - DNA, 19 bp, Homo sapiens
  siRNA target sequence for GPRC5C (NM_018653.3,1097-1115).
gcatgttcgtggagaacaa

SEQ ID NO: 372356 - DNA, 19 bp, Homo sapiens
  siRNA target sequence for GPRC5C (NM_018653.3,1380-1398).
gaactctcaggtctttaga

SEQ ID NO: 372357 - DNA, 19 bp, Homo sapiens
  siRNA target sequence for SLC35E3 (NM_018656.1,263-281).
gtgtccatctgcattgtgt

SEQ ID NO: 372358 - DNA, 19 bp, Homo sapiens
  siRNA target sequence for SLC35E3 (NM_018656.1,280-298).
gttcctcaacaaatggatt

SEQ ID NO: 372359 - DNA, 19 bp, Homo sapiens
  siRNA target sequence for SLC35E3 (NM_018656.1,456-474).
gtggtcttcactaaccttt

SEQ ID NO: 372360 - DNA, 19 bp, Homo sapiens
  siRNA target sequence for SLC35E3 (NM_018656.1,587-605).
gctcacgctgattcctata

SEQ ID NO: 372361 - DNA, 19 bp, Homo sapiens
  siRNA target sequence for SLC35E3 (NM_018656.1,592-610).
cgctgattcctataacttt

SEQ ID NO: 372362 - DNA, 19 bp, Homo sapiens
  siRNA target sequence for SLC35E3 (NM_018656.1,596-614).
gattcctataactttaggt

SEQ ID NO: 372363 - DNA, 19 bp, Homo sapiens
  siRNA target sequence for SLC35E3 (NM_018656.1,601-619).
ctataactttaggtgtaat

SEQ ID NO: 372364 - DNA, 19 bp, Homo sapiens
  siRNA target sequence for SLC35E3 (NM_018656.1,607-625).
ctttaggtgtaatcctaaa

SEQ ID NO: 372365 - DNA, 19 bp, Homo sapiens
  siRNA target sequence for SLC35E3 (NM_018656.1,612-630).
ggtgtaatcctaaattctt

SEQ ID NO: 372366 - DNA, 19 bp, Homo sapiens
  siRNA target sequence for SLC35E3 (NM_018656.1,613-631).
gtgtaatcctaaattctta

SEQ ID NO: 372367 - DNA, 19 bp, Homo sapiens
  siRNA target sequence for SLC35E3 (NM_018656.1,620-638).
cctaaattcttattacgat

SEQ ID NO: 372368 - DNA, 19 bp, Homo sapiens
  siRNA target sequence for SLC35E3 (NM_018656.1,628-646).
cttattacgatgtgaagtt

SEQ ID NO: 372369 - DNA, 19 bp, Homo sapiens
  siRNA target sequence for SLC35E3 (NM_018656.1,670-688).
ctgctcttggtgttttagt

SEQ ID NO: 372370 - DNA, 19 bp, Homo sapiens
  siRNA target sequence for SLC35E3 (NM_018656.1,675-693).
cttggtgttttagttacat

SEQ ID NO: 372371 - DNA, 19 bp, Homo sapiens
  siRNA target sequence for SLC35E3 (NM_018656.1,729-747).
gaattacaagtgaactcaa

SEQ ID NO: 372372 - DNA, 19 bp, Homo sapiens
  siRNA target sequence for SLC35E3 (NM_018656.1,875-893).
gctgctatctggagtaata

SEQ ID NO: 372373 - DNA, 19 bp, Homo sapiens
  siRNA target sequence for SLC35E3 (NM_018656.1,902-920).
ggtgaacttatcaatttat

SEQ ID NO: 372374 - DNA, 19 bp, Homo sapiens
  siRNA target sequence for SLC35E3 (NM_018656.1,903-921).
gtgaacttatcaatttatt

SEQ ID NO: 372375 - DNA, 19 bp, Homo sapiens
  siRNA target sequence for SLC35E3 (NM_018656.1,937-955).
cttcacctgtcacctataa

SEQ ID NO: 372376 - DNA, 19 bp, Homo sapiens
  siRNA target sequence for SLC35E3 (NM_018656.1,943-961).
ctgtcacctataacatgtt

SEQ ID NO: 372377 - DNA, 19 bp, Homo sapiens
  siRNA target sequence for SLC35E3 (NM_018656.1,985-1003).
ctttattcggaggatatgt

SEQ ID NO: 372378 - DNA, 19 bp, Homo sapiens
  siRNA target sequence for SLC35E3 (NM_018656.1,992-1010).
cggaggatatgttttattt

SEQ ID NO: 372379 - DNA, 19 bp, Homo sapiens
  siRNA target sequence for SLC35E3 (NM_018656.1,1013-1031).
ggatccactgtccattaat

SEQ ID NO: 372380 - DNA, 19 bp, Homo sapiens
  siRNA target sequence for PBF (NM_018660.1,564-582).
gcctgggcagaaggtttat

SEQ ID NO: 372381 - DNA, 19 bp, Homo sapiens
  siRNA target sequence for PBF (NM_018660.1,568-586).
gggcagaaggtttatgtgt

SEQ ID NO: 372382 - DNA, 19 bp, Homo sapiens
  siRNA target sequence for PBF (NM_018660.1,815-833).
cggacgcagtggaaatgga

SEQ ID NO: 372383 - DNA, 19 bp, Homo sapiens
  siRNA target sequence for PBF (NM_018660.1,869-887).
cctgcagccctgttgtaca

SEQ ID NO: 372384 - DNA, 19 bp, Homo sapiens
  siRNA target sequence for PBF (NM_018660.1,1056-1074).
gtatttgggggatgctttt

SEQ ID NO: 372385 - DNA, 19 bp, Homo sapiens
  siRNA target sequence for PBF (NM_018660.1,1131-1149).
cgaaccagctccacgaaaa

SEQ ID NO: 372386 - DNA, 19 bp, Homo sapiens
  siRNA target sequence for PBF (NM_018660.1,1132-1150).
gaaccagctccacgaaaaa

SEQ ID NO: 372387 - DNA, 19 bp, Homo sapiens
  siRNA target sequence for PBF (NM_018660.1,1667-1685).
ggagccggtcgctaagctt

SEQ ID NO: 372388 - DNA, 19 bp, Homo sapiens
  siRNA target sequence for PBF (NM_018660.1,1702-1720).
ccagcacctgcgatgaaat

SEQ ID NO: 372389 - DNA, 19 bp, Homo sapiens
  siRNA target sequence for PBF (NM_018660.1,1706-1724).
cacctgcgatgaaatctca

SEQ ID NO: 372390 - DNA, 19 bp, Homo sapiens
  siRNA target sequence for PBF (NM_018660.1,1712-1730).
cgatgaaatctcatctgat

SEQ ID NO: 372391 - DNA, 19 bp, Homo sapiens
  siRNA target sequence for SAGE (NM_018666.1,219-237).
catgctgctgcctatgtgt

SEQ ID NO: 372392 - DNA, 19 bp, Homo sapiens
  siRNA target sequence for SAGE (NM_018666.1,222-240).
gctgctgcctatgtgttta

SEQ ID NO: 372393 - DNA, 19 bp, Homo sapiens
  siRNA target sequence for SAGE (NM_018666.1,241-259).
caaatgatgggcagcaaat

SEQ ID NO: 372394 - DNA, 19 bp, Homo sapiens
  siRNA target sequence for SAGE (NM_018666.1,254-272).
gcaaatgaggagtgatgaa

SEQ ID NO: 372395 - DNA, 19 bp, Homo sapiens
  siRNA target sequence for SAGE (NM_018666.1,260-278).
gaggagtgatgaagtaaat

SEQ ID NO: 372396 - DNA, 19 bp, Homo sapiens
  siRNA target sequence for SAGE (NM_018666.1,262-280).
ggagtgatgaagtaaatct

SEQ ID NO: 372397 - DNA, 19 bp, Homo sapiens
  siRNA target sequence for SAGE (NM_018666.1,286-304).
caacagggcatcaaagcaa

SEQ ID NO: 372398 - DNA, 19 bp, Homo sapiens
  siRNA target sequence for SAGE (NM_018666.1,362-380).
gtcctcgtggttagacaaa

SEQ ID NO: 372399 - DNA, 19 bp, Homo sapiens
  siRNA target sequence for SAGE (NM_018666.1,364-382).
cctcgtggttagacaaaca

SEQ ID NO: 372400 - DNA, 19 bp, Homo sapiens
  siRNA target sequence for SAGE (NM_018666.1,393-411).
gcagtcactcacagcattt

SEQ ID NO: 372401 - DNA, 19 bp, Homo sapiens
  siRNA target sequence for SAGE (NM_018666.1,433-451).
gccaaccagtagctgataa

SEQ ID NO: 372402 - DNA, 19 bp, Homo sapiens
  siRNA target sequence for SAGE (NM_018666.1,438-456).
ccagtagctgataatgtct

SEQ ID NO: 372403 - DNA, 19 bp, Homo sapiens
  siRNA target sequence for SAGE (NM_018666.1,527-545).
ccaatctcgaactgacaaa

SEQ ID NO: 372404 - DNA, 19 bp, Homo sapiens
  siRNA target sequence for SAGE (NM_018666.1,699-717).
ggtcccacagggcttatta

SEQ ID NO: 372405 - DNA, 19 bp, Homo sapiens
  siRNA target sequence for SAGE (NM_018666.1,700-718).
gtcccacagggcttattaa

SEQ ID NO: 372406 - DNA, 19 bp, Homo sapiens
  siRNA target sequence for SAGE (NM_018666.1,746-764).
gagtgccagagatctctat

SEQ ID NO: 372407 - DNA, 19 bp, Homo sapiens
  siRNA target sequence for SAGE (NM_018666.1,817-835).
cacctgataacgtgttgtt

SEQ ID NO: 372408 - DNA, 19 bp, Homo sapiens
  siRNA target sequence for SAGE (NM_018666.1,819-837).
cctgataacgtgttgttga

SEQ ID NO: 372409 - DNA, 19 bp, Homo sapiens
  siRNA target sequence for SAGE (NM_018666.1,840-858).
cttcgaccacggcgtatta

SEQ ID NO: 372410 - DNA, 19 bp, Homo sapiens
  siRNA target sequence for SAGE (NM_018666.1,843-861).
cgaccacggcgtattaata

SEQ ID NO: 372411 - DNA, 19 bp, Homo sapiens
  siRNA target sequence for SAGE (NM_018666.1,846-864).
ccacggcgtattaatatga

SEQ ID NO: 372412 - DNA, 19 bp, Homo sapiens
  siRNA target sequence for SAGE (NM_018666.1,1089-1107).
gaccaaccgcaacctaata

SEQ ID NO: 372413 - DNA, 19 bp, Homo sapiens
  siRNA target sequence for SAGE (NM_018666.1,1095-1113).
ccgcaacctaataacgtat

SEQ ID NO: 372414 - DNA, 19 bp, Homo sapiens
  siRNA target sequence for SAGE (NM_018666.1,1096-1114).
cgcaacctaataacgtatt

SEQ ID NO: 372415 - DNA, 19 bp, Homo sapiens
  siRNA target sequence for SAGE (NM_018666.1,1109-1127).
cgtattgtcaactgttcaa

SEQ ID NO: 372416 - DNA, 19 bp, Homo sapiens
  siRNA target sequence for SAGE (NM_018666.1,1128-1146).
ccagtgattatttatttga

SEQ ID NO: 372417 - DNA, 19 bp, Homo sapiens
  siRNA target sequence for SAGE (NM_018666.1,1242-1260).
cctagtaacgccttgtcaa

SEQ ID NO: 372418 - DNA, 19 bp, Homo sapiens
  siRNA target sequence for SAGE (NM_018666.1,1372-1390).
gccaaccaacccctgataa

SEQ ID NO: 372419 - DNA, 19 bp, Homo sapiens
  siRNA target sequence for SAGE (NM_018666.1,1391-1409).
cgtcttgtcagctgttaca

SEQ ID NO: 372420 - DNA, 19 bp, Homo sapiens
  siRNA target sequence for SAGE (NM_018666.1,1408-1426).
caccagagcttattaactt

SEQ ID NO: 372421 - DNA, 19 bp, Homo sapiens
  siRNA target sequence for SAGE (NM_018666.1,1545-1563).
gttctatccgggcttatta

SEQ ID NO: 372422 - DNA, 19 bp, Homo sapiens
  siRNA target sequence for SAGE (NM_018666.1,1548-1566).
ctatccgggcttattaata

SEQ ID NO: 372423 - DNA, 19 bp, Homo sapiens
  siRNA target sequence for SAGE (NM_018666.1,1627-1645).
gtgttcgtgaagagaagat

SEQ ID NO: 372424 - DNA, 19 bp, Homo sapiens
  siRNA target sequence for SAGE (NM_018666.1,1796-1814).
ccaaccacaacctagttat

SEQ ID NO: 372425 - DNA, 19 bp, Homo sapiens
  siRNA target sequence for SAGE (NM_018666.1,1800-1818).
ccacaacctagttatgact

SEQ ID NO: 372426 - DNA, 19 bp, Homo sapiens
  siRNA target sequence for SAGE (NM_018666.1,1801-1819).
cacaacctagttatgactt

SEQ ID NO: 372427 - DNA, 19 bp, Homo sapiens
  siRNA target sequence for SAGE (NM_018666.1,1806-1824).
cctagttatgacttgtcaa

SEQ ID NO: 372428 - DNA, 19 bp, Homo sapiens
  siRNA target sequence for SAGE (NM_018666.1,1941-1959).
gcagcatccgataatgtct

SEQ ID NO: 372429 - DNA, 19 bp, Homo sapiens
  siRNA target sequence for SAGE (NM_018666.1,1942-1960).
cagcatccgataatgtctt

SEQ ID NO: 372430 - DNA, 19 bp, Homo sapiens
  siRNA target sequence for SAGE (NM_018666.1,2051-2069).
catccgtgaagagaagata

SEQ ID NO: 372431 - DNA, 19 bp, Homo sapiens
  siRNA target sequence for SAGE (NM_018666.1,2085-2103).
gcacctggtaacatcttgt

SEQ ID NO: 372432 - DNA, 19 bp, Homo sapiens
  siRNA target sequence for SAGE (NM_018666.1,2113-2131).
ctccatggcttcgtcatat

SEQ ID NO: 372433 - DNA, 19 bp, Homo sapiens
  siRNA target sequence for SAGE (NM_018666.1,2142-2160).
ggaatttcatccacgatta

SEQ ID NO: 372434 - DNA, 19 bp, Homo sapiens
  siRNA target sequence for SAGE (NM_018666.1,2220-2238).
caacaggcacctgataact

SEQ ID NO: 372435 - DNA, 19 bp, Homo sapiens
  siRNA target sequence for SAGE (NM_018666.1,2248-2266).
cggttccacctggttgtat

SEQ ID NO: 372436 - DNA, 19 bp, Homo sapiens
  siRNA target sequence for SAGE (NM_018666.1,2254-2272).
cacctggttgtattaatct

SEQ ID NO: 372437 - DNA, 19 bp, Homo sapiens
  siRNA target sequence for SAGE (NM_018666.1,2296-2314).
gaagtaccagggatctgta

SEQ ID NO: 372438 - DNA, 19 bp, Homo sapiens
  siRNA target sequence for SAGE (NM_018666.1,2317-2335).
ctactgtcattcacgatat

SEQ ID NO: 372439 - DNA, 19 bp, Homo sapiens
  siRNA target sequence for SAGE (NM_018666.1,2320-2338).
ctgtcattcacgatatcca

SEQ ID NO: 372440 - DNA, 19 bp, Homo sapiens
  siRNA target sequence for SAGE (NM_018666.1,2428-2446).
gtatgccacccaatgcatt

SEQ ID NO: 372441 - DNA, 19 bp, Homo sapiens
  siRNA target sequence for SAGE (NM_018666.1,2436-2454).
cccaatgcattggattctt

SEQ ID NO: 372442 - DNA, 19 bp, Homo sapiens
  siRNA target sequence for SAGE (NM_018666.1,2492-2510).
gctttacaaacctgatagt

SEQ ID NO: 372443 - DNA, 19 bp, Homo sapiens
  siRNA target sequence for SAGE (NM_018666.1,2493-2511).
ctttacaaacctgatagta

SEQ ID NO: 372444 - DNA, 19 bp, Homo sapiens
  siRNA target sequence for SAGE (NM_018666.1,2520-2538).
gcggtaggcaccaaaaact

SEQ ID NO: 372445 - DNA, 19 bp, Homo sapiens
  siRNA target sequence for SAGE (NM_018666.1,2521-2539).
cggtaggcaccaaaaacta

SEQ ID NO: 372446 - DNA, 19 bp, Homo sapiens
  siRNA target sequence for SAGE (NM_018666.1,2562-2580).
ccagttacagtaatgtctt

SEQ ID NO: 372447 - DNA, 19 bp, Homo sapiens
  siRNA target sequence for SAGE (NM_018666.1,2583-2601).
gtggaaactgtgccaaata

SEQ ID NO: 372448 - DNA, 19 bp, Homo sapiens
  siRNA target sequence for SAGE (NM_018666.1,2718-2736).
gaggtacaaggatctatga

SEQ ID NO: 372449 - DNA, 19 bp, Homo sapiens
  siRNA target sequence for SAGE (NM_018666.1,2735-2753).
gaaagtcaagagacaattt

SEQ ID NO: 372450 - DNA, 19 bp, Homo sapiens
  siRNA target sequence for SAGE (NM_018666.1,2820-2838).
gcgcttaaagaaatagatt

SEQ ID NO: 372451 - DNA, 19 bp, Homo sapiens
  siRNA target sequence for SAGE (NM_018666.1,2845-2863).
gccatctcagaaaagttaa

SEQ ID NO: 372452 - DNA, 19 bp, Homo sapiens
  siRNA target sequence for SAGE (NM_018666.1,2859-2877).
gttaagcacatgagaaaaa

SEQ ID NO: 372453 - DNA, 19 bp, Homo sapiens
  siRNA target sequence for WDR4 (NM_018669.4,151-169).
catagcaagcagtgatgat

SEQ ID NO: 372454 - DNA, 19 bp, Homo sapiens
  siRNA target sequence for WDR4 (NM_018669.4,286-304).
gtctggcagctattttgct

SEQ ID NO: 372455 - DNA, 19 bp, Homo sapiens
  siRNA target sequence for WDR4 (NM_018669.4,303-321).
ctttaaccgatgacagtaa

SEQ ID NO: 372456 - DNA, 19 bp, Homo sapiens
  siRNA target sequence for WDR4 (NM_018669.4,328-346).
gattcttttccgtacaaaa

SEQ ID NO: 372457 - DNA, 19 bp, Homo sapiens
  siRNA target sequence for WDR4 (NM_018669.4,332-350).
cttttccgtacaaaaccat

SEQ ID NO: 372458 - DNA, 19 bp, Homo sapiens
  siRNA target sequence for WDR4 (NM_018669.4,384-402).
ggtgtacagccctgacttt

SEQ ID NO: 372459 - DNA, 19 bp, Homo sapiens
  siRNA target sequence for WDR4 (NM_018669.4,387-405).
gtacagccctgactttcat

SEQ ID NO: 372460 - DNA, 19 bp, Homo sapiens
  siRNA target sequence for WDR4 (NM_018669.4,443-461).
ggagacgtctactcctttt

SEQ ID NO: 372461 - DNA, 19 bp, Homo sapiens
  siRNA target sequence for WDR4 (NM_018669.4,505-523).
cctgtctatgctgttagat

SEQ ID NO: 372462 - DNA, 19 bp, Homo sapiens
  siRNA target sequence for WDR4 (NM_018669.4,561-579).
ccgaccgggacgagaagat

SEQ ID NO: 372463 - DNA, 19 bp, Homo sapiens
  siRNA target sequence for WDR4 (NM_018669.4,625-643).
cttggggcacacagagttt

SEQ ID NO: 372464 - DNA, 19 bp, Homo sapiens
  siRNA target sequence for WDR4 (NM_018669.4,629-647).
gggcacacagagtttgtga

SEQ ID NO: 372465 - DNA, 19 bp, Homo sapiens
  siRNA target sequence for WDR4 (NM_018669.4,806-824).
gccgcgtccaggattgcat

SEQ ID NO: 372466 - DNA, 19 bp, Homo sapiens
  siRNA target sequence for WDR4 (NM_018669.4,807-825).
ccgcgtccaggattgcatt

SEQ ID NO: 372467 - DNA, 19 bp, Homo sapiens
  siRNA target sequence for WDR4 (NM_018669.4,1055-1073).
cctgagagcaccgtgttaa

SEQ ID NO: 372468 - DNA, 19 bp, Homo sapiens
  siRNA target sequence for WDR4 (NM_018669.4,1056-1074).
ctgagagcaccgtgttaaa

SEQ ID NO: 372469 - DNA, 19 bp, Homo sapiens
  siRNA target sequence for WDR4 (NM_018669.4,1060-1078).
gagcaccgtgttaaagaaa

SEQ ID NO: 372470 - DNA, 19 bp, Homo sapiens
  siRNA target sequence for WDR4 (NM_018669.4,1062-1080).
gcaccgtgttaaagaaagt

SEQ ID NO: 372471 - DNA, 19 bp, Homo sapiens
  siRNA target sequence for WDR4 (NM_018669.4,1289-1307).
ggggaggcgacgctaagtt

SEQ ID NO: 372472 - DNA, 19 bp, Homo sapiens
  siRNA target sequence for SMAP-1 (NM_018671.2,390-408).
ccaagaacaaagttttcca

SEQ ID NO: 372473 - DNA, 19 bp, Homo sapiens
  siRNA target sequence for SMAP-1 (NM_018671.2,443-461).
gagaaggtgcgatacatgt

SEQ ID NO: 372474 - DNA, 19 bp, Homo sapiens
  siRNA target sequence for SMAP-1 (NM_018671.2,589-607).
gaagatcttccggagtaat

SEQ ID NO: 372475 - DNA, 19 bp, Homo sapiens
  siRNA target sequence for SMAP-1 (NM_018671.2,823-841).
cctcaaggaaggtgtcaaa

SEQ ID NO: 372476 - DNA, 19 bp, Homo sapiens
  siRNA target sequence for SMAP-1 (NM_018671.2,1039-1057).
catcgaccaaggtctgaaa

SEQ ID NO: 372477 - DNA, 19 bp, Homo sapiens
  siRNA target sequence for SMAP-1 (NM_018671.2,1043-1061).
gaccaaggtctgaaaaaga

SEQ ID NO: 372478 - DNA, 19 bp, Homo sapiens
  siRNA target sequence for SMAP-1 (NM_018671.2,1123-1141).
ccgcatgagcgcctctatt

SEQ ID NO: 372479 - DNA, 19 bp, Homo sapiens
  siRNA target sequence for SMAP-1 (NM_018671.2,1125-1143).
gcatgagcgcctctattct

SEQ ID NO: 372480 - DNA, 19 bp, Homo sapiens
  siRNA target sequence for SMAP-1 (NM_018671.2,1189-1207).
gaatttccacagactttgt

SEQ ID NO: 372481 - DNA, 19 bp, Homo sapiens
  siRNA target sequence for SMAP-1 (NM_018671.2,1462-1480).
gctgctgaaggacctatat

SEQ ID NO: 372482 - DNA, 19 bp, Homo sapiens
  siRNA target sequence for SMAP-1 (NM_018671.2,1463-1481).
ctgctgaaggacctatata

SEQ ID NO: 372483 - DNA, 19 bp, Homo sapiens
  siRNA target sequence for SMAP-1 (NM_018671.2,1675-1693).
ggcttacctgacctttgat

SEQ ID NO: 372484 - DNA, 19 bp, Homo sapiens
  siRNA target sequence for SMAP-1 (NM_018671.2,1695-1713).
ccgacgtgaaggaagagtt

SEQ ID NO: 372485 - DNA, 19 bp, Homo sapiens
  siRNA target sequence for SMAP-1 (NM_018671.2,2197-2215).
ccctggcgagcggatctat

SEQ ID NO: 372486 - DNA, 19 bp, Homo sapiens
  siRNA target sequence for SMAP-1 (NM_018671.2,2199-2217).
ctggcgagcggatctatga

SEQ ID NO: 372487 - DNA, 19 bp, Homo sapiens
  siRNA target sequence for SMAP-1 (NM_018671.2,2256-2274).
gctcaggcctgcagaactt

SEQ ID NO: 372488 - DNA, 19 bp, Homo sapiens
  siRNA target sequence for SMAP-1 (NM_018671.2,2279-2297).
gcgctcatggccctaacaa

SEQ ID NO: 372489 - DNA, 19 bp, Homo sapiens
  siRNA target sequence for SMAP-1 (NM_018671.2,2280-2298).
cgctcatggccctaacaaa

SEQ ID NO: 372490 - DNA, 19 bp, Homo sapiens
  siRNA target sequence for SMAP-1 (NM_018671.2,2409-2427).
cggagtgcatgtgtaactt

SEQ ID NO: 372491 - DNA, 19 bp, Homo sapiens
  siRNA target sequence for THSD1 (NM_018676.2,275-293).
ggtggtactctgtgactat

SEQ ID NO: 372492 - DNA, 19 bp, Homo sapiens
  siRNA target sequence for THSD1 (NM_018676.2,278-296).
ggtactctgtgactatgtt

SEQ ID NO: 372493 - DNA, 19 bp, Homo sapiens
  siRNA target sequence for THSD1 (NM_018676.2,349-367).
gcaacgacacagtgtatgt

SEQ ID NO: 372494 - DNA, 19 bp, Homo sapiens
  siRNA target sequence for THSD1 (NM_018676.2,396-414).
gggacactgaggaatgtat

SEQ ID NO: 372495 - DNA, 19 bp, Homo sapiens
  siRNA target sequence for THSD1 (NM_018676.2,486-504).
ggaacactaaagtttgagt

SEQ ID NO: 372496 - DNA, 19 bp, Homo sapiens
  siRNA target sequence for THSD1 (NM_018676.2,525-543).
ggtgactactggttcacaa

SEQ ID NO: 372497 - DNA, 19 bp, Homo sapiens
  siRNA target sequence for THSD1 (NM_018676.2,526-544).
gtgactactggttcacaat

SEQ ID NO: 372498 - DNA, 19 bp, Homo sapiens
  siRNA target sequence for THSD1 (NM_018676.2,528-546).
gactactggttcacaatga

SEQ ID NO: 372499 - DNA, 19 bp, Homo sapiens
  siRNA target sequence for THSD1 (NM_018676.2,530-548).
ctactggttcacaatgact

SEQ ID NO: 372500 - DNA, 19 bp, Homo sapiens
  siRNA target sequence for THSD1 (NM_018676.2,578-596).
cccctggtgggagaaaagt

SEQ ID NO: 372501 - DNA, 19 bp, Homo sapiens
  siRNA target sequence for THSD1 (NM_018676.2,619-637).
ctgtctttcacgttgactt

SEQ ID NO: 372502 - DNA, 19 bp, Homo sapiens
  siRNA target sequence for THSD1 (NM_018676.2,672-690).
caagtgggcctatttacca

SEQ ID NO: 372503 - DNA, 19 bp, Homo sapiens
  siRNA target sequence for THSD1 (NM_018676.2,781-799).
caagacagccgctggaaat

SEQ ID NO: 372504 - DNA, 19 bp, Homo sapiens
  siRNA target sequence for THSD1 (NM_018676.2,786-804).
cagccgctggaaataagaa

SEQ ID NO: 372505 - DNA, 19 bp, Homo sapiens
  siRNA target sequence for THSD1 (NM_018676.2,903-921).
gggcgagactcagtcatta

SEQ ID NO: 372506 - DNA, 19 bp, Homo sapiens
  siRNA target sequence for THSD1 (NM_018676.2,906-924).
cgagactcagtcattacct

SEQ ID NO: 372507 - DNA, 19 bp, Homo sapiens
  siRNA target sequence for THSD1 (NM_018676.2,1084-1102).
ggaagaggaccattcactt

SEQ ID NO: 372508 - DNA, 19 bp, Homo sapiens
  siRNA target sequence for THSD1 (NM_018676.2,1093-1111).
ccattcacttggctgaaaa

SEQ ID NO: 372509 - DNA, 19 bp, Homo sapiens
  siRNA target sequence for THSD1 (NM_018676.2,1226-1244).
ggaggagtgcatgctaatt

SEQ ID NO: 372510 - DNA, 19 bp, Homo sapiens
  siRNA target sequence for THSD1 (NM_018676.2,1230-1248).
gagtgcatgctaattcaga

SEQ ID NO: 372511 - DNA, 19 bp, Homo sapiens
  siRNA target sequence for THSD1 (NM_018676.2,1234-1252).
gcatgctaattcagagaaa

SEQ ID NO: 372512 - DNA, 19 bp, Homo sapiens
  siRNA target sequence for THSD1 (NM_018676.2,1478-1496).
cgtgactgtcactggtata

SEQ ID NO: 372513 - DNA, 19 bp, Homo sapiens
  siRNA target sequence for THSD1 (NM_018676.2,1483-1501).
ctgtcactggtatatcctt

SEQ ID NO: 372514 - DNA, 19 bp, Homo sapiens
  siRNA target sequence for THSD1 (NM_018676.2,1498-1516).
ccttgtgcttgttcatcat

SEQ ID NO: 372515 - DNA, 19 bp, Homo sapiens
  siRNA target sequence for THSD1 (NM_018676.2,1502-1520).
gtgcttgttcatcatcatt

SEQ ID NO: 372516 - DNA, 19 bp, Homo sapiens
  siRNA target sequence for THSD1 (NM_018676.2,1787-1805).
gtccaacgcccagaagata

SEQ ID NO: 372517 - DNA, 19 bp, Homo sapiens
  siRNA target sequence for THSD1 (NM_018676.2,1873-1891).
cggaaactaccaaagtgta

SEQ ID NO: 372518 - DNA, 19 bp, Homo sapiens
  siRNA target sequence for THSD1 (NM_018676.2,1937-1955).
ccccagcgctcccttagat

SEQ ID NO: 372519 - DNA, 19 bp, Homo sapiens
  siRNA target sequence for THSD1 (NM_018676.2,1938-1956).
cccagcgctcccttagatt

SEQ ID NO: 372520 - DNA, 19 bp, Homo sapiens
  siRNA target sequence for THSD1 (NM_018676.2,1942-1960).
gcgctcccttagatttgga

SEQ ID NO: 372521 - DNA, 19 bp, Homo sapiens
  siRNA target sequence for THSD1 (NM_018676.2,1943-1961).
cgctcccttagatttggaa

SEQ ID NO: 372522 - DNA, 19 bp, Homo sapiens
  siRNA target sequence for THSD1 (NM_018676.2,2047-2065).
cctccaggctggatctaaa

SEQ ID NO: 372523 - DNA, 19 bp, Homo sapiens
  siRNA target sequence for THSD1 (NM_018676.2,2048-2066).
ctccaggctggatctaaat

SEQ ID NO: 372524 - DNA, 19 bp, Homo sapiens
  siRNA target sequence for THSD1 (NM_018676.2,2385-2403).
ggaacccgtggtccattaa

SEQ ID NO: 372525 - DNA, 19 bp, Homo sapiens
  siRNA target sequence for THSD1 (NM_018676.2,2386-2404).
gaacccgtggtccattaaa

SEQ ID NO: 372526 - DNA, 19 bp, Homo sapiens
  siRNA target sequence for THSD1 (NM_018676.2,2473-2491).
gattagtggccggaattga

SEQ ID NO: 372527 - DNA, 19 bp, Homo sapiens
  siRNA target sequence for THSD1 (NM_018676.2,2660-2678).
gtttgccttctatgacaat

SEQ ID NO: 372528 - DNA, 19 bp, Homo sapiens
  siRNA target sequence for THSD1 (NM_018676.2,2664-2682).
gccttctatgacaatacgt

SEQ ID NO: 372529 - DNA, 19 bp, Homo sapiens
  siRNA target sequence for THSD1 (NM_018676.2,2717-2735).
ggacctcccaggatatttt

SEQ ID NO: 372530 - DNA, 19 bp, Homo sapiens
  siRNA target sequence for THSD1 (NM_018676.2,2750-2768).
ggatgaaaccacaagtaca

SEQ ID NO: 372531 - DNA, 19 bp, Homo sapiens
  siRNA target sequence for THSD1 (NM_018676.2,2754-2772).
gaaaccacaagtacactta

SEQ ID NO: 372532 - DNA, 19 bp, Homo sapiens
  siRNA target sequence for ZNF313 (NM_018683.3,163-181).
ccctgcggacacgtctttt

SEQ ID NO: 372533 - DNA, 19 bp, Homo sapiens
  siRNA target sequence for ZNF313 (NM_018683.3,309-327).
ccatggctgccgtaagaat

SEQ ID NO: 372534 - DNA, 19 bp, Homo sapiens
  siRNA target sequence for ZNF313 (NM_018683.3,310-328).
catggctgccgtaagaatt

SEQ ID NO: 372535 - DNA, 19 bp, Homo sapiens
  siRNA target sequence for ZNF313 (NM_018683.3,395-413).
gtgtgaaggccaccattaa

SEQ ID NO: 372536 - DNA, 19 bp, Homo sapiens
  siRNA target sequence for ZNF313 (NM_018683.3,505-523).
gtggaacactgcaaattat

SEQ ID NO: 372537 - DNA, 19 bp, Homo sapiens
  siRNA target sequence for ZNF313 (NM_018683.3,525-543).
ccatagcacggataccaaa

SEQ ID NO: 372538 - DNA, 19 bp, Homo sapiens
  siRNA target sequence for ZNF313 (NM_018683.3,526-544).
catagcacggataccaaat

SEQ ID NO: 372539 - DNA, 19 bp, Homo sapiens
  siRNA target sequence for ZNF313 (NM_018683.3,530-548).
gcacggataccaaatctgt

SEQ ID NO: 372540 - DNA, 19 bp, Homo sapiens
  siRNA target sequence for ZNF313 (NM_018683.3,631-649).
caccggttttcttatgaca

SEQ ID NO: 372541 - DNA, 19 bp, Homo sapiens
  siRNA target sequence for ZNF313 (NM_018683.3,648-666).
cacttttgtggattatgat

SEQ ID NO: 372542 - DNA, 19 bp, Homo sapiens
  siRNA target sequence for LOC55908 (NM_018687.3,273-291).
ggtcctcgcctgtcatgta

SEQ ID NO: 372543 - DNA, 19 bp, Homo sapiens
  siRNA target sequence for LOC55908 (NM_018687.3,324-342).
cctggcggctgctgaagtt

SEQ ID NO: 372544 - DNA, 19 bp, Homo sapiens
  siRNA target sequence for LOC55908 (NM_018687.3,340-358).
gttgaggctgttatacctt

SEQ ID NO: 372545 - DNA, 19 bp, Homo sapiens
  siRNA target sequence for LOC55908 (NM_018687.3,577-595).
ctatggccgcacaatagaa

SEQ ID NO: 372546 - DNA, 19 bp, Homo sapiens
  siRNA target sequence for LOC55908 (NM_018687.3,798-816).
gccctgcctaccgagaatt

SEQ ID NO: 372547 - DNA, 19 bp, Homo sapiens
  siRNA target sequence for LOC55908 (NM_018687.3,809-827).
cgagaatttgaggtcttaa

SEQ ID NO: 372548 - DNA, 19 bp, Homo sapiens
  siRNA target sequence for KIAA1199 (NM_018689.1,499-517).
gaggcaagctggtcattaa

SEQ ID NO: 372549 - DNA, 19 bp, Homo sapiens
  siRNA target sequence for KIAA1199 (NM_018689.1,502-520).
gcaagctggtcattaaaga

SEQ ID NO: 372550 - DNA, 19 bp, Homo sapiens
  siRNA target sequence for KIAA1199 (NM_018689.1,521-539).
ccacgacgagccgattgtt

SEQ ID NO: 372551 - DNA, 19 bp, Homo sapiens
  siRNA target sequence for KIAA1199 (NM_018689.1,522-540).
cacgacgagccgattgttt

SEQ ID NO: 372552 - DNA, 19 bp, Homo sapiens
  siRNA target sequence for KIAA1199 (NM_018689.1,549-567).
cggcacatcctgattgaca

SEQ ID NO: 372553 - DNA, 19 bp, Homo sapiens
  siRNA target sequence for KIAA1199 (NM_018689.1,601-619).
gccctttccagggcaattt

SEQ ID NO: 372554 - DNA, 19 bp, Homo sapiens
  siRNA target sequence for KIAA1199 (NM_018689.1,652-670).
gtattcagccggatcctta

SEQ ID NO: 372555 - DNA, 19 bp, Homo sapiens
  siRNA target sequence for KIAA1199 (NM_018689.1,667-685).
cttactatggtctgaagta

SEQ ID NO: 372556 - DNA, 19 bp, Homo sapiens
  siRNA target sequence for KIAA1199 (NM_018689.1,683-701).
gtacattggggttggtaaa

SEQ ID NO: 372557 - DNA, 19 bp, Homo sapiens
  siRNA target sequence for KIAA1199 (NM_018689.1,686-704).
cattggggttggtaaagga

SEQ ID NO: 372558 - DNA, 19 bp, Homo sapiens
  siRNA target sequence for KIAA1199 (NM_018689.1,779-797).
ggcagaaggaggctatttt

SEQ ID NO: 372559 - DNA, 19 bp, Homo sapiens
  siRNA target sequence for KIAA1199 (NM_018689.1,786-804).
ggaggctatttttttgaaa

SEQ ID NO: 372560 - DNA, 19 bp, Homo sapiens
  siRNA target sequence for KIAA1199 (NM_018689.1,814-832).
gccaccgtggagttattgt

SEQ ID NO: 372561 - DNA, 19 bp, Homo sapiens
  siRNA target sequence for KIAA1199 (NM_018689.1,818-836).
ccgtggagttattgttcat

SEQ ID NO: 372562 - DNA, 19 bp, Homo sapiens
  siRNA target sequence for KIAA1199 (NM_018689.1,820-838).
gtggagttattgttcatgt

SEQ ID NO: 372563 - DNA, 19 bp, Homo sapiens
  siRNA target sequence for KIAA1199 (NM_018689.1,823-841).
gagttattgttcatgtcat

SEQ ID NO: 372564 - DNA, 19 bp, Homo sapiens
  siRNA target sequence for KIAA1199 (NM_018689.1,867-885).
cattctgaccggtttgaca

SEQ ID NO: 372565 - DNA, 19 bp, Homo sapiens
  siRNA target sequence for KIAA1199 (NM_018689.1,873-891).
gaccggtttgacacctata

SEQ ID NO: 372566 - DNA, 19 bp, Homo sapiens
  siRNA target sequence for KIAA1199 (NM_018689.1,875-893).
ccggtttgacacctataga

SEQ ID NO: 372567 - DNA, 19 bp, Homo sapiens
  siRNA target sequence for KIAA1199 (NM_018689.1,876-894).
cggtttgacacctatagat

SEQ ID NO: 372568 - DNA, 19 bp, Homo sapiens
  siRNA target sequence for KIAA1199 (NM_018689.1,886-904).
cctatagatccaagaaaga

SEQ ID NO: 372569 - DNA, 19 bp, Homo sapiens
  siRNA target sequence for KIAA1199 (NM_018689.1,909-927).
gaacgtctggtccagtatt

SEQ ID NO: 372570 - DNA, 19 bp, Homo sapiens
  siRNA target sequence for KIAA1199 (NM_018689.1,912-930).
cgtctggtccagtatttga

SEQ ID NO: 372571 - DNA, 19 bp, Homo sapiens
  siRNA target sequence for KIAA1199 (NM_018689.1,939-957).
cccgatggcaggatccttt

SEQ ID NO: 372572 - DNA, 19 bp, Homo sapiens
  siRNA target sequence for KIAA1199 (NM_018689.1,982-1000).
ctcgaaatctggatgacat

SEQ ID NO: 372573 - DNA, 19 bp, Homo sapiens
  siRNA target sequence for KIAA1199 (NM_018689.1,1016-1034).
gaccaaattgggaagcaaa

SEQ ID NO: 372574 - DNA, 19 bp, Homo sapiens
  siRNA target sequence for KIAA1199 (NM_018689.1,1040-1058).
cctgcaccttggatttaga

SEQ ID NO: 372575 - DNA, 19 bp, Homo sapiens
  siRNA target sequence for KIAA1199 (NM_018689.1,1061-1079).
cccttggagttttctaact

SEQ ID NO: 372576 - DNA, 19 bp, Homo sapiens
  siRNA target sequence for KIAA1199 (NM_018689.1,1063-1081).
cttggagttttctaactgt

SEQ ID NO: 372577 - DNA, 19 bp, Homo sapiens
  siRNA target sequence for KIAA1199 (NM_018689.1,1104-1122).
gtggaagaccatattgaat

SEQ ID NO: 372578 - DNA, 19 bp, Homo sapiens
  siRNA target sequence for KIAA1199 (NM_018689.1,1237-1255).
cggagtggttcgatcatga

SEQ ID NO: 372579 - DNA, 19 bp, Homo sapiens
  siRNA target sequence for KIAA1199 (NM_018689.1,1238-1256).
ggagtggttcgatcatgat

SEQ ID NO: 372580 - DNA, 19 bp, Homo sapiens
  siRNA target sequence for KIAA1199 (NM_018689.1,1239-1257).
gagtggttcgatcatgata

SEQ ID NO: 372581 - DNA, 19 bp, Homo sapiens
  siRNA target sequence for KIAA1199 (NM_018689.1,1241-1259).
gtggttcgatcatgataaa

SEQ ID NO: 372582 - DNA, 19 bp, Homo sapiens
  siRNA target sequence for KIAA1199 (NM_018689.1,1243-1261).
ggttcgatcatgataaagt

SEQ ID NO: 372583 - DNA, 19 bp, Homo sapiens
  siRNA target sequence for KIAA1199 (NM_018689.1,1244-1262).
gttcgatcatgataaagta

SEQ ID NO: 372584 - DNA, 19 bp, Homo sapiens
  siRNA target sequence for KIAA1199 (NM_018689.1,1305-1323).
gctcacccaggaaaaatat

SEQ ID NO: 372585 - DNA, 19 bp, Homo sapiens
  siRNA target sequence for KIAA1199 (NM_018689.1,1310-1328).
cccaggaaaaatatgcaat

SEQ ID NO: 372586 - DNA, 19 bp, Homo sapiens
  siRNA target sequence for KIAA1199 (NM_018689.1,1324-1342).
gcaatcgtcccattgatat

SEQ ID NO: 372587 - DNA, 19 bp, Homo sapiens
  siRNA target sequence for KIAA1199 (NM_018689.1,1325-1343).
caatcgtcccattgatata

SEQ ID NO: 372588 - DNA, 19 bp, Homo sapiens
  siRNA target sequence for KIAA1199 (NM_018689.1,1338-1356).
gatatacaggccactacaa

SEQ ID NO: 372589 - DNA, 19 bp, Homo sapiens
  siRNA target sequence for KIAA1199 (NM_018689.1,1354-1372).
caatggatggagttaacct

SEQ ID NO: 372590 - DNA, 19 bp, Homo sapiens
  siRNA target sequence for KIAA1199 (NM_018689.1,1376-1394).
caccgaggttgtctacaaa

SEQ ID NO: 372591 - DNA, 19 bp, Homo sapiens
  siRNA target sequence for KIAA1199 (NM_018689.1,1378-1396).
ccgaggttgtctacaaaaa

SEQ ID NO: 372592 - DNA, 19 bp, Homo sapiens
  siRNA target sequence for KIAA1199 (NM_018689.1,1379-1397).
cgaggttgtctacaaaaaa

SEQ ID NO: 372593 - DNA, 19 bp, Homo sapiens
  siRNA target sequence for KIAA1199 (NM_018689.1,1491-1509).
ctcacagtcaccattgaca

SEQ ID NO: 372594 - DNA, 19 bp, Homo sapiens
  siRNA target sequence for KIAA1199 (NM_018689.1,1577-1595).
ggtcattgccagtactgat

SEQ ID NO: 372595 - DNA, 19 bp, Homo sapiens
  siRNA target sequence for KIAA1199 (NM_018689.1,1744-1762).
gccggaacatcatagtgat

SEQ ID NO: 372596 - DNA, 19 bp, Homo sapiens
  siRNA target sequence for KIAA1199 (NM_018689.1,1767-1785).
gagatggaggacaaatgct

SEQ ID NO: 372597 - DNA, 19 bp, Homo sapiens
  siRNA target sequence for KIAA1199 (NM_018689.1,1795-1813).
gaaaccacatctgcaattt

SEQ ID NO: 372598 - DNA, 19 bp, Homo sapiens
  siRNA target sequence for KIAA1199 (NM_018689.1,1881-1899).
ggcacggagctgaagcata

SEQ ID NO: 372599 - DNA, 19 bp, Homo sapiens
  siRNA target sequence for KIAA1199 (NM_018689.1,1882-1900).
gcacggagctgaagcatat

SEQ ID NO: 372600 - DNA, 19 bp, Homo sapiens
  siRNA target sequence for KIAA1199 (NM_018689.1,1918-1936).
gtcagtacccgattcactt

SEQ ID NO: 372601 - DNA, 19 bp, Homo sapiens
  siRNA target sequence for KIAA1199 (NM_018689.1,1937-1955).
ccacctggccggtgatgta

SEQ ID NO: 372602 - DNA, 19 bp, Homo sapiens
  siRNA target sequence for KIAA1199 (NM_018689.1,1974-1992).
gacccacccacatacatca

SEQ ID NO: 372603 - DNA, 19 bp, Homo sapiens
  siRNA target sequence for KIAA1199 (NM_018689.1,1997-2015).
cctctccatccatcataca

SEQ ID NO: 372604 - DNA, 19 bp, Homo sapiens
  siRNA target sequence for KIAA1199 (NM_018689.1,2041-2059).
gctccaatggcttgttgat

SEQ ID NO: 372605 - DNA, 19 bp, Homo sapiens
  siRNA target sequence for KIAA1199 (NM_018689.1,2044-2062).
ccaatggcttgttgatcaa

SEQ ID NO: 372606 - DNA, 19 bp, Homo sapiens
  siRNA target sequence for KIAA1199 (NM_018689.1,2066-2084).
cgttgtgggctataactct

SEQ ID NO: 372607 - DNA, 19 bp, Homo sapiens
  siRNA target sequence for KIAA1199 (NM_018689.1,2067-2085).
gttgtgggctataactctt

SEQ ID NO: 372608 - DNA, 19 bp, Homo sapiens
  siRNA target sequence for KIAA1199 (NM_018689.1,2115-2133).
ccggaggaacgcaacactt

SEQ ID NO: 372609 - DNA, 19 bp, Homo sapiens
  siRNA target sequence for KIAA1199 (NM_018689.1,2116-2134).
cggaggaacgcaacacttt

SEQ ID NO: 372610 - DNA, 19 bp, Homo sapiens
  siRNA target sequence for KIAA1199 (NM_018689.1,2390-2408).
gtactccccaggttattca

SEQ ID NO: 372611 - DNA, 19 bp, Homo sapiens
  siRNA target sequence for KIAA1199 (NM_018689.1,2418-2436).
ccactgggaaaattctata

SEQ ID NO: 372612 - DNA, 19 bp, Homo sapiens
  siRNA target sequence for KIAA1199 (NM_018689.1,2459-2477).
ccgggctggcatgatcata

SEQ ID NO: 372613 - DNA, 19 bp, Homo sapiens
  siRNA target sequence for KIAA1199 (NM_018689.1,2463-2481).
gctggcatgatcatagaca

SEQ ID NO: 372614 - DNA, 19 bp, Homo sapiens
  siRNA target sequence for KIAA1199 (NM_018689.1,2474-2492).
catagacaacggagtcaaa

SEQ ID NO: 372615 - DNA, 19 bp, Homo sapiens
  siRNA target sequence for KIAA1199 (NM_018689.1,2523-2541).
ccgttcctctcaatcatct

SEQ ID NO: 372616 - DNA, 19 bp, Homo sapiens
  siRNA target sequence for KIAA1199 (NM_018689.1,2675-2693).
ctgccggtttgctgacaat

SEQ ID NO: 372617 - DNA, 19 bp, Homo sapiens
  siRNA target sequence for KIAA1199 (NM_018689.1,2741-2759).
cggctccaagcaagagata

SEQ ID NO: 372618 - DNA, 19 bp, Homo sapiens
  siRNA target sequence for KIAA1199 (NM_018689.1,2742-2760).
ggctccaagcaagagataa

SEQ ID NO: 372619 - DNA, 19 bp, Homo sapiens
  siRNA target sequence for KIAA1199 (NM_018689.1,2743-2761).
gctccaagcaagagataaa

SEQ ID NO: 372620 - DNA, 19 bp, Homo sapiens
  siRNA target sequence for KIAA1199 (NM_018689.1,2859-2877).
ctccctataggccagaatt

SEQ ID NO: 372621 - DNA, 19 bp, Homo sapiens
  siRNA target sequence for KIAA1199 (NM_018689.1,2880-2898).
ccaattagaggaattcagt

SEQ ID NO: 372622 - DNA, 19 bp, Homo sapiens
  siRNA target sequence for KIAA1199 (NM_018689.1,2927-2945).
ctgcactttccgaaagttt

SEQ ID NO: 372623 - DNA, 19 bp, Homo sapiens
  siRNA target sequence for KIAA1199 (NM_018689.1,3042-3060).
gaggacgttccgattactt

SEQ ID NO: 372624 - DNA, 19 bp, Homo sapiens
  siRNA target sequence for KIAA1199 (NM_018689.1,3170-3188).
ctcctacctcacgaagaat

SEQ ID NO: 372625 - DNA, 19 bp, Homo sapiens
  siRNA target sequence for KIAA1199 (NM_018689.1,3172-3190).
cctacctcacgaagaatga

SEQ ID NO: 372626 - DNA, 19 bp, Homo sapiens
  siRNA target sequence for KIAA1199 (NM_018689.1,3256-3274).
ggtgctatgcacagatgta

SEQ ID NO: 372627 - DNA, 19 bp, Homo sapiens
  siRNA target sequence for KIAA1199 (NM_018689.1,3292-3310).
ccagtaacctgcgaatgaa

SEQ ID NO: 372628 - DNA, 19 bp, Homo sapiens
  siRNA target sequence for KIAA1199 (NM_018689.1,3295-3313).
gtaacctgcgaatgaagat

SEQ ID NO: 372629 - DNA, 19 bp, Homo sapiens
  siRNA target sequence for KIAA1199 (NM_018689.1,3303-3321).
cgaatgaagatcatcaaga

SEQ ID NO: 372630 - DNA, 19 bp, Homo sapiens
  siRNA target sequence for KIAA1199 (NM_018689.1,3370-3388).
gcacccattaccagcaata

SEQ ID NO: 372631 - DNA, 19 bp, Homo sapiens
  siRNA target sequence for KIAA1199 (NM_018689.1,3513-3531).
ccgcgaggcaccacattct

SEQ ID NO: 372632 - DNA, 19 bp, Homo sapiens
  siRNA target sequence for KIAA1199 (NM_018689.1,3536-3554).
cctctcggatgttcacaat

SEQ ID NO: 372633 - DNA, 19 bp, Homo sapiens
  siRNA target sequence for KIAA1199 (NM_018689.1,3732-3750).
ggctgtgagaggataaaga

SEQ ID NO: 372634 - DNA, 19 bp, Homo sapiens
  siRNA target sequence for KIAA1199 (NM_018689.1,3937-3955).
ggaacgacttcgcttacat

SEQ ID NO: 372635 - DNA, 19 bp, Homo sapiens
  siRNA target sequence for KIAA1199 (NM_018689.1,3938-3956).
gaacgacttcgcttacatt

SEQ ID NO: 372636 - DNA, 19 bp, Homo sapiens
  siRNA target sequence for KIAA1199 (NM_018689.1,3941-3959).
cgacttcgcttacattgaa

SEQ ID NO: 372637 - DNA, 19 bp, Homo sapiens
  siRNA target sequence for KIAA1199 (NM_018689.1,4100-4118).
ggcgaccatccctgacaat

SEQ ID NO: 372638 - DNA, 19 bp, Homo sapiens
  siRNA target sequence for KIAA1199 (NM_018689.1,4101-4119).
gcgaccatccctgacaatt

SEQ ID NO: 372639 - DNA, 19 bp, Homo sapiens
  siRNA target sequence for KIAA1199 (NM_018689.1,4105-4123).
ccatccctgacaattccat

SEQ ID NO: 372640 - DNA, 19 bp, Homo sapiens
  siRNA target sequence for KIAA1199 (NM_018689.1,4168-4186).
ggaccagagtgctggaaaa

SEQ ID NO: 372641 - DNA, 19 bp, Homo sapiens
  siRNA target sequence for KIAA1199 (NM_018689.1,4284-4302).
gatcacaaagccaaaatct

SEQ ID NO: 372642 - DNA, 19 bp, Homo sapiens
  siRNA target sequence for ELAC1 (NM_018696.1,135-153).
gcgagtgctggctctttga

SEQ ID NO: 372643 - DNA, 19 bp, Homo sapiens
  siRNA target sequence for ELAC1 (NM_018696.1,137-155).
gagtgctggctctttgact

SEQ ID NO: 372644 - DNA, 19 bp, Homo sapiens
  siRNA target sequence for ELAC1 (NM_018696.1,165-183).
gaacacagacacagcttat

SEQ ID NO: 372645 - DNA, 19 bp, Homo sapiens
  siRNA target sequence for ELAC1 (NM_018696.1,170-188).
cagacacagcttatgaaaa

SEQ ID NO: 372646 - DNA, 19 bp, Homo sapiens
  siRNA target sequence for ELAC1 (NM_018696.1,304-322).
gtccaaacagcctattgaa

SEQ ID NO: 372647 - DNA, 19 bp, Homo sapiens
  siRNA target sequence for ELAC1 (NM_018696.1,306-324).
ccaaacagcctattgaaat

SEQ ID NO: 372648 - DNA, 19 bp, Homo sapiens
  siRNA target sequence for ELAC1 (NM_018696.1,335-353).
gtagggcttcgggacttta

SEQ ID NO: 372649 - DNA, 19 bp, Homo sapiens
  siRNA target sequence for ELAC1 (NM_018696.1,338-356).
gggcttcgggactttatct

SEQ ID NO: 372650 - DNA, 19 bp, Homo sapiens
  siRNA target sequence for ELAC1 (NM_018696.1,381-399).
cggagctggtcttccatta

SEQ ID NO: 372651 - DNA, 19 bp, Homo sapiens
  siRNA target sequence for ELAC1 (NM_018696.1,382-400).
ggagctggtcttccattat

SEQ ID NO: 372652 - DNA, 19 bp, Homo sapiens
  siRNA target sequence for ELAC1 (NM_018696.1,394-412).
ccattatgtggttcatgaa

SEQ ID NO: 372653 - DNA, 19 bp, Homo sapiens
  siRNA target sequence for ELAC1 (NM_018696.1,545-563).
ctgtttgatgatgaacaat

SEQ ID NO: 372654 - DNA, 19 bp, Homo sapiens
  siRNA target sequence for ELAC1 (NM_018696.1,575-593).
gcatttcgcctctttcaca

SEQ ID NO: 372655 - DNA, 19 bp, Homo sapiens
  siRNA target sequence for ELAC1 (NM_018696.1,747-765).
ctccccaagatgtcttaaa

SEQ ID NO: 372656 - DNA, 19 bp, Homo sapiens
  siRNA target sequence for ELAC1 (NM_018696.1,1090-1108).
gactctagcagaagatttt

SEQ ID NO: 372657 - DNA, 19 bp, Homo sapiens
  siRNA target sequence for ELAC1 (NM_018696.1,1103-1121).
gattttatggtgataagca

SEQ ID NO: 372658 - DNA, 19 bp, Homo sapiens
  siRNA target sequence for LANCL2 (NM_018697.2,190-208).
ggcgagaccatgtcaaaga

SEQ ID NO: 372659 - DNA, 19 bp, Homo sapiens
  siRNA target sequence for LANCL2 (NM_018697.2,381-399).
ggacgggaagatcattcat

SEQ ID NO: 372660 - DNA, 19 bp, Homo sapiens
  siRNA target sequence for LANCL2 (NM_018697.2,382-400).
gacgggaagatcattcata

SEQ ID NO: 372661 - DNA, 19 bp, Homo sapiens
  siRNA target sequence for LANCL2 (NM_018697.2,384-402).
cgggaagatcattcataat

SEQ ID NO: 372662 - DNA, 19 bp, Homo sapiens
  siRNA target sequence for LANCL2 (NM_018697.2,385-403).
gggaagatcattcataatt

SEQ ID NO: 372663 - DNA, 19 bp, Homo sapiens
  siRNA target sequence for LANCL2 (NM_018697.2,393-411).
cattcataatttcataaga

SEQ ID NO: 372664 - DNA, 19 bp, Homo sapiens
  siRNA target sequence for LANCL2 (NM_018697.2,412-430).
cggatccagaccaaaatta

SEQ ID NO: 372665 - DNA, 19 bp, Homo sapiens
  siRNA target sequence for LANCL2 (NM_018697.2,413-431).
ggatccagaccaaaattaa

SEQ ID NO: 372666 - DNA, 19 bp, Homo sapiens
  siRNA target sequence for LANCL2 (NM_018697.2,414-432).
gatccagaccaaaattaaa

SEQ ID NO: 372667 - DNA, 19 bp, Homo sapiens
  siRNA target sequence for LANCL2 (NM_018697.2,477-495).
ccatgactgctctgcttat

SEQ ID NO: 372668 - DNA, 19 bp, Homo sapiens
  siRNA target sequence for LANCL2 (NM_018697.2,567-585).
ccgatccctggattacgta

SEQ ID NO: 372669 - DNA, 19 bp, Homo sapiens
  siRNA target sequence for LANCL2 (NM_018697.2,568-586).
cgatccctggattacgtaa

SEQ ID NO: 372670 - DNA, 19 bp, Homo sapiens
  siRNA target sequence for LANCL2 (NM_018697.2,573-591).
cctggattacgtaaaaaga

SEQ ID NO: 372671 - DNA, 19 bp, Homo sapiens
  siRNA target sequence for LANCL2 (NM_018697.2,574-592).
ctggattacgtaaaaagaa

SEQ ID NO: 372672 - DNA, 19 bp, Homo sapiens
  siRNA target sequence for LANCL2 (NM_018697.2,576-594).
ggattacgtaaaaagaaca

SEQ ID NO: 372673 - DNA, 19 bp, Homo sapiens
  siRNA target sequence for LANCL2 (NM_018697.2,590-608).
gaacacttcggaatctgaa

SEQ ID NO: 372674 - DNA, 19 bp, Homo sapiens
  siRNA target sequence for LANCL2 (NM_018697.2,658-676).
ggagctgtgatttatcaca

SEQ ID NO: 372675 - DNA, 19 bp, Homo sapiens
  siRNA target sequence for LANCL2 (NM_018697.2,659-677).
gagctgtgatttatcacaa

SEQ ID NO: 372676 - DNA, 19 bp, Homo sapiens
  siRNA target sequence for LANCL2 (NM_018697.2,738-756).
ggttgtctgccaagaatca

SEQ ID NO: 372677 - DNA, 19 bp, Homo sapiens
  siRNA target sequence for LANCL2 (NM_018697.2,782-800).
gacgggcaggttatctgta

SEQ ID NO: 372678 - DNA, 19 bp, Homo sapiens
  siRNA target sequence for LANCL2 (NM_018697.2,840-858).
cgtgtgtgagtcagctatt

SEQ ID NO: 372679 - DNA, 19 bp, Homo sapiens
  siRNA target sequence for LANCL2 (NM_018697.2,841-859).
gtgtgtgagtcagctatta

SEQ ID NO: 372680 - DNA, 19 bp, Homo sapiens
  siRNA target sequence for LANCL2 (NM_018697.2,845-863).
gtgagtcagctattaaaga

SEQ ID NO: 372681 - DNA, 19 bp, Homo sapiens
  siRNA target sequence for LANCL2 (NM_018697.2,862-880).
gaggtagtcaatgctatta

SEQ ID NO: 372682 - DNA, 19 bp, Homo sapiens
  siRNA target sequence for LANCL2 (NM_018697.2,883-901).
gaatcgggtaagactttgt

SEQ ID NO: 372683 - DNA, 19 bp, Homo sapiens
  siRNA target sequence for LANCL2 (NM_018697.2,985-1003).
gctggaatttactatatgt

SEQ ID NO: 372684 - DNA, 19 bp, Homo sapiens
  siRNA target sequence for LANCL2 (NM_018697.2,1050-1068).
ggtgaaacccagtattgat

SEQ ID NO: 372685 - DNA, 19 bp, Homo sapiens
  siRNA target sequence for LANCL2 (NM_018697.2,1053-1071).
gaaacccagtattgattat

SEQ ID NO: 372686 - DNA, 19 bp, Homo sapiens
  siRNA target sequence for LANCL2 (NM_018697.2,1066-1084).
gattatgtgcgccacaaaa

SEQ ID NO: 372687 - DNA, 19 bp, Homo sapiens
  siRNA target sequence for LANCL2 (NM_018697.2,1096-1114).
gggaattacccatcatcat

SEQ ID NO: 372688 - DNA, 19 bp, Homo sapiens
  siRNA target sequence for LANCL2 (NM_018697.2,1097-1115).
ggaattacccatcatcatt

SEQ ID NO: 372689 - DNA, 19 bp, Homo sapiens
  siRNA target sequence for LANCL2 (NM_018697.2,1183-1201).
caggcgtacaaggtcttta

SEQ ID NO: 372690 - DNA, 19 bp, Homo sapiens
  siRNA target sequence for LANCL2 (NM_018697.2,1187-1205).
cgtacaaggtctttaagga

SEQ ID NO: 372691 - DNA, 19 bp, Homo sapiens
  siRNA target sequence for LANCL2 (NM_018697.2,1231-1249).
gagtgtagcgatgtgattt

SEQ ID NO: 372692 - DNA, 19 bp, Homo sapiens
  siRNA target sequence for LANCL2 (NM_018697.2,1297-1315).
gctggcaacggctattcct

SEQ ID NO: 372693 - DNA, 19 bp, Homo sapiens
  siRNA target sequence for LANCL2 (NM_018697.2,1298-1316).
ctggcaacggctattcctt

SEQ ID NO: 372694 - DNA, 19 bp, Homo sapiens
  siRNA target sequence for LANCL2 (NM_018697.2,1330-1348).
cgtctcacgcaggataaga

SEQ ID NO: 372695 - DNA, 19 bp, Homo sapiens
  siRNA target sequence for LANCL2 (NM_018697.2,1356-1374).
ctaccgagcttgcaagttt

SEQ ID NO: 372696 - DNA, 19 bp, Homo sapiens
  siRNA target sequence for LANCL2 (NM_018697.2,1424-1442).
gaccctattcgctctttga

SEQ ID NO: 372697 - DNA, 19 bp, Homo sapiens
  siRNA target sequence for LANCL2 (NM_018697.2,1445-1463).
gcatggctggcgctattca

SEQ ID NO: 372698 - DNA, 19 bp, Homo sapiens
  siRNA target sequence for DKFZp547A023 (NM_018704.1,193-211).
cctgaactcctgacactat

SEQ ID NO: 372699 - DNA, 19 bp, Homo sapiens
  siRNA target sequence for DKFZp547A023 (NM_018704.1,276-294).
cagagatactttcattgaa

SEQ ID NO: 372700 - DNA, 19 bp, Homo sapiens
  siRNA target sequence for DKFZp547A023 (NM_018704.1,295-313).
gaacgctatggaaaatata

SEQ ID NO: 372701 - DNA, 19 bp, Homo sapiens
  siRNA target sequence for DKFZp547A023 (NM_018704.1,404-422).
cactctctattcttaaggt

SEQ ID NO: 372702 - DNA, 19 bp, Homo sapiens
  siRNA target sequence for DKFZp547A023 (NM_018704.1,410-428).
ctattcttaaggttgtgat

SEQ ID NO: 372703 - DNA, 19 bp, Homo sapiens
  siRNA target sequence for DKFZp547A023 (NM_018704.1,595-613).
ctgactcaacagttggaat

SEQ ID NO: 372704 - DNA, 19 bp, Homo sapiens
  siRNA target sequence for DKFZp547A023 (NM_018704.1,798-816).
gaagagccgggtgagtaaa

SEQ ID NO: 372705 - DNA, 19 bp, Homo sapiens
  siRNA target sequence for DKFZp547A023 (NM_018704.1,944-962).
ggaccaaaaccctgaaaga

SEQ ID NO: 372706 - DNA, 19 bp, Homo sapiens
  siRNA target sequence for DKFZp547A023 (NM_018704.1,1022-1040).
gccctaatgagcaattgaa

SEQ ID NO: 372707 - DNA, 19 bp, Homo sapiens
  siRNA target sequence for DKFZp547A023 (NM_018704.1,1073-1091).
ctgagcctctcatgctaat

SEQ ID NO: 372708 - DNA, 19 bp, Homo sapiens
  siRNA target sequence for DKFZp547A023 (NM_018704.1,1077-1095).
gcctctcatgctaatgtct

SEQ ID NO: 372709 - DNA, 19 bp, Homo sapiens
  siRNA target sequence for DKFZp547A023 (NM_018704.1,1183-1201).
gccactcctgcttactcat

SEQ ID NO: 372710 - DNA, 19 bp, Homo sapiens
  siRNA target sequence for DKFZp547A023 (NM_018704.1,1184-1202).
ccactcctgcttactcata

SEQ ID NO: 372711 - DNA, 19 bp, Homo sapiens
  siRNA target sequence for DKFZp547A023 (NM_018704.1,1189-1207).
cctgcttactcatatgcaa

SEQ ID NO: 372712 - DNA, 19 bp, Homo sapiens
  siRNA target sequence for DKFZp547A023 (NM_018704.1,1218-1236).
ccattgtgacccagagata

SEQ ID NO: 372713 - DNA, 19 bp, Homo sapiens
  siRNA target sequence for DKFZp547A023 (NM_018704.1,1254-1272).
gactgcaggcaacaatgta

SEQ ID NO: 372714 - DNA, 19 bp, Homo sapiens
  siRNA target sequence for DKFZp547A023 (NM_018704.1,1282-1300).
gtgcctccacgggaaaaat

SEQ ID NO: 372715 - DNA, 19 bp, Homo sapiens
  siRNA target sequence for DKFZp547A023 (NM_018704.1,1305-1323).
ggcattggcccaagagaaa

SEQ ID NO: 372716 - DNA, 19 bp, Homo sapiens
  siRNA target sequence for DKFZp547A023 (NM_018704.1,1454-1472).
cttcgccggtactcactaa

SEQ ID NO: 372717 - DNA, 19 bp, Homo sapiens
  siRNA target sequence for DKFZp547A023 (NM_018704.1,1462-1480).
gtactcactaagcgtttat

SEQ ID NO: 372718 - DNA, 19 bp, Homo sapiens
  siRNA target sequence for DKFZp547A023 (NM_018704.1,1546-1564).
catgcagctcgccacaaat

SEQ ID NO: 372719 - DNA, 19 bp, Homo sapiens
  siRNA target sequence for DKFZp547A023 (NM_018704.1,1550-1568).
cagctcgccacaaatttca

SEQ ID NO: 372720 - DNA, 19 bp, Homo sapiens
  siRNA target sequence for DKFZp547A023 (NM_018704.1,1757-1775).
gcacagactatcgaaatct

SEQ ID NO: 372721 - DNA, 19 bp, Homo sapiens
  siRNA target sequence for DKFZp547A023 (NM_018704.1,1758-1776).
cacagactatcgaaatcta

SEQ ID NO: 372722 - DNA, 19 bp, Homo sapiens
  siRNA target sequence for DKFZp547A023 (NM_018704.1,1777-1795).
gccaacactgccaatccaa

SEQ ID NO: 372723 - DNA, 19 bp, Homo sapiens
  siRNA target sequence for DKFZp547A023 (NM_018704.1,1816-1834).
cctactccagggaaagtgt

SEQ ID NO: 372724 - DNA, 19 bp, Homo sapiens
  siRNA target sequence for DKFZp547A023 (NM_018704.1,1956-1974).
cactccattgaccaaaact

SEQ ID NO: 372725 - DNA, 19 bp, Homo sapiens
  siRNA target sequence for DKFZp547A023 (NM_018704.1,2021-2039).
gctgctcttccaatactgt

SEQ ID NO: 372726 - DNA, 19 bp, Homo sapiens
  siRNA target sequence for DKFZp547A023 (NM_018704.1,2025-2043).
ctcttccaatactgttgta

SEQ ID NO: 372727 - DNA, 19 bp, Homo sapiens
  siRNA target sequence for DKFZp547A023 (NM_018704.1,2051-2069).
gtaaggatgttgagttact

SEQ ID NO: 372728 - DNA, 19 bp, Homo sapiens
  siRNA target sequence for FEM1A (NM_018708.1,219-237).
ggggaacgccgctactcat

SEQ ID NO: 372729 - DNA, 19 bp, Homo sapiens
  siRNA target sequence for FEM1A (NM_018708.1,935-953).
ccactgaacggggaatctt

SEQ ID NO: 372730 - DNA, 19 bp, Homo sapiens
  siRNA target sequence for FEM1A (NM_018708.1,936-954).
cactgaacggggaatctta

SEQ ID NO: 372731 - DNA, 19 bp, Homo sapiens
  siRNA target sequence for FEM1A (NM_018708.1,940-958).
gaacggggaatcttacgaa

SEQ ID NO: 372732 - DNA, 19 bp, Homo sapiens
  siRNA target sequence for FEM1A (NM_018708.1,986-1004).
gccgtggaagccttggaat

SEQ ID NO: 372733 - DNA, 19 bp, Homo sapiens
  siRNA target sequence for FEM1A (NM_018708.1,987-1005).
ccgtggaagccttggaatt

SEQ ID NO: 372734 - DNA, 19 bp, Homo sapiens
  siRNA target sequence for FEM1A (NM_018708.1,1011-1029).
gagctacgtatgtggataa

SEQ ID NO: 372735 - DNA, 19 bp, Homo sapiens
  siRNA target sequence for FEM1A (NM_018708.1,1013-1031).
gctacgtatgtggataaga

SEQ ID NO: 372736 - DNA, 19 bp, Homo sapiens
  siRNA target sequence for FEM1A (NM_018708.1,1014-1032).
ctacgtatgtggataagaa

SEQ ID NO: 372737 - DNA, 19 bp, Homo sapiens
  siRNA target sequence for FEM1A (NM_018708.1,1129-1147).
ggtcctggcctatgactat

SEQ ID NO: 372738 - DNA, 19 bp, Homo sapiens
  siRNA target sequence for FEM1A (NM_018708.1,1133-1151).
ctggcctatgactattcca

SEQ ID NO: 372739 - DNA, 19 bp, Homo sapiens
  siRNA target sequence for FEM1A (NM_018708.1,1209-1227).
gcatgcaggccctgttgat

SEQ ID NO: 372740 - DNA, 19 bp, Homo sapiens
  siRNA target sequence for FEM1A (NM_018708.1,1256-1274).
ccggacacttcctattaca

SEQ ID NO: 372741 - DNA, 19 bp, Homo sapiens
  siRNA target sequence for FEM1A (NM_018708.1,1257-1275).
cggacacttcctattacat

SEQ ID NO: 372742 - DNA, 19 bp, Homo sapiens
  siRNA target sequence for FEM1A (NM_018708.1,1299-1317).
ccgactcgggcaatttcga

SEQ ID NO: 372743 - DNA, 19 bp, Homo sapiens
  siRNA target sequence for FEM1A (NM_018708.1,1818-1836).
cggacagcagggattttga

SEQ ID NO: 372744 - DNA, 19 bp, Homo sapiens
  siRNA target sequence for FEM1A (NM_018708.1,1840-1858).
caacaccccgctacacata

SEQ ID NO: 372745 - DNA, 19 bp, Homo sapiens
  siRNA target sequence for DKFZp762O076 (NM_018710.1,120-138).
catcccactccggaaatgt

SEQ ID NO: 372746 - DNA, 19 bp, Homo sapiens
  siRNA target sequence for DKFZp762O076 (NM_018710.1,152-170).
ccaccgtacttgcaagaaa

SEQ ID NO: 372747 - DNA, 19 bp, Homo sapiens
  siRNA target sequence for DKFZp762O076 (NM_018710.1,225-243).
ccagtggtattccagtaat

SEQ ID NO: 372748 - DNA, 19 bp, Homo sapiens
  siRNA target sequence for DKFZp762O076 (NM_018710.1,226-244).
cagtggtattccagtaata

SEQ ID NO: 372749 - DNA, 19 bp, Homo sapiens
  siRNA target sequence for DKFZp762O076 (NM_018710.1,230-248).
ggtattccagtaataaact

SEQ ID NO: 372750 - DNA, 19 bp, Homo sapiens
  siRNA target sequence for DKFZp762O076 (NM_018710.1,250-268).
ccgtgtgtgccaatcacta

SEQ ID NO: 372751 - DNA, 19 bp, Homo sapiens
  siRNA target sequence for DKFZp762O076 (NM_018710.1,251-269).
cgtgtgtgccaatcactaa

SEQ ID NO: 372752 - DNA, 19 bp, Homo sapiens
  siRNA target sequence for DKFZp762O076 (NM_018710.1,252-270).
gtgtgtgccaatcactaat

SEQ ID NO: 372753 - DNA, 19 bp, Homo sapiens
  siRNA target sequence for DKFZp762O076 (NM_018710.1,254-272).
gtgtgccaatcactaatca

SEQ ID NO: 372754 - DNA, 19 bp, Homo sapiens
  siRNA target sequence for DKFZp762O076 (NM_018710.1,256-274).
gtgccaatcactaatcaat

SEQ ID NO: 372755 - DNA, 19 bp, Homo sapiens
  siRNA target sequence for DKFZp762O076 (NM_018710.1,323-341).
gaagctacgccaatcaaaa

SEQ ID NO: 372756 - DNA, 19 bp, Homo sapiens
  siRNA target sequence for DKFZp762O076 (NM_018710.1,344-362).
cccccaacaggcaagaaat

SEQ ID NO: 372757 - DNA, 19 bp, Homo sapiens
  siRNA target sequence for DKFZp762O076 (NM_018710.1,345-363).
ccccaacaggcaagaaata

SEQ ID NO: 372758 - DNA, 19 bp, Homo sapiens
  siRNA target sequence for DKFZp762O076 (NM_018710.1,346-364).
cccaacaggcaagaaatat

SEQ ID NO: 372759 - DNA, 19 bp, Homo sapiens
  siRNA target sequence for DKFZp762O076 (NM_018710.1,375-393).
cttgtaattgtcttctcat

SEQ ID NO: 372760 - DNA, 19 bp, Homo sapiens
  siRNA target sequence for DKFZp762O076 (NM_018710.1,403-421).
cacatctcggcgaatagga

SEQ ID NO: 372761 - DNA, 19 bp, Homo sapiens
  siRNA target sequence for DKFZp762O076 (NM_018710.1,433-451).
caactgtagacggataatt

SEQ ID NO: 372762 - DNA, 19 bp, Homo sapiens
  siRNA target sequence for DKFZp762O076 (NM_018710.1,458-476).
ggcccagtaatgcttattt

SEQ ID NO: 372763 - DNA, 19 bp, Homo sapiens
  siRNA target sequence for DKFZp762O076 (NM_018710.1,460-478).
cccagtaatgcttatttct

SEQ ID NO: 372764 - DNA, 19 bp, Homo sapiens
  siRNA target sequence for DKFZp762O076 (NM_018710.1,462-480).
cagtaatgcttatttctga

SEQ ID NO: 372765 - DNA, 19 bp, Homo sapiens
  siRNA target sequence for DKFZp762O076 (NM_018710.1,539-557).
gggcactgtggaaacacat

SEQ ID NO: 372766 - DNA, 19 bp, Homo sapiens
  siRNA target sequence for DKFZp762O076 (NM_018710.1,599-617).
ccacactgcaaaaaaatct

SEQ ID NO: 372767 - DNA, 19 bp, Homo sapiens
  siRNA target sequence for DKFZp762O076 (NM_018710.1,647-665).
cgctgctgtgcatatatta

SEQ ID NO: 372768 - DNA, 19 bp, Homo sapiens
  siRNA target sequence for DKFZp762O076 (NM_018710.1,656-674).
gcatatattaccattggaa

SEQ ID NO: 372769 - DNA, 19 bp, Homo sapiens
  siRNA target sequence for DKFZp762O076 (NM_018710.1,666-684).
ccattggaatgatatgtat

SEQ ID NO: 372770 - DNA, 19 bp, Homo sapiens
  siRNA target sequence for DKFZp762O076 (NM_018710.1,688-706).
cattggagttgggttaact

SEQ ID NO: 372771 - DNA, 19 bp, Homo sapiens
  siRNA target sequence for DKFZp762O076 (NM_018710.1,705-723).
ctgttggcaccccagattt

SEQ ID NO: 372772 - DNA, 19 bp, Homo sapiens
  siRNA target sequence for DKFZp762O076 (NM_018710.1,710-728).
ggcaccccagattttgcaa

SEQ ID NO: 372773 - DNA, 19 bp, Homo sapiens
  siRNA target sequence for DKFZp762O076 (NM_018710.1,730-748).
gcgatttcgagcaacctat

SEQ ID NO: 372774 - DNA, 19 bp, Homo sapiens
  siRNA target sequence for DKFZp762O076 (NM_018710.1,749-767).
gtttcttgggcaattgctt

SEQ ID NO: 372775 - DNA, 19 bp, Homo sapiens
  siRNA target sequence for DKFZp762O076 (NM_018710.1,753-771).
cttgggcaattgcttatct

SEQ ID NO: 372776 - DNA, 19 bp, Homo sapiens
  siRNA target sequence for DKFZp762O076 (NM_018710.1,765-783).
cttatctcctaggattgat

SEQ ID NO: 372777 - DNA, 19 bp, Homo sapiens
  siRNA target sequence for DKFZp762O076 (NM_018710.1,786-804).
gccttatccgagcttgtta

SEQ ID NO: 372778 - DNA, 19 bp, Homo sapiens
  siRNA target sequence for DKFZp762O076 (NM_018710.1,787-805).
ccttatccgagcttgttat

SEQ ID NO: 372779 - DNA, 19 bp, Homo sapiens
  siRNA target sequence for DKFZp762O076 (NM_018710.1,810-828).
gagccataagagtcagtta

SEQ ID NO: 372780 - DNA, 19 bp, Homo sapiens
  siRNA target sequence for DKFZp762O076 (NM_018710.1,814-832).
cataagagtcagttatcca

SEQ ID NO: 372781 - DNA, 19 bp, Homo sapiens
  siRNA target sequence for DKFZp762O076 (NM_018710.1,830-848).
ccagaacacagttttgcat

SEQ ID NO: 372782 - DNA, 19 bp, Homo sapiens
  siRNA target sequence for DKFZp547C176 (NM_018712.2,364-382).
caccccgacgctattgaaa

SEQ ID NO: 372783 - DNA, 19 bp, Homo sapiens
  siRNA target sequence for DKFZp547C176 (NM_018712.2,366-384).
ccccgacgctattgaaaaa

SEQ ID NO: 372784 - DNA, 19 bp, Homo sapiens
  siRNA target sequence for DKFZp547C176 (NM_018712.2,367-385).
cccgacgctattgaaaaaa

SEQ ID NO: 372785 - DNA, 19 bp, Homo sapiens
  siRNA target sequence for DKFZp547C176 (NM_018712.2,369-387).
cgacgctattgaaaaaact

SEQ ID NO: 372786 - DNA, 19 bp, Homo sapiens
  siRNA target sequence for DKFZp547C176 (NM_018712.2,372-390).
cgctattgaaaaaactata

SEQ ID NO: 372787 - DNA, 19 bp, Homo sapiens
  siRNA target sequence for DKFZp547C176 (NM_018712.2,458-476).
cttgccttctgcaaatcgt

SEQ ID NO: 372788 - DNA, 19 bp, Homo sapiens
  siRNA target sequence for DKFZp547C176 (NM_018712.2,480-498).
gtacaggaaccttattgca

SEQ ID NO: 372789 - DNA, 19 bp, Homo sapiens
  siRNA target sequence for DKFZp547C176 (NM_018712.2,513-531).
gcgtagagaggcctatgat

SEQ ID NO: 372790 - DNA, 19 bp, Homo sapiens
  siRNA target sequence for DKFZp547C176 (NM_018712.2,514-532).
cgtagagaggcctatgatt

SEQ ID NO: 372791 - DNA, 19 bp, Homo sapiens
  siRNA target sequence for DKFZp547C176 (NM_018712.2,520-538).
gaggcctatgattctgata

SEQ ID NO: 372792 - DNA, 19 bp, Homo sapiens
  siRNA target sequence for DKFZp547C176 (NM_018712.2,522-540).
ggcctatgattctgataat

SEQ ID NO: 372793 - DNA, 19 bp, Homo sapiens
  siRNA target sequence for DKFZp547C176 (NM_018712.2,533-551).
ctgataatccccaacatga

SEQ ID NO: 372794 - DNA, 19 bp, Homo sapiens
  siRNA target sequence for DKFZp547C176 (NM_018712.2,598-616).
ctggaatctcggatttcta

SEQ ID NO: 372795 - DNA, 19 bp, Homo sapiens
  siRNA target sequence for DKFZp547C176 (NM_018712.2,640-658).
caaggtgatgatcctaaaa

SEQ ID NO: 372796 - DNA, 19 bp, Homo sapiens
  siRNA target sequence for DKFZp547C176 (NM_018712.2,688-706).
ctgtacaatttgcagtatt

SEQ ID NO: 372797 - DNA, 19 bp, Homo sapiens
  siRNA target sequence for DKFZp547C176 (NM_018712.2,760-778).
ccgaaatgcagggatatca

SEQ ID NO: 372798 - DNA, 19 bp, Homo sapiens
  siRNA target sequence for DKFZp547C176 (NM_018712.2,762-780).
gaaatgcagggatatcact

SEQ ID NO: 372799 - DNA, 19 bp, Homo sapiens
  siRNA target sequence for DKFZp547C176 (NM_018712.2,768-786).
cagggatatcactaaagaa

SEQ ID NO: 372800 - DNA, 19 bp, Homo sapiens
  siRNA target sequence for DKFZp547C176 (NM_018712.2,845-863).
ggtactcatttgcaattgt

SEQ ID NO: 372801 - DNA, 19 bp, Homo sapiens
  siRNA target sequence for DKFZp547C176 (NM_018712.2,857-875).
caattgtgggcatcaatat

SEQ ID NO: 372802 - DNA, 19 bp, Homo sapiens
  siRNA target sequence for DKFZp547C176 (NM_018712.2,878-896).
ctgacctggcatataatct

SEQ ID NO: 372803 - DNA, 19 bp, Homo sapiens
  siRNA target sequence for DKFZp547C176 (NM_018712.2,900-918).
ggtcagcggagctctaaaa

SEQ ID NO: 372804 - DNA, 19 bp, Homo sapiens
  siRNA target sequence for DKFZp547C176 (NM_018712.2,940-958).
ccagaagctccaacattgt

SEQ ID NO: 372805 - DNA, 19 bp, Homo sapiens
  siRNA target sequence for DKFZp547C176 (NM_018712.2,950-968).
caacattgtctcactttca

SEQ ID NO: 372806 - DNA, 19 bp, Homo sapiens
  siRNA target sequence for DKFZp547C176 (NM_018712.2,1018-1036).
gaggaccccatggacataa

SEQ ID NO: 372807 - DNA, 19 bp, Homo sapiens
  siRNA target sequence for DKFZp547C176 (NM_018712.2,1067-1085).
gcaagaggatcatcaaaca

SEQ ID NO: 372808 - DNA, 19 bp, Homo sapiens
  siRNA target sequence for DKFZp547C176 (NM_018712.2,1104-1122).
ggcgctgtgcccacatttt

SEQ ID NO: 372809 - DNA, 19 bp, Homo sapiens
  siRNA target sequence for DKFZp547C176 (NM_018712.2,1123-1141).
gctgcctcggaaggtttaa

SEQ ID NO: 372810 - DNA, 19 bp, Homo sapiens
  siRNA target sequence for DKFZp547C176 (NM_018712.2,1130-1148).
cggaaggtttaatcaacat

SEQ ID NO: 372811 - DNA, 19 bp, Homo sapiens
  siRNA target sequence for DKFZp547C176 (NM_018712.2,1132-1150).
gaaggtttaatcaacatgt

SEQ ID NO: 372812 - DNA, 19 bp, Homo sapiens
  siRNA target sequence for TD-60 (NM_018715.1,507-525).
ccaaggagcgcgtcaaact

SEQ ID NO: 372813 - DNA, 19 bp, Homo sapiens
  siRNA target sequence for TD-60 (NM_018715.1,508-526).
caaggagcgcgtcaaactt

SEQ ID NO: 372814 - DNA, 19 bp, Homo sapiens
  siRNA target sequence for TD-60 (NM_018715.1,511-529).
ggagcgcgtcaaacttgaa

SEQ ID NO: 372815 - DNA, 19 bp, Homo sapiens
  siRNA target sequence for TD-60 (NM_018715.1,623-641).
cgcaatctcggtcagaatt

SEQ ID NO: 372816 - DNA, 19 bp, Homo sapiens
  siRNA target sequence for TD-60 (NM_018715.1,750-768).
ggagctggggtcgaaatga

SEQ ID NO: 372817 - DNA, 19 bp, Homo sapiens
  siRNA target sequence for TD-60 (NM_018715.1,908-926).
gcgtttggggaaaacaaga

SEQ ID NO: 372818 - DNA, 19 bp, Homo sapiens
  siRNA target sequence for TD-60 (NM_018715.1,991-1009).
cggccagccaattaccaaa

SEQ ID NO: 372819 - DNA, 19 bp, Homo sapiens
  siRNA target sequence for TD-60 (NM_018715.1,1017-1035).
gtggggctgaattcagtat

SEQ ID NO: 372820 - DNA, 19 bp, Homo sapiens
  siRNA target sequence for TD-60 (NM_018715.1,1019-1037).
ggggctgaattcagtatga

SEQ ID NO: 372821 - DNA, 19 bp, Homo sapiens
  siRNA target sequence for TD-60 (NM_018715.1,1020-1038).
gggctgaattcagtatgat

SEQ ID NO: 372822 - DNA, 19 bp, Homo sapiens
  siRNA target sequence for TD-60 (NM_018715.1,1021-1039).
ggctgaattcagtatgata

SEQ ID NO: 372823 - DNA, 19 bp, Homo sapiens
  siRNA target sequence for TD-60 (NM_018715.1,1022-1040).
gctgaattcagtatgataa

SEQ ID NO: 372824 - DNA, 19 bp, Homo sapiens
  siRNA target sequence for TD-60 (NM_018715.1,1065-1083).
cctttgggtgccctgaata

SEQ ID NO: 372825 - DNA, 19 bp, Homo sapiens
  siRNA target sequence for TD-60 (NM_018715.1,1066-1084).
ctttgggtgccctgaatat

SEQ ID NO: 372826 - DNA, 19 bp, Homo sapiens
  siRNA target sequence for TD-60 (NM_018715.1,1125-1143).
gggcacagcggatagagta

SEQ ID NO: 372827 - DNA, 19 bp, Homo sapiens
  siRNA target sequence for TD-60 (NM_018715.1,1141-1159).
gtacgactgtgaactagtt

SEQ ID NO: 372828 - DNA, 19 bp, Homo sapiens
  siRNA target sequence for TD-60 (NM_018715.1,1165-1183).
gcgagtggccatcttcatt

SEQ ID NO: 372829 - DNA, 19 bp, Homo sapiens
  siRNA target sequence for TD-60 (NM_018715.1,1167-1185).
gagtggccatcttcattga

SEQ ID NO: 372830 - DNA, 19 bp, Homo sapiens
  siRNA target sequence for TD-60 (NM_018715.1,1189-1207).
gacgaaagatggacagatt

SEQ ID NO: 372831 - DNA, 19 bp, Homo sapiens
  siRNA target sequence for TD-60 (NM_018715.1,1191-1209).
cgaaagatggacagattct

SEQ ID NO: 372832 - DNA, 19 bp, Homo sapiens
  siRNA target sequence for TD-60 (NM_018715.1,1468-1486).
caacacctcccgtgaatct

SEQ ID NO: 372833 - DNA, 19 bp, Homo sapiens
  siRNA target sequence for MAML3 (NM_018717.2,780-798).
gccgcgaatggcagtagta

SEQ ID NO: 372834 - DNA, 19 bp, Homo sapiens
  siRNA target sequence for MAML3 (NM_018717.2,781-799).
ccgcgaatggcagtagtat

SEQ ID NO: 372835 - DNA, 19 bp, Homo sapiens
  siRNA target sequence for MAML3 (NM_018717.2,782-800).
cgcgaatggcagtagtatt

SEQ ID NO: 372836 - DNA, 19 bp, Homo sapiens
  siRNA target sequence for MAML3 (NM_018717.2,783-801).
gcgaatggcagtagtattt

SEQ ID NO: 372837 - DNA, 19 bp, Homo sapiens
  siRNA target sequence for MAML3 (NM_018717.2,839-857).
cgggatcggtgtgaataat

SEQ ID NO: 372838 - DNA, 19 bp, Homo sapiens
  siRNA target sequence for MAML3 (NM_018717.2,840-858).
gggatcggtgtgaataata

SEQ ID NO: 372839 - DNA, 19 bp, Homo sapiens
  siRNA target sequence for MAML3 (NM_018717.2,842-860).
gatcggtgtgaataatact

SEQ ID NO: 372840 - DNA, 19 bp, Homo sapiens
  siRNA target sequence for MAML3 (NM_018717.2,1107-1125).
gagcagagggccaagaaat

SEQ ID NO: 372841 - DNA, 19 bp, Homo sapiens
  siRNA target sequence for MAML3 (NM_018717.2,1210-1228).
cgctgatcatgctacaaga

SEQ ID NO: 372842 - DNA, 19 bp, Homo sapiens
  siRNA target sequence for MAML3 (NM_018717.2,1252-1270).
gagctcgatcaccacttaa

SEQ ID NO: 372843 - DNA, 19 bp, Homo sapiens
  siRNA target sequence for MAML3 (NM_018717.2,1280-1298).
gcagaatggtgcttgtgat

SEQ ID NO: 372844 - DNA, 19 bp, Homo sapiens
  siRNA target sequence for MAML3 (NM_018717.2,1309-1327).
ctccgactagcaaacgaat

SEQ ID NO: 372845 - DNA, 19 bp, Homo sapiens
  siRNA target sequence for MAML3 (NM_018717.2,1313-1331).
gactagcaaacgaattcga

SEQ ID NO: 372846 - DNA, 19 bp, Homo sapiens
  siRNA target sequence for MAML3 (NM_018717.2,1315-1333).
ctagcaaacgaattcgaaa

SEQ ID NO: 372847 - DNA, 19 bp, Homo sapiens
  siRNA target sequence for MAML3 (NM_018717.2,1410-1428).
caacttgacctgaaacctt

SEQ ID NO: 372848 - DNA, 19 bp, Homo sapiens
  siRNA target sequence for MAML3 (NM_018717.2,1457-1475).
cactcctgggcttctagaa

SEQ ID NO: 372849 - DNA, 19 bp, Homo sapiens
  siRNA target sequence for MAML3 (NM_018717.2,1464-1482).
gggcttctagaagatctaa

SEQ ID NO: 372850 - DNA, 19 bp, Homo sapiens
  siRNA target sequence for MAML3 (NM_018717.2,1466-1484).
gcttctagaagatctaagt

SEQ ID NO: 372851 - DNA, 19 bp, Homo sapiens
  siRNA target sequence for MAML3 (NM_018717.2,1467-1485).
cttctagaagatctaagta

SEQ ID NO: 372852 - DNA, 19 bp, Homo sapiens
  siRNA target sequence for MAML3 (NM_018717.2,1491-1509).
ggtaggctccctgagatta

SEQ ID NO: 372853 - DNA, 19 bp, Homo sapiens
  siRNA target sequence for MAML3 (NM_018717.2,1492-1510).
gtaggctccctgagattaa

SEQ ID NO: 372854 - DNA, 19 bp, Homo sapiens
  siRNA target sequence for MAML3 (NM_018717.2,1604-1622).
catagacacatcagaaaca

SEQ ID NO: 372855 - DNA, 19 bp, Homo sapiens
  siRNA target sequence for MAML3 (NM_018717.2,1668-1686).
gatcaggagtggcaagaat

SEQ ID NO: 372856 - DNA, 19 bp, Homo sapiens
  siRNA target sequence for MAML3 (NM_018717.2,1671-1689).
caggagtggcaagaattaa

SEQ ID NO: 372857 - DNA, 19 bp, Homo sapiens
  siRNA target sequence for MAML3 (NM_018717.2,1877-1895).
ggcgaggccttcttcttct

SEQ ID NO: 372858 - DNA, 19 bp, Homo sapiens
  siRNA target sequence for MAML3 (NM_018717.2,1914-1932).
gtctccacggccactagtt

SEQ ID NO: 372859 - DNA, 19 bp, Homo sapiens
  siRNA target sequence for MAML3 (NM_018717.2,1916-1934).
ctccacggccactagttta

SEQ ID NO: 372860 - DNA, 19 bp, Homo sapiens
  siRNA target sequence for MAML3 (NM_018717.2,1919-1937).
cacggccactagtttacct

SEQ ID NO: 372861 - DNA, 19 bp, Homo sapiens
  siRNA target sequence for MAML3 (NM_018717.2,2047-2065).
ctcggcctggaaatggtta

SEQ ID NO: 372862 - DNA, 19 bp, Homo sapiens
  siRNA target sequence for MAML3 (NM_018717.2,2050-2068).
ggcctggaaatggttatct

SEQ ID NO: 372863 - DNA, 19 bp, Homo sapiens
  siRNA target sequence for MAML3 (NM_018717.2,2145-2163).
gcagaacagctcaaacaga

SEQ ID NO: 372864 - DNA, 19 bp, Homo sapiens
  siRNA target sequence for MAML3 (NM_018717.2,2349-2367).
ccaaatagcccaatgatgt

SEQ ID NO: 372865 - DNA, 19 bp, Homo sapiens
  siRNA target sequence for MAML3 (NM_018717.2,2350-2368).
caaatagcccaatgatgta

SEQ ID NO: 372866 - DNA, 19 bp, Homo sapiens
  siRNA target sequence for MAML3 (NM_018717.2,2373-2391).
caagcctttaacaaccaaa

SEQ ID NO: 372867 - DNA, 19 bp, Homo sapiens
  siRNA target sequence for MAML3 (NM_018717.2,2451-2469).
cctcagaatcacatgaata

SEQ ID NO: 372868 - DNA, 19 bp, Homo sapiens
  siRNA target sequence for MAML3 (NM_018717.2,2519-2537).
gcacaatattctgacttat

SEQ ID NO: 372869 - DNA, 19 bp, Homo sapiens
  siRNA target sequence for MAML3 (NM_018717.2,2620-2638).
ccttgatgccgtatatcca

SEQ ID NO: 372870 - DNA, 19 bp, Homo sapiens
  siRNA target sequence for MAML3 (NM_018717.2,3068-3086).
gcagttgcagcaatcacat

SEQ ID NO: 372871 - DNA, 19 bp, Homo sapiens
  siRNA target sequence for MAML3 (NM_018717.2,3071-3089).
gttgcagcaatcacatcta

SEQ ID NO: 372872 - DNA, 19 bp, Homo sapiens
  siRNA target sequence for MAML3 (NM_018717.2,3131-3149).
gcagcaggtcaatcagttt

SEQ ID NO: 372873 - DNA, 19 bp, Homo sapiens
  siRNA target sequence for MAML3 (NM_018717.2,3165-3183).
gatatagcagccgtaagaa

SEQ ID NO: 372874 - DNA, 19 bp, Homo sapiens
  siRNA target sequence for MAML3 (NM_018717.2,3306-3324).
ggactggccccttatagca

SEQ ID NO: 372875 - DNA, 19 bp, Homo sapiens
  siRNA target sequence for MAML3 (NM_018717.2,3334-3352).
ccagccaaccaggaatgta

SEQ ID NO: 372876 - DNA, 19 bp, Homo sapiens
  siRNA target sequence for MAML3 (NM_018717.2,3337-3355).
gccaaccaggaatgtacaa

SEQ ID NO: 372877 - DNA, 19 bp, Homo sapiens
  siRNA target sequence for MAML3 (NM_018717.2,3338-3356).
ccaaccaggaatgtacaat

SEQ ID NO: 372878 - DNA, 19 bp, Homo sapiens
  siRNA target sequence for MAML3 (NM_018717.2,3380-3398).
gttgcagcatccaaaccaa

SEQ ID NO: 372879 - DNA, 19 bp, Homo sapiens
  siRNA target sequence for MAML3 (NM_018717.2,3407-3425).
gagcatcacacataaccaa

SEQ ID NO: 372880 - DNA, 19 bp, Homo sapiens
  siRNA target sequence for MAML3 (NM_018717.2,3669-3687).
gaattgggaccattcaaca

SEQ ID NO: 372881 - DNA, 19 bp, Homo sapiens
  siRNA target sequence for MAML3 (NM_018717.2,3811-3829).
ccatgggtcggcagatgat

SEQ ID NO: 372882 - DNA, 19 bp, Homo sapiens
  siRNA target sequence for MAML3 (NM_018717.2,4000-4018).
cccctcaggacgtgtcata

SEQ ID NO: 372883 - DNA, 19 bp, Homo sapiens
  siRNA target sequence for MAML3 (NM_018717.2,4005-4023).
caggacgtgtcatacaatt

SEQ ID NO: 372884 - DNA, 19 bp, Homo sapiens
  siRNA target sequence for MAML3 (NM_018717.2,4008-4026).
gacgtgtcatacaattaca

SEQ ID NO: 372885 - DNA, 19 bp, Homo sapiens
  siRNA target sequence for MAML3 (NM_018717.2,4010-4028).
cgtgtcatacaattacagt

SEQ ID NO: 372886 - DNA, 19 bp, Homo sapiens
  siRNA target sequence for MAML3 (NM_018717.2,4117-4135).
ggatgcaggagcttgatga

SEQ ID NO: 372887 - DNA, 19 bp, Homo sapiens
  siRNA target sequence for MAML3 (NM_018717.2,4124-4142).
ggagcttgatgaattgttt

SEQ ID NO: 372888 - DNA, 19 bp, Homo sapiens
  siRNA target sequence for MAML3 (NM_018717.2,4128-4146).
cttgatgaattgtttggta

SEQ ID NO: 372889 - DNA, 19 bp, Homo sapiens
  siRNA target sequence for TSGA14 (NM_018718.1,70-88).
ggaaccctgagtatctgat

SEQ ID NO: 372890 - DNA, 19 bp, Homo sapiens
  siRNA target sequence for TSGA14 (NM_018718.1,108-126).
ccaagataccagcatatca

SEQ ID NO: 372891 - DNA, 19 bp, Homo sapiens
  siRNA target sequence for TSGA14 (NM_018718.1,109-127).
caagataccagcatatcaa

SEQ ID NO: 372892 - DNA, 19 bp, Homo sapiens
  siRNA target sequence for TSGA14 (NM_018718.1,135-153).
ctggacactggtaacagta

SEQ ID NO: 372893 - DNA, 19 bp, Homo sapiens
  siRNA target sequence for TSGA14 (NM_018718.1,138-156).
gacactggtaacagtatga

SEQ ID NO: 372894 - DNA, 19 bp, Homo sapiens
  siRNA target sequence for TSGA14 (NM_018718.1,142-160).
ctggtaacagtatgactaa

SEQ ID NO: 372895 - DNA, 19 bp, Homo sapiens
  siRNA target sequence for TSGA14 (NM_018718.1,151-169).
gtatgactaaatatactga

SEQ ID NO: 372896 - DNA, 19 bp, Homo sapiens
  siRNA target sequence for TSGA14 (NM_018718.1,174-192).
ctcgaagagattaagaaaa

SEQ ID NO: 372897 - DNA, 19 bp, Homo sapiens
  siRNA target sequence for TSGA14 (NM_018718.1,221-239).
caagagactaaaagttaca

SEQ ID NO: 372898 - DNA, 19 bp, Homo sapiens
  siRNA target sequence for TSGA14 (NM_018718.1,267-285).
gcttccctctctgatcaaa

SEQ ID NO: 372899 - DNA, 19 bp, Homo sapiens
  siRNA target sequence for TSGA14 (NM_018718.1,271-289).
ccctctctgatcaaacact

SEQ ID NO: 372900 - DNA, 19 bp, Homo sapiens
  siRNA target sequence for TSGA14 (NM_018718.1,406-424).
cgagccctgagcagttcat

SEQ ID NO: 372901 - DNA, 19 bp, Homo sapiens
  siRNA target sequence for TSGA14 (NM_018718.1,407-425).
gagccctgagcagttcata

SEQ ID NO: 372902 - DNA, 19 bp, Homo sapiens
  siRNA target sequence for TSGA14 (NM_018718.1,446-464).
ctccagccgctcaactctt

SEQ ID NO: 372903 - DNA, 19 bp, Homo sapiens
  siRNA target sequence for TSGA14 (NM_018718.1,487-505).
gggaactggatctagacaa

SEQ ID NO: 372904 - DNA, 19 bp, Homo sapiens
  siRNA target sequence for TSGA14 (NM_018718.1,527-545).
gccccataccaaagacaaa

SEQ ID NO: 372905 - DNA, 19 bp, Homo sapiens
  siRNA target sequence for TSGA14 (NM_018718.1,536-554).
caaagacaaaccttatcct

SEQ ID NO: 372906 - DNA, 19 bp, Homo sapiens
  siRNA target sequence for TSGA14 (NM_018718.1,572-590).
gctagatgtgcgtgataga

SEQ ID NO: 372907 - DNA, 19 bp, Homo sapiens
  siRNA target sequence for TSGA14 (NM_018718.1,576-594).
gatgtgcgtgatagagatt

SEQ ID NO: 372908 - DNA, 19 bp, Homo sapiens
  siRNA target sequence for TSGA14 (NM_018718.1,579-597).
gtgcgtgatagagattctt

SEQ ID NO: 372909 - DNA, 19 bp, Homo sapiens
  siRNA target sequence for TSGA14 (NM_018718.1,611-629).
cattgttggagcttacagt

SEQ ID NO: 372910 - DNA, 19 bp, Homo sapiens
  siRNA target sequence for TSGA14 (NM_018718.1,655-673).
caatgaacccttattcaaa

SEQ ID NO: 372911 - DNA, 19 bp, Homo sapiens
  siRNA target sequence for TSGA14 (NM_018718.1,659-677).
gaacccttattcaaatgat

SEQ ID NO: 372912 - DNA, 19 bp, Homo sapiens
  siRNA target sequence for TSGA14 (NM_018718.1,662-680).
cccttattcaaatgatatt

SEQ ID NO: 372913 - DNA, 19 bp, Homo sapiens
  siRNA target sequence for TSGA14 (NM_018718.1,696-714).
gcccatggcaagatcatca

SEQ ID NO: 372914 - DNA, 19 bp, Homo sapiens
  siRNA target sequence for TSGA14 (NM_018718.1,698-716).
ccatggcaagatcatcatt

SEQ ID NO: 372915 - DNA, 19 bp, Homo sapiens
  siRNA target sequence for TSGA14 (NM_018718.1,703-721).
gcaagatcatcattctgta

SEQ ID NO: 372916 - DNA, 19 bp, Homo sapiens
  siRNA target sequence for TSGA14 (NM_018718.1,717-735).
ctgtatgacgatgatgaaa

SEQ ID NO: 372917 - DNA, 19 bp, Homo sapiens
  siRNA target sequence for TSGA14 (NM_018718.1,761-779).
catgtgcgagcgtggattt

SEQ ID NO: 372918 - DNA, 19 bp, Homo sapiens
  siRNA target sequence for TSGA14 (NM_018718.1,764-782).
gtgcgagcgtggatttgaa

SEQ ID NO: 372919 - DNA, 19 bp, Homo sapiens
  siRNA target sequence for TSGA14 (NM_018718.1,766-784).
gcgagcgtggatttgaaaa

SEQ ID NO: 372920 - DNA, 19 bp, Homo sapiens
  siRNA target sequence for TSGA14 (NM_018718.1,794-812).
gctttccggaggtctaaaa

SEQ ID NO: 372921 - DNA, 19 bp, Homo sapiens
  siRNA target sequence for TSGA14 (NM_018718.1,799-817).
ccggaggtctaaaagtctt

SEQ ID NO: 372922 - DNA, 19 bp, Homo sapiens
  siRNA target sequence for TSGA14 (NM_018718.1,800-818).
cggaggtctaaaagtctta

SEQ ID NO: 372923 - DNA, 19 bp, Homo sapiens
  siRNA target sequence for TSGA14 (NM_018718.1,830-848).
cccggaaggactgattact

SEQ ID NO: 372924 - DNA, 19 bp, Homo sapiens
  siRNA target sequence for TSGA14 (NM_018718.1,888-906).
gggtctgcccggaaacgat

SEQ ID NO: 372925 - DNA, 19 bp, Homo sapiens
  siRNA target sequence for TSGA14 (NM_018718.1,1021-1039).
gccgactgaaccaagctaa

SEQ ID NO: 372926 - DNA, 19 bp, Homo sapiens
  siRNA target sequence for TSGA14 (NM_018718.1,1072-1090).
cccgaagcgctcagaatct

SEQ ID NO: 372927 - DNA, 19 bp, Homo sapiens
  siRNA target sequence for RAM2 (NM_018719.2,101-119).
gctaccagatccctaaaga

SEQ ID NO: 372928 - DNA, 19 bp, Homo sapiens
  siRNA target sequence for RAM2 (NM_018719.2,102-120).
ctaccagatccctaaagaa

SEQ ID NO: 372929 - DNA, 19 bp, Homo sapiens
  siRNA target sequence for RAM2 (NM_018719.2,207-225).
ggagagctgcgatagtttt

SEQ ID NO: 372930 - DNA, 19 bp, Homo sapiens
  siRNA target sequence for RAM2 (NM_018719.2,249-267).
gcaggatgtgcgctttcat

SEQ ID NO: 372931 - DNA, 19 bp, Homo sapiens
  siRNA target sequence for RAM2 (NM_018719.2,250-268).
caggatgtgcgctttcatt

SEQ ID NO: 372932 - DNA, 19 bp, Homo sapiens
  siRNA target sequence for RAM2 (NM_018719.2,256-274).
gtgcgctttcattccaaat

SEQ ID NO: 372933 - DNA, 19 bp, Homo sapiens
  siRNA target sequence for RAM2 (NM_018719.2,259-277).
cgctttcattccaaatact

SEQ ID NO: 372934 - DNA, 19 bp, Homo sapiens
  siRNA target sequence for RAM2 (NM_018719.2,260-278).
gctttcattccaaatactt

SEQ ID NO: 372935 - DNA, 19 bp, Homo sapiens
  siRNA target sequence for RAM2 (NM_018719.2,328-346).
gaggattttgcaggattta

SEQ ID NO: 372936 - DNA, 19 bp, Homo sapiens
  siRNA target sequence for RAM2 (NM_018719.2,349-367).
cagagtgatctgaatggaa

SEQ ID NO: 372937 - DNA, 19 bp, Homo sapiens
  siRNA target sequence for RAM2 (NM_018719.2,355-373).
gatctgaatggaaagacta

SEQ ID NO: 372938 - DNA, 19 bp, Homo sapiens
  siRNA target sequence for RAM2 (NM_018719.2,371-389).
ctaacccagaagtaatggt

SEQ ID NO: 372939 - DNA, 19 bp, Homo sapiens
  siRNA target sequence for RAM2 (NM_018719.2,587-605).
ctagcgcacgcttacagaa

SEQ ID NO: 372940 - DNA, 19 bp, Homo sapiens
  siRNA target sequence for RAM2 (NM_018719.2,590-608).
gcgcacgcttacagaatga

SEQ ID NO: 372941 - DNA, 19 bp, Homo sapiens
  siRNA target sequence for RAM2 (NM_018719.2,592-610).
gcacgcttacagaatgaga

SEQ ID NO: 372942 - DNA, 19 bp, Homo sapiens
  siRNA target sequence for RAM2 (NM_018719.2,595-613).
cgcttacagaatgagaaaa

SEQ ID NO: 372943 - DNA, 19 bp, Homo sapiens
  siRNA target sequence for RAM2 (NM_018719.2,651-669).
gatacaaagggaagattct

SEQ ID NO: 372944 - DNA, 19 bp, Homo sapiens
  siRNA target sequence for RAM2 (NM_018719.2,761-779).
ccatgcttgcccagttatt

SEQ ID NO: 372945 - DNA, 19 bp, Homo sapiens
  siRNA target sequence for RAM2 (NM_018719.2,772-790).
cagttattggcggaattga

SEQ ID NO: 372946 - DNA, 19 bp, Homo sapiens
  siRNA target sequence for RAM2 (NM_018719.2,944-962).
ctgtctcagccgctaaatt

SEQ ID NO: 372947 - DNA, 19 bp, Homo sapiens
  siRNA target sequence for RAM2 (NM_018719.2,984-1002).
ccgaagaaggaagacaatt

SEQ ID NO: 372948 - DNA, 19 bp, Homo sapiens
  siRNA target sequence for RAM2 (NM_018719.2,1027-1045).
cgacgtcaccgtatatctt

SEQ ID NO: 372949 - DNA, 19 bp, Homo sapiens
  siRNA target sequence for RAM2 (NM_018719.2,1030-1048).
cgtcaccgtatatcttctt

SEQ ID NO: 372950 - DNA, 19 bp, Homo sapiens
  siRNA target sequence for RAM2 (NM_018719.2,1031-1049).
gtcaccgtatatcttcttt

SEQ ID NO: 372951 - DNA, 19 bp, Homo sapiens
  siRNA target sequence for RAM2 (NM_018719.2,1051-1069).
cggccagtggaggatatca

SEQ ID NO: 372952 - DNA, 19 bp, Homo sapiens
  siRNA target sequence for RAM2 (NM_018719.2,1094-1112).
ccataactgttcgagataa

SEQ ID NO: 372953 - DNA, 19 bp, Homo sapiens
  siRNA target sequence for RAM2 (NM_018719.2,1095-1113).
cataactgttcgagataaa

SEQ ID NO: 372954 - DNA, 19 bp, Homo sapiens
  siRNA target sequence for RAM2 (NM_018719.2,1100-1118).
ctgttcgagataaaatcta

SEQ ID NO: 372955 - DNA, 19 bp, Homo sapiens
  siRNA target sequence for RAM2 (NM_018719.2,1105-1123).
cgagataaaatctatgata

SEQ ID NO: 372956 - DNA, 19 bp, Homo sapiens
  siRNA target sequence for RAM2 (NM_018719.2,1106-1124).
gagataaaatctatgataa

SEQ ID NO: 372957 - DNA, 19 bp, Homo sapiens
  siRNA target sequence for RAM2 (NM_018719.2,1142-1160).
gccatcagtgtcgacaaaa

SEQ ID NO: 372958 - DNA, 19 bp, Homo sapiens
  siRNA target sequence for RAM2 (NM_018719.2,1144-1162).
catcagtgtcgacaaaaga

SEQ ID NO: 372959 - DNA, 19 bp, Homo sapiens
  siRNA target sequence for RAM2 (NM_018719.2,1303-1321).
cgtgggatctgcaattgca

SEQ ID NO: 372960 - DNA, 19 bp, Homo sapiens
  siRNA target sequence for NSFL1C (NM_018839.3,1382-1400).
gtaaaccgagagttcatgt

SEQ ID NO: 372961 - DNA, 19 bp, Homo sapiens
  siRNA target sequence for NSFL1C (NM_018839.3,1387-1405).
ccgagagttcatgtagtat

SEQ ID NO: 372962 - DNA, 19 bp, Homo sapiens
  siRNA target sequence for NSFL1C (NM_018839.3,1388-1406).
cgagagttcatgtagtatt

SEQ ID NO: 372963 - DNA, 19 bp, Homo sapiens
  siRNA target sequence for C20orf24 (NM_018840.1,352-370).
gtgtcatttggggagtttt

SEQ ID NO: 372964 - DNA, 19 bp, Homo sapiens
  siRNA target sequence for C20orf24 (NM_018840.1,362-380).
gggagttttgccattacga

SEQ ID NO: 372965 - DNA, 19 bp, Homo sapiens
  siRNA target sequence for C20orf24 (NM_018840.1,421-439).
gagtcctgtacctctactt

SEQ ID NO: 372966 - DNA, 19 bp, Homo sapiens
  siRNA target sequence for C20orf24 (NM_018840.1,440-458).
cagcaattacctacagatt

SEQ ID NO: 372967 - DNA, 19 bp, Homo sapiens
  siRNA target sequence for C20orf24 (NM_018840.1,442-460).
gcaattacctacagattga

SEQ ID NO: 372968 - DNA, 19 bp, Homo sapiens
  siRNA target sequence for C20orf24 (NM_018840.1,531-549).
gtcatttggatcatctttt

SEQ ID NO: 372969 - DNA, 19 bp, Homo sapiens
  siRNA target sequence for GNG12 (NM_018841.2,345-363).
gataggaataccaacttca

SEQ ID NO: 372970 - DNA, 19 bp, Homo sapiens
  siRNA target sequence for GNG12 (NM_018841.2,349-367).
ggaataccaacttcagaaa

SEQ ID NO: 372971 - DNA, 19 bp, Homo sapiens
  siRNA target sequence for GNG12 (NM_018841.2,364-382).
gaaaaccctttcaaggata

SEQ ID NO: 372972 - DNA, 19 bp, Homo sapiens
  siRNA target sequence for PCDHAC1 (NM_018898.3,189-207).
ggggtggcagttttatgtt

SEQ ID NO: 372973 - DNA, 19 bp, Homo sapiens
  siRNA target sequence for PCDHAC1 (NM_018898.3,190-208).
gggtggcagttttatgttt

SEQ ID NO: 372974 - DNA, 19 bp, Homo sapiens
  siRNA target sequence for PCDHAC1 (NM_018898.3,333-351).
cggaactttcgcttccttt

SEQ ID NO: 372975 - DNA, 19 bp, Homo sapiens
  siRNA target sequence for PCDHAC1 (NM_018898.3,592-610).
ccggagcccgctttactct

SEQ ID NO: 372976 - DNA, 19 bp, Homo sapiens
  siRNA target sequence for PCDHAC1 (NM_018898.3,635-653).
gggaagcaatgggatacta

SEQ ID NO: 372977 - DNA, 19 bp, Homo sapiens
  siRNA target sequence for PCDHAC1 (NM_018898.3,640-658).
gcaatgggatactaagcta

SEQ ID NO: 372978 - DNA, 19 bp, Homo sapiens
  siRNA target sequence for PCDHAC1 (NM_018898.3,824-842).
cgcacaagtcaccatcatt

SEQ ID NO: 372979 - DNA, 19 bp, Homo sapiens
  siRNA target sequence for PCDHAC1 (NM_018898.3,915-933).
cccaatgggactgtgttat

SEQ ID NO: 372980 - DNA, 19 bp, Homo sapiens
  siRNA target sequence for PCDHAC1 (NM_018898.3,916-934).
ccaatgggactgtgttatt

SEQ ID NO: 372981 - DNA, 19 bp, Homo sapiens
  siRNA target sequence for PCDHAC1 (NM_018898.3,1118-1136).
cgaaggtgtctttggttta

SEQ ID NO: 372982 - DNA, 19 bp, Homo sapiens
  siRNA target sequence for PCDHAC1 (NM_018898.3,1122-1140).
ggtgtctttggtttagcta

SEQ ID NO: 372983 - DNA, 19 bp, Homo sapiens
  siRNA target sequence for PCDHAC1 (NM_018898.3,1272-1290).
gatgaagacctcgattcta

SEQ ID NO: 372984 - DNA, 19 bp, Homo sapiens
  siRNA target sequence for PCDHAC1 (NM_018898.3,1278-1296).
gacctcgattctaatggta

SEQ ID NO: 372985 - DNA, 19 bp, Homo sapiens
  siRNA target sequence for PCDHAC1 (NM_018898.3,1299-1317).
gtcatttgtggcatgtcta

SEQ ID NO: 372986 - DNA, 19 bp, Homo sapiens
  siRNA target sequence for PCDHAC1 (NM_018898.3,1315-1333).
ctagtgcaggcccttttca

SEQ ID NO: 372987 - DNA, 19 bp, Homo sapiens
  siRNA target sequence for PCDHAC1 (NM_018898.3,1389-1407).
cgggagcagatcagtgaat

SEQ ID NO: 372988 - DNA, 19 bp, Homo sapiens
  siRNA target sequence for PCDHAC1 (NM_018898.3,1390-1408).
gggagcagatcagtgaata

SEQ ID NO: 372989 - DNA, 19 bp, Homo sapiens
  siRNA target sequence for PCDHAC1 (NM_018898.3,1416-1434).
ctgatcacggcctcagata

SEQ ID NO: 372990 - DNA, 19 bp, Homo sapiens
  siRNA target sequence for PCDHAC1 (NM_018898.3,1418-1436).
gatcacggcctcagatagt

SEQ ID NO: 372991 - DNA, 19 bp, Homo sapiens
  siRNA target sequence for PCDHAC1 (NM_018898.3,1475-1493).
gtcagttgctgatgtgaat

SEQ ID NO: 372992 - DNA, 19 bp, Homo sapiens
  siRNA target sequence for PCDHAC1 (NM_018898.3,1515-1533).
caaccccagcaggaacttt

SEQ ID NO: 372993 - DNA, 19 bp, Homo sapiens
  siRNA target sequence for PCDHAC1 (NM_018898.3,1562-1580).
ctctctaggccgagtgttt

SEQ ID NO: 372994 - DNA, 19 bp, Homo sapiens
  siRNA target sequence for PCDHAC1 (NM_018898.3,1691-1709).
ggccatcactgccaaaact

SEQ ID NO: 372995 - DNA, 19 bp, Homo sapiens
  siRNA target sequence for PCDHAC1 (NM_018898.3,1783-1801).
gtgcaacagtgactataaa

SEQ ID NO: 372996 - DNA, 19 bp, Homo sapiens
  siRNA target sequence for PCDHAC1 (NM_018898.3,1785-1803).
gcaacagtgactataaact

SEQ ID NO: 372997 - DNA, 19 bp, Homo sapiens
  siRNA target sequence for PCDHAC1 (NM_018898.3,1809-1827).
gtggtagataggaatgaca

SEQ ID NO: 372998 - DNA, 19 bp, Homo sapiens
  siRNA target sequence for PCDHAC1 (NM_018898.3,1811-1829).
ggtagataggaatgacaat

SEQ ID NO: 372999 - DNA, 19 bp, Homo sapiens
  siRNA target sequence for PCDHAC1 (NM_018898.3,1812-1830).
gtagataggaatgacaatt

SEQ ID NO: 373000 - DNA, 19 bp, Homo sapiens
  siRNA target sequence for PCDHAC1 (NM_018898.3,1824-1842).
gacaattatccggttatct

SEQ ID NO: 373001 - DNA, 19 bp, Homo sapiens
  siRNA target sequence for PCDHAC1 (NM_018898.3,1906-1924).
gacacttggtcacaaaagt

SEQ ID NO: 373002 - DNA, 19 bp, Homo sapiens
  siRNA target sequence for PCDHAC1 (NM_018898.3,1951-1969).
ctaatgcctggctttccta

SEQ ID NO: 373003 - DNA, 19 bp, Homo sapiens
  siRNA target sequence for PCDHAC1 (NM_018898.3,1989-2007).
gactctagtctctttagaa

SEQ ID NO: 373004 - DNA, 19 bp, Homo sapiens
  siRNA target sequence for PCDHAC1 (NM_018898.3,1991-2009).
ctctagtctctttagaatt

SEQ ID NO: 373005 - DNA, 19 bp, Homo sapiens
  siRNA target sequence for PCDHAC1 (NM_018898.3,2030-2048).
ccgtactgctcgcttagtt

SEQ ID NO: 373006 - DNA, 19 bp, Homo sapiens
  siRNA target sequence for PCDHAC1 (NM_018898.3,2032-2050).
gtactgctcgcttagttct

SEQ ID NO: 373007 - DNA, 19 bp, Homo sapiens
  siRNA target sequence for PCDHAC1 (NM_018898.3,2212-2230).
cccagaacttgtatttagt

SEQ ID NO: 373008 - DNA, 19 bp, Homo sapiens
  siRNA target sequence for PCDHAC1 (NM_018898.3,2456-2474).
gggacttggttctgataat

SEQ ID NO: 373009 - DNA, 19 bp, Homo sapiens
  siRNA target sequence for PCDHAC1 (NM_018898.3,2457-2475).
ggacttggttctgataata

SEQ ID NO: 373010 - DNA, 19 bp, Homo sapiens
  siRNA target sequence for PCDHAC1 (NM_018898.3,2486-2504).
gttgcgtggggagtacaat

SEQ ID NO: 373011 - DNA, 19 bp, Homo sapiens
  siRNA target sequence for PCDHAC1 (NM_018898.3,2506-2524).
ctgccgacctgcgaaatct

SEQ ID NO: 373012 - DNA, 19 bp, Homo sapiens
  siRNA target sequence for PCDHAC1 (NM_018898.3,2530-2548).
ctggggtaggactgaattt

SEQ ID NO: 373013 - DNA, 19 bp, Homo sapiens
  siRNA target sequence for PCDHAC1 (NM_018898.3,2550-2568).
ccaatatcctgtattcaga

SEQ ID NO: 373014 - DNA, 19 bp, Homo sapiens
  siRNA target sequence for PCDHAC1 (NM_018898.3,2584-2602).
gggatcacgctaatgtcaa

SEQ ID NO: 373015 - DNA, 19 bp, Homo sapiens
  siRNA target sequence for PCDHAC1 (NM_018898.3,2585-2603).
ggatcacgctaatgtcaat

SEQ ID NO: 373016 - DNA, 19 bp, Homo sapiens
  siRNA target sequence for PCDHAC1 (NM_018898.3,2806-2824).
gcaacagctggacctttaa

SEQ ID NO: 373017 - DNA, 19 bp, Homo sapiens
  siRNA target sequence for PCDHAC1 (NM_018898.3,2832-2850).
ccaggcaaccccaaacaat

SEQ ID NO: 373018 - DNA, 19 bp, Homo sapiens
  siRNA target sequence for PCDHAC1 (NM_018898.3,2860-2878).
gtgagttgcccgacaaatt

SEQ ID NO: 373019 - DNA, 19 bp, Homo sapiens
  siRNA target sequence for PCDHAC1 (NM_018898.3,2862-2880).
gagttgcccgacaaattca

SEQ ID NO: 373020 - DNA, 19 bp, Homo sapiens
  siRNA target sequence for PCDHAC1 (NM_018898.3,2864-2882).
gttgcccgacaaattcatt

SEQ ID NO: 373021 - DNA, 19 bp, Homo sapiens
  siRNA target sequence for PCDHAC1 (NM_018898.3,2913-2931).
cggcaggagcctactaaca

SEQ ID NO: 373022 - DNA, 19 bp, Homo sapiens
  siRNA target sequence for PCDHAC1 (NM_018898.3,2921-2939).
gcctactaacagccaaatt

SEQ ID NO: 373023 - DNA, 19 bp, Homo sapiens
  siRNA target sequence for PCDHAC2 (NM_018899.3,123-141).
ctcccagctgcgatactct

SEQ ID NO: 373024 - DNA, 19 bp, Homo sapiens
  siRNA target sequence for PCDHAC2 (NM_018899.3,300-318).
cgtcaacgagcgcattgat

SEQ ID NO: 373025 - DNA, 19 bp, Homo sapiens
  siRNA target sequence for PCDHAC2 (NM_018899.3,395-413).
gcgccgttgaggtggaaat

SEQ ID NO: 373026 - DNA, 19 bp, Homo sapiens
  siRNA target sequence for PCDHAC2 (NM_018899.3,396-414).
cgccgttgaggtggaaata

SEQ ID NO: 373027 - DNA, 19 bp, Homo sapiens
  siRNA target sequence for PCDHAC2 (NM_018899.3,397-415).
gccgttgaggtggaaatat

SEQ ID NO: 373028 - DNA, 19 bp, Homo sapiens
  siRNA target sequence for PCDHAC2 (NM_018899.3,398-416).
ccgttgaggtggaaatatt

SEQ ID NO: 373029 - DNA, 19 bp, Homo sapiens
  siRNA target sequence for PCDHAC2 (NM_018899.3,488-506).
ctggagcgcgctttcacat

SEQ ID NO: 373030 - DNA, 19 bp, Homo sapiens
  siRNA target sequence for PCDHAC2 (NM_018899.3,491-509).
gagcgcgctttcacataga

SEQ ID NO: 373031 - DNA, 19 bp, Homo sapiens
  siRNA target sequence for PCDHAC2 (NM_018899.3,493-511).
gcgcgctttcacatagaga

SEQ ID NO: 373032 - DNA, 19 bp, Homo sapiens
  siRNA target sequence for PCDHAC2 (NM_018899.3,595-613).
cccctgcaggagaacagta

SEQ ID NO: 373033 - DNA, 19 bp, Homo sapiens
  siRNA target sequence for PCDHAC2 (NM_018899.3,941-959).
ccggggaagtgcgagtaat

SEQ ID NO: 373034 - DNA, 19 bp, Homo sapiens
  siRNA target sequence for PCDHAC2 (NM_018899.3,942-960).
cggggaagtgcgagtaatt

SEQ ID NO: 373035 - DNA, 19 bp, Homo sapiens
  siRNA target sequence for PCDHAC2 (NM_018899.3,986-1004).
cctcctaccagatctatgt

SEQ ID NO: 373036 - DNA, 19 bp, Homo sapiens
  siRNA target sequence for PCDHAC2 (NM_018899.3,1117-1135).
ccagtgcctgagaatgcta

SEQ ID NO: 373037 - DNA, 19 bp, Homo sapiens
  siRNA target sequence for PCDHAC2 (NM_018899.3,1152-1170).
ggccgttctcagtgtcaat

SEQ ID NO: 373038 - DNA, 19 bp, Homo sapiens
  siRNA target sequence for PCDHAC2 (NM_018899.3,1154-1172).
ccgttctcagtgtcaatga

SEQ ID NO: 373039 - DNA, 19 bp, Homo sapiens
  siRNA target sequence for PCDHAC2 (NM_018899.3,1231-1249).
cgactgaatggctttggaa

SEQ ID NO: 373040 - DNA, 19 bp, Homo sapiens
  siRNA target sequence for PCDHAC2 (NM_018899.3,1232-1250).
gactgaatggctttggaaa

SEQ ID NO: 373041 - DNA, 19 bp, Homo sapiens
  siRNA target sequence for PCDHAC2 (NM_018899.3,1242-1260).
ctttggaaactcctataca

SEQ ID NO: 373042 - DNA, 19 bp, Homo sapiens
  siRNA target sequence for PCDHAC2 (NM_018899.3,1292-1310).
gggtggctgtctacaacat

SEQ ID NO: 373043 - DNA, 19 bp, Homo sapiens
  siRNA target sequence for PCDHAC2 (NM_018899.3,1416-1434).
ctcctattccatctacata

SEQ ID NO: 373044 - DNA, 19 bp, Homo sapiens
  siRNA target sequence for PCDHAC2 (NM_018899.3,1418-1436).
cctattccatctacataca

SEQ ID NO: 373045 - DNA, 19 bp, Homo sapiens
  siRNA target sequence for PCDHAC2 (NM_018899.3,1560-1578).
ctatgtctccattaacagt

SEQ ID NO: 373046 - DNA, 19 bp, Homo sapiens
  siRNA target sequence for PCDHAC2 (NM_018899.3,1806-1824).
cctggtcaccaaagtcata

SEQ ID NO: 373047 - DNA, 19 bp, Homo sapiens
  siRNA target sequence for PCDHAC2 (NM_018899.3,1810-1828).
gtcaccaaagtcatagcta

SEQ ID NO: 373048 - DNA, 19 bp, Homo sapiens
  siRNA target sequence for PCDHAC2 (NM_018899.3,1883-1901).
ctgacctggacctctttaa

SEQ ID NO: 373049 - DNA, 19 bp, Homo sapiens
  siRNA target sequence for PCDHAC2 (NM_018899.3,1976-1994).
ccgtggtggtccgagataa

SEQ ID NO: 373050 - DNA, 19 bp, Homo sapiens
  siRNA target sequence for PCDHAC2 (NM_018899.3,1977-1995).
cgtggtggtccgagataat

SEQ ID NO: 373051 - DNA, 19 bp, Homo sapiens
  siRNA target sequence for PCDHAC2 (NM_018899.3,1980-1998).
ggtggtccgagataatgga

SEQ ID NO: 373052 - DNA, 19 bp, Homo sapiens
  siRNA target sequence for PCDHAC2 (NM_018899.3,2015-2033).
cctctgtggccattacagt

SEQ ID NO: 373053 - DNA, 19 bp, Homo sapiens
  siRNA target sequence for PCDHAC2 (NM_018899.3,2016-2034).
ctctgtggccattacagta

SEQ ID NO: 373054 - DNA, 19 bp, Homo sapiens
  siRNA target sequence for PCDHAC2 (NM_018899.3,2088-2106).
gagccctcggacatactct

SEQ ID NO: 373055 - DNA, 19 bp, Homo sapiens
  siRNA target sequence for PCDHAC2 (NM_018899.3,2092-2110).
cctcggacatactctgaaa

SEQ ID NO: 373056 - DNA, 19 bp, Homo sapiens
  siRNA target sequence for PCDHAC2 (NM_018899.3,2093-2111).
ctcggacatactctgaaat

SEQ ID NO: 373057 - DNA, 19 bp, Homo sapiens
  siRNA target sequence for PCDHAC2 (NM_018899.3,2095-2113).
cggacatactctgaaatta

SEQ ID NO: 373058 - DNA, 19 bp, Homo sapiens
  siRNA target sequence for PCDHAC2 (NM_018899.3,2115-2133).
cctttatctaataatagca

SEQ ID NO: 373059 - DNA, 19 bp, Homo sapiens
  siRNA target sequence for PCDHAC2 (NM_018899.3,2252-2270).
ggtcccctgcagaactgta

SEQ ID NO: 373060 - DNA, 19 bp, Homo sapiens
  siRNA target sequence for PCDHAC2 (NM_018899.3,2322-2340).
gcagcctcacttcattgaa

SEQ ID NO: 373061 - DNA, 19 bp, Homo sapiens
  siRNA target sequence for PCDHAC2 (NM_018899.3,2399-2417).
gctcagggagtgacacttt

SEQ ID NO: 373062 - DNA, 19 bp, Homo sapiens
  siRNA target sequence for PCDHAC2 (NM_018899.3,2404-2422).
gggagtgacactttcatgt

SEQ ID NO: 373063 - DNA, 19 bp, Homo sapiens
  siRNA target sequence for PCDHAC2 (NM_018899.3,2405-2423).
ggagtgacactttcatgtt

SEQ ID NO: 373064 - DNA, 19 bp, Homo sapiens
  siRNA target sequence for PCDHAC2 (NM_018899.3,2522-2540).
ggaacctgattattctcaa

SEQ ID NO: 373065 - DNA, 19 bp, Homo sapiens
  siRNA target sequence for PCDHAC2 (NM_018899.3,2523-2541).
gaacctgattattctcaaa

SEQ ID NO: 373066 - DNA, 19 bp, Homo sapiens
  siRNA target sequence for PCDHA1 (NM_018900.2,369-387).
gaaagacattaacgataat

SEQ ID NO: 373067 - DNA, 19 bp, Homo sapiens
  siRNA target sequence for PCDHA1 (NM_018900.2,396-414).
cttcaggggcagagaacaa

SEQ ID NO: 373068 - DNA, 19 bp, Homo sapiens
  siRNA target sequence for PCDHA1 (NM_018900.2,487-505).
ggtgctaacgctcttctaa

SEQ ID NO: 373069 - DNA, 19 bp, Homo sapiens
  siRNA target sequence for PCDHA1 (NM_018900.2,491-509).
ctaacgctcttctaacgta

SEQ ID NO: 373070 - DNA, 19 bp, Homo sapiens
  siRNA target sequence for PCDHA1 (NM_018900.2,512-530).
cgctcagcccgagtgatta

SEQ ID NO: 373071 - DNA, 19 bp, Homo sapiens
  siRNA target sequence for PCDHA1 (NM_018900.2,514-532).
ctcagcccgagtgattatt

SEQ ID NO: 373072 - DNA, 19 bp, Homo sapiens
  siRNA target sequence for PCDHA1 (NM_018900.2,519-537).
cccgagtgattatttctct

SEQ ID NO: 373073 - DNA, 19 bp, Homo sapiens
  siRNA target sequence for PCDHA1 (NM_018900.2,520-538).
ccgagtgattatttctctt

SEQ ID NO: 373074 - DNA, 19 bp, Homo sapiens
  siRNA target sequence for PCDHA1 (NM_018900.2,540-558).
ggatgtagaggcaagtgat

SEQ ID NO: 373075 - DNA, 19 bp, Homo sapiens
  siRNA target sequence for PCDHA1 (NM_018900.2,617-635).
cagaacttcacttattact

SEQ ID NO: 373076 - DNA, 19 bp, Homo sapiens
  siRNA target sequence for PCDHA1 (NM_018900.2,619-637).
gaacttcacttattactga

SEQ ID NO: 373077 - DNA, 19 bp, Homo sapiens
  siRNA target sequence for PCDHA1 (NM_018900.2,690-708).
caccgtcctcgacgttaat

SEQ ID NO: 373078 - DNA, 19 bp, Homo sapiens
  siRNA target sequence for PCDHA1 (NM_018900.2,692-710).
ccgtcctcgacgttaatga

SEQ ID NO: 373079 - DNA, 19 bp, Homo sapiens
  siRNA target sequence for PCDHA1 (NM_018900.2,693-711).
cgtcctcgacgttaatgat

SEQ ID NO: 373080 - DNA, 19 bp, Homo sapiens
  siRNA target sequence for PCDHA1 (NM_018900.2,764-782).
cagcaaatggaacattagt

SEQ ID NO: 373081 - DNA, 19 bp, Homo sapiens
  siRNA target sequence for PCDHA1 (NM_018900.2,776-794).
cattagtgaccacattaaa

SEQ ID NO: 373082 - DNA, 19 bp, Homo sapiens
  siRNA target sequence for PCDHA1 (NM_018900.2,823-841).
ggtgaagtcgtcttttcct

SEQ ID NO: 373083 - DNA, 19 bp, Homo sapiens
  siRNA target sequence for PCDHA1 (NM_018900.2,824-842).
gtgaagtcgtcttttcctt

SEQ ID NO: 373084 - DNA, 19 bp, Homo sapiens
  siRNA target sequence for PCDHA1 (NM_018900.2,829-847).
gtcgtcttttcctttgaca

SEQ ID NO: 373085 - DNA, 19 bp, Homo sapiens
  siRNA target sequence for PCDHA1 (NM_018900.2,851-869).
gtatttctcgtgacattca

SEQ ID NO: 373086 - DNA, 19 bp, Homo sapiens
  siRNA target sequence for PCDHA1 (NM_018900.2,893-911).
gctcaggagaaattaggtt

SEQ ID NO: 373087 - DNA, 19 bp, Homo sapiens
  siRNA target sequence for PCDHA1 (NM_018900.2,894-912).
ctcaggagaaattaggtta

SEQ ID NO: 373088 - DNA, 19 bp, Homo sapiens
  siRNA target sequence for PCDHA1 (NM_018900.2,899-917).
gagaaattaggttaattga

SEQ ID NO: 373089 - DNA, 19 bp, Homo sapiens
  siRNA target sequence for PCDHA1 (NM_018900.2,944-962).
cctacgaaattcaagtaaa

SEQ ID NO: 373090 - DNA, 19 bp, Homo sapiens
  siRNA target sequence for PCDHA1 (NM_018900.2,976-994).
ggaagtcctccgatgtcaa

SEQ ID NO: 373091 - DNA, 19 bp, Homo sapiens
  siRNA target sequence for PCDHA1 (NM_018900.2,977-995).
gaagtcctccgatgtcaaa

SEQ ID NO: 373092 - DNA, 19 bp, Homo sapiens
  siRNA target sequence for PCDHA1 (NM_018900.2,980-998).
gtcctccgatgtcaaatca

SEQ ID NO: 373093 - DNA, 19 bp, Homo sapiens
  siRNA target sequence for PCDHA1 (NM_018900.2,982-1000).
cctccgatgtcaaatcact

SEQ ID NO: 373094 - DNA, 19 bp, Homo sapiens
  siRNA target sequence for PCDHA1 (NM_018900.2,990-1008).
gtcaaatcactgtaaggtt

SEQ ID NO: 373095 - DNA, 19 bp, Homo sapiens
  siRNA target sequence for PCDHA1 (NM_018900.2,1045-1063).
gaactggcggtcacttcat

SEQ ID NO: 373096 - DNA, 19 bp, Homo sapiens
  siRNA target sequence for PCDHA1 (NM_018900.2,1048-1066).
ctggcggtcacttcattgt

SEQ ID NO: 373097 - DNA, 19 bp, Homo sapiens
  siRNA target sequence for PCDHA1 (NM_018900.2,1050-1068).
ggcggtcacttcattgtat

SEQ ID NO: 373098 - DNA, 19 bp, Homo sapiens
  siRNA target sequence for PCDHA1 (NM_018900.2,1051-1069).
gcggtcacttcattgtatt

SEQ ID NO: 373099 - DNA, 19 bp, Homo sapiens
  siRNA target sequence for PCDHA1 (NM_018900.2,1052-1070).
cggtcacttcattgtattt

SEQ ID NO: 373100 - DNA, 19 bp, Homo sapiens
  siRNA target sequence for PCDHA1 (NM_018900.2,2323-2341).
ggcctatctccaagtctta

SEQ ID NO: 373101 - DNA, 19 bp, Homo sapiens
  siRNA target sequence for PCDHA1 (NM_018900.2,2324-2342).
gcctatctccaagtcttaa

SEQ ID NO: 373102 - DNA, 19 bp, Homo sapiens
  siRNA target sequence for PCDHA10 (NM_018901.2,389-407).
ccaggttctccgtaacaga

SEQ ID NO: 373103 - DNA, 19 bp, Homo sapiens
  siRNA target sequence for PCDHA10 (NM_018901.2,393-411).
gttctccgtaacagaacaa

SEQ ID NO: 373104 - DNA, 19 bp, Homo sapiens
  siRNA target sequence for PCDHA10 (NM_018901.2,398-416).
ccgtaacagaacaaaagct

SEQ ID NO: 373105 - DNA, 19 bp, Homo sapiens
  siRNA target sequence for PCDHA10 (NM_018901.2,484-502).
ggagagaacgcattgctta

SEQ ID NO: 373106 - DNA, 19 bp, Homo sapiens
  siRNA target sequence for PCDHA10 (NM_018901.2,487-505).
gagaacgcattgcttactt

SEQ ID NO: 373107 - DNA, 19 bp, Homo sapiens
  siRNA target sequence for PCDHA10 (NM_018901.2,492-510).
cgcattgcttacttacaaa

SEQ ID NO: 373108 - DNA, 19 bp, Homo sapiens
  siRNA target sequence for PCDHA10 (NM_018901.2,511-529).
ctcagtccaaatgagtatt

SEQ ID NO: 373109 - DNA, 19 bp, Homo sapiens
  siRNA target sequence for PCDHA10 (NM_018901.2,523-541).
gagtattttgttcttgata

SEQ ID NO: 373110 - DNA, 19 bp, Homo sapiens
  siRNA target sequence for PCDHA10 (NM_018901.2,594-612).
gctggatcgtgaagaaaat

SEQ ID NO: 373111 - DNA, 19 bp, Homo sapiens
  siRNA target sequence for PCDHA10 (NM_018901.2,597-615).
ggatcgtgaagaaaatcct

SEQ ID NO: 373112 - DNA, 19 bp, Homo sapiens
  siRNA target sequence for PCDHA10 (NM_018901.2,607-625).
gaaaatcctcagctaaagt

SEQ ID NO: 373113 - DNA, 19 bp, Homo sapiens
  siRNA target sequence for PCDHA10 (NM_018901.2,614-632).
ctcagctaaagttgttgtt

SEQ ID NO: 373114 - DNA, 19 bp, Homo sapiens
  siRNA target sequence for PCDHA10 (NM_018901.2,646-664).
ggaggcaaacctgaattta

SEQ ID NO: 373115 - DNA, 19 bp, Homo sapiens
  siRNA target sequence for PCDHA10 (NM_018901.2,720-738).
ctttgacagaccggtttat

SEQ ID NO: 373116 - DNA, 19 bp, Homo sapiens
  siRNA target sequence for PCDHA10 (NM_018901.2,726-744).
cagaccggtttatgaagtt

SEQ ID NO: 373117 - DNA, 19 bp, Homo sapiens
  siRNA target sequence for PCDHA10 (NM_018901.2,728-746).
gaccggtttatgaagttaa

SEQ ID NO: 373118 - DNA, 19 bp, Homo sapiens
  siRNA target sequence for PCDHA10 (NM_018901.2,730-748).
ccggtttatgaagttaaga

SEQ ID NO: 373119 - DNA, 19 bp, Homo sapiens
  siRNA target sequence for PCDHA10 (NM_018901.2,763-781).
gtgaaccaaacattagtaa

SEQ ID NO: 373120 - DNA, 19 bp, Homo sapiens
  siRNA target sequence for PCDHA10 (NM_018901.2,765-783).
gaaccaaacattagtaata

SEQ ID NO: 373121 - DNA, 19 bp, Homo sapiens
  siRNA target sequence for PCDHA10 (NM_018901.2,784-802).
cggctcaacgcttctgatt

SEQ ID NO: 373122 - DNA, 19 bp, Homo sapiens
  siRNA target sequence for PCDHA10 (NM_018901.2,797-815).
ctgattcggatgaaggaat

SEQ ID NO: 373123 - DNA, 19 bp, Homo sapiens
  siRNA target sequence for PCDHA10 (NM_018901.2,811-829).
ggaataaacaaggaaatga

SEQ ID NO: 373124 - DNA, 19 bp, Homo sapiens
  siRNA target sequence for PCDHA10 (NM_018901.2,849-867).
ggtcccacccacgataaga

SEQ ID NO: 373125 - DNA, 19 bp, Homo sapiens
  siRNA target sequence for PCDHA10 (NM_018901.2,850-868).
gtcccacccacgataagaa

SEQ ID NO: 373126 - DNA, 19 bp, Homo sapiens
  siRNA target sequence for PCDHA10 (NM_018901.2,856-874).
cccacgataagaaggaaat

SEQ ID NO: 373127 - DNA, 19 bp, Homo sapiens
  siRNA target sequence for PCDHA10 (NM_018901.2,857-875).
ccacgataagaaggaaatt

SEQ ID NO: 373128 - DNA, 19 bp, Homo sapiens
  siRNA target sequence for PCDHA10 (NM_018901.2,939-957).
cacttatgaaattcatgta

SEQ ID NO: 373129 - DNA, 19 bp, Homo sapiens
  siRNA target sequence for PCDHA10 (NM_018901.2,941-959).
cttatgaaattcatgtaga

SEQ ID NO: 373130 - DNA, 19 bp, Homo sapiens
  siRNA target sequence for PCDHA10 (NM_018901.2,972-990).
gggaaacccacctatggtt

SEQ ID NO: 373131 - DNA, 19 bp, Homo sapiens
  siRNA target sequence for PCDHA10 (NM_018901.2,1001-1019).
cggtcctagtggaactact

SEQ ID NO: 373132 - DNA, 19 bp, Homo sapiens
  siRNA target sequence for PCDHA10 (NM_018901.2,1116-1134).
cgtttctgaccatgattca

SEQ ID NO: 373133 - DNA, 19 bp, Homo sapiens
  siRNA target sequence for PCDHA10 (NM_018901.2,2327-2345).
catgcccaatggtagatgt

SEQ ID NO: 373134 - DNA, 19 bp, Homo sapiens
  siRNA target sequence for PCDHA10 (NM_018901.2,2349-2367).
cggggaagatcagtctatt

SEQ ID NO: 373135 - DNA, 19 bp, Homo sapiens
  siRNA target sequence for PCDHA11 (NM_018902.3,908-926).
ggcttctcctcctcgaatt

SEQ ID NO: 373136 - DNA, 19 bp, Homo sapiens
  siRNA target sequence for PCDHA11 (NM_018902.3,1276-1294).
ctgctgattgcggaatcta

SEQ ID NO: 373137 - DNA, 19 bp, Homo sapiens
  siRNA target sequence for PCDHA11 (NM_018902.3,1362-1380).
gacctacaggctaagtaaa

SEQ ID NO: 373138 - DNA, 19 bp, Homo sapiens
  siRNA target sequence for PCDHA11 (NM_018902.3,1365-1383).
ctacaggctaagtaaaaat

SEQ ID NO: 373139 - DNA, 19 bp, Homo sapiens
  siRNA target sequence for PCDHA11 (NM_018902.3,1409-1427).
caaatggtaagcagattaa

SEQ ID NO: 373140 - DNA, 19 bp, Homo sapiens
  siRNA target sequence for PCDHA11 (NM_018902.3,1465-1483).
gagaaaactccggaactta

SEQ ID NO: 373141 - DNA, 19 bp, Homo sapiens
  siRNA target sequence for PCDHA11 (NM_018902.3,1467-1485).
gaaaactccggaacttaat

SEQ ID NO: 373142 - DNA, 19 bp, Homo sapiens
  siRNA target sequence for PCDHA11 (NM_018902.3,1529-1547).
gcaccgttcggctgttagt

SEQ ID NO: 373143 - DNA, 19 bp, Homo sapiens
  siRNA target sequence for PCDHA11 (NM_018902.3,1538-1556).
ggctgttagtccaagtctt

SEQ ID NO: 373144 - DNA, 19 bp, Homo sapiens
  siRNA target sequence for PCDHA11 (NM_018902.3,1566-1584).
cgacaatgatccagagttt

SEQ ID NO: 373145 - DNA, 19 bp, Homo sapiens
  siRNA target sequence for PCDHA11 (NM_018902.3,1602-1620).
ggtgagccttatggaaaat

SEQ ID NO: 373146 - DNA, 19 bp, Homo sapiens
  siRNA target sequence for PCDHA11 (NM_018902.3,1675-1693).
gtcaatggagaggtaacat

SEQ ID NO: 373147 - DNA, 19 bp, Homo sapiens
  siRNA target sequence for PCDHA11 (NM_018902.3,1684-1702).
gaggtaacatactccttaa

SEQ ID NO: 373148 - DNA, 19 bp, Homo sapiens
  siRNA target sequence for PCDHA11 (NM_018902.3,1687-1705).
gtaacatactccttaatgt

SEQ ID NO: 373149 - DNA, 19 bp, Homo sapiens
  siRNA target sequence for PCDHA11 (NM_018902.3,1728-1746).
cttatttacactagatcaa

SEQ ID NO: 373150 - DNA, 19 bp, Homo sapiens
  siRNA target sequence for PCDHA11 (NM_018902.3,1756-1774).
gaagtgagggtcaatggaa

SEQ ID NO: 373151 - DNA, 19 bp, Homo sapiens
  siRNA target sequence for PCDHA11 (NM_018902.3,1859-1877).
cagtctgggtggaaatctt

SEQ ID NO: 373152 - DNA, 19 bp, Homo sapiens
  siRNA target sequence for PCDHA11 (NM_018902.3,2573-2591).
cgggaggcgcagttaacaa

SEQ ID NO: 373153 - DNA, 19 bp, Homo sapiens
  siRNA target sequence for PCDHA11 (NM_018902.3,2786-2804).
gccaccgacttctagtact

SEQ ID NO: 373154 - DNA, 19 bp, Homo sapiens
  siRNA target sequence for PCDHA11 (NM_018902.3,3181-3199).
cttcctctaggtctgaata

SEQ ID NO: 373155 - DNA, 19 bp, Homo sapiens
  siRNA target sequence for PCDHA12 (NM_018903.2,605-623).
gcggatatcggcgtaaact

SEQ ID NO: 373156 - DNA, 19 bp, Homo sapiens
  siRNA target sequence for PCDHA12 (NM_018903.2,607-625).
ggatatcggcgtaaactct

SEQ ID NO: 373157 - DNA, 19 bp, Homo sapiens
  siRNA target sequence for PCDHA12 (NM_018903.2,614-632).
ggcgtaaactctcttttga

SEQ ID NO: 373158 - DNA, 19 bp, Homo sapiens
  siRNA target sequence for PCDHA12 (NM_018903.2,631-649).
gacctatgcgttaagtcta

SEQ ID NO: 373159 - DNA, 19 bp, Homo sapiens
  siRNA target sequence for PCDHA12 (NM_018903.2,633-651).
cctatgcgttaagtctaaa

SEQ ID NO: 373160 - DNA, 19 bp, Homo sapiens
  siRNA target sequence for PCDHA12 (NM_018903.2,634-652).
ctatgcgttaagtctaaat

SEQ ID NO: 373161 - DNA, 19 bp, Homo sapiens
  siRNA target sequence for PCDHA12 (NM_018903.2,638-656).
gcgttaagtctaaatgaga

SEQ ID NO: 373162 - DNA, 19 bp, Homo sapiens
  siRNA target sequence for PCDHA12 (NM_018903.2,693-711).
gtatattgcctgaattagt

SEQ ID NO: 373163 - DNA, 19 bp, Homo sapiens
  siRNA target sequence for PCDHA12 (NM_018903.2,732-750).
gagagcaaacgccaaaact

SEQ ID NO: 373164 - DNA, 19 bp, Homo sapiens
  siRNA target sequence for PCDHA12 (NM_018903.2,734-752).
gagcaaacgccaaaactca

SEQ ID NO: 373165 - DNA, 19 bp, Homo sapiens
  siRNA target sequence for PCDHA12 (NM_018903.2,736-754).
gcaaacgccaaaactcaat

SEQ ID NO: 373166 - DNA, 19 bp, Homo sapiens
  siRNA target sequence for PCDHA12 (NM_018903.2,737-755).
caaacgccaaaactcaatt

SEQ ID NO: 373167 - DNA, 19 bp, Homo sapiens
  siRNA target sequence for PCDHA12 (NM_018903.2,776-794).
ggcggtaaaccagaactaa

SEQ ID NO: 373168 - DNA, 19 bp, Homo sapiens
  siRNA target sequence for PCDHA12 (NM_018903.2,778-796).
cggtaaaccagaactaaca

SEQ ID NO: 373169 - DNA, 19 bp, Homo sapiens
  siRNA target sequence for PCDHA12 (NM_018903.2,838-856).
caatggtccggcgtttgat

SEQ ID NO: 373170 - DNA, 19 bp, Homo sapiens
  siRNA target sequence for PCDHA12 (NM_018903.2,908-926).
gtgatccaactaaatgctt

SEQ ID NO: 373171 - DNA, 19 bp, Homo sapiens
  siRNA target sequence for PCDHA12 (NM_018903.2,960-978).
cctatgggatcaaaatgat

SEQ ID NO: 373172 - DNA, 19 bp, Homo sapiens
  siRNA target sequence for PCDHA12 (NM_018903.2,961-979).
ctatgggatcaaaatgatt

SEQ ID NO: 373173 - DNA, 19 bp, Homo sapiens
  siRNA target sequence for PCDHA12 (NM_018903.2,1082-1100).
caggttaacgccattgata

SEQ ID NO: 373174 - DNA, 19 bp, Homo sapiens
  siRNA target sequence for PCDHA12 (NM_018903.2,1084-1102).
ggttaacgccattgataaa

SEQ ID NO: 373175 - DNA, 19 bp, Homo sapiens
  siRNA target sequence for PCDHA12 (NM_018903.2,1169-1187).
cctgaagtaatggttactt

SEQ ID NO: 373176 - DNA, 19 bp, Homo sapiens
  siRNA target sequence for PCDHA12 (NM_018903.2,2202-2220).
ctctggtggatattaacgt

SEQ ID NO: 373177 - DNA, 19 bp, Homo sapiens
  siRNA target sequence for PCDHA12 (NM_018903.2,2456-2474).
cagctgtctcgagaagatt

SEQ ID NO: 373178 - DNA, 19 bp, Homo sapiens
  siRNA target sequence for PCDHA12 (NM_018903.2,2458-2476).
gctgtctcgagaagattgt

SEQ ID NO: 373179 - DNA, 19 bp, Homo sapiens
  siRNA target sequence for PCDHA12 (NM_018903.2,2459-2477).
ctgtctcgagaagattgtt

SEQ ID NO: 373180 - DNA, 19 bp, Homo sapiens
  siRNA target sequence for PCDHA12 (NM_018903.2,2461-2479).
gtctcgagaagattgttta

SEQ ID NO: 373181 - DNA, 19 bp, Homo sapiens
  siRNA target sequence for PCDHA13 (NM_018904.2,512-530).
gactggatcccaacgatta

SEQ ID NO: 373182 - DNA, 19 bp, Homo sapiens
  siRNA target sequence for PCDHA13 (NM_018904.2,514-532).
ctggatcccaacgattatt

SEQ ID NO: 373183 - DNA, 19 bp, Homo sapiens
  siRNA target sequence for PCDHA13 (NM_018904.2,517-535).
gatcccaacgattatttca

SEQ ID NO: 373184 - DNA, 19 bp, Homo sapiens
  siRNA target sequence for PCDHA13 (NM_018904.2,552-570).
cagtcttgagcaaatgtct

SEQ ID NO: 373185 - DNA, 19 bp, Homo sapiens
  siRNA target sequence for PCDHA13 (NM_018904.2,610-628).
gaaattcaggaacatagtt

SEQ ID NO: 373186 - DNA, 19 bp, Homo sapiens
  siRNA target sequence for PCDHA13 (NM_018904.2,730-748).
caatccgtttataaagtga

SEQ ID NO: 373187 - DNA, 19 bp, Homo sapiens
  siRNA target sequence for PCDHA13 (NM_018904.2,753-771).
gttagagaacgccttcaat

SEQ ID NO: 373188 - DNA, 19 bp, Homo sapiens
  siRNA target sequence for PCDHA13 (NM_018904.2,757-775).
gagaacgccttcaatggaa

SEQ ID NO: 373189 - DNA, 19 bp, Homo sapiens
  siRNA target sequence for PCDHA13 (NM_018904.2,762-780).
cgccttcaatggaacatta

SEQ ID NO: 373190 - DNA, 19 bp, Homo sapiens
  siRNA target sequence for PCDHA13 (NM_018904.2,823-841).
ggagatatagtttactcat

SEQ ID NO: 373191 - DNA, 19 bp, Homo sapiens
  siRNA target sequence for PCDHA13 (NM_018904.2,858-876).
gcctgcagtggtatatgca

SEQ ID NO: 373192 - DNA, 19 bp, Homo sapiens
  siRNA target sequence for PCDHA13 (NM_018904.2,865-883).
gtggtatatgcatttacca

SEQ ID NO: 373193 - DNA, 19 bp, Homo sapiens
  siRNA target sequence for PCDHA13 (NM_018904.2,956-974).
ccgtggaggcagttgacaa

SEQ ID NO: 373194 - DNA, 19 bp, Homo sapiens
  siRNA target sequence for PCDHA13 (NM_018904.2,1005-1023).
ccttttggtggaagtacta

SEQ ID NO: 373195 - DNA, 19 bp, Homo sapiens
  siRNA target sequence for PCDHA13 (NM_018904.2,1011-1029).
ggtggaagtactagatgta

SEQ ID NO: 373196 - DNA, 19 bp, Homo sapiens
  siRNA target sequence for PCDHA13 (NM_018904.2,1012-1030).
gtggaagtactagatgtaa

SEQ ID NO: 373197 - DNA, 19 bp, Homo sapiens
  siRNA target sequence for PCDHA13 (NM_018904.2,1088-1106).
ctcagcctagcgccattat

SEQ ID NO: 373198 - DNA, 19 bp, Homo sapiens
  siRNA target sequence for PCDHA13 (NM_018904.2,2086-2104).
gtcaatgtttacttgatca

SEQ ID NO: 373199 - DNA, 19 bp, Homo sapiens
  siRNA target sequence for PCDHA3 (NM_018906.2,6-24).
gttctcctggcgagaagat

SEQ ID NO: 373200 - DNA, 19 bp, Homo sapiens
  siRNA target sequence for PCDHA3 (NM_018906.2,384-402).
caacgcgccagtttttcca

SEQ ID NO: 373201 - DNA, 19 bp, Homo sapiens
  siRNA target sequence for PCDHA3 (NM_018906.2,401-419).
caatggctgtaaagaatct

SEQ ID NO: 373202 - DNA, 19 bp, Homo sapiens
  siRNA target sequence for PCDHA3 (NM_018906.2,487-505).
ggaacaaattcgttgttga

SEQ ID NO: 373203 - DNA, 19 bp, Homo sapiens
  siRNA target sequence for PCDHA3 (NM_018906.2,491-509).
caaattcgttgttgactta

SEQ ID NO: 373204 - DNA, 19 bp, Homo sapiens
  siRNA target sequence for PCDHA3 (NM_018906.2,512-530).
gtcttgattccactgaata

SEQ ID NO: 373205 - DNA, 19 bp, Homo sapiens
  siRNA target sequence for PCDHA3 (NM_018906.2,536-554).
ccttggacgttaaaagaaa

SEQ ID NO: 373206 - DNA, 19 bp, Homo sapiens
  siRNA target sequence for PCDHA3 (NM_018906.2,537-555).
cttggacgttaaaagaaat

SEQ ID NO: 373207 - DNA, 19 bp, Homo sapiens
  siRNA target sequence for PCDHA3 (NM_018906.2,540-558).
ggacgttaaaagaaatgat

SEQ ID NO: 373208 - DNA, 19 bp, Homo sapiens
  siRNA target sequence for PCDHA3 (NM_018906.2,572-590).
cccttggactcgtgttgaa

SEQ ID NO: 373209 - DNA, 19 bp, Homo sapiens
  siRNA target sequence for PCDHA3 (NM_018906.2,573-591).
ccttggactcgtgttgaaa

SEQ ID NO: 373210 - DNA, 19 bp, Homo sapiens
  siRNA target sequence for PCDHA3 (NM_018906.2,574-592).
cttggactcgtgttgaaaa

SEQ ID NO: 373211 - DNA, 19 bp, Homo sapiens
  siRNA target sequence for PCDHA3 (NM_018906.2,577-595).
ggactcgtgttgaaaaaaa

SEQ ID NO: 373212 - DNA, 19 bp, Homo sapiens
  siRNA target sequence for PCDHA3 (NM_018906.2,607-625).
gaggacactcctaagcatt

SEQ ID NO: 373213 - DNA, 19 bp, Homo sapiens
  siRNA target sequence for PCDHA3 (NM_018906.2,609-627).
ggacactcctaagcattat

SEQ ID NO: 373214 - DNA, 19 bp, Homo sapiens
  siRNA target sequence for PCDHA3 (NM_018906.2,666-684).
cactggcacgactcaacta

SEQ ID NO: 373215 - DNA, 19 bp, Homo sapiens
  siRNA target sequence for PCDHA3 (NM_018906.2,668-686).
ctggcacgactcaactaaa

SEQ ID NO: 373216 - DNA, 19 bp, Homo sapiens
  siRNA target sequence for PCDHA3 (NM_018906.2,671-689).
gcacgactcaactaaagat

SEQ ID NO: 373217 - DNA, 19 bp, Homo sapiens
  siRNA target sequence for PCDHA3 (NM_018906.2,723-741).
gtttgagaggacgatctat

SEQ ID NO: 373218 - DNA, 19 bp, Homo sapiens
  siRNA target sequence for PCDHA3 (NM_018906.2,734-752).
cgatctataaagtcagatt

SEQ ID NO: 373219 - DNA, 19 bp, Homo sapiens
  siRNA target sequence for PCDHA3 (NM_018906.2,747-765).
cagattactcgaaaatgca

SEQ ID NO: 373220 - DNA, 19 bp, Homo sapiens
  siRNA target sequence for PCDHA3 (NM_018906.2,756-774).
cgaaaatgcaccaaatggt

SEQ ID NO: 373221 - DNA, 19 bp, Homo sapiens
  siRNA target sequence for PCDHA3 (NM_018906.2,826-844).
gatatcgcgtattctttca

SEQ ID NO: 373222 - DNA, 19 bp, Homo sapiens
  siRNA target sequence for PCDHA3 (NM_018906.2,848-866).
cggacatgtcagcagatat

SEQ ID NO: 373223 - DNA, 19 bp, Homo sapiens
  siRNA target sequence for PCDHA3 (NM_018906.2,889-907).
ccagtcaatggacaaatca

SEQ ID NO: 373224 - DNA, 19 bp, Homo sapiens
  siRNA target sequence for PCDHA3 (NM_018906.2,906-924).
cagtgtaaagggtaacata

SEQ ID NO: 373225 - DNA, 19 bp, Homo sapiens
  siRNA target sequence for PCDHA3 (NM_018906.2,1001-1019).
gcacagttctactcgaaat

SEQ ID NO: 373226 - DNA, 19 bp, Homo sapiens
  siRNA target sequence for PCDHA3 (NM_018906.2,1002-1020).
cacagttctactcgaaatt

SEQ ID NO: 373227 - DNA, 19 bp, Homo sapiens
  siRNA target sequence for PCDHA3 (NM_018906.2,1004-1022).
cagttctactcgaaattgt

SEQ ID NO: 373228 - DNA, 19 bp, Homo sapiens
  siRNA target sequence for PCDHA3 (NM_018906.2,1047-1065).
gttagttattcaatcacta

SEQ ID NO: 373229 - DNA, 19 bp, Homo sapiens
  siRNA target sequence for PCDHA3 (NM_018906.2,1051-1069).
gttattcaatcactatctt

SEQ ID NO: 373230 - DNA, 19 bp, Homo sapiens
  siRNA target sequence for PCDHA3 (NM_018906.2,1128-1146).
ccgcgactcaggagtcaat

SEQ ID NO: 373231 - DNA, 19 bp, Homo sapiens
  siRNA target sequence for PCDHA3 (NM_018906.2,1960-1978).
cacggtgaaccctcattga

SEQ ID NO: 373232 - DNA, 19 bp, Homo sapiens
  siRNA target sequence for PCDHA3 (NM_018906.2,2325-2343).
ccttcctccttgtccaatt

SEQ ID NO: 373233 - DNA, 19 bp, Homo sapiens
  siRNA target sequence for PCDHA4 (NM_018907.2,680-698).
gcttatattacggaaatct

SEQ ID NO: 373234 - DNA, 19 bp, Homo sapiens
  siRNA target sequence for PCDHA4 (NM_018907.2,681-699).
cttatattacggaaatctt

SEQ ID NO: 373235 - DNA, 19 bp, Homo sapiens
  siRNA target sequence for PCDHA4 (NM_018907.2,708-726).
gaagaagctccggagattt

SEQ ID NO: 373236 - DNA, 19 bp, Homo sapiens
  siRNA target sequence for PCDHA4 (NM_018907.2,711-729).
gaagctccggagatttttt

SEQ ID NO: 373237 - DNA, 19 bp, Homo sapiens
  siRNA target sequence for PCDHA4 (NM_018907.2,867-885).
cctaatggaacattggtaa

SEQ ID NO: 373238 - DNA, 19 bp, Homo sapiens
  siRNA target sequence for PCDHA4 (NM_018907.2,868-886).
ctaatggaacattggtaat

SEQ ID NO: 373239 - DNA, 19 bp, Homo sapiens
  siRNA target sequence for PCDHA4 (NM_018907.2,874-892).
gaacattggtaattaaact

SEQ ID NO: 373240 - DNA, 19 bp, Homo sapiens
  siRNA target sequence for PCDHA4 (NM_018907.2,920-938).
gaatggggacattgtttat

SEQ ID NO: 373241 - DNA, 19 bp, Homo sapiens
  siRNA target sequence for PCDHA4 (NM_018907.2,951-969).
gatatttcgccaaatgtga

SEQ ID NO: 373242 - DNA, 19 bp, Homo sapiens
  siRNA target sequence for PCDHA4 (NM_018907.2,958-976).
cgccaaatgtgaaatccaa

SEQ ID NO: 373243 - DNA, 19 bp, Homo sapiens
  siRNA target sequence for PCDHA4 (NM_018907.2,1011-1029).
gtaaagggatatattgact

SEQ ID NO: 373244 - DNA, 19 bp, Homo sapiens
  siRNA target sequence for PCDHA4 (NM_018907.2,1093-1111).
ctggccattgtagagttat

SEQ ID NO: 373245 - DNA, 19 bp, Homo sapiens
  siRNA target sequence for PCDHA4 (NM_018907.2,1096-1114).
gccattgtagagttattgt

SEQ ID NO: 373246 - DNA, 19 bp, Homo sapiens
  siRNA target sequence for PCDHA4 (NM_018907.2,1151-1169).
ggaattcaagtctttatca

SEQ ID NO: 373247 - DNA, 19 bp, Homo sapiens
  siRNA target sequence for PCDHA4 (NM_018907.2,1160-1178).
gtctttatcacttccaatt

SEQ ID NO: 373248 - DNA, 19 bp, Homo sapiens
  siRNA target sequence for PCDHA4 (NM_018907.2,1219-1237).
gcgtgtccgacaaagacat

SEQ ID NO: 373249 - DNA, 19 bp, Homo sapiens
  siRNA target sequence for PCDHA6 (NM_018909.2,45-63).
ggatagattgggaaagcaa

SEQ ID NO: 373250 - DNA, 19 bp, Homo sapiens
  siRNA target sequence for PCDHA6 (NM_018909.2,46-64).
gatagattgggaaagcaat

SEQ ID NO: 373251 - DNA, 19 bp, Homo sapiens
  siRNA target sequence for PCDHA6 (NM_018909.2,426-444).
cccggtagaggaacaaaga

SEQ ID NO: 373252 - DNA, 19 bp, Homo sapiens
  siRNA target sequence for PCDHA6 (NM_018909.2,445-463).
gtgctgatttacgaatcta

SEQ ID NO: 373253 - DNA, 19 bp, Homo sapiens
  siRNA target sequence for PCDHA6 (NM_018909.2,514-532).
ggctcaaattccatcttaa

SEQ ID NO: 373254 - DNA, 19 bp, Homo sapiens
  siRNA target sequence for PCDHA6 (NM_018909.2,541-559).
ctcagttctagcgaatact

SEQ ID NO: 373255 - DNA, 19 bp, Homo sapiens
  siRNA target sequence for PCDHA6 (NM_018909.2,877-895).
cttgttgcagccatggtta

SEQ ID NO: 373256 - DNA, 19 bp, Homo sapiens
  siRNA target sequence for PCDHA6 (NM_018909.2,2318-2336).
cacccaagatggatctcat

SEQ ID NO: 373257 - DNA, 19 bp, Homo sapiens
  siRNA target sequence for PCDHA6 (NM_018909.2,2353-2371).
ctttcaccttgtcctatta

SEQ ID NO: 373258 - DNA, 19 bp, Homo sapiens
  siRNA target sequence for PCDHA7 (NM_018910.2,45-63).
gctgtttattataattcta

SEQ ID NO: 373259 - DNA, 19 bp, Homo sapiens
  siRNA target sequence for PCDHA7 (NM_018910.2,1093-1111).
ccaggtaccgtcatcacat

SEQ ID NO: 373260 - DNA, 19 bp, Homo sapiens
  siRNA target sequence for PCDHA7 (NM_018910.2,1094-1112).
caggtaccgtcatcacatt

SEQ ID NO: 373261 - DNA, 19 bp, Homo sapiens
  siRNA target sequence for PCDHA7 (NM_018910.2,1096-1114).
ggtaccgtcatcacattga

SEQ ID NO: 373262 - DNA, 19 bp, Homo sapiens
  siRNA target sequence for PCDHA7 (NM_018910.2,1097-1115).
gtaccgtcatcacattgat

SEQ ID NO: 373263 - DNA, 19 bp, Homo sapiens
  siRNA target sequence for PCDHA7 (NM_018910.2,1109-1127).
cattgattagcgtgtttga

SEQ ID NO: 373264 - DNA, 19 bp, Homo sapiens
  siRNA target sequence for PCDHA7 (NM_018910.2,1118-1136).
gcgtgtttgaccgagattt

SEQ ID NO: 373265 - DNA, 19 bp, Homo sapiens
  siRNA target sequence for PCDHA7 (NM_018910.2,1119-1137).
cgtgtttgaccgagatttt

SEQ ID NO: 373266 - DNA, 19 bp, Homo sapiens
  siRNA target sequence for PCDHA7 (NM_018910.2,2187-2205).
gggcgcatgtagtttggta

SEQ ID NO: 373267 - DNA, 19 bp, Homo sapiens
  siRNA target sequence for PCDHA7 (NM_018910.2,2188-2206).
ggcgcatgtagtttggtaa

SEQ ID NO: 373268 - DNA, 19 bp, Homo sapiens
  siRNA target sequence for PCDHA7 (NM_018910.2,2189-2207).
gcgcatgtagtttggtaaa

SEQ ID NO: 373269 - DNA, 19 bp, Homo sapiens
  siRNA target sequence for PCDHA8 (NM_018911.2,27-45).
gggatcctggcgactacta

SEQ ID NO: 373270 - DNA, 19 bp, Homo sapiens
  siRNA target sequence for PCDHA8 (NM_018911.2,29-47).
gatcctggcgactactact

SEQ ID NO: 373271 - DNA, 19 bp, Homo sapiens
  siRNA target sequence for PCDHA8 (NM_018911.2,32-50).
cctggcgactactactctt

SEQ ID NO: 373272 - DNA, 19 bp, Homo sapiens
  siRNA target sequence for PCDHA8 (NM_018911.2,392-410).
cagtgttccgggtaaaaga

SEQ ID NO: 373273 - DNA, 19 bp, Homo sapiens
  siRNA target sequence for PCDHA8 (NM_018911.2,487-505).
ggagctaactccgtgttaa

SEQ ID NO: 373274 - DNA, 19 bp, Homo sapiens
  siRNA target sequence for PCDHA8 (NM_018911.2,490-508).
gctaactccgtgttaacct

SEQ ID NO: 373275 - DNA, 19 bp, Homo sapiens
  siRNA target sequence for PCDHA8 (NM_018911.2,491-509).
ctaactccgtgttaaccta

SEQ ID NO: 373276 - DNA, 19 bp, Homo sapiens
  siRNA target sequence for PCDHA8 (NM_018911.2,510-528).
caggcttagctctcatgat

SEQ ID NO: 373277 - DNA, 19 bp, Homo sapiens
  siRNA target sequence for PCDHA8 (NM_018911.2,512-530).
ggcttagctctcatgatta

SEQ ID NO: 373278 - DNA, 19 bp, Homo sapiens
  siRNA target sequence for PCDHA8 (NM_018911.2,518-536).
gctctcatgattacttcat

SEQ ID NO: 373279 - DNA, 19 bp, Homo sapiens
  siRNA target sequence for PCDHA8 (NM_018911.2,538-556).
ctagatgtgaattcaaaga

SEQ ID NO: 373280 - DNA, 19 bp, Homo sapiens
  siRNA target sequence for PCDHA8 (NM_018911.2,573-591).
ggttgagctcgtattaaga

SEQ ID NO: 373281 - DNA, 19 bp, Homo sapiens
  siRNA target sequence for PCDHA8 (NM_018911.2,574-592).
gttgagctcgtattaagaa

SEQ ID NO: 373282 - DNA, 19 bp, Homo sapiens
  siRNA target sequence for PCDHA8 (NM_018911.2,580-598).
ctcgtattaagaaaatcct

SEQ ID NO: 373283 - DNA, 19 bp, Homo sapiens
  siRNA target sequence for PCDHA8 (NM_018911.2,849-867).
ccttgttgaaactatggtt

SEQ ID NO: 373284 - DNA, 19 bp, Homo sapiens
  siRNA target sequence for PCDHA8 (NM_018911.2,2243-2261).
ggtcatactcgcaacaaca

SEQ ID NO: 373285 - DNA, 19 bp, Homo sapiens
  siRNA target sequence for PCDHGA1 (NM_018912.2,220-238).
cttttcgctctgaatccta

SEQ ID NO: 373286 - DNA, 19 bp, Homo sapiens
  siRNA target sequence for PCDHGA1 (NM_018912.2,342-360).
gaagctttttcctgttgaa

SEQ ID NO: 373287 - DNA, 19 bp, Homo sapiens
  siRNA target sequence for PCDHGA1 (NM_018912.2,389-407).
ctccccaattccagttaga

SEQ ID NO: 373288 - DNA, 19 bp, Homo sapiens
  siRNA target sequence for PCDHGA1 (NM_018912.2,443-461).
caggtaccagagtctcatt

SEQ ID NO: 373289 - DNA, 19 bp, Homo sapiens
  siRNA target sequence for PCDHGA1 (NM_018912.2,586-604).
ctgcagagtcccttagaca

SEQ ID NO: 373290 - DNA, 19 bp, Homo sapiens
  siRNA target sequence for PCDHGA1 (NM_018912.2,671-689).
ggaccctcagaatttacat

SEQ ID NO: 373291 - DNA, 19 bp, Homo sapiens
  siRNA target sequence for PCDHGA1 (NM_018912.2,672-690).
gaccctcagaatttacatt

SEQ ID NO: 373292 - DNA, 19 bp, Homo sapiens
  siRNA target sequence for PCDHGA1 (NM_018912.2,728-746).
ctcaggcacaataccatat

SEQ ID NO: 373293 - DNA, 19 bp, Homo sapiens
  siRNA target sequence for PCDHGA1 (NM_018912.2,818-836).
ccaatggggaagtaacgta

SEQ ID NO: 373294 - DNA, 19 bp, Homo sapiens
  siRNA target sequence for PCDHGA1 (NM_018912.2,829-847).
gtaacgtactcctttcaca

SEQ ID NO: 373295 - DNA, 19 bp, Homo sapiens
  siRNA target sequence for PCDHGA1 (NM_018912.2,855-873).
ccacagagtggcccaaata

SEQ ID NO: 373296 - DNA, 19 bp, Homo sapiens
  siRNA target sequence for PCDHGA1 (NM_018912.2,862-880).
gtggcccaaatatttcgtt

SEQ ID NO: 373297 - DNA, 19 bp, Homo sapiens
  siRNA target sequence for PCDHGA1 (NM_018912.2,927-945).
cgaagaatacaaaatgtat

SEQ ID NO: 373298 - DNA, 19 bp, Homo sapiens
  siRNA target sequence for PCDHGA1 (NM_018912.2,976-994).
gggctcatggctaaagtta

SEQ ID NO: 373299 - DNA, 19 bp, Homo sapiens
  siRNA target sequence for PCDHGA1 (NM_018912.2,977-995).
ggctcatggctaaagttaa

SEQ ID NO: 373300 - DNA, 19 bp, Homo sapiens
  siRNA target sequence for PCDHGA1 (NM_018912.2,981-999).
catggctaaagttaaggta

SEQ ID NO: 373301 - DNA, 19 bp, Homo sapiens
  siRNA target sequence for PCDHGA1 (NM_018912.2,1088-1106).
ggaccataattgctcttat

SEQ ID NO: 373302 - DNA, 19 bp, Homo sapiens
  siRNA target sequence for PCDHGA1 (NM_018912.2,1092-1110).
cataattgctcttatcagt

SEQ ID NO: 373303 - DNA, 19 bp, Homo sapiens
  siRNA target sequence for PCDHGA1 (NM_018912.2,1139-1157).
gctacaccacatgtttcat

SEQ ID NO: 373304 - DNA, 19 bp, Homo sapiens
  siRNA target sequence for PCDHGA1 (NM_018912.2,1207-1225).
cgtttagtgactgaaagaa

SEQ ID NO: 373305 - DNA, 19 bp, Homo sapiens
  siRNA target sequence for PCDHGA1 (NM_018912.2,1228-1246).
ctggacagagaacttatct

SEQ ID NO: 373306 - DNA, 19 bp, Homo sapiens
  siRNA target sequence for PCDHGA1 (NM_018912.2,1240-1258).
cttatctctgggtacaaca

SEQ ID NO: 373307 - DNA, 19 bp, Homo sapiens
  siRNA target sequence for PCDHGA1 (NM_018912.2,1282-1300).
ggaactccagctctatcta

SEQ ID NO: 373308 - DNA, 19 bp, Homo sapiens
  siRNA target sequence for PCDHGA1 (NM_018912.2,1307-1325).
ctcacatttcactactagt

SEQ ID NO: 373309 - DNA, 19 bp, Homo sapiens
  siRNA target sequence for PCDHGA1 (NM_018912.2,1469-1487).
ccctaatagaggacactat

SEQ ID NO: 373310 - DNA, 19 bp, Homo sapiens
  siRNA target sequence for PCDHGA1 (NM_018912.2,2378-2396).
caccccagtctttacttga

SEQ ID NO: 373311 - DNA, 19 bp, Homo sapiens
  siRNA target sequence for PCDHGA10 (NM_018913.2,64-82).
cttttcttcgggattccat

SEQ ID NO: 373312 - DNA, 19 bp, Homo sapiens
  siRNA target sequence for PCDHGA10 (NM_018913.2,97-115).
cggcagatctcctactcaa

SEQ ID NO: 373313 - DNA, 19 bp, Homo sapiens
  siRNA target sequence for PCDHGA10 (NM_018913.2,99-117).
gcagatctcctactcaatt

SEQ ID NO: 373314 - DNA, 19 bp, Homo sapiens
  siRNA target sequence for PCDHGA10 (NM_018913.2,566-584).
gtgccaatggcgtcaagta

SEQ ID NO: 373315 - DNA, 19 bp, Homo sapiens
  siRNA target sequence for PCDHGA10 (NM_018913.2,702-720).
gactgtcttcgatgcaaat

SEQ ID NO: 373316 - DNA, 19 bp, Homo sapiens
  siRNA target sequence for PCDHGA10 (NM_018913.2,865-883).
cctgacacgcaattgttga

SEQ ID NO: 373317 - DNA, 19 bp, Homo sapiens
  siRNA target sequence for PCDHGA10 (NM_018913.2,866-884).
ctgacacgcaattgttgaa

SEQ ID NO: 373318 - DNA, 19 bp, Homo sapiens
  siRNA target sequence for PCDHGA10 (NM_018913.2,868-886).
gacacgcaattgttgaagt

SEQ ID NO: 373319 - DNA, 19 bp, Homo sapiens
  siRNA target sequence for PCDHGA10 (NM_018913.2,888-906).
ccaactaaacaaatatact

SEQ ID NO: 373320 - DNA, 19 bp, Homo sapiens
  siRNA target sequence for PCDHGA10 (NM_018913.2,947-965).
ccggtttctatgaaataga

SEQ ID NO: 373321 - DNA, 19 bp, Homo sapiens
  siRNA target sequence for PCDHGA10 (NM_018913.2,948-966).
cggtttctatgaaatagaa

SEQ ID NO: 373322 - DNA, 19 bp, Homo sapiens
  siRNA target sequence for PCDHGA10 (NM_018913.2,998-1016).
caactgcaaaagtgttgat

SEQ ID NO: 373323 - DNA, 19 bp, Homo sapiens
  siRNA target sequence for PCDHGA10 (NM_018913.2,1051-1069).
ctgaccatcacgtctctat

SEQ ID NO: 373324 - DNA, 19 bp, Homo sapiens
  siRNA target sequence for PCDHGA10 (NM_018913.2,1053-1071).
gaccatcacgtctctattt

SEQ ID NO: 373325 - DNA, 19 bp, Homo sapiens
  siRNA target sequence for PCDHGA10 (NM_018913.2,1255-1273).
gtatcctcttacaatatca

SEQ ID NO: 373326 - DNA, 19 bp, Homo sapiens
  siRNA target sequence for PCDHGA10 (NM_018913.2,1293-1311).
gggaagtcctcctctatca

SEQ ID NO: 373327 - DNA, 19 bp, Homo sapiens
  siRNA target sequence for PCDHGA10 (NM_018913.2,1294-1312).
ggaagtcctcctctatcaa

SEQ ID NO: 373328 - DNA, 19 bp, Homo sapiens
  siRNA target sequence for PCDHGA10 (NM_018913.2,1310-1328).
caacggaagctcactttat

SEQ ID NO: 373329 - DNA, 19 bp, Homo sapiens
  siRNA target sequence for PCDHGA10 (NM_018913.2,1313-1331).
cggaagctcactttatgct

SEQ ID NO: 373330 - DNA, 19 bp, Homo sapiens
  siRNA target sequence for PCDHGA10 (NM_018913.2,1314-1332).
ggaagctcactttatgcta

SEQ ID NO: 373331 - DNA, 19 bp, Homo sapiens
  siRNA target sequence for PCDHGA10 (NM_018913.2,1319-1337).
ctcactttatgctacaagt

SEQ ID NO: 373332 - DNA, 19 bp, Homo sapiens
  siRNA target sequence for PCDHGA10 (NM_018913.2,1372-1390).
caagtctcctactttacct

SEQ ID NO: 373333 - DNA, 19 bp, Homo sapiens
  siRNA target sequence for PCDHGA10 (NM_018913.2,1375-1393).
gtctcctactttacctata

SEQ ID NO: 373334 - DNA, 19 bp, Homo sapiens
  siRNA target sequence for PCDHGA10 (NM_018913.2,1459-1477).
gagaatgcccagattattt

SEQ ID NO: 373335 - DNA, 19 bp, Homo sapiens
  siRNA target sequence for PCDHGA10 (NM_018913.2,1510-1528).
cctctgtcctcatacatat

SEQ ID NO: 373336 - DNA, 19 bp, Homo sapiens
  siRNA target sequence for PCDHGA10 (NM_018913.2,1513-1531).
ctgtcctcatacatatcca

SEQ ID NO: 373337 - DNA, 19 bp, Homo sapiens
  siRNA target sequence for PCDHGA10 (NM_018913.2,2387-2405).
ctttgttagatgattcgaa

SEQ ID NO: 373338 - DNA, 19 bp, Homo sapiens
  siRNA target sequence for PCDHGA10 (NM_018913.2,2391-2409).
gttagatgattcgaagttt

SEQ ID NO: 373339 - DNA, 19 bp, Homo sapiens
  siRNA target sequence for PCDHGA11 (NM_018914.2,343-361).
gccaggcagatccgatatt

SEQ ID NO: 373340 - DNA, 19 bp, Homo sapiens
  siRNA target sequence for PCDHGA11 (NM_018914.2,591-609).
ggaagacaccttgaagatt

SEQ ID NO: 373341 - DNA, 19 bp, Homo sapiens
  siRNA target sequence for PCDHGA11 (NM_018914.2,666-684).
ggacgaagtggagataaaa

SEQ ID NO: 373342 - DNA, 19 bp, Homo sapiens
  siRNA target sequence for PCDHGA11 (NM_018914.2,687-705).
cagtgagcacgcaattcct

SEQ ID NO: 373343 - DNA, 19 bp, Homo sapiens
  siRNA target sequence for PCDHGA11 (NM_018914.2,710-728).
cgcgatttgctcttcctaa

SEQ ID NO: 373344 - DNA, 19 bp, Homo sapiens
  siRNA target sequence for PCDHGA11 (NM_018914.2,711-729).
gcgatttgctcttcctaat

SEQ ID NO: 373345 - DNA, 19 bp, Homo sapiens
  siRNA target sequence for PCDHGA11 (NM_018914.2,951-969).
ggtggtcctcgatgtaaat

SEQ ID NO: 373346 - DNA, 19 bp, Homo sapiens
  siRNA target sequence for PCDHGA11 (NM_018914.2,954-972).
ggtcctcgatgtaaatgat

SEQ ID NO: 373347 - DNA, 19 bp, Homo sapiens
  siRNA target sequence for PCDHGA11 (NM_018914.2,1037-1055).
ctcgggtgctgatggttaa

SEQ ID NO: 373348 - DNA, 19 bp, Homo sapiens
  siRNA target sequence for PCDHGA11 (NM_018914.2,1042-1060).
gtgctgatggttaatgcaa

SEQ ID NO: 373349 - DNA, 19 bp, Homo sapiens
  siRNA target sequence for PCDHGA11 (NM_018914.2,1076-1094).
gaatcaacggggaagtaat

SEQ ID NO: 373350 - DNA, 19 bp, Homo sapiens
  siRNA target sequence for PCDHGA11 (NM_018914.2,1080-1098).
caacggggaagtaatgtat

SEQ ID NO: 373351 - DNA, 19 bp, Homo sapiens
  siRNA target sequence for PCDHGA11 (NM_018914.2,1228-1246).
gatggtggaggtctcttta

SEQ ID NO: 373352 - DNA, 19 bp, Homo sapiens
  siRNA target sequence for PCDHGA11 (NM_018914.2,1285-1303).
gataacgctccagaaataa

SEQ ID NO: 373353 - DNA, 19 bp, Homo sapiens
  siRNA target sequence for PCDHGA11 (NM_018914.2,1308-1326).
cacctcttctattaattca

SEQ ID NO: 373354 - DNA, 19 bp, Homo sapiens
  siRNA target sequence for PCDHGA11 (NM_018914.2,1310-1328).
cctcttctattaattcaat

SEQ ID NO: 373355 - DNA, 19 bp, Homo sapiens
  siRNA target sequence for PCDHGA11 (NM_018914.2,1311-1329).
ctcttctattaattcaatt

SEQ ID NO: 373356 - DNA, 19 bp, Homo sapiens
  siRNA target sequence for PCDHGA11 (NM_018914.2,1421-1439).
ctaaccacctgccttttaa

SEQ ID NO: 373357 - DNA, 19 bp, Homo sapiens
  siRNA target sequence for PCDHGA11 (NM_018914.2,1500-1518).
gttggtccagagctacaat

SEQ ID NO: 373358 - DNA, 19 bp, Homo sapiens
  siRNA target sequence for PCDHGA11 (NM_018914.2,1507-1525).
cagagctacaatataacgt

SEQ ID NO: 373359 - DNA, 19 bp, Homo sapiens
  siRNA target sequence for PCDHGA11 (NM_018914.2,1568-1586).
ctcatgtctggctgaatgt

SEQ ID NO: 373360 - DNA, 19 bp, Homo sapiens
  siRNA target sequence for PCDHGA11 (NM_018914.2,1599-1617).
cgataaccctcccgttttt

SEQ ID NO: 373361 - DNA, 19 bp, Homo sapiens
  siRNA target sequence for PCDHGA11 (NM_018914.2,1788-1806).
caacactggtgttctctat

SEQ ID NO: 373362 - DNA, 19 bp, Homo sapiens
  siRNA target sequence for PCDHGA11 (NM_018914.2,1798-1816).
gttctctatgccctacaat

SEQ ID NO: 373363 - DNA, 19 bp, Homo sapiens
  siRNA target sequence for PCDHGA11 (NM_018914.2,2461-2479).
ggtatgcccacgtcacatt

SEQ ID NO: 373364 - DNA, 19 bp, Homo sapiens
  siRNA target sequence for PCDHGA11 (NM_018914.2,2462-2480).
gtatgcccacgtcacattt

SEQ ID NO: 373365 - DNA, 19 bp, Homo sapiens
  siRNA target sequence for PCDHGA11 (NM_018914.2,2672-2690).
gtgacccgacaagtaatca

SEQ ID NO: 373366 - DNA, 19 bp, Homo sapiens
  siRNA target sequence for PCDHGA2 (NM_018915.2,481-499).
gcgcaccctgtctgttgaa

SEQ ID NO: 373367 - DNA, 19 bp, Homo sapiens
  siRNA target sequence for PCDHGA2 (NM_018915.2,484-502).
caccctgtctgttgaattt

SEQ ID NO: 373368 - DNA, 19 bp, Homo sapiens
  siRNA target sequence for PCDHGA2 (NM_018915.2,486-504).
ccctgtctgttgaatttta

SEQ ID NO: 373369 - DNA, 19 bp, Homo sapiens
  siRNA target sequence for PCDHGA2 (NM_018915.2,512-530).
gctggaggataaattgact

SEQ ID NO: 373370 - DNA, 19 bp, Homo sapiens
  siRNA target sequence for PCDHGA2 (NM_018915.2,515-533).
ggaggataaattgactatt

SEQ ID NO: 373371 - DNA, 19 bp, Homo sapiens
  siRNA target sequence for PCDHGA2 (NM_018915.2,631-649).
gattccggattcctcttaa

SEQ ID NO: 373372 - DNA, 19 bp, Homo sapiens
  siRNA target sequence for PCDHGA2 (NM_018915.2,635-653).
ccggattcctcttaagaat

SEQ ID NO: 373373 - DNA, 19 bp, Homo sapiens
  siRNA target sequence for PCDHGA2 (NM_018915.2,673-691).
gtgagaacgcccttcagaa

SEQ ID NO: 373374 - DNA, 19 bp, Homo sapiens
  siRNA target sequence for PCDHGA2 (NM_018915.2,918-936).
cccgagtaccgcataagca

SEQ ID NO: 373375 - DNA, 19 bp, Homo sapiens
  siRNA target sequence for PCDHGA2 (NM_018915.2,920-938).
cgagtaccgcataagcatt

SEQ ID NO: 373376 - DNA, 19 bp, Homo sapiens
  siRNA target sequence for PCDHGA2 (NM_018915.2,954-972).
gtgggcacccggatactca

SEQ ID NO: 373377 - DNA, 19 bp, Homo sapiens
  siRNA target sequence for PCDHGA2 (NM_018915.2,1004-1022).
ctacgctcaagtggtatat

SEQ ID NO: 373378 - DNA, 19 bp, Homo sapiens
  siRNA target sequence for PCDHGA2 (NM_018915.2,1055-1073).
ggtatttgagcttaagtca

SEQ ID NO: 373379 - DNA, 19 bp, Homo sapiens
  siRNA target sequence for PCDHGA2 (NM_018915.2,1120-1138).
ctacattccatgaaattga

SEQ ID NO: 373380 - DNA, 19 bp, Homo sapiens
  siRNA target sequence for PCDHGA2 (NM_018915.2,1123-1141).
cattccatgaaattgatat

SEQ ID NO: 373381 - DNA, 19 bp, Homo sapiens
  siRNA target sequence for PCDHGA2 (NM_018915.2,1127-1145).
ccatgaaattgatattgaa

SEQ ID NO: 373382 - DNA, 19 bp, Homo sapiens
  siRNA target sequence for PCDHGA2 (NM_018915.2,1167-1185).
ctaaccagagcgaaggtta

SEQ ID NO: 373383 - DNA, 19 bp, Homo sapiens
  siRNA target sequence for PCDHGA2 (NM_018915.2,1171-1189).
ccagagcgaaggttatcgt

SEQ ID NO: 373384 - DNA, 19 bp, Homo sapiens
  siRNA target sequence for PCDHGA2 (NM_018915.2,1240-1258).
ctactagctcagtttctga

SEQ ID NO: 373385 - DNA, 19 bp, Homo sapiens
  siRNA target sequence for PCDHGA2 (NM_018915.2,1343-1361).
ccccgaggatcttcctttt

SEQ ID NO: 373386 - DNA, 19 bp, Homo sapiens
  siRNA target sequence for PCDHGA2 (NM_018915.2,1344-1362).
cccgaggatcttcctttta

SEQ ID NO: 373387 - DNA, 19 bp, Homo sapiens
  siRNA target sequence for PCDHGA2 (NM_018915.2,1345-1363).
ccgaggatcttccttttaa

SEQ ID NO: 373388 - DNA, 19 bp, Homo sapiens
  siRNA target sequence for PCDHGA2 (NM_018915.2,1445-1463).
cactctaaccgctaaagat

SEQ ID NO: 373389 - DNA, 19 bp, Homo sapiens
  siRNA target sequence for PCDHGA2 (NM_018915.2,1486-1504).
cggatgctcacattttgct

SEQ ID NO: 373390 - DNA, 19 bp, Homo sapiens
  siRNA target sequence for PCDHGA2 (NM_018915.2,1628-1646).
caacgacaatgctcatgta

SEQ ID NO: 373391 - DNA, 19 bp, Homo sapiens
  siRNA target sequence for PCDHGA2 (NM_018915.2,1631-1649).
cgacaatgctcatgtaact

SEQ ID NO: 373392 - DNA, 19 bp, Homo sapiens
  siRNA target sequence for PCDHGA2 (NM_018915.2,1632-1650).
gacaatgctcatgtaactt

SEQ ID NO: 373393 - DNA, 19 bp, Homo sapiens
  siRNA target sequence for PCDHGA2 (NM_018915.2,1638-1656).
gctcatgtaacttactctt

SEQ ID NO: 373394 - DNA, 19 bp, Homo sapiens
  siRNA target sequence for PCDHGA2 (NM_018915.2,1639-1657).
ctcatgtaacttactcttt

SEQ ID NO: 373395 - DNA, 19 bp, Homo sapiens
  siRNA target sequence for PCDHGA2 (NM_018915.2,1681-1699).
cacccttatcctcttacat

SEQ ID NO: 373396 - DNA, 19 bp, Homo sapiens
  siRNA target sequence for PCDHGA2 (NM_018915.2,1731-1749).
gcactgcgctcctttgatt

SEQ ID NO: 373397 - DNA, 19 bp, Homo sapiens
  siRNA target sequence for PCDHGA2 (NM_018915.2,1732-1750).
cactgcgctcctttgatta

SEQ ID NO: 373398 - DNA, 19 bp, Homo sapiens
  siRNA target sequence for PCDHGA2 (NM_018915.2,1809-1827).
ctcagtagcaatgtatcat

SEQ ID NO: 373399 - DNA, 19 bp, Homo sapiens
  siRNA target sequence for PCDHGA2 (NM_018915.2,1811-1829).
cagtagcaatgtatcatta

SEQ ID NO: 373400 - DNA, 19 bp, Homo sapiens
  siRNA target sequence for PCDHGA3 (NM_018916.3,297-315).
cccgctgtgtctggtaaaa

SEQ ID NO: 373401 - DNA, 19 bp, Homo sapiens
  siRNA target sequence for PCDHGA3 (NM_018916.3,298-316).
ccgctgtgtctggtaaaaa

SEQ ID NO: 373402 - DNA, 19 bp, Homo sapiens
  siRNA target sequence for PCDHGA3 (NM_018916.3,400-418).
ccaacagaggaattggaaa

SEQ ID NO: 373403 - DNA, 19 bp, Homo sapiens
  siRNA target sequence for PCDHGA3 (NM_018916.3,445-463).
ggaacccgatttccaatta

SEQ ID NO: 373404 - DNA, 19 bp, Homo sapiens
  siRNA target sequence for PCDHGA3 (NM_018916.3,446-464).
gaacccgatttccaattaa

SEQ ID NO: 373405 - DNA, 19 bp, Homo sapiens
  siRNA target sequence for PCDHGA3 (NM_018916.3,450-468).
ccgatttccaattaaaact

SEQ ID NO: 373406 - DNA, 19 bp, Homo sapiens
  siRNA target sequence for PCDHGA3 (NM_018916.3,595-613).
gccctggaccgtgagaaaa

SEQ ID NO: 373407 - DNA, 19 bp, Homo sapiens
  siRNA target sequence for PCDHGA3 (NM_018916.3,596-614).
ccctggaccgtgagaaaaa

SEQ ID NO: 373408 - DNA, 19 bp, Homo sapiens
  siRNA target sequence for PCDHGA3 (NM_018916.3,597-615).
cctggaccgtgagaaaaaa

SEQ ID NO: 373409 - DNA, 19 bp, Homo sapiens
  siRNA target sequence for PCDHGA3 (NM_018916.3,819-837).
caatgctcaagtgtcttat

SEQ ID NO: 373410 - DNA, 19 bp, Homo sapiens
  siRNA target sequence for PCDHGA3 (NM_018916.3,824-842).
ctcaagtgtcttatattct

SEQ ID NO: 373411 - DNA, 19 bp, Homo sapiens
  siRNA target sequence for PCDHGA3 (NM_018916.3,893-911).
gtggagaagtatcaatatt

SEQ ID NO: 373412 - DNA, 19 bp, Homo sapiens
  siRNA target sequence for PCDHGA3 (NM_018916.3,895-913).
ggagaagtatcaatattaa

SEQ ID NO: 373413 - DNA, 19 bp, Homo sapiens
  siRNA target sequence for PCDHGA3 (NM_018916.3,967-985).
gatggaccaggtcttcttt

SEQ ID NO: 373414 - DNA, 19 bp, Homo sapiens
  siRNA target sequence for PCDHGA3 (NM_018916.3,970-988).
ggaccaggtcttctttcaa

SEQ ID NO: 373415 - DNA, 19 bp, Homo sapiens
  siRNA target sequence for PCDHGA3 (NM_018916.3,1077-1095).
gggcaccgttggaagagaa

SEQ ID NO: 373416 - DNA, 19 bp, Homo sapiens
  siRNA target sequence for PCDHGA3 (NM_018916.3,1091-1109).
gagaaattgctcttatcga

SEQ ID NO: 373417 - DNA, 19 bp, Homo sapiens
  siRNA target sequence for PCDHGA3 (NM_018916.3,1110-1128).
cgtgcatgaccgagattct

SEQ ID NO: 373418 - DNA, 19 bp, Homo sapiens
  siRNA target sequence for PCDHGA3 (NM_018916.3,1198-1216).
caatattaccgcttagtga

SEQ ID NO: 373419 - DNA, 19 bp, Homo sapiens
  siRNA target sequence for PCDHGA3 (NM_018916.3,1227-1245).
cctggaccgcgaacaaata

SEQ ID NO: 373420 - DNA, 19 bp, Homo sapiens
  siRNA target sequence for PCDHGA3 (NM_018916.3,1228-1246).
ctggaccgcgaacaaatat

SEQ ID NO: 373421 - DNA, 19 bp, Homo sapiens
  siRNA target sequence for PCDHGA3 (NM_018916.3,1230-1248).
ggaccgcgaacaaatatca

SEQ ID NO: 373422 - DNA, 19 bp, Homo sapiens
  siRNA target sequence for PCDHGA3 (NM_018916.3,1233-1251).
ccgcgaacaaatatcagaa

SEQ ID NO: 373423 - DNA, 19 bp, Homo sapiens
  siRNA target sequence for PCDHGA3 (NM_018916.3,1234-1252).
cgcgaacaaatatcagaat

SEQ ID NO: 373424 - DNA, 19 bp, Homo sapiens
  siRNA target sequence for PCDHGA3 (NM_018916.3,1427-1445).
cccaggacccagatagcaa

SEQ ID NO: 373425 - DNA, 19 bp, Homo sapiens
  siRNA target sequence for PCDHGA3 (NM_018916.3,1432-1450).
gacccagatagcaacaaca

SEQ ID NO: 373426 - DNA, 19 bp, Homo sapiens
  siRNA target sequence for PCDHGA3 (NM_018916.3,1526-1544).
ccaacactggcgtcctata

SEQ ID NO: 373427 - DNA, 19 bp, Homo sapiens
  siRNA target sequence for PCDHGA3 (NM_018916.3,1567-1585).
gagcaatttagagacttaa

SEQ ID NO: 373428 - DNA, 19 bp, Homo sapiens
  siRNA target sequence for PCDHGA3 (NM_018916.3,2405-2423).
gagattccaacctacttca

SEQ ID NO: 373429 - DNA, 19 bp, Homo sapiens
  siRNA target sequence for PCDHGA4 (NM_018917.2,80-98).
gggccgaacagattctcta

SEQ ID NO: 373430 - DNA, 19 bp, Homo sapiens
  siRNA target sequence for PCDHGA4 (NM_018917.2,288-306).
cgacagatctccaaactgt

SEQ ID NO: 373431 - DNA, 19 bp, Homo sapiens
  siRNA target sequence for PCDHGA4 (NM_018917.2,309-327).
gacaaacctggagattctt

SEQ ID NO: 373432 - DNA, 19 bp, Homo sapiens
  siRNA target sequence for PCDHGA4 (NM_018917.2,319-337).
gagattcttctagaagata

SEQ ID NO: 373433 - DNA, 19 bp, Homo sapiens
  siRNA target sequence for PCDHGA4 (NM_018917.2,351-369).
gcgggtagaggtggaaata

SEQ ID NO: 373434 - DNA, 19 bp, Homo sapiens
  siRNA target sequence for PCDHGA4 (NM_018917.2,352-370).
cgggtagaggtggaaataa

SEQ ID NO: 373435 - DNA, 19 bp, Homo sapiens
  siRNA target sequence for PCDHGA4 (NM_018917.2,458-476).
ctcttcctgaagcttttga

SEQ ID NO: 373436 - DNA, 19 bp, Homo sapiens
  siRNA target sequence for PCDHGA4 (NM_018917.2,478-496).
ccggatgtaggtgtaaact

SEQ ID NO: 373437 - DNA, 19 bp, Homo sapiens
  siRNA target sequence for PCDHGA4 (NM_018917.2,516-534).
caactcaaacggttacttt

SEQ ID NO: 373438 - DNA, 19 bp, Homo sapiens
  siRNA target sequence for PCDHGA4 (NM_018917.2,585-603).
gctggaacgcgctctagat

SEQ ID NO: 373439 - DNA, 19 bp, Homo sapiens
  siRNA target sequence for PCDHGA4 (NM_018917.2,677-695).
ccaggattctcataatact

SEQ ID NO: 373440 - DNA, 19 bp, Homo sapiens
  siRNA target sequence for PCDHGA4 (NM_018917.2,680-698).
ggattctcataatacttgt

SEQ ID NO: 373441 - DNA, 19 bp, Homo sapiens
  siRNA target sequence for PCDHGA4 (NM_018917.2,694-712).
cttgtggataccaacgata

SEQ ID NO: 373442 - DNA, 19 bp, Homo sapiens
  siRNA target sequence for PCDHGA4 (NM_018917.2,734-752).
ccgagtaccacgtaagtgt

SEQ ID NO: 373443 - DNA, 19 bp, Homo sapiens
  siRNA target sequence for PCDHGA4 (NM_018917.2,735-753).
cgagtaccacgtaagtgtt

SEQ ID NO: 373444 - DNA, 19 bp, Homo sapiens
  siRNA target sequence for PCDHGA4 (NM_018917.2,823-841).
ggagacgtgacgtattctt

SEQ ID NO: 373445 - DNA, 19 bp, Homo sapiens
  siRNA target sequence for PCDHGA4 (NM_018917.2,824-842).
gagacgtgacgtattcttt

SEQ ID NO: 373446 - DNA, 19 bp, Homo sapiens
  siRNA target sequence for PCDHGA4 (NM_018917.2,834-852).
gtattctttccggaaagta

SEQ ID NO: 373447 - DNA, 19 bp, Homo sapiens
  siRNA target sequence for PCDHGA4 (NM_018917.2,839-857).
ctttccggaaagtaagaga

SEQ ID NO: 373448 - DNA, 19 bp, Homo sapiens
  siRNA target sequence for PCDHGA4 (NM_018917.2,889-907).
ctgagtggggatataacaa

SEQ ID NO: 373449 - DNA, 19 bp, Homo sapiens
  siRNA target sequence for PCDHGA4 (NM_018917.2,938-956).
gattctatgacatagatgt

SEQ ID NO: 373450 - DNA, 19 bp, Homo sapiens
  siRNA target sequence for PCDHGA4 (NM_018917.2,942-960).
ctatgacatagatgtagaa

SEQ ID NO: 373451 - DNA, 19 bp, Homo sapiens
  siRNA target sequence for PCDHGA4 (NM_018917.2,1138-1156).
ggcctagtcacatgttcta

SEQ ID NO: 373452 - DNA, 19 bp, Homo sapiens
  siRNA target sequence for PCDHGA4 (NM_018917.2,1139-1157).
gcctagtcacatgttctat

SEQ ID NO: 373453 - DNA, 19 bp, Homo sapiens
  siRNA target sequence for PCDHGA4 (NM_018917.2,1171-1189).
ccattcacacttgaaaaga

SEQ ID NO: 373454 - DNA, 19 bp, Homo sapiens
  siRNA target sequence for PCDHGA4 (NM_018917.2,1226-1244).
cactggacagggaagaagt

SEQ ID NO: 373455 - DNA, 19 bp, Homo sapiens
  siRNA target sequence for PCDHGA4 (NM_018917.2,1364-1382).
cttcctactctgcttacat

SEQ ID NO: 373456 - DNA, 19 bp, Homo sapiens
  siRNA target sequence for PCDHGA4 (NM_018917.2,1526-1544).
ccaatacagggatcctata

SEQ ID NO: 373457 - DNA, 19 bp, Homo sapiens
  siRNA target sequence for PCDHGA4 (NM_018917.2,1527-1545).
caatacagggatcctatat

SEQ ID NO: 373458 - DNA, 19 bp, Homo sapiens
  siRNA target sequence for PCDHGA4 (NM_018917.2,1836-1854).
cgagccgggactatttgca

SEQ ID NO: 373459 - DNA, 19 bp, Homo sapiens
  siRNA target sequence for PCDHGA4 (NM_018917.2,2058-2076).
ctcgggcctcacactctat

SEQ ID NO: 373460 - DNA, 19 bp, Homo sapiens
  siRNA target sequence for PCDHGA4 (NM_018917.2,2399-2417).
caaaaggagaccctaatct

SEQ ID NO: 373461 - DNA, 19 bp, Homo sapiens
  siRNA target sequence for PCDHGA5 (NM_018918.2,299-317).
cactgtgtgtggtgaactt

SEQ ID NO: 373462 - DNA, 19 bp, Homo sapiens
  siRNA target sequence for PCDHGA5 (NM_018918.2,392-410).
cgcgtttccgggatgaaga

SEQ ID NO: 373463 - DNA, 19 bp, Homo sapiens
  siRNA target sequence for PCDHGA5 (NM_018918.2,399-417).
ccgggatgaagagttaaaa

SEQ ID NO: 373464 - DNA, 19 bp, Homo sapiens
  siRNA target sequence for PCDHGA5 (NM_018918.2,551-569).
gcggaactgatggacaaaa

SEQ ID NO: 373465 - DNA, 19 bp, Homo sapiens
  siRNA target sequence for PCDHGA5 (NM_018918.2,839-857).
cttttcgcaatgaagaaga

SEQ ID NO: 373466 - DNA, 19 bp, Homo sapiens
  siRNA target sequence for PCDHGA5 (NM_018918.2,866-884).
cggagactttccaacttga

SEQ ID NO: 373467 - DNA, 19 bp, Homo sapiens
  siRNA target sequence for PCDHGA5 (NM_018918.2,867-885).
ggagactttccaacttgat

SEQ ID NO: 373468 - DNA, 19 bp, Homo sapiens
  siRNA target sequence for PCDHGA5 (NM_018918.2,868-886).
gagactttccaacttgatt

SEQ ID NO: 373469 - DNA, 19 bp, Homo sapiens
  siRNA target sequence for PCDHGA5 (NM_018918.2,1007-1025).
cagtacaggacgtgaatga

SEQ ID NO: 373470 - DNA, 19 bp, Homo sapiens
  siRNA target sequence for PCDHGA5 (NM_018918.2,1077-1095).
ctgtcttcccggaactgta

SEQ ID NO: 373471 - DNA, 19 bp, Homo sapiens
  siRNA target sequence for PCDHGA5 (NM_018918.2,1079-1097).
gtcttcccggaactgtaat

SEQ ID NO: 373472 - DNA, 19 bp, Homo sapiens
  siRNA target sequence for PCDHGA5 (NM_018918.2,1100-1118).
cgctgtttagcgtacatga

SEQ ID NO: 373473 - DNA, 19 bp, Homo sapiens
  siRNA target sequence for PCDHGA5 (NM_018918.2,1101-1119).
gctgtttagcgtacatgat

SEQ ID NO: 373474 - DNA, 19 bp, Homo sapiens
  siRNA target sequence for PCDHGA5 (NM_018918.2,1110-1128).
cgtacatgatggtgattct

SEQ ID NO: 373475 - DNA, 19 bp, Homo sapiens
  siRNA target sequence for PCDHGA5 (NM_018918.2,1143-1161).
gattgcatgctctattcct

SEQ ID NO: 373476 - DNA, 19 bp, Homo sapiens
  siRNA target sequence for PCDHGA5 (NM_018918.2,1188-1206).
gtcagttgataattactat

SEQ ID NO: 373477 - DNA, 19 bp, Homo sapiens
  siRNA target sequence for PCDHGA5 (NM_018918.2,1203-1221).
ctatcacctattaacaact

SEQ ID NO: 373478 - DNA, 19 bp, Homo sapiens
  siRNA target sequence for PCDHGA5 (NM_018918.2,1237-1255).
gaagagacttcagattata

SEQ ID NO: 373479 - DNA, 19 bp, Homo sapiens
  siRNA target sequence for PCDHGA5 (NM_018918.2,1240-1258).
gagacttcagattataata

SEQ ID NO: 373480 - DNA, 19 bp, Homo sapiens
  siRNA target sequence for PCDHGA5 (NM_018918.2,1247-1265).
cagattataatatcacttt

SEQ ID NO: 373481 - DNA, 19 bp, Homo sapiens
  siRNA target sequence for PCDHGA5 (NM_018918.2,1307-1325).
gccacatccccttgaaagt

SEQ ID NO: 373482 - DNA, 19 bp, Homo sapiens
  siRNA target sequence for PCDHGA5 (NM_018918.2,1308-1326).
ccacatccccttgaaagta

SEQ ID NO: 373483 - DNA, 19 bp, Homo sapiens
  siRNA target sequence for PCDHGA5 (NM_018918.2,1320-1338).
gaaagtagcagacgttaat

SEQ ID NO: 373484 - DNA, 19 bp, Homo sapiens
  siRNA target sequence for PCDHGA5 (NM_018918.2,1397-1415).
ccagaggtgtctctatctt

SEQ ID NO: 373485 - DNA, 19 bp, Homo sapiens
  siRNA target sequence for PCDHGA5 (NM_018918.2,1497-1515).
gcccttgtcctcctatgta

SEQ ID NO: 373486 - DNA, 19 bp, Homo sapiens
  siRNA target sequence for PCDHGA5 (NM_018918.2,2017-2035).
gctgacctaggcagtatca

SEQ ID NO: 373487 - DNA, 19 bp, Homo sapiens
  siRNA target sequence for PCDHGA5 (NM_018918.2,2018-2036).
ctgacctaggcagtatcaa

SEQ ID NO: 373488 - DNA, 19 bp, Homo sapiens
  siRNA target sequence for PCDHGA5 (NM_018918.2,2327-2345).
cagacacgctccttagtga

SEQ ID NO: 373489 - DNA, 19 bp, Homo sapiens
  siRNA target sequence for PCDHGA5 (NM_018918.2,2368-2386).
cctcttctgatgtctgata

SEQ ID NO: 373490 - DNA, 19 bp, Homo sapiens
  siRNA target sequence for PCDHGA5 (NM_018918.2,2381-2399).
ctgataaggtagatgcaaa

SEQ ID NO: 373491 - DNA, 19 bp, Homo sapiens
  siRNA target sequence for PCDHGA6 (NM_018919.2,330-348).
cgaggataaactgaatctt

SEQ ID NO: 373492 - DNA, 19 bp, Homo sapiens
  siRNA target sequence for PCDHGA6 (NM_018919.2,353-371).
ccgtggaagtggaaatagt

SEQ ID NO: 373493 - DNA, 19 bp, Homo sapiens
  siRNA target sequence for PCDHGA6 (NM_018919.2,384-402).
caatacaccccgattctta

SEQ ID NO: 373494 - DNA, 19 bp, Homo sapiens
  siRNA target sequence for PCDHGA6 (NM_018919.2,394-412).
cgattcttaaaggaagaat

SEQ ID NO: 373495 - DNA, 19 bp, Homo sapiens
  siRNA target sequence for PCDHGA6 (NM_018919.2,446-464).
cctctcgttttccactaat

SEQ ID NO: 373496 - DNA, 19 bp, Homo sapiens
  siRNA target sequence for PCDHGA6 (NM_018919.2,458-476).
cactaatggaggtctatga

SEQ ID NO: 373497 - DNA, 19 bp, Homo sapiens
  siRNA target sequence for PCDHGA6 (NM_018919.2,666-684).
ctcaagcgtcgcccaaatt

SEQ ID NO: 373498 - DNA, 19 bp, Homo sapiens
  siRNA target sequence for PCDHGA6 (NM_018919.2,668-686).
caagcgtcgcccaaattct

SEQ ID NO: 373499 - DNA, 19 bp, Homo sapiens
  siRNA target sequence for PCDHGA6 (NM_018919.2,732-750).
gcctgtctaccgtgtaagt

SEQ ID NO: 373500 - DNA, 19 bp, Homo sapiens
  siRNA target sequence for PCDHGA6 (NM_018919.2,734-752).
ctgtctaccgtgtaagtgt

SEQ ID NO: 373501 - DNA, 19 bp, Homo sapiens
  siRNA target sequence for PCDHGA6 (NM_018919.2,817-835).
gtccacggggaagtaactt

SEQ ID NO: 373502 - DNA, 19 bp, Homo sapiens
  siRNA target sequence for PCDHGA6 (NM_018919.2,819-837).
ccacggggaagtaacttat

SEQ ID NO: 373503 - DNA, 19 bp, Homo sapiens
  siRNA target sequence for PCDHGA6 (NM_018919.2,924-942).
ctatgaggactcgagtttt

SEQ ID NO: 373504 - DNA, 19 bp, Homo sapiens
  siRNA target sequence for PCDHGA6 (NM_018919.2,982-1000).
cgagacagagcgaaagtct

SEQ ID NO: 373505 - DNA, 19 bp, Homo sapiens
  siRNA target sequence for PCDHGA6 (NM_018919.2,987-1005).
cagagcgaaagtcttaata

SEQ ID NO: 373506 - DNA, 19 bp, Homo sapiens
  siRNA target sequence for PCDHGA6 (NM_018919.2,991-1009).
gcgaaagtcttaataacta

SEQ ID NO: 373507 - DNA, 19 bp, Homo sapiens
  siRNA target sequence for PCDHGA6 (NM_018919.2,1030-1048).
gtaccagaagtggttgtta

SEQ ID NO: 373508 - DNA, 19 bp, Homo sapiens
  siRNA target sequence for PCDHGA6 (NM_018919.2,1049-1067).
catctggaagcagaacaat

SEQ ID NO: 373509 - DNA, 19 bp, Homo sapiens
  siRNA target sequence for PCDHGA6 (NM_018919.2,1160-1178).
cgagaagtctcccatttga

SEQ ID NO: 373510 - DNA, 19 bp, Homo sapiens
  siRNA target sequence for PCDHGA6 (NM_018919.2,1161-1179).
gagaagtctcccatttgaa

SEQ ID NO: 373511 - DNA, 19 bp, Homo sapiens
  siRNA target sequence for PCDHGA6 (NM_018919.2,1163-1181).
gaagtctcccatttgaatt

SEQ ID NO: 373512 - DNA, 19 bp, Homo sapiens
  siRNA target sequence for PCDHGA6 (NM_018919.2,1192-1210).
gttggcaattattatcgat

SEQ ID NO: 373513 - DNA, 19 bp, Homo sapiens
  siRNA target sequence for PCDHGA6 (NM_018919.2,1231-1249).
gaccgggaagaggtattct

SEQ ID NO: 373514 - DNA, 19 bp, Homo sapiens
  siRNA target sequence for PCDHGA6 (NM_018919.2,1307-1325).
caatcatctctctaaatgt

SEQ ID NO: 373515 - DNA, 19 bp, Homo sapiens
  siRNA target sequence for PCDHGA6 (NM_018919.2,2289-2307).
gcgtaagagtcatctgatt

SEQ ID NO: 373516 - DNA, 19 bp, Homo sapiens
  siRNA target sequence for PCDHGA6 (NM_018919.2,2290-2308).
cgtaagagtcatctgattt

SEQ ID NO: 373517 - DNA, 19 bp, Homo sapiens
  siRNA target sequence for PCDHGA7 (NM_018920.2,23-41).
gggactacagaggattctt

SEQ ID NO: 373518 - DNA, 19 bp, Homo sapiens
  siRNA target sequence for PCDHGA7 (NM_018920.2,80-98).
gggcaggacgtattctcta

SEQ ID NO: 373519 - DNA, 19 bp, Homo sapiens
  siRNA target sequence for PCDHGA7 (NM_018920.2,296-314).
gtgcgcggtgtctggtaaa

SEQ ID NO: 373520 - DNA, 19 bp, Homo sapiens
  siRNA target sequence for PCDHGA7 (NM_018920.2,351-369).
ccctatagacgtggaaata

SEQ ID NO: 373521 - DNA, 19 bp, Homo sapiens
  siRNA target sequence for PCDHGA7 (NM_018920.2,352-370).
cctatagacgtggaaataa

SEQ ID NO: 373522 - DNA, 19 bp, Homo sapiens
  siRNA target sequence for PCDHGA7 (NM_018920.2,382-400).
gacaacgttccaagattct

SEQ ID NO: 373523 - DNA, 19 bp, Homo sapiens
  siRNA target sequence for PCDHGA7 (NM_018920.2,553-571).
ggagacgatgaaactaagt

SEQ ID NO: 373524 - DNA, 19 bp, Homo sapiens
  siRNA target sequence for PCDHGA7 (NM_018920.2,554-572).
gagacgatgaaactaagta

SEQ ID NO: 373525 - DNA, 19 bp, Homo sapiens
  siRNA target sequence for PCDHGA7 (NM_018920.2,732-750).
gcctcagtaccaagtaact

SEQ ID NO: 373526 - DNA, 19 bp, Homo sapiens
  siRNA target sequence for PCDHGA7 (NM_018920.2,804-822).
cctggacgagggagtcaat

SEQ ID NO: 373527 - DNA, 19 bp, Homo sapiens
  siRNA target sequence for PCDHGA7 (NM_018920.2,833-851).
catattcttttcggaaaat

SEQ ID NO: 373528 - DNA, 19 bp, Homo sapiens
  siRNA target sequence for PCDHGA7 (NM_018920.2,896-914).
gagaaatatcaactttaga

SEQ ID NO: 373529 - DNA, 19 bp, Homo sapiens
  siRNA target sequence for PCDHGA7 (NM_018920.2,935-953).
ctgccttctatgaaatgga

SEQ ID NO: 373530 - DNA, 19 bp, Homo sapiens
  siRNA target sequence for PCDHGA7 (NM_018920.2,1039-1057).
gtgactatgacgtctttaa

SEQ ID NO: 373531 - DNA, 19 bp, Homo sapiens
  siRNA target sequence for PCDHGA7 (NM_018920.2,1041-1059).
gactatgacgtctttaagt

SEQ ID NO: 373532 - DNA, 19 bp, Homo sapiens
  siRNA target sequence for PCDHGA7 (NM_018920.2,1234-1252).
cgggaaacactctctttgt

SEQ ID NO: 373533 - DNA, 19 bp, Homo sapiens
  siRNA target sequence for PCDHGA7 (NM_018920.2,1241-1259).
cactctctttgtataacat

SEQ ID NO: 373534 - DNA, 19 bp, Homo sapiens
  siRNA target sequence for PCDHGA7 (NM_018920.2,1251-1269).
gtataacatcacactgaaa

SEQ ID NO: 373535 - DNA, 19 bp, Homo sapiens
  siRNA target sequence for PCDHGA7 (NM_018920.2,1296-1314).
gtccagggaaactcacata

SEQ ID NO: 373536 - DNA, 19 bp, Homo sapiens
  siRNA target sequence for PCDHGA7 (NM_018920.2,1298-1316).
ccagggaaactcacatatt

SEQ ID NO: 373537 - DNA, 19 bp, Homo sapiens
  siRNA target sequence for PCDHGA7 (NM_018920.2,1301-1319).
gggaaactcacatattcat

SEQ ID NO: 373538 - DNA, 19 bp, Homo sapiens
  siRNA target sequence for PCDHGA7 (NM_018920.2,1434-1452).
ccacgacagtgaggataat

SEQ ID NO: 373539 - DNA, 19 bp, Homo sapiens
  siRNA target sequence for PCDHGA7 (NM_018920.2,1545-1563).
cgcgctgcaatcctttgat

SEQ ID NO: 373540 - DNA, 19 bp, Homo sapiens
  siRNA target sequence for PCDHGA7 (NM_018920.2,1546-1564).
gcgctgcaatcctttgatt

SEQ ID NO: 373541 - DNA, 19 bp, Homo sapiens
  siRNA target sequence for PCDHGA7 (NM_018920.2,1547-1565).
cgctgcaatcctttgatta

SEQ ID NO: 373542 - DNA, 19 bp, Homo sapiens
  siRNA target sequence for PCDHGA7 (NM_018920.2,1548-1566).
gctgcaatcctttgattat

SEQ ID NO: 373543 - DNA, 19 bp, Homo sapiens
  siRNA target sequence for PCDHGA7 (NM_018920.2,1572-1590).
gttgagagaactacaacta

SEQ ID NO: 373544 - DNA, 19 bp, Homo sapiens
  siRNA target sequence for PCDHGA7 (NM_018920.2,2039-2057).
cctccgacggtccttacaa

SEQ ID NO: 373545 - DNA, 19 bp, Homo sapiens
  siRNA target sequence for PCDHGA7 (NM_018920.2,2043-2061).
cgacggtccttacaactat

SEQ ID NO: 373546 - DNA, 19 bp, Homo sapiens
  siRNA target sequence for PCDHGA9 (NM_018921.2,342-360).
gaaactgtacggaatagaa

SEQ ID NO: 373547 - DNA, 19 bp, Homo sapiens
  siRNA target sequence for PCDHGA9 (NM_018921.2,348-366).
gtacggaatagaaatagaa

SEQ ID NO: 373548 - DNA, 19 bp, Homo sapiens
  siRNA target sequence for PCDHGA9 (NM_018921.2,403-421).
gccgaaagtctggaagtaa

SEQ ID NO: 373549 - DNA, 19 bp, Homo sapiens
  siRNA target sequence for PCDHGA9 (NM_018921.2,404-422).
ccgaaagtctggaagtaaa

SEQ ID NO: 373550 - DNA, 19 bp, Homo sapiens
  siRNA target sequence for PCDHGA9 (NM_018921.2,405-423).
cgaaagtctggaagtaaaa

SEQ ID NO: 373551 - DNA, 19 bp, Homo sapiens
  siRNA target sequence for PCDHGA9 (NM_018921.2,1041-1059).
gaccattacatctctgttt

SEQ ID NO: 373552 - DNA, 19 bp, Homo sapiens
  siRNA target sequence for PCDHGA9 (NM_018921.2,1077-1095).
cgcacctcagggaacagta

SEQ ID NO: 373553 - DNA, 19 bp, Homo sapiens
  siRNA target sequence for PCDHGA9 (NM_018921.2,1086-1104).
gggaacagtaattcttctt

SEQ ID NO: 373554 - DNA, 19 bp, Homo sapiens
  siRNA target sequence for PCDHGA9 (NM_018921.2,1119-1137).
ccgagactccgggaagaat

SEQ ID NO: 373555 - DNA, 19 bp, Homo sapiens
  siRNA target sequence for PCDHGA9 (NM_018921.2,1139-1157).
gtcaagttgtctgttctat

SEQ ID NO: 373556 - DNA, 19 bp, Homo sapiens
  siRNA target sequence for PCDHGA9 (NM_018921.2,1151-1169).
gttctatccaggagaatct

SEQ ID NO: 373557 - DNA, 19 bp, Homo sapiens
  siRNA target sequence for PCDHGA9 (NM_018921.2,1212-1230).
gttgacggcccaaattctt

SEQ ID NO: 373558 - DNA, 19 bp, Homo sapiens
  siRNA target sequence for PCDHGA9 (NM_018921.2,1234-1252).
cgagaaaaagcctcagaat

SEQ ID NO: 373559 - DNA, 19 bp, Homo sapiens
  siRNA target sequence for PCDHGA9 (NM_018921.2,1375-1393).
gtctacctcccggaaaaca

SEQ ID NO: 373560 - DNA, 19 bp, Homo sapiens
  siRNA target sequence for PCDHGA9 (NM_018921.2,1438-1456).
gatagcaatgagaattcta

SEQ ID NO: 373561 - DNA, 19 bp, Homo sapiens
  siRNA target sequence for PCDHGA9 (NM_018921.2,2107-2125).
gtcttcctcaccttcgtta

SEQ ID NO: 373562 - DNA, 19 bp, Homo sapiens
  siRNA target sequence for PCDHGA9 (NM_018921.2,2375-2393).
gcgtctctgttgattccaa

SEQ ID NO: 373563 - DNA, 19 bp, Homo sapiens
  siRNA target sequence for PCDHGB1 (NM_018922.2,20-38).
ccgaaatgatgaaaagtca

SEQ ID NO: 373564 - DNA, 19 bp, Homo sapiens
  siRNA target sequence for PCDHGB1 (NM_018922.2,126-144).
ctcacgggtggggaaactt

SEQ ID NO: 373565 - DNA, 19 bp, Homo sapiens
  siRNA target sequence for PCDHGB1 (NM_018922.2,194-212).
gggttagtgcagaggatta

SEQ ID NO: 373566 - DNA, 19 bp, Homo sapiens
  siRNA target sequence for PCDHGB1 (NM_018922.2,195-213).
ggttagtgcagaggattat

SEQ ID NO: 373567 - DNA, 19 bp, Homo sapiens
  siRNA target sequence for PCDHGB1 (NM_018922.2,196-214).
gttagtgcagaggattatt

SEQ ID NO: 373568 - DNA, 19 bp, Homo sapiens
  siRNA target sequence for PCDHGB1 (NM_018922.2,228-246).
ggagagcggggatttgtta

SEQ ID NO: 373569 - DNA, 19 bp, Homo sapiens
  siRNA target sequence for PCDHGB1 (NM_018922.2,233-251).
gcggggatttgttagtgaa

SEQ ID NO: 373570 - DNA, 19 bp, Homo sapiens
  siRNA target sequence for PCDHGB1 (NM_018922.2,243-261).
gttagtgaacggtaggata

SEQ ID NO: 373571 - DNA, 19 bp, Homo sapiens
  siRNA target sequence for PCDHGB1 (NM_018922.2,258-276).
gatagatcgagagaagatt

SEQ ID NO: 373572 - DNA, 19 bp, Homo sapiens
  siRNA target sequence for PCDHGB1 (NM_018922.2,294-312).
gtgtgcactagaattcgaa

SEQ ID NO: 373573 - DNA, 19 bp, Homo sapiens
  siRNA target sequence for PCDHGB1 (NM_018922.2,318-336).
cgctgaaaacccaatgaat

SEQ ID NO: 373574 - DNA, 19 bp, Homo sapiens
  siRNA target sequence for PCDHGB1 (NM_018922.2,345-363).
cgtggttgttgtaatccaa

SEQ ID NO: 373575 - DNA, 19 bp, Homo sapiens
  siRNA target sequence for PCDHGB1 (NM_018922.2,360-378).
ccaagatattaatgacaat

SEQ ID NO: 373576 - DNA, 19 bp, Homo sapiens
  siRNA target sequence for PCDHGB1 (NM_018922.2,375-393).
caatgcaccacgtttcgtt

SEQ ID NO: 373577 - DNA, 19 bp, Homo sapiens
  siRNA target sequence for PCDHGB1 (NM_018922.2,380-398).
caccacgtttcgttgcaaa

SEQ ID NO: 373578 - DNA, 19 bp, Homo sapiens
  siRNA target sequence for PCDHGB1 (NM_018922.2,400-418).
ggcattgacttagaaattt

SEQ ID NO: 373579 - DNA, 19 bp, Homo sapiens
  siRNA target sequence for PCDHGB1 (NM_018922.2,501-519).
caccatcaaccccaatcaa

SEQ ID NO: 373580 - DNA, 19 bp, Homo sapiens
  siRNA target sequence for PCDHGB1 (NM_018922.2,503-521).
ccatcaaccccaatcaata

SEQ ID NO: 373581 - DNA, 19 bp, Homo sapiens
  siRNA target sequence for PCDHGB1 (NM_018922.2,566-584).
cggtattactgctggaaaa

SEQ ID NO: 373582 - DNA, 19 bp, Homo sapiens
  siRNA target sequence for PCDHGB1 (NM_018922.2,608-626).
gctctcatcgcttaatcct

SEQ ID NO: 373583 - DNA, 19 bp, Homo sapiens
  siRNA target sequence for PCDHGB1 (NM_018922.2,734-752).
gggttagcctccaagaaaa

SEQ ID NO: 373584 - DNA, 19 bp, Homo sapiens
  siRNA target sequence for PCDHGB1 (NM_018922.2,795-813).
ccaggatgagggcattaat

SEQ ID NO: 373585 - DNA, 19 bp, Homo sapiens
  siRNA target sequence for PCDHGB1 (NM_018922.2,834-852).
cctcaattccccaataagt

SEQ ID NO: 373586 - DNA, 19 bp, Homo sapiens
  siRNA target sequence for PCDHGB1 (NM_018922.2,1067-1085).
cagaccttggaactgtaat

SEQ ID NO: 373587 - DNA, 19 bp, Homo sapiens
  siRNA target sequence for PCDHGB1 (NM_018922.2,1175-1193).
ccacctcgaagaattatta

SEQ ID NO: 373588 - DNA, 19 bp, Homo sapiens
  siRNA target sequence for PCDHGB1 (NM_018922.2,1239-1257).
ctacaacgtcacaatcata

SEQ ID NO: 373589 - DNA, 19 bp, Homo sapiens
  siRNA target sequence for PCDHGB1 (NM_018922.2,1392-1410).
cgcctccattgcacaagta

SEQ ID NO: 373590 - DNA, 19 bp, Homo sapiens
  siRNA target sequence for PCDHGB1 (NM_018922.2,1443-1461).
cagagtctcctactctatt

SEQ ID NO: 373591 - DNA, 19 bp, Homo sapiens
  siRNA target sequence for PCDHGB1 (NM_018922.2,1445-1463).
gagtctcctactctattct

SEQ ID NO: 373592 - DNA, 19 bp, Homo sapiens
  siRNA target sequence for PCDHGB1 (NM_018922.2,2248-2266).
ctatgtattgcctctcatt

SEQ ID NO: 373593 - DNA, 19 bp, Homo sapiens
  siRNA target sequence for PCDHGB1 (NM_018922.2,2338-2356).
gatccttctatggttgtat

SEQ ID NO: 373594 - DNA, 19 bp, Homo sapiens
  siRNA target sequence for PCDHGB1 (NM_018922.2,2357-2375).
gtgccagtaatgaagatca

SEQ ID NO: 373595 - DNA, 19 bp, Homo sapiens
  siRNA target sequence for PCDHGB2 (NM_018923.2,35-53).
ggtggctgcaggtactgtt

SEQ ID NO: 373596 - DNA, 19 bp, Homo sapiens
  siRNA target sequence for PCDHGB2 (NM_018923.2,91-109).
gtccagatccgctattcaa

SEQ ID NO: 373597 - DNA, 19 bp, Homo sapiens
  siRNA target sequence for PCDHGB2 (NM_018923.2,202-220).
gttagcgcggagaaggaat

SEQ ID NO: 373598 - DNA, 19 bp, Homo sapiens
  siRNA target sequence for PCDHGB2 (NM_018923.2,206-224).
gcgcggagaaggaatattt

SEQ ID NO: 373599 - DNA, 19 bp, Homo sapiens
  siRNA target sequence for PCDHGB2 (NM_018923.2,208-226).
gcggagaaggaatatttca

SEQ ID NO: 373600 - DNA, 19 bp, Homo sapiens
  siRNA target sequence for PCDHGB2 (NM_018923.2,303-321).
gtgtgttctggatttcgat

SEQ ID NO: 373601 - DNA, 19 bp, Homo sapiens
  siRNA target sequence for PCDHGB2 (NM_018923.2,318-336).
cgatactgtcgctgaaaat

SEQ ID NO: 373602 - DNA, 19 bp, Homo sapiens
  siRNA target sequence for PCDHGB2 (NM_018923.2,327-345).
cgctgaaaatccactaaat

SEQ ID NO: 373603 - DNA, 19 bp, Homo sapiens
  siRNA target sequence for PCDHGB2 (NM_018923.2,361-379).
gtaattgtgcaggatataa

SEQ ID NO: 373604 - DNA, 19 bp, Homo sapiens
  siRNA target sequence for PCDHGB2 (NM_018923.2,392-410).
cgctattcaaacagactaa

SEQ ID NO: 373605 - DNA, 19 bp, Homo sapiens
  siRNA target sequence for PCDHGB2 (NM_018923.2,394-412).
ctattcaaacagactaaga

SEQ ID NO: 373606 - DNA, 19 bp, Homo sapiens
  siRNA target sequence for PCDHGB2 (NM_018923.2,403-421).
cagactaagattaatttaa

SEQ ID NO: 373607 - DNA, 19 bp, Homo sapiens
  siRNA target sequence for PCDHGB2 (NM_018923.2,435-453).
cactaagccaggtacaaca

SEQ ID NO: 373608 - DNA, 19 bp, Homo sapiens
  siRNA target sequence for PCDHGB2 (NM_018923.2,437-455).
ctaagccaggtacaacatt

SEQ ID NO: 373609 - DNA, 19 bp, Homo sapiens
  siRNA target sequence for PCDHGB2 (NM_018923.2,441-459).
gccaggtacaacatttcca

SEQ ID NO: 373610 - DNA, 19 bp, Homo sapiens
  siRNA target sequence for PCDHGB2 (NM_018923.2,487-505).
ggtcctaactcactacaaa

SEQ ID NO: 373611 - DNA, 19 bp, Homo sapiens
  siRNA target sequence for PCDHGB2 (NM_018923.2,490-508).
cctaactcactacaaagat

SEQ ID NO: 373612 - DNA, 19 bp, Homo sapiens
  siRNA target sequence for PCDHGB2 (NM_018923.2,506-524).
gataccaccttaatgacaa

SEQ ID NO: 373613 - DNA, 19 bp, Homo sapiens
  siRNA target sequence for PCDHGB2 (NM_018923.2,535-553).
gatctcgctgagaaacaga

SEQ ID NO: 373614 - DNA, 19 bp, Homo sapiens
  siRNA target sequence for PCDHGB2 (NM_018923.2,552-570).
gactccagatggtcgtaaa

SEQ ID NO: 373615 - DNA, 19 bp, Homo sapiens
  siRNA target sequence for PCDHGB2 (NM_018923.2,566-584).
gtaaatatcctgagttgat

SEQ ID NO: 373616 - DNA, 19 bp, Homo sapiens
  siRNA target sequence for PCDHGB2 (NM_018923.2,651-669).
cggagacccacctcaaagt

SEQ ID NO: 373617 - DNA, 19 bp, Homo sapiens
  siRNA target sequence for PCDHGB2 (NM_018923.2,674-692).
cgacccaaatccgaatcaa

SEQ ID NO: 373618 - DNA, 19 bp, Homo sapiens
  siRNA target sequence for PCDHGB2 (NM_018923.2,675-693).
gacccaaatccgaatcaaa

SEQ ID NO: 373619 - DNA, 19 bp, Homo sapiens
  siRNA target sequence for PCDHGB2 (NM_018923.2,677-695).
cccaaatccgaatcaaagt

SEQ ID NO: 373620 - DNA, 19 bp, Homo sapiens
  siRNA target sequence for PCDHGB2 (NM_018923.2,862-880).
gtgaaacactttttcaact

SEQ ID NO: 373621 - DNA, 19 bp, Homo sapiens
  siRNA target sequence for PCDHGB2 (NM_018923.2,928-946).
gagattgcaagtagttaca

SEQ ID NO: 373622 - DNA, 19 bp, Homo sapiens
  siRNA target sequence for PCDHGB2 (NM_018923.2,930-948).
gattgcaagtagttacact

SEQ ID NO: 373623 - DNA, 19 bp, Homo sapiens
  siRNA target sequence for PCDHGB2 (NM_018923.2,947-965).
ctctgagtatcgaagcaaa

SEQ ID NO: 373624 - DNA, 19 bp, Homo sapiens
  siRNA target sequence for PCDHGB2 (NM_018923.2,951-969).
gagtatcgaagcaaaagat

SEQ ID NO: 373625 - DNA, 19 bp, Homo sapiens
  siRNA target sequence for PCDHGB2 (NM_018923.2,992-1010).
gcagtatccaagttgaaat

SEQ ID NO: 373626 - DNA, 19 bp, Homo sapiens
  siRNA target sequence for PCDHGB2 (NM_018923.2,993-1011).
cagtatccaagttgaaatt

SEQ ID NO: 373627 - DNA, 19 bp, Homo sapiens
  siRNA target sequence for PCDHGB2 (NM_018923.2,1023-1041).
cgattgtgcacctgaagtt

SEQ ID NO: 373628 - DNA, 19 bp, Homo sapiens
  siRNA target sequence for PCDHGB2 (NM_018923.2,1024-1042).
gattgtgcacctgaagtta

SEQ ID NO: 373629 - DNA, 19 bp, Homo sapiens
  siRNA target sequence for PCDHGB2 (NM_018923.2,1039-1057).
gttattgtgacttcagtat

SEQ ID NO: 373630 - DNA, 19 bp, Homo sapiens
  siRNA target sequence for PCDHGB2 (NM_018923.2,1403-1421).
gcgcctctatcgctcaaat

SEQ ID NO: 373631 - DNA, 19 bp, Homo sapiens
  siRNA target sequence for PCDHGB2 (NM_018923.2,1407-1425).
ctctatcgctcaaatcagt

SEQ ID NO: 373632 - DNA, 19 bp, Homo sapiens
  siRNA target sequence for PCDHGB2 (NM_018923.2,2260-2278).
ctgtgtgttgcctcacaat

SEQ ID NO: 373633 - DNA, 19 bp, Homo sapiens
  siRNA target sequence for PCDHGB2 (NM_018923.2,2262-2280).
gtgtgttgcctcacaatca

SEQ ID NO: 373634 - DNA, 19 bp, Homo sapiens
  siRNA target sequence for PCDHGB2 (NM_018923.2,2307-2325).
cataaccccggaattggtt

SEQ ID NO: 373635 - DNA, 19 bp, Homo sapiens
  siRNA target sequence for PCDHGB2 (NM_018923.2,2392-2410).
gtcccttttgcctcagata

SEQ ID NO: 373636 - DNA, 19 bp, Homo sapiens
  siRNA target sequence for PCDHGB3 (NM_018924.2,34-52).
gggcagaggcgaatgctat

SEQ ID NO: 373637 - DNA, 19 bp, Homo sapiens
  siRNA target sequence for PCDHGB3 (NM_018924.2,35-53).
ggcagaggcgaatgctatt

SEQ ID NO: 373638 - DNA, 19 bp, Homo sapiens
  siRNA target sequence for PCDHGB3 (NM_018924.2,36-54).
gcagaggcgaatgctattt

SEQ ID NO: 373639 - DNA, 19 bp, Homo sapiens
  siRNA target sequence for PCDHGB3 (NM_018924.2,165-183).
gtttggcgtgggggattta

SEQ ID NO: 373640 - DNA, 19 bp, Homo sapiens
  siRNA target sequence for PCDHGB3 (NM_018924.2,169-187).
ggcgtgggggatttaccta

SEQ ID NO: 373641 - DNA, 19 bp, Homo sapiens
  siRNA target sequence for PCDHGB3 (NM_018924.2,192-210).
gaacctgcgggttattgca

SEQ ID NO: 373642 - DNA, 19 bp, Homo sapiens
  siRNA target sequence for PCDHGB3 (NM_018924.2,236-254).
ccgaaaatgggaacttact

SEQ ID NO: 373643 - DNA, 19 bp, Homo sapiens
  siRNA target sequence for PCDHGB3 (NM_018924.2,299-317).
cgacgtgtgttctggaatt

SEQ ID NO: 373644 - DNA, 19 bp, Homo sapiens
  siRNA target sequence for PCDHGB3 (NM_018924.2,328-346).
gctgaaaagcctttaaact

SEQ ID NO: 373645 - DNA, 19 bp, Homo sapiens
  siRNA target sequence for PCDHGB3 (NM_018924.2,392-410).
cgacctttagccaaaatat

SEQ ID NO: 373646 - DNA, 19 bp, Homo sapiens
  siRNA target sequence for PCDHGB3 (NM_018924.2,523-541).
gatccgcacttctctttga

SEQ ID NO: 373647 - DNA, 19 bp, Homo sapiens
  siRNA target sequence for PCDHGB3 (NM_018924.2,569-587).
ggtacccagagctagtact

SEQ ID NO: 373648 - DNA, 19 bp, Homo sapiens
  siRNA target sequence for PCDHGB3 (NM_018924.2,709-727).
gataaccccccagtattta

SEQ ID NO: 373649 - DNA, 19 bp, Homo sapiens
  siRNA target sequence for PCDHGB3 (NM_018924.2,735-753).
catgtacagggtcaatgtt

SEQ ID NO: 373650 - DNA, 19 bp, Homo sapiens
  siRNA target sequence for PCDHGB3 (NM_018924.2,768-786).
cgctggctcctccgtatta

SEQ ID NO: 373651 - DNA, 19 bp, Homo sapiens
  siRNA target sequence for PCDHGB3 (NM_018924.2,769-787).
gctggctcctccgtattaa

SEQ ID NO: 373652 - DNA, 19 bp, Homo sapiens
  siRNA target sequence for PCDHGB3 (NM_018924.2,770-788).
ctggctcctccgtattaaa

SEQ ID NO: 373653 - DNA, 19 bp, Homo sapiens
  siRNA target sequence for PCDHGB3 (NM_018924.2,773-791).
gctcctccgtattaaaagt

SEQ ID NO: 373654 - DNA, 19 bp, Homo sapiens
  siRNA target sequence for PCDHGB3 (NM_018924.2,814-832).
ggcatcaatgccgaaatca

SEQ ID NO: 373655 - DNA, 19 bp, Homo sapiens
  siRNA target sequence for PCDHGB3 (NM_018924.2,815-833).
gcatcaatgccgaaatcat

SEQ ID NO: 373656 - DNA, 19 bp, Homo sapiens
  siRNA target sequence for PCDHGB3 (NM_018924.2,834-852).
ctatgccttcatcaatatt

SEQ ID NO: 373657 - DNA, 19 bp, Homo sapiens
  siRNA target sequence for PCDHGB3 (NM_018924.2,873-891).
gttcaagctggacagtaaa

SEQ ID NO: 373658 - DNA, 19 bp, Homo sapiens
  siRNA target sequence for PCDHGB3 (NM_018924.2,947-965).
caattggggtggaagcaaa

SEQ ID NO: 373659 - DNA, 19 bp, Homo sapiens
  siRNA target sequence for PCDHGB3 (NM_018924.2,1038-1056).
gataaccctggcttctgaa

SEQ ID NO: 373660 - DNA, 19 bp, Homo sapiens
  siRNA target sequence for PCDHGB3 (NM_018924.2,1048-1066).
gcttctgaatcccaacata

SEQ ID NO: 373661 - DNA, 19 bp, Homo sapiens
  siRNA target sequence for PCDHGB3 (NM_018924.2,1049-1067).
cttctgaatcccaacatat

SEQ ID NO: 373662 - DNA, 19 bp, Homo sapiens
  siRNA target sequence for PCDHGB3 (NM_018924.2,1141-1159).
gaaatcctatgccaactaa

SEQ ID NO: 373663 - DNA, 19 bp, Homo sapiens
  siRNA target sequence for PCDHGB3 (NM_018924.2,1163-1181).
gaaacttcccctttaaaat

SEQ ID NO: 373664 - DNA, 19 bp, Homo sapiens
  siRNA target sequence for PCDHGB3 (NM_018924.2,1454-1472).
gccttgtctcctactacat

SEQ ID NO: 373665 - DNA, 19 bp, Homo sapiens
  siRNA target sequence for PCDHGB3 (NM_018924.2,2051-2069).
ctcaggcggagctacagtt

SEQ ID NO: 373666 - DNA, 19 bp, Homo sapiens
  siRNA target sequence for PCDHGB3 (NM_018924.2,2280-2298).
ctcaaacaccgagtttaaa

SEQ ID NO: 373667 - DNA, 19 bp, Homo sapiens
  siRNA target sequence for PCDHGB3 (NM_018924.2,2282-2300).
caaacaccgagtttaaatt

SEQ ID NO: 373668 - DNA, 19 bp, Homo sapiens
  siRNA target sequence for PCDHGB3 (NM_018924.2,2326-2344).
gcaccacaagatcttctat

SEQ ID NO: 373669 - DNA, 19 bp, Homo sapiens
  siRNA target sequence for PCDHGB3 (NM_018924.2,2393-2411).
ctaattcaggcaatttgca

SEQ ID NO: 373670 - DNA, 19 bp, Homo sapiens
  siRNA target sequence for PCDHGB5 (NM_018925.2,449-467).
caagatttatactagaagt

SEQ ID NO: 373671 - DNA, 19 bp, Homo sapiens
  siRNA target sequence for PCDHGB5 (NM_018925.2,495-513).
ctctctgcagaagtataaa

SEQ ID NO: 373672 - DNA, 19 bp, Homo sapiens
  siRNA target sequence for PCDHGB5 (NM_018925.2,596-614).
ccttagaccgggaacaaca

SEQ ID NO: 373673 - DNA, 19 bp, Homo sapiens
  siRNA target sequence for PCDHGB5 (NM_018925.2,694-712).
gtaaccgacgccaatgata

SEQ ID NO: 373674 - DNA, 19 bp, Homo sapiens
  siRNA target sequence for PCDHGB5 (NM_018925.2,846-864).
cagaaccgggcaaatcttt

SEQ ID NO: 373675 - DNA, 19 bp, Homo sapiens
  siRNA target sequence for PCDHGB5 (NM_018925.2,851-869).
ccgggcaaatctttagtct

SEQ ID NO: 373676 - DNA, 19 bp, Homo sapiens
  siRNA target sequence for PCDHGB5 (NM_018925.2,919-937).
gagaccaaggaatattcaa

SEQ ID NO: 373677 - DNA, 19 bp, Homo sapiens
  siRNA target sequence for PCDHGB5 (NM_018925.2,964-982).
ggactggttgcacaatgta

SEQ ID NO: 373678 - DNA, 19 bp, Homo sapiens
  siRNA target sequence for PCDHGB5 (NM_018925.2,1020-1038).
cccagaagttacattccat

SEQ ID NO: 373679 - DNA, 19 bp, Homo sapiens
  siRNA target sequence for PCDHGB5 (NM_018925.2,1031-1049).
cattccattctctacttga

SEQ ID NO: 373680 - DNA, 19 bp, Homo sapiens
  siRNA target sequence for PCDHGB5 (NM_018925.2,1036-1054).
cattctctacttgaaatga

SEQ ID NO: 373681 - DNA, 19 bp, Homo sapiens
  siRNA target sequence for PCDHGB5 (NM_018925.2,1065-1083).
cgcggtgcctggaacacta

SEQ ID NO: 373682 - DNA, 19 bp, Homo sapiens
  siRNA target sequence for PCDHGB5 (NM_018925.2,1081-1099).
ctaattgctttgatcaaaa

SEQ ID NO: 373683 - DNA, 19 bp, Homo sapiens
  siRNA target sequence for PCDHGB5 (NM_018925.2,1119-1137).
ggaaaatggggaggttaat

SEQ ID NO: 373684 - DNA, 19 bp, Homo sapiens
  siRNA target sequence for PCDHGB5 (NM_018925.2,1126-1144).
ggggaggttaattgtcaat

SEQ ID NO: 373685 - DNA, 19 bp, Homo sapiens
  siRNA target sequence for PCDHGB5 (NM_018925.2,1127-1145).
gggaggttaattgtcaatt

SEQ ID NO: 373686 - DNA, 19 bp, Homo sapiens
  siRNA target sequence for PCDHGB5 (NM_018925.2,1128-1146).
ggaggttaattgtcaatta

SEQ ID NO: 373687 - DNA, 19 bp, Homo sapiens
  siRNA target sequence for PCDHGB5 (NM_018925.2,1147-1165).
caaggcgaagtccctttta

SEQ ID NO: 373688 - DNA, 19 bp, Homo sapiens
  siRNA target sequence for PCDHGB5 (NM_018925.2,1150-1168).
ggcgaagtcccttttaaga

SEQ ID NO: 373689 - DNA, 19 bp, Homo sapiens
  siRNA target sequence for PCDHGB5 (NM_018925.2,1151-1169).
gcgaagtcccttttaagat

SEQ ID NO: 373690 - DNA, 19 bp, Homo sapiens
  siRNA target sequence for PCDHGB5 (NM_018925.2,1152-1170).
cgaagtcccttttaagatt

SEQ ID NO: 373691 - DNA, 19 bp, Homo sapiens
  siRNA target sequence for PCDHGB5 (NM_018925.2,1175-1193).
cttcatccaaaaattcgta

SEQ ID NO: 373692 - DNA, 19 bp, Homo sapiens
  siRNA target sequence for PCDHGB5 (NM_018925.2,1227-1245).
gcaaaccccggagtacaat

SEQ ID NO: 373693 - DNA, 19 bp, Homo sapiens
  siRNA target sequence for PCDHGB5 (NM_018925.2,1299-1317).
cgtcatcctacatatcaga

SEQ ID NO: 373694 - DNA, 19 bp, Homo sapiens
  siRNA target sequence for PCDHGB5 (NM_018925.2,1348-1366).
caggcgtcctacttagtca

SEQ ID NO: 373695 - DNA, 19 bp, Homo sapiens
  siRNA target sequence for PCDHGB5 (NM_018925.2,1363-1381).
gtcagtgtacccgaaaaca

SEQ ID NO: 373696 - DNA, 19 bp, Homo sapiens
  siRNA target sequence for PCDHGB6 (NM_018926.2,385-403).
cacgcccctcaatttgata

SEQ ID NO: 373697 - DNA, 19 bp, Homo sapiens
  siRNA target sequence for PCDHGB6 (NM_018926.2,469-487).
gccacggatcctgatataa

SEQ ID NO: 373698 - DNA, 19 bp, Homo sapiens
  siRNA target sequence for PCDHGB6 (NM_018926.2,473-491).
cggatcctgatataaacat

SEQ ID NO: 373699 - DNA, 19 bp, Homo sapiens
  siRNA target sequence for PCDHGB6 (NM_018926.2,513-531).
gataaactctaatccttat

SEQ ID NO: 373700 - DNA, 19 bp, Homo sapiens
  siRNA target sequence for PCDHGB6 (NM_018926.2,615-633).
gagatctcatagcttgata

SEQ ID NO: 373701 - DNA, 19 bp, Homo sapiens
  siRNA target sequence for PCDHGB6 (NM_018926.2,617-635).
gatctcatagcttgatatt

SEQ ID NO: 373702 - DNA, 19 bp, Homo sapiens
  siRNA target sequence for PCDHGB6 (NM_018926.2,668-686).
gtgccaccgctcacataga

SEQ ID NO: 373703 - DNA, 19 bp, Homo sapiens
  siRNA target sequence for PCDHGB6 (NM_018926.2,670-688).
gccaccgctcacatagaaa

SEQ ID NO: 373704 - DNA, 19 bp, Homo sapiens
  siRNA target sequence for PCDHGB6 (NM_018926.2,671-689).
ccaccgctcacatagaaat

SEQ ID NO: 373705 - DNA, 19 bp, Homo sapiens
  siRNA target sequence for PCDHGB6 (NM_018926.2,672-690).
caccgctcacatagaaatt

SEQ ID NO: 373706 - DNA, 19 bp, Homo sapiens
  siRNA target sequence for PCDHGB6 (NM_018926.2,728-746).
gcagagacgaatatagaat

SEQ ID NO: 373707 - DNA, 19 bp, Homo sapiens
  siRNA target sequence for PCDHGB6 (NM_018926.2,729-747).
cagagacgaatatagaatt

SEQ ID NO: 373708 - DNA, 19 bp, Homo sapiens
  siRNA target sequence for PCDHGB6 (NM_018926.2,743-761).
gaattagtcttagtgaaaa

SEQ ID NO: 373709 - DNA, 19 bp, Homo sapiens
  siRNA target sequence for PCDHGB6 (NM_018926.2,813-831).
gggggtcaatgctgagata

SEQ ID NO: 373710 - DNA, 19 bp, Homo sapiens
  siRNA target sequence for PCDHGB6 (NM_018926.2,817-835).
gtcaatgctgagataaact

SEQ ID NO: 373711 - DNA, 19 bp, Homo sapiens
  siRNA target sequence for PCDHGB6 (NM_018926.2,823-841).
gctgagataaactactact

SEQ ID NO: 373712 - DNA, 19 bp, Homo sapiens
  siRNA target sequence for PCDHGB6 (NM_018926.2,896-914).
gtatgattaagaataacca

SEQ ID NO: 373713 - DNA, 19 bp, Homo sapiens
  siRNA target sequence for PCDHGB6 (NM_018926.2,906-924).
gaataaccagtcatttgat

SEQ ID NO: 373714 - DNA, 19 bp, Homo sapiens
  siRNA target sequence for PCDHGB6 (NM_018926.2,981-999).
ctctacccagtgtaaagta

SEQ ID NO: 373715 - DNA, 19 bp, Homo sapiens
  siRNA target sequence for PCDHGB6 (NM_018926.2,983-1001).
ctacccagtgtaaagtaat

SEQ ID NO: 373716 - DNA, 19 bp, Homo sapiens
  siRNA target sequence for PCDHGB6 (NM_018926.2,987-1005).
ccagtgtaaagtaatcata

SEQ ID NO: 373717 - DNA, 19 bp, Homo sapiens
  siRNA target sequence for PCDHGB6 (NM_018926.2,1148-1166).
ggtgtaatatagaaacaga

SEQ ID NO: 373718 - DNA, 19 bp, Homo sapiens
  siRNA target sequence for PCDHGB6 (NM_018926.2,1163-1181).
cagacattccattcaagat

SEQ ID NO: 373719 - DNA, 19 bp, Homo sapiens
  siRNA target sequence for PCDHGB6 (NM_018926.2,1193-1211).
ccaataactactacaaact

SEQ ID NO: 373720 - DNA, 19 bp, Homo sapiens
  siRNA target sequence for PCDHGB6 (NM_018926.2,1235-1253).
gagagcagacaccagaata

SEQ ID NO: 373721 - DNA, 19 bp, Homo sapiens
  siRNA target sequence for PCDHGB6 (NM_018926.2,1281-1299).
gggcaagccgcctctttct

SEQ ID NO: 373722 - DNA, 19 bp, Homo sapiens
  siRNA target sequence for PCDHGB6 (NM_018926.2,1307-1325).
gaagcatcaccttgtatgt

SEQ ID NO: 373723 - DNA, 19 bp, Homo sapiens
  siRNA target sequence for PCDHGB6 (NM_018926.2,1716-1734).
cgcgttcttcgatatggta

SEQ ID NO: 373724 - DNA, 19 bp, Homo sapiens
  siRNA target sequence for PCDHGB6 (NM_018926.2,2245-2263).
ccttattcttataatctgt

SEQ ID NO: 373725 - DNA, 19 bp, Homo sapiens
  siRNA target sequence for PCDHGB6 (NM_018926.2,2272-2290).
catacgggtacaaaagagt

SEQ ID NO: 373726 - DNA, 19 bp, Homo sapiens
  siRNA target sequence for PCDHGB6 (NM_018926.2,2276-2294).
cgggtacaaaagagtttaa

SEQ ID NO: 373727 - DNA, 19 bp, Homo sapiens
  siRNA target sequence for PCDHGB6 (NM_018926.2,2277-2295).
gggtacaaaagagtttaat

SEQ ID NO: 373728 - DNA, 19 bp, Homo sapiens
  siRNA target sequence for PCDHGB6 (NM_018926.2,2313-2331).
gcccctacattccaatgaa

SEQ ID NO: 373729 - DNA, 19 bp, Homo sapiens
  siRNA target sequence for PCDHGB6 (NM_018926.2,2315-2333).
ccctacattccaatgaaga

SEQ ID NO: 373730 - DNA, 19 bp, Homo sapiens
  siRNA target sequence for PCDHGB6 (NM_018926.2,2332-2350).
gacatggtttgcagtgttt

SEQ ID NO: 373731 - DNA, 19 bp, Homo sapiens
  siRNA target sequence for PCDHGB6 (NM_018926.2,2374-2392).
catggtggggaggatttga

SEQ ID NO: 373732 - DNA, 19 bp, Homo sapiens
  siRNA target sequence for PCDHGB6 (NM_018926.2,2377-2395).
ggtggggaggatttgactt

SEQ ID NO: 373733 - DNA, 19 bp, Homo sapiens
  siRNA target sequence for PCDHGB7 (NM_018927.2,535-553).
ccctcaattccggaaagat

SEQ ID NO: 373734 - DNA, 19 bp, Homo sapiens
  siRNA target sequence for PCDHGB7 (NM_018927.2,537-555).
ctcaattccggaaagatga

SEQ ID NO: 373735 - DNA, 19 bp, Homo sapiens
  siRNA target sequence for PCDHGB7 (NM_018927.2,589-607).
ggggatgggaacaattctt

SEQ ID NO: 373736 - DNA, 19 bp, Homo sapiens
  siRNA target sequence for PCDHGB7 (NM_018927.2,614-632).
gcagaagatcctgatatta

SEQ ID NO: 373737 - DNA, 19 bp, Homo sapiens
  siRNA target sequence for PCDHGB7 (NM_018927.2,617-635).
gaagatcctgatattagta

SEQ ID NO: 373738 - DNA, 19 bp, Homo sapiens
  siRNA target sequence for PCDHGB7 (NM_018927.2,623-641).
cctgatattagtatgaatt

SEQ ID NO: 373739 - DNA, 19 bp, Homo sapiens
  siRNA target sequence for PCDHGB7 (NM_018927.2,646-664).
gagcaaataccaactaagt

SEQ ID NO: 373740 - DNA, 19 bp, Homo sapiens
  siRNA target sequence for PCDHGB7 (NM_018927.2,665-683).
cctaacgagtatttctcat

SEQ ID NO: 373741 - DNA, 19 bp, Homo sapiens
  siRNA target sequence for PCDHGB7 (NM_018927.2,666-684).
ctaacgagtatttctcatt

SEQ ID NO: 373742 - DNA, 19 bp, Homo sapiens
  siRNA target sequence for PCDHGB7 (NM_018927.2,775-793).
ggtactgaccgccttagat

SEQ ID NO: 373743 - DNA, 19 bp, Homo sapiens
  siRNA target sequence for PCDHGB7 (NM_018927.2,814-832).
cggtactgctcagataaga

SEQ ID NO: 373744 - DNA, 19 bp, Homo sapiens
  siRNA target sequence for PCDHGB7 (NM_018927.2,1082-1100).
gaaagatatacgataaaca

SEQ ID NO: 373745 - DNA, 19 bp, Homo sapiens
  siRNA target sequence for PCDHGB7 (NM_018927.2,1086-1104).
gatatacgataaacataga

SEQ ID NO: 373746 - DNA, 19 bp, Homo sapiens
  siRNA target sequence for PCDHGB7 (NM_018927.2,1126-1144).
ctcaacacggtgtaaagta

SEQ ID NO: 373747 - DNA, 19 bp, Homo sapiens
  siRNA target sequence for PCDHGB7 (NM_018927.2,1128-1146).
caacacggtgtaaagtaat

SEQ ID NO: 373748 - DNA, 19 bp, Homo sapiens
  siRNA target sequence for PCDHGB7 (NM_018927.2,1134-1152).
ggtgtaaagtaattgtaga

SEQ ID NO: 373749 - DNA, 19 bp, Homo sapiens
  siRNA target sequence for PCDHGB7 (NM_018927.2,1285-1303).
ggaagtcaggtgtagctta

SEQ ID NO: 373750 - DNA, 19 bp, Homo sapiens
  siRNA target sequence for PCDHGB7 (NM_018927.2,1291-1309).
caggtgtagcttaagtaga

SEQ ID NO: 373751 - DNA, 19 bp, Homo sapiens
  siRNA target sequence for PCDHGB7 (NM_018927.2,1305-1323).
gtagaggtgttccatttaa

SEQ ID NO: 373752 - DNA, 19 bp, Homo sapiens
  siRNA target sequence for PCDHGB7 (NM_018927.2,1308-1326).
gaggtgttccatttaagat

SEQ ID NO: 373753 - DNA, 19 bp, Homo sapiens
  siRNA target sequence for PCDHGB7 (NM_018927.2,1328-1346).
cattcttcttctaataatt

SEQ ID NO: 373754 - DNA, 19 bp, Homo sapiens
  siRNA target sequence for PCDHGB7 (NM_018927.2,1427-1445).
ggcaagcctccgttatcct

SEQ ID NO: 373755 - DNA, 19 bp, Homo sapiens
  siRNA target sequence for PCDHGB7 (NM_018927.2,1436-1454).
ccgttatcctccagcaaaa

SEQ ID NO: 373756 - DNA, 19 bp, Homo sapiens
  siRNA target sequence for PCDHGB7 (NM_018927.2,1456-1474).
cataaccctgcacattact

SEQ ID NO: 373757 - DNA, 19 bp, Homo sapiens
  siRNA target sequence for PCDHGB7 (NM_018927.2,2068-2086).
cctgctagtcgctgtaaga

SEQ ID NO: 373758 - DNA, 19 bp, Homo sapiens
  siRNA target sequence for PCDHGB7 (NM_018927.2,2071-2089).
gctagtcgctgtaagagat

SEQ ID NO: 373759 - DNA, 19 bp, Homo sapiens
  siRNA target sequence for PCDHGB7 (NM_018927.2,2263-2281).
ggtgattctagctattgct

SEQ ID NO: 373760 - DNA, 19 bp, Homo sapiens
  siRNA target sequence for PCDHGB7 (NM_018927.2,2285-2303).
cgcctgcgacagtctttca

SEQ ID NO: 373761 - DNA, 19 bp, Homo sapiens
  siRNA target sequence for PCDHGB7 (NM_018927.2,2385-2403).
cgttgccctatgcctataa

SEQ ID NO: 373762 - DNA, 19 bp, Homo sapiens
  siRNA target sequence for PCDHGB7 (NM_018927.2,2389-2407).
gccctatgcctataatttt

SEQ ID NO: 373763 - DNA, 19 bp, Homo sapiens
  siRNA target sequence for PCDHGB7 (NM_018927.2,2475-2493).
cacaagataacctcaacaa

SEQ ID NO: 373764 - DNA, 19 bp, Homo sapiens
  siRNA target sequence for PCDHGB7 (NM_018927.2,2503-2521).
gctactggctagcatttta

SEQ ID NO: 373765 - DNA, 19 bp, Homo sapiens
  siRNA target sequence for PCDHGB7 (NM_018927.2,2504-2522).
ctactggctagcattttaa

SEQ ID NO: 373766 - DNA, 19 bp, Homo sapiens
  siRNA target sequence for PCDHGB7 (NM_018927.2,2526-2544).
ccagcgttgaagcagataa

SEQ ID NO: 373767 - DNA, 19 bp, Homo sapiens
  siRNA target sequence for PCDHGC4 (NM_018928.2,37-55).
cggtgggctacccttttgt

SEQ ID NO: 373768 - DNA, 19 bp, Homo sapiens
  siRNA target sequence for PCDHGC4 (NM_018928.2,199-217).
gctggagaggtgaaccaaa

SEQ ID NO: 373769 - DNA, 19 bp, Homo sapiens
  siRNA target sequence for PCDHGC4 (NM_018928.2,327-345).
caccgaaggtcctttggaa

SEQ ID NO: 373770 - DNA, 19 bp, Homo sapiens
  siRNA target sequence for PCDHGC4 (NM_018928.2,329-347).
ccgaaggtcctttggaaat

SEQ ID NO: 373771 - DNA, 19 bp, Homo sapiens
  siRNA target sequence for PCDHGC4 (NM_018928.2,366-384).
gatcgtagatgtgaatgat

SEQ ID NO: 373772 - DNA, 19 bp, Homo sapiens
  siRNA target sequence for PCDHGC4 (NM_018928.2,448-466).
cagcgtttcccgttggaaa

SEQ ID NO: 373773 - DNA, 19 bp, Homo sapiens
  siRNA target sequence for PCDHGC4 (NM_018928.2,484-502).
gtggggagcaattcgatta

SEQ ID NO: 373774 - DNA, 19 bp, Homo sapiens
  siRNA target sequence for PCDHGC4 (NM_018928.2,730-748).
caatccagctacaggatta

SEQ ID NO: 373775 - DNA, 19 bp, Homo sapiens
  siRNA target sequence for PCDHGC4 (NM_018928.2,734-752).
ccagctacaggattagtgt

SEQ ID NO: 373776 - DNA, 19 bp, Homo sapiens
  siRNA target sequence for PCDHGC4 (NM_018928.2,823-841).
ggtaacgtcaccttttatt

SEQ ID NO: 373777 - DNA, 19 bp, Homo sapiens
  siRNA target sequence for PCDHGC4 (NM_018928.2,824-842).
gtaacgtcaccttttattt

SEQ ID NO: 373778 - DNA, 19 bp, Homo sapiens
  siRNA target sequence for PCDHGC4 (NM_018928.2,889-907).
cccactactggaaagctta

SEQ ID NO: 373779 - DNA, 19 bp, Homo sapiens
  siRNA target sequence for PCDHGC4 (NM_018928.2,893-911).
ctactggaaagcttactct

SEQ ID NO: 373780 - DNA, 19 bp, Homo sapiens
  siRNA target sequence for PCDHGC4 (NM_018928.2,1239-1257).
ggatcgagaggccaaatct

SEQ ID NO: 373781 - DNA, 19 bp, Homo sapiens
  siRNA target sequence for PCDHGC4 (NM_018928.2,1240-1258).
gatcgagaggccaaatcta

SEQ ID NO: 373782 - DNA, 19 bp, Homo sapiens
  siRNA target sequence for PCDHGC4 (NM_018928.2,1250-1268).
ccaaatctagctatgacat

SEQ ID NO: 373783 - DNA, 19 bp, Homo sapiens
  siRNA target sequence for PCDHGC4 (NM_018928.2,1303-1321).
ctcagtacccacagaacta

SEQ ID NO: 373784 - DNA, 19 bp, Homo sapiens
  siRNA target sequence for PCDHGC4 (NM_018928.2,1305-1323).
cagtacccacagaactatt

SEQ ID NO: 373785 - DNA, 19 bp, Homo sapiens
  siRNA target sequence for PCDHGC4 (NM_018928.2,1373-1391).
ggtcacatgaggtgtttgt

SEQ ID NO: 373786 - DNA, 19 bp, Homo sapiens
  siRNA target sequence for PCDHGC4 (NM_018928.2,1453-1471).
ggcttgaatgcgcttatct

SEQ ID NO: 373787 - DNA, 19 bp, Homo sapiens
  siRNA target sequence for PCDHGC4 (NM_018928.2,1489-1507).
cccaggaatcgagatgtat

SEQ ID NO: 373788 - DNA, 19 bp, Homo sapiens
  siRNA target sequence for PCDHGC4 (NM_018928.2,1491-1509).
caggaatcgagatgtatca

SEQ ID NO: 373789 - DNA, 19 bp, Homo sapiens
  siRNA target sequence for PCDHGC4 (NM_018928.2,1536-1554).
ccagacaggagctgttcat

SEQ ID NO: 373790 - DNA, 19 bp, Homo sapiens
  siRNA target sequence for PCDHGC4 (NM_018928.2,1643-1661).
ctgtaacagttcgtctatt

SEQ ID NO: 373791 - DNA, 19 bp, Homo sapiens
  siRNA target sequence for PCDHGC4 (NM_018928.2,1753-1771).
ggtgctggccacctaatca

SEQ ID NO: 373792 - DNA, 19 bp, Homo sapiens
  siRNA target sequence for PCDHGC4 (NM_018928.2,1756-1774).
gctggccacctaatcacaa

SEQ ID NO: 373793 - DNA, 19 bp, Homo sapiens
  siRNA target sequence for PCDHGC4 (NM_018928.2,1806-1824).
caatgcttgggtttcctat

SEQ ID NO: 373794 - DNA, 19 bp, Homo sapiens
  siRNA target sequence for PCDHGC4 (NM_018928.2,1854-1872).
gtttgcagtctctcgatat

SEQ ID NO: 373795 - DNA, 19 bp, Homo sapiens
  siRNA target sequence for PCDHGC4 (NM_018928.2,1930-1948).
gtcattgtggtaaaggata

SEQ ID NO: 373796 - DNA, 19 bp, Homo sapiens
  siRNA target sequence for PCDHGC4 (NM_018928.2,1970-1988).
cctctgttactctcttagt

SEQ ID NO: 373797 - DNA, 19 bp, Homo sapiens
  siRNA target sequence for PCDHGC4 (NM_018928.2,2083-2101).
gtgtccctagtggcaattt

SEQ ID NO: 373798 - DNA, 19 bp, Homo sapiens
  siRNA target sequence for PCDHGC4 (NM_018928.2,2087-2105).
ccctagtggcaatttgctt

SEQ ID NO: 373799 - DNA, 19 bp, Homo sapiens
  siRNA target sequence for PCDHGC4 (NM_018928.2,2125-2143).
gtggcactactctctaagt

SEQ ID NO: 373800 - DNA, 19 bp, Homo sapiens
  siRNA target sequence for PCDHGC4 (NM_018928.2,2127-2145).
ggcactactctctaagtgt

SEQ ID NO: 373801 - DNA, 19 bp, Homo sapiens
  siRNA target sequence for PCDHGC4 (NM_018928.2,2223-2241).
ggggcttcccccttccaat

SEQ ID NO: 373802 - DNA, 19 bp, Homo sapiens
  siRNA target sequence for PCDHGC4 (NM_018928.2,2267-2285).
cagatgaccctatcaagtt

SEQ ID NO: 373803 - DNA, 19 bp, Homo sapiens
  siRNA target sequence for PCDHGC4 (NM_018928.2,2274-2292).
ccctatcaagtttgttgat

SEQ ID NO: 373804 - DNA, 19 bp, Homo sapiens
  siRNA target sequence for PCDHGC4 (NM_018928.2,2276-2294).
ctatcaagtttgttgatgt

SEQ ID NO: 373805 - DNA, 19 bp, Homo sapiens
  siRNA target sequence for PCDHGC4 (NM_018928.2,2332-2350).
gcacccactcggagtgata

SEQ ID NO: 373806 - DNA, 19 bp, Homo sapiens
  siRNA target sequence for PCDHGC4 (NM_018928.2,2336-2354).
ccactcggagtgatagctt

SEQ ID NO: 373807 - DNA, 19 bp, Homo sapiens
  siRNA target sequence for PCDHGC4 (NM_018928.2,2342-2360).
ggagtgatagcttcatgat

SEQ ID NO: 373808 - DNA, 19 bp, Homo sapiens
  siRNA target sequence for PCDHGC4 (NM_018928.2,2411-2429).
gcccaccctctgatcttct

SEQ ID NO: 373809 - DNA, 19 bp, Homo sapiens
  siRNA target sequence for PCDHGC4 (NM_018928.2,2414-2432).
caccctctgatcttctcta

SEQ ID NO: 373810 - DNA, 19 bp, Homo sapiens
  siRNA target sequence for PCDHGC5 (NM_018929.2,40-58).
caagtgctgtgcatgttgt

SEQ ID NO: 373811 - DNA, 19 bp, Homo sapiens
  siRNA target sequence for PCDHGC5 (NM_018929.2,126-144).
gacgctggtggggaatgtt

SEQ ID NO: 373812 - DNA, 19 bp, Homo sapiens
  siRNA target sequence for PCDHGC5 (NM_018929.2,146-164).
ctcaggatctgggcttaaa

SEQ ID NO: 373813 - DNA, 19 bp, Homo sapiens
  siRNA target sequence for PCDHGC5 (NM_018929.2,207-225).
ggagaatgggcgctatttt

SEQ ID NO: 373814 - DNA, 19 bp, Homo sapiens
  siRNA target sequence for PCDHGC5 (NM_018929.2,208-226).
gagaatgggcgctattttt

SEQ ID NO: 373815 - DNA, 19 bp, Homo sapiens
  siRNA target sequence for PCDHGC5 (NM_018929.2,478-496).
ccggatgtgggcaccaata

SEQ ID NO: 373816 - DNA, 19 bp, Homo sapiens
  siRNA target sequence for PCDHGC5 (NM_018929.2,491-509).
ccaatactgtgagctttta

SEQ ID NO: 373817 - DNA, 19 bp, Homo sapiens
  siRNA target sequence for PCDHGC5 (NM_018929.2,525-543).
cagccacttctctctgaat

SEQ ID NO: 373818 - DNA, 19 bp, Homo sapiens
  siRNA target sequence for PCDHGC5 (NM_018929.2,757-775).
gagaatgcacccattggta

SEQ ID NO: 373819 - DNA, 19 bp, Homo sapiens
  siRNA target sequence for PCDHGC5 (NM_018929.2,815-833).
gcaccaacggccaactaga

SEQ ID NO: 373820 - DNA, 19 bp, Homo sapiens
  siRNA target sequence for PCDHGC5 (NM_018929.2,818-836).
ccaacggccaactagacta

SEQ ID NO: 373821 - DNA, 19 bp, Homo sapiens
  siRNA target sequence for PCDHGC5 (NM_018929.2,819-837).
caacggccaactagactat

SEQ ID NO: 373822 - DNA, 19 bp, Homo sapiens
  siRNA target sequence for PCDHGC5 (NM_018929.2,822-840).
cggccaactagactattct

SEQ ID NO: 373823 - DNA, 19 bp, Homo sapiens
  siRNA target sequence for PCDHGC5 (NM_018929.2,910-928).
gtgttgggtcccatagact

SEQ ID NO: 373824 - DNA, 19 bp, Homo sapiens
  siRNA target sequence for PCDHGC5 (NM_018929.2,912-930).
gttgggtcccatagacttt

SEQ ID NO: 373825 - DNA, 19 bp, Homo sapiens
  siRNA target sequence for PCDHGC5 (NM_018929.2,993-1011).
gggccactgtgtgattcaa

SEQ ID NO: 373826 - DNA, 19 bp, Homo sapiens
  siRNA target sequence for PCDHGC5 (NM_018929.2,995-1013).
gccactgtgtgattcaagt

SEQ ID NO: 373827 - DNA, 19 bp, Homo sapiens
  siRNA target sequence for PCDHGC5 (NM_018929.2,1131-1149).
ggactcaggtagaaatggt

SEQ ID NO: 373828 - DNA, 19 bp, Homo sapiens
  siRNA target sequence for PCDHGC5 (NM_018929.2,1169-1187).
ctccggacctgccatttca

SEQ ID NO: 373829 - DNA, 19 bp, Homo sapiens
  siRNA target sequence for PCDHGC5 (NM_018929.2,1171-1189).
ccggacctgccatttcaga

SEQ ID NO: 373830 - DNA, 19 bp, Homo sapiens
  siRNA target sequence for PCDHGC5 (NM_018929.2,1172-1190).
cggacctgccatttcagat

SEQ ID NO: 373831 - DNA, 19 bp, Homo sapiens
  siRNA target sequence for PCDHGC5 (NM_018929.2,1243-1261).
gaggccacatcccactata

SEQ ID NO: 373832 - DNA, 19 bp, Homo sapiens
  siRNA target sequence for PCDHGC5 (NM_018929.2,1289-1307).
gttcaccttccctacacaa

SEQ ID NO: 373833 - DNA, 19 bp, Homo sapiens
  siRNA target sequence for PCDHGC5 (NM_018929.2,1292-1310).
caccttccctacacaaaca

SEQ ID NO: 373834 - DNA, 19 bp, Homo sapiens
  siRNA target sequence for PCDHGC5 (NM_018929.2,1317-1335).
catcaggctcaacatttca

SEQ ID NO: 373835 - DNA, 19 bp, Homo sapiens
  siRNA target sequence for PCDHGC5 (NM_018929.2,1362-1380).
caaccagcagctttacact

SEQ ID NO: 373836 - DNA, 19 bp, Homo sapiens
  siRNA target sequence for PCDHGC5 (NM_018929.2,1464-1482).
cctcacctactccattgta

SEQ ID NO: 373837 - DNA, 19 bp, Homo sapiens
  siRNA target sequence for PCDHGC5 (NM_018929.2,1470-1488).
ctactccattgtaggaaat

SEQ ID NO: 373838 - DNA, 19 bp, Homo sapiens
  siRNA target sequence for PCDHGC5 (NM_018929.2,1552-1570).
gcccagcgtacctttgact

SEQ ID NO: 373839 - DNA, 19 bp, Homo sapiens
  siRNA target sequence for PCDHGC5 (NM_018929.2,1557-1575).
gcgtacctttgactatgaa

SEQ ID NO: 373840 - DNA, 19 bp, Homo sapiens
  siRNA target sequence for PCDHGC5 (NM_018929.2,1558-1576).
cgtacctttgactatgaat

SEQ ID NO: 373841 - DNA, 19 bp, Homo sapiens
  siRNA target sequence for PCDHGC5 (NM_018929.2,1562-1580).
cctttgactatgaattgct

SEQ ID NO: 373842 - DNA, 19 bp, Homo sapiens
  siRNA target sequence for PCDHGC5 (NM_018929.2,1617-1635).
cggctctcccccattgcat

SEQ ID NO: 373843 - DNA, 19 bp, Homo sapiens
  siRNA target sequence for PCDHGC5 (NM_018929.2,1641-1659).
cacatctctgcatgtgttt

SEQ ID NO: 373844 - DNA, 19 bp, Homo sapiens
  siRNA target sequence for PCDHGC5 (NM_018929.2,1660-1678).
gtcctagacgagaatgata

SEQ ID NO: 373845 - DNA, 19 bp, Homo sapiens
  siRNA target sequence for PCDHGC5 (NM_018929.2,2095-2113).
gcgaccgtcagtctcttat

SEQ ID NO: 373846 - DNA, 19 bp, Homo sapiens
  siRNA target sequence for PCDHGC5 (NM_018929.2,2210-2228).
cctccccggacttctataa

SEQ ID NO: 373847 - DNA, 19 bp, Homo sapiens
  siRNA target sequence for PCDHGC5 (NM_018929.2,2213-2231).
ccccggacttctataagca

SEQ ID NO: 373848 - DNA, 19 bp, Homo sapiens
  siRNA target sequence for PCDHGC5 (NM_018929.2,2258-2276).
cggacggcacgctcaagta

SEQ ID NO: 373849 - DNA, 19 bp, Homo sapiens
  siRNA target sequence for PCDHGC5 (NM_018929.2,2260-2278).
gacggcacgctcaagtaca

SEQ ID NO: 373850 - DNA, 19 bp, Homo sapiens
  siRNA target sequence for PCDHGC5 (NM_018929.2,2349-2367).
cggcagtgacttcactttt

SEQ ID NO: 373851 - DNA, 19 bp, Homo sapiens
  siRNA target sequence for PCDHGC5 (NM_018929.2,2421-2439).
catccggtcccgctctaat

SEQ ID NO: 373852 - DNA, 19 bp, Homo sapiens
  siRNA target sequence for PDE7B (NM_018945.2,316-334).
gagaggtgtggcgaaatct

SEQ ID NO: 373853 - DNA, 19 bp, Homo sapiens
  siRNA target sequence for PDE7B (NM_018945.2,320-338).
ggtgtggcgaaatcttgtt

SEQ ID NO: 373854 - DNA, 19 bp, Homo sapiens
  siRNA target sequence for PDE7B (NM_018945.2,321-339).
gtgtggcgaaatcttgttt

SEQ ID NO: 373855 - DNA, 19 bp, Homo sapiens
  siRNA target sequence for PDE7B (NM_018945.2,372-390).
catgctgggagatatacga

SEQ ID NO: 373856 - DNA, 19 bp, Homo sapiens
  siRNA target sequence for PDE7B (NM_018945.2,425-443).
gtggctcctacccattcat

SEQ ID NO: 373857 - DNA, 19 bp, Homo sapiens
  siRNA target sequence for PDE7B (NM_018945.2,445-463).
gacttccgcctacttaaca

SEQ ID NO: 373858 - DNA, 19 bp, Homo sapiens
  siRNA target sequence for PDE7B (NM_018945.2,447-465).
cttccgcctacttaacagt

SEQ ID NO: 373859 - DNA, 19 bp, Homo sapiens
  siRNA target sequence for PDE7B (NM_018945.2,451-469).
cgcctacttaacagtacaa

SEQ ID NO: 373860 - DNA, 19 bp, Homo sapiens
  siRNA target sequence for PDE7B (NM_018945.2,457-475).
cttaacagtacaacatact

SEQ ID NO: 373861 - DNA, 19 bp, Homo sapiens
  siRNA target sequence for PDE7B (NM_018945.2,502-520).
gtgaaaagactattaagct

SEQ ID NO: 373862 - DNA, 19 bp, Homo sapiens
  siRNA target sequence for PDE7B (NM_018945.2,605-623).
gacaagcaaggcatatgct

SEQ ID NO: 373863 - DNA, 19 bp, Homo sapiens
  siRNA target sequence for PDE7B (NM_018945.2,660-678).
gtttgatcgcttgacaaat

SEQ ID NO: 373864 - DNA, 19 bp, Homo sapiens
  siRNA target sequence for PDE7B (NM_018945.2,699-717).
gttgtgccacctcttcaat

SEQ ID NO: 373865 - DNA, 19 bp, Homo sapiens
  siRNA target sequence for PDE7B (NM_018945.2,756-774).
gaccttacaccgattttta

SEQ ID NO: 373866 - DNA, 19 bp, Homo sapiens
  siRNA target sequence for PDE7B (NM_018945.2,758-776).
ccttacaccgatttttagt

SEQ ID NO: 373867 - DNA, 19 bp, Homo sapiens
  siRNA target sequence for PDE7B (NM_018945.2,800-818).
gccaaaacccgtatcacaa

SEQ ID NO: 373868 - DNA, 19 bp, Homo sapiens
  siRNA target sequence for PDE7B (NM_018945.2,801-819).
ccaaaacccgtatcacaat

SEQ ID NO: 373869 - DNA, 19 bp, Homo sapiens
  siRNA target sequence for PDE7B (NM_018945.2,861-879).
cctgaaagagccaaagctt

SEQ ID NO: 373870 - DNA, 19 bp, Homo sapiens
  siRNA target sequence for PDE7B (NM_018945.2,953-971).
gggtgaaccagccattttt

SEQ ID NO: 373871 - DNA, 19 bp, Homo sapiens
  siRNA target sequence for PDE7B (NM_018945.2,987-1005).
ccatcttgcaaacctatat

SEQ ID NO: 373872 - DNA, 19 bp, Homo sapiens
  siRNA target sequence for PDE7B (NM_018945.2,1030-1048).
catcactggcgatctacaa

SEQ ID NO: 373873 - DNA, 19 bp, Homo sapiens
  siRNA target sequence for PDE7B (NM_018945.2,1051-1069).
ggcatgcttcgagaatcaa

SEQ ID NO: 373874 - DNA, 19 bp, Homo sapiens
  siRNA target sequence for PDE7B (NM_018945.2,1188-1206).
cctccacaataaagactta

SEQ ID NO: 373875 - DNA, 19 bp, Homo sapiens
  siRNA target sequence for PDE7B (NM_018945.2,1240-1258).
cttcagatcgccttgaagt

SEQ ID NO: 373876 - DNA, 19 bp, Homo sapiens
  siRNA target sequence for PDE7B (NM_018945.2,1266-1284).
catttgcaatccttgtaga

SEQ ID NO: 373877 - DNA, 19 bp, Homo sapiens
  siRNA target sequence for PDE7B (NM_018945.2,1379-1397).
ctctttgtaatcaacagaa

SEQ ID NO: 373878 - DNA, 19 bp, Homo sapiens
  siRNA target sequence for PDE7B (NM_018945.2,1404-1422).
catccctagtatacaaatt

SEQ ID NO: 373879 - DNA, 19 bp, Homo sapiens
  siRNA target sequence for PDE7B (NM_018945.2,1456-1474).
cgggaatgggcccatttca

SEQ ID NO: 373880 - DNA, 19 bp, Homo sapiens
  siRNA target sequence for PDE7B (NM_018945.2,1508-1526).
gccacctcgcacacaacaa

SEQ ID NO: 373881 - DNA, 19 bp, Homo sapiens
  siRNA target sequence for HOXC5 (NM_018953.2,81-99).
ctcctacgtagccaattca

SEQ ID NO: 373882 - DNA, 19 bp, Homo sapiens
  siRNA target sequence for HOXC5 (NM_018953.2,83-101).
cctacgtagccaattcatt

SEQ ID NO: 373883 - DNA, 19 bp, Homo sapiens
  siRNA target sequence for HOXC5 (NM_018953.2,87-105).
cgtagccaattcattctat

SEQ ID NO: 373884 - DNA, 19 bp, Homo sapiens
  siRNA target sequence for HOXC5 (NM_018953.2,88-106).
gtagccaattcattctata

SEQ ID NO: 373885 - DNA, 19 bp, Homo sapiens
  siRNA target sequence for HOXC5 (NM_018953.2,116-134).
ccaatatccctgcctataa

SEQ ID NO: 373886 - DNA, 19 bp, Homo sapiens
  siRNA target sequence for HOXC5 (NM_018953.2,544-562).
cggtcccgaaccagttaca

SEQ ID NO: 373887 - DNA, 19 bp, Homo sapiens
  siRNA target sequence for HOXC5 (NM_018953.2,620-638).
gccgcaggcgcatagagat

SEQ ID NO: 373888 - DNA, 19 bp, Homo sapiens
  siRNA target sequence for HOXC5 (NM_018953.2,634-652).
gagatcgccaacaacttgt

SEQ ID NO: 373889 - DNA, 19 bp, Homo sapiens
  siRNA target sequence for HOXC5 (NM_018953.2,642-660).
caacaacttgtgtctcaat

SEQ ID NO: 373890 - DNA, 19 bp, Homo sapiens
  siRNA target sequence for C9orf9 (NM_018956.3,454-472).
ccctcgttagccaaagcaa

SEQ ID NO: 373891 - DNA, 19 bp, Homo sapiens
  siRNA target sequence for C9orf9 (NM_018956.3,572-590).
ccccctcatcctagactta

SEQ ID NO: 373892 - DNA, 19 bp, Homo sapiens
  siRNA target sequence for C9orf9 (NM_018956.3,573-591).
cccctcatcctagacttaa

SEQ ID NO: 373893 - DNA, 19 bp, Homo sapiens
  siRNA target sequence for C9orf9 (NM_018956.3,574-592).
ccctcatcctagacttaat

SEQ ID NO: 373894 - DNA, 19 bp, Homo sapiens
  siRNA target sequence for C9orf9 (NM_018956.3,576-594).
ctcatcctagacttaatga

SEQ ID NO: 373895 - DNA, 19 bp, Homo sapiens
  siRNA target sequence for GDAP1 (NM_018972.1,66-84).
ccgacgcggaggttaagct

SEQ ID NO: 373896 - DNA, 19 bp, Homo sapiens
  siRNA target sequence for GDAP1 (NM_018972.1,124-142).
ggtgcgcttggtaattgct

SEQ ID NO: 373897 - DNA, 19 bp, Homo sapiens
  siRNA target sequence for GDAP1 (NM_018972.1,250-268).
ccacggggaaaacataatt

SEQ ID NO: 373898 - DNA, 19 bp, Homo sapiens
  siRNA target sequence for GDAP1 (NM_018972.1,255-273).
gggaaaacataatttgtga

SEQ ID NO: 373899 - DNA, 19 bp, Homo sapiens
  siRNA target sequence for GDAP1 (NM_018972.1,302-320).
cagactttcctggatgaaa

SEQ ID NO: 373900 - DNA, 19 bp, Homo sapiens
  siRNA target sequence for GDAP1 (NM_018972.1,327-345).
ccaggttaatgcctgataa

SEQ ID NO: 373901 - DNA, 19 bp, Homo sapiens
  siRNA target sequence for GDAP1 (NM_018972.1,328-346).
caggttaatgcctgataaa

SEQ ID NO: 373902 - DNA, 19 bp, Homo sapiens
  siRNA target sequence for GDAP1 (NM_018972.1,330-348).
ggttaatgcctgataaaga

SEQ ID NO: 373903 - DNA, 19 bp, Homo sapiens
  siRNA target sequence for GDAP1 (NM_018972.1,331-349).
gttaatgcctgataaagaa

SEQ ID NO: 373904 - DNA, 19 bp, Homo sapiens
  siRNA target sequence for GDAP1 (NM_018972.1,457-475).
catgatcccggcttatgca

SEQ ID NO: 373905 - DNA, 19 bp, Homo sapiens
  siRNA target sequence for GDAP1 (NM_018972.1,463-481).
cccggcttatgcaactaca

SEQ ID NO: 373906 - DNA, 19 bp, Homo sapiens
  siRNA target sequence for GDAP1 (NM_018972.1,464-482).
ccggcttatgcaactacaa

SEQ ID NO: 373907 - DNA, 19 bp, Homo sapiens
  siRNA target sequence for GDAP1 (NM_018972.1,473-491).
gcaactacaaggattcgta

SEQ ID NO: 373908 - DNA, 19 bp, Homo sapiens
  siRNA target sequence for GDAP1 (NM_018972.1,551-569).
caagaagcatacattgcaa

SEQ ID NO: 373909 - DNA, 19 bp, Homo sapiens
  siRNA target sequence for GDAP1 (NM_018972.1,558-576).
catacattgcaaaacagaa

SEQ ID NO: 373910 - DNA, 19 bp, Homo sapiens
  siRNA target sequence for GDAP1 (NM_018972.1,652-670).
cttggatcaggttgaaact

SEQ ID NO: 373911 - DNA, 19 bp, Homo sapiens
  siRNA target sequence for GDAP1 (NM_018972.1,768-786).
cattgcatcgactgaagtt

SEQ ID NO: 373912 - DNA, 19 bp, Homo sapiens
  siRNA target sequence for GDAP1 (NM_018972.1,895-913).
caacaatatattaatctct

SEQ ID NO: 373913 - DNA, 19 bp, Homo sapiens
  siRNA target sequence for GDAP1 (NM_018972.1,972-990).
cgacccttgtggttggttt

SEQ ID NO: 373914 - DNA, 19 bp, Homo sapiens
  siRNA target sequence for GDAP1 (NM_018972.1,998-1016).
ggagtgggatattttgctt

SEQ ID NO: 373915 - DNA, 19 bp, Homo sapiens
  siRNA target sequence for GDAP1 (NM_018972.1,999-1017).
gagtgggatattttgcttt

SEQ ID NO: 373916 - DNA, 19 bp, Homo sapiens
  siRNA target sequence for UNC93A (NM_018974.2,493-511).
gcatcttcttcctcatatt

SEQ ID NO: 373917 - DNA, 19 bp, Homo sapiens
  siRNA target sequence for UNC93A (NM_018974.2,539-557).
gatctcatcgctggtattt

SEQ ID NO: 373918 - DNA, 19 bp, Homo sapiens
  siRNA target sequence for UNC93A (NM_018974.2,815-833).
gtcgactttcaagctatat

SEQ ID NO: 373919 - DNA, 19 bp, Homo sapiens
  siRNA target sequence for UNC93A (NM_018974.2,896-914).
cctctccagcgaatacaca

SEQ ID NO: 373920 - DNA, 19 bp, Homo sapiens
  siRNA target sequence for UNC93A (NM_018974.2,897-915).
ctctccagcgaatacacaa

SEQ ID NO: 373921 - DNA, 19 bp, Homo sapiens
  siRNA target sequence for UNC93A (NM_018974.2,988-1006).
cgctgtgctccgtgttgta

SEQ ID NO: 373922 - DNA, 19 bp, Homo sapiens
  siRNA target sequence for UNC93A (NM_018974.2,989-1007).
gctgtgctccgtgttgtat

SEQ ID NO: 373923 - DNA, 19 bp, Homo sapiens
  siRNA target sequence for UNC93A (NM_018974.2,994-1012).
gctccgtgttgtatggaaa

SEQ ID NO: 373924 - DNA, 19 bp, Homo sapiens
  siRNA target sequence for UNC93A (NM_018974.2,1116-1134).
ctggcagtgttcttcgtat

SEQ ID NO: 373925 - DNA, 19 bp, Homo sapiens
  siRNA target sequence for UNC93A (NM_018974.2,1161-1179).
gccgtctggcagacacaaa

SEQ ID NO: 373926 - DNA, 19 bp, Homo sapiens
  siRNA target sequence for UNC93A (NM_018974.2,1162-1180).
ccgtctggcagacacaaaa

SEQ ID NO: 373927 - DNA, 19 bp, Homo sapiens
  siRNA target sequence for UNC93A (NM_018974.2,1164-1182).
gtctggcagacacaaaaca

SEQ ID NO: 373928 - DNA, 19 bp, Homo sapiens
  siRNA target sequence for UNC93A (NM_018974.2,1271-1289).
cttcgggtacagcatgttt

SEQ ID NO: 373929 - DNA, 19 bp, Homo sapiens
  siRNA target sequence for NLGN3 (NM_018977.1,486-504).
ggcctgtggaccaatacct

SEQ ID NO: 373930 - DNA, 19 bp, Homo sapiens
  siRNA target sequence for NLGN3 (NM_018977.1,527-545).
ccgatcggcgagaaacgtt

SEQ ID NO: 373931 - DNA, 19 bp, Homo sapiens
  siRNA target sequence for NLGN3 (NM_018977.1,528-546).
cgatcggcgagaaacgttt

SEQ ID NO: 373932 - DNA, 19 bp, Homo sapiens
  siRNA target sequence for NLGN3 (NM_018977.1,583-601).
ccggaacgccacacacttt

SEQ ID NO: 373933 - DNA, 19 bp, Homo sapiens
  siRNA target sequence for NLGN3 (NM_018977.1,677-695).
gatatcgtcgctacttaca

SEQ ID NO: 373934 - DNA, 19 bp, Homo sapiens
  siRNA target sequence for NLGN3 (NM_018977.1,775-793).
cgaggacttagcggataat

SEQ ID NO: 373935 - DNA, 19 bp, Homo sapiens
  siRNA target sequence for NLGN3 (NM_018977.1,1031-1049).
cgctgggtgagcgagaata

SEQ ID NO: 373936 - DNA, 19 bp, Homo sapiens
  siRNA target sequence for NLGN3 (NM_018977.1,1032-1050).
gctgggtgagcgagaatat

SEQ ID NO: 373937 - DNA, 19 bp, Homo sapiens
  siRNA target sequence for NLGN3 (NM_018977.1,1033-1051).
ctgggtgagcgagaatatt

SEQ ID NO: 373938 - DNA, 19 bp, Homo sapiens
  siRNA target sequence for NLGN3 (NM_018977.1,1283-1301).
gactgtcttcggcaaaaga

SEQ ID NO: 373939 - DNA, 19 bp, Homo sapiens
  siRNA target sequence for NLGN3 (NM_018977.1,1456-1474).
gggcgagggtctcaagttt

SEQ ID NO: 373940 - DNA, 19 bp, Homo sapiens
  siRNA target sequence for NLGN3 (NM_018977.1,1458-1476).
gcgagggtctcaagtttgt

SEQ ID NO: 373941 - DNA, 19 bp, Homo sapiens
  siRNA target sequence for NLGN3 (NM_018977.1,1511-1529).
ggcactgactttgactatt

SEQ ID NO: 373942 - DNA, 19 bp, Homo sapiens
  siRNA target sequence for NLGN3 (NM_018977.1,1523-1541).
gactattccgtctccaatt

SEQ ID NO: 373943 - DNA, 19 bp, Homo sapiens
  siRNA target sequence for NLGN3 (NM_018977.1,1525-1543).
ctattccgtctccaatttt

SEQ ID NO: 373944 - DNA, 19 bp, Homo sapiens
  siRNA target sequence for NLGN3 (NM_018977.1,1898-1916).
gctgtcgtcatgacctatt

SEQ ID NO: 373945 - DNA, 19 bp, Homo sapiens
  siRNA target sequence for NLGN3 (NM_018977.1,2048-2066).
cacatcgggctgaaaccaa

SEQ ID NO: 373946 - DNA, 19 bp, Homo sapiens
  siRNA target sequence for NLGN3 (NM_018977.1,2064-2082).
caagggtccgagatcatta

SEQ ID NO: 373947 - DNA, 19 bp, Homo sapiens
  siRNA target sequence for NLGN3 (NM_018977.1,2091-2109).
ctaaggtggccttttggaa

SEQ ID NO: 373948 - DNA, 19 bp, Homo sapiens
  siRNA target sequence for NLGN3 (NM_018977.1,2114-2132).
ctggtgccccacctataca

SEQ ID NO: 373949 - DNA, 19 bp, Homo sapiens
  siRNA target sequence for NLGN3 (NM_018977.1,2138-2156).
catgacatgttccactata

SEQ ID NO: 373950 - DNA, 19 bp, Homo sapiens
  siRNA target sequence for NLGN3 (NM_018977.1,2141-2159).
gacatgttccactatacgt

SEQ ID NO: 373951 - DNA, 19 bp, Homo sapiens
  siRNA target sequence for NLGN3 (NM_018977.1,2339-2357).
cgtgactactccactgaat

SEQ ID NO: 373952 - DNA, 19 bp, Homo sapiens
  siRNA target sequence for NLGN3 (NM_018977.1,2340-2358).
gtgactactccactgaatt

SEQ ID NO: 373953 - DNA, 19 bp, Homo sapiens
  siRNA target sequence for NLGN3 (NM_018977.1,2342-2360).
gactactccactgaattaa

SEQ ID NO: 373954 - DNA, 19 bp, Homo sapiens
  siRNA target sequence for NLGN3 (NM_018977.1,2386-2404).
cctcctgttccttaacgtt

SEQ ID NO: 373955 - DNA, 19 bp, Homo sapiens
  siRNA target sequence for NLGN3 (NM_018977.1,2726-2744).
gccgcagggttcaacagta

SEQ ID NO: 373956 - DNA, 19 bp, Homo sapiens
  siRNA target sequence for CSE-C (NM_018978.1,694-712).
gatgactgtgttacagata

SEQ ID NO: 373957 - DNA, 19 bp, Homo sapiens
  siRNA target sequence for CSE-C (NM_018978.1,719-737).
gctacaagggagttgtcta

SEQ ID NO: 373958 - DNA, 19 bp, Homo sapiens
  siRNA target sequence for CSE-C (NM_018978.1,720-738).
ctacaagggagttgtctaa

SEQ ID NO: 373959 - DNA, 19 bp, Homo sapiens
  siRNA target sequence for CSE-C (NM_018978.1,735-753).
ctaacactgcggcatatca

SEQ ID NO: 373960 - DNA, 19 bp, Homo sapiens
  siRNA target sequence for CSE-C (NM_018978.1,863-881).
ggatatttcaagtacatgt

SEQ ID NO: 373961 - DNA, 19 bp, Homo sapiens
  siRNA target sequence for CSE-C (NM_018978.1,898-916).
ctttggacgtcacctttat

SEQ ID NO: 373962 - DNA, 19 bp, Homo sapiens
  siRNA target sequence for CSE-C (NM_018978.1,902-920).
ggacgtcacctttatgaca

SEQ ID NO: 373963 - DNA, 19 bp, Homo sapiens
  siRNA target sequence for CSE-C (NM_018978.1,1005-1023).
cctgtggggtccctaaaca

SEQ ID NO: 373964 - DNA, 19 bp, Homo sapiens
  siRNA target sequence for CSE-C (NM_018978.1,1006-1024).
ctgtggggtccctaaacaa

SEQ ID NO: 373965 - DNA, 19 bp, Homo sapiens
  siRNA target sequence for CSE-C (NM_018978.1,1030-1048).
cattccatacgattctgta

SEQ ID NO: 373966 - DNA, 19 bp, Homo sapiens
  siRNA target sequence for CSE-C (NM_018978.1,1091-1109).
catccactgtgcaatatga

SEQ ID NO: 373967 - DNA, 19 bp, Homo sapiens
  siRNA target sequence for CSE-C (NM_018978.1,1132-1150).
ccagggggagtccaatata

SEQ ID NO: 373968 - DNA, 19 bp, Homo sapiens
  siRNA target sequence for CSE-C (NM_018978.1,1133-1151).
cagggggagtccaatataa

SEQ ID NO: 373969 - DNA, 19 bp, Homo sapiens
  siRNA target sequence for CSE-C (NM_018978.1,1136-1154).
ggggagtccaatataaatt

SEQ ID NO: 373970 - DNA, 19 bp, Homo sapiens
  siRNA target sequence for CSE-C (NM_018978.1,1137-1155).
gggagtccaatataaatta

SEQ ID NO: 373971 - DNA, 19 bp, Homo sapiens
  siRNA target sequence for CSE-C (NM_018978.1,1139-1157).
gagtccaatataaattata

SEQ ID NO: 373972 - DNA, 19 bp, Homo sapiens
  siRNA target sequence for CSE-C (NM_018978.1,1233-1251).
ggcagacggagcgtttctt

SEQ ID NO: 373973 - DNA, 19 bp, Homo sapiens
  siRNA target sequence for CSE-C (NM_018978.1,1294-1312).
gagctcagacgatggattt

SEQ ID NO: 373974 - DNA, 19 bp, Homo sapiens
  siRNA target sequence for CSE-C (NM_018978.1,1316-1334).
cagatccgttggcatcaaa

SEQ ID NO: 373975 - DNA, 19 bp, Homo sapiens
  siRNA target sequence for CSE-C (NM_018978.1,1318-1336).
gatccgttggcatcaaaca

SEQ ID NO: 373976 - DNA, 19 bp, Homo sapiens
  siRNA target sequence for CSE-C (NM_018978.1,1361-1379).
ccaaagatgcccaatactt

SEQ ID NO: 373977 - DNA, 19 bp, Homo sapiens
  siRNA target sequence for CSE-C (NM_018978.1,1381-1399).
catggctgtagctatggat

SEQ ID NO: 373978 - DNA, 19 bp, Homo sapiens
  siRNA target sequence for CSE-C (NM_018978.1,1428-1446).
gcatccaccctcgagataa

SEQ ID NO: 373979 - DNA, 19 bp, Homo sapiens
  siRNA target sequence for CSE-C (NM_018978.1,1429-1447).
catccaccctcgagataaa

SEQ ID NO: 373980 - DNA, 19 bp, Homo sapiens
  siRNA target sequence for CSE-C (NM_018978.1,1433-1451).
caccctcgagataaacaga

SEQ ID NO: 373981 - DNA, 19 bp, Homo sapiens
  siRNA target sequence for CSE-C (NM_018978.1,1521-1539).
gaccactgcctgagaagat

SEQ ID NO: 373982 - DNA, 19 bp, Homo sapiens
  siRNA target sequence for CSE-C (NM_018978.1,1656-1674).
ggcttccagcttctatgaa

SEQ ID NO: 373983 - DNA, 19 bp, Homo sapiens
  siRNA target sequence for CSE-C (NM_018978.1,1658-1676).
cttccagcttctatgaaca

SEQ ID NO: 373984 - DNA, 19 bp, Homo sapiens
  siRNA target sequence for CSE-C (NM_018978.1,1694-1712).
ctgaccctggcgatcgatt

SEQ ID NO: 373985 - DNA, 19 bp, Homo sapiens
  siRNA target sequence for CSE-C (NM_018978.1,1699-1717).
cctggcgatcgattcttgt

SEQ ID NO: 373986 - DNA, 19 bp, Homo sapiens
  siRNA target sequence for CSE-C (NM_018978.1,1702-1720).
ggcgatcgattcttgtcat

SEQ ID NO: 373987 - DNA, 19 bp, Homo sapiens
  siRNA target sequence for CSE-C (NM_018978.1,1755-1773).
cgtggccttgtgaatataa

SEQ ID NO: 373988 - DNA, 19 bp, Homo sapiens
  siRNA target sequence for CSE-C (NM_018978.1,1817-1835).
cccttcattgctttcatta

SEQ ID NO: 373989 - DNA, 19 bp, Homo sapiens
  siRNA target sequence for CSE-C (NM_018978.1,1819-1837).
cttcattgctttcattaca

SEQ ID NO: 373990 - DNA, 19 bp, Homo sapiens
  siRNA target sequence for DJ167A19.1 (NM_018982.3,517-535).
ctctgacaaaactgagtta

SEQ ID NO: 373991 - DNA, 19 bp, Homo sapiens
  siRNA target sequence for DJ167A19.1 (NM_018982.3,558-576).
cccccttctggacatttga

SEQ ID NO: 373992 - DNA, 19 bp, Homo sapiens
  siRNA target sequence for DJ167A19.1 (NM_018982.3,559-577).
ccccttctggacatttgaa

SEQ ID NO: 373993 - DNA, 19 bp, Homo sapiens
  siRNA target sequence for DJ167A19.1 (NM_018982.3,575-593).
gaatactaccaaacattct

SEQ ID NO: 373994 - DNA, 19 bp, Homo sapiens
  siRNA target sequence for DJ167A19.1 (NM_018982.3,580-598).
ctaccaaacattctttgat

SEQ ID NO: 373995 - DNA, 19 bp, Homo sapiens
  siRNA target sequence for DJ167A19.1 (NM_018982.3,616-634).
ctttgacagaattaaagga

SEQ ID NO: 373996 - DNA, 19 bp, Homo sapiens
  siRNA target sequence for DJ167A19.1 (NM_018982.3,644-662).
ccaatacccgggaaaaact

SEQ ID NO: 373997 - DNA, 19 bp, Homo sapiens
  siRNA target sequence for DJ167A19.1 (NM_018982.3,645-663).
caatacccgggaaaaactt

SEQ ID NO: 373998 - DNA, 19 bp, Homo sapiens
  siRNA target sequence for DJ167A19.1 (NM_018982.3,650-668).
cccgggaaaaactttgtga

SEQ ID NO: 373999 - DNA, 19 bp, Homo sapiens
  siRNA target sequence for DJ167A19.1 (NM_018982.3,740-758).
gcaattagtgggaatcttt

SEQ ID NO: 374000 - DNA, 19 bp, Homo sapiens
  siRNA target sequence for DJ167A19.1 (NM_018982.3,779-797).
ggagagaagacgtaccatt

SEQ ID NO: 374001 - DNA, 19 bp, Homo sapiens
  siRNA target sequence for DJ167A19.1 (NM_018982.3,780-798).
gagagaagacgtaccatta

SEQ ID NO: 374002 - DNA, 19 bp, Homo sapiens
  siRNA target sequence for DJ167A19.1 (NM_018982.3,803-821).
cccgaattccgaaaagtgt

SEQ ID NO: 374003 - DNA, 19 bp, Homo sapiens
  siRNA target sequence for DJ167A19.1 (NM_018982.3,910-928).
gaacatcgtctcctattca

SEQ ID NO: 374004 - DNA, 19 bp, Homo sapiens
  siRNA target sequence for DJ167A19.1 (NM_018982.3,913-931).
catcgtctcctattcattt

SEQ ID NO: 374005 - DNA, 19 bp, Homo sapiens
  siRNA target sequence for DJ167A19.1 (NM_018982.3,981-999).
ccgcaatactgtggattat

SEQ ID NO: 374006 - DNA, 19 bp, Homo sapiens
  siRNA target sequence for DJ167A19.1 (NM_018982.3,1080-1098).
cagctgttcgtgaggataa

SEQ ID NO: 374007 - DNA, 19 bp, Homo sapiens
  siRNA target sequence for DJ167A19.1 (NM_018982.3,1105-1123).
cgttgcattggccacaatt

SEQ ID NO: 374008 - DNA, 19 bp, Homo sapiens
  siRNA target sequence for DJ167A19.1 (NM_018982.3,1128-1146).
caattgtgttgctccatat

SEQ ID NO: 374009 - DNA, 19 bp, Homo sapiens
  siRNA target sequence for DJ167A19.1 (NM_018982.3,1159-1177).
gggctgcttggcatacttt

SEQ ID NO: 374010 - DNA, 19 bp, Homo sapiens
  siRNA target sequence for DJ167A19.1 (NM_018982.3,1164-1182).
gcttggcatacttttttga

SEQ ID NO: 374011 - DNA, 19 bp, Homo sapiens
  siRNA target sequence for DJ167A19.1 (NM_018982.3,1165-1183).
cttggcatacttttttgat

SEQ ID NO: 374012 - DNA, 19 bp, Homo sapiens
  siRNA target sequence for DJ167A19.1 (NM_018982.3,1218-1236).
ctactccaaaccaaacagt

SEQ ID NO: 374013 - DNA, 19 bp, Homo sapiens
  siRNA target sequence for SSH1 (NM_018984.2,154-172).
ggctggcagcgaagaagat

SEQ ID NO: 374014 - DNA, 19 bp, Homo sapiens
  siRNA target sequence for SSH1 (NM_018984.2,159-177).
gcagcgaagaagatcgaaa

SEQ ID NO: 374015 - DNA, 19 bp, Homo sapiens
  siRNA target sequence for SSH1 (NM_018984.2,160-178).
cagcgaagaagatcgaaaa

SEQ ID NO: 374016 - DNA, 19 bp, Homo sapiens
  siRNA target sequence for SSH1 (NM_018984.2,162-180).
gcgaagaagatcgaaaatt

SEQ ID NO: 374017 - DNA, 19 bp, Homo sapiens
  siRNA target sequence for SSH1 (NM_018984.2,163-181).
cgaagaagatcgaaaatta

SEQ ID NO: 374018 - DNA, 19 bp, Homo sapiens
  siRNA target sequence for SSH1 (NM_018984.2,189-207).
gcttaagtgagagcttttt

SEQ ID NO: 374019 - DNA, 19 bp, Homo sapiens
  siRNA target sequence for SSH1 (NM_018984.2,220-238).
cgcagccctcttcttacaa

SEQ ID NO: 374020 - DNA, 19 bp, Homo sapiens
  siRNA target sequence for SSH1 (NM_018984.2,222-240).
cagccctcttcttacaaca

SEQ ID NO: 374021 - DNA, 19 bp, Homo sapiens
  siRNA target sequence for SSH1 (NM_018984.2,335-353).
cgttgcgaagacagaatca

SEQ ID NO: 374022 - DNA, 19 bp, Homo sapiens
  siRNA target sequence for SSH1 (NM_018984.2,460-478).
ggacttttccagtaaggaa

SEQ ID NO: 374023 - DNA, 19 bp, Homo sapiens
  siRNA target sequence for SSH1 (NM_018984.2,512-530).
ctgtggagcgacacgaaaa

SEQ ID NO: 374024 - DNA, 19 bp, Homo sapiens
  siRNA target sequence for SSH1 (NM_018984.2,516-534).
ggagcgacacgaaaatcca

SEQ ID NO: 374025 - DNA, 19 bp, Homo sapiens
  siRNA target sequence for SSH1 (NM_018984.2,572-590).
ggaaggatgcacatattta

SEQ ID NO: 374026 - DNA, 19 bp, Homo sapiens
  siRNA target sequence for SSH1 (NM_018984.2,573-591).
gaaggatgcacatatttaa

SEQ ID NO: 374027 - DNA, 19 bp, Homo sapiens
  siRNA target sequence for SSH1 (NM_018984.2,828-846).
ggaccgagcgcctcatcaa

SEQ ID NO: 374028 - DNA, 19 bp, Homo sapiens
  siRNA target sequence for SSH1 (NM_018984.2,854-872).
ctccgaagcatcatgatga

SEQ ID NO: 374029 - DNA, 19 bp, Homo sapiens
  siRNA target sequence for SSH1 (NM_018984.2,875-893).
caggatctagaaaatgtga

SEQ ID NO: 374030 - DNA, 19 bp, Homo sapiens
  siRNA target sequence for SSH1 (NM_018984.2,894-912).
cttccaaagagattcgtaa

SEQ ID NO: 374031 - DNA, 19 bp, Homo sapiens
  siRNA target sequence for SSH1 (NM_018984.2,898-916).
caaagagattcgtaatgaa

SEQ ID NO: 374032 - DNA, 19 bp, Homo sapiens
  siRNA target sequence for SSH1 (NM_018984.2,936-954).
gtaacttgaaggaactcaa

SEQ ID NO: 374033 - DNA, 19 bp, Homo sapiens
  siRNA target sequence for SSH1 (NM_018984.2,1008-1026).
cccttatcttcgatcatct

SEQ ID NO: 374034 - DNA, 19 bp, Homo sapiens
  siRNA target sequence for SSH1 (NM_018984.2,1009-1027).
ccttatcttcgatcatctt

SEQ ID NO: 374035 - DNA, 19 bp, Homo sapiens
  siRNA target sequence for SSH1 (NM_018984.2,1010-1028).
cttatcttcgatcatcttt

SEQ ID NO: 374036 - DNA, 19 bp, Homo sapiens
  siRNA target sequence for SSH1 (NM_018984.2,1070-1088).
cagggctcaggggttgatt

SEQ ID NO: 374037 - DNA, 19 bp, Homo sapiens
  siRNA target sequence for SSH1 (NM_018984.2,1073-1091).
ggctcaggggttgattaca

SEQ ID NO: 374038 - DNA, 19 bp, Homo sapiens
  siRNA target sequence for SSH1 (NM_018984.2,1075-1093).
ctcaggggttgattacatt

SEQ ID NO: 374039 - DNA, 19 bp, Homo sapiens
  siRNA target sequence for SSH1 (NM_018984.2,1192-1210).
ctggaatgaagcgtatcat

SEQ ID NO: 374040 - DNA, 19 bp, Homo sapiens
  siRNA target sequence for SSH1 (NM_018984.2,1194-1212).
ggaatgaagcgtatcattt

SEQ ID NO: 374041 - DNA, 19 bp, Homo sapiens
  siRNA target sequence for SSH1 (NM_018984.2,1195-1213).
gaatgaagcgtatcatttt

SEQ ID NO: 374042 - DNA, 19 bp, Homo sapiens
  siRNA target sequence for SSH1 (NM_018984.2,1203-1221).
cgtatcattttataaacaa

SEQ ID NO: 374043 - DNA, 19 bp, Homo sapiens
  siRNA target sequence for SSH1 (NM_018984.2,1224-1242).
cgaagaggaaccattccaa

SEQ ID NO: 374044 - DNA, 19 bp, Homo sapiens
  siRNA target sequence for SSH1 (NM_018984.2,1276-1294).
ctcggcctccacagtcata

SEQ ID NO: 374045 - DNA, 19 bp, Homo sapiens
  siRNA target sequence for SSH1 (NM_018984.2,1287-1305).
cagtcatagcctatgcaat

SEQ ID NO: 374046 - DNA, 19 bp, Homo sapiens
  siRNA target sequence for SSH1 (NM_018984.2,1325-1343).
ctggaaaaagcatataact

SEQ ID NO: 374047 - DNA, 19 bp, Homo sapiens
  siRNA target sequence for SSH1 (NM_018984.2,1392-1410).
ggcagctgtctgagtatga

SEQ ID NO: 374048 - DNA, 19 bp, Homo sapiens
  siRNA target sequence for SSH1 (NM_018984.2,1393-1411).
gcagctgtctgagtatgaa

SEQ ID NO: 374049 - DNA, 19 bp, Homo sapiens
  siRNA target sequence for SSH1 (NM_018984.2,1892-1910).
ccaacccagctcgatcaaa

SEQ ID NO: 374050 - DNA, 19 bp, Homo sapiens
  siRNA target sequence for SSH1 (NM_018984.2,1893-1911).
caacccagctcgatcaaaa

SEQ ID NO: 374051 - DNA, 19 bp, Homo sapiens
  siRNA target sequence for SSH1 (NM_018984.2,1916-1934).
ctcaactcggagaacctaa

SEQ ID NO: 374052 - DNA, 19 bp, Homo sapiens
  siRNA target sequence for SSH1 (NM_018984.2,1966-1984).
catggaggatgatgctata

SEQ ID NO: 374053 - DNA, 19 bp, Homo sapiens
  siRNA target sequence for SSH1 (NM_018984.2,1989-2007).
ggatccttaacaaagtgaa

SEQ ID NO: 374054 - DNA, 19 bp, Homo sapiens
  siRNA target sequence for SSH1 (NM_018984.2,2003-2021).
gtgaagccttcctataaat

SEQ ID NO: 374055 - DNA, 19 bp, Homo sapiens
  siRNA target sequence for SSH1 (NM_018984.2,2310-2328).
ccagagagaccccaaaagt

SEQ ID NO: 374056 - DNA, 19 bp, Homo sapiens
  siRNA target sequence for SSH1 (NM_018984.2,2380-2398).
cagcacagaagtggtaata

SEQ ID NO: 374057 - DNA, 19 bp, Homo sapiens
  siRNA target sequence for SSH1 (NM_018984.2,2503-2521).
gcaccaggagtccatcatt

SEQ ID NO: 374058 - DNA, 19 bp, Homo sapiens
  siRNA target sequence for SSH1 (NM_018984.2,2795-2813).
gaccacaccagtagtttct

SEQ ID NO: 374059 - DNA, 19 bp, Homo sapiens
  siRNA target sequence for SSH1 (NM_018984.2,2800-2818).
caccagtagtttctcaaaa

SEQ ID NO: 374060 - DNA, 19 bp, Homo sapiens
  siRNA target sequence for SSH1 (NM_018984.2,3091-3109).
ccaggacaccactttgagt

SEQ ID NO: 374061 - DNA, 19 bp, Homo sapiens
  siRNA target sequence for SSH1 (NM_018984.2,3206-3224).
ccttcgtggatgagcaaaa

SEQ ID NO: 374062 - DNA, 19 bp, Homo sapiens
  siRNA target sequence for HCG4 (NM_018985.1,370-388).
gcctcactctggttgtagt

SEQ ID NO: 374063 - DNA, 19 bp, Homo sapiens
  siRNA target sequence for HCG4 (NM_018985.1,408-426).
gttcactcggtaaaactgt

SEQ ID NO: 374064 - DNA, 19 bp, Homo sapiens
  siRNA target sequence for HCG4 (NM_018985.1,869-887).
gtgggtgcgtgggaacttt

SEQ ID NO: 374065 - DNA, 19 bp, Homo sapiens
  siRNA target sequence for HCG4 (NM_018985.1,873-891).
gtgcgtgggaactttagaa

SEQ ID NO: 374066 - DNA, 19 bp, Homo sapiens
  siRNA target sequence for HCG4 (NM_018985.1,1226-1244).
cgtccctctctcttcactt

SEQ ID NO: 374067 - DNA, 19 bp, Homo sapiens
  siRNA target sequence for HCG4 (NM_018985.1,1231-1249).
ctctctcttcactttgcat

SEQ ID NO: 374068 - DNA, 19 bp, Homo sapiens
  siRNA target sequence for FLJ20356 (NM_018986.2,431-449).
cgcgtgcttggggaattat

SEQ ID NO: 374069 - DNA, 19 bp, Homo sapiens
  siRNA target sequence for FLJ20356 (NM_018986.2,433-451).
cgtgcttggggaattatca

SEQ ID NO: 374070 - DNA, 19 bp, Homo sapiens
  siRNA target sequence for FLJ20356 (NM_018986.2,485-503).
cggatcgtggtgacgttta

SEQ ID NO: 374071 - DNA, 19 bp, Homo sapiens
  siRNA target sequence for FLJ20356 (NM_018986.2,486-504).
ggatcgtggtgacgtttaa

SEQ ID NO: 374072 - DNA, 19 bp, Homo sapiens
  siRNA target sequence for FLJ20356 (NM_018986.2,490-508).
cgtggtgacgtttaagact

SEQ ID NO: 374073 - DNA, 19 bp, Homo sapiens
  siRNA target sequence for FLJ20356 (NM_018986.2,496-514).
gacgtttaagacttttgaa

SEQ ID NO: 374074 - DNA, 19 bp, Homo sapiens
  siRNA target sequence for FLJ20356 (NM_018986.2,498-516).
cgtttaagacttttgaaga

SEQ ID NO: 374075 - DNA, 19 bp, Homo sapiens
  siRNA target sequence for FLJ20356 (NM_018986.2,881-899).
ccggagcctttgattccat

SEQ ID NO: 374076 - DNA, 19 bp, Homo sapiens
  siRNA target sequence for FLJ20356 (NM_018986.2,882-900).
cggagcctttgattccatt

SEQ ID NO: 374077 - DNA, 19 bp, Homo sapiens
  siRNA target sequence for FLJ20356 (NM_018986.2,886-904).
gcctttgattccatttcat

SEQ ID NO: 374078 - DNA, 19 bp, Homo sapiens
  siRNA target sequence for FLJ20356 (NM_018986.2,1169-1187).
cccgtgtccgagttggaaa

SEQ ID NO: 374079 - DNA, 19 bp, Homo sapiens
  siRNA target sequence for FLJ20356 (NM_018986.2,1184-1202).
gaaagtgcgatttttctca

SEQ ID NO: 374080 - DNA, 19 bp, Homo sapiens
  siRNA target sequence for FLJ20356 (NM_018986.2,1188-1206).
gtgcgatttttctcaatga

SEQ ID NO: 374081 - DNA, 19 bp, Homo sapiens
  siRNA target sequence for FLJ20356 (NM_018986.2,1339-1357).
gccgcaggaaaaagaaata

SEQ ID NO: 374082 - DNA, 19 bp, Homo sapiens
  siRNA target sequence for FLJ20356 (NM_018986.2,3038-3056).
cggctgtgccacttctaca

SEQ ID NO: 374083 - DNA, 19 bp, Homo sapiens
  siRNA target sequence for FLJ20356 (NM_018986.2,3215-3233).
ctggactacaccaaacgaa

SEQ ID NO: 374084 - DNA, 19 bp, Homo sapiens
  siRNA target sequence for FLJ20356 (NM_018986.2,3289-3307).
gcaagcagggaagatctat

SEQ ID NO: 374085 - DNA, 19 bp, Homo sapiens
  siRNA target sequence for FLJ20356 (NM_018986.2,3293-3311).
gcagggaagatctattaca

SEQ ID NO: 374086 - DNA, 19 bp, Homo sapiens
  siRNA target sequence for FLJ20356 (NM_018986.2,3410-3428).
gcggctggagacatcttct

SEQ ID NO: 374087 - DNA, 19 bp, Homo sapiens
  siRNA target sequence for FLJ20356 (NM_018986.2,3948-3966).
gtgagaagtcgctcttctt

SEQ ID NO: 374088 - DNA, 19 bp, Homo sapiens
  siRNA target sequence for CXorf9 (NM_018990.2,239-257).
gcgagaaggagtttaatct

SEQ ID NO: 374089 - DNA, 19 bp, Homo sapiens
  siRNA target sequence for CXorf9 (NM_018990.2,510-528).
gcaagaggagcatgaactt

SEQ ID NO: 374090 - DNA, 19 bp, Homo sapiens
  siRNA target sequence for CXorf9 (NM_018990.2,710-728).
gagatgtgatccagatcat

SEQ ID NO: 374091 - DNA, 19 bp, Homo sapiens
  siRNA target sequence for CXorf9 (NM_018990.2,715-733).
gtgatccagatcattgaaa

SEQ ID NO: 374092 - DNA, 19 bp, Homo sapiens
  siRNA target sequence for CXorf9 (NM_018990.2,749-767).
cgtggctgggcctactcaa

SEQ ID NO: 374093 - DNA, 19 bp, Homo sapiens
  siRNA target sequence for CXorf9 (NM_018990.2,750-768).
gtggctgggcctactcaat

SEQ ID NO: 374094 - DNA, 19 bp, Homo sapiens
  siRNA target sequence for CXorf9 (NM_018990.2,769-787).
ggcaaggtgggctctttca

SEQ ID NO: 374095 - DNA, 19 bp, Homo sapiens
  siRNA target sequence for CXorf9 (NM_018990.2,775-793).
gtgggctctttcaaattca

SEQ ID NO: 374096 - DNA, 19 bp, Homo sapiens
  siRNA target sequence for CXorf9 (NM_018990.2,779-797).
gctctttcaaattcatcta

SEQ ID NO: 374097 - DNA, 19 bp, Homo sapiens
  siRNA target sequence for CXorf9 (NM_018990.2,988-1006).
ctcaatgagctgaacatca

SEQ ID NO: 374098 - DNA, 19 bp, Homo sapiens
  siRNA target sequence for FBXW5 (NM_018998.2,770-788).
caccgcatcggagatatca

SEQ ID NO: 374099 - DNA, 19 bp, Homo sapiens
  siRNA target sequence for FBXW5 (NM_018998.2,973-991).
gtccccctgccgcatcttt

SEQ ID NO: 374100 - DNA, 19 bp, Homo sapiens
  siRNA target sequence for FBXW5 (NM_018998.2,1334-1352).
ctggaccacgtcatagaca

SEQ ID NO: 374101 - DNA, 19 bp, Homo sapiens
  siRNA target sequence for FBXW5 (NM_018998.2,1336-1354).
ggaccacgtcatagacata

SEQ ID NO: 374102 - DNA, 19 bp, Homo sapiens
  siRNA target sequence for FBXW5 (NM_018998.2,1464-1482).
caatcgcggaggagattga

SEQ ID NO: 374103 - DNA, 19 bp, Homo sapiens
  siRNA target sequence for FBXW5 (NM_018998.2,1638-1656).
gggaccgccactacaacat

SEQ ID NO: 374104 - DNA, 19 bp, Homo sapiens
  siRNA target sequence for FBXW5 (NM_018998.2,1741-1759).
cgacgacgccaccatcaaa

SEQ ID NO: 374105 - DNA, 19 bp, Homo sapiens
  siRNA target sequence for FBXW5 (NM_018998.2,1808-1826).
cggcctcgcaccttcttct

SEQ ID NO: 374106 - DNA, 19 bp, Homo sapiens
  siRNA target sequence for FLJ20152 (NM_019000.2,244-262).
ggcaaaagctgggaagtta

SEQ ID NO: 374107 - DNA, 19 bp, Homo sapiens
  siRNA target sequence for FLJ20152 (NM_019000.2,254-272).
gggaagttatcaattccaa

SEQ ID NO: 374108 - DNA, 19 bp, Homo sapiens
  siRNA target sequence for FLJ20152 (NM_019000.2,400-418).
gtgtgcacattttttacga

SEQ ID NO: 374109 - DNA, 19 bp, Homo sapiens
  siRNA target sequence for FLJ20152 (NM_019000.2,441-459).
ggttatactcagctatcta

SEQ ID NO: 374110 - DNA, 19 bp, Homo sapiens
  siRNA target sequence for FLJ20152 (NM_019000.2,650-668).
cagctctttgtcctaagat

SEQ ID NO: 374111 - DNA, 19 bp, Homo sapiens
  siRNA target sequence for FLJ20152 (NM_019000.2,652-670).
gctctttgtcctaagatta

SEQ ID NO: 374112 - DNA, 19 bp, Homo sapiens
  siRNA target sequence for FLJ20152 (NM_019000.2,677-695).
cggttgctgccaaagagtt

SEQ ID NO: 374113 - DNA, 19 bp, Homo sapiens
  siRNA target sequence for FLJ20152 (NM_019000.2,678-696).
ggttgctgccaaagagtta

SEQ ID NO: 374114 - DNA, 19 bp, Homo sapiens
  siRNA target sequence for FLJ20152 (NM_019000.2,679-697).
gttgctgccaaagagttat

SEQ ID NO: 374115 - DNA, 19 bp, Homo sapiens
  siRNA target sequence for FLJ20152 (NM_019000.2,683-701).
ctgccaaagagttatctgt

SEQ ID NO: 374116 - DNA, 19 bp, Homo sapiens
  siRNA target sequence for FLJ20152 (NM_019000.2,721-739).
gaggtatcctggactgata

SEQ ID NO: 374117 - DNA, 19 bp, Homo sapiens
  siRNA target sequence for FLJ20152 (NM_019000.2,723-741).
ggtatcctggactgataat

SEQ ID NO: 374118 - DNA, 19 bp, Homo sapiens
  siRNA target sequence for FLJ20152 (NM_019000.2,743-761).
ggaccttcaacctttcaga

SEQ ID NO: 374119 - DNA, 19 bp, Homo sapiens
  siRNA target sequence for FLJ20152 (NM_019000.2,802-820).
cgacccagtgaggaagttt

SEQ ID NO: 374120 - DNA, 19 bp, Homo sapiens
  siRNA target sequence for FLJ20152 (NM_019000.2,803-821).
gacccagtgaggaagtttt

SEQ ID NO: 374121 - DNA, 19 bp, Homo sapiens
  siRNA target sequence for FLJ20152 (NM_019000.2,901-919).
cccactgagctcaagagaa

SEQ ID NO: 374122 - DNA, 19 bp, Homo sapiens
  siRNA target sequence for FLJ20152 (NM_019000.2,1175-1193).
cagagctggatcaaattga

SEQ ID NO: 374123 - DNA, 19 bp, Homo sapiens
  siRNA target sequence for FLJ20152 (NM_019000.2,1245-1263).
gaagtcttcaggtttcctt

SEQ ID NO: 374124 - DNA, 19 bp, Homo sapiens
  siRNA target sequence for FLJ20152 (NM_019000.2,1250-1268).
cttcaggtttcctttcaaa

SEQ ID NO: 374125 - DNA, 19 bp, Homo sapiens
  siRNA target sequence for SEP1 (NM_019001.2,74-92).
gtccccaagttttacagat

SEQ ID NO: 374126 - DNA, 19 bp, Homo sapiens
  siRNA target sequence for SEP1 (NM_019001.2,146-164).
cctgaatttgacaacttgt

SEQ ID NO: 374127 - DNA, 19 bp, Homo sapiens
  siRNA target sequence for SEP1 (NM_019001.2,265-283).
ctacctggaggtgttgttt

SEQ ID NO: 374128 - DNA, 19 bp, Homo sapiens
  siRNA target sequence for SEP1 (NM_019001.2,274-292).
ggtgttgtttcgcattatt

SEQ ID NO: 374129 - DNA, 19 bp, Homo sapiens
  siRNA target sequence for SEP1 (NM_019001.2,277-295).
gttgtttcgcattattaaa

SEQ ID NO: 374130 - DNA, 19 bp, Homo sapiens
  siRNA target sequence for SEP1 (NM_019001.2,356-374).
cagcgtgggaggcgtttta

SEQ ID NO: 374131 - DNA, 19 bp, Homo sapiens
  siRNA target sequence for SEP1 (NM_019001.2,359-377).
cgtgggaggcgttttaggt

SEQ ID NO: 374132 - DNA, 19 bp, Homo sapiens
  siRNA target sequence for SEP1 (NM_019001.2,447-465).
gatttgattccaactgtat

SEQ ID NO: 374133 - DNA, 19 bp, Homo sapiens
  siRNA target sequence for SEP1 (NM_019001.2,492-510).
ggttacatgaacatctgaa

SEQ ID NO: 374134 - DNA, 19 bp, Homo sapiens
  siRNA target sequence for SEP1 (NM_019001.2,546-564).
catggcaaggagttaccat

SEQ ID NO: 374135 - DNA, 19 bp, Homo sapiens
  siRNA target sequence for SEP1 (NM_019001.2,551-569).
caaggagttaccatctact

SEQ ID NO: 374136 - DNA, 19 bp, Homo sapiens
  siRNA target sequence for SEP1 (NM_019001.2,554-572).
ggagttaccatctacttct

SEQ ID NO: 374137 - DNA, 19 bp, Homo sapiens
  siRNA target sequence for SEP1 (NM_019001.2,661-679).
cagacactgtctttatggt

SEQ ID NO: 374138 - DNA, 19 bp, Homo sapiens
  siRNA target sequence for SEP1 (NM_019001.2,694-712).
gattatgcttggattaaca

SEQ ID NO: 374139 - DNA, 19 bp, Homo sapiens
  siRNA target sequence for SEP1 (NM_019001.2,700-718).
gcttggattaacaagtcat

SEQ ID NO: 374140 - DNA, 19 bp, Homo sapiens
  siRNA target sequence for SEP1 (NM_019001.2,806-824).
caccttctacacttgtctt

SEQ ID NO: 374141 - DNA, 19 bp, Homo sapiens
  siRNA target sequence for SEP1 (NM_019001.2,844-862).
ctatgagttttcagtatta

SEQ ID NO: 374142 - DNA, 19 bp, Homo sapiens
  siRNA target sequence for SEP1 (NM_019001.2,871-889).
gatcacatttaaatatgat

SEQ ID NO: 374143 - DNA, 19 bp, Homo sapiens
  siRNA target sequence for SEP1 (NM_019001.2,922-940).
ggggtttcttgttggtaat

SEQ ID NO: 374144 - DNA, 19 bp, Homo sapiens
  siRNA target sequence for SEP1 (NM_019001.2,925-943).
gtttcttgttggtaatgat

SEQ ID NO: 374145 - DNA, 19 bp, Homo sapiens
  siRNA target sequence for SEP1 (NM_019001.2,980-998).
gatgcactgcctcttcttt

SEQ ID NO: 374146 - DNA, 19 bp, Homo sapiens
  siRNA target sequence for SEP1 (NM_019001.2,995-1013).
ctttatggaacatatgtta

SEQ ID NO: 374147 - DNA, 19 bp, Homo sapiens
  siRNA target sequence for SEP1 (NM_019001.2,1022-1040).
ccagaacttgggggttata

SEQ ID NO: 374148 - DNA, 19 bp, Homo sapiens
  siRNA target sequence for SEP1 (NM_019001.2,1025-1043).
gaacttgggggttatatta

SEQ ID NO: 374149 - DNA, 19 bp, Homo sapiens
  siRNA target sequence for SEP1 (NM_019001.2,1031-1049).
gggggttatattaatgaaa

SEQ ID NO: 374150 - DNA, 19 bp, Homo sapiens
  siRNA target sequence for SEP1 (NM_019001.2,1033-1051).
gggttatattaatgaaagt

SEQ ID NO: 374151 - DNA, 19 bp, Homo sapiens
  siRNA target sequence for SEP1 (NM_019001.2,1057-1075).
cctcaacttacctcgattt

SEQ ID NO: 374152 - DNA, 19 bp, Homo sapiens
  siRNA target sequence for SEP1 (NM_019001.2,1063-1081).
cttacctcgatttgagaaa

SEQ ID NO: 374153 - DNA, 19 bp, Homo sapiens
  siRNA target sequence for SEP1 (NM_019001.2,1090-1108).
gaaactatcagattttgat

SEQ ID NO: 374154 - DNA, 19 bp, Homo sapiens
  siRNA target sequence for SEP1 (NM_019001.2,1155-1173).
gcaaagttggtaacaagta

SEQ ID NO: 374155 - DNA, 19 bp, Homo sapiens
  siRNA target sequence for SEP1 (NM_019001.2,1164-1182).
gtaacaagtacctcaatga

SEQ ID NO: 374156 - DNA, 19 bp, Homo sapiens
  siRNA target sequence for SEP1 (NM_019001.2,1287-1305).
gcgaaatgataacttctaa

SEQ ID NO: 374157 - DNA, 19 bp, Homo sapiens
  siRNA target sequence for SEP1 (NM_019001.2,1393-1411).
gggggttgacgtagtatct

SEQ ID NO: 374158 - DNA, 19 bp, Homo sapiens
  siRNA target sequence for SEP1 (NM_019001.2,1395-1413).
gggttgacgtagtatctga

SEQ ID NO: 374159 - DNA, 19 bp, Homo sapiens
  siRNA target sequence for SEP1 (NM_019001.2,1396-1414).
ggttgacgtagtatctgat

SEQ ID NO: 374160 - DNA, 19 bp, Homo sapiens
  siRNA target sequence for SEP1 (NM_019001.2,1402-1420).
cgtagtatctgatgacttt

SEQ ID NO: 374161 - DNA, 19 bp, Homo sapiens
  siRNA target sequence for SEP1 (NM_019001.2,1440-1458).
gttatgttcaggcaataca

SEQ ID NO: 374162 - DNA, 19 bp, Homo sapiens
  siRNA target sequence for SEP1 (NM_019001.2,1452-1470).
caatacagtggattttgca

SEQ ID NO: 374163 - DNA, 19 bp, Homo sapiens
  siRNA target sequence for SEP1 (NM_019001.2,1490-1508).
cagtcctggagctggtatt

SEQ ID NO: 374164 - DNA, 19 bp, Homo sapiens
  siRNA target sequence for SEP1 (NM_019001.2,1497-1515).
ggagctggtattatcctta

SEQ ID NO: 374165 - DNA, 19 bp, Homo sapiens
  siRNA target sequence for SEP1 (NM_019001.2,1498-1516).
gagctggtattatccttat

SEQ ID NO: 374166 - DNA, 19 bp, Homo sapiens
  siRNA target sequence for SEP1 (NM_019001.2,1523-1541).
gcacctttcctgtctgata

SEQ ID NO: 374167 - DNA, 19 bp, Homo sapiens
  siRNA target sequence for SEP1 (NM_019001.2,1538-1556).
gatatacacaacatcagta

SEQ ID NO: 374168 - DNA, 19 bp, Homo sapiens
  siRNA target sequence for SEP1 (NM_019001.2,1546-1564).
caacatcagtacactcaaa

SEQ ID NO: 374169 - DNA, 19 bp, Homo sapiens
  siRNA target sequence for SEP1 (NM_019001.2,1552-1570).
cagtacactcaaaatccat

SEQ ID NO: 374170 - DNA, 19 bp, Homo sapiens
  siRNA target sequence for SEP1 (NM_019001.2,1623-1641).
cagcagccagcaaaaattt

SEQ ID NO: 374171 - DNA, 19 bp, Homo sapiens
  siRNA target sequence for SEP1 (NM_019001.2,1647-1665).
ctgcatgctaccagcattt

SEQ ID NO: 374172 - DNA, 19 bp, Homo sapiens
  siRNA target sequence for SEP1 (NM_019001.2,1850-1868).
catagtgagtgcctaatgt

SEQ ID NO: 374173 - DNA, 19 bp, Homo sapiens
  siRNA target sequence for SEP1 (NM_019001.2,1862-1880).
ctaatgtgctggtatgata

SEQ ID NO: 374174 - DNA, 19 bp, Homo sapiens
  siRNA target sequence for SEP1 (NM_019001.2,1877-1895).
gatagagacacagagttta

SEQ ID NO: 374175 - DNA, 19 bp, Homo sapiens
  siRNA target sequence for SEP1 (NM_019001.2,1881-1899).
gagacacagagtttatcta

SEQ ID NO: 374176 - DNA, 19 bp, Homo sapiens
  siRNA target sequence for SEP1 (NM_019001.2,1928-1946).
gccatagaacgatgttgta

SEQ ID NO: 374177 - DNA, 19 bp, Homo sapiens
  siRNA target sequence for SEP1 (NM_019001.2,1930-1948).
catagaacgatgttgtaca

SEQ ID NO: 374178 - DNA, 19 bp, Homo sapiens
  siRNA target sequence for SEP1 (NM_019001.2,1937-1955).
cgatgttgtacaaggtata

SEQ ID NO: 374179 - DNA, 19 bp, Homo sapiens
  siRNA target sequence for SEP1 (NM_019001.2,1973-1991).
gcttggcgtgtagacataa

SEQ ID NO: 374180 - DNA, 19 bp, Homo sapiens
  siRNA target sequence for SEP1 (NM_019001.2,1974-1992).
cttggcgtgtagacataaa

SEQ ID NO: 374181 - DNA, 19 bp, Homo sapiens
  siRNA target sequence for SEP1 (NM_019001.2,1977-1995).
ggcgtgtagacataaacaa

SEQ ID NO: 374182 - DNA, 19 bp, Homo sapiens
  siRNA target sequence for SEP1 (NM_019001.2,1978-1996).
gcgtgtagacataaacaaa

SEQ ID NO: 374183 - DNA, 19 bp, Homo sapiens
  siRNA target sequence for SEP1 (NM_019001.2,1979-1997).
cgtgtagacataaacaaaa

SEQ ID NO: 374184 - DNA, 19 bp, Homo sapiens
  siRNA target sequence for SEP1 (NM_019001.2,2083-2101).
gaaaagtggtgttcaagta

SEQ ID NO: 374185 - DNA, 19 bp, Homo sapiens
  siRNA target sequence for SEP1 (NM_019001.2,2088-2106).
gtggtgttcaagtattcca

SEQ ID NO: 374186 - DNA, 19 bp, Homo sapiens
  siRNA target sequence for SEP1 (NM_019001.2,2115-2133).
gtcgtggagaaaacatgat

SEQ ID NO: 374187 - DNA, 19 bp, Homo sapiens
  siRNA target sequence for SEP1 (NM_019001.2,2117-2135).
cgtggagaaaacatgatgt

SEQ ID NO: 374188 - DNA, 19 bp, Homo sapiens
  siRNA target sequence for SEP1 (NM_019001.2,2118-2136).
gtggagaaaacatgatgtt

SEQ ID NO: 374189 - DNA, 19 bp, Homo sapiens
  siRNA target sequence for SEP1 (NM_019001.2,2244-2262).
gagtcgtggctgtatcaga

SEQ ID NO: 374190 - DNA, 19 bp, Homo sapiens
  siRNA target sequence for SEP1 (NM_019001.2,2322-2340).
gaactgccccaccatctaa

SEQ ID NO: 374191 - DNA, 19 bp, Homo sapiens
  siRNA target sequence for SEP1 (NM_019001.2,2344-2362).
ggttcatcttggagataaa

SEQ ID NO: 374192 - DNA, 19 bp, Homo sapiens
  siRNA target sequence for SEP1 (NM_019001.2,2370-2388).
ctaactgggcaaaagaagt

SEQ ID NO: 374193 - DNA, 19 bp, Homo sapiens
  siRNA target sequence for SEP1 (NM_019001.2,2402-2420).
gaacactacctgagaagaa

SEQ ID NO: 374194 - DNA, 19 bp, Homo sapiens
  siRNA target sequence for SEP1 (NM_019001.2,2474-2492).
ggtcgtaaatatcaaataa

SEQ ID NO: 374195 - DNA, 19 bp, Homo sapiens
  siRNA target sequence for SEP1 (NM_019001.2,2507-2525).
gttcgtctagagaaacagt

SEQ ID NO: 374196 - DNA, 19 bp, Homo sapiens
  siRNA target sequence for SEP1 (NM_019001.2,2524-2542).
gtggtcaaaacaagttgtt

SEQ ID NO: 374197 - DNA, 19 bp, Homo sapiens
  siRNA target sequence for SEP1 (NM_019001.2,2585-2603).
gactcccgtttctccaata

SEQ ID NO: 374198 - DNA, 19 bp, Homo sapiens
  siRNA target sequence for SEP1 (NM_019001.2,2589-2607).
cccgtttctccaatatcaa

SEQ ID NO: 374199 - DNA, 19 bp, Homo sapiens
  siRNA target sequence for SEP1 (NM_019001.2,2634-2652).
gaagtatggtctttatgct

SEQ ID NO: 374200 - DNA, 19 bp, Homo sapiens
  siRNA target sequence for SEP1 (NM_019001.2,2714-2732).
ggtaggattcgtgtgattt

SEQ ID NO: 374201 - DNA, 19 bp, Homo sapiens
  siRNA target sequence for SEP1 (NM_019001.2,2715-2733).
gtaggattcgtgtgatttt

SEQ ID NO: 374202 - DNA, 19 bp, Homo sapiens
  siRNA target sequence for SEP1 (NM_019001.2,2750-2768).
cccaatcttgatgctttaa

SEQ ID NO: 374203 - DNA, 19 bp, Homo sapiens
  siRNA target sequence for SEP1 (NM_019001.2,2836-2854).
gagtggataccttgtttca

SEQ ID NO: 374204 - DNA, 19 bp, Homo sapiens
  siRNA target sequence for SEP1 (NM_019001.2,2845-2863).
ccttgtttcaaggtttaca

SEQ ID NO: 374205 - DNA, 19 bp, Homo sapiens
  siRNA target sequence for SEP1 (NM_019001.2,2856-2874).
ggtttacaggaagtatttt

SEQ ID NO: 374206 - DNA, 19 bp, Homo sapiens
  siRNA target sequence for SEP1 (NM_019001.2,2899-2917).
ccctcatggagaccataaa

SEQ ID NO: 374207 - DNA, 19 bp, Homo sapiens
  siRNA target sequence for SEP1 (NM_019001.2,2907-2925).
gagaccataaagcaaatgt

SEQ ID NO: 374208 - DNA, 19 bp, Homo sapiens
  siRNA target sequence for SEP1 (NM_019001.2,2959-2977).
ggaggtacctggatatact

SEQ ID NO: 374209 - DNA, 19 bp, Homo sapiens
  siRNA target sequence for SEP1 (NM_019001.2,2960-2978).
gaggtacctggatatacta

SEQ ID NO: 374210 - DNA, 19 bp, Homo sapiens
  siRNA target sequence for SEP1 (NM_019001.2,2963-2981).
gtacctggatatactaaga

SEQ ID NO: 374211 - DNA, 19 bp, Homo sapiens
  siRNA target sequence for SEP1 (NM_019001.2,3047-3065).
gctccagaactatttagtt

SEQ ID NO: 374212 - DNA, 19 bp, Homo sapiens
  siRNA target sequence for SEP1 (NM_019001.2,3048-3066).
ctccagaactatttagtta

SEQ ID NO: 374213 - DNA, 19 bp, Homo sapiens
  siRNA target sequence for SEP1 (NM_019001.2,3050-3068).
ccagaactatttagttata

SEQ ID NO: 374214 - DNA, 19 bp, Homo sapiens
  siRNA target sequence for SEP1 (NM_019001.2,3173-3191).
ggacatcctgtcagtactt

SEQ ID NO: 374215 - DNA, 19 bp, Homo sapiens
  siRNA target sequence for SEP1 (NM_019001.2,3174-3192).
gacatcctgtcagtacttt

SEQ ID NO: 374216 - DNA, 19 bp, Homo sapiens
  siRNA target sequence for SEP1 (NM_019001.2,3195-3213).
ctcgttcttcttgtgattt

SEQ ID NO: 374217 - DNA, 19 bp, Homo sapiens
  siRNA target sequence for SEP1 (NM_019001.2,3257-3275).
gtcgaaaagtgcaagcaaa

SEQ ID NO: 374218 - DNA, 19 bp, Homo sapiens
  siRNA target sequence for SEP1 (NM_019001.2,3292-3310).
ggtgcgagtaacagtgaaa

SEQ ID NO: 374219 - DNA, 19 bp, Homo sapiens
  siRNA target sequence for SEP1 (NM_019001.2,3359-3377).
gatcgggatgcagaatttt

SEQ ID NO: 374220 - DNA, 19 bp, Homo sapiens
  siRNA target sequence for SEP1 (NM_019001.2,3380-3398).
ctttttgaccgtgttgtaa

SEQ ID NO: 374221 - DNA, 19 bp, Homo sapiens
  siRNA target sequence for SEP1 (NM_019001.2,3430-3448).
ccttcgaggcaccatcata

SEQ ID NO: 374222 - DNA, 19 bp, Homo sapiens
  siRNA target sequence for SEP1 (NM_019001.2,3437-3455).
ggcaccatcataggaataa

SEQ ID NO: 374223 - DNA, 19 bp, Homo sapiens
  siRNA target sequence for SEP1 (NM_019001.2,3438-3456).
gcaccatcataggaataaa

SEQ ID NO: 374224 - DNA, 19 bp, Homo sapiens
  siRNA target sequence for SEP1 (NM_019001.2,3468-3486).
gagaagccgatgtactatt

SEQ ID NO: 374225 - DNA, 19 bp, Homo sapiens
  siRNA target sequence for SEP1 (NM_019001.2,3474-3492).
ccgatgtactatttgaagt

SEQ ID NO: 374226 - DNA, 19 bp, Homo sapiens
  siRNA target sequence for SEP1 (NM_019001.2,3512-3530).
cctggagggttaacaataa

SEQ ID NO: 374227 - DNA, 19 bp, Homo sapiens
  siRNA target sequence for SEP1 (NM_019001.2,3515-3533).
ggagggttaacaataagat

SEQ ID NO: 374228 - DNA, 19 bp, Homo sapiens
  siRNA target sequence for SEP1 (NM_019001.2,3597-3615).
gctctgaaactggaaatca

SEQ ID NO: 374229 - DNA, 19 bp, Homo sapiens
  siRNA target sequence for SEP1 (NM_019001.2,3619-3637).
gttgacagccatcgtaaaa

SEQ ID NO: 374230 - DNA, 19 bp, Homo sapiens
  siRNA target sequence for SEP1 (NM_019001.2,3622-3640).
gacagccatcgtaaaacca

SEQ ID NO: 374231 - DNA, 19 bp, Homo sapiens
  siRNA target sequence for SEP1 (NM_019001.2,3703-3721).
caaccattcccctcaatca

SEQ ID NO: 374232 - DNA, 19 bp, Homo sapiens
  siRNA target sequence for SEP1 (NM_019001.2,3706-3724).
ccattcccctcaatcactt

SEQ ID NO: 374233 - DNA, 19 bp, Homo sapiens
  siRNA target sequence for SEP1 (NM_019001.2,3707-3725).
cattcccctcaatcacttt

SEQ ID NO: 374234 - DNA, 19 bp, Homo sapiens
  siRNA target sequence for SEP1 (NM_019001.2,3758-3776).
gatgaattctgcaacattt

SEQ ID NO: 374235 - DNA, 19 bp, Homo sapiens
  siRNA target sequence for SEP1 (NM_019001.2,3791-3809).
ggatctggaaagatgcaat

SEQ ID NO: 374236 - DNA, 19 bp, Homo sapiens
  siRNA target sequence for SEP1 (NM_019001.2,3792-3810).
gatctggaaagatgcaata

SEQ ID NO: 374237 - DNA, 19 bp, Homo sapiens
  siRNA target sequence for SEP1 (NM_019001.2,3811-3829).
ctttcagccaactatacaa

SEQ ID NO: 374238 - DNA, 19 bp, Homo sapiens
  siRNA target sequence for SEP1 (NM_019001.2,3861-3879).
gccaagtaaatcaacatca

SEQ ID NO: 374239 - DNA, 19 bp, Homo sapiens
  siRNA target sequence for SEP1 (NM_019001.2,3863-3881).
caagtaaatcaacatcata

SEQ ID NO: 374240 - DNA, 19 bp, Homo sapiens
  siRNA target sequence for SEP1 (NM_019001.2,3866-3884).
gtaaatcaacatcataaat

SEQ ID NO: 374241 - DNA, 19 bp, Homo sapiens
  siRNA target sequence for SEP1 (NM_019001.2,3905-3923).
gttaaatatcagcaaagaa

SEQ ID NO: 374242 - DNA, 19 bp, Homo sapiens
  siRNA target sequence for SEP1 (NM_019001.2,3997-4015).
caataagcagcctaactct

SEQ ID NO: 374243 - DNA, 19 bp, Homo sapiens
  siRNA target sequence for SEP1 (NM_019001.2,4003-4021).
gcagcctaactctggaatt

SEQ ID NO: 374244 - DNA, 19 bp, Homo sapiens
  siRNA target sequence for SEP1 (NM_019001.2,4014-4032).
ctggaattgagaacttttt

SEQ ID NO: 374245 - DNA, 19 bp, Homo sapiens
  siRNA target sequence for SEP1 (NM_019001.2,4091-4109).
ccaagtgaagagcatttgt

SEQ ID NO: 374246 - DNA, 19 bp, Homo sapiens
  siRNA target sequence for SEP1 (NM_019001.2,4129-4147).
gggaacacggatgcttaaa

SEQ ID NO: 374247 - DNA, 19 bp, Homo sapiens
  siRNA target sequence for SEP1 (NM_019001.2,4131-4149).
gaacacggatgcttaaaga

SEQ ID NO: 374248 - DNA, 19 bp, Homo sapiens
  siRNA target sequence for SEP1 (NM_019001.2,4134-4152).
cacggatgcttaaagaaat

SEQ ID NO: 374249 - DNA, 19 bp, Homo sapiens
  siRNA target sequence for SEP1 (NM_019001.2,4138-4156).
gatgcttaaagaaattcta

SEQ ID NO: 374250 - DNA, 19 bp, Homo sapiens
  siRNA target sequence for SEP1 (NM_019001.2,4170-4188).
ctaacactgtggaccataa

SEQ ID NO: 374251 - DNA, 19 bp, Homo sapiens
  siRNA target sequence for SEP1 (NM_019001.2,4174-4192).
cactgtggaccataagaat

SEQ ID NO: 374252 - DNA, 19 bp, Homo sapiens
  siRNA target sequence for SEP1 (NM_019001.2,4178-4196).
gtggaccataagaatgaaa

SEQ ID NO: 374253 - DNA, 19 bp, Homo sapiens
  siRNA target sequence for SEP1 (NM_019001.2,4257-4275).
cctctcagcctaaacaaaa

SEQ ID NO: 374254 - DNA, 19 bp, Homo sapiens
  siRNA target sequence for SEP1 (NM_019001.2,4331-4349).
gttcagtctatggacaata

SEQ ID NO: 374255 - DNA, 19 bp, Homo sapiens
  siRNA target sequence for SEP1 (NM_019001.2,4336-4354).
gtctatggacaatatgtgt

SEQ ID NO: 374256 - DNA, 19 bp, Homo sapiens
  siRNA target sequence for SEP1 (NM_019001.2,4428-4446).
gaatgccacaacctgattt

SEQ ID NO: 374257 - DNA, 19 bp, Homo sapiens
  siRNA target sequence for SEP1 (NM_019001.2,4477-4495).
cgtttgccaagtaaaatta

SEQ ID NO: 374258 - DNA, 19 bp, Homo sapiens
  siRNA target sequence for SEP1 (NM_019001.2,4520-4538).
ccacagtgccactctgaaa

SEQ ID NO: 374259 - DNA, 19 bp, Homo sapiens
  siRNA target sequence for SEP1 (NM_019001.2,4582-4600).
gggctccttaggcatgaat

SEQ ID NO: 374260 - DNA, 19 bp, Homo sapiens
  siRNA target sequence for SEP1 (NM_019001.2,4583-4601).
ggctccttaggcatgaatt

SEQ ID NO: 374261 - DNA, 19 bp, Homo sapiens
  siRNA target sequence for SEP1 (NM_019001.2,4680-4698).
ctactggctgggatcacta

SEQ ID NO: 374262 - DNA, 19 bp, Homo sapiens
  siRNA target sequence for SEP1 (NM_019001.2,4712-4730).
gcattgggggcagctaata

SEQ ID NO: 374263 - DNA, 19 bp, Homo sapiens
  siRNA target sequence for SEP1 (NM_019001.2,4795-4813).
gaagcccttccatcatact

SEQ ID NO: 374264 - DNA, 19 bp, Homo sapiens
  siRNA target sequence for SEP1 (NM_019001.2,4798-4816).
gcccttccatcatacttta

SEQ ID NO: 374265 - DNA, 19 bp, Homo sapiens
  siRNA target sequence for SEP1 (NM_019001.2,4799-4817).
cccttccatcatactttat

SEQ ID NO: 374266 - DNA, 19 bp, Homo sapiens
  siRNA target sequence for SEP1 (NM_019001.2,4800-4818).
ccttccatcatactttata

SEQ ID NO: 374267 - DNA, 19 bp, Homo sapiens
  siRNA target sequence for SEP1 (NM_019001.2,4834-4852).
catggctgggggaatacca

SEQ ID NO: 374268 - DNA, 19 bp, Homo sapiens
  siRNA target sequence for SEP1 (NM_019001.2,4854-4872).
ggggtgtgcacaatcagtt

SEQ ID NO: 374269 - DNA, 19 bp, Homo sapiens
  siRNA target sequence for SEP1 (NM_019001.2,4856-4874).
ggtgtgcacaatcagttta

SEQ ID NO: 374270 - DNA, 19 bp, Homo sapiens
  siRNA target sequence for SEP1 (NM_019001.2,4857-4875).
gtgtgcacaatcagtttat

SEQ ID NO: 374271 - DNA, 19 bp, Homo sapiens
  siRNA target sequence for SEP1 (NM_019001.2,4877-4895).
cctctgcaggttactaaaa

SEQ ID NO: 374272 - DNA, 19 bp, Homo sapiens
  siRNA target sequence for SEP1 (NM_019001.2,4878-4896).
ctctgcaggttactaaaaa

SEQ ID NO: 374273 - DNA, 19 bp, Homo sapiens
  siRNA target sequence for SEP1 (NM_019001.2,4963-4981).
gactagccagccagattct

SEQ ID NO: 374274 - DNA, 19 bp, Homo sapiens
  siRNA target sequence for SEP1 (NM_019001.2,5045-5063).
gctcaacctgcatcttctt

SEQ ID NO: 374275 - DNA, 19 bp, Homo sapiens
  siRNA target sequence for SEP1 (NM_019001.2,5046-5064).
ctcaacctgcatcttcttt

SEQ ID NO: 374276 - DNA, 19 bp, Homo sapiens
  siRNA target sequence for SEP1 (NM_019001.2,5078-5096).
gcctctcaaggccatagta

SEQ ID NO: 374277 - DNA, 19 bp, Homo sapiens
  siRNA target sequence for SEP1 (NM_019001.2,5079-5097).
cctctcaaggccatagtat

SEQ ID NO: 374278 - DNA, 19 bp, Homo sapiens
  siRNA target sequence for ETAA16 (NM_019002.2,147-165).
gagtcggcgaaggaaacat

SEQ ID NO: 374279 - DNA, 19 bp, Homo sapiens
  siRNA target sequence for ETAA16 (NM_019002.2,149-167).
gtcggcgaaggaaacatga

SEQ ID NO: 374280 - DNA, 19 bp, Homo sapiens
  siRNA target sequence for ETAA16 (NM_019002.2,340-358).
gccctgtgcagtaaaagta

SEQ ID NO: 374281 - DNA, 19 bp, Homo sapiens
  siRNA target sequence for ETAA16 (NM_019002.2,356-374).
gtaaccccgaggaaaggta

SEQ ID NO: 374282 - DNA, 19 bp, Homo sapiens
  siRNA target sequence for ETAA16 (NM_019002.2,360-378).
ccccgaggaaaggtatgaa

SEQ ID NO: 374283 - DNA, 19 bp, Homo sapiens
  siRNA target sequence for ETAA16 (NM_019002.2,372-390).
gtatgaaacaccaaagaga

SEQ ID NO: 374284 - DNA, 19 bp, Homo sapiens
  siRNA target sequence for ETAA16 (NM_019002.2,383-401).
caaagagagcgctgaaaat

SEQ ID NO: 374285 - DNA, 19 bp, Homo sapiens
  siRNA target sequence for ETAA16 (NM_019002.2,420-438).
cttcagttctcctaatgat

SEQ ID NO: 374286 - DNA, 19 bp, Homo sapiens
  siRNA target sequence for ETAA16 (NM_019002.2,469-487).
cagaattctccattgacaa

SEQ ID NO: 374287 - DNA, 19 bp, Homo sapiens
  siRNA target sequence for ETAA16 (NM_019002.2,483-501).
gacaaagcagttaggtaaa

SEQ ID NO: 374288 - DNA, 19 bp, Homo sapiens
  siRNA target sequence for ETAA16 (NM_019002.2,533-551).
gtgatgagatttcacatat

SEQ ID NO: 374289 - DNA, 19 bp, Homo sapiens
  siRNA target sequence for ETAA16 (NM_019002.2,545-563).
cacatattgttaatcgtat

SEQ ID NO: 374290 - DNA, 19 bp, Homo sapiens
  siRNA target sequence for ETAA16 (NM_019002.2,616-634).
ggtgaaactgctattcctt

SEQ ID NO: 374291 - DNA, 19 bp, Homo sapiens
  siRNA target sequence for ETAA16 (NM_019002.2,640-658).
cccagtgtagcaaaaggaa

SEQ ID NO: 374292 - DNA, 19 bp, Homo sapiens
  siRNA target sequence for ETAA16 (NM_019002.2,675-693).
cagctgcacaaagttaaaa

SEQ ID NO: 374293 - DNA, 19 bp, Homo sapiens
  siRNA target sequence for ETAA16 (NM_019002.2,750-768).
ggaagagctagatgtgatt

SEQ ID NO: 374294 - DNA, 19 bp, Homo sapiens
  siRNA target sequence for ETAA16 (NM_019002.2,772-790).
gagcaaaacaagaggaatt

SEQ ID NO: 374295 - DNA, 19 bp, Homo sapiens
  siRNA target sequence for ETAA16 (NM_019002.2,774-792).
gcaaaacaagaggaattat

SEQ ID NO: 374296 - DNA, 19 bp, Homo sapiens
  siRNA target sequence for ETAA16 (NM_019002.2,877-895).
cccgaaatagataatgcta

SEQ ID NO: 374297 - DNA, 19 bp, Homo sapiens
  siRNA target sequence for ETAA16 (NM_019002.2,950-968).
gcagtcagaagccatttga

SEQ ID NO: 374298 - DNA, 19 bp, Homo sapiens
  siRNA target sequence for ETAA16 (NM_019002.2,979-997).
gaagcagcctttaatgcta

SEQ ID NO: 374299 - DNA, 19 bp, Homo sapiens
  siRNA target sequence for ETAA16 (NM_019002.2,982-1000).
gcagcctttaatgctattt

SEQ ID NO: 374300 - DNA, 19 bp, Homo sapiens
  siRNA target sequence for ETAA16 (NM_019002.2,1017-1035).
gaaatgtagcggacagtta

SEQ ID NO: 374301 - DNA, 19 bp, Homo sapiens
  siRNA target sequence for ETAA16 (NM_019002.2,1042-1060).
gaactgccagaggcttttt

SEQ ID NO: 374302 - DNA, 19 bp, Homo sapiens
  siRNA target sequence for ETAA16 (NM_019002.2,1065-1083).
caccagtaatactaccttt

SEQ ID NO: 374303 - DNA, 19 bp, Homo sapiens
  siRNA target sequence for ETAA16 (NM_019002.2,1183-1201).
gtagatacacccataatga

SEQ ID NO: 374304 - DNA, 19 bp, Homo sapiens
  siRNA target sequence for ETAA16 (NM_019002.2,1192-1210).
cccataatgacaaaatcat

SEQ ID NO: 374305 - DNA, 19 bp, Homo sapiens
  siRNA target sequence for ETAA16 (NM_019002.2,1230-1248).
ggagccagaaacttctaat

SEQ ID NO: 374306 - DNA, 19 bp, Homo sapiens
  siRNA target sequence for ETAA16 (NM_019002.2,1231-1249).
gagccagaaacttctaata

SEQ ID NO: 374307 - DNA, 19 bp, Homo sapiens
  siRNA target sequence for ETAA16 (NM_019002.2,1235-1253).
cagaaacttctaataagta

SEQ ID NO: 374308 - DNA, 19 bp, Homo sapiens
  siRNA target sequence for ETAA16 (NM_019002.2,1237-1255).
gaaacttctaataagtaca

SEQ ID NO: 374309 - DNA, 19 bp, Homo sapiens
  siRNA target sequence for ETAA16 (NM_019002.2,1306-1324).
ggtagtgaaccttttgcta

SEQ ID NO: 374310 - DNA, 19 bp, Homo sapiens
  siRNA target sequence for ETAA16 (NM_019002.2,1307-1325).
gtagtgaaccttttgctat

SEQ ID NO: 374311 - DNA, 19 bp, Homo sapiens
  siRNA target sequence for ETAA16 (NM_019002.2,1312-1330).
gaaccttttgctatgcaaa

SEQ ID NO: 374312 - DNA, 19 bp, Homo sapiens
  siRNA target sequence for ETAA16 (NM_019002.2,1335-1353).
cgacatgcctgaactcttt

SEQ ID NO: 374313 - DNA, 19 bp, Homo sapiens
  siRNA target sequence for ETAA16 (NM_019002.2,1450-1468).
gccaggttaggagattcaa

SEQ ID NO: 374314 - DNA, 19 bp, Homo sapiens
  siRNA target sequence for ETAA16 (NM_019002.2,1455-1473).
gttaggagattcaaaagta

SEQ ID NO: 374315 - DNA, 19 bp, Homo sapiens
  siRNA target sequence for ETAA16 (NM_019002.2,1471-1489).
gtattacaagatctttctt

SEQ ID NO: 374316 - DNA, 19 bp, Homo sapiens
  siRNA target sequence for ETAA16 (NM_019002.2,1496-1514).
catatgacagagaattaat

SEQ ID NO: 374317 - DNA, 19 bp, Homo sapiens
  siRNA target sequence for ETAA16 (NM_019002.2,1643-1661).
catctaatctgacaaaaat

SEQ ID NO: 374318 - DNA, 19 bp, Homo sapiens
  siRNA target sequence for ETAA16 (NM_019002.2,1669-1687).
gatattcttactaactcta

SEQ ID NO: 374319 - DNA, 19 bp, Homo sapiens
  siRNA target sequence for ETAA16 (NM_019002.2,1721-1739).
caaggtattctaatgaaca

SEQ ID NO: 374320 - DNA, 19 bp, Homo sapiens
  siRNA target sequence for ETAA16 (NM_019002.2,1766-1784).
ctattaaagcccctgttaa

SEQ ID NO: 374321 - DNA, 19 bp, Homo sapiens
  siRNA target sequence for ETAA16 (NM_019002.2,1776-1794).
ccctgttaatactgatctt

SEQ ID NO: 374322 - DNA, 19 bp, Homo sapiens
  siRNA target sequence for ETAA16 (NM_019002.2,1813-1831).
ggcagtaaaaccagtgtta

SEQ ID NO: 374323 - DNA, 19 bp, Homo sapiens
  siRNA target sequence for ETAA16 (NM_019002.2,1828-1846).
gttagtaacccaaatcaga

SEQ ID NO: 374324 - DNA, 19 bp, Homo sapiens
  siRNA target sequence for ETAA16 (NM_019002.2,1891-1909).
ccctcatttgccaatgaaa

SEQ ID NO: 374325 - DNA, 19 bp, Homo sapiens
  siRNA target sequence for ETAA16 (NM_019002.2,1918-1936).
gcatgtcatcaattagata

SEQ ID NO: 374326 - DNA, 19 bp, Homo sapiens
  siRNA target sequence for ETAA16 (NM_019002.2,1924-1942).
catcaattagataatacct

SEQ ID NO: 374327 - DNA, 19 bp, Homo sapiens
  siRNA target sequence for ETAA16 (NM_019002.2,1971-1989).
gttgtaccaagcatgtgat

SEQ ID NO: 374328 - DNA, 19 bp, Homo sapiens
  siRNA target sequence for ETAA16 (NM_019002.2,1974-1992).
gtaccaagcatgtgatgat

SEQ ID NO: 374329 - DNA, 19 bp, Homo sapiens
  siRNA target sequence for ETAA16 (NM_019002.2,1977-1995).
ccaagcatgtgatgatatt

SEQ ID NO: 374330 - DNA, 19 bp, Homo sapiens
  siRNA target sequence for ETAA16 (NM_019002.2,2073-2091).
cgaacatggagccaaacta

SEQ ID NO: 374331 - DNA, 19 bp, Homo sapiens
  siRNA target sequence for ETAA16 (NM_019002.2,2074-2092).
gaacatggagccaaactaa

SEQ ID NO: 374332 - DNA, 19 bp, Homo sapiens
  siRNA target sequence for ETAA16 (NM_019002.2,2192-2210).
ctaaacaaggaagtaattt

SEQ ID NO: 374333 - DNA, 19 bp, Homo sapiens
  siRNA target sequence for ETAA16 (NM_019002.2,2264-2282).
caaatagctcacaaataga

SEQ ID NO: 374334 - DNA, 19 bp, Homo sapiens
  siRNA target sequence for ETAA16 (NM_019002.2,2341-2359).
gccacaaatttgactatgt

SEQ ID NO: 374335 - DNA, 19 bp, Homo sapiens
  siRNA target sequence for ETAA16 (NM_019002.2,2452-2470).
cttccaggaagttcaagtt

SEQ ID NO: 374336 - DNA, 19 bp, Homo sapiens
  siRNA target sequence for ETAA16 (NM_019002.2,2476-2494).
gtaacttcagatcatatga

SEQ ID NO: 374337 - DNA, 19 bp, Homo sapiens
  siRNA target sequence for ETAA16 (NM_019002.2,2498-2516).
cagaaattactacttataa

SEQ ID NO: 374338 - DNA, 19 bp, Homo sapiens
  siRNA target sequence for ETAA16 (NM_019002.2,2539-2557).
ccatgccataagactgtaa

SEQ ID NO: 374339 - DNA, 19 bp, Homo sapiens
  siRNA target sequence for ETAA16 (NM_019002.2,2543-2561).
gccataagactgtaacaga

SEQ ID NO: 374340 - DNA, 19 bp, Homo sapiens
  siRNA target sequence for ETAA16 (NM_019002.2,2569-2587).
cagagcaaccttaacacaa

SEQ ID NO: 374341 - DNA, 19 bp, Homo sapiens
  siRNA target sequence for ETAA16 (NM_019002.2,2588-2606).
cagttggattttcaaagtt

SEQ ID NO: 374342 - DNA, 19 bp, Homo sapiens
  siRNA target sequence for ETAA16 (NM_019002.2,2669-2687).
gaagtatgtctgataccaa

SEQ ID NO: 374343 - DNA, 19 bp, Homo sapiens
  siRNA target sequence for ETAA16 (NM_019002.2,2740-2758).
gctgttggacagcaatctt

SEQ ID NO: 374344 - DNA, 19 bp, Homo sapiens
  siRNA target sequence for ETAA16 (NM_019002.2,2752-2770).
caatctttggtgaaacttt

SEQ ID NO: 374345 - DNA, 19 bp, Homo sapiens
  siRNA target sequence for ETAA16 (NM_019002.2,2760-2778).
ggtgaaactttctgaatct

SEQ ID NO: 374346 - DNA, 19 bp, Homo sapiens
  siRNA target sequence for ETAA16 (NM_019002.2,2881-2899).
gcacgagcctcatctgtaa

SEQ ID NO: 374347 - DNA, 19 bp, Homo sapiens
  siRNA target sequence for FLJ20323 (NM_019005.1,186-204).
gcggtaccaaacctgatat

SEQ ID NO: 374348 - DNA, 19 bp, Homo sapiens
  siRNA target sequence for FLJ20323 (NM_019005.1,187-205).
cggtaccaaacctgatatt

SEQ ID NO: 374349 - DNA, 19 bp, Homo sapiens
  siRNA target sequence for FLJ20323 (NM_019005.1,210-228).
gggcaccacaccatgttga

SEQ ID NO: 374350 - DNA, 19 bp, Homo sapiens
  siRNA target sequence for FLJ20323 (NM_019005.1,212-230).
gcaccacaccatgttgata

SEQ ID NO: 374351 - DNA, 19 bp, Homo sapiens
  siRNA target sequence for FLJ20323 (NM_019005.1,220-238).
ccatgttgatagatttgtt

SEQ ID NO: 374352 - DNA, 19 bp, Homo sapiens
  siRNA target sequence for FLJ20323 (NM_019005.1,241-259).
gtgtgactcagaactaagt

SEQ ID NO: 374353 - DNA, 19 bp, Homo sapiens
  siRNA target sequence for FLJ20323 (NM_019005.1,243-261).
gtgactcagaactaagtct

SEQ ID NO: 374354 - DNA, 19 bp, Homo sapiens
  siRNA target sequence for FLJ20323 (NM_019005.1,247-265).
ctcagaactaagtctttat

SEQ ID NO: 374355 - DNA, 19 bp, Homo sapiens
  siRNA target sequence for FLJ20323 (NM_019005.1,279-297).
ctgtgaattcagaactcaa

SEQ ID NO: 374356 - DNA, 19 bp, Homo sapiens
  siRNA target sequence for FLJ20323 (NM_019005.1,303-321).
gatctttacgtttatctga

SEQ ID NO: 374357 - DNA, 19 bp, Homo sapiens
  siRNA target sequence for FLJ20323 (NM_019005.1,330-348).
cagctacattactgtcaat

SEQ ID NO: 374358 - DNA, 19 bp, Homo sapiens
  siRNA target sequence for FLJ20323 (NM_019005.1,332-350).
gctacattactgtcaataa

SEQ ID NO: 374359 - DNA, 19 bp, Homo sapiens
  siRNA target sequence for FLJ20323 (NM_019005.1,343-361).
gtcaataaattcagataca

SEQ ID NO: 374360 - DNA, 19 bp, Homo sapiens
  siRNA target sequence for FLJ20323 (NM_019005.1,360-378).
caccctatatgaaatgtgt

SEQ ID NO: 374361 - DNA, 19 bp, Homo sapiens
  siRNA target sequence for FLJ20323 (NM_019005.1,415-433).
ggcagttggacaagcaaat

SEQ ID NO: 374362 - DNA, 19 bp, Homo sapiens
  siRNA target sequence for FLJ20323 (NM_019005.1,434-452).
ggtcgagttgtacttacaa

SEQ ID NO: 374363 - DNA, 19 bp, Homo sapiens
  siRNA target sequence for FLJ20323 (NM_019005.1,453-471).
gccttggtcaagatcataa

SEQ ID NO: 374364 - DNA, 19 bp, Homo sapiens
  siRNA target sequence for FLJ20323 (NM_019005.1,455-473).
cttggtcaagatcataact

SEQ ID NO: 374365 - DNA, 19 bp, Homo sapiens
  siRNA target sequence for FLJ20323 (NM_019005.1,459-477).
gtcaagatcataactcaaa

SEQ ID NO: 374366 - DNA, 19 bp, Homo sapiens
  siRNA target sequence for FLJ20323 (NM_019005.1,461-479).
caagatcataactcaaagt

SEQ ID NO: 374367 - DNA, 19 bp, Homo sapiens
  siRNA target sequence for FLJ20323 (NM_019005.1,464-482).
gatcataactcaaagttca

SEQ ID NO: 374368 - DNA, 19 bp, Homo sapiens
  siRNA target sequence for FLJ20323 (NM_019005.1,515-533).
catgcacgacaatgtaata

SEQ ID NO: 374369 - DNA, 19 bp, Homo sapiens
  siRNA target sequence for FLJ20323 (NM_019005.1,543-561).
ggaatccactggatagtaa

SEQ ID NO: 374370 - DNA, 19 bp, Homo sapiens
  siRNA target sequence for FLJ20323 (NM_019005.1,562-580).
ctggctagctgctggttta

SEQ ID NO: 374371 - DNA, 19 bp, Homo sapiens
  siRNA target sequence for FLJ20323 (NM_019005.1,564-582).
ggctagctgctggtttaga

SEQ ID NO: 374372 - DNA, 19 bp, Homo sapiens
  siRNA target sequence for FLJ20323 (NM_019005.1,565-583).
gctagctgctggtttagat

SEQ ID NO: 374373 - DNA, 19 bp, Homo sapiens
  siRNA target sequence for FLJ20323 (NM_019005.1,586-604).
gcacagagctgacttttca

SEQ ID NO: 374374 - DNA, 19 bp, Homo sapiens
  siRNA target sequence for FLJ20323 (NM_019005.1,596-614).
gacttttcagtgctaatat

SEQ ID NO: 374375 - DNA, 19 bp, Homo sapiens
  siRNA target sequence for FLJ20323 (NM_019005.1,605-623).
gtgctaatatgggatatct

SEQ ID NO: 374376 - DNA, 19 bp, Homo sapiens
  siRNA target sequence for FLJ20323 (NM_019005.1,627-645).
gcaaatatactcctgatat

SEQ ID NO: 374377 - DNA, 19 bp, Homo sapiens
  siRNA target sequence for FLJ20323 (NM_019005.1,641-659).
gatatagttcccatggaaa

SEQ ID NO: 374378 - DNA, 19 bp, Homo sapiens
  siRNA target sequence for FLJ20323 (NM_019005.1,678-696).
gtgaaactgaaacaacatt

SEQ ID NO: 374379 - DNA, 19 bp, Homo sapiens
  siRNA target sequence for FLJ20323 (NM_019005.1,690-708).
caacattattagtaacaaa

SEQ ID NO: 374380 - DNA, 19 bp, Homo sapiens
  siRNA target sequence for FLJ20323 (NM_019005.1,762-780).
cacgagaccagaaacttct

SEQ ID NO: 374381 - DNA, 19 bp, Homo sapiens
  siRNA target sequence for FLJ20323 (NM_019005.1,793-811).
gcatcgtaacctagctata

SEQ ID NO: 374382 - DNA, 19 bp, Homo sapiens
  siRNA target sequence for FLJ20323 (NM_019005.1,794-812).
catcgtaacctagctatat

SEQ ID NO: 374383 - DNA, 19 bp, Homo sapiens
  siRNA target sequence for FLJ20323 (NM_019005.1,798-816).
gtaacctagctatatttga

SEQ ID NO: 374384 - DNA, 19 bp, Homo sapiens
  siRNA target sequence for FLJ20323 (NM_019005.1,802-820).
cctagctatatttgatctt

SEQ ID NO: 374385 - DNA, 19 bp, Homo sapiens
  siRNA target sequence for FLJ20323 (NM_019005.1,821-839).
cggaatacaagccaaaaga

SEQ ID NO: 374386 - DNA, 19 bp, Homo sapiens
  siRNA target sequence for FLJ20323 (NM_019005.1,831-849).
gccaaaagatgttcgtaaa

SEQ ID NO: 374387 - DNA, 19 bp, Homo sapiens
  siRNA target sequence for FLJ20323 (NM_019005.1,869-887).
gtgacggtagacccatatt

SEQ ID NO: 374388 - DNA, 19 bp, Homo sapiens
  siRNA target sequence for FLJ20323 (NM_019005.1,873-891).
cggtagacccatatttcca

SEQ ID NO: 374389 - DNA, 19 bp, Homo sapiens
  siRNA target sequence for FLJ20323 (NM_019005.1,914-932).
gaaggtcaggttgcaatat

SEQ ID NO: 374390 - DNA, 19 bp, Homo sapiens
  siRNA target sequence for FLJ20323 (NM_019005.1,966-984).
cattgactgagcaaccaaa

SEQ ID NO: 374391 - DNA, 19 bp, Homo sapiens
  siRNA target sequence for FLJ20323 (NM_019005.1,1012-1030).
cactaggactggtctactt

SEQ ID NO: 374392 - DNA, 19 bp, Homo sapiens
  siRNA target sequence for FLJ20323 (NM_019005.1,1022-1040).
ggtctacttgccactttaa

SEQ ID NO: 374393 - DNA, 19 bp, Homo sapiens
  siRNA target sequence for FLJ20323 (NM_019005.1,1046-1064).
gatagtaatattattagat

SEQ ID NO: 374394 - DNA, 19 bp, Homo sapiens
  siRNA target sequence for FLJ20323 (NM_019005.1,1133-1151).
gtgcaaccttgtgacaatt

SEQ ID NO: 374395 - DNA, 19 bp, Homo sapiens
  siRNA target sequence for FLJ20323 (NM_019005.1,1170-1188).
ggcatccaacaagtcaaaa

SEQ ID NO: 374396 - DNA, 19 bp, Homo sapiens
  siRNA target sequence for FLJ20323 (NM_019005.1,1171-1189).
gcatccaacaagtcaaaat

SEQ ID NO: 374397 - DNA, 19 bp, Homo sapiens
  siRNA target sequence for FLJ20323 (NM_019005.1,1175-1193).
ccaacaagtcaaaatcgaa

SEQ ID NO: 374398 - DNA, 19 bp, Homo sapiens
  siRNA target sequence for FLJ20323 (NM_019005.1,1176-1194).
caacaagtcaaaatcgaat

SEQ ID NO: 374399 - DNA, 19 bp, Homo sapiens
  siRNA target sequence for FLJ20323 (NM_019005.1,1179-1197).
caagtcaaaatcgaatgat

SEQ ID NO: 374400 - DNA, 19 bp, Homo sapiens
  siRNA target sequence for FLJ20323 (NM_019005.1,1182-1200).
gtcaaaatcgaatgatagt

SEQ ID NO: 374401 - DNA, 19 bp, Homo sapiens
  siRNA target sequence for FLJ20323 (NM_019005.1,1253-1271).
cttgcctggagcccaatta

SEQ ID NO: 374402 - DNA, 19 bp, Homo sapiens
  siRNA target sequence for FLJ20323 (NM_019005.1,1256-1274).
gcctggagcccaattacat

SEQ ID NO: 374403 - DNA, 19 bp, Homo sapiens
  siRNA target sequence for FLJ20323 (NM_019005.1,1261-1279).
gagcccaattacatcttta

SEQ ID NO: 374404 - DNA, 19 bp, Homo sapiens
  siRNA target sequence for FLJ20323 (NM_019005.1,1284-1302).
gggcttgtggtcgtcattt

SEQ ID NO: 374405 - DNA, 19 bp, Homo sapiens
  siRNA target sequence for FLJ20323 (NM_019005.1,1292-1310).
ggtcgtcatttatatgaat

SEQ ID NO: 374406 - DNA, 19 bp, Homo sapiens
  siRNA target sequence for FLJ20323 (NM_019005.1,1363-1381).
gcgtcttcgggctttatca

SEQ ID NO: 374407 - DNA, 19 bp, Homo sapiens
  siRNA target sequence for FLJ20323 (NM_019005.1,1364-1382).
cgtcttcgggctttatcaa

SEQ ID NO: 374408 - DNA, 19 bp, Homo sapiens
  siRNA target sequence for FLJ20323 (NM_019005.1,1383-1401).
ggtatggacttgatacaga

SEQ ID NO: 374409 - DNA, 19 bp, Homo sapiens
  siRNA target sequence for FLJ20323 (NM_019005.1,1406-1424).
gtgtggaggaaccacattt

SEQ ID NO: 374410 - DNA, 19 bp, Homo sapiens
  siRNA target sequence for FLJ20323 (NM_019005.1,1408-1426).
gtggaggaaccacatttta

SEQ ID NO: 374411 - DNA, 19 bp, Homo sapiens
  siRNA target sequence for FLJ20323 (NM_019005.1,1450-1468).
caagtcactctggtatact

SEQ ID NO: 374412 - DNA, 19 bp, Homo sapiens
  siRNA target sequence for FLJ20323 (NM_019005.1,1461-1479).
ggtatactctgcactttat

SEQ ID NO: 374413 - DNA, 19 bp, Homo sapiens
  siRNA target sequence for FLJ20323 (NM_019005.1,1491-1509).
cagaagatatggatcagaa

SEQ ID NO: 374414 - DNA, 19 bp, Homo sapiens
  siRNA target sequence for FLJ20323 (NM_019005.1,1515-1533).
caggcaacaaaggatcatt

SEQ ID NO: 374415 - DNA, 19 bp, Homo sapiens
  siRNA target sequence for FLJ20323 (NM_019005.1,1602-1620).
ggagtgggttggataagca

SEQ ID NO: 374416 - DNA, 19 bp, Homo sapiens
  siRNA target sequence for FLJ20323 (NM_019005.1,1603-1621).
gagtgggttggataagcaa

SEQ ID NO: 374417 - DNA, 19 bp, Homo sapiens
  siRNA target sequence for FLJ20323 (NM_019005.1,1609-1627).
gttggataagcaaagtgat

SEQ ID NO: 374418 - DNA, 19 bp, Homo sapiens
  siRNA target sequence for FLJ20323 (NM_019005.1,1612-1630).
ggataagcaaagtgatatt

SEQ ID NO: 374419 - DNA, 19 bp, Homo sapiens
  siRNA target sequence for FLJ20323 (NM_019005.1,1700-1718).
gacgtggggccatttttga

SEQ ID NO: 374420 - DNA, 19 bp, Homo sapiens
  siRNA target sequence for FLJ20323 (NM_019005.1,1703-1721).
gtggggccatttttgaact

SEQ ID NO: 374421 - DNA, 19 bp, Homo sapiens
  siRNA target sequence for FLJ20323 (NM_019005.1,1785-1803).
gccgagcaatccaaatcct

SEQ ID NO: 374422 - DNA, 19 bp, Homo sapiens
  siRNA target sequence for FLJ20323 (NM_019005.1,1834-1852).
gagatctgaatctcaatgt

SEQ ID NO: 374423 - DNA, 19 bp, Homo sapiens
  siRNA target sequence for FLJ20811 (NM_019007.2,505-523).
gaggagcctgatatttggt

SEQ ID NO: 374424 - DNA, 19 bp, Homo sapiens
  siRNA target sequence for FLJ20811 (NM_019007.2,507-525).
ggagcctgatatttggttt

SEQ ID NO: 374425 - DNA, 19 bp, Homo sapiens
  siRNA target sequence for FLJ20811 (NM_019007.2,632-650).
gagcacacccaataaaaca

SEQ ID NO: 374426 - DNA, 19 bp, Homo sapiens
  siRNA target sequence for FLJ20811 (NM_019007.2,651-669).
gcggccattcccctatgaa

SEQ ID NO: 374427 - DNA, 19 bp, Homo sapiens
  siRNA target sequence for FLJ20811 (NM_019007.2,654-672).
gccattcccctatgaacat

SEQ ID NO: 374428 - DNA, 19 bp, Homo sapiens
  siRNA target sequence for FLJ20811 (NM_019007.2,684-702).
gagtgctcaaaattgtaaa

SEQ ID NO: 374429 - DNA, 19 bp, Homo sapiens
  siRNA target sequence for FLJ20811 (NM_019007.2,775-793).
gatgcgggctttccattta

SEQ ID NO: 374430 - DNA, 19 bp, Homo sapiens
  siRNA target sequence for FLJ20811 (NM_019007.2,821-839).
gcctctcaatggctagaaa

SEQ ID NO: 374431 - DNA, 19 bp, Homo sapiens
  siRNA target sequence for FLJ20811 (NM_019007.2,823-841).
ctctcaatggctagaaaca

SEQ ID NO: 374432 - DNA, 19 bp, Homo sapiens
  siRNA target sequence for FLJ20811 (NM_019007.2,894-912).
cttaaatgcgagtattgaa

SEQ ID NO: 374433 - DNA, 19 bp, Homo sapiens
  siRNA target sequence for FLJ20811 (NM_019007.2,965-983).
cacgttgctgcaactcatt

SEQ ID NO: 374434 - DNA, 19 bp, Homo sapiens
  siRNA target sequence for FLJ20811 (NM_019007.2,968-986).
gttgctgcaactcatttct

SEQ ID NO: 374435 - DNA, 19 bp, Homo sapiens
  siRNA target sequence for FLJ20811 (NM_019007.2,987-1005).
gcagcaggccggattaaat

SEQ ID NO: 374436 - DNA, 19 bp, Homo sapiens
  siRNA target sequence for FLJ20811 (NM_019007.2,988-1006).
cagcaggccggattaaatt

SEQ ID NO: 374437 - DNA, 19 bp, Homo sapiens
  siRNA target sequence for FLJ20811 (NM_019007.2,991-1009).
caggccggattaaatttgt

SEQ ID NO: 374438 - DNA, 19 bp, Homo sapiens
  siRNA target sequence for FLJ20811 (NM_019007.2,1049-1067).
ccgcttcagacttgaagtt

SEQ ID NO: 374439 - DNA, 19 bp, Homo sapiens
  siRNA target sequence for FLJ20811 (NM_019007.2,1050-1068).
cgcttcagacttgaagttt

SEQ ID NO: 374440 - DNA, 19 bp, Homo sapiens
  siRNA target sequence for FLJ20811 (NM_019007.2,1062-1080).
gaagtttcctttgatatca

SEQ ID NO: 374441 - DNA, 19 bp, Homo sapiens
  siRNA target sequence for FLJ20811 (NM_019007.2,1169-1187).
cccagatgctcttctcatt

SEQ ID NO: 374442 - DNA, 19 bp, Homo sapiens
  siRNA target sequence for FLJ20232 (NM_019008.3,733-751).
caccttcgacacagataca

SEQ ID NO: 374443 - DNA, 19 bp, Homo sapiens
  siRNA target sequence for FLJ20232 (NM_019008.3,735-753).
ccttcgacacagatacatt

SEQ ID NO: 374444 - DNA, 19 bp, Homo sapiens
  siRNA target sequence for FLJ20232 (NM_019008.3,783-801).
ggaagggccaggtagactt

SEQ ID NO: 374445 - DNA, 19 bp, Homo sapiens
  siRNA target sequence for FLJ20232 (NM_019008.3,962-980).
ccgcttcgggacatgtact

SEQ ID NO: 374446 - DNA, 19 bp, Homo sapiens
  siRNA target sequence for FLJ20232 (NM_019008.3,963-981).
cgcttcgggacatgtactt

SEQ ID NO: 374447 - DNA, 19 bp, Homo sapiens
  siRNA target sequence for FLJ20232 (NM_019008.3,1020-1038).
ctgaccacatccaactcat

SEQ ID NO: 374448 - DNA, 19 bp, Homo sapiens
  siRNA target sequence for FLJ20232 (NM_019008.3,1117-1135).
cctggtgcgtcgtgagaat

SEQ ID NO: 374449 - DNA, 19 bp, Homo sapiens
  siRNA target sequence for FLJ20232 (NM_019008.3,1148-1166).
cctcgtgggagcagttact

SEQ ID NO: 374450 - DNA, 19 bp, Homo sapiens
  siRNA target sequence for FLJ20232 (NM_019008.3,1204-1222).
gacagtcgcagatacattt

SEQ ID NO: 374451 - DNA, 19 bp, Homo sapiens
  siRNA target sequence for FLJ20232 (NM_019008.3,1206-1224).
cagtcgcagatacatttga

SEQ ID NO: 374452 - DNA, 19 bp, Homo sapiens
  siRNA target sequence for FLJ20232 (NM_019008.3,1208-1226).
gtcgcagatacatttgaga

SEQ ID NO: 374453 - DNA, 19 bp, Homo sapiens
  siRNA target sequence for FLJ20232 (NM_019008.3,1232-1250).
gtggctggctccatcaatt

SEQ ID NO: 374454 - DNA, 19 bp, Homo sapiens
  siRNA target sequence for FLJ20232 (NM_019008.3,1263-1281).
ggtccctcttggactatgt

SEQ ID NO: 374455 - DNA, 19 bp, Homo sapiens
  siRNA target sequence for FLJ20232 (NM_019008.3,1266-1284).
ccctcttggactatgtgat

SEQ ID NO: 374456 - DNA, 19 bp, Homo sapiens
  siRNA target sequence for FLJ20232 (NM_019008.3,1314-1332).
cactggaggtgcagtatga

SEQ ID NO: 374457 - DNA, 19 bp, Homo sapiens
  siRNA target sequence for FLJ20232 (NM_019008.3,1324-1342).
gcagtatgagcgtgacaaa

SEQ ID NO: 374458 - DNA, 19 bp, Homo sapiens
  siRNA target sequence for FLJ20232 (NM_019008.3,1327-1345).
gtatgagcgtgacaaacat

SEQ ID NO: 374459 - DNA, 19 bp, Homo sapiens
  siRNA target sequence for FLJ20232 (NM_019008.3,1335-1353).
gtgacaaacatctcttcat

SEQ ID NO: 374460 - DNA, 19 bp, Homo sapiens
  siRNA target sequence for FLJ20232 (NM_019008.3,1409-1427).
cggctagcccagtatgaca

SEQ ID NO: 374461 - DNA, 19 bp, Homo sapiens
  siRNA target sequence for FLJ20232 (NM_019008.3,1410-1428).
ggctagcccagtatgacaa

SEQ ID NO: 374462 - DNA, 19 bp, Homo sapiens
  siRNA target sequence for FLJ20232 (NM_019008.3,1655-1673).
gccttgaggggacttatca

SEQ ID NO: 374463 - DNA, 19 bp, Homo sapiens
  siRNA target sequence for FLJ20232 (NM_019008.3,1665-1683).
gacttatcagctacttaga

SEQ ID NO: 374464 - DNA, 19 bp, Homo sapiens
  siRNA target sequence for FLJ20232 (NM_019008.3,1711-1729).
ccccaaggtgaacttattt

SEQ ID NO: 374465 - DNA, 19 bp, Homo sapiens
  siRNA target sequence for FLJ20232 (NM_019008.3,1714-1732).
caaggtgaacttatttgca

SEQ ID NO: 374466 - DNA, 19 bp, Homo sapiens
  siRNA target sequence for FLJ20232 (NM_019008.3,1735-1753).
gctcacccctgaagaaata

SEQ ID NO: 374467 - DNA, 19 bp, Homo sapiens
  siRNA target sequence for FLJ20232 (NM_019008.3,1748-1766).
gaaatagacgaattaggat

SEQ ID NO: 374468 - DNA, 19 bp, Homo sapiens
  siRNA target sequence for FLJ10156 (NM_019013.1,54-72).
cttctcggtggcagaacat

SEQ ID NO: 374469 - DNA, 19 bp, Homo sapiens
  siRNA target sequence for FLJ10156 (NM_019013.1,330-348).
gtgccgtgtcccagagaat

SEQ ID NO: 374470 - DNA, 19 bp, Homo sapiens
  siRNA target sequence for FLJ11127 (NM_019018.1,214-232).
gtgatgttggcagtttcat

SEQ ID NO: 374471 - DNA, 19 bp, Homo sapiens
  siRNA target sequence for FLJ11127 (NM_019018.1,258-276).
ccggaggctacatttatat

SEQ ID NO: 374472 - DNA, 19 bp, Homo sapiens
  siRNA target sequence for FLJ11127 (NM_019018.1,259-277).
cggaggctacatttatatt

SEQ ID NO: 374473 - DNA, 19 bp, Homo sapiens
  siRNA target sequence for FLJ11127 (NM_019018.1,346-364).
gcagaggttgatttactca

SEQ ID NO: 374474 - DNA, 19 bp, Homo sapiens
  siRNA target sequence for FLJ11127 (NM_019018.1,351-369).
ggttgatttactcagttat

SEQ ID NO: 374475 - DNA, 19 bp, Homo sapiens
  siRNA target sequence for FLJ11127 (NM_019018.1,593-611).
cacaaggttgtaattggat

SEQ ID NO: 374476 - DNA, 19 bp, Homo sapiens
  siRNA target sequence for FLJ11127 (NM_019018.1,662-680).
gaaaactacggaaatatgt

SEQ ID NO: 374477 - DNA, 19 bp, Homo sapiens
  siRNA target sequence for FLJ11127 (NM_019018.1,670-688).
cggaaatatgtggaattat

SEQ ID NO: 374478 - DNA, 19 bp, Homo sapiens
  siRNA target sequence for FLJ11127 (NM_019018.1,730-748).
cacaagagaggaagtatgt

SEQ ID NO: 374479 - DNA, 19 bp, Homo sapiens
  siRNA target sequence for FLJ11127 (NM_019018.1,793-811).
gaagctttaaagttcatca

SEQ ID NO: 374480 - DNA, 19 bp, Homo sapiens
  siRNA target sequence for FLJ11127 (NM_019018.1,816-834).
gtatcaagtcactgaagtt

SEQ ID NO: 374481 - DNA, 19 bp, Homo sapiens
  siRNA target sequence for FLJ11127 (NM_019018.1,859-877).
gtcattcccagtcttttta

SEQ ID NO: 374482 - DNA, 19 bp, Homo sapiens
  siRNA target sequence for FLJ11127 (NM_019018.1,927-945).
gaatcacctgaattctgta

SEQ ID NO: 374483 - DNA, 19 bp, Homo sapiens
  siRNA target sequence for FLJ11127 (NM_019018.1,956-974).
gtggactagagcagattga

SEQ ID NO: 374484 - DNA, 19 bp, Homo sapiens
  siRNA target sequence for FLJ11127 (NM_019018.1,958-976).
ggactagagcagattgata

SEQ ID NO: 374485 - DNA, 19 bp, Homo sapiens
  siRNA target sequence for FLJ11127 (NM_019018.1,959-977).
gactagagcagattgatat

SEQ ID NO: 374486 - DNA, 19 bp, Homo sapiens
  siRNA target sequence for FLJ11127 (NM_019018.1,961-979).
ctagagcagattgatatgt

SEQ ID NO: 374487 - DNA, 19 bp, Homo sapiens
  siRNA target sequence for FLJ11127 (NM_019018.1,966-984).
gcagattgatatgtttata

SEQ ID NO: 374488 - DNA, 19 bp, Homo sapiens
  siRNA target sequence for FLJ11127 (NM_019018.1,988-1006).
ggatactcccttgaagtaa

SEQ ID NO: 374489 - DNA, 19 bp, Homo sapiens
  siRNA target sequence for FLJ11127 (NM_019018.1,989-1007).
gatactcccttgaagtaaa

SEQ ID NO: 374490 - DNA, 19 bp, Homo sapiens
  siRNA target sequence for FLJ11127 (NM_019018.1,1017-1035).
gttcagactgttcaagttt

SEQ ID NO: 374491 - DNA, 19 bp, Homo sapiens
  siRNA target sequence for MGC25062 (NM_019020.2,227-245).
catctactccaagaacaat

SEQ ID NO: 374492 - DNA, 19 bp, Homo sapiens
  siRNA target sequence for MGC25062 (NM_019020.2,1101-1119).
gagagccagtacaaggttt

SEQ ID NO: 374493 - DNA, 19 bp, Homo sapiens
  siRNA target sequence for MGC25062 (NM_019020.2,1158-1176).
gtgttccagcagtggaaat

SEQ ID NO: 374494 - DNA, 19 bp, Homo sapiens
  siRNA target sequence for MGC25062 (NM_019020.2,1278-1296).
cccgaggagagcatgtaca

SEQ ID NO: 374495 - DNA, 19 bp, Homo sapiens
  siRNA target sequence for MGC25062 (NM_019020.2,1279-1297).
ccgaggagagcatgtacaa

SEQ ID NO: 374496 - DNA, 19 bp, Homo sapiens
  siRNA target sequence for MGC25062 (NM_019020.2,1423-1441).
ccttcctgctgcgctatta

SEQ ID NO: 374497 - DNA, 19 bp, Homo sapiens
  siRNA target sequence for MGC25062 (NM_019020.2,1549-1567).
gagcgttctggcgtaatgt

SEQ ID NO: 374498 - DNA, 19 bp, Homo sapiens
  siRNA target sequence for MGC25062 (NM_019020.2,1657-1675).
ggaggatcctgctgaacta

SEQ ID NO: 374499 - DNA, 19 bp, Homo sapiens
  siRNA target sequence for MGC25062 (NM_019020.2,1823-1841).
cgaggacatggagaaacaa

SEQ ID NO: 374500 - DNA, 19 bp, Homo sapiens
  siRNA target sequence for MGC25062 (NM_019020.2,2028-2046).
gactacttccaccttttca

SEQ ID NO: 374501 - DNA, 19 bp, Homo sapiens
  siRNA target sequence for MGC25062 (NM_019020.2,2221-2239).
gcctgcacgatctgtgtaa

SEQ ID NO: 374502 - DNA, 19 bp, Homo sapiens
  siRNA target sequence for FLJ20010 (NM_019021.1,312-330).
caggcctgaagcgattcat

SEQ ID NO: 374503 - DNA, 19 bp, Homo sapiens
  siRNA target sequence for FLJ20010 (NM_019021.1,314-332).
ggcctgaagcgattcatct

SEQ ID NO: 374504 - DNA, 19 bp, Homo sapiens
  siRNA target sequence for FLJ20010 (NM_019021.1,315-333).
gcctgaagcgattcatcta

SEQ ID NO: 374505 - DNA, 19 bp, Homo sapiens
  siRNA target sequence for FLJ20010 (NM_019021.1,499-517).
caacagcgtttgattgcat

SEQ ID NO: 374506 - DNA, 19 bp, Homo sapiens
  siRNA target sequence for FLJ20010 (NM_019021.1,504-522).
gcgtttgattgcattagga

SEQ ID NO: 374507 - DNA, 19 bp, Homo sapiens
  siRNA target sequence for FLJ20010 (NM_019021.1,531-549).
cgcagctcgaatttcagtt

SEQ ID NO: 374508 - DNA, 19 bp, Homo sapiens
  siRNA target sequence for FLJ20010 (NM_019021.1,532-550).
gcagctcgaatttcagttt

SEQ ID NO: 374509 - DNA, 19 bp, Homo sapiens
  siRNA target sequence for LOC54499 (NM_019026.1,157-175).
gacactctcctcatcgttt

SEQ ID NO: 374510 - DNA, 19 bp, Homo sapiens
  siRNA target sequence for LOC54499 (NM_019026.1,159-177).
cactctcctcatcgttttt

SEQ ID NO: 374511 - DNA, 19 bp, Homo sapiens
  siRNA target sequence for LOC54499 (NM_019026.1,199-217).
ctcgcagagggcataacct

SEQ ID NO: 374512 - DNA, 19 bp, Homo sapiens
  siRNA target sequence for LOC54499 (NM_019026.1,317-335).
cagctggtcgacaacagaa

SEQ ID NO: 374513 - DNA, 19 bp, Homo sapiens
  siRNA target sequence for LOC54499 (NM_019026.1,436-454).
gccctaatgggaatgttca

SEQ ID NO: 374514 - DNA, 19 bp, Homo sapiens
  siRNA target sequence for LOC54499 (NM_019026.1,437-455).
ccctaatgggaatgttcaa

SEQ ID NO: 374515 - DNA, 19 bp, Homo sapiens
  siRNA target sequence for LOC54499 (NM_019026.1,438-456).
cctaatgggaatgttcaat

SEQ ID NO: 374516 - DNA, 19 bp, Homo sapiens
  siRNA target sequence for LOC54499 (NM_019026.1,445-463).
ggaatgttcaattccatat

SEQ ID NO: 374517 - DNA, 19 bp, Homo sapiens
  siRNA target sequence for HIP14L (NM_019028.1,179-197).
ggcatctgtgcacatgaaa

SEQ ID NO: 374518 - DNA, 19 bp, Homo sapiens
  siRNA target sequence for HIP14L (NM_019028.1,219-237).
gagaagctcttcctcttat

SEQ ID NO: 374519 - DNA, 19 bp, Homo sapiens
  siRNA target sequence for HIP14L (NM_019028.1,233-251).
cttatagaggactctagta

SEQ ID NO: 374520 - DNA, 19 bp, Homo sapiens
  siRNA target sequence for HIP14L (NM_019028.1,244-262).
ctctagtaactgtgacatt

SEQ ID NO: 374521 - DNA, 19 bp, Homo sapiens
  siRNA target sequence for HIP14L (NM_019028.1,246-264).
ctagtaactgtgacattgt

SEQ ID NO: 374522 - DNA, 19 bp, Homo sapiens
  siRNA target sequence for HIP14L (NM_019028.1,269-287).
gctactcaatacggaattt

SEQ ID NO: 374523 - DNA, 19 bp, Homo sapiens
  siRNA target sequence for HIP14L (NM_019028.1,270-288).
ctactcaatacggaatttt

SEQ ID NO: 374524 - DNA, 19 bp, Homo sapiens
  siRNA target sequence for HIP14L (NM_019028.1,359-377).
cttcattgggctgctatta

SEQ ID NO: 374525 - DNA, 19 bp, Homo sapiens
  siRNA target sequence for HIP14L (NM_019028.1,379-397).
caacagactggatcttgta

SEQ ID NO: 374526 - DNA, 19 bp, Homo sapiens
  siRNA target sequence for HIP14L (NM_019028.1,417-435).
gtgctgttgtagatcagtt

SEQ ID NO: 374527 - DNA, 19 bp, Homo sapiens
  siRNA target sequence for HIP14L (NM_019028.1,471-489).
ccatccgacaaggacattt

SEQ ID NO: 374528 - DNA, 19 bp, Homo sapiens
  siRNA target sequence for HIP14L (NM_019028.1,472-490).
catccgacaaggacattta

SEQ ID NO: 374529 - DNA, 19 bp, Homo sapiens
  siRNA target sequence for HIP14L (NM_019028.1,492-510).
ctatggtcatattattact

SEQ ID NO: 374530 - DNA, 19 bp, Homo sapiens
  siRNA target sequence for HIP14L (NM_019028.1,558-576).
gcatccacctggcagtatt

SEQ ID NO: 374531 - DNA, 19 bp, Homo sapiens
  siRNA target sequence for HIP14L (NM_019028.1,565-583).
cctggcagtattgtttcaa

SEQ ID NO: 374532 - DNA, 19 bp, Homo sapiens
  siRNA target sequence for HIP14L (NM_019028.1,584-602).
cacatgcctattatagcat

SEQ ID NO: 374533 - DNA, 19 bp, Homo sapiens
  siRNA target sequence for HIP14L (NM_019028.1,586-604).
catgcctattatagcatat

SEQ ID NO: 374534 - DNA, 19 bp, Homo sapiens
  siRNA target sequence for HIP14L (NM_019028.1,648-666).
ggcagacacctctcatgtt

SEQ ID NO: 374535 - DNA, 19 bp, Homo sapiens
  siRNA target sequence for HIP14L (NM_019028.1,649-667).
gcagacacctctcatgtta

SEQ ID NO: 374536 - DNA, 19 bp, Homo sapiens
  siRNA target sequence for HIP14L (NM_019028.1,652-670).
gacacctctcatgttatca

SEQ ID NO: 374537 - DNA, 19 bp, Homo sapiens
  siRNA target sequence for HIP14L (NM_019028.1,661-679).
catgttatcagctcacaaa

SEQ ID NO: 374538 - DNA, 19 bp, Homo sapiens
  siRNA target sequence for HIP14L (NM_019028.1,688-706).
gccagaaccaactggattt

SEQ ID NO: 374539 - DNA, 19 bp, Homo sapiens
  siRNA target sequence for HIP14L (NM_019028.1,715-733).
gtttaatccttctctcaat

SEQ ID NO: 374540 - DNA, 19 bp, Homo sapiens
  siRNA target sequence for HIP14L (NM_019028.1,728-746).
ctcaatgtggttgataaaa

SEQ ID NO: 374541 - DNA, 19 bp, Homo sapiens
  siRNA target sequence for HIP14L (NM_019028.1,776-794).
gttgcagcaggaaatgtta

SEQ ID NO: 374542 - DNA, 19 bp, Homo sapiens
  siRNA target sequence for HIP14L (NM_019028.1,819-837).
ctggttctagcctggatat

SEQ ID NO: 374543 - DNA, 19 bp, Homo sapiens
  siRNA target sequence for HIP14L (NM_019028.1,822-840).
gttctagcctggatatcca

SEQ ID NO: 374544 - DNA, 19 bp, Homo sapiens
  siRNA target sequence for HIP14L (NM_019028.1,852-870).
gagaaacacctcttgatat

SEQ ID NO: 374545 - DNA, 19 bp, Homo sapiens
  siRNA target sequence for HIP14L (NM_019028.1,863-881).
cttgatatggctctacaaa

SEQ ID NO: 374546 - DNA, 19 bp, Homo sapiens
  siRNA target sequence for HIP14L (NM_019028.1,866-884).
gatatggctctacaaaaca

SEQ ID NO: 374547 - DNA, 19 bp, Homo sapiens
  siRNA target sequence for HIP14L (NM_019028.1,892-910).
gctcattattcatatgcta

SEQ ID NO: 374548 - DNA, 19 bp, Homo sapiens
  siRNA target sequence for HIP14L (NM_019028.1,895-913).
cattattcatatgctaaaa

SEQ ID NO: 374549 - DNA, 19 bp, Homo sapiens
  siRNA target sequence for HIP14L (NM_019028.1,1008-1026).
ccatgtgggctattggata

SEQ ID NO: 374550 - DNA, 19 bp, Homo sapiens
  siRNA target sequence for HIP14L (NM_019028.1,1014-1032).
gggctattggatacatatt

SEQ ID NO: 374551 - DNA, 19 bp, Homo sapiens
  siRNA target sequence for HIP14L (NM_019028.1,1122-1140).
ggtataagaaccttgtata

SEQ ID NO: 374552 - DNA, 19 bp, Homo sapiens
  siRNA target sequence for HIP14L (NM_019028.1,1217-1235).
gcaggagcccctttctatt

SEQ ID NO: 374553 - DNA, 19 bp, Homo sapiens
  siRNA target sequence for HIP14L (NM_019028.1,1223-1241).
gcccctttctatttcagtt

SEQ ID NO: 374554 - DNA, 19 bp, Homo sapiens
  siRNA target sequence for HIP14L (NM_019028.1,1251-1269).
gcatagtagcctttctata

SEQ ID NO: 374555 - DNA, 19 bp, Homo sapiens
  siRNA target sequence for HIP14L (NM_019028.1,1256-1274).
gtagcctttctatactttt

SEQ ID NO: 374556 - DNA, 19 bp, Homo sapiens
  siRNA target sequence for HIP14L (NM_019028.1,1365-1383).
ctctggacttcagaacatt

SEQ ID NO: 374557 - DNA, 19 bp, Homo sapiens
  siRNA target sequence for HIP14L (NM_019028.1,1444-1462).
ctgtgtggctcgatatgat

SEQ ID NO: 374558 - DNA, 19 bp, Homo sapiens
  siRNA target sequence for HIP14L (NM_019028.1,1446-1464).
gtgtggctcgatatgatca

SEQ ID NO: 374559 - DNA, 19 bp, Homo sapiens
  siRNA target sequence for HIP14L (NM_019028.1,1494-1512).
gttttggcaaccatcacta

SEQ ID NO: 374560 - DNA, 19 bp, Homo sapiens
  siRNA target sequence for HIP14L (NM_019028.1,1499-1517).
ggcaaccatcactattaca

SEQ ID NO: 374561 - DNA, 19 bp, Homo sapiens
  siRNA target sequence for TSRC1 (NM_019032.2,574-592).
gaaaccctccccttgtaca

SEQ ID NO: 374562 - DNA, 19 bp, Homo sapiens
  siRNA target sequence for TSRC1 (NM_019032.2,727-745).
gggagagtgccctttgcat

SEQ ID NO: 374563 - DNA, 19 bp, Homo sapiens
  siRNA target sequence for TSRC1 (NM_019032.2,1137-1155).
gagacgccctgatcctttt

SEQ ID NO: 374564 - DNA, 19 bp, Homo sapiens
  siRNA target sequence for TSRC1 (NM_019032.2,1141-1159).
cgccctgatccttttcctt

SEQ ID NO: 374565 - DNA, 19 bp, Homo sapiens
  siRNA target sequence for TSRC1 (NM_019032.2,1326-1344).
ccctattccaagatgttct

SEQ ID NO: 374566 - DNA, 19 bp, Homo sapiens
  siRNA target sequence for TSRC1 (NM_019032.2,1417-1435).
cagtgcgcagcctttaact

SEQ ID NO: 374567 - DNA, 19 bp, Homo sapiens
  siRNA target sequence for TSRC1 (NM_019032.2,1523-1541).
gtggcttccgcttctatgt

SEQ ID NO: 374568 - DNA, 19 bp, Homo sapiens
  siRNA target sequence for TSRC1 (NM_019032.2,1744-1762).
ggctatcagaagatcttgt

SEQ ID NO: 374569 - DNA, 19 bp, Homo sapiens
  siRNA target sequence for TSRC1 (NM_019032.2,1903-1921).
gggaccgtctttcgatata

SEQ ID NO: 374570 - DNA, 19 bp, Homo sapiens
  siRNA target sequence for TSRC1 (NM_019032.2,1904-1922).
ggaccgtctttcgatataa

SEQ ID NO: 374571 - DNA, 19 bp, Homo sapiens
  siRNA target sequence for TSRC1 (NM_019032.2,2013-2031).
ggaaaacccaggcgttttt

SEQ ID NO: 374572 - DNA, 19 bp, Homo sapiens
  siRNA target sequence for TSRC1 (NM_019032.2,2020-2038).
ccaggcgttttttatcagt

SEQ ID NO: 374573 - DNA, 19 bp, Homo sapiens
  siRNA target sequence for TSRC1 (NM_019032.2,2021-2039).
caggcgttttttatcagta

SEQ ID NO: 374574 - DNA, 19 bp, Homo sapiens
  siRNA target sequence for TSRC1 (NM_019032.2,2101-2119).
cttcagccggagattctga

SEQ ID NO: 374575 - DNA, 19 bp, Homo sapiens
  siRNA target sequence for TSRC1 (NM_019032.2,3156-3174).
ctgccaggaccgatggttt

SEQ ID NO: 374576 - DNA, 19 bp, Homo sapiens
  siRNA target sequence for TSRC1 (NM_019032.2,3160-3178).
caggaccgatggttttcca

SEQ ID NO: 374577 - DNA, 19 bp, Homo sapiens
  siRNA target sequence for TSRC1 (NM_019032.2,3326-3344).
gccagcgccctgatgatca

SEQ ID NO: 374578 - DNA, 19 bp, Homo sapiens
  siRNA target sequence for TSRC1 (NM_019032.2,3328-3346).
cagcgccctgatgatcaat

SEQ ID NO: 374579 - DNA, 19 bp, Homo sapiens
  siRNA target sequence for TSRC1 (NM_019032.2,3332-3350).
gccctgatgatcaatgcaa

SEQ ID NO: 374580 - DNA, 19 bp, Homo sapiens
  siRNA target sequence for FLJ11235 (NM_019033.1,18-36).
gaagcgctcggcttttctt

SEQ ID NO: 374581 - DNA, 19 bp, Homo sapiens
  siRNA target sequence for FLJ11235 (NM_019033.1,227-245).
gggactcccgagctcatta

SEQ ID NO: 374582 - DNA, 19 bp, Homo sapiens
  siRNA target sequence for FLJ11235 (NM_019033.1,253-271).
ccgtgtgtagccaagttca

SEQ ID NO: 374583 - DNA, 19 bp, Homo sapiens
  siRNA target sequence for FLJ11235 (NM_019033.1,254-272).
cgtgtgtagccaagttcaa

SEQ ID NO: 374584 - DNA, 19 bp, Homo sapiens
  siRNA target sequence for FLJ11235 (NM_019033.1,303-321).
gcggaatacggcttcttca

SEQ ID NO: 374585 - DNA, 19 bp, Homo sapiens
  siRNA target sequence for FLJ11235 (NM_019033.1,512-530).
gtccaggcgtctgcaaaaa

SEQ ID NO: 374586 - DNA, 19 bp, Homo sapiens
  siRNA target sequence for ELP4 (NM_019040.2,19-37).
ggcaacctgcggtagtgtt

SEQ ID NO: 374587 - DNA, 19 bp, Homo sapiens
  siRNA target sequence for ELP4 (NM_019040.2,182-200).
ggacagctgctggtatcaa

SEQ ID NO: 374588 - DNA, 19 bp, Homo sapiens
  siRNA target sequence for ELP4 (NM_019040.2,223-241).
gctcttaggtggaggttta

SEQ ID NO: 374589 - DNA, 19 bp, Homo sapiens
  siRNA target sequence for ELP4 (NM_019040.2,243-261).
ccgttggaacagttcttct

SEQ ID NO: 374590 - DNA, 19 bp, Homo sapiens
  siRNA target sequence for ELP4 (NM_019040.2,346-364).
gttggttgcatctgctaaa

SEQ ID NO: 374591 - DNA, 19 bp, Homo sapiens
  siRNA target sequence for ELP4 (NM_019040.2,365-383).
gaggatcctgccaacattt

SEQ ID NO: 374592 - DNA, 19 bp, Homo sapiens
  siRNA target sequence for ELP4 (NM_019040.2,367-385).
ggatcctgccaacatttta

SEQ ID NO: 374593 - DNA, 19 bp, Homo sapiens
  siRNA target sequence for ELP4 (NM_019040.2,388-406).
ggaacttccagcaccatta

SEQ ID NO: 374594 - DNA, 19 bp, Homo sapiens
  siRNA target sequence for ELP4 (NM_019040.2,398-416).
gcaccattacttgatgata

SEQ ID NO: 374595 - DNA, 19 bp, Homo sapiens
  siRNA target sequence for ELP4 (NM_019040.2,437-455).
gaagatgtatacaatcata

SEQ ID NO: 374596 - DNA, 19 bp, Homo sapiens
  siRNA target sequence for ELP4 (NM_019040.2,452-470).
cataaaacaccagaatcta

SEQ ID NO: 374597 - DNA, 19 bp, Homo sapiens
  siRNA target sequence for ELP4 (NM_019040.2,459-477).
caccagaatctaatattaa

SEQ ID NO: 374598 - DNA, 19 bp, Homo sapiens
  siRNA target sequence for ELP4 (NM_019040.2,464-482).
gaatctaatattaagatga

SEQ ID NO: 374599 - DNA, 19 bp, Homo sapiens
  siRNA target sequence for ELP4 (NM_019040.2,528-546).
cagtatcatcttcaagatt

SEQ ID NO: 374600 - DNA, 19 bp, Homo sapiens
  siRNA target sequence for ELP4 (NM_019040.2,543-561).
gatttggtcactattatga

SEQ ID NO: 374601 - DNA, 19 bp, Homo sapiens
  siRNA target sequence for ELP4 (NM_019040.2,597-615).
cttcaaattggcatggatt

SEQ ID NO: 374602 - DNA, 19 bp, Homo sapiens
  siRNA target sequence for ELP4 (NM_019040.2,731-749).
ggatccaatcctcagaaaa

SEQ ID NO: 374603 - DNA, 19 bp, Homo sapiens
  siRNA target sequence for ELP4 (NM_019040.2,732-750).
gatccaatcctcagaaaaa

SEQ ID NO: 374604 - DNA, 19 bp, Homo sapiens
  siRNA target sequence for ELP4 (NM_019040.2,907-925).
catcacaatgccaacacat

SEQ ID NO: 374605 - DNA, 19 bp, Homo sapiens
  siRNA target sequence for ELP4 (NM_019040.2,977-995).
gtagttggtctggaatcat

SEQ ID NO: 374606 - DNA, 19 bp, Homo sapiens
  siRNA target sequence for ELP4 (NM_019040.2,980-998).
gttggtctggaatcattta

SEQ ID NO: 374607 - DNA, 19 bp, Homo sapiens
  siRNA target sequence for ELP4 (NM_019040.2,1011-1029).
gagaaactaacccattgta

SEQ ID NO: 374608 - DNA, 19 bp, Homo sapiens
  siRNA target sequence for ELP4 (NM_019040.2,1013-1031).
gaaactaacccattgtata

SEQ ID NO: 374609 - DNA, 19 bp, Homo sapiens
  siRNA target sequence for ELP4 (NM_019040.2,1017-1035).
ctaacccattgtataagga

SEQ ID NO: 374610 - DNA, 19 bp, Homo sapiens
  siRNA target sequence for ELP4 (NM_019040.2,1021-1039).
cccattgtataaggattat

SEQ ID NO: 374611 - DNA, 19 bp, Homo sapiens
  siRNA target sequence for ELP4 (NM_019040.2,1023-1041).
cattgtataaggattatca

SEQ ID NO: 374612 - DNA, 19 bp, Homo sapiens
  siRNA target sequence for ELP4 (NM_019040.2,1033-1051).
ggattatcatggattgatt

SEQ ID NO: 374613 - DNA, 19 bp, Homo sapiens
  siRNA target sequence for ELP4 (NM_019040.2,1060-1078).
gcagattcctcggcttaat

SEQ ID NO: 374614 - DNA, 19 bp, Homo sapiens
  siRNA target sequence for ELP4 (NM_019040.2,1061-1079).
cagattcctcggcttaata

SEQ ID NO: 374615 - DNA, 19 bp, Homo sapiens
  siRNA target sequence for ELP4 (NM_019040.2,1067-1085).
cctcggcttaataacttga

SEQ ID NO: 374616 - DNA, 19 bp, Homo sapiens
  siRNA target sequence for ELP4 (NM_019040.2,1068-1086).
ctcggcttaataacttgat

SEQ ID NO: 374617 - DNA, 19 bp, Homo sapiens
  siRNA target sequence for ELP4 (NM_019040.2,1070-1088).
cggcttaataacttgatct

SEQ ID NO: 374618 - DNA, 19 bp, Homo sapiens
  siRNA target sequence for ELP4 (NM_019040.2,1081-1099).
cttgatctgtgatgaatca

SEQ ID NO: 374619 - DNA, 19 bp, Homo sapiens
  siRNA target sequence for ELP4 (NM_019040.2,1401-1419).
ggcctagggctttgtattt

SEQ ID NO: 374620 - DNA, 19 bp, Homo sapiens
  siRNA target sequence for ELP4 (NM_019040.2,1443-1461).
gtgcaagacaactacttga

SEQ ID NO: 374621 - DNA, 19 bp, Homo sapiens
  siRNA target sequence for ELP4 (NM_019040.2,1486-1504).
caggcttctcatacttact

SEQ ID NO: 374622 - DNA, 19 bp, Homo sapiens
  siRNA target sequence for ELP4 (NM_019040.2,1488-1506).
ggcttctcatacttactca

SEQ ID NO: 374623 - DNA, 19 bp, Homo sapiens
  siRNA target sequence for FLJ10996 (NM_019044.2,372-390).
ctctacgataggtcaaaaa

SEQ ID NO: 374624 - DNA, 19 bp, Homo sapiens
  siRNA target sequence for FLJ10996 (NM_019044.2,374-392).
ctacgataggtcaaaaaat

SEQ ID NO: 374625 - DNA, 19 bp, Homo sapiens
  siRNA target sequence for FLJ10996 (NM_019044.2,378-396).
gataggtcaaaaaatagct

SEQ ID NO: 374626 - DNA, 19 bp, Homo sapiens
  siRNA target sequence for FLJ10996 (NM_019044.2,507-525).
gctggtgaaacgagctata

SEQ ID NO: 374627 - DNA, 19 bp, Homo sapiens
  siRNA target sequence for FLJ10996 (NM_019044.2,510-528).
ggtgaaacgagctatagaa

SEQ ID NO: 374628 - DNA, 19 bp, Homo sapiens
  siRNA target sequence for FLJ10996 (NM_019044.2,513-531).
gaaacgagctatagaaaca

SEQ ID NO: 374629 - DNA, 19 bp, Homo sapiens
  siRNA target sequence for FLJ10996 (NM_019044.2,576-594).
gttccagaagacttacagt

SEQ ID NO: 374630 - DNA, 19 bp, Homo sapiens
  siRNA target sequence for FLJ10996 (NM_019044.2,672-690).
gccccgtcggaaatacaaa

SEQ ID NO: 374631 - DNA, 19 bp, Homo sapiens
  siRNA target sequence for FLJ10996 (NM_019044.2,701-719).
gagcagaggagctacttga

SEQ ID NO: 374632 - DNA, 19 bp, Homo sapiens
  siRNA target sequence for FLJ10996 (NM_019044.2,711-729).
gctacttgatgaagaatct

SEQ ID NO: 374633 - DNA, 19 bp, Homo sapiens
  siRNA target sequence for FLJ10996 (NM_019044.2,730-748).
cgaatccatgctacacttt

SEQ ID NO: 374634 - DNA, 19 bp, Homo sapiens
  siRNA target sequence for FLJ10996 (NM_019044.2,735-753).
ccatgctacacttttggaa

SEQ ID NO: 374635 - DNA, 19 bp, Homo sapiens
  siRNA target sequence for FLJ10996 (NM_019044.2,757-775).
ggcaggagatatggattta

SEQ ID NO: 374636 - DNA, 19 bp, Homo sapiens
  siRNA target sequence for FLJ10996 (NM_019044.2,884-902).
ctgaagagcagcgtattca

SEQ ID NO: 374637 - DNA, 19 bp, Homo sapiens
  siRNA target sequence for FLJ10996 (NM_019044.2,886-904).
gaagagcagcgtattcagt

SEQ ID NO: 374638 - DNA, 19 bp, Homo sapiens
  siRNA target sequence for FLJ10996 (NM_019044.2,1081-1099).
ctacatcgccggaaagtca

SEQ ID NO: 374639 - DNA, 19 bp, Homo sapiens
  siRNA target sequence for FLJ10996 (NM_019044.2,1084-1102).
catcgccggaaagtcattt

SEQ ID NO: 374640 - DNA, 19 bp, Homo sapiens
  siRNA target sequence for FLJ10996 (NM_019044.2,1087-1105).
cgccggaaagtcatttcct

SEQ ID NO: 374641 - DNA, 19 bp, Homo sapiens
  siRNA target sequence for FLJ10996 (NM_019044.2,1121-1139).
cgcaaaagaccaaacatct

SEQ ID NO: 374642 - DNA, 19 bp, Homo sapiens
  siRNA target sequence for FLJ10996 (NM_019044.2,1164-1182).
cagcctacaagccagatat

SEQ ID NO: 374643 - DNA, 19 bp, Homo sapiens
  siRNA target sequence for FLJ10996 (NM_019044.2,1166-1184).
gcctacaagccagatataa

SEQ ID NO: 374644 - DNA, 19 bp, Homo sapiens
  siRNA target sequence for FLJ10996 (NM_019044.2,1167-1185).
cctacaagccagatataat

SEQ ID NO: 374645 - DNA, 19 bp, Homo sapiens
  siRNA target sequence for FLJ10996 (NM_019044.2,1249-1267).
gccctcgagaagatagaat

SEQ ID NO: 374646 - DNA, 19 bp, Homo sapiens
  siRNA target sequence for FLJ10996 (NM_019044.2,1293-1311).
gaacctgagagcacttgta

SEQ ID NO: 374647 - DNA, 19 bp, Homo sapiens
  siRNA target sequence for FLJ10996 (NM_019044.2,1334-1352).
gtcaagaacaggaatttaa

SEQ ID NO: 374648 - DNA, 19 bp, Homo sapiens
  siRNA target sequence for FLJ10996 (NM_019044.2,1497-1515).
cctagacagacggtataat

SEQ ID NO: 374649 - DNA, 19 bp, Homo sapiens
  siRNA target sequence for FLJ10996 (NM_019044.2,1498-1516).
ctagacagacggtataata

SEQ ID NO: 374650 - DNA, 19 bp, Homo sapiens
  siRNA target sequence for FLJ10996 (NM_019044.2,1508-1526).
ggtataatatggagaaaga

SEQ ID NO: 374651 - DNA, 19 bp, Homo sapiens
  siRNA target sequence for FLJ10996 (NM_019044.2,1584-1602).
gcaccgcaagattgatgaa

SEQ ID NO: 374652 - DNA, 19 bp, Homo sapiens
  siRNA target sequence for FLJ10996 (NM_019044.2,1607-1625).
ctagccgtgccgagctaat

SEQ ID NO: 374653 - DNA, 19 bp, Homo sapiens
  siRNA target sequence for FLJ10996 (NM_019044.2,1610-1628).
gccgtgccgagctaataca

SEQ ID NO: 374654 - DNA, 19 bp, Homo sapiens
  siRNA target sequence for FLJ10996 (NM_019044.2,1612-1630).
cgtgccgagctaatacagt

SEQ ID NO: 374655 - DNA, 19 bp, Homo sapiens
  siRNA target sequence for FLJ10996 (NM_019044.2,1613-1631).
gtgccgagctaatacagta

SEQ ID NO: 374656 - DNA, 19 bp, Homo sapiens
  siRNA target sequence for FLJ10996 (NM_019044.2,1616-1634).
ccgagctaatacagtatca

SEQ ID NO: 374657 - DNA, 19 bp, Homo sapiens
  siRNA target sequence for FLJ10996 (NM_019044.2,1618-1636).
gagctaatacagtatcaga

SEQ ID NO: 374658 - DNA, 19 bp, Homo sapiens
  siRNA target sequence for FLJ10996 (NM_019044.2,1648-1666).
gaactctaccgccagattt

SEQ ID NO: 374659 - DNA, 19 bp, Homo sapiens
  siRNA target sequence for FLJ10996 (NM_019044.2,1685-1703).
ccaagcagttcttcacttt

SEQ ID NO: 374660 - DNA, 19 bp, Homo sapiens
  siRNA target sequence for FLJ10996 (NM_019044.2,1686-1704).
caagcagttcttcacttta

SEQ ID NO: 374661 - DNA, 19 bp, Homo sapiens
  siRNA target sequence for FLJ10996 (NM_019044.2,1690-1708).
cagttcttcactttatata

SEQ ID NO: 374662 - DNA, 19 bp, Homo sapiens
  siRNA target sequence for FLJ10996 (NM_019044.2,1692-1710).
gttcttcactttatataat

SEQ ID NO: 374663 - DNA, 19 bp, Homo sapiens
  siRNA target sequence for FLJ10996 (NM_019044.2,1713-1731).
cctggatgataaaaaggtt

SEQ ID NO: 374664 - DNA, 19 bp, Homo sapiens
  siRNA target sequence for FLJ10996 (NM_019044.2,1939-1957).
gaaaagcagaggctatact

SEQ ID NO: 374665 - DNA, 19 bp, Homo sapiens
  siRNA target sequence for FLJ10996 (NM_019044.2,1945-1963).
cagaggctatactttaaga

SEQ ID NO: 374666 - DNA, 19 bp, Homo sapiens
  siRNA target sequence for DKFZp686L20145 (NM_019045.2,420-438).
gcgacaccgaggaattcta

SEQ ID NO: 374667 - DNA, 19 bp, Homo sapiens
  siRNA target sequence for DKFZp686L20145 (NM_019045.2,421-439).
cgacaccgaggaattctat

SEQ ID NO: 374668 - DNA, 19 bp, Homo sapiens
  siRNA target sequence for DKFZp686L20145 (NM_019045.2,424-442).
caccgaggaattctatgat

SEQ ID NO: 374669 - DNA, 19 bp, Homo sapiens
  siRNA target sequence for DKFZp686L20145 (NM_019045.2,436-454).
ctatgatgcccctgaagat

SEQ ID NO: 374670 - DNA, 19 bp, Homo sapiens
  siRNA target sequence for DKFZp686L20145 (NM_019045.2,522-540).
cagagaacactgcatacaa

SEQ ID NO: 374671 - DNA, 19 bp, Homo sapiens
  siRNA target sequence for DKFZp686L20145 (NM_019045.2,526-544).
gaacactgcatacaaagtt

SEQ ID NO: 374672 - DNA, 19 bp, Homo sapiens
  siRNA target sequence for DKFZp686L20145 (NM_019045.2,721-739).
caatatacccggactgtta

SEQ ID NO: 374673 - DNA, 19 bp, Homo sapiens
  siRNA target sequence for DKFZp686L20145 (NM_019045.2,730-748).
cggactgttagccatagat

SEQ ID NO: 374674 - DNA, 19 bp, Homo sapiens
  siRNA target sequence for DKFZp686L20145 (NM_019045.2,732-750).
gactgttagccatagatca

SEQ ID NO: 374675 - DNA, 19 bp, Homo sapiens
  siRNA target sequence for DKFZp686L20145 (NM_019045.2,736-754).
gttagccatagatcaagta

SEQ ID NO: 374676 - DNA, 19 bp, Homo sapiens
  siRNA target sequence for DKFZp686L20145 (NM_019045.2,776-794).
gcagagagtcagaatacat

SEQ ID NO: 374677 - DNA, 19 bp, Homo sapiens
  siRNA target sequence for DKFZp686L20145 (NM_019045.2,871-889).
gaagttaactcaaacaagt

SEQ ID NO: 374678 - DNA, 19 bp, Homo sapiens
  siRNA target sequence for DKFZp686L20145 (NM_019045.2,888-906).
gttcaactgagcagcttaa

SEQ ID NO: 374679 - DNA, 19 bp, Homo sapiens
  siRNA target sequence for DKFZp686L20145 (NM_019045.2,891-909).
caactgagcagcttaatgt

SEQ ID NO: 374680 - DNA, 19 bp, Homo sapiens
  siRNA target sequence for DKFZp686L20145 (NM_019045.2,985-1003).
gtcctcagactccttatct

SEQ ID NO: 374681 - DNA, 19 bp, Homo sapiens
  siRNA target sequence for DKFZp686L20145 (NM_019045.2,988-1006).
ctcagactccttatctact

SEQ ID NO: 374682 - DNA, 19 bp, Homo sapiens
  siRNA target sequence for DKFZp686L20145 (NM_019045.2,990-1008).
cagactccttatctactaa

SEQ ID NO: 374683 - DNA, 19 bp, Homo sapiens
  siRNA target sequence for DKFZp686L20145 (NM_019045.2,1213-1231).
gaaaactcctgatatagat

SEQ ID NO: 374684 - DNA, 19 bp, Homo sapiens
  siRNA target sequence for DKFZp686L20145 (NM_019045.2,1232-1250).
gttcccaaagagaatatta

SEQ ID NO: 374685 - DNA, 19 bp, Homo sapiens
  siRNA target sequence for DKFZp686L20145 (NM_019045.2,1235-1253).
cccaaagagaatattacgt

SEQ ID NO: 374686 - DNA, 19 bp, Homo sapiens
  siRNA target sequence for DKFZp686L20145 (NM_019045.2,1284-1302).
cagaaagtacggttaagga

SEQ ID NO: 374687 - DNA, 19 bp, Homo sapiens
  siRNA target sequence for DKFZp686L20145 (NM_019045.2,1286-1304).
gaaagtacggttaaggatt

SEQ ID NO: 374688 - DNA, 19 bp, Homo sapiens
  siRNA target sequence for DKFZp686L20145 (NM_019045.2,1290-1308).
gtacggttaaggattctca

SEQ ID NO: 374689 - DNA, 19 bp, Homo sapiens
  siRNA target sequence for DKFZp686L20145 (NM_019045.2,1392-1410).
ctgtagcaggtgaagtgat

SEQ ID NO: 374690 - DNA, 19 bp, Homo sapiens
  siRNA target sequence for DKFZp686L20145 (NM_019045.2,1636-1654).
gtctcagccaacagatact

SEQ ID NO: 374691 - DNA, 19 bp, Homo sapiens
  siRNA target sequence for DKFZp686L20145 (NM_019045.2,1680-1698).
cgactcaactaaagaagtt

SEQ ID NO: 374692 - DNA, 19 bp, Homo sapiens
  siRNA target sequence for DKFZp686L20145 (NM_019045.2,1681-1699).
gactcaactaaagaagttt

SEQ ID NO: 374693 - DNA, 19 bp, Homo sapiens
  siRNA target sequence for DKFZp686L20145 (NM_019045.2,1683-1701).
ctcaactaaagaagtttct

SEQ ID NO: 374694 - DNA, 19 bp, Homo sapiens
  siRNA target sequence for DKFZp686L20145 (NM_019045.2,1729-1747).
ccttgctgaggaatatggt

SEQ ID NO: 374695 - DNA, 19 bp, Homo sapiens
  siRNA target sequence for DKFZp686L20145 (NM_019045.2,1745-1763).
ggtgaacgtgctataaata

SEQ ID NO: 374696 - DNA, 19 bp, Homo sapiens
  siRNA target sequence for DKFZp686L20145 (NM_019045.2,1839-1857).
catacacaagaccagttaa

SEQ ID NO: 374697 - DNA, 19 bp, Homo sapiens
  siRNA target sequence for DKFZp686L20145 (NM_019045.2,1845-1863).
caagaccagttaaattcaa

SEQ ID NO: 374698 - DNA, 19 bp, Homo sapiens
  siRNA target sequence for DKFZp686L20145 (NM_019045.2,1919-1937).
gatcttagtggtgaacata

SEQ ID NO: 374699 - DNA, 19 bp, Homo sapiens
  siRNA target sequence for DKFZp686L20145 (NM_019045.2,1946-1964).
gtttggaccatgaaatttt

SEQ ID NO: 374700 - DNA, 19 bp, Homo sapiens
  siRNA target sequence for DKFZp686L20145 (NM_019045.2,1987-2005).
ctcagctggacaagacaat

SEQ ID NO: 374701 - DNA, 19 bp, Homo sapiens
  siRNA target sequence for DKFZp686L20145 (NM_019045.2,2032-2050).
gcttttgactatttcaaca

SEQ ID NO: 374702 - DNA, 19 bp, Homo sapiens
  siRNA target sequence for DKFZp686L20145 (NM_019045.2,2046-2064).
caacaatatgcgaatgaaa

SEQ ID NO: 374703 - DNA, 19 bp, Homo sapiens
  siRNA target sequence for DKFZp686L20145 (NM_019045.2,2095-2113).
ccctctcaggaaagtctaa

SEQ ID NO: 374704 - DNA, 19 bp, Homo sapiens
  siRNA target sequence for DKFZp686L20145 (NM_019045.2,2101-2119).
caggaaagtctaagttcat

SEQ ID NO: 374705 - DNA, 19 bp, Homo sapiens
  siRNA target sequence for DKFZp686L20145 (NM_019045.2,2103-2121).
ggaaagtctaagttcatca

SEQ ID NO: 374706 - DNA, 19 bp, Homo sapiens
  siRNA target sequence for DKFZp686L20145 (NM_019045.2,2104-2122).
gaaagtctaagttcatcaa

SEQ ID NO: 374707 - DNA, 19 bp, Homo sapiens
  siRNA target sequence for DKFZp686L20145 (NM_019045.2,2142-2160).
ggtatgcagtggaactgat

SEQ ID NO: 374708 - DNA, 19 bp, Homo sapiens
  siRNA target sequence for DKFZp686L20145 (NM_019045.2,2191-2209).
cggcaacggccattttgca

SEQ ID NO: 374709 - DNA, 19 bp, Homo sapiens
  siRNA target sequence for DKFZp686L20145 (NM_019045.2,2192-2210).
ggcaacggccattttgcaa

SEQ ID NO: 374710 - DNA, 19 bp, Homo sapiens
  siRNA target sequence for DKFZp686L20145 (NM_019045.2,2197-2215).
cggccattttgcaaatata

SEQ ID NO: 374711 - DNA, 19 bp, Homo sapiens
  siRNA target sequence for DKFZp686L20145 (NM_019045.2,2198-2216).
ggccattttgcaaatataa

SEQ ID NO: 374712 - DNA, 19 bp, Homo sapiens
  siRNA target sequence for DKFZp686L20145 (NM_019045.2,2208-2226).
caaatataaaggacatact

SEQ ID NO: 374713 - DNA, 19 bp, Homo sapiens
  siRNA target sequence for DKFZp686L20145 (NM_019045.2,2227-2245).
gctgatctccttgatcttt

SEQ ID NO: 374714 - DNA, 19 bp, Homo sapiens
  siRNA target sequence for DKFZp686L20145 (NM_019045.2,2249-2267).
ggtctaaaaactactttct

SEQ ID NO: 374715 - DNA, 19 bp, Homo sapiens
  siRNA target sequence for DKFZp686L20145 (NM_019045.2,2283-2301).
ggataaaacagtcagatta

SEQ ID NO: 374716 - DNA, 19 bp, Homo sapiens
  siRNA target sequence for DKFZp686L20145 (NM_019045.2,2375-2393).
caagagatgacaggtattt

SEQ ID NO: 374717 - DNA, 19 bp, Homo sapiens
  siRNA target sequence for DKFZp686L20145 (NM_019045.2,2418-2436).
gctccgcctttggaacata

SEQ ID NO: 374718 - DNA, 19 bp, Homo sapiens
  siRNA target sequence for DKFZp686L20145 (NM_019045.2,2470-2488).
gatggtcagacaaaattga

SEQ ID NO: 374719 - DNA, 19 bp, Homo sapiens
  siRNA target sequence for DKFZp686L20145 (NM_019045.2,2473-2491).
ggtcagacaaaattgatca

SEQ ID NO: 374720 - DNA, 19 bp, Homo sapiens
  siRNA target sequence for DKFZp686L20145 (NM_019045.2,2490-2508).
cacagctgcaaatttctgt

SEQ ID NO: 374721 - DNA, 19 bp, Homo sapiens
  siRNA target sequence for DKFZp686L20145 (NM_019045.2,2525-2543).
cagtgattgggacatatga

SEQ ID NO: 374722 - DNA, 19 bp, Homo sapiens
  siRNA target sequence for DKFZp686L20145 (NM_019045.2,2673-2691).
gatattggtaacctcaaat

SEQ ID NO: 374723 - DNA, 19 bp, Homo sapiens
  siRNA target sequence for DKFZp686L20145 (NM_019045.2,2707-2725).
ctatatgatttgagagatt

SEQ ID NO: 374724 - DNA, 19 bp, Homo sapiens
  siRNA target sequence for DKFZp686L20145 (NM_019045.2,2727-2745).
gtcactatccatgaagtat

SEQ ID NO: 374725 - DNA, 19 bp, Homo sapiens
  siRNA target sequence for DKFZp686L20145 (NM_019045.2,2779-2797).
gcaagtttcagccatgatt

SEQ ID NO: 374726 - DNA, 19 bp, Homo sapiens
  siRNA target sequence for DKFZp686L20145 (NM_019045.2,2780-2798).
caagtttcagccatgattt

SEQ ID NO: 374727 - DNA, 19 bp, Homo sapiens
  siRNA target sequence for DKFZp686L20145 (NM_019045.2,2808-2826).
cgttagtggttcagaagat

SEQ ID NO: 374728 - DNA, 19 bp, Homo sapiens
  siRNA target sequence for DKFZp686L20145 (NM_019045.2,2813-2831).
gtggttcagaagataagta

SEQ ID NO: 374729 - DNA, 19 bp, Homo sapiens
  siRNA target sequence for DKFZp686L20145 (NM_019045.2,2816-2834).
gttcagaagataagtatgt

SEQ ID NO: 374730 - DNA, 19 bp, Homo sapiens
  siRNA target sequence for DKFZp686L20145 (NM_019045.2,2876-2894).
cagtcaggagagatcgtaa

SEQ ID NO: 374731 - DNA, 19 bp, Homo sapiens
  siRNA target sequence for DKFZp686L20145 (NM_019045.2,2882-2900).
ggagagatcgtaatgactt

SEQ ID NO: 374732 - DNA, 19 bp, Homo sapiens
  siRNA target sequence for DKFZp686L20145 (NM_019045.2,2898-2916).
cttctgggaaggtattaaa

SEQ ID NO: 374733 - DNA, 19 bp, Homo sapiens
  siRNA target sequence for DKFZp686L20145 (NM_019045.2,2920-2938).
cacaatgcagttgttacat

SEQ ID NO: 374734 - DNA, 19 bp, Homo sapiens
  siRNA target sequence for DKFZp686L20145 (NM_019045.2,2922-2940).
caatgcagttgttacatca

SEQ ID NO: 374735 - DNA, 19 bp, Homo sapiens
  siRNA target sequence for DKFZp686L20145 (NM_019045.2,3040-3058).
gccacaccttctggtatta

SEQ ID NO: 374736 - DNA, 19 bp, Homo sapiens
  siRNA target sequence for DKFZp686L20145 (NM_019045.2,3041-3059).
ccacaccttctggtattat

SEQ ID NO: 374737 - DNA, 19 bp, Homo sapiens
  siRNA target sequence for DKFZp686L20145 (NM_019045.2,3044-3062).
caccttctggtattatgaa

SEQ ID NO: 374738 - DNA, 19 bp, Homo sapiens
  siRNA target sequence for DKFZp686L20145 (NM_019045.2,3106-3124).
gcaatcaaagtgtttgtta

SEQ ID NO: 374739 - DNA, 19 bp, Homo sapiens
  siRNA target sequence for DKFZp686L20145 (NM_019045.2,3107-3125).
caatcaaagtgtttgttaa

SEQ ID NO: 374740 - DNA, 19 bp, Homo sapiens
  siRNA target sequence for FLJ20054 (NM_019049.1,202-220).
gctgtacggacagcatata

SEQ ID NO: 374741 - DNA, 19 bp, Homo sapiens
  siRNA target sequence for FLJ20054 (NM_019049.1,203-221).
ctgtacggacagcatataa

SEQ ID NO: 374742 - DNA, 19 bp, Homo sapiens
  siRNA target sequence for FLJ20054 (NM_019049.1,295-313).
gattatgggacctgttcta

SEQ ID NO: 374743 - DNA, 19 bp, Homo sapiens
  siRNA target sequence for FLJ20054 (NM_019049.1,303-321).
gacctgttctagttctgta

SEQ ID NO: 374744 - DNA, 19 bp, Homo sapiens
  siRNA target sequence for FLJ20054 (NM_019049.1,308-326).
gttctagttctgtacaata

SEQ ID NO: 374745 - DNA, 19 bp, Homo sapiens
  siRNA target sequence for FLJ20054 (NM_019049.1,322-340).
caatatacaccagtttaca

SEQ ID NO: 374746 - DNA, 19 bp, Homo sapiens
  siRNA target sequence for FLJ20054 (NM_019049.1,329-347).
caccagtttacaaattaca

SEQ ID NO: 374747 - DNA, 19 bp, Homo sapiens
  siRNA target sequence for FLJ20054 (NM_019049.1,366-384).
ctcagaaaagcgtaagctt

SEQ ID NO: 374748 - DNA, 19 bp, Homo sapiens
  siRNA target sequence for FLJ20054 (NM_019049.1,385-403).
gctcaggcacgcttaaaaa

SEQ ID NO: 374749 - DNA, 19 bp, Homo sapiens
  siRNA target sequence for FLJ20054 (NM_019049.1,395-413).
gcttaaaaaggcctcttaa

SEQ ID NO: 374750 - DNA, 19 bp, Homo sapiens
  siRNA target sequence for FLJ20054 (NM_019049.1,416-434).
gccttgatggtgctctata

SEQ ID NO: 374751 - DNA, 19 bp, Homo sapiens
  siRNA target sequence for FLJ20054 (NM_019049.1,417-435).
ccttgatggtgctctatat

SEQ ID NO: 374752 - DNA, 19 bp, Homo sapiens
  siRNA target sequence for FLJ20054 (NM_019049.1,460-478).
gaaagagcaagcaagttat

SEQ ID NO: 374753 - DNA, 19 bp, Homo sapiens
  siRNA target sequence for FLJ20054 (NM_019049.1,573-591).
cttactaggagagattctt

SEQ ID NO: 374754 - DNA, 19 bp, Homo sapiens
  siRNA target sequence for FLJ20054 (NM_019049.1,577-595).
ctaggagagattcttgata

SEQ ID NO: 374755 - DNA, 19 bp, Homo sapiens
  siRNA target sequence for FLJ20054 (NM_019049.1,676-694).
gattacaaacctacgaata

SEQ ID NO: 374756 - DNA, 19 bp, Homo sapiens
  siRNA target sequence for FLJ20054 (NM_019049.1,681-699).
caaacctacgaataaatct

SEQ ID NO: 374757 - DNA, 19 bp, Homo sapiens
  siRNA target sequence for FLJ20054 (NM_019049.1,704-722).
ctcctagtgagaataacct

SEQ ID NO: 374758 - DNA, 19 bp, Homo sapiens
  siRNA target sequence for FLJ20054 (NM_019049.1,750-768).
ccaagcagagtggaatctt

SEQ ID NO: 374759 - DNA, 19 bp, Homo sapiens
  siRNA target sequence for FLJ20054 (NM_019049.1,836-854).
gtggtttgacagattctct

SEQ ID NO: 374760 - DNA, 19 bp, Homo sapiens
  siRNA target sequence for FLJ20054 (NM_019049.1,845-863).
cagattctctgtttatcct

SEQ ID NO: 374761 - DNA, 19 bp, Homo sapiens
  siRNA target sequence for FLJ20054 (NM_019049.1,889-907).
ctcggtgctgacaatgtga

SEQ ID NO: 374762 - DNA, 19 bp, Homo sapiens
  siRNA target sequence for FLJ20054 (NM_019049.1,988-1006).
gaaacactaagccagattt

SEQ ID NO: 374763 - DNA, 19 bp, Homo sapiens
  siRNA target sequence for FLJ20054 (NM_019049.1,992-1010).
cactaagccagatttcaga

SEQ ID NO: 374764 - DNA, 19 bp, Homo sapiens
  siRNA target sequence for FLJ20054 (NM_019049.1,1037-1055).
ggcattcatcgacttttgt

SEQ ID NO: 374765 - DNA, 19 bp, Homo sapiens
  siRNA target sequence for FLJ20054 (NM_019049.1,1038-1056).
gcattcatcgacttttgtt

SEQ ID NO: 374766 - DNA, 19 bp, Homo sapiens
  siRNA target sequence for FLJ20054 (NM_019049.1,1089-1107).
gacttcagaagatattgga

SEQ ID NO: 374767 - DNA, 19 bp, Homo sapiens
  siRNA target sequence for FLJ20054 (NM_019049.1,1106-1124).
gactgctccatgaagtagt

SEQ ID NO: 374768 - DNA, 19 bp, Homo sapiens
  siRNA target sequence for FLJ20054 (NM_019049.1,1113-1131).
ccatgaagtagtgtcatta

SEQ ID NO: 374769 - DNA, 19 bp, Homo sapiens
  siRNA target sequence for FLJ20054 (NM_019049.1,1114-1132).
catgaagtagtgtcattat

SEQ ID NO: 374770 - DNA, 19 bp, Homo sapiens
  siRNA target sequence for FLJ20054 (NM_019049.1,1152-1170).
ccaacaaagcttgaacatt

SEQ ID NO: 374771 - DNA, 19 bp, Homo sapiens
  siRNA target sequence for C6orf18 (NM_019052.2,992-1010).
gaggctctttccagtttga

SEQ ID NO: 374772 - DNA, 19 bp, Homo sapiens
  siRNA target sequence for C6orf18 (NM_019052.2,1159-1177).
gaccctggttgagaatcta

SEQ ID NO: 374773 - DNA, 19 bp, Homo sapiens
  siRNA target sequence for C6orf18 (NM_019052.2,1162-1180).
cctggttgagaatctaaga

SEQ ID NO: 374774 - DNA, 19 bp, Homo sapiens
  siRNA target sequence for C6orf18 (NM_019052.2,1858-1876).
cctgattgctcgaaagctt

SEQ ID NO: 374775 - DNA, 19 bp, Homo sapiens
  siRNA target sequence for C6orf18 (NM_019052.2,2547-2565).
cttccctactggataagaa

SEQ ID NO: 374776 - DNA, 19 bp, Homo sapiens
  siRNA target sequence for C6orf18 (NM_019052.2,2635-2653).
caccagggagtccataaaa

SEQ ID NO: 374777 - DNA, 19 bp, Homo sapiens
  siRNA target sequence for MGC5560 (NM_019054.1,1916-1934).
gagttgttgatttcactat

SEQ ID NO: 374778 - DNA, 19 bp, Homo sapiens
  siRNA target sequence for ROBO4 (NM_019055.4,467-485).
ctgtcctccgggaggattt

SEQ ID NO: 374779 - DNA, 19 bp, Homo sapiens
  siRNA target sequence for ROBO4 (NM_019055.4,514-532).
gtggtgggtgagcagttta

SEQ ID NO: 374780 - DNA, 19 bp, Homo sapiens
  siRNA target sequence for ROBO4 (NM_019055.4,516-534).
ggtgggtgagcagtttact

SEQ ID NO: 374781 - DNA, 19 bp, Homo sapiens
  siRNA target sequence for ROBO4 (NM_019055.4,789-807).
gcgaattcagctggaaaat

SEQ ID NO: 374782 - DNA, 19 bp, Homo sapiens
  siRNA target sequence for ROBO4 (NM_019055.4,889-907).
gctgcgcctgcccaatctt

SEQ ID NO: 374783 - DNA, 19 bp, Homo sapiens
  siRNA target sequence for ROBO4 (NM_019055.4,890-908).
ctgcgcctgcccaatctta

SEQ ID NO: 374784 - DNA, 19 bp, Homo sapiens
  siRNA target sequence for ROBO4 (NM_019055.4,892-910).
gcgcctgcccaatcttaca

SEQ ID NO: 374785 - DNA, 19 bp, Homo sapiens
  siRNA target sequence for ROBO4 (NM_019055.4,1016-1034).
gccaagactacgagttcaa

SEQ ID NO: 374786 - DNA, 19 bp, Homo sapiens
  siRNA target sequence for ROBO4 (NM_019055.4,1017-1035).
ccaagactacgagttcaaa

SEQ ID NO: 374787 - DNA, 19 bp, Homo sapiens
  siRNA target sequence for ROBO4 (NM_019055.4,1021-1039).
gactacgagttcaaagtga

SEQ ID NO: 374788 - DNA, 19 bp, Homo sapiens
  siRNA target sequence for ROBO4 (NM_019055.4,1567-1585).
ggcccaggtctgtacagat

SEQ ID NO: 374789 - DNA, 19 bp, Homo sapiens
  siRNA target sequence for ROBO4 (NM_019055.4,1573-1591).
ggtctgtacagatatacca

SEQ ID NO: 374790 - DNA, 19 bp, Homo sapiens
  siRNA target sequence for ROBO4 (NM_019055.4,2020-2038).
ctgcagcatgccaacagtt

SEQ ID NO: 374791 - DNA, 19 bp, Homo sapiens
  siRNA target sequence for ROBO4 (NM_019055.4,2680-2698).
ggctccttagccaatggtt

SEQ ID NO: 374792 - DNA, 19 bp, Homo sapiens
  siRNA target sequence for ROBO4 (NM_019055.4,2806-2824).
gctgtggatagctttggtt

SEQ ID NO: 374793 - DNA, 19 bp, Homo sapiens
  siRNA target sequence for ROBO4 (NM_019055.4,2807-2825).
ctgtggatagctttggttt

SEQ ID NO: 374794 - DNA, 19 bp, Homo sapiens
  siRNA target sequence for ROBO4 (NM_019055.4,2844-2862).
ggcagactgcgtcttcata

SEQ ID NO: 374795 - DNA, 19 bp, Homo sapiens
  siRNA target sequence for ROBO4 (NM_019055.4,2882-2900).
ccccacgggatgagatctt

SEQ ID NO: 374796 - DNA, 19 bp, Homo sapiens
  siRNA target sequence for ROBO4 (NM_019055.4,3010-3028).
cctgactctcagatctctt

SEQ ID NO: 374797 - DNA, 19 bp, Homo sapiens
  siRNA target sequence for FLJ10404 (NM_019057.2,3168-3186).
gcaggagatcaaaaacact

SEQ ID NO: 374798 - DNA, 19 bp, Homo sapiens
  siRNA target sequence for FLJ10404 (NM_019057.2,3849-3867).
ggctggcagtcccaaaact

SEQ ID NO: 374799 - DNA, 19 bp, Homo sapiens
  siRNA target sequence for FLJ10404 (NM_019057.2,4031-4049).
cctccttggacgatgtgtt

SEQ ID NO: 374800 - DNA, 19 bp, Homo sapiens
  siRNA target sequence for FLJ10404 (NM_019057.2,4159-4177).
gtgaactggaccaacttca

SEQ ID NO: 374801 - DNA, 19 bp, Homo sapiens
  siRNA target sequence for RTP801 (NM_019058.1,571-589).
gccaggtgggcaaagaact

SEQ ID NO: 374802 - DNA, 19 bp, Homo sapiens
  siRNA target sequence for RTP801 (NM_019058.1,572-590).
ccaggtgggcaaagaacta

SEQ ID NO: 374803 - DNA, 19 bp, Homo sapiens
  siRNA target sequence for PIP3AP (NM_019061.2,200-218).
cgtacgccctgaggaaatt

SEQ ID NO: 374804 - DNA, 19 bp, Homo sapiens
  siRNA target sequence for PIP3AP (NM_019061.2,204-222).
cgccctgaggaaattcaca

SEQ ID NO: 374805 - DNA, 19 bp, Homo sapiens
  siRNA target sequence for PIP3AP (NM_019061.2,212-230).
ggaaattcacacaaacgaa

SEQ ID NO: 374806 - DNA, 19 bp, Homo sapiens
  siRNA target sequence for PIP3AP (NM_019061.2,295-313).
ccagcacagtactgaagta

SEQ ID NO: 374807 - DNA, 19 bp, Homo sapiens
  siRNA target sequence for PIP3AP (NM_019061.2,464-482).
ccactgtgttgatcagatt

SEQ ID NO: 374808 - DNA, 19 bp, Homo sapiens
  siRNA target sequence for PIP3AP (NM_019061.2,465-483).
cactgtgttgatcagattt

SEQ ID NO: 374809 - DNA, 19 bp, Homo sapiens
  siRNA target sequence for PIP3AP (NM_019061.2,467-485).
ctgtgttgatcagatttat

SEQ ID NO: 374810 - DNA, 19 bp, Homo sapiens
  siRNA target sequence for PIP3AP (NM_019061.2,619-637).
ggattgtcagtggcataat

SEQ ID NO: 374811 - DNA, 19 bp, Homo sapiens
  siRNA target sequence for PIP3AP (NM_019061.2,650-668).
ggctcctaaactgcttaaa

SEQ ID NO: 374812 - DNA, 19 bp, Homo sapiens
  siRNA target sequence for PIP3AP (NM_019061.2,654-672).
cctaaactgcttaaacgat

SEQ ID NO: 374813 - DNA, 19 bp, Homo sapiens
  siRNA target sequence for PIP3AP (NM_019061.2,655-673).
ctaaactgcttaaacgatt

SEQ ID NO: 374814 - DNA, 19 bp, Homo sapiens
  siRNA target sequence for PIP3AP (NM_019061.2,738-756).
gtaatgtttgacacactta

SEQ ID NO: 374815 - DNA, 19 bp, Homo sapiens
  siRNA target sequence for PIP3AP (NM_019061.2,844-862).
gattgccagcatactttgt

SEQ ID NO: 374816 - DNA, 19 bp, Homo sapiens
  siRNA target sequence for PIP3AP (NM_019061.2,903-921).
cagggtcatggcataccaa

SEQ ID NO: 374817 - DNA, 19 bp, Homo sapiens
  siRNA target sequence for PIP3AP (NM_019061.2,905-923).
gggtcatggcataccaata

SEQ ID NO: 374818 - DNA, 19 bp, Homo sapiens
  siRNA target sequence for PIP3AP (NM_019061.2,906-924).
ggtcatggcataccaatat

SEQ ID NO: 374819 - DNA, 19 bp, Homo sapiens
  siRNA target sequence for PIP3AP (NM_019061.2,909-927).
catggcataccaatatggt

SEQ ID NO: 374820 - DNA, 19 bp, Homo sapiens
  siRNA target sequence for PIP3AP (NM_019061.2,986-1004).
ggatgacggcattttacaa

SEQ ID NO: 374821 - DNA, 19 bp, Homo sapiens
  siRNA target sequence for PIP3AP (NM_019061.2,1044-1062).
cacaggccaccctatgaaa

SEQ ID NO: 374822 - DNA, 19 bp, Homo sapiens
  siRNA target sequence for PIP3AP (NM_019061.2,1048-1066).
ggccaccctatgaaattgt

SEQ ID NO: 374823 - DNA, 19 bp, Homo sapiens
  siRNA target sequence for PIP3AP (NM_019061.2,1051-1069).
caccctatgaaattgttaa

SEQ ID NO: 374824 - DNA, 19 bp, Homo sapiens
  siRNA target sequence for PIP3AP (NM_019061.2,1113-1131).
cagactgcatactctaaat

SEQ ID NO: 374825 - DNA, 19 bp, Homo sapiens
  siRNA target sequence for PIP3AP (NM_019061.2,1140-1158).
ctatttctgatagataaca

SEQ ID NO: 374826 - DNA, 19 bp, Homo sapiens
  siRNA target sequence for PIP3AP (NM_019061.2,1207-1225).
gtagcagctggcttgacat

SEQ ID NO: 374827 - DNA, 19 bp, Homo sapiens
  siRNA target sequence for PIP3AP (NM_019061.2,1210-1228).
gcagctggcttgacataat

SEQ ID NO: 374828 - DNA, 19 bp, Homo sapiens
  siRNA target sequence for PIP3AP (NM_019061.2,1214-1232).
ctggcttgacataatcaga

SEQ ID NO: 374829 - DNA, 19 bp, Homo sapiens
  siRNA target sequence for PIP3AP (NM_019061.2,1256-1274).
gattacagaatgtatggaa

SEQ ID NO: 374830 - DNA, 19 bp, Homo sapiens
  siRNA target sequence for PIP3AP (NM_019061.2,1267-1285).
gtatggaagcacaaaacat

SEQ ID NO: 374831 - DNA, 19 bp, Homo sapiens
  siRNA target sequence for PIP3AP (NM_019061.2,1369-1387).
gcagaaccagaattggttt

SEQ ID NO: 374832 - DNA, 19 bp, Homo sapiens
  siRNA target sequence for PIP3AP (NM_019061.2,1487-1505).
cctgcttttcctagattgt

SEQ ID NO: 374833 - DNA, 19 bp, Homo sapiens
  siRNA target sequence for PIP3AP (NM_019061.2,1551-1569).
gagacttacctgactgttt

SEQ ID NO: 374834 - DNA, 19 bp, Homo sapiens
  siRNA target sequence for PIP3AP (NM_019061.2,1571-1589).
gtcagatagcctgtatata

SEQ ID NO: 374835 - DNA, 19 bp, Homo sapiens
  siRNA target sequence for PIP3AP (NM_019061.2,1610-1628).
cttcaattcacctcatcaa

SEQ ID NO: 374836 - DNA, 19 bp, Homo sapiens
  siRNA target sequence for PIP3AP (NM_019061.2,1620-1638).
cctcatcaaaaagatacta

SEQ ID NO: 374837 - DNA, 19 bp, Homo sapiens
  siRNA target sequence for PIP3AP (NM_019061.2,1648-1666).
gagaaggccaggatacaca

SEQ ID NO: 374838 - DNA, 19 bp, Homo sapiens
  siRNA target sequence for PIP3AP (NM_019061.2,1725-1743).
gcccagacattgctcaaaa

SEQ ID NO: 374839 - DNA, 19 bp, Homo sapiens
  siRNA target sequence for PIP3AP (NM_019061.2,1736-1754).
gctcaaaaaccctctttat

SEQ ID NO: 374840 - DNA, 19 bp, Homo sapiens
  siRNA target sequence for PIP3AP (NM_019061.2,1787-1805).
gaaaggaatgcgcttcaaa

SEQ ID NO: 374841 - DNA, 19 bp, Homo sapiens
  siRNA target sequence for PIP3AP (NM_019061.2,1802-1820).
caaacatcaacgacaactt

SEQ ID NO: 374842 - DNA, 19 bp, Homo sapiens
  siRNA target sequence for PIP3AP (NM_019061.2,1993-2011).
ctgactaccatggtttgtt

SEQ ID NO: 374843 - DNA, 19 bp, Homo sapiens
  siRNA target sequence for PIP3AP (NM_019061.2,1997-2015).
ctaccatggtttgttgtta

SEQ ID NO: 374844 - DNA, 19 bp, Homo sapiens
  siRNA target sequence for PIP3AP (NM_019061.2,2054-2072).
gcgctacctacgttggatt

SEQ ID NO: 374845 - DNA, 19 bp, Homo sapiens
  siRNA target sequence for PIP3AP (NM_019061.2,2235-2253).
ctctcgtctttgtttcctt

SEQ ID NO: 374846 - DNA, 19 bp, Homo sapiens
  siRNA target sequence for SDK2 (NM_019064.2,604-622).
gtaaccatcaggtacatct

SEQ ID NO: 374847 - DNA, 19 bp, Homo sapiens
  siRNA target sequence for SDK2 (NM_019064.2,665-683).
gtatccgcctggacagaaa

SEQ ID NO: 374848 - DNA, 19 bp, Homo sapiens
  siRNA target sequence for SDK2 (NM_019064.2,864-882).
gtggaccaagccctttgat

SEQ ID NO: 374849 - DNA, 19 bp, Homo sapiens
  siRNA target sequence for SDK2 (NM_019064.2,891-909).
ccccctgatccgctacatt

SEQ ID NO: 374850 - DNA, 19 bp, Homo sapiens
  siRNA target sequence for SDK2 (NM_019064.2,1011-1029).
ctaccagttccgtctttgt

SEQ ID NO: 374851 - DNA, 19 bp, Homo sapiens
  siRNA target sequence for SDK2 (NM_019064.2,1243-1261).
gggtaccagtttaagaaca

SEQ ID NO: 374852 - DNA, 19 bp, Homo sapiens
  siRNA target sequence for SDK2 (NM_019064.2,1244-1262).
ggtaccagtttaagaacat

SEQ ID NO: 374853 - DNA, 19 bp, Homo sapiens
  siRNA target sequence for SDK2 (NM_019064.2,1290-1308).
gctggaggatctcatcatt

SEQ ID NO: 374854 - DNA, 19 bp, Homo sapiens
  siRNA target sequence for SDK2 (NM_019064.2,1360-1378).
gtctacagcagtaaagtca

SEQ ID NO: 374855 - DNA, 19 bp, Homo sapiens
  siRNA target sequence for SDK2 (NM_019064.2,1426-1444).
cacgcggaagccaccaatt

SEQ ID NO: 374856 - DNA, 19 bp, Homo sapiens
  siRNA target sequence for SDK2 (NM_019064.2,1429-1447).
gcggaagccaccaattcca

SEQ ID NO: 374857 - DNA, 19 bp, Homo sapiens
  siRNA target sequence for SDK2 (NM_019064.2,1777-1795).
caagagccgggagagaaaa

SEQ ID NO: 374858 - DNA, 19 bp, Homo sapiens
  siRNA target sequence for SDK2 (NM_019064.2,2077-2095).
ggctacgatgggaaaacct

SEQ ID NO: 374859 - DNA, 19 bp, Homo sapiens
  siRNA target sequence for SDK2 (NM_019064.2,2423-2441).
ccgtgggctataagatcaa

SEQ ID NO: 374860 - DNA, 19 bp, Homo sapiens
  siRNA target sequence for SDK2 (NM_019064.2,2720-2738).
ggctcgtgctgggctataa

SEQ ID NO: 374861 - DNA, 19 bp, Homo sapiens
  siRNA target sequence for SDK2 (NM_019064.2,2730-2748).
gggctataaggtgatgtat

SEQ ID NO: 374862 - DNA, 19 bp, Homo sapiens
  siRNA target sequence for SDK2 (NM_019064.2,2731-2749).
ggctataaggtgatgtata

SEQ ID NO: 374863 - DNA, 19 bp, Homo sapiens
  siRNA target sequence for SDK2 (NM_019064.2,2732-2750).
gctataaggtgatgtataa

SEQ ID NO: 374864 - DNA, 19 bp, Homo sapiens
  siRNA target sequence for SDK2 (NM_019064.2,2822-2840).
ccggcttgggcaaatacgt

SEQ ID NO: 374865 - DNA, 19 bp, Homo sapiens
  siRNA target sequence for SDK2 (NM_019064.2,2831-2849).
gcaaatacgtgctctatga

SEQ ID NO: 374866 - DNA, 19 bp, Homo sapiens
  siRNA target sequence for SDK2 (NM_019064.2,3457-3475).
gtgaaggcgaccaatgaca

SEQ ID NO: 374867 - DNA, 19 bp, Homo sapiens
  siRNA target sequence for SDK2 (NM_019064.2,3459-3477).
gaaggcgaccaatgacatt

SEQ ID NO: 374868 - DNA, 19 bp, Homo sapiens
  siRNA target sequence for SDK2 (NM_019064.2,3689-3707).
cgcttcgaggcatcaacaa

SEQ ID NO: 374869 - DNA, 19 bp, Homo sapiens
  siRNA target sequence for SDK2 (NM_019064.2,3994-4012).
gacatccaggggtacaaga

SEQ ID NO: 374870 - DNA, 19 bp, Homo sapiens
  siRNA target sequence for SDK2 (NM_019064.2,3999-4017).
ccaggggtacaagatttat

SEQ ID NO: 374871 - DNA, 19 bp, Homo sapiens
  siRNA target sequence for SDK2 (NM_019064.2,4000-4018).
caggggtacaagatttatt

SEQ ID NO: 374872 - DNA, 19 bp, Homo sapiens
  siRNA target sequence for SDK2 (NM_019064.2,4210-4228).
cccagctcggtcaagttca

SEQ ID NO: 374873 - DNA, 19 bp, Homo sapiens
  siRNA target sequence for SDK2 (NM_019064.2,4735-4753).
gcggtcaacgactatggtt

SEQ ID NO: 374874 - DNA, 19 bp, Homo sapiens
  siRNA target sequence for SDK2 (NM_019064.2,4736-4754).
cggtcaacgactatggttt

SEQ ID NO: 374875 - DNA, 19 bp, Homo sapiens
  siRNA target sequence for SDK2 (NM_019064.2,4957-4975).
ggccacagcgagatgatga

SEQ ID NO: 374876 - DNA, 19 bp, Homo sapiens
  siRNA target sequence for SDK2 (NM_019064.2,5018-5036).
ggcggctctccgtcaagaa

SEQ ID NO: 374877 - DNA, 19 bp, Homo sapiens
  siRNA target sequence for SDK2 (NM_019064.2,5020-5038).
cggctctccgtcaagaact

SEQ ID NO: 374878 - DNA, 19 bp, Homo sapiens
  siRNA target sequence for SDK2 (NM_019064.2,5023-5041).
ctctccgtcaagaactctt

SEQ ID NO: 374879 - DNA, 19 bp, Homo sapiens
  siRNA target sequence for SDK2 (NM_019064.2,5113-5131).
gaggatgtcaccaaataca

SEQ ID NO: 374880 - DNA, 19 bp, Homo sapiens
  siRNA target sequence for SDK2 (NM_019064.2,5165-5183).
cggagaagccctcagaaat

SEQ ID NO: 374881 - DNA, 19 bp, Homo sapiens
  siRNA target sequence for NECAB2 (NM_019065.2,226-244).
gccgtgcggacaaaaatga

SEQ ID NO: 374882 - DNA, 19 bp, Homo sapiens
  siRNA target sequence for NECAB2 (NM_019065.2,227-245).
ccgtgcggacaaaaatgat

SEQ ID NO: 374883 - DNA, 19 bp, Homo sapiens
  siRNA target sequence for NECAB2 (NM_019065.2,288-306).
gatggcgtccttaatgaga

SEQ ID NO: 374884 - DNA, 19 bp, Homo sapiens
  siRNA target sequence for NECAB2 (NM_019065.2,292-310).
gcgtccttaatgagaaaga

SEQ ID NO: 374885 - DNA, 19 bp, Homo sapiens
  siRNA target sequence for NECAB2 (NM_019065.2,293-311).
cgtccttaatgagaaagaa

SEQ ID NO: 374886 - DNA, 19 bp, Homo sapiens
  siRNA target sequence for NECAB2 (NM_019065.2,312-330).
ctggaggatctctttcaca

SEQ ID NO: 374887 - DNA, 19 bp, Homo sapiens
  siRNA target sequence for NECAB2 (NM_019065.2,321-339).
ctctttcacacgattgact

SEQ ID NO: 374888 - DNA, 19 bp, Homo sapiens
  siRNA target sequence for NECAB2 (NM_019065.2,364-382).
ccaaggagctgtgtgatta

SEQ ID NO: 374889 - DNA, 19 bp, Homo sapiens
  siRNA target sequence for NECAB2 (NM_019065.2,389-407).
ggaccacatgggtgactat

SEQ ID NO: 374890 - DNA, 19 bp, Homo sapiens
  siRNA target sequence for NECAB2 (NM_019065.2,463-481).
gttataccaagaaggtata

SEQ ID NO: 374891 - DNA, 19 bp, Homo sapiens
  siRNA target sequence for SGTB (NM_019072.1,183-201).
ctatcaagcacctggttta

SEQ ID NO: 374892 - DNA, 19 bp, Homo sapiens
  siRNA target sequence for SGTB (NM_019072.1,187-205).
caagcacctggtttatgca

SEQ ID NO: 374893 - DNA, 19 bp, Homo sapiens
  siRNA target sequence for SGTB (NM_019072.1,196-214).
ggtttatgcagttattcgt

SEQ ID NO: 374894 - DNA, 19 bp, Homo sapiens
  siRNA target sequence for SGTB (NM_019072.1,212-230).
cgtttcttacgggaacaaa

SEQ ID NO: 374895 - DNA, 19 bp, Homo sapiens
  siRNA target sequence for SGTB (NM_019072.1,243-261).
cttacacctcggatgaaca

SEQ ID NO: 374896 - DNA, 19 bp, Homo sapiens
  siRNA target sequence for SGTB (NM_019072.1,250-268).
ctcggatgaacaagaaagt

SEQ ID NO: 374897 - DNA, 19 bp, Homo sapiens
  siRNA target sequence for SGTB (NM_019072.1,252-270).
cggatgaacaagaaagttt

SEQ ID NO: 374898 - DNA, 19 bp, Homo sapiens
  siRNA target sequence for SGTB (NM_019072.1,293-311).
gagacagtttttaagatca

SEQ ID NO: 374899 - DNA, 19 bp, Homo sapiens
  siRNA target sequence for SGTB (NM_019072.1,307-325).
gatcagcccagaagataca

SEQ ID NO: 374900 - DNA, 19 bp, Homo sapiens
  siRNA target sequence for SGTB (NM_019072.1,324-342).
cacacctagcagtttcaca

SEQ ID NO: 374901 - DNA, 19 bp, Homo sapiens
  siRNA target sequence for SGTB (NM_019072.1,363-381).
ccagttccttctgtaagaa

SEQ ID NO: 374902 - DNA, 19 bp, Homo sapiens
  siRNA target sequence for SGTB (NM_019072.1,364-382).
cagttccttctgtaagaat

SEQ ID NO: 374903 - DNA, 19 bp, Homo sapiens
  siRNA target sequence for SGTB (NM_019072.1,383-401).
gacgttctgcccctttcaa

SEQ ID NO: 374904 - DNA, 19 bp, Homo sapiens
  siRNA target sequence for SGTB (NM_019072.1,386-404).
gttctgcccctttcaaact

SEQ ID NO: 374905 - DNA, 19 bp, Homo sapiens
  siRNA target sequence for SGTB (NM_019072.1,522-540).
ccaataatgcagtttacta

SEQ ID NO: 374906 - DNA, 19 bp, Homo sapiens
  siRNA target sequence for SGTB (NM_019072.1,523-541).
caataatgcagtttactat

SEQ ID NO: 374907 - DNA, 19 bp, Homo sapiens
  siRNA target sequence for SGTB (NM_019072.1,551-569).
gctgctgctcagagcaaat

SEQ ID NO: 374908 - DNA, 19 bp, Homo sapiens
  siRNA target sequence for SGTB (NM_019072.1,552-570).
ctgctgctcagagcaaatt

SEQ ID NO: 374909 - DNA, 19 bp, Homo sapiens
  siRNA target sequence for SGTB (NM_019072.1,587-605).
gcgataaaggattgtgaaa

SEQ ID NO: 374910 - DNA, 19 bp, Homo sapiens
  siRNA target sequence for SGTB (NM_019072.1,588-606).
cgataaaggattgtgaaaa

SEQ ID NO: 374911 - DNA, 19 bp, Homo sapiens
  siRNA target sequence for SGTB (NM_019072.1,609-627).
caatagcaattgattcaaa

SEQ ID NO: 374912 - DNA, 19 bp, Homo sapiens
  siRNA target sequence for SGTB (NM_019072.1,659-677).
gccctcactgccttgaata

SEQ ID NO: 374913 - DNA, 19 bp, Homo sapiens
  siRNA target sequence for SGTB (NM_019072.1,661-679).
cctcactgccttgaataaa

SEQ ID NO: 374914 - DNA, 19 bp, Homo sapiens
  siRNA target sequence for SGTB (NM_019072.1,689-707).
gcagttacaagttatcaaa

SEQ ID NO: 374915 - DNA, 19 bp, Homo sapiens
  siRNA target sequence for SGTB (NM_019072.1,699-717).
gttatcaaaaggcattaga

SEQ ID NO: 374916 - DNA, 19 bp, Homo sapiens
  siRNA target sequence for SGTB (NM_019072.1,728-746).
gaaaatgattcctataagt

SEQ ID NO: 374917 - DNA, 19 bp, Homo sapiens
  siRNA target sequence for SGTB (NM_019072.1,815-833).
gacatggctagcttgataa

SEQ ID NO: 374918 - DNA, 19 bp, Homo sapiens
  siRNA target sequence for SGTB (NM_019072.1,817-835).
catggctagcttgataaat

SEQ ID NO: 374919 - DNA, 19 bp, Homo sapiens
  siRNA target sequence for SGTB (NM_019072.1,820-838).
ggctagcttgataaataat

SEQ ID NO: 374920 - DNA, 19 bp, Homo sapiens
  siRNA target sequence for SGTB (NM_019072.1,893-911).
ctaatgtcaggaatgatga

SEQ ID NO: 374921 - DNA, 19 bp, Homo sapiens
  siRNA target sequence for SGTB (NM_019072.1,1000-1018).
gatacagcaacaaaatcct

SEQ ID NO: 374922 - DNA, 19 bp, Homo sapiens
  siRNA target sequence for SGTB (NM_019072.1,1043-1061).
cacatccggagcagatcat

SEQ ID NO: 374923 - DNA, 19 bp, Homo sapiens
  siRNA target sequence for SPATA6 (NM_019073.1,224-242).
gcccaggagtcgtgcttaa

SEQ ID NO: 374924 - DNA, 19 bp, Homo sapiens
  siRNA target sequence for SPATA6 (NM_019073.1,225-243).
cccaggagtcgtgcttaaa

SEQ ID NO: 374925 - DNA, 19 bp, Homo sapiens
  siRNA target sequence for SPATA6 (NM_019073.1,227-245).
caggagtcgtgcttaaaga

SEQ ID NO: 374926 - DNA, 19 bp, Homo sapiens
  siRNA target sequence for SPATA6 (NM_019073.1,229-247).
ggagtcgtgcttaaagaca

SEQ ID NO: 374927 - DNA, 19 bp, Homo sapiens
  siRNA target sequence for SPATA6 (NM_019073.1,230-248).
gagtcgtgcttaaagacaa

SEQ ID NO: 374928 - DNA, 19 bp, Homo sapiens
  siRNA target sequence for SPATA6 (NM_019073.1,314-332).
cttttcccctggtcttcaa

SEQ ID NO: 374929 - DNA, 19 bp, Homo sapiens
  siRNA target sequence for SPATA6 (NM_019073.1,357-375).
gttcccggacgcagtagat

SEQ ID NO: 374930 - DNA, 19 bp, Homo sapiens
  siRNA target sequence for SPATA6 (NM_019073.1,440-458).
caccagtgggtgaaacact

SEQ ID NO: 374931 - DNA, 19 bp, Homo sapiens
  siRNA target sequence for SPATA6 (NM_019073.1,459-477).
gtctacgtatgacgaaaat

SEQ ID NO: 374932 - DNA, 19 bp, Homo sapiens
  siRNA target sequence for SPATA6 (NM_019073.1,513-531).
gtctggacaccatgattca

SEQ ID NO: 374933 - DNA, 19 bp, Homo sapiens
  siRNA target sequence for SPATA6 (NM_019073.1,530-548).
caaaccgccaggttaccat

SEQ ID NO: 374934 - DNA, 19 bp, Homo sapiens
  siRNA target sequence for SPATA6 (NM_019073.1,541-559).
gttaccatgaggaggattt

SEQ ID NO: 374935 - DNA, 19 bp, Homo sapiens
  siRNA target sequence for SPATA6 (NM_019073.1,577-595).
gctccaaggctggaatttt

SEQ ID NO: 374936 - DNA, 19 bp, Homo sapiens
  siRNA target sequence for SPATA6 (NM_019073.1,605-623).
cagtgattactgaatgtct

SEQ ID NO: 374937 - DNA, 19 bp, Homo sapiens
  siRNA target sequence for SPATA6 (NM_019073.1,609-627).
gattactgaatgtctgata

SEQ ID NO: 374938 - DNA, 19 bp, Homo sapiens
  siRNA target sequence for SPATA6 (NM_019073.1,616-634).
gaatgtctgataagttcaa

SEQ ID NO: 374939 - DNA, 19 bp, Homo sapiens
  siRNA target sequence for SPATA6 (NM_019073.1,643-661).
cacactcaggataaattta

SEQ ID NO: 374940 - DNA, 19 bp, Homo sapiens
  siRNA target sequence for SPATA6 (NM_019073.1,741-759).
gtcacctgagagaagtaaa

SEQ ID NO: 374941 - DNA, 19 bp, Homo sapiens
  siRNA target sequence for SPATA6 (NM_019073.1,743-761).
cacctgagagaagtaaata

SEQ ID NO: 374942 - DNA, 19 bp, Homo sapiens
  siRNA target sequence for SPATA6 (NM_019073.1,745-763).
cctgagagaagtaaatact

SEQ ID NO: 374943 - DNA, 19 bp, Homo sapiens
  siRNA target sequence for SPATA6 (NM_019073.1,872-890).
ggctggcccatttaaatct

SEQ ID NO: 374944 - DNA, 19 bp, Homo sapiens
  siRNA target sequence for SPATA6 (NM_019073.1,891-909).
gggaccctatgagttcaaa

SEQ ID NO: 374945 - DNA, 19 bp, Homo sapiens
  siRNA target sequence for SPATA6 (NM_019073.1,893-911).
gaccctatgagttcaaaaa

SEQ ID NO: 374946 - DNA, 19 bp, Homo sapiens
  siRNA target sequence for SPATA6 (NM_019073.1,919-937).
gataaacctccatttgtga

SEQ ID NO: 374947 - DNA, 19 bp, Homo sapiens
  siRNA target sequence for SPATA6 (NM_019073.1,961-979).
cccagggctgatactttat

SEQ ID NO: 374948 - DNA, 19 bp, Homo sapiens
  siRNA target sequence for SPATA6 (NM_019073.1,962-980).
ccagggctgatactttatt

SEQ ID NO: 374949 - DNA, 19 bp, Homo sapiens
  siRNA target sequence for SPATA6 (NM_019073.1,1016-1034).
ggtcaagggtgcacaatga

SEQ ID NO: 374950 - DNA, 19 bp, Homo sapiens
  siRNA target sequence for SPATA6 (NM_019073.1,1017-1035).
gtcaagggtgcacaatgat

SEQ ID NO: 374951 - DNA, 19 bp, Homo sapiens
  siRNA target sequence for SPATA6 (NM_019073.1,1019-1037).
caagggtgcacaatgatca

SEQ ID NO: 374952 - DNA, 19 bp, Homo sapiens
  siRNA target sequence for SPATA6 (NM_019073.1,1026-1044).
gcacaatgatcattctcat

SEQ ID NO: 374953 - DNA, 19 bp, Homo sapiens
  siRNA target sequence for SPATA6 (NM_019073.1,1052-1070).
gctgccgacccaaggatta

SEQ ID NO: 374954 - DNA, 19 bp, Homo sapiens
  siRNA target sequence for SPATA6 (NM_019073.1,1053-1071).
ctgccgacccaaggattat

SEQ ID NO: 374955 - DNA, 19 bp, Homo sapiens
  siRNA target sequence for SPATA6 (NM_019073.1,1055-1073).
gccgacccaaggattataa

SEQ ID NO: 374956 - DNA, 19 bp, Homo sapiens
  siRNA target sequence for SPATA6 (NM_019073.1,1058-1076).
gacccaaggattataaggt

SEQ ID NO: 374957 - DNA, 19 bp, Homo sapiens
  siRNA target sequence for SPATA6 (NM_019073.1,1060-1078).
cccaaggattataaggtta

SEQ ID NO: 374958 - DNA, 19 bp, Homo sapiens
  siRNA target sequence for SPATA6 (NM_019073.1,1061-1079).
ccaaggattataaggttat

SEQ ID NO: 374959 - DNA, 19 bp, Homo sapiens
  siRNA target sequence for SPATA6 (NM_019073.1,1097-1115).
gagacttcgatgactcttt

SEQ ID NO: 374960 - DNA, 19 bp, Homo sapiens
  siRNA target sequence for SPATA6 (NM_019073.1,1101-1119).
cttcgatgactctttagaa

SEQ ID NO: 374961 - DNA, 19 bp, Homo sapiens
  siRNA target sequence for SPATA6 (NM_019073.1,1283-1301).
cttcaaactgcgatgagat

SEQ ID NO: 374962 - DNA, 19 bp, Homo sapiens
  siRNA target sequence for SPATA6 (NM_019073.1,1299-1317).
gatccatgaccgggtaaaa

SEQ ID NO: 374963 - DNA, 19 bp, Homo sapiens
  siRNA target sequence for SPATA6 (NM_019073.1,1306-1324).
gaccgggtaaaaaatgtct

SEQ ID NO: 374964 - DNA, 19 bp, Homo sapiens
  siRNA target sequence for SPATA6 (NM_019073.1,1393-1411).
gaactgaaaagaagtcttt

SEQ ID NO: 374965 - DNA, 19 bp, Homo sapiens
  siRNA target sequence for SPATA6 (NM_019073.1,1537-1555).
caccgacccatctttgaga

SEQ ID NO: 374966 - DNA, 19 bp, Homo sapiens
  siRNA target sequence for SPATA6 (NM_019073.1,1566-1584).
caagatgtacaggaactta

SEQ ID NO: 374967 - DNA, 19 bp, Homo sapiens
  siRNA target sequence for SPATA6 (NM_019073.1,1587-1605).
caaaaaggcctgtagttct

SEQ ID NO: 374968 - DNA, 19 bp, Homo sapiens
  siRNA target sequence for UGT1A8 (NM_019076.3,722-740).
gccagtatttttccaaaaa

SEQ ID NO: 374969 - DNA, 19 bp, Homo sapiens
  siRNA target sequence for UGT1A7 (NM_019077.1,23-41).
gcctccttcccctatatgt

SEQ ID NO: 374970 - DNA, 19 bp, Homo sapiens
  siRNA target sequence for UGT1A7 (NM_019077.1,306-324).
gcgaagtgcattttctcta

SEQ ID NO: 374971 - DNA, 19 bp, Homo sapiens
  siRNA target sequence for FLJ10884 (NM_019079.2,272-290).
gtatctactagtgtacaat

SEQ ID NO: 374972 - DNA, 19 bp, Homo sapiens
  siRNA target sequence for FLJ10884 (NM_019079.2,276-294).
ctactagtgtacaatcaaa

SEQ ID NO: 374973 - DNA, 19 bp, Homo sapiens
  siRNA target sequence for FLJ10884 (NM_019079.2,367-385).
ggacatagctccggtatta

SEQ ID NO: 374974 - DNA, 19 bp, Homo sapiens
  siRNA target sequence for FLJ10884 (NM_019079.2,370-388).
catagctccggtattagat

SEQ ID NO: 374975 - DNA, 19 bp, Homo sapiens
  siRNA target sequence for FLJ10884 (NM_019079.2,374-392).
gctccggtattagatttaa

SEQ ID NO: 374976 - DNA, 19 bp, Homo sapiens
  siRNA target sequence for FLJ10884 (NM_019079.2,397-415).
caaggacgtatcagcaatt

SEQ ID NO: 374977 - DNA, 19 bp, Homo sapiens
  siRNA target sequence for FLJ10884 (NM_019079.2,401-419).
gacgtatcagcaattatga

SEQ ID NO: 374978 - DNA, 19 bp, Homo sapiens
  siRNA target sequence for FLJ10884 (NM_019079.2,403-421).
cgtatcagcaattatgaat

SEQ ID NO: 374979 - DNA, 19 bp, Homo sapiens
  siRNA target sequence for FLJ10884 (NM_019079.2,404-422).
gtatcagcaattatgaata

SEQ ID NO: 374980 - DNA, 19 bp, Homo sapiens
  siRNA target sequence for FLJ10884 (NM_019079.2,408-426).
cagcaattatgaataagtt

SEQ ID NO: 374981 - DNA, 19 bp, Homo sapiens
  siRNA target sequence for FLJ10884 (NM_019079.2,410-428).
gcaattatgaataagttta

SEQ ID NO: 374982 - DNA, 19 bp, Homo sapiens
  siRNA target sequence for FLJ10884 (NM_019079.2,463-481).
ggagatgagggaaactctt

SEQ ID NO: 374983 - DNA, 19 bp, Homo sapiens
  siRNA target sequence for FLJ10884 (NM_019079.2,516-534).
ctacaatacctgaggtaaa

SEQ ID NO: 374984 - DNA, 19 bp, Homo sapiens
  siRNA target sequence for FLJ10884 (NM_019079.2,552-570).
gtagtaggacagagtttca

SEQ ID NO: 374985 - DNA, 19 bp, Homo sapiens
  siRNA target sequence for FLJ10884 (NM_019079.2,558-576).
ggacagagtttcagcaaat

SEQ ID NO: 374986 - DNA, 19 bp, Homo sapiens
  siRNA target sequence for FLJ10884 (NM_019079.2,559-577).
gacagagtttcagcaaata

SEQ ID NO: 374987 - DNA, 19 bp, Homo sapiens
  siRNA target sequence for FLJ10884 (NM_019079.2,561-579).
cagagtttcagcaaataat

SEQ ID NO: 374988 - DNA, 19 bp, Homo sapiens
  siRNA target sequence for FLJ10884 (NM_019079.2,563-581).
gagtttcagcaaataatca

SEQ ID NO: 374989 - DNA, 19 bp, Homo sapiens
  siRNA target sequence for FLJ10884 (NM_019079.2,572-590).
caaataatcaatttagcat

SEQ ID NO: 374990 - DNA, 19 bp, Homo sapiens
  siRNA target sequence for FLJ10884 (NM_019079.2,686-704).
ctgagtggtaaattagaca

SEQ ID NO: 374991 - DNA, 19 bp, Homo sapiens
  siRNA target sequence for FLJ10884 (NM_019079.2,692-710).
ggtaaattagacaacacta

SEQ ID NO: 374992 - DNA, 19 bp, Homo sapiens
  siRNA target sequence for FLJ10884 (NM_019079.2,693-711).
gtaaattagacaacactaa

SEQ ID NO: 374993 - DNA, 19 bp, Homo sapiens
  siRNA target sequence for FLJ10884 (NM_019079.2,701-719).
gacaacactaacgaataca

SEQ ID NO: 374994 - DNA, 19 bp, Homo sapiens
  siRNA target sequence for FLJ10884 (NM_019079.2,703-721).
caacactaacgaatacaat

SEQ ID NO: 374995 - DNA, 19 bp, Homo sapiens
  siRNA target sequence for FLJ10884 (NM_019079.2,706-724).
cactaacgaatacaatagt

SEQ ID NO: 374996 - DNA, 19 bp, Homo sapiens
  siRNA target sequence for FLJ10884 (NM_019079.2,708-726).
ctaacgaatacaatagtaa

SEQ ID NO: 374997 - DNA, 19 bp, Homo sapiens
  siRNA target sequence for FLJ10884 (NM_019079.2,756-774).
cacgaagttacgaagtcat

SEQ ID NO: 374998 - DNA, 19 bp, Homo sapiens
  siRNA target sequence for FLJ10884 (NM_019079.2,792-810).
ccttatgcaatatagatga

SEQ ID NO: 374999 - DNA, 19 bp, Homo sapiens
  siRNA target sequence for FLJ10884 (NM_019079.2,819-837).
gaaatcgcaatgtccattt

SEQ ID NO: 375000 - DNA, 19 bp, Homo sapiens
  siRNA target sequence for FLJ10884 (NM_019079.2,832-850).
ccatttagaatttacagaa

SEQ ID NO: 375001 - DNA, 19 bp, Homo sapiens
  siRNA target sequence for FLJ10884 (NM_019079.2,1095-1113).
gtgaagttaaattagcatt

SEQ ID NO: 375002 - DNA, 19 bp, Homo sapiens
  siRNA target sequence for FLJ10884 (NM_019079.2,1271-1289).
gataaaaccctaatagact

SEQ ID NO: 375003 - DNA, 19 bp, Homo sapiens
  siRNA target sequence for FLJ10884 (NM_019079.2,1319-1337).
gatggcttgagcttcctat

SEQ ID NO: 375004 - DNA, 19 bp, Homo sapiens
  siRNA target sequence for FLJ10884 (NM_019079.2,1628-1646).
catgaagttgagataacca

SEQ ID NO: 375005 - DNA, 19 bp, Homo sapiens
  siRNA target sequence for FLJ10884 (NM_019079.2,1658-1676).
gaaactactttcattgact

SEQ ID NO: 375006 - DNA, 19 bp, Homo sapiens
  siRNA target sequence for FLJ10884 (NM_019079.2,1675-1693).
ctctgtagaggattctgaa

SEQ ID NO: 375007 - DNA, 19 bp, Homo sapiens
  siRNA target sequence for FLJ10884 (NM_019079.2,1747-1765).
ctccctgactgagaaaaaa

SEQ ID NO: 375008 - DNA, 19 bp, Homo sapiens
  siRNA target sequence for FLJ10884 (NM_019079.2,1767-1785).
cctcacgtagacaaaaaga

SEQ ID NO: 375009 - DNA, 19 bp, Homo sapiens
  siRNA target sequence for FLJ10884 (NM_019079.2,1770-1788).
cacgtagacaaaaagaaat

SEQ ID NO: 375010 - DNA, 19 bp, Homo sapiens
  siRNA target sequence for FLJ10884 (NM_019079.2,1927-1945).
ggcctctccctcaaagtca

SEQ ID NO: 375011 - DNA, 19 bp, Homo sapiens
  siRNA target sequence for FLJ10884 (NM_019079.2,1956-1974).
gtcatgatgagcataaaaa

SEQ ID NO: 375012 - DNA, 19 bp, Homo sapiens
  siRNA target sequence for FLJ10884 (NM_019079.2,2118-2136).
gtagtgtgattaatagcat

SEQ ID NO: 375013 - DNA, 19 bp, Homo sapiens
  siRNA target sequence for FLJ10884 (NM_019079.2,2177-2195).
cattcaggtgtcttggaaa

SEQ ID NO: 375014 - DNA, 19 bp, Homo sapiens
  siRNA target sequence for FLJ10884 (NM_019079.2,2230-2248).
ggacatacttgaagaaaga

SEQ ID NO: 375015 - DNA, 19 bp, Homo sapiens
  siRNA target sequence for FLJ10884 (NM_019079.2,2276-2294).
gaattctctaaggatacaa

SEQ ID NO: 375016 - DNA, 19 bp, Homo sapiens
  siRNA target sequence for FLJ10884 (NM_019079.2,2281-2299).
ctctaaggatacaatgcaa

SEQ ID NO: 375017 - DNA, 19 bp, Homo sapiens
  siRNA target sequence for FLJ10884 (NM_019079.2,2283-2301).
ctaaggatacaatgcaaat

SEQ ID NO: 375018 - DNA, 19 bp, Homo sapiens
  siRNA target sequence for FLJ10884 (NM_019079.2,2296-2314).
gcaaatgaccaaacagata

SEQ ID NO: 375019 - DNA, 19 bp, Homo sapiens
  siRNA target sequence for FLJ10884 (NM_019079.2,2365-2383).
cattcgtttgataggaatt

SEQ ID NO: 375020 - DNA, 19 bp, Homo sapiens
  siRNA target sequence for FLJ10884 (NM_019079.2,2496-2514).
gagtacctagtaaaattga

SEQ ID NO: 375021 - DNA, 19 bp, Homo sapiens
  siRNA target sequence for FLJ10884 (NM_019079.2,2535-2553).
gacacatcttggtgaaatt

SEQ ID NO: 375022 - DNA, 19 bp, Homo sapiens
  siRNA target sequence for FLJ10884 (NM_019079.2,2537-2555).
cacatcttggtgaaatttt

SEQ ID NO: 375023 - DNA, 19 bp, Homo sapiens
  siRNA target sequence for FLJ10884 (NM_019079.2,2632-2650).
caggttgacagcagactta

SEQ ID NO: 375024 - DNA, 19 bp, Homo sapiens
  siRNA target sequence for FLJ10884 (NM_019079.2,2663-2681).
ctggatgctagaagtaaat

SEQ ID NO: 375025 - DNA, 19 bp, Homo sapiens
  siRNA target sequence for FLJ10884 (NM_019079.2,2756-2774).
gattttaggggtaaaacaa

SEQ ID NO: 375026 - DNA, 19 bp, Homo sapiens
  siRNA target sequence for FLJ10884 (NM_019079.2,2772-2790).
caaaggtatttcttagtat

SEQ ID NO: 375027 - DNA, 19 bp, Homo sapiens
  siRNA target sequence for FLJ10884 (NM_019079.2,2821-2839).
gcccaccttgagagaatta

SEQ ID NO: 375028 - DNA, 19 bp, Homo sapiens
  siRNA target sequence for FLJ10884 (NM_019079.2,2832-2850).
gagaattactggggaataa

SEQ ID NO: 375029 - DNA, 19 bp, Homo sapiens
  siRNA target sequence for FLJ10884 (NM_019079.2,2834-2852).
gaattactggggaataata

SEQ ID NO: 375030 - DNA, 19 bp, Homo sapiens
  siRNA target sequence for FLJ10287 (NM_019083.1,27-45).
gccgcacgcgcctggtttt

SEQ ID NO: 375031 - DNA, 19 bp, Homo sapiens
  siRNA target sequence for FLJ10287 (NM_019083.1,30-48).
gcacgcgcctggttttcca

SEQ ID NO: 375032 - DNA, 19 bp, Homo sapiens
  siRNA target sequence for FLJ10287 (NM_019083.1,54-72).
gggtagatgcggttactat

SEQ ID NO: 375033 - DNA, 19 bp, Homo sapiens
  siRNA target sequence for FLJ10287 (NM_019083.1,62-80).
gcggttactatgtggaaaa

SEQ ID NO: 375034 - DNA, 19 bp, Homo sapiens
  siRNA target sequence for FLJ10287 (NM_019083.1,64-82).
ggttactatgtggaaaaga

SEQ ID NO: 375035 - DNA, 19 bp, Homo sapiens
  siRNA target sequence for FLJ10287 (NM_019083.1,65-83).
gttactatgtggaaaagaa

SEQ ID NO: 375036 - DNA, 19 bp, Homo sapiens
  siRNA target sequence for FLJ10287 (NM_019083.1,108-126).
ggccgcagggaaaagattt

SEQ ID NO: 375037 - DNA, 19 bp, Homo sapiens
  siRNA target sequence for FLJ10287 (NM_019083.1,109-127).
gccgcagggaaaagatttt

SEQ ID NO: 375038 - DNA, 19 bp, Homo sapiens
  siRNA target sequence for FLJ10287 (NM_019083.1,173-191).
gaatcctgtgtcctttaga

SEQ ID NO: 375039 - DNA, 19 bp, Homo sapiens
  siRNA target sequence for FLJ10287 (NM_019083.1,180-198).
gtgtcctttagatccaaaa

SEQ ID NO: 375040 - DNA, 19 bp, Homo sapiens
  siRNA target sequence for FLJ10287 (NM_019083.1,220-238).
ctagcaaagcatttgaaaa

SEQ ID NO: 375041 - DNA, 19 bp, Homo sapiens
  siRNA target sequence for FLJ10287 (NM_019083.1,259-277).
ccaaaacctgatttctata

SEQ ID NO: 375042 - DNA, 19 bp, Homo sapiens
  siRNA target sequence for FLJ10287 (NM_019083.1,320-338).
ctgaacaattagttccaat

SEQ ID NO: 375043 - DNA, 19 bp, Homo sapiens
  siRNA target sequence for FLJ10287 (NM_019083.1,331-349).
gttccaatttcttctctat

SEQ ID NO: 375044 - DNA, 19 bp, Homo sapiens
  siRNA target sequence for FLJ10287 (NM_019083.1,400-418).
ggcttgaattctacactta

SEQ ID NO: 375045 - DNA, 19 bp, Homo sapiens
  siRNA target sequence for FLJ10287 (NM_019083.1,401-419).
gcttgaattctacacttaa

SEQ ID NO: 375046 - DNA, 19 bp, Homo sapiens
  siRNA target sequence for FLJ10287 (NM_019083.1,455-473).
cacttaatgaccctaaaaa

SEQ ID NO: 375047 - DNA, 19 bp, Homo sapiens
  siRNA target sequence for FLJ10287 (NM_019083.1,504-522).
gcaggcttctattttaggt

SEQ ID NO: 375048 - DNA, 19 bp, Homo sapiens
  siRNA target sequence for FLJ10287 (NM_019083.1,505-523).
caggcttctattttaggta

SEQ ID NO: 375049 - DNA, 19 bp, Homo sapiens
  siRNA target sequence for FLJ10287 (NM_019083.1,540-558).
gttacttggtccaagaaga

SEQ ID NO: 375050 - DNA, 19 bp, Homo sapiens
  siRNA target sequence for FLJ10287 (NM_019083.1,652-670).
gaaaaggtgaccacaagat

SEQ ID NO: 375051 - DNA, 19 bp, Homo sapiens
  siRNA target sequence for FLJ10287 (NM_019083.1,668-686).
gattcaaggtggatggaaa

SEQ ID NO: 375052 - DNA, 19 bp, Homo sapiens
  siRNA target sequence for FLJ10287 (NM_019083.1,807-825).
gtgtggtatggcaacagat

SEQ ID NO: 375053 - DNA, 19 bp, Homo sapiens
  siRNA target sequence for FLJ10287 (NM_019083.1,816-834).
ggcaacagatcttgcatta

SEQ ID NO: 375054 - DNA, 19 bp, Homo sapiens
  siRNA target sequence for FLJ10287 (NM_019083.1,1025-1043).
gtgattggagacattatgt

SEQ ID NO: 375055 - DNA, 19 bp, Homo sapiens
  siRNA target sequence for FLJ10287 (NM_019083.1,1075-1093).
ggagcagtggaattccatt

SEQ ID NO: 375056 - DNA, 19 bp, Homo sapiens
  siRNA target sequence for FLJ10287 (NM_019083.1,1076-1094).
gagcagtggaattccatta

SEQ ID NO: 375057 - DNA, 19 bp, Homo sapiens
  siRNA target sequence for FLJ10287 (NM_019083.1,1107-1125).
gagtagttgggcaacttgt

SEQ ID NO: 375058 - DNA, 19 bp, Homo sapiens
  siRNA target sequence for FLJ10287 (NM_019083.1,1131-1149).
gcggaaaacatctttggaa

SEQ ID NO: 375059 - DNA, 19 bp, Homo sapiens
  siRNA target sequence for FLJ10287 (NM_019083.1,1172-1190).
ggcaagataatcagaatga

SEQ ID NO: 375060 - DNA, 19 bp, Homo sapiens
  siRNA target sequence for FLJ10287 (NM_019083.1,1173-1191).
gcaagataatcagaatgat

SEQ ID NO: 375061 - DNA, 19 bp, Homo sapiens
  siRNA target sequence for FLJ10287 (NM_019083.1,1319-1337).
gtcgaatccagtatttgca

SEQ ID NO: 375062 - DNA, 19 bp, Homo sapiens
  siRNA target sequence for FLJ10287 (NM_019083.1,1352-1370).
gtcctgctttgcagtacta

SEQ ID NO: 375063 - DNA, 19 bp, Homo sapiens
  siRNA target sequence for FLJ10287 (NM_019083.1,1358-1376).
ctttgcagtactatacaga

SEQ ID NO: 375064 - DNA, 19 bp, Homo sapiens
  siRNA target sequence for FLJ10287 (NM_019083.1,1411-1429).
gctttaccaaatcattctt

SEQ ID NO: 375065 - DNA, 19 bp, Homo sapiens
  siRNA target sequence for FLJ10895 (NM_019084.2,442-460).
ctgaagttgccctcctata

SEQ ID NO: 375066 - DNA, 19 bp, Homo sapiens
  siRNA target sequence for FLJ10895 (NM_019084.2,463-481).
ggccagtcccctcagttaa

SEQ ID NO: 375067 - DNA, 19 bp, Homo sapiens
  siRNA target sequence for FLJ10895 (NM_019084.2,465-483).
ccagtcccctcagttaagt

SEQ ID NO: 375068 - DNA, 19 bp, Homo sapiens
  siRNA target sequence for FLJ10895 (NM_019084.2,491-509).
ggtattttgctgacttgat

SEQ ID NO: 375069 - DNA, 19 bp, Homo sapiens
  siRNA target sequence for FLJ10895 (NM_019084.2,550-568).
cgccatcttgctgtctatt

SEQ ID NO: 375070 - DNA, 19 bp, Homo sapiens
  siRNA target sequence for FLJ10895 (NM_019084.2,586-604).
gaccgctatgacatctcta

SEQ ID NO: 375071 - DNA, 19 bp, Homo sapiens
  siRNA target sequence for FLJ10895 (NM_019084.2,606-624).
ccagcagctgcatttagtt

SEQ ID NO: 375072 - DNA, 19 bp, Homo sapiens
  siRNA target sequence for FLJ10895 (NM_019084.2,635-653).
gcctgcttctagcaagtaa

SEQ ID NO: 375073 - DNA, 19 bp, Homo sapiens
  siRNA target sequence for FLJ10895 (NM_019084.2,636-654).
cctgcttctagcaagtaaa

SEQ ID NO: 375074 - DNA, 19 bp, Homo sapiens
  siRNA target sequence for FLJ10895 (NM_019084.2,706-724).
ggttgtatgactaatatga

SEQ ID NO: 375075 - DNA, 19 bp, Homo sapiens
  siRNA target sequence for FLJ10895 (NM_019084.2,707-725).
gttgtatgactaatatgaa

SEQ ID NO: 375076 - DNA, 19 bp, Homo sapiens
  siRNA target sequence for FLJ10895 (NM_019084.2,710-728).
gtatgactaatatgaatct

SEQ ID NO: 375077 - DNA, 19 bp, Homo sapiens
  siRNA target sequence for FLJ10895 (NM_019084.2,714-732).
gactaatatgaatctagta

SEQ ID NO: 375078 - DNA, 19 bp, Homo sapiens
  siRNA target sequence for FLJ10895 (NM_019084.2,716-734).
ctaatatgaatctagtatt

SEQ ID NO: 375079 - DNA, 19 bp, Homo sapiens
  siRNA target sequence for FLJ10895 (NM_019084.2,754-772).
catatggaactattattat

SEQ ID NO: 375080 - DNA, 19 bp, Homo sapiens
  siRNA target sequence for FLJ10895 (NM_019084.2,884-902).
gcttggaaaagactaaact

SEQ ID NO: 375081 - DNA, 19 bp, Homo sapiens
  siRNA target sequence for FLJ10895 (NM_019084.2,910-928).
gccaaatatgcagattact

SEQ ID NO: 375082 - DNA, 19 bp, Homo sapiens
  siRNA target sequence for FLJ10895 (NM_019084.2,911-929).
ccaaatatgcagattactt

SEQ ID NO: 375083 - DNA, 19 bp, Homo sapiens
  siRNA target sequence for FLJ10895 (NM_019084.2,964-982).
gtggcttcttcgaggatta

SEQ ID NO: 375084 - DNA, 19 bp, Homo sapiens
  siRNA target sequence for FLJ10895 (NM_019084.2,966-984).
ggcttcttcgaggattata

SEQ ID NO: 375085 - DNA, 19 bp, Homo sapiens
  siRNA target sequence for FLJ10895 (NM_019084.2,968-986).
cttcttcgaggattatact

SEQ ID NO: 375086 - DNA, 19 bp, Homo sapiens
  siRNA target sequence for FLJ10895 (NM_019084.2,1002-1020).
gtggcctacaagactacat

SEQ ID NO: 375087 - DNA, 19 bp, Homo sapiens
  siRNA target sequence for FLJ10895 (NM_019084.2,1030-1048).
gcctactcttgggatttct

SEQ ID NO: 375088 - DNA, 19 bp, Homo sapiens
  siRNA target sequence for FLJ10895 (NM_019084.2,1047-1065).
cttagtgcagtgtattgaa

SEQ ID NO: 375089 - DNA, 19 bp, Homo sapiens
  siRNA target sequence for FLJ10895 (NM_019084.2,1058-1076).
gtattgaacgactgttgat

SEQ ID NO: 375090 - DNA, 19 bp, Homo sapiens
  siRNA target sequence for FLJ10895 (NM_019084.2,1069-1087).
ctgttgatcgctcatgata

SEQ ID NO: 375091 - DNA, 19 bp, Homo sapiens
  siRNA target sequence for FLJ10895 (NM_019084.2,1074-1092).
gatcgctcatgataatgat

SEQ ID NO: 375092 - DNA, 19 bp, Homo sapiens
  siRNA target sequence for FLJ10895 (NM_019084.2,1129-1147).
cctcagtcagcgcaactaa

SEQ ID NO: 375093 - DNA, 19 bp, Homo sapiens
  siRNA target sequence for FLJ10895 (NM_019084.2,1134-1152).
gtcagcgcaactaagtgta

SEQ ID NO: 375094 - DNA, 19 bp, Homo sapiens
  siRNA target sequence for FLJ10895 (NM_019084.2,1136-1154).
cagcgcaactaagtgtatt

SEQ ID NO: 375095 - DNA, 19 bp, Homo sapiens
  siRNA target sequence for FLJ10895 (NM_019084.2,1262-1280).
caagctgtcagcagattgt

SEQ ID NO: 375096 - DNA, 19 bp, Homo sapiens
  siRNA target sequence for FLJ10895 (NM_019084.2,1450-1468).
gaacattacccttgtatta

SEQ ID NO: 375097 - DNA, 19 bp, Homo sapiens
  siRNA target sequence for FLJ10895 (NM_019084.2,1463-1481).
gtattactccatgttttga

SEQ ID NO: 375098 - DNA, 19 bp, Homo sapiens
  siRNA target sequence for FLJ20674 (NM_019086.2,343-361).
gctgggtcgccgtaggatt

SEQ ID NO: 375099 - DNA, 19 bp, Homo sapiens
  siRNA target sequence for FLJ20674 (NM_019086.2,358-376).
gattggaggctgttgtcat

SEQ ID NO: 375100 - DNA, 19 bp, Homo sapiens
  siRNA target sequence for FLJ20674 (NM_019086.2,474-492).
cttctctcgtccaactcta

SEQ ID NO: 375101 - DNA, 19 bp, Homo sapiens
  siRNA target sequence for FLJ20674 (NM_019086.2,753-771).
ccaccacccgtggttgaat

SEQ ID NO: 375102 - DNA, 19 bp, Homo sapiens
  siRNA target sequence for FLJ20674 (NM_019086.2,877-895).
cctgtttagccttgaatca

SEQ ID NO: 375103 - DNA, 19 bp, Homo sapiens
  siRNA target sequence for FLJ20674 (NM_019086.2,926-944).
cgagctcctggtctactat

SEQ ID NO: 375104 - DNA, 19 bp, Homo sapiens
  siRNA target sequence for FLJ20674 (NM_019086.2,1071-1089).
gtaatcgtggggaagtcaa

SEQ ID NO: 375105 - DNA, 19 bp, Homo sapiens
  siRNA target sequence for FLJ20674 (NM_019086.2,1122-1140).
ctgtcggatggcaagaagt

SEQ ID NO: 375106 - DNA, 19 bp, Homo sapiens
  siRNA target sequence for FLJ20674 (NM_019086.2,1147-1165).
gtgttacaagccacatagt

SEQ ID NO: 375107 - DNA, 19 bp, Homo sapiens
  siRNA target sequence for FLJ20674 (NM_019086.2,1251-1269).
ggcaatgtgacgcttacat

SEQ ID NO: 375108 - DNA, 19 bp, Homo sapiens
  siRNA target sequence for FLJ20674 (NM_019086.2,1548-1566).
ctgggactggccattatct

SEQ ID NO: 375109 - DNA, 19 bp, Homo sapiens
  siRNA target sequence for FLJ20674 (NM_019086.2,1567-1585).
cagggcttctgttgcatta

SEQ ID NO: 375110 - DNA, 19 bp, Homo sapiens
  siRNA target sequence for FLJ20674 (NM_019086.2,1618-1636).
cttccaggggacaaaacat

SEQ ID NO: 375111 - DNA, 19 bp, Homo sapiens
  siRNA target sequence for FLJ20674 (NM_019086.2,1742-1760).
ggagttgccaaaagaaata

SEQ ID NO: 375112 - DNA, 19 bp, Homo sapiens
  siRNA target sequence for FLJ20674 (NM_019086.2,1812-1830).
gaacagatgggaaatggat

SEQ ID NO: 375113 - DNA, 19 bp, Homo sapiens
  siRNA target sequence for FLJ20674 (NM_019086.2,1862-1880).
gcaaagtgacattgttcaa

SEQ ID NO: 375114 - DNA, 19 bp, Homo sapiens
  siRNA target sequence for FLJ20674 (NM_019086.2,1867-1885).
gtgacattgttcaagaaga

SEQ ID NO: 375115 - DNA, 19 bp, Homo sapiens
  siRNA target sequence for FLJ20051 (NM_019087.1,97-115).
gtctgatctccgaataact

SEQ ID NO: 375116 - DNA, 19 bp, Homo sapiens
  siRNA target sequence for FLJ20051 (NM_019087.1,120-138).
cgtttctgtacatggatta

SEQ ID NO: 375117 - DNA, 19 bp, Homo sapiens
  siRNA target sequence for FLJ20051 (NM_019087.1,174-192).
cacctgcacgaccagaata

SEQ ID NO: 375118 - DNA, 19 bp, Homo sapiens
  siRNA target sequence for FLJ20051 (NM_019087.1,177-195).
ctgcacgaccagaatatga

SEQ ID NO: 375119 - DNA, 19 bp, Homo sapiens
  siRNA target sequence for FLJ20051 (NM_019087.1,255-273).
gtgaaagccccgataacgt

SEQ ID NO: 375120 - DNA, 19 bp, Homo sapiens
  siRNA target sequence for FLJ20051 (NM_019087.1,277-295).
gtcgaccacaggttttagt

SEQ ID NO: 375121 - DNA, 19 bp, Homo sapiens
  siRNA target sequence for FLJ20051 (NM_019087.1,313-331).
ccagaatgccatcttgaat

SEQ ID NO: 375122 - DNA, 19 bp, Homo sapiens
  siRNA target sequence for FLJ20051 (NM_019087.1,341-359).
cttggaggggctgataaca

SEQ ID NO: 375123 - DNA, 19 bp, Homo sapiens
  siRNA target sequence for FLJ20051 (NM_019087.1,353-371).
gataacatccggaaatact

SEQ ID NO: 375124 - DNA, 19 bp, Homo sapiens
  siRNA target sequence for FLJ20051 (NM_019087.1,389-407).
ggatctcaaggggtaatat

SEQ ID NO: 375125 - DNA, 19 bp, Homo sapiens
  siRNA target sequence for FLJ20051 (NM_019087.1,399-417).
gggtaatatttgtattaga

SEQ ID NO: 375126 - DNA, 19 bp, Homo sapiens
  siRNA target sequence for FLJ20051 (NM_019087.1,422-440).
gcctcttcagaggatgatt

SEQ ID NO: 375127 - DNA, 19 bp, Homo sapiens
  siRNA target sequence for FLJ20051 (NM_019087.1,423-441).
cctcttcagaggatgattt

SEQ ID NO: 375128 - DNA, 19 bp, Homo sapiens
  siRNA target sequence for FLJ20051 (NM_019087.1,424-442).
ctcttcagaggatgattta

SEQ ID NO: 375129 - DNA, 19 bp, Homo sapiens
  siRNA target sequence for FLJ20051 (NM_019087.1,492-510).
gcactttaccctttttaat

SEQ ID NO: 375130 - DNA, 19 bp, Homo sapiens
  siRNA target sequence for FLJ20051 (NM_019087.1,540-558).
ctcgctcagtacaagagat

SEQ ID NO: 375131 - DNA, 19 bp, Homo sapiens
  siRNA target sequence for FLJ20051 (NM_019087.1,543-561).
gctcagtacaagagatcaa

SEQ ID NO: 375132 - DNA, 19 bp, Homo sapiens
  siRNA target sequence for FLJ20051 (NM_019087.1,661-679).
gctgattaatttgttagaa

SEQ ID NO: 375133 - DNA, 19 bp, Homo sapiens
  siRNA target sequence for FLJ20051 (NM_019087.1,689-707).
catgaagctgtaagaatgt

SEQ ID NO: 375134 - DNA, 19 bp, Homo sapiens
  siRNA target sequence for PD2 (NM_019088.1,322-340).
cgagtcaagtactgcaata

SEQ ID NO: 375135 - DNA, 19 bp, Homo sapiens
  siRNA target sequence for PD2 (NM_019088.1,335-353).
gcaatagcctccctgatat

SEQ ID NO: 375136 - DNA, 19 bp, Homo sapiens
  siRNA target sequence for PD2 (NM_019088.1,474-492).
caccatcgatctcatcaat

SEQ ID NO: 375137 - DNA, 19 bp, Homo sapiens
  siRNA target sequence for PD2 (NM_019088.1,504-522).
ccgcatcgaccccaatgtt

SEQ ID NO: 375138 - DNA, 19 bp, Homo sapiens
  siRNA target sequence for PD2 (NM_019088.1,507-525).
catcgaccccaatgttctt

SEQ ID NO: 375139 - DNA, 19 bp, Homo sapiens
  siRNA target sequence for PD2 (NM_019088.1,510-528).
cgaccccaatgttcttcta

SEQ ID NO: 375140 - DNA, 19 bp, Homo sapiens
  siRNA target sequence for PD2 (NM_019088.1,513-531).
ccccaatgttcttctagat

SEQ ID NO: 375141 - DNA, 19 bp, Homo sapiens
  siRNA target sequence for PD2 (NM_019088.1,622-640).
cgaaagacagagtacatct

SEQ ID NO: 375142 - DNA, 19 bp, Homo sapiens
  siRNA target sequence for PD2 (NM_019088.1,714-732).
gtttaccgaggaagaaata

SEQ ID NO: 375143 - DNA, 19 bp, Homo sapiens
  siRNA target sequence for PD2 (NM_019088.1,758-776).
cagccattgagaagacttt

SEQ ID NO: 375144 - DNA, 19 bp, Homo sapiens
  siRNA target sequence for PD2 (NM_019088.1,1024-1042).
gagacgttgaagaaacgaa

SEQ ID NO: 375145 - DNA, 19 bp, Homo sapiens
  siRNA target sequence for PD2 (NM_019088.1,1065-1083).
ggactatgcaccagatgat

SEQ ID NO: 375146 - DNA, 19 bp, Homo sapiens
  siRNA target sequence for PD2 (NM_019088.1,1075-1093).
ccagatgatgtgtatgact

SEQ ID NO: 375147 - DNA, 19 bp, Homo sapiens
  siRNA target sequence for PD2 (NM_019088.1,1177-1195).
gagggtgacggggtttact

SEQ ID NO: 375148 - DNA, 19 bp, Homo sapiens
  siRNA target sequence for PD2 (NM_019088.1,1180-1198).
ggtgacggggtttactaca

SEQ ID NO: 375149 - DNA, 19 bp, Homo sapiens
  siRNA target sequence for PD2 (NM_019088.1,1181-1199).
gtgacggggtttactacaa

SEQ ID NO: 375150 - DNA, 19 bp, Homo sapiens
  siRNA target sequence for PD2 (NM_019088.1,1186-1204).
ggggtttactacaatgagt

SEQ ID NO: 375151 - DNA, 19 bp, Homo sapiens
  siRNA target sequence for PD2 (NM_019088.1,1187-1205).
gggtttactacaatgagtt

SEQ ID NO: 375152 - DNA, 19 bp, Homo sapiens
  siRNA target sequence for PD2 (NM_019088.1,1211-1229).
ccagggtccgccttagtaa

SEQ ID NO: 375153 - DNA, 19 bp, Homo sapiens
  siRNA target sequence for PD2 (NM_019088.1,1269-1287).
cctgcttgtggtcaaacat

SEQ ID NO: 375154 - DNA, 19 bp, Homo sapiens
  siRNA target sequence for PD2 (NM_019088.1,1327-1345).
cggaaggcccagctagaaa

SEQ ID NO: 375155 - DNA, 19 bp, Homo sapiens
  siRNA target sequence for PD2 (NM_019088.1,1614-1632).
cgatgccgactctgatgat

SEQ ID NO: 375156 - DNA, 19 bp, Homo sapiens
  siRNA target sequence for KIAA1383 (NM_019090.1,89-107).
ggactgggtgcgtttggaa

SEQ ID NO: 375157 - DNA, 19 bp, Homo sapiens
  siRNA target sequence for KIAA1383 (NM_019090.1,520-538).
gacgtttccccctgcataa

SEQ ID NO: 375158 - DNA, 19 bp, Homo sapiens
  siRNA target sequence for KIAA1383 (NM_019090.1,738-756).
ccgctgggggagttagaaa

SEQ ID NO: 375159 - DNA, 19 bp, Homo sapiens
  siRNA target sequence for KIAA1383 (NM_019090.1,739-757).
cgctgggggagttagaaat

SEQ ID NO: 375160 - DNA, 19 bp, Homo sapiens
  siRNA target sequence for KIAA1383 (NM_019090.1,870-888).
ggcaatgggagaaatgtta

SEQ ID NO: 375161 - DNA, 19 bp, Homo sapiens
  siRNA target sequence for KIAA1383 (NM_019090.1,945-963).
cctcctttgtattacacta

SEQ ID NO: 375162 - DNA, 19 bp, Homo sapiens
  siRNA target sequence for KIAA1383 (NM_019090.1,1121-1139).
cgaacatcctccaatgctt

SEQ ID NO: 375163 - DNA, 19 bp, Homo sapiens
  siRNA target sequence for KIAA1383 (NM_019090.1,1160-1178).
gaatataggagcaactaat

SEQ ID NO: 375164 - DNA, 19 bp, Homo sapiens
  siRNA target sequence for KIAA1383 (NM_019090.1,1167-1185).
ggagcaactaatcaaacat

SEQ ID NO: 375165 - DNA, 19 bp, Homo sapiens
  siRNA target sequence for KIAA1383 (NM_019090.1,1194-1212).
gaacaaaatcgaattaata

SEQ ID NO: 375166 - DNA, 19 bp, Homo sapiens
  siRNA target sequence for KIAA1383 (NM_019090.1,1197-1215).
caaaatcgaattaatacaa

SEQ ID NO: 375167 - DNA, 19 bp, Homo sapiens
  siRNA target sequence for KIAA1383 (NM_019090.1,1232-1250).
gttaaatgctttgttagtt

SEQ ID NO: 375168 - DNA, 19 bp, Homo sapiens
  siRNA target sequence for KIAA1383 (NM_019090.1,1248-1266).
gttgagttgtccttgttat

SEQ ID NO: 375169 - DNA, 19 bp, Homo sapiens
  siRNA target sequence for KIAA1383 (NM_019090.1,1280-1298).
gacaagtcctgctcatata

SEQ ID NO: 375170 - DNA, 19 bp, Homo sapiens
  siRNA target sequence for KIAA1383 (NM_019090.1,1303-1321).
ctcacctagcctggttata

SEQ ID NO: 375171 - DNA, 19 bp, Homo sapiens
  siRNA target sequence for KIAA1383 (NM_019090.1,1305-1323).
cacctagcctggttatata

SEQ ID NO: 375172 - DNA, 19 bp, Homo sapiens
  siRNA target sequence for KIAA1383 (NM_019090.1,1337-1355).
gaagtcacccgaatcttct

SEQ ID NO: 375173 - DNA, 19 bp, Homo sapiens
  siRNA target sequence for KIAA1383 (NM_019090.1,1401-1419).
gtggggggatgtgaaaagt

SEQ ID NO: 375174 - DNA, 19 bp, Homo sapiens
  siRNA target sequence for KIAA1383 (NM_019090.1,1422-1440).
gtgagtcttcagtataaaa

SEQ ID NO: 375175 - DNA, 19 bp, Homo sapiens
  siRNA target sequence for KIAA1383 (NM_019090.1,1457-1475).
ctataaggaagataaatat

SEQ ID NO: 375176 - DNA, 19 bp, Homo sapiens
  siRNA target sequence for KIAA1383 (NM_019090.1,1486-1504).
gcagtggtgccctccataa

SEQ ID NO: 375177 - DNA, 19 bp, Homo sapiens
  siRNA target sequence for KIAA1383 (NM_019090.1,1523-1541).
gctactttatggcttaaca

SEQ ID NO: 375178 - DNA, 19 bp, Homo sapiens
  siRNA target sequence for KIAA1383 (NM_019090.1,1533-1551).
ggcttaacaaatacactaa

SEQ ID NO: 375179 - DNA, 19 bp, Homo sapiens
  siRNA target sequence for KIAA1383 (NM_019090.1,1546-1564).
cactaagactacgtttaaa

SEQ ID NO: 375180 - DNA, 19 bp, Homo sapiens
  siRNA target sequence for KIAA1383 (NM_019090.1,1583-1601).
gttggtggtacatgaaaaa

SEQ ID NO: 375181 - DNA, 19 bp, Homo sapiens
  siRNA target sequence for KIAA1383 (NM_019090.1,1586-1604).
ggtggtacatgaaaaaaga

SEQ ID NO: 375182 - DNA, 19 bp, Homo sapiens
  siRNA target sequence for KIAA1383 (NM_019090.1,1634-1652).
gttgggtacaaaattcaga

SEQ ID NO: 375183 - DNA, 19 bp, Homo sapiens
  siRNA target sequence for KIAA1383 (NM_019090.1,1637-1655).
gggtacaaaattcagaatt

SEQ ID NO: 375184 - DNA, 19 bp, Homo sapiens
  siRNA target sequence for KIAA1383 (NM_019090.1,1657-1675).
cgtcatccaaagttaaact

SEQ ID NO: 375185 - DNA, 19 bp, Homo sapiens
  siRNA target sequence for KIAA1383 (NM_019090.1,1707-1725).
caactgcctgaagataagt

SEQ ID NO: 375186 - DNA, 19 bp, Homo sapiens
  siRNA target sequence for KIAA1383 (NM_019090.1,1759-1777).
gtgatacctcaagacaaat

SEQ ID NO: 375187 - DNA, 19 bp, Homo sapiens
  siRNA target sequence for KIAA1383 (NM_019090.1,1761-1779).
gatacctcaagacaaatca

SEQ ID NO: 375188 - DNA, 19 bp, Homo sapiens
  siRNA target sequence for KIAA1383 (NM_019090.1,1791-1809).
gatgagcccagcacaagta

SEQ ID NO: 375189 - DNA, 19 bp, Homo sapiens
  siRNA target sequence for KIAA1383 (NM_019090.1,1844-1862).
gacagttgattgtagtaaa

SEQ ID NO: 375190 - DNA, 19 bp, Homo sapiens
  siRNA target sequence for KIAA1383 (NM_019090.1,1893-1911).
gttgtgagtcctgcaaatt

SEQ ID NO: 375191 - DNA, 19 bp, Homo sapiens
  siRNA target sequence for KIAA1383 (NM_019090.1,1927-1945).
ggcttacccctacaaatat

SEQ ID NO: 375192 - DNA, 19 bp, Homo sapiens
  siRNA target sequence for KIAA1383 (NM_019090.1,2012-2030).
cagaattgtagataaggaa

SEQ ID NO: 375193 - DNA, 19 bp, Homo sapiens
  siRNA target sequence for KIAA1383 (NM_019090.1,2043-2061).
caggtcaaaaccacagata

SEQ ID NO: 375194 - DNA, 19 bp, Homo sapiens
  siRNA target sequence for KIAA1383 (NM_019090.1,2045-2063).
ggtcaaaaccacagataat

SEQ ID NO: 375195 - DNA, 19 bp, Homo sapiens
  siRNA target sequence for KIAA1383 (NM_019090.1,2066-2084).
cattcttatggctgatata

SEQ ID NO: 375196 - DNA, 19 bp, Homo sapiens
  siRNA target sequence for KIAA1383 (NM_019090.1,2153-2171).
gtctagcccttgctattct

SEQ ID NO: 375197 - DNA, 19 bp, Homo sapiens
  siRNA target sequence for KIAA1383 (NM_019090.1,2155-2173).
ctagcccttgctattctga

SEQ ID NO: 375198 - DNA, 19 bp, Homo sapiens
  siRNA target sequence for KIAA1383 (NM_019090.1,2159-2177).
cccttgctattctgaagat

SEQ ID NO: 375199 - DNA, 19 bp, Homo sapiens
  siRNA target sequence for KIAA1383 (NM_019090.1,2161-2179).
cttgctattctgaagattt

SEQ ID NO: 375200 - DNA, 19 bp, Homo sapiens
  siRNA target sequence for KIAA1383 (NM_019090.1,2214-2232).
gctcatgatagcagttcaa

SEQ ID NO: 375201 - DNA, 19 bp, Homo sapiens
  siRNA target sequence for KIAA1383 (NM_019090.1,2256-2274).
caatatacaagcaagtcta

SEQ ID NO: 375202 - DNA, 19 bp, Homo sapiens
  siRNA target sequence for KIAA1383 (NM_019090.1,2305-2323).
gtagtgacaggagttctat

SEQ ID NO: 375203 - DNA, 19 bp, Homo sapiens
  siRNA target sequence for KIAA1383 (NM_019090.1,2353-2371).
ctgtacactcatacagaaa

SEQ ID NO: 375204 - DNA, 19 bp, Homo sapiens
  siRNA target sequence for KIAA1383 (NM_019090.1,2355-2373).
gtacactcatacagaaaat

SEQ ID NO: 375205 - DNA, 19 bp, Homo sapiens
  siRNA target sequence for KIAA1383 (NM_019090.1,2406-2424).
gaggaagcatctagtatct

SEQ ID NO: 375206 - DNA, 19 bp, Homo sapiens
  siRNA target sequence for KIAA1383 (NM_019090.1,2433-2451).
gatttatcttcaacacatt

SEQ ID NO: 375207 - DNA, 19 bp, Homo sapiens
  siRNA target sequence for KIAA1383 (NM_019090.1,2492-2510).
gcacaattctgaaattaca

SEQ ID NO: 375208 - DNA, 19 bp, Homo sapiens
  siRNA target sequence for KIAA1383 (NM_019090.1,2509-2527).
caaagagagctcaagacat

SEQ ID NO: 375209 - DNA, 19 bp, Homo sapiens
  siRNA target sequence for KIAA1383 (NM_019090.1,2517-2535).
gctcaagacatctctgtta

SEQ ID NO: 375210 - DNA, 19 bp, Homo sapiens
  siRNA target sequence for KIAA1383 (NM_019090.1,2528-2546).
ctctgttaaaacaagaagt

SEQ ID NO: 375211 - DNA, 19 bp, Homo sapiens
  siRNA target sequence for KIAA1383 (NM_019090.1,2584-2602).
catcccaggtgagttctta

SEQ ID NO: 375212 - DNA, 19 bp, Homo sapiens
  siRNA target sequence for KIAA1383 (NM_019090.1,2599-2617).
cttacctgccttcaaatgt

SEQ ID NO: 375213 - DNA, 19 bp, Homo sapiens
  siRNA target sequence for KIAA1383 (NM_019090.1,2631-2649).
gtcctggatagcagtacat

SEQ ID NO: 375214 - DNA, 19 bp, Homo sapiens
  siRNA target sequence for KIAA1383 (NM_019090.1,2633-2651).
cctggatagcagtacatca

SEQ ID NO: 375215 - DNA, 19 bp, Homo sapiens
  siRNA target sequence for KIAA1383 (NM_019090.1,2642-2660).
cagtacatcagatcacttt

SEQ ID NO: 375216 - DNA, 19 bp, Homo sapiens
  siRNA target sequence for KIAA1383 (NM_019090.1,2644-2662).
gtacatcagatcactttga

SEQ ID NO: 375217 - DNA, 19 bp, Homo sapiens
  siRNA target sequence for KIAA1383 (NM_019090.1,2647-2665).
catcagatcactttgaaga

SEQ ID NO: 375218 - DNA, 19 bp, Homo sapiens
  siRNA target sequence for KIAA1383 (NM_019090.1,2676-2694).
gatgttggttcactaaata

SEQ ID NO: 375219 - DNA, 19 bp, Homo sapiens
  siRNA target sequence for KIAA1383 (NM_019090.1,2679-2697).
gttggttcactaaatattt

SEQ ID NO: 375220 - DNA, 19 bp, Homo sapiens
  siRNA target sequence for KIAA1383 (NM_019090.1,2682-2700).
ggttcactaaatatttcca

SEQ ID NO: 375221 - DNA, 19 bp, Homo sapiens
  siRNA target sequence for KIAA1383 (NM_019090.1,2683-2701).
gttcactaaatatttccaa

SEQ ID NO: 375222 - DNA, 19 bp, Homo sapiens
  siRNA target sequence for KIAA1383 (NM_019090.1,2688-2706).
ctaaatatttccaagcaat

SEQ ID NO: 375223 - DNA, 19 bp, Homo sapiens
  siRNA target sequence for KIAA1383 (NM_019090.1,2739-2757).
cttccaggatacacaatgt

SEQ ID NO: 375224 - DNA, 19 bp, Homo sapiens
  siRNA target sequence for UGT1A3 (NM_019093.1,284-302).
gccacactcaactgtactt

SEQ ID NO: 375225 - DNA, 19 bp, Homo sapiens
  siRNA target sequence for UGT1A3 (NM_019093.1,288-306).
cactcaactgtactttgaa

SEQ ID NO: 375226 - DNA, 19 bp, Homo sapiens
  siRNA target sequence for LOC55924 (NM_019099.3,626-644).
gttaggggacaacgttttt

SEQ ID NO: 375227 - DNA, 19 bp, Homo sapiens
  siRNA target sequence for LOC55924 (NM_019099.3,772-790).
ccctgacagcaaacatctt

SEQ ID NO: 375228 - DNA, 19 bp, Homo sapiens
  siRNA target sequence for LOC55924 (NM_019099.3,919-937).
ccaagggctctggacattt

SEQ ID NO: 375229 - DNA, 19 bp, Homo sapiens
  siRNA target sequence for LOC55924 (NM_019099.3,1007-1025).
gcactcaccctcaggattt

SEQ ID NO: 375230 - DNA, 19 bp, Homo sapiens
  siRNA target sequence for F25965 (NM_019104.1,379-397).
ccgcagcgatccaacacat

SEQ ID NO: 375231 - DNA, 19 bp, Homo sapiens
  siRNA target sequence for F25965 (NM_019104.1,380-398).
cgcagcgatccaacacata

SEQ ID NO: 375232 - DNA, 19 bp, Homo sapiens
  siRNA target sequence for F25965 (NM_019104.1,381-399).
gcagcgatccaacacatat

SEQ ID NO: 375233 - DNA, 19 bp, Homo sapiens
  siRNA target sequence for F25965 (NM_019104.1,578-596).
gcaagagtcgtgatgtgta

SEQ ID NO: 375234 - DNA, 19 bp, Homo sapiens
  siRNA target sequence for F25965 (NM_019104.1,799-817).
cagcttcgttactcagaaa

SEQ ID NO: 375235 - DNA, 19 bp, Homo sapiens
  siRNA target sequence for C19orf10 (NM_019107.1,220-238).
gacaaatatacgtgtatgt

SEQ ID NO: 375236 - DNA, 19 bp, Homo sapiens
  siRNA target sequence for C19orf10 (NM_019107.1,337-355).
caggggaagtcctatctgt

SEQ ID NO: 375237 - DNA, 19 bp, Homo sapiens
  siRNA target sequence for C19orf10 (NM_019107.1,402-420).
cgccatggcctactctaaa

SEQ ID NO: 375238 - DNA, 19 bp, Homo sapiens
  siRNA target sequence for FLJ12886 (NM_019108.1,33-51).
gataggagatgaagtcaat

SEQ ID NO: 375239 - DNA, 19 bp, Homo sapiens
  siRNA target sequence for FLJ12886 (NM_019108.1,37-55).
ggagatgaagtcaatatat

SEQ ID NO: 375240 - DNA, 19 bp, Homo sapiens
  siRNA target sequence for FLJ12886 (NM_019108.1,38-56).
gagatgaagtcaatatatt

SEQ ID NO: 375241 - DNA, 19 bp, Homo sapiens
  siRNA target sequence for FLJ12886 (NM_019108.1,125-143).
gggactcagactcagattt

SEQ ID NO: 375242 - DNA, 19 bp, Homo sapiens
  siRNA target sequence for FLJ12886 (NM_019108.1,127-145).
gactcagactcagatttct

SEQ ID NO: 375243 - DNA, 19 bp, Homo sapiens
  siRNA target sequence for FLJ12886 (NM_019108.1,462-480).
cgtgggtcaggccaaacta

SEQ ID NO: 375244 - DNA, 19 bp, Homo sapiens
  siRNA target sequence for FLJ12886 (NM_019108.1,516-534).
ggtggatgaccagatgaat

SEQ ID NO: 375245 - DNA, 19 bp, Homo sapiens
  siRNA target sequence for FLJ12886 (NM_019108.1,517-535).
gtggatgaccagatgaatt

SEQ ID NO: 375246 - DNA, 19 bp, Homo sapiens
  siRNA target sequence for FLJ12886 (NM_019108.1,657-675).
ggaggaccagaggacttat

SEQ ID NO: 375247 - DNA, 19 bp, Homo sapiens
  siRNA target sequence for FLJ12886 (NM_019108.1,660-678).
ggaccagaggacttatgtt

SEQ ID NO: 375248 - DNA, 19 bp, Homo sapiens
  siRNA target sequence for FLJ12886 (NM_019108.1,661-679).
gaccagaggacttatgttt

SEQ ID NO: 375249 - DNA, 19 bp, Homo sapiens
  siRNA target sequence for FLJ12886 (NM_019108.1,726-744).
cagtggcatcgacttcttt

SEQ ID NO: 375250 - DNA, 19 bp, Homo sapiens
  siRNA target sequence for FLJ12886 (NM_019108.1,730-748).
ggcatcgacttctttatta

SEQ ID NO: 375251 - DNA, 19 bp, Homo sapiens
  siRNA target sequence for FLJ12886 (NM_019108.1,749-767).
cccaagaacggattgtttt

SEQ ID NO: 375252 - DNA, 19 bp, Homo sapiens
  siRNA target sequence for FLJ12886 (NM_019108.1,797-815).
ctatcctagaccatctcat

SEQ ID NO: 375253 - DNA, 19 bp, Homo sapiens
  siRNA target sequence for FLJ12886 (NM_019108.1,801-819).
cctagaccatctcatcaat

SEQ ID NO: 375254 - DNA, 19 bp, Homo sapiens
  siRNA target sequence for FLJ12886 (NM_019108.1,853-871).
ccccacacttacgttgaaa

SEQ ID NO: 375255 - DNA, 19 bp, Homo sapiens
  siRNA target sequence for FLJ12886 (NM_019108.1,854-872).
cccacacttacgttgaaat

SEQ ID NO: 375256 - DNA, 19 bp, Homo sapiens
  siRNA target sequence for FLJ12886 (NM_019108.1,909-927).
ctgccatgtggtgattgtt

SEQ ID NO: 375257 - DNA, 19 bp, Homo sapiens
  siRNA target sequence for FLJ12886 (NM_019108.1,911-929).
gccatgtggtgattgttgt

SEQ ID NO: 375258 - DNA, 19 bp, Homo sapiens
  siRNA target sequence for FLJ12886 (NM_019108.1,1235-1253).
gaactctgtccatgttaca

SEQ ID NO: 375259 - DNA, 19 bp, Homo sapiens
  siRNA target sequence for FLJ12886 (NM_019108.1,1290-1308).
ggactctgaggtcaactta

SEQ ID NO: 375260 - DNA, 19 bp, Homo sapiens
  siRNA target sequence for UBPH (NM_019116.1,43-61).
gacaccaccggaaaggatt

SEQ ID NO: 375261 - DNA, 19 bp, Homo sapiens
  siRNA target sequence for UBPH (NM_019116.1,47-65).
ccaccggaaaggattcatt

SEQ ID NO: 375262 - DNA, 19 bp, Homo sapiens
  siRNA target sequence for UBPH (NM_019116.1,57-75).
ggattcattcgggaacatt

SEQ ID NO: 375263 - DNA, 19 bp, Homo sapiens
  siRNA target sequence for UBPH (NM_019116.1,359-377).
cagccttgccccttaaagt

SEQ ID NO: 375264 - DNA, 19 bp, Homo sapiens
  siRNA target sequence for UBPH (NM_019116.1,534-552).
gaggcgggtctccatagaa

SEQ ID NO: 375265 - DNA, 19 bp, Homo sapiens
  siRNA target sequence for UBPH (NM_019116.1,646-664).
gagcggtgggtgttgtaca

SEQ ID NO: 375266 - DNA, 19 bp, Homo sapiens
  siRNA target sequence for UBPH (NM_019116.1,649-667).
cggtgggtgttgtacacaa

SEQ ID NO: 375267 - DNA, 19 bp, Homo sapiens
  siRNA target sequence for UBPH (NM_019116.1,655-673).
gtgttgtacacaatcatca

SEQ ID NO: 375268 - DNA, 19 bp, Homo sapiens
  siRNA target sequence for UBPH (NM_019116.1,928-946).
gtggacttgaagatcatct

SEQ ID NO: 375269 - DNA, 19 bp, Homo sapiens
  siRNA target sequence for UBPH (NM_019116.1,956-974).
ccaagcatgacgtgaagtt

SEQ ID NO: 375270 - DNA, 19 bp, Homo sapiens
  siRNA target sequence for UBPH (NM_019116.1,989-1007).
caggctccgagctgaaaca

SEQ ID NO: 375271 - DNA, 19 bp, Homo sapiens
  siRNA target sequence for UBPH (NM_019116.1,991-1009).
ggctccgagctgaaacaga

SEQ ID NO: 375272 - DNA, 19 bp, Homo sapiens
  siRNA target sequence for UBPH (NM_019116.1,992-1010).
gctccgagctgaaacagaa

SEQ ID NO: 375273 - DNA, 19 bp, Homo sapiens
  siRNA target sequence for UBPH (NM_019116.1,1006-1024).
cagaagatccactcgatta

SEQ ID NO: 375274 - DNA, 19 bp, Homo sapiens
  siRNA target sequence for UBPH (NM_019116.1,1008-1026).
gaagatccactcgattaca

SEQ ID NO: 375275 - DNA, 19 bp, Homo sapiens
  siRNA target sequence for UBPH (NM_019116.1,1068-1086).
cgtccccgaggataaaaca

SEQ ID NO: 375276 - DNA, 19 bp, Homo sapiens
  siRNA target sequence for UBPH (NM_019116.1,1069-1087).
gtccccgaggataaaacat

SEQ ID NO: 375277 - DNA, 19 bp, Homo sapiens
  siRNA target sequence for UBPH (NM_019116.1,1072-1090).
cccgaggataaaacattga

SEQ ID NO: 375278 - DNA, 19 bp, Homo sapiens
  siRNA target sequence for UBPH (NM_019116.1,1074-1092).
cgaggataaaacattgaga

SEQ ID NO: 375279 - DNA, 19 bp, Homo sapiens
  siRNA target sequence for UBPH (NM_019116.1,1128-1146).
ggttggctccaccatcaat

SEQ ID NO: 375280 - DNA, 19 bp, Homo sapiens
  siRNA target sequence for UBPH (NM_019116.1,1133-1151).
gctccaccatcaatgatgt

SEQ ID NO: 375281 - DNA, 19 bp, Homo sapiens
  siRNA target sequence for UBPH (NM_019116.1,1134-1152).
ctccaccatcaatgatgtt

SEQ ID NO: 375282 - DNA, 19 bp, Homo sapiens
  siRNA target sequence for UBPH (NM_019116.1,1137-1155).
caccatcaatgatgtttta

SEQ ID NO: 375283 - DNA, 19 bp, Homo sapiens
  siRNA target sequence for UBPH (NM_019116.1,1178-1196).
ctgcgcagcaggatgcaaa

SEQ ID NO: 375284 - DNA, 19 bp, Homo sapiens
  siRNA target sequence for UBPH (NM_019116.1,1321-1339).
ccgctgtccggcatgtaca

SEQ ID NO: 375285 - DNA, 19 bp, Homo sapiens
  siRNA target sequence for UBPH (NM_019116.1,1323-1341).
gctgtccggcatgtacaat

SEQ ID NO: 375286 - DNA, 19 bp, Homo sapiens
  siRNA target sequence for UBPH (NM_019116.1,1324-1342).
ctgtccggcatgtacaata

SEQ ID NO: 375287 - DNA, 19 bp, Homo sapiens
  siRNA target sequence for UBPH (NM_019116.1,1326-1344).
gtccggcatgtacaataaa

SEQ ID NO: 375288 - DNA, 19 bp, Homo sapiens
  siRNA target sequence for UBPH (NM_019116.1,1329-1347).
cggcatgtacaataaatct

SEQ ID NO: 375289 - DNA, 19 bp, Homo sapiens
  siRNA target sequence for UBPH (NM_019116.1,1361-1379).
gactcacctttaaactaga

SEQ ID NO: 375290 - DNA, 19 bp, Homo sapiens
  siRNA target sequence for UBPH (NM_019116.1,1425-1443).
gcccatgggctccataaaa

SEQ ID NO: 375291 - DNA, 19 bp, Homo sapiens
  siRNA target sequence for UBPH (NM_019116.1,1449-1467).
ggtcagtgaacctatcgaa

SEQ ID NO: 375292 - DNA, 19 bp, Homo sapiens
  siRNA target sequence for UBPH (NM_019116.1,1483-1501).
cacatgatggcgtttcagt

SEQ ID NO: 375293 - DNA, 19 bp, Homo sapiens
  siRNA target sequence for UBPH (NM_019116.1,1507-1525).
cccacggaagcctcttact

SEQ ID NO: 375294 - DNA, 19 bp, Homo sapiens
  siRNA target sequence for UBPH (NM_019116.1,1533-1551).
gtactgggttccaactcaa

SEQ ID NO: 375295 - DNA, 19 bp, Homo sapiens
  siRNA target sequence for UBPH (NM_019116.1,1538-1556).
gggttccaactcaatatgt

SEQ ID NO: 375296 - DNA, 19 bp, Homo sapiens
  siRNA target sequence for UBPH (NM_019116.1,1547-1565).
ctcaatatgtggatgcaat

SEQ ID NO: 375297 - DNA, 19 bp, Homo sapiens
  siRNA target sequence for RP4-622L5 (NM_019118.2,118-136).
gcctgcagcgggttcatga

SEQ ID NO: 375298 - DNA, 19 bp, Homo sapiens
  siRNA target sequence for RP4-622L5 (NM_019118.2,175-193).
ccctcttcttgaatactga

SEQ ID NO: 375299 - DNA, 19 bp, Homo sapiens
  siRNA target sequence for RP4-622L5 (NM_019118.2,223-241).
gtggatcccttctctatta

SEQ ID NO: 375300 - DNA, 19 bp, Homo sapiens
  siRNA target sequence for RP4-622L5 (NM_019118.2,226-244).
gatcccttctctattacct

SEQ ID NO: 375301 - DNA, 19 bp, Homo sapiens
  siRNA target sequence for RP4-622L5 (NM_019118.2,286-304).
gtaactctctggctatcat

SEQ ID NO: 375302 - DNA, 19 bp, Homo sapiens
  siRNA target sequence for RP4-622L5 (NM_019118.2,372-390).
gtgctcaccgtgataggaa

SEQ ID NO: 375303 - DNA, 19 bp, Homo sapiens
  siRNA target sequence for RP4-622L5 (NM_019118.2,374-392).
gctcaccgtgataggaatt

SEQ ID NO: 375304 - DNA, 19 bp, Homo sapiens
  siRNA target sequence for RP4-622L5 (NM_019118.2,375-393).
ctcaccgtgataggaattt

SEQ ID NO: 375305 - DNA, 19 bp, Homo sapiens
  siRNA target sequence for RP4-622L5 (NM_019118.2,377-395).
caccgtgataggaatttca

SEQ ID NO: 375306 - DNA, 19 bp, Homo sapiens
  siRNA target sequence for RP4-622L5 (NM_019118.2,379-397).
ccgtgataggaatttcact

SEQ ID NO: 375307 - DNA, 19 bp, Homo sapiens
  siRNA target sequence for LOC56181 (NM_019557.3,367-385).
ggctgctcgaagtgtagta

SEQ ID NO: 375308 - DNA, 19 bp, Homo sapiens
  siRNA target sequence for LOC56181 (NM_019557.3,368-386).
gctgctcgaagtgtagtaa

SEQ ID NO: 375309 - DNA, 19 bp, Homo sapiens
  siRNA target sequence for LOC56181 (NM_019557.3,371-389).
gctcgaagtgtagtaagaa

SEQ ID NO: 375310 - DNA, 19 bp, Homo sapiens
  siRNA target sequence for LOC56181 (NM_019557.3,374-392).
cgaagtgtagtaagaagaa

SEQ ID NO: 375311 - DNA, 19 bp, Homo sapiens
  siRNA target sequence for LOC56181 (NM_019557.3,584-602).
cccagccctctgattgtca

SEQ ID NO: 375312 - DNA, 19 bp, Homo sapiens
  siRNA target sequence for LOC56181 (NM_019557.3,727-745).
cagccagattgcaaagata

SEQ ID NO: 375313 - DNA, 19 bp, Homo sapiens
  siRNA target sequence for LOC56181 (NM_019557.3,729-747).
gccagattgcaaagatagt

SEQ ID NO: 375314 - DNA, 19 bp, Homo sapiens
  siRNA target sequence for LOC56181 (NM_019557.3,758-776).
gcagcttcggcttcattaa

SEQ ID NO: 375315 - DNA, 19 bp, Homo sapiens
  siRNA target sequence for LOC56181 (NM_019557.3,768-786).
cttcattaacgccagattt

SEQ ID NO: 375316 - DNA, 19 bp, Homo sapiens
  siRNA target sequence for LOC56181 (NM_019557.3,787-805).
cttatctccaggaagttca

SEQ ID NO: 375317 - DNA, 19 bp, Homo sapiens
  siRNA target sequence for LOC56181 (NM_019557.3,838-856).
ctcattccactctacaact

SEQ ID NO: 375318 - DNA, 19 bp, Homo sapiens
  siRNA target sequence for LOC56181 (NM_019557.3,948-966).
gttgcaaaccagaacacaa

SEQ ID NO: 375319 - DNA, 19 bp, Homo sapiens
  siRNA target sequence for LOC56181 (NM_019557.3,992-1010).
gatgactgcgtctctttgt

SEQ ID NO: 375320 - DNA, 19 bp, Homo sapiens
  siRNA target sequence for LOC56181 (NM_019557.3,1020-1038).
gcagctttgcagacatgat

SEQ ID NO: 375321 - DNA, 19 bp, Homo sapiens
  siRNA target sequence for LOC56181 (NM_019557.3,1151-1169).
gctctaaaggaagaagata

SEQ ID NO: 375322 - DNA, 19 bp, Homo sapiens
  siRNA target sequence for DKFZP761L0424 (NM_019590.1,267-285).
gagagaacttgtttatgca

SEQ ID NO: 375323 - DNA, 19 bp, Homo sapiens
  siRNA target sequence for DKFZP761L0424 (NM_019590.1,332-350).
caccccatgcgattccaaa

SEQ ID NO: 375324 - DNA, 19 bp, Homo sapiens
  siRNA target sequence for DKFZP761L0424 (NM_019590.1,334-352).
ccccatgcgattccaaatt

SEQ ID NO: 375325 - DNA, 19 bp, Homo sapiens
  siRNA target sequence for DKFZP761L0424 (NM_019590.1,390-408).
ctccccgtccagaattcct

SEQ ID NO: 375326 - DNA, 19 bp, Homo sapiens
  siRNA target sequence for DKFZP761L0424 (NM_019590.1,392-410).
ccccgtccagaattcctta

SEQ ID NO: 375327 - DNA, 19 bp, Homo sapiens
  siRNA target sequence for DKFZP761L0424 (NM_019590.1,393-411).
cccgtccagaattccttat

SEQ ID NO: 375328 - DNA, 19 bp, Homo sapiens
  siRNA target sequence for DKFZP761L0424 (NM_019590.1,549-567).
catgagtggcaaaaacatt

SEQ ID NO: 375329 - DNA, 19 bp, Homo sapiens
  siRNA target sequence for DKFZP761L0424 (NM_019590.1,576-594).
cagaaatgagggtttctat

SEQ ID NO: 375330 - DNA, 19 bp, Homo sapiens
  siRNA target sequence for DKFZP761L0424 (NM_019590.1,591-609).
ctatgctgatccttacctt

SEQ ID NO: 375331 - DNA, 19 bp, Homo sapiens
  siRNA target sequence for DKFZP761L0424 (NM_019590.1,667-685).
cccgaccacatcattgcat

SEQ ID NO: 375332 - DNA, 19 bp, Homo sapiens
  siRNA target sequence for DKFZP761L0424 (NM_019590.1,668-686).
ccgaccacatcattgcata

SEQ ID NO: 375333 - DNA, 19 bp, Homo sapiens
  siRNA target sequence for DKFZP761L0424 (NM_019590.1,702-720).
ccggtcagcgagtgcttat

SEQ ID NO: 375334 - DNA, 19 bp, Homo sapiens
  siRNA target sequence for DKFZP761L0424 (NM_019590.1,703-721).
cggtcagcgagtgcttatt

SEQ ID NO: 375335 - DNA, 19 bp, Homo sapiens
  siRNA target sequence for DKFZP761L0424 (NM_019590.1,705-723).
gtcagcgagtgcttattgt

SEQ ID NO: 375336 - DNA, 19 bp, Homo sapiens
  siRNA target sequence for DKFZP761L0424 (NM_019590.1,707-725).
cagcgagtgcttattgtaa

SEQ ID NO: 375337 - DNA, 19 bp, Homo sapiens
  siRNA target sequence for DKFZP761L0424 (NM_019590.1,731-749).
caatgcaagcggaaatgca

SEQ ID NO: 375338 - DNA, 19 bp, Homo sapiens
  siRNA target sequence for DKFZP761L0424 (NM_019590.1,853-871).
gacctgaggatgatagaca

SEQ ID NO: 375339 - DNA, 19 bp, Homo sapiens
  siRNA target sequence for DKFZP761L0424 (NM_019590.1,932-950).
cgagccgccaggcctttaa

SEQ ID NO: 375340 - DNA, 19 bp, Homo sapiens
  siRNA target sequence for DKFZP761L0424 (NM_019590.1,933-951).
gagccgccaggcctttaaa

SEQ ID NO: 375341 - DNA, 19 bp, Homo sapiens
  siRNA target sequence for DKFZP761L0424 (NM_019590.1,935-953).
gccgccaggcctttaaaaa

SEQ ID NO: 375342 - DNA, 19 bp, Homo sapiens
  siRNA target sequence for DKFZP761L0424 (NM_019590.1,938-956).
gccaggcctttaaaaagga

SEQ ID NO: 375343 - DNA, 19 bp, Homo sapiens
  siRNA target sequence for DKFZP761L0424 (NM_019590.1,958-976).
ccaggcaccttggtgtata

SEQ ID NO: 375344 - DNA, 19 bp, Homo sapiens
  siRNA target sequence for DKFZP761L0424 (NM_019590.1,959-977).
caggcaccttggtgtatat

SEQ ID NO: 375345 - DNA, 19 bp, Homo sapiens
  siRNA target sequence for DKFZP761L0424 (NM_019590.1,962-980).
gcaccttggtgtatataga

SEQ ID NO: 375346 - DNA, 19 bp, Homo sapiens
  siRNA target sequence for DKFZP761L0424 (NM_019590.1,965-983).
ccttggtgtatatagaaaa

SEQ ID NO: 375347 - DNA, 19 bp, Homo sapiens
  siRNA target sequence for DKFZP761L0424 (NM_019590.1,1001-1019).
gattatccagccttgtaga

SEQ ID NO: 375348 - DNA, 19 bp, Homo sapiens
  siRNA target sequence for DKFZP761L0424 (NM_019590.1,1056-1074).
ctacagcacggcgacaata

SEQ ID NO: 375349 - DNA, 19 bp, Homo sapiens
  siRNA target sequence for DKFZP761L0424 (NM_019590.1,1066-1084).
gcgacaatacccaaagaca

SEQ ID NO: 375350 - DNA, 19 bp, Homo sapiens
  siRNA target sequence for DKFZP761L0424 (NM_019590.1,1485-1503).
gtgcgagttggaagacttt

SEQ ID NO: 375351 - DNA, 19 bp, Homo sapiens
  siRNA target sequence for DKFZP761L0424 (NM_019590.1,1535-1553).
ccagccgattggttactct

SEQ ID NO: 375352 - DNA, 19 bp, Homo sapiens
  siRNA target sequence for DKFZP761L0424 (NM_019590.1,1805-1823).
cccaagccgcacagtacat

SEQ ID NO: 375353 - DNA, 19 bp, Homo sapiens
  siRNA target sequence for DKFZP761L0424 (NM_019590.1,1816-1834).
cagtacatggctatggaaa

SEQ ID NO: 375354 - DNA, 19 bp, Homo sapiens
  siRNA target sequence for DKFZP761L0424 (NM_019590.1,2140-2158).
gccatgcagagcttgttca

SEQ ID NO: 375355 - DNA, 19 bp, Homo sapiens
  siRNA target sequence for DKFZP761L0424 (NM_019590.1,2237-2255).
ggcaaaatctggatcacta

SEQ ID NO: 375356 - DNA, 19 bp, Homo sapiens
  siRNA target sequence for DKFZP761L0424 (NM_019590.1,2238-2256).
gcaaaatctggatcactat

SEQ ID NO: 375357 - DNA, 19 bp, Homo sapiens
  siRNA target sequence for DKFZP761L0424 (NM_019590.1,2287-2305).
gaagctcaggccaatatca

SEQ ID NO: 375358 - DNA, 19 bp, Homo sapiens
  siRNA target sequence for DKFZP761L0424 (NM_019590.1,2290-2308).
gctcaggccaatatcatga

SEQ ID NO: 375359 - DNA, 19 bp, Homo sapiens
  siRNA target sequence for DKFZP761L0424 (NM_019590.1,2291-2309).
ctcaggccaatatcatgaa

SEQ ID NO: 375360 - DNA, 19 bp, Homo sapiens
  siRNA target sequence for DKFZP761L0424 (NM_019590.1,2304-2322).
catgaagtcaataccaaat

SEQ ID NO: 375361 - DNA, 19 bp, Homo sapiens
  siRNA target sequence for DKFZP761L0424 (NM_019590.1,2783-2801).
gggctgacagtcacgttaa

SEQ ID NO: 375362 - DNA, 19 bp, Homo sapiens
  siRNA target sequence for DKFZP761L0424 (NM_019590.1,2784-2802).
ggctgacagtcacgttaaa

SEQ ID NO: 375363 - DNA, 19 bp, Homo sapiens
  siRNA target sequence for DKFZP761L0424 (NM_019590.1,2872-2890).
cggaaatctgatgttgaat

SEQ ID NO: 375364 - DNA, 19 bp, Homo sapiens
  siRNA target sequence for DKFZP761L0424 (NM_019590.1,2903-2921).
cccaaatggaattccaaaa

SEQ ID NO: 375365 - DNA, 19 bp, Homo sapiens
  siRNA target sequence for DKFZP761L0424 (NM_019590.1,2969-2987).
gaggaatggagaatagtat

SEQ ID NO: 375366 - DNA, 19 bp, Homo sapiens
  siRNA target sequence for DKFZP761L0424 (NM_019590.1,2995-3013).
gcatcaagaacatcagaat

SEQ ID NO: 375367 - DNA, 19 bp, Homo sapiens
  siRNA target sequence for DKFZP761L0424 (NM_019590.1,3036-3054).
ggaaaattccatatccaat

SEQ ID NO: 375368 - DNA, 19 bp, Homo sapiens
  siRNA target sequence for DKFZP761L0424 (NM_019590.1,3037-3055).
gaaaattccatatccaata

SEQ ID NO: 375369 - DNA, 19 bp, Homo sapiens
  siRNA target sequence for RNF20 (NM_019592.5,156-174).
ggcagctgttgaagattca

SEQ ID NO: 375370 - DNA, 19 bp, Homo sapiens
  siRNA target sequence for RNF20 (NM_019592.5,212-230).
cttcaacggaggaactaga

SEQ ID NO: 375371 - DNA, 19 bp, Homo sapiens
  siRNA target sequence for RNF20 (NM_019592.5,215-233).
caacggaggaactagacat

SEQ ID NO: 375372 - DNA, 19 bp, Homo sapiens
  siRNA target sequence for RNF20 (NM_019592.5,219-237).
ggaggaactagacattaga

SEQ ID NO: 375373 - DNA, 19 bp, Homo sapiens
  siRNA target sequence for RNF20 (NM_019592.5,256-274).
cgcaagctggcagaaatgt

SEQ ID NO: 375374 - DNA, 19 bp, Homo sapiens
  siRNA target sequence for RNF20 (NM_019592.5,257-275).
gcaagctggcagaaatgtt

SEQ ID NO: 375375 - DNA, 19 bp, Homo sapiens
  siRNA target sequence for RNF20 (NM_019592.5,344-362).
ctgatgatgcctcactatt

SEQ ID NO: 375376 - DNA, 19 bp, Homo sapiens
  siRNA target sequence for RNF20 (NM_019592.5,352-370).
gcctcactattgattgtca

SEQ ID NO: 375377 - DNA, 19 bp, Homo sapiens
  siRNA target sequence for RNF20 (NM_019592.5,372-390).
ccgatactggagtcagttt

SEQ ID NO: 375378 - DNA, 19 bp, Homo sapiens
  siRNA target sequence for RNF20 (NM_019592.5,374-392).
gatactggagtcagtttga

SEQ ID NO: 375379 - DNA, 19 bp, Homo sapiens
  siRNA target sequence for RNF20 (NM_019592.5,402-420).
ccgtatcatccttaaacgt

SEQ ID NO: 375380 - DNA, 19 bp, Homo sapiens
  siRNA target sequence for RNF20 (NM_019592.5,403-421).
cgtatcatccttaaacgtt

SEQ ID NO: 375381 - DNA, 19 bp, Homo sapiens
  siRNA target sequence for RNF20 (NM_019592.5,404-422).
gtatcatccttaaacgtta

SEQ ID NO: 375382 - DNA, 19 bp, Homo sapiens
  siRNA target sequence for RNF20 (NM_019592.5,408-426).
catccttaaacgttatgat

SEQ ID NO: 375383 - DNA, 19 bp, Homo sapiens
  siRNA target sequence for RNF20 (NM_019592.5,447-465).
cctactcacagaacgaaaa

SEQ ID NO: 375384 - DNA, 19 bp, Homo sapiens
  siRNA target sequence for RNF20 (NM_019592.5,503-521).
gcaatcaggagcgtaaaga

SEQ ID NO: 375385 - DNA, 19 bp, Homo sapiens
  siRNA target sequence for RNF20 (NM_019592.5,638-656).
gagccgtgtcccagattgt

SEQ ID NO: 375386 - DNA, 19 bp, Homo sapiens
  siRNA target sequence for RNF20 (NM_019592.5,705-723).
gctaaacagtggagataat

SEQ ID NO: 375387 - DNA, 19 bp, Homo sapiens
  siRNA target sequence for RNF20 (NM_019592.5,763-781).
ctcgcacaggagaatatga

SEQ ID NO: 375388 - DNA, 19 bp, Homo sapiens
  siRNA target sequence for RNF20 (NM_019592.5,840-858).
ctccaagttgcagagtaaa

SEQ ID NO: 375389 - DNA, 19 bp, Homo sapiens
  siRNA target sequence for RNF20 (NM_019592.5,888-906).
cctggagtccatgattgat

SEQ ID NO: 375390 - DNA, 19 bp, Homo sapiens
  siRNA target sequence for RNF20 (NM_019592.5,912-930).
gcagtgggatattgacaaa

SEQ ID NO: 375391 - DNA, 19 bp, Homo sapiens
  siRNA target sequence for RNF20 (NM_019592.5,913-931).
cagtgggatattgacaaaa

SEQ ID NO: 375392 - DNA, 19 bp, Homo sapiens
  siRNA target sequence for RNF20 (NM_019592.5,948-966).
gcgactcaaccgacactta

SEQ ID NO: 375393 - DNA, 19 bp, Homo sapiens
  siRNA target sequence for RNF20 (NM_019592.5,973-991).
gtcctagaacgggtgaatt

SEQ ID NO: 375394 - DNA, 19 bp, Homo sapiens
  siRNA target sequence for RNF20 (NM_019592.5,976-994).
ctagaacgggtgaattcca

SEQ ID NO: 375395 - DNA, 19 bp, Homo sapiens
  siRNA target sequence for RNF20 (NM_019592.5,982-1000).
cgggtgaattccaaaggtt

SEQ ID NO: 375396 - DNA, 19 bp, Homo sapiens
  siRNA target sequence for RNF20 (NM_019592.5,1029-1047).
gtatggcggcacaatcact

SEQ ID NO: 375397 - DNA, 19 bp, Homo sapiens
  siRNA target sequence for RNF20 (NM_019592.5,1033-1051).
ggcggcacaatcactatca

SEQ ID NO: 375398 - DNA, 19 bp, Homo sapiens
  siRNA target sequence for RNF20 (NM_019592.5,1034-1052).
gcggcacaatcactatcaa

SEQ ID NO: 375399 - DNA, 19 bp, Homo sapiens
  siRNA target sequence for RNF20 (NM_019592.5,1035-1053).
cggcacaatcactatcaat

SEQ ID NO: 375400 - DNA, 19 bp, Homo sapiens
  siRNA target sequence for RNF20 (NM_019592.5,1131-1149).
gaaacttcggcaagacttt

SEQ ID NO: 375401 - DNA, 19 bp, Homo sapiens
  siRNA target sequence for RNF20 (NM_019592.5,1155-1173).
ggtcactacacaaaatgaa

SEQ ID NO: 375402 - DNA, 19 bp, Homo sapiens
  siRNA target sequence for RNF20 (NM_019592.5,1199-1217).
cagtggagcaagtcgttaa

SEQ ID NO: 375403 - DNA, 19 bp, Homo sapiens
  siRNA target sequence for RNF20 (NM_019592.5,1204-1222).
gagcaagtcgttaaggaaa

SEQ ID NO: 375404 - DNA, 19 bp, Homo sapiens
  siRNA target sequence for RNF20 (NM_019592.5,1247-1265).
cacagttctccgtcttgta

SEQ ID NO: 375405 - DNA, 19 bp, Homo sapiens
  siRNA target sequence for RNF20 (NM_019592.5,1249-1267).
cagttctccgtcttgtata

SEQ ID NO: 375406 - DNA, 19 bp, Homo sapiens
  siRNA target sequence for RNF20 (NM_019592.5,1251-1269).
gttctccgtcttgtataat

SEQ ID NO: 375407 - DNA, 19 bp, Homo sapiens
  siRNA target sequence for RNF20 (NM_019592.5,1341-1359).
gcaccaggttgagcttatt

SEQ ID NO: 375408 - DNA, 19 bp, Homo sapiens
  siRNA target sequence for RNF20 (NM_019592.5,1362-1380).
gcgagatgaggttagtctt

SEQ ID NO: 375409 - DNA, 19 bp, Homo sapiens
  siRNA target sequence for RNF20 (NM_019592.5,1366-1384).
gatgaggttagtcttcata

SEQ ID NO: 375410 - DNA, 19 bp, Homo sapiens
  siRNA target sequence for RNF20 (NM_019592.5,1369-1387).
gaggttagtcttcataaga

SEQ ID NO: 375411 - DNA, 19 bp, Homo sapiens
  siRNA target sequence for RNF20 (NM_019592.5,1492-1510).
caagcaggccctataaaca

SEQ ID NO: 375412 - DNA, 19 bp, Homo sapiens
  siRNA target sequence for RNF20 (NM_019592.5,1648-1666).
ctgcagtcccagtctagta

SEQ ID NO: 375413 - DNA, 19 bp, Homo sapiens
  siRNA target sequence for RNF20 (NM_019592.5,1650-1668).
gcagtcccagtctagtact

SEQ ID NO: 375414 - DNA, 19 bp, Homo sapiens
  siRNA target sequence for RNF20 (NM_019592.5,1692-1710).
ggagctaaaaccagattct

SEQ ID NO: 375415 - DNA, 19 bp, Homo sapiens
  siRNA target sequence for RNF20 (NM_019592.5,1702-1720).
ccagattctgaggacttat

SEQ ID NO: 375416 - DNA, 19 bp, Homo sapiens
  siRNA target sequence for RNF20 (NM_019592.5,1705-1723).
gattctgaggacttatcct

SEQ ID NO: 375417 - DNA, 19 bp, Homo sapiens
  siRNA target sequence for RNF20 (NM_019592.5,1773-1791).
gtctaaacgggatgaagaa

SEQ ID NO: 375418 - DNA, 19 bp, Homo sapiens
  siRNA target sequence for RNF20 (NM_019592.5,1901-1919).
gagattctgctaaggataa

SEQ ID NO: 375419 - DNA, 19 bp, Homo sapiens
  siRNA target sequence for RNF20 (NM_019592.5,2083-2101).
gcagctgagaagaagtcta

SEQ ID NO: 375420 - DNA, 19 bp, Homo sapiens
  siRNA target sequence for RNF20 (NM_019592.5,2389-2407).
cgtatcaagtccaatcaga

SEQ ID NO: 375421 - DNA, 19 bp, Homo sapiens
  siRNA target sequence for RNF20 (NM_019592.5,2390-2408).
gtatcaagtccaatcagat

SEQ ID NO: 375422 - DNA, 19 bp, Homo sapiens
  siRNA target sequence for RNF20 (NM_019592.5,2404-2422).
cagatccataagttgctta

SEQ ID NO: 375423 - DNA, 19 bp, Homo sapiens
  siRNA target sequence for RNF20 (NM_019592.5,2479-2497).
gcccagctacaggtagtaa

SEQ ID NO: 375424 - DNA, 19 bp, Homo sapiens
  siRNA target sequence for RNF20 (NM_019592.5,2798-2816).
ccaagtgtgatgagattct

SEQ ID NO: 375425 - DNA, 19 bp, Homo sapiens
  siRNA target sequence for RNF20 (NM_019592.5,2852-2870).
cctgtccgtgctgtaacat

SEQ ID NO: 375426 - DNA, 19 bp, Homo sapiens
  siRNA target sequence for RNF20 (NM_019592.5,2861-2879).
gctgtaacatgcgtaaaaa

SEQ ID NO: 375427 - DNA, 19 bp, Homo sapiens
  siRNA target sequence for RNF20 (NM_019592.5,2881-2899).
gatgctgttcttactaagt

SEQ ID NO: 375428 - DNA, 19 bp, Homo sapiens
  siRNA target sequence for RNF20 (NM_019592.5,2953-2971).
cgcaaatgtcccaagtgta

SEQ ID NO: 375429 - DNA, 19 bp, Homo sapiens
  siRNA target sequence for RNF20 (NM_019592.5,2964-2982).
caagtgtaatgctgctttt

SEQ ID NO: 375430 - DNA, 19 bp, Homo sapiens
  siRNA target sequence for RNF20 (NM_019592.5,2992-3010).
gattttcatcgcatctaca

SEQ ID NO: 375431 - DNA, 19 bp, Homo sapiens
  siRNA target sequence for LRRC8 (NM_019594.1,320-338).
cggcgctccctcaagaagt

SEQ ID NO: 375432 - DNA, 19 bp, Homo sapiens
  siRNA target sequence for LRRC8 (NM_019594.1,321-339).
ggcgctccctcaagaagta

SEQ ID NO: 375433 - DNA, 19 bp, Homo sapiens
  siRNA target sequence for LRRC8 (NM_019594.1,718-736).
ccacacagcggccaagatt

SEQ ID NO: 375434 - DNA, 19 bp, Homo sapiens
  siRNA target sequence for LRRC8 (NM_019594.1,721-739).
cacagcggccaagattgaa

SEQ ID NO: 375435 - DNA, 19 bp, Homo sapiens
  siRNA target sequence for LRRC8 (NM_019594.1,776-794).
gcgctgcacatcaagttca

SEQ ID NO: 375436 - DNA, 19 bp, Homo sapiens
  siRNA target sequence for LRRC8 (NM_019594.1,935-953).
cggctcaagagcaacctaa

SEQ ID NO: 375437 - DNA, 19 bp, Homo sapiens
  siRNA target sequence for BTNL2 (NM_019602.1,127-145).
ggggaagatgccctgttaa

SEQ ID NO: 375438 - DNA, 19 bp, Homo sapiens
  siRNA target sequence for BTNL2 (NM_019602.1,130-148).
gaagatgccctgttaacct

SEQ ID NO: 375439 - DNA, 19 bp, Homo sapiens
  siRNA target sequence for BTNL2 (NM_019602.1,302-320).
gcattgcaaagggaaatgt

SEQ ID NO: 375440 - DNA, 19 bp, Homo sapiens
  siRNA target sequence for BTNL2 (NM_019602.1,319-337).
gtggcactgaagatacaca

SEQ ID NO: 375441 - DNA, 19 bp, Homo sapiens
  siRNA target sequence for BTNL2 (NM_019602.1,404-422).
caagcttgctgctcaaagt

SEQ ID NO: 375442 - DNA, 19 bp, Homo sapiens
  siRNA target sequence for BTNL2 (NM_019602.1,865-883).
cctgctgtgcatgtgtata

SEQ ID NO: 375443 - DNA, 19 bp, Homo sapiens
  siRNA target sequence for BTNL2 (NM_019602.1,968-986).
gactgaccctgcagatact

SEQ ID NO: 375444 - DNA, 19 bp, Homo sapiens
  siRNA target sequence for BTNL2 (NM_019602.1,1014-1032).
gtaccgctgcctttttgaa

SEQ ID NO: 375445 - DNA, 19 bp, Homo sapiens
  siRNA target sequence for BTNL2 (NM_019602.1,1134-1152).
gccgatgtgctcttcagat

SEQ ID NO: 375446 - DNA, 19 bp, Homo sapiens
  siRNA target sequence for BTNL2 (NM_019602.1,1252-1270).
cacgtgcagacattgctaa

SEQ ID NO: 375447 - DNA, 19 bp, Homo sapiens
  siRNA target sequence for BTNL2 (NM_019602.1,1332-1350).
ggagaaaatcgcaactttt

SEQ ID NO: 375448 - DNA, 19 bp, Homo sapiens
  siRNA target sequence for CRTAM (NM_019604.1,91-109).
ggccagacgctcactctaa

SEQ ID NO: 375449 - DNA, 19 bp, Homo sapiens
  siRNA target sequence for CRTAM (NM_019604.1,94-112).
cagacgctcactctaaagt

SEQ ID NO: 375450 - DNA, 19 bp, Homo sapiens
  siRNA target sequence for CRTAM (NM_019604.1,96-114).
gacgctcactctaaagtgt

SEQ ID NO: 375451 - DNA, 19 bp, Homo sapiens
  siRNA target sequence for CRTAM (NM_019604.1,246-264).
catcactgtgcctaacgta

SEQ ID NO: 375452 - DNA, 19 bp, Homo sapiens
  siRNA target sequence for CRTAM (NM_019604.1,261-279).
cgtaaccctgcaagatgaa

SEQ ID NO: 375453 - DNA, 19 bp, Homo sapiens
  siRNA target sequence for CRTAM (NM_019604.1,283-301).
gtgtacaagtgcttacatt

SEQ ID NO: 375454 - DNA, 19 bp, Homo sapiens
  siRNA target sequence for CRTAM (NM_019604.1,298-316).
cattacagcgactctgtaa

SEQ ID NO: 375455 - DNA, 19 bp, Homo sapiens
  siRNA target sequence for CRTAM (NM_019604.1,367-385).
ctggaagcttcagttatca

SEQ ID NO: 375456 - DNA, 19 bp, Homo sapiens
  siRNA target sequence for CRTAM (NM_019604.1,369-387).
ggaagcttcagttatcaga

SEQ ID NO: 375457 - DNA, 19 bp, Homo sapiens
  siRNA target sequence for CRTAM (NM_019604.1,461-479).
ggctacttgggaatagcat

SEQ ID NO: 375458 - DNA, 19 bp, Homo sapiens
  siRNA target sequence for CRTAM (NM_019604.1,498-516).
gctccatgaatttgaaact

SEQ ID NO: 375459 - DNA, 19 bp, Homo sapiens
  siRNA target sequence for CRTAM (NM_019604.1,520-538).
gggaagaaatgtaatacta

SEQ ID NO: 375460 - DNA, 19 bp, Homo sapiens
  siRNA target sequence for CRTAM (NM_019604.1,536-554).
ctaccagcactctcataat

SEQ ID NO: 375461 - DNA, 19 bp, Homo sapiens
  siRNA target sequence for CRTAM (NM_019604.1,539-557).
ccagcactctcataatcca

SEQ ID NO: 375462 - DNA, 19 bp, Homo sapiens
  siRNA target sequence for CRTAM (NM_019604.1,545-563).
ctctcataatccacactta

SEQ ID NO: 375463 - DNA, 19 bp, Homo sapiens
  siRNA target sequence for CRTAM (NM_019604.1,555-573).
ccacacttatggcaaaaat

SEQ ID NO: 375464 - DNA, 19 bp, Homo sapiens
  siRNA target sequence for CRTAM (NM_019604.1,606-624).
cctgcaagggagaaaacta

SEQ ID NO: 375465 - DNA, 19 bp, Homo sapiens
  siRNA target sequence for CRTAM (NM_019604.1,632-650).
ccttccggtttgaagattt

SEQ ID NO: 375466 - DNA, 19 bp, Homo sapiens
  siRNA target sequence for CRTAM (NM_019604.1,733-751).
gtctcagtaacggaagatt

SEQ ID NO: 375467 - DNA, 19 bp, Homo sapiens
  siRNA target sequence for CRTAM (NM_019604.1,735-753).
ctcagtaacggaagattct

SEQ ID NO: 375468 - DNA, 19 bp, Homo sapiens
  siRNA target sequence for CRTAM (NM_019604.1,739-757).
gtaacggaagattctagta

SEQ ID NO: 375469 - DNA, 19 bp, Homo sapiens
  siRNA target sequence for CRTAM (NM_019604.1,752-770).
ctagtacatcggagattga

SEQ ID NO: 375470 - DNA, 19 bp, Homo sapiens
  siRNA target sequence for CRTAM (NM_019604.1,807-825).
cttgaccaccgaagcaaat

SEQ ID NO: 375471 - DNA, 19 bp, Homo sapiens
  siRNA target sequence for CRTAM (NM_019604.1,816-834).
cgaagcaaatcctcagtat

SEQ ID NO: 375472 - DNA, 19 bp, Homo sapiens
  siRNA target sequence for CRTAM (NM_019604.1,982-1000).
cacacactagaaagttaca

SEQ ID NO: 375473 - DNA, 19 bp, Homo sapiens
  siRNA target sequence for CRTAM (NM_019604.1,999-1017).
cagatcaaggtcaaataat

SEQ ID NO: 375474 - DNA, 19 bp, Homo sapiens
  siRNA target sequence for CRTAM (NM_019604.1,1001-1019).
gatcaaggtcaaataatga

SEQ ID NO: 375475 - DNA, 19 bp, Homo sapiens
  siRNA target sequence for CRTAM (NM_019604.1,1060-1078).
cctatgcgttgcatgaact

SEQ ID NO: 375476 - DNA, 19 bp, Homo sapiens
  siRNA target sequence for CRTAM (NM_019604.1,1061-1079).
ctatgcgttgcatgaacta

SEQ ID NO: 375477 - DNA, 19 bp, Homo sapiens
  siRNA target sequence for CRTAM (NM_019604.1,1066-1084).
cgttgcatgaactacatca

SEQ ID NO: 375478 - DNA, 19 bp, Homo sapiens
  siRNA target sequence for CRTAM (NM_019604.1,1119-1137).
ggaaaatgtacaacattca

SEQ ID NO: 375479 - DNA, 19 bp, Homo sapiens
  siRNA target sequence for DJ667H12.2 (NM_019605.2,344-362).
cccactggcaggatcacat

SEQ ID NO: 375480 - DNA, 19 bp, Homo sapiens
  siRNA target sequence for DJ667H12.2 (NM_019605.2,346-364).
cactggcaggatcacatta

SEQ ID NO: 375481 - DNA, 19 bp, Homo sapiens
  siRNA target sequence for DJ667H12.2 (NM_019605.2,348-366).
ctggcaggatcacattaca

SEQ ID NO: 375482 - DNA, 19 bp, Homo sapiens
  siRNA target sequence for DJ667H12.2 (NM_019605.2,360-378).
cattacaggggaatttcaa

SEQ ID NO: 375483 - DNA, 19 bp, Homo sapiens
  siRNA target sequence for DJ667H12.2 (NM_019605.2,367-385).
ggggaatttcaaatcctat

SEQ ID NO: 375484 - DNA, 19 bp, Homo sapiens
  siRNA target sequence for DJ667H12.2 (NM_019605.2,463-481).
gccataaaaccatctcaat

SEQ ID NO: 375485 - DNA, 19 bp, Homo sapiens
  siRNA target sequence for DJ667H12.2 (NM_019605.2,489-507).
gaacgagcccacatccttt

SEQ ID NO: 375486 - DNA, 19 bp, Homo sapiens
  siRNA target sequence for DJ667H12.2 (NM_019605.2,492-510).
cgagcccacatcctttata

SEQ ID NO: 375487 - DNA, 19 bp, Homo sapiens
  siRNA target sequence for DJ667H12.2 (NM_019605.2,495-513).
gcccacatcctttatatgt

SEQ ID NO: 375488 - DNA, 19 bp, Homo sapiens
  siRNA target sequence for DJ667H12.2 (NM_019605.2,514-532).
ccttagaaaagctaaagtt

SEQ ID NO: 375489 - DNA, 19 bp, Homo sapiens
  siRNA target sequence for DJ667H12.2 (NM_019605.2,557-575).
ccgaagatctgtccttata

SEQ ID NO: 375490 - DNA, 19 bp, Homo sapiens
  siRNA target sequence for DJ667H12.2 (NM_019605.2,559-577).
gaagatctgtccttataaa

SEQ ID NO: 375491 - DNA, 19 bp, Homo sapiens
  siRNA target sequence for DJ667H12.2 (NM_019605.2,562-580).
gatctgtccttataaacaa

SEQ ID NO: 375492 - DNA, 19 bp, Homo sapiens
  siRNA target sequence for DJ667H12.2 (NM_019605.2,658-676).
ctgcccaagagtggtttat

SEQ ID NO: 375493 - DNA, 19 bp, Homo sapiens
  siRNA target sequence for DJ667H12.2 (NM_019605.2,686-704).
ctgcccttaccgaaaacga

SEQ ID NO: 375494 - DNA, 19 bp, Homo sapiens
  siRNA target sequence for DJ667H12.2 (NM_019605.2,765-783).
ggtggccactacctaaatt

SEQ ID NO: 375495 - DNA, 19 bp, Homo sapiens
  siRNA target sequence for DJ667H12.2 (NM_019605.2,766-784).
gtggccactacctaaattt

SEQ ID NO: 375496 - DNA, 19 bp, Homo sapiens
  siRNA target sequence for DJ667H12.2 (NM_019605.2,786-804).
cccctttctgtcaatgcta

SEQ ID NO: 375497 - DNA, 19 bp, Homo sapiens
  siRNA target sequence for DJ667H12.2 (NM_019605.2,898-916).
gttcccgccaggtggattt

SEQ ID NO: 375498 - DNA, 19 bp, Homo sapiens
  siRNA target sequence for DJ667H12.2 (NM_019605.2,921-939).
gtaggtagtgcatctattt

SEQ ID NO: 375499 - DNA, 19 bp, Homo sapiens
  siRNA target sequence for DJ667H12.2 (NM_019605.2,924-942).
ggtagtgcatctatttaca

SEQ ID NO: 375500 - DNA, 19 bp, Homo sapiens
  siRNA target sequence for DJ667H12.2 (NM_019605.2,980-998).
cactaatgtcagatcactt

SEQ ID NO: 375501 - DNA, 19 bp, Homo sapiens
  siRNA target sequence for DJ667H12.2 (NM_019605.2,1087-1105).
gaaatgaccttgcttttga

SEQ ID NO: 375502 - DNA, 19 bp, Homo sapiens
  siRNA target sequence for DJ667H12.2 (NM_019605.2,1106-1124).
gtgcaaaggccaattttat

SEQ ID NO: 375503 - DNA, 19 bp, Homo sapiens
  siRNA target sequence for DJ667H12.2 (NM_019605.2,1109-1127).
caaaggccaattttatgat

SEQ ID NO: 375504 - DNA, 19 bp, Homo sapiens
  siRNA target sequence for DJ667H12.2 (NM_019605.2,1200-1218).
gcttcaccaccaagtaaca

SEQ ID NO: 375505 - DNA, 19 bp, Homo sapiens
  siRNA target sequence for FLJ11267 (NM_019607.1,368-386).
gtcgggagcacttcgaaaa

SEQ ID NO: 375506 - DNA, 19 bp, Homo sapiens
  siRNA target sequence for FLJ11267 (NM_019607.1,371-389).
gggagcacttcgaaaacca

SEQ ID NO: 375507 - DNA, 19 bp, Homo sapiens
  siRNA target sequence for FLJ11267 (NM_019607.1,533-551).
gccaggtattagaattatt

SEQ ID NO: 375508 - DNA, 19 bp, Homo sapiens
  siRNA target sequence for FLJ11267 (NM_019607.1,534-552).
ccaggtattagaattattt

SEQ ID NO: 375509 - DNA, 19 bp, Homo sapiens
  siRNA target sequence for FLJ11267 (NM_019607.1,648-666).
ctccaagagaccagatgta

SEQ ID NO: 375510 - DNA, 19 bp, Homo sapiens
  siRNA target sequence for FLJ11267 (NM_019607.1,658-676).
ccagatgtaccgagtttga

SEQ ID NO: 375511 - DNA, 19 bp, Homo sapiens
  siRNA target sequence for FLJ11267 (NM_019607.1,661-679).
gatgtaccgagtttgaaat

SEQ ID NO: 375512 - DNA, 19 bp, Homo sapiens
  siRNA target sequence for R30953_1 (NM_019612.1,362-380).
cggctgacaagtacctaaa

SEQ ID NO: 375513 - DNA, 19 bp, Homo sapiens
  siRNA target sequence for R30953_1 (NM_019612.1,475-493).
cagggcaagaagttctact

SEQ ID NO: 375514 - DNA, 19 bp, Homo sapiens
  siRNA target sequence for LOC56270 (NM_019613.2,344-362).
gttatttcgctgcaactat

SEQ ID NO: 375515 - DNA, 19 bp, Homo sapiens
  siRNA target sequence for LOC56270 (NM_019613.2,351-369).
cgctgcaactatttagctt

SEQ ID NO: 375516 - DNA, 19 bp, Homo sapiens
  siRNA target sequence for LOC56270 (NM_019613.2,399-417).
cctcccaacaaagtaatga

SEQ ID NO: 375517 - DNA, 19 bp, Homo sapiens
  siRNA target sequence for LOC56270 (NM_019613.2,437-455).
gaagactgttattgaaata

SEQ ID NO: 375518 - DNA, 19 bp, Homo sapiens
  siRNA target sequence for LOC56270 (NM_019613.2,510-528).
gttttggactccatgatta

SEQ ID NO: 375519 - DNA, 19 bp, Homo sapiens
  siRNA target sequence for LOC56270 (NM_019613.2,558-576).
cagttgcacgtcttcgaaa

SEQ ID NO: 375520 - DNA, 19 bp, Homo sapiens
  siRNA target sequence for LOC56270 (NM_019613.2,603-621).
gtcctttgtcccaatagta

SEQ ID NO: 375521 - DNA, 19 bp, Homo sapiens
  siRNA target sequence for LOC56270 (NM_019613.2,779-797).
cgagaaagggacgcttata

SEQ ID NO: 375522 - DNA, 19 bp, Homo sapiens
  siRNA target sequence for LOC56270 (NM_019613.2,782-800).
gaaagggacgcttataaga

SEQ ID NO: 375523 - DNA, 19 bp, Homo sapiens
  siRNA target sequence for LOC56270 (NM_019613.2,786-804).
gggacgcttataagaatat

SEQ ID NO: 375524 - DNA, 19 bp, Homo sapiens
  siRNA target sequence for LOC56270 (NM_019613.2,787-805).
ggacgcttataagaatatt

SEQ ID NO: 375525 - DNA, 19 bp, Homo sapiens
  siRNA target sequence for LOC56270 (NM_019613.2,788-806).
gacgcttataagaatattt

SEQ ID NO: 375526 - DNA, 19 bp, Homo sapiens
  siRNA target sequence for LOC56270 (NM_019613.2,814-832).
catcagggcatttaatcca

SEQ ID NO: 375527 - DNA, 19 bp, Homo sapiens
  siRNA target sequence for LOC56270 (NM_019613.2,920-938).
cggcacagtgcatattttt

SEQ ID NO: 375528 - DNA, 19 bp, Homo sapiens
  siRNA target sequence for LOC56270 (NM_019613.2,984-1002).
gccagtttccttccaaaat

SEQ ID NO: 375529 - DNA, 19 bp, Homo sapiens
  siRNA target sequence for LOC56270 (NM_019613.2,985-1003).
ccagtttccttccaaaata

SEQ ID NO: 375530 - DNA, 19 bp, Homo sapiens
  siRNA target sequence for LOC56270 (NM_019613.2,1080-1098).
ccaaacgccgtcattgcaa

SEQ ID NO: 375531 - DNA, 19 bp, Homo sapiens
  siRNA target sequence for LOC56270 (NM_019613.2,1085-1103).
cgccgtcattgcaatttgt

SEQ ID NO: 375532 - DNA, 19 bp, Homo sapiens
  siRNA target sequence for LOC56270 (NM_019613.2,1107-1125).
gacggcagctactacaaat

SEQ ID NO: 375533 - DNA, 19 bp, Homo sapiens
  siRNA target sequence for NGEF (NM_019850.1,247-265).
ggaatctgaagatttggaa

SEQ ID NO: 375534 - DNA, 19 bp, Homo sapiens
  siRNA target sequence for NGEF (NM_019850.1,360-378).
ctcaagctgaccaggatat

SEQ ID NO: 375535 - DNA, 19 bp, Homo sapiens
  siRNA target sequence for NGEF (NM_019850.1,401-419).
cacatcccaattaagagaa

SEQ ID NO: 375536 - DNA, 19 bp, Homo sapiens
  siRNA target sequence for NGEF (NM_019850.1,403-421).
catcccaattaagagaaat

SEQ ID NO: 375537 - DNA, 19 bp, Homo sapiens
  siRNA target sequence for NGEF (NM_019850.1,427-445).
cttcaatcgctccataaga

SEQ ID NO: 375538 - DNA, 19 bp, Homo sapiens
  siRNA target sequence for NGEF (NM_019850.1,438-456).
ccataagacgcaaaagcaa

SEQ ID NO: 375539 - DNA, 19 bp, Homo sapiens
  siRNA target sequence for NGEF (NM_019850.1,439-457).
cataagacgcaaaagcaaa

SEQ ID NO: 375540 - DNA, 19 bp, Homo sapiens
  siRNA target sequence for NGEF (NM_019850.1,503-521).
gattcacaggacaatggaa

SEQ ID NO: 375541 - DNA, 19 bp, Homo sapiens
  siRNA target sequence for NGEF (NM_019850.1,776-794).
gaataccgagataaatcga

SEQ ID NO: 375542 - DNA, 19 bp, Homo sapiens
  siRNA target sequence for NGEF (NM_019850.1,792-810).
cgactctccaagaaatcga

SEQ ID NO: 375543 - DNA, 19 bp, Homo sapiens
  siRNA target sequence for NGEF (NM_019850.1,1014-1032).
gcagcggggtgcttgagat

SEQ ID NO: 375544 - DNA, 19 bp, Homo sapiens
  siRNA target sequence for NGEF (NM_019850.1,1086-1104).
ccgaggcgtcctactacaa

SEQ ID NO: 375545 - DNA, 19 bp, Homo sapiens
  siRNA target sequence for NGEF (NM_019850.1,1088-1106).
gaggcgtcctactacaaga

SEQ ID NO: 375546 - DNA, 19 bp, Homo sapiens
  siRNA target sequence for NGEF (NM_019850.1,1136-1154).
gagaacgagcggataagga

SEQ ID NO: 375547 - DNA, 19 bp, Homo sapiens
  siRNA target sequence for NGEF (NM_019850.1,1543-1561).
ggagtgcactgctttggat

SEQ ID NO: 375548 - DNA, 19 bp, Homo sapiens
  siRNA target sequence for NGEF (NM_019850.1,1620-1638).
gccgcacggaacagatgat

SEQ ID NO: 375549 - DNA, 19 bp, Homo sapiens
  siRNA target sequence for NGEF (NM_019850.1,1768-1786).
gaagctcttccacgaaatt

SEQ ID NO: 375550 - DNA, 19 bp, Homo sapiens
  siRNA target sequence for NGEF (NM_019850.1,1836-1854).
gagacaagtaccaggtatt

SEQ ID NO: 375551 - DNA, 19 bp, Homo sapiens
  siRNA target sequence for NGEF (NM_019850.1,2232-2250).
ccatgactgaggagatctt

SEQ ID NO: 375552 - DNA, 19 bp, Homo sapiens
  siRNA target sequence for NGEF (NM_019850.1,2286-2304).
gtttccgtgtccacaagat

SEQ ID NO: 375553 - DNA, 19 bp, Homo sapiens
  siRNA target sequence for OR2S2 (NM_019897.1,511-529).
gagattctggctgttctaa

SEQ ID NO: 375554 - DNA, 19 bp, Homo sapiens
  siRNA target sequence for OR2S2 (NM_019897.1,596-614).
gagtcccggttctgttcat

SEQ ID NO: 375555 - DNA, 19 bp, Homo sapiens
  siRNA target sequence for OR2S2 (NM_019897.1,598-616).
gtcccggttctgttcatct

SEQ ID NO: 375556 - DNA, 19 bp, Homo sapiens
  siRNA target sequence for OR2S2 (NM_019897.1,721-739).
gtcttctacgggaccttat

SEQ ID NO: 375557 - DNA, 19 bp, Homo sapiens
  siRNA target sequence for OR2S2 (NM_019897.1,771-789).
ctccatgggagcagacaaa

SEQ ID NO: 375558 - DNA, 19 bp, Homo sapiens
  siRNA target sequence for OR2S2 (NM_019897.1,773-791).
ccatgggagcagacaaaga

SEQ ID NO: 375559 - DNA, 19 bp, Homo sapiens
  siRNA target sequence for OR2S2 (NM_019897.1,781-799).
gcagacaaagaggatcttt

SEQ ID NO: 375560 - DNA, 19 bp, Homo sapiens
  siRNA target sequence for OR2S2 (NM_019897.1,897-915).
gagactgctgagaccaaaa

SEQ ID NO: 375561 - DNA, 19 bp, Homo sapiens
  siRNA target sequence for BARHL2 (NM_020063.1,57-75).
ggccagcgggtcgagtttt

SEQ ID NO: 375562 - DNA, 19 bp, Homo sapiens
  siRNA target sequence for BARHL2 (NM_020063.1,62-80).
gcgggtcgagttttggaat

SEQ ID NO: 375563 - DNA, 19 bp, Homo sapiens
  siRNA target sequence for BARHL2 (NM_020063.1,63-81).
cgggtcgagttttggaata

SEQ ID NO: 375564 - DNA, 19 bp, Homo sapiens
  siRNA target sequence for BARHL2 (NM_020063.1,65-83).
ggtcgagttttggaataga

SEQ ID NO: 375565 - DNA, 19 bp, Homo sapiens
  siRNA target sequence for BARHL2 (NM_020063.1,76-94).
ggaatagacacgattttgt

SEQ ID NO: 375566 - DNA, 19 bp, Homo sapiens
  siRNA target sequence for BARHL2 (NM_020063.1,153-171).
ggccaggaccgcggatttt

SEQ ID NO: 375567 - DNA, 19 bp, Homo sapiens
  siRNA target sequence for BARHL2 (NM_020063.1,154-172).
gccaggaccgcggatttta

SEQ ID NO: 375568 - DNA, 19 bp, Homo sapiens
  siRNA target sequence for BARHL2 (NM_020063.1,193-211).
ccctgttcggagattgata

SEQ ID NO: 375569 - DNA, 19 bp, Homo sapiens
  siRNA target sequence for BARHL2 (NM_020063.1,679-697).
gaaggagaccgggagatta

SEQ ID NO: 375570 - DNA, 19 bp, Homo sapiens
  siRNA target sequence for BARHL2 (NM_020063.1,682-700).
ggagaccgggagattacga

SEQ ID NO: 375571 - DNA, 19 bp, Homo sapiens
  siRNA target sequence for BARHL2 (NM_020063.1,762-780).
cgaccaccagctcaatcaa

SEQ ID NO: 375572 - DNA, 19 bp, Homo sapiens
  siRNA target sequence for BARHL2 (NM_020063.1,937-955).
gccgaggcagggaactact

SEQ ID NO: 375573 - DNA, 19 bp, Homo sapiens
  siRNA target sequence for BARHL2 (NM_020063.1,977-995).
catcgccttatttctatca

SEQ ID NO: 375574 - DNA, 19 bp, Homo sapiens
  siRNA target sequence for BARHL2 (NM_020063.1,1039-1057).
gctgccgctgccatgtaca

SEQ ID NO: 375575 - DNA, 19 bp, Homo sapiens
  siRNA target sequence for BARHL2 (NM_020063.1,1146-1164).
gggacagccagcccttaat

SEQ ID NO: 375576 - DNA, 19 bp, Homo sapiens
  siRNA target sequence for KCMF1 (NM_020122.2,75-93).
cgaggtcgcagatataagt

SEQ ID NO: 375577 - DNA, 19 bp, Homo sapiens
  siRNA target sequence for KCMF1 (NM_020122.2,78-96).
ggtcgcagatataagtgtt

SEQ ID NO: 375578 - DNA, 19 bp, Homo sapiens
  siRNA target sequence for KCMF1 (NM_020122.2,79-97).
gtcgcagatataagtgttt

SEQ ID NO: 375579 - DNA, 19 bp, Homo sapiens
  siRNA target sequence for KCMF1 (NM_020122.2,81-99).
cgcagatataagtgtttaa

SEQ ID NO: 375580 - DNA, 19 bp, Homo sapiens
  siRNA target sequence for KCMF1 (NM_020122.2,104-122).
ctacgattacgatctttgt

SEQ ID NO: 375581 - DNA, 19 bp, Homo sapiens
  siRNA target sequence for KCMF1 (NM_020122.2,113-131).
cgatctttgtgcatcttgt

SEQ ID NO: 375582 - DNA, 19 bp, Homo sapiens
  siRNA target sequence for KCMF1 (NM_020122.2,135-153).
gaaagtggtgcaacaacaa

SEQ ID NO: 375583 - DNA, 19 bp, Homo sapiens
  siRNA target sequence for KCMF1 (NM_020122.2,173-191).
cccaatgcagtgcatatta

SEQ ID NO: 375584 - DNA, 19 bp, Homo sapiens
  siRNA target sequence for KCMF1 (NM_020122.2,198-216).
gtagattttgatttatact

SEQ ID NO: 375585 - DNA, 19 bp, Homo sapiens
  siRNA target sequence for KCMF1 (NM_020122.2,321-339).
gaacatgcagaaacatcaa

SEQ ID NO: 375586 - DNA, 19 bp, Homo sapiens
  siRNA target sequence for KCMF1 (NM_020122.2,373-391).
ctggaggcgatcctaatca

SEQ ID NO: 375587 - DNA, 19 bp, Homo sapiens
  siRNA target sequence for KCMF1 (NM_020122.2,376-394).
gaggcgatcctaatcatgt

SEQ ID NO: 375588 - DNA, 19 bp, Homo sapiens
  siRNA target sequence for KCMF1 (NM_020122.2,436-454).
cccctagagatttagatga

SEQ ID NO: 375589 - DNA, 19 bp, Homo sapiens
  siRNA target sequence for KCMF1 (NM_020122.2,458-476).
gagtggtgttcgacatgta

SEQ ID NO: 375590 - DNA, 19 bp, Homo sapiens
  siRNA target sequence for KCMF1 (NM_020122.2,468-486).
cgacatgtacgtagaatgt

SEQ ID NO: 375591 - DNA, 19 bp, Homo sapiens
  siRNA target sequence for KCMF1 (NM_020122.2,513-531).
cctcgtgctcgtagatcaa

SEQ ID NO: 375592 - DNA, 19 bp, Homo sapiens
  siRNA target sequence for KCMF1 (NM_020122.2,514-532).
ctcgtgctcgtagatcaaa

SEQ ID NO: 375593 - DNA, 19 bp, Homo sapiens
  siRNA target sequence for KCMF1 (NM_020122.2,516-534).
cgtgctcgtagatcaaaca

SEQ ID NO: 375594 - DNA, 19 bp, Homo sapiens
  siRNA target sequence for KCMF1 (NM_020122.2,517-535).
gtgctcgtagatcaaacat

SEQ ID NO: 375595 - DNA, 19 bp, Homo sapiens
  siRNA target sequence for KCMF1 (NM_020122.2,537-555).
cactttactagcagttcta

SEQ ID NO: 375596 - DNA, 19 bp, Homo sapiens
  siRNA target sequence for KCMF1 (NM_020122.2,602-620).
ggaagccatggatcctata

SEQ ID NO: 375597 - DNA, 19 bp, Homo sapiens
  siRNA target sequence for KCMF1 (NM_020122.2,660-678).
gcaggaggacagcttaatt

SEQ ID NO: 375598 - DNA, 19 bp, Homo sapiens
  siRNA target sequence for KCMF1 (NM_020122.2,663-681).
ggaggacagcttaattcct

SEQ ID NO: 375599 - DNA, 19 bp, Homo sapiens
  siRNA target sequence for KCMF1 (NM_020122.2,686-704).
cccttccgcttctcagtta

SEQ ID NO: 375600 - DNA, 19 bp, Homo sapiens
  siRNA target sequence for KCMF1 (NM_020122.2,688-706).
cttccgcttctcagttaca

SEQ ID NO: 375601 - DNA, 19 bp, Homo sapiens
  siRNA target sequence for KCMF1 (NM_020122.2,691-709).
ccgcttctcagttacaaca

SEQ ID NO: 375602 - DNA, 19 bp, Homo sapiens
  siRNA target sequence for KCMF1 (NM_020122.2,692-710).
cgcttctcagttacaacaa

SEQ ID NO: 375603 - DNA, 19 bp, Homo sapiens
  siRNA target sequence for KCMF1 (NM_020122.2,805-823).
gcagtgtcaccactacaat

SEQ ID NO: 375604 - DNA, 19 bp, Homo sapiens
  siRNA target sequence for KCMF1 (NM_020122.2,837-855).
gcaacaaccaacatagcta

SEQ ID NO: 375605 - DNA, 19 bp, Homo sapiens
  siRNA target sequence for KCMF1 (NM_020122.2,838-856).
caacaaccaacatagctaa

SEQ ID NO: 375606 - DNA, 19 bp, Homo sapiens
  siRNA target sequence for KCMF1 (NM_020122.2,844-862).
ccaacatagctaatacaga

SEQ ID NO: 375607 - DNA, 19 bp, Homo sapiens
  siRNA target sequence for KCMF1 (NM_020122.2,868-886).
gtcagcagactctacagaa

SEQ ID NO: 375608 - DNA, 19 bp, Homo sapiens
  siRNA target sequence for KCMF1 (NM_020122.2,904-922).
caaggttgaatgatcctaa

SEQ ID NO: 375609 - DNA, 19 bp, Homo sapiens
  siRNA target sequence for KCMF1 (NM_020122.2,915-933).
gatcctaaaatgtctgaaa

SEQ ID NO: 375610 - DNA, 19 bp, Homo sapiens
  siRNA target sequence for PPL13 (NM_020129.1,228-246).
catcactacccgtaccata

SEQ ID NO: 375611 - DNA, 19 bp, Homo sapiens
  siRNA target sequence for PPL13 (NM_020129.1,295-313).
gacaccgatcctcactttt

SEQ ID NO: 375612 - DNA, 19 bp, Homo sapiens
  siRNA target sequence for PPL13 (NM_020129.1,297-315).
caccgatcctcacttttgt

SEQ ID NO: 375613 - DNA, 19 bp, Homo sapiens
  siRNA target sequence for PPL13 (NM_020129.1,299-317).
ccgatcctcacttttgtca

SEQ ID NO: 375614 - DNA, 19 bp, Homo sapiens
  siRNA target sequence for PPL13 (NM_020129.1,300-318).
cgatcctcacttttgtcaa

SEQ ID NO: 375615 - DNA, 19 bp, Homo sapiens
  siRNA target sequence for PPL13 (NM_020129.1,401-419).
catcctgcaatcatgaaca

SEQ ID NO: 375616 - DNA, 19 bp, Homo sapiens
  siRNA target sequence for PPL13 (NM_020129.1,404-422).
cctgcaatcatgaacagtt

SEQ ID NO: 375617 - DNA, 19 bp, Homo sapiens
  siRNA target sequence for PPL13 (NM_020129.1,506-524).
gtgcgtcacaaggaataca

SEQ ID NO: 375618 - DNA, 19 bp, Homo sapiens
  siRNA target sequence for PPL13 (NM_020129.1,518-536).
gaatacaaggtaatggtaa

SEQ ID NO: 375619 - DNA, 19 bp, Homo sapiens
  siRNA target sequence for PPL13 (NM_020129.1,539-557).
ggccaacgcatttacaact

SEQ ID NO: 375620 - DNA, 19 bp, Homo sapiens
  siRNA target sequence for PPL13 (NM_020129.1,540-558).
gccaacgcatttacaactt

SEQ ID NO: 375621 - DNA, 19 bp, Homo sapiens
  siRNA target sequence for PPL13 (NM_020129.1,541-559).
ccaacgcatttacaacttt

SEQ ID NO: 375622 - DNA, 19 bp, Homo sapiens
  siRNA target sequence for PPL13 (NM_020129.1,593-611).
ctgcaagtcttcagagata

SEQ ID NO: 375623 - DNA, 19 bp, Homo sapiens
  siRNA target sequence for PPL13 (NM_020129.1,615-633).
ccctgaccagagtgcttat

SEQ ID NO: 375624 - DNA, 19 bp, Homo sapiens
  siRNA target sequence for PPL13 (NM_020129.1,617-635).
ctgaccagagtgcttatca

SEQ ID NO: 375625 - DNA, 19 bp, Homo sapiens
  siRNA target sequence for C8orf4 (NM_020130.2,195-213).
cacagaccaagaatcacta

SEQ ID NO: 375626 - DNA, 19 bp, Homo sapiens
  siRNA target sequence for AGPAT3 (NM_020132.2,890-908).
gctggacgtggtactttct

SEQ ID NO: 375627 - DNA, 19 bp, Homo sapiens
  siRNA target sequence for AGPAT3 (NM_020132.2,1152-1170).
gacagtcgcagctgtctat

SEQ ID NO: 375628 - DNA, 19 bp, Homo sapiens
  siRNA target sequence for AGPAT3 (NM_020132.2,1154-1172).
cagtcgcagctgtctatga

SEQ ID NO: 375629 - DNA, 19 bp, Homo sapiens
  siRNA target sequence for AGPAT3 (NM_020132.2,1159-1177).
gcagctgtctatgatgtaa

SEQ ID NO: 375630 - DNA, 19 bp, Homo sapiens
  siRNA target sequence for AGPAT3 (NM_020132.2,1248-1266).
catgtgcgtgaggagattt

SEQ ID NO: 375631 - DNA, 19 bp, Homo sapiens
  siRNA target sequence for AGPAT3 (NM_020132.2,1306-1324).
cagtggcttcataaactgt

SEQ ID NO: 375632 - DNA, 19 bp, Homo sapiens
  siRNA target sequence for AGPAT3 (NM_020132.2,1336-1354).
gacgcgctccaggagatat

SEQ ID NO: 375633 - DNA, 19 bp, Homo sapiens
  siRNA target sequence for AGPAT3 (NM_020132.2,1338-1356).
cgcgctccaggagatatat

SEQ ID NO: 375634 - DNA, 19 bp, Homo sapiens
  siRNA target sequence for AGPAT3 (NM_020132.2,1339-1357).
gcgctccaggagatatata

SEQ ID NO: 375635 - DNA, 19 bp, Homo sapiens
  siRNA target sequence for AGPAT3 (NM_020132.2,1340-1358).
cgctccaggagatatataa

SEQ ID NO: 375636 - DNA, 19 bp, Homo sapiens
  siRNA target sequence for AGPAT3 (NM_020132.2,1341-1359).
gctccaggagatatataat

SEQ ID NO: 375637 - DNA, 19 bp, Homo sapiens
  siRNA target sequence for AGPAT3 (NM_020132.2,1551-1569).
cagactgataggagtaact

SEQ ID NO: 375638 - DNA, 19 bp, Homo sapiens
  siRNA target sequence for AGPAT3 (NM_020132.2,1553-1571).
gactgataggagtaactga

SEQ ID NO: 375639 - DNA, 19 bp, Homo sapiens
  siRNA target sequence for EB-1 (NM_020140.1,266-284).
cccaggactaccgctatta

SEQ ID NO: 375640 - DNA, 19 bp, Homo sapiens
  siRNA target sequence for EB-1 (NM_020140.1,294-312).
cggctactccctgcttaaa

SEQ ID NO: 375641 - DNA, 19 bp, Homo sapiens
  siRNA target sequence for EB-1 (NM_020140.1,463-481).
gatcaggatttgttggaaa

SEQ ID NO: 375642 - DNA, 19 bp, Homo sapiens
  siRNA target sequence for EB-1 (NM_020140.1,474-492).
gttggaaattggaatcctt

SEQ ID NO: 375643 - DNA, 19 bp, Homo sapiens
  siRNA target sequence for EB-1 (NM_020140.1,591-609).
gtggctggattccattgaa

SEQ ID NO: 375644 - DNA, 19 bp, Homo sapiens
  siRNA target sequence for EB-1 (NM_020140.1,621-639).
caccaaagcctttctaatt

SEQ ID NO: 375645 - DNA, 19 bp, Homo sapiens
  siRNA target sequence for EB-1 (NM_020140.1,623-641).
ccaaagcctttctaattaa

SEQ ID NO: 375646 - DNA, 19 bp, Homo sapiens
  siRNA target sequence for EB-1 (NM_020140.1,634-652).
ctaattaatggctacactt

SEQ ID NO: 375647 - DNA, 19 bp, Homo sapiens
  siRNA target sequence for EB-1 (NM_020140.1,650-668).
cttcgatggacctgttgaa

SEQ ID NO: 375648 - DNA, 19 bp, Homo sapiens
  siRNA target sequence for EB-1 (NM_020140.1,675-693).
ctgggaggttgaacttatt

SEQ ID NO: 375649 - DNA, 19 bp, Homo sapiens
  siRNA target sequence for EB-1 (NM_020140.1,719-737).
gccacaggaaacgtatttt

SEQ ID NO: 375650 - DNA, 19 bp, Homo sapiens
  siRNA target sequence for EB-1 (NM_020140.1,817-835).
ggagaaccttccattacct

SEQ ID NO: 375651 - DNA, 19 bp, Homo sapiens
  siRNA target sequence for EB-1 (NM_020140.1,818-836).
gagaaccttccattacctt

SEQ ID NO: 375652 - DNA, 19 bp, Homo sapiens
  siRNA target sequence for EB-1 (NM_020140.1,834-852).
cttgcgacctccgaatgaa

SEQ ID NO: 375653 - DNA, 19 bp, Homo sapiens
  siRNA target sequence for EB-1 (NM_020140.1,860-878).
cctctaccccggtacagta

SEQ ID NO: 375654 - DNA, 19 bp, Homo sapiens
  siRNA target sequence for EB-1 (NM_020140.1,885-903).
gcatcacccagaaaagctt

SEQ ID NO: 375655 - DNA, 19 bp, Homo sapiens
  siRNA target sequence for EB-1 (NM_020140.1,886-904).
catcacccagaaaagctta

SEQ ID NO: 375656 - DNA, 19 bp, Homo sapiens
  siRNA target sequence for EB-1 (NM_020140.1,889-907).
cacccagaaaagcttatct

SEQ ID NO: 375657 - DNA, 19 bp, Homo sapiens
  siRNA target sequence for EB-1 (NM_020140.1,909-927).
ccagtcgtgtgattacaaa

SEQ ID NO: 375658 - DNA, 19 bp, Homo sapiens
  siRNA target sequence for EB-1 (NM_020140.1,914-932).
cgtgtgattacaaagcttt

SEQ ID NO: 375659 - DNA, 19 bp, Homo sapiens
  siRNA target sequence for EB-1 (NM_020140.1,960-978).
gcttagggggacagaatca

SEQ ID NO: 375660 - DNA, 19 bp, Homo sapiens
  siRNA target sequence for EB-1 (NM_020140.1,961-979).
cttagggggacagaatcaa

SEQ ID NO: 375661 - DNA, 19 bp, Homo sapiens
  siRNA target sequence for EB-1 (NM_020140.1,982-1000).
caagatgcttgtgcaaaaa

SEQ ID NO: 375662 - DNA, 19 bp, Homo sapiens
  siRNA target sequence for EB-1 (NM_020140.1,1006-1024).
gctaactgtcagaagtcta

SEQ ID NO: 375663 - DNA, 19 bp, Homo sapiens
  siRNA target sequence for EB-1 (NM_020140.1,1038-1056).
gaaggtccctactattatt

SEQ ID NO: 375664 - DNA, 19 bp, Homo sapiens
  siRNA target sequence for EB-1 (NM_020140.1,1065-1083).
ctcatataaaggagtcaaa

SEQ ID NO: 375665 - DNA, 19 bp, Homo sapiens
  siRNA target sequence for EB-1 (NM_020140.1,1117-1135).
gagcatgaaattcgtaata

SEQ ID NO: 375666 - DNA, 19 bp, Homo sapiens
  siRNA target sequence for EB-1 (NM_020140.1,1177-1195).
gcctatatcacaaaagatt

SEQ ID NO: 375667 - DNA, 19 bp, Homo sapiens
  siRNA target sequence for EB-1 (NM_020140.1,1229-1247).
ctgcctttgatgtgaattt

SEQ ID NO: 375668 - DNA, 19 bp, Homo sapiens
  siRNA target sequence for EB-1 (NM_020140.1,1249-1267).
gcctatgaaatcatcctaa

SEQ ID NO: 375669 - DNA, 19 bp, Homo sapiens
  siRNA target sequence for EB-1 (NM_020140.1,1269-1287).
cctgggacaggcattcgaa

SEQ ID NO: 375670 - DNA, 19 bp, Homo sapiens
  siRNA target sequence for EB-1 (NM_020140.1,1460-1478).
ctgaggaggcactcagaaa

SEQ ID NO: 375671 - DNA, 19 bp, Homo sapiens
  siRNA target sequence for EB-1 (NM_020140.1,1462-1480).
gaggaggcactcagaaaat

SEQ ID NO: 375672 - DNA, 19 bp, Homo sapiens
  siRNA target sequence for LOC56901 (NM_020142.3,291-309).
cttctaccggcagatcaaa

SEQ ID NO: 375673 - DNA, 19 bp, Homo sapiens
  siRNA target sequence for LOC56901 (NM_020142.3,294-312).
ctaccggcagatcaaaaga

SEQ ID NO: 375674 - DNA, 19 bp, Homo sapiens
  siRNA target sequence for LOC56901 (NM_020142.3,358-376).
ggcagcgctgcgctttact

SEQ ID NO: 375675 - DNA, 19 bp, Homo sapiens
  siRNA target sequence for LOC56901 (NM_020142.3,359-377).
gcagcgctgcgctttactt

SEQ ID NO: 375676 - DNA, 19 bp, Homo sapiens
  siRNA target sequence for LOC56901 (NM_020142.3,481-499).
gtttccactgactataaga

SEQ ID NO: 375677 - DNA, 19 bp, Homo sapiens
  siRNA target sequence for SH3GLB2 (NM_020145.2,248-266).
gcttgatgcccactttgaa

SEQ ID NO: 375678 - DNA, 19 bp, Homo sapiens
  siRNA target sequence for SH3GLB2 (NM_020145.2,529-547).
cggagagggattttatcca

SEQ ID NO: 375679 - DNA, 19 bp, Homo sapiens
  siRNA target sequence for SH3GLB2 (NM_020145.2,706-724).
cgacggtgcctgactttca

SEQ ID NO: 375680 - DNA, 19 bp, Homo sapiens
  siRNA target sequence for SH3GLB2 (NM_020145.2,725-743).
ggagactagacctcgtaat

SEQ ID NO: 375681 - DNA, 19 bp, Homo sapiens
  siRNA target sequence for SH3GLB2 (NM_020145.2,726-744).
gagactagacctcgtaatt

SEQ ID NO: 375682 - DNA, 19 bp, Homo sapiens
  siRNA target sequence for SH3GLB2 (NM_020145.2,730-748).
ctagacctcgtaattacat

SEQ ID NO: 375683 - DNA, 19 bp, Homo sapiens
  siRNA target sequence for SH3GLB2 (NM_020145.2,733-751).
gacctcgtaattacattct

SEQ ID NO: 375684 - DNA, 19 bp, Homo sapiens
  siRNA target sequence for SH3GLB2 (NM_020145.2,764-782).
ctccgcgctctggaatgat

SEQ ID NO: 375685 - DNA, 19 bp, Homo sapiens
  siRNA target sequence for SH3GLB2 (NM_020145.2,766-784).
ccgcgctctggaatgatga

SEQ ID NO: 375686 - DNA, 19 bp, Homo sapiens
  siRNA target sequence for SH3GLB2 (NM_020145.2,767-785).
cgcgctctggaatgatgaa

SEQ ID NO: 375687 - DNA, 19 bp, Homo sapiens
  siRNA target sequence for SH3GLB2 (NM_020145.2,812-830).
cgtggcccagacagagttt

SEQ ID NO: 375688 - DNA, 19 bp, Homo sapiens
  siRNA target sequence for SH3GLB2 (NM_020145.2,1164-1182).
gctcgggtgctctatgact

SEQ ID NO: 375689 - DNA, 19 bp, Homo sapiens
  siRNA target sequence for SH3GLB2 (NM_020145.2,1165-1183).
ctcgggtgctctatgacta

SEQ ID NO: 375690 - DNA, 19 bp, Homo sapiens
  siRNA target sequence for THAP10 (NM_020147.2,556-574).
ggctgcagcttcacagatt

SEQ ID NO: 375691 - DNA, 19 bp, Homo sapiens
  siRNA target sequence for THAP10 (NM_020147.2,557-575).
gctgcagcttcacagatta

SEQ ID NO: 375692 - DNA, 19 bp, Homo sapiens
  siRNA target sequence for THAP10 (NM_020147.2,560-578).
gcagcttcacagattacgt

SEQ ID NO: 375693 - DNA, 19 bp, Homo sapiens
  siRNA target sequence for THAP10 (NM_020147.2,567-585).
cacagattacgtgtgaaaa

SEQ ID NO: 375694 - DNA, 19 bp, Homo sapiens
  siRNA target sequence for THAP10 (NM_020147.2,576-594).
cgtgtgaaaatgaacttgt

SEQ ID NO: 375695 - DNA, 19 bp, Homo sapiens
  siRNA target sequence for THAP10 (NM_020147.2,600-618).
cccaaccccatgctgataa

SEQ ID NO: 375696 - DNA, 19 bp, Homo sapiens
  siRNA target sequence for THAP10 (NM_020147.2,605-623).
ccccatgctgataatccat

SEQ ID NO: 375697 - DNA, 19 bp, Homo sapiens
  siRNA target sequence for THAP10 (NM_020147.2,611-629).
gctgataatccatctaata

SEQ ID NO: 375698 - DNA, 19 bp, Homo sapiens
  siRNA target sequence for THAP10 (NM_020147.2,659-677).
gaaggcccagtgcataaaa

SEQ ID NO: 375699 - DNA, 19 bp, Homo sapiens
  siRNA target sequence for THAP10 (NM_020147.2,662-680).
ggcccagtgcataaaagta

SEQ ID NO: 375700 - DNA, 19 bp, Homo sapiens
  siRNA target sequence for THAP10 (NM_020147.2,668-686).
gtgcataaaagtacacaaa

SEQ ID NO: 375701 - DNA, 19 bp, Homo sapiens
  siRNA target sequence for THAP10 (NM_020147.2,709-727).
ccgtagtgtgggtattcaa

SEQ ID NO: 375702 - DNA, 19 bp, Homo sapiens
  siRNA target sequence for THAP10 (NM_020147.2,779-797).
gaggaattgtggtctagaa

SEQ ID NO: 375703 - DNA, 19 bp, Homo sapiens
  siRNA target sequence for THAP10 (NM_020147.2,781-799).
ggaattgtggtctagaact

SEQ ID NO: 375704 - DNA, 19 bp, Homo sapiens
  siRNA target sequence for THAP10 (NM_020147.2,782-800).
gaattgtggtctagaactt

SEQ ID NO: 375705 - DNA, 19 bp, Homo sapiens
  siRNA target sequence for STARD7 (NM_020151.2,881-899).
cagtaccgagtttttggaa

SEQ ID NO: 375706 - DNA, 19 bp, Homo sapiens
  siRNA target sequence for STARD7 (NM_020151.2,915-933).
cacctcggcagttcttcaa

SEQ ID NO: 375707 - DNA, 19 bp, Homo sapiens
  siRNA target sequence for STARD7 (NM_020151.2,918-936).
ctcggcagttcttcaatgt

SEQ ID NO: 375708 - DNA, 19 bp, Homo sapiens
  siRNA target sequence for STARD7 (NM_020151.2,941-959).
ctggacacagagtatagaa

SEQ ID NO: 375709 - DNA, 19 bp, Homo sapiens
  siRNA target sequence for STARD7 (NM_020151.2,1014-1032).
gtggttccgaggttcttca

SEQ ID NO: 375710 - DNA, 19 bp, Homo sapiens
  siRNA target sequence for STARD7 (NM_020151.2,1035-1053).
gggtaacccattttcctta

SEQ ID NO: 375711 - DNA, 19 bp, Homo sapiens
  siRNA target sequence for STARD7 (NM_020151.2,1060-1078).
gtactcacgggattatgtt

SEQ ID NO: 375712 - DNA, 19 bp, Homo sapiens
  siRNA target sequence for STARD7 (NM_020151.2,1063-1081).
ctcacgggattatgtttat

SEQ ID NO: 375713 - DNA, 19 bp, Homo sapiens
  siRNA target sequence for STARD7 (NM_020151.2,1065-1083).
cacgggattatgtttatgt

SEQ ID NO: 375714 - DNA, 19 bp, Homo sapiens
  siRNA target sequence for STARD7 (NM_020151.2,1100-1118).
gatcaggaaaacaacatga

SEQ ID NO: 375715 - DNA, 19 bp, Homo sapiens
  siRNA target sequence for STARD7 (NM_020151.2,1210-1228).
ccgtccccacaagtcattt

SEQ ID NO: 375716 - DNA, 19 bp, Homo sapiens
  siRNA target sequence for STARD7 (NM_020151.2,1212-1230).
gtccccacaagtcatttga

SEQ ID NO: 375717 - DNA, 19 bp, Homo sapiens
  siRNA target sequence for STARD7 (NM_020151.2,1246-1264).
ctacttactaacatacagt

SEQ ID NO: 375718 - DNA, 19 bp, Homo sapiens
  siRNA target sequence for STARD7 (NM_020151.2,1286-1304).
cctcgctactgtgttagtt

SEQ ID NO: 375719 - DNA, 19 bp, Homo sapiens
  siRNA target sequence for STARD7 (NM_020151.2,1345-1363).
gcacatggccactctgaaa

SEQ ID NO: 375720 - DNA, 19 bp, Homo sapiens
  siRNA target sequence for STARD7 (NM_020151.2,1401-1419).
cagctaagcctctggaaat

SEQ ID NO: 375721 - DNA, 19 bp, Homo sapiens
  siRNA target sequence for STARD7 (NM_020151.2,1478-1496).
ggccctgctcggattgagt

SEQ ID NO: 375722 - DNA, 19 bp, Homo sapiens
  siRNA target sequence for STARD7 (NM_020151.2,1479-1497).
gccctgctcggattgagta

SEQ ID NO: 375723 - DNA, 19 bp, Homo sapiens
  siRNA target sequence for STARD7 (NM_020151.2,1480-1498).
ccctgctcggattgagtat

SEQ ID NO: 375724 - DNA, 19 bp, Homo sapiens
  siRNA target sequence for STARD7 (NM_020151.2,1484-1502).
gctcggattgagtatgctt

SEQ ID NO: 375725 - DNA, 19 bp, Homo sapiens
  siRNA target sequence for C21orf7 (NM_020152.2,286-304).
gctgattgcacctttagaa

SEQ ID NO: 375726 - DNA, 19 bp, Homo sapiens
  siRNA target sequence for C21orf7 (NM_020152.2,293-311).
gcacctttagaagttatgt

SEQ ID NO: 375727 - DNA, 19 bp, Homo sapiens
  siRNA target sequence for C21orf7 (NM_020152.2,598-616).
gaagccaaagtctattact

SEQ ID NO: 375728 - DNA, 19 bp, Homo sapiens
  siRNA target sequence for C21orf7 (NM_020152.2,709-727).
gcccctgccgccttgtcat

SEQ ID NO: 375729 - DNA, 19 bp, Homo sapiens
  siRNA target sequence for C21orf7 (NM_020152.2,754-772).
caaacagcactgccaaata

SEQ ID NO: 375730 - DNA, 19 bp, Homo sapiens
  siRNA target sequence for C21orf7 (NM_020152.2,807-825).
ccctgcttgagcaaaggaa

SEQ ID NO: 375731 - DNA, 19 bp, Homo sapiens
  siRNA target sequence for C21orf7 (NM_020152.2,832-850).
gctcattgccaagttagat

SEQ ID NO: 375732 - DNA, 19 bp, Homo sapiens
  siRNA target sequence for C21orf7 (NM_020152.2,931-949).
gttggcccagtctcaatgt

SEQ ID NO: 375733 - DNA, 19 bp, Homo sapiens
  siRNA target sequence for LXN (NM_020169.2,256-274).
ccttggtggcacagaacta

SEQ ID NO: 375734 - DNA, 19 bp, Homo sapiens
  siRNA target sequence for LXN (NM_020169.2,261-279).
gtggcacagaactacatca

SEQ ID NO: 375735 - DNA, 19 bp, Homo sapiens
  siRNA target sequence for LXN (NM_020169.2,264-282).
gcacagaactacatcaact

SEQ ID NO: 375736 - DNA, 19 bp, Homo sapiens
  siRNA target sequence for LXN (NM_020169.2,314-332).
ggtgcagaaggtcaaacaa

SEQ ID NO: 375737 - DNA, 19 bp, Homo sapiens
  siRNA target sequence for LXN (NM_020169.2,419-437).
gaactgcacagctgaagta

SEQ ID NO: 375738 - DNA, 19 bp, Homo sapiens
  siRNA target sequence for LXN (NM_020169.2,465-483).
gcaccagaagtcaacttca

SEQ ID NO: 375739 - DNA, 19 bp, Homo sapiens
  siRNA target sequence for LXN (NM_020169.2,561-579).
ccgctagaagcacaaaata

SEQ ID NO: 375740 - DNA, 19 bp, Homo sapiens
  siRNA target sequence for LXN (NM_020169.2,562-580).
cgctagaagcacaaaatat

SEQ ID NO: 375741 - DNA, 19 bp, Homo sapiens
  siRNA target sequence for LXN (NM_020169.2,563-581).
gctagaagcacaaaatatt

SEQ ID NO: 375742 - DNA, 19 bp, Homo sapiens
  siRNA target sequence for LXN (NM_020169.2,614-632).
gacgctcgttctacattta

SEQ ID NO: 375743 - DNA, 19 bp, Homo sapiens
  siRNA target sequence for LXN (NM_020169.2,637-655).
gggttgcctgtggttatat

SEQ ID NO: 375744 - DNA, 19 bp, Homo sapiens
  siRNA target sequence for LXN (NM_020169.2,642-660).
gcctgtggttatataatat

SEQ ID NO: 375745 - DNA, 19 bp, Homo sapiens
  siRNA target sequence for LXN (NM_020169.2,735-753).
gactttattgaattagact

SEQ ID NO: 375746 - DNA, 19 bp, Homo sapiens
  siRNA target sequence for LXN (NM_020169.2,752-770).
ctacaccattctacttcat

SEQ ID NO: 375747 - DNA, 19 bp, Homo sapiens
  siRNA target sequence for LXN (NM_020169.2,757-775).
ccattctacttcataatat

SEQ ID NO: 375748 - DNA, 19 bp, Homo sapiens
  siRNA target sequence for LXN (NM_020169.2,762-780).
ctacttcataatatagcat

SEQ ID NO: 375749 - DNA, 19 bp, Homo sapiens
  siRNA target sequence for LXN (NM_020169.2,823-841).
cacaatacggcactaaagt

SEQ ID NO: 375750 - DNA, 19 bp, Homo sapiens
  siRNA target sequence for LXN (NM_020169.2,825-843).
caatacggcactaaagtaa

SEQ ID NO: 375751 - DNA, 19 bp, Homo sapiens
  siRNA target sequence for LXN (NM_020169.2,830-848).
cggcactaaagtaaaacat

SEQ ID NO: 375752 - DNA, 19 bp, Homo sapiens
  siRNA target sequence for FEM1C (NM_020177.2,608-626).
ctccggcttctcaccaaat

SEQ ID NO: 375753 - DNA, 19 bp, Homo sapiens
  siRNA target sequence for FEM1C (NM_020177.2,611-629).
cggcttctcaccaaattgt

SEQ ID NO: 375754 - DNA, 19 bp, Homo sapiens
  siRNA target sequence for FEM1C (NM_020177.2,684-702).
gggccacgccactcttgat

SEQ ID NO: 375755 - DNA, 19 bp, Homo sapiens
  siRNA target sequence for FEM1C (NM_020177.2,711-729).
ggtatgggcaccttgacat

SEQ ID NO: 375756 - DNA, 19 bp, Homo sapiens
  siRNA target sequence for FEM1C (NM_020177.2,770-788).
gttgggggctccgtcaatt

SEQ ID NO: 375757 - DNA, 19 bp, Homo sapiens
  siRNA target sequence for FEM1C (NM_020177.2,774-792).
ggggctccgtcaattttga

SEQ ID NO: 375758 - DNA, 19 bp, Homo sapiens
  siRNA target sequence for FEM1C (NM_020177.2,775-793).
gggctccgtcaattttgat

SEQ ID NO: 375759 - DNA, 19 bp, Homo sapiens
  siRNA target sequence for FEM1C (NM_020177.2,853-871).
ggtggtccagtccttgtta

SEQ ID NO: 375760 - DNA, 19 bp, Homo sapiens
  siRNA target sequence for FEM1C (NM_020177.2,854-872).
gtggtccagtccttgttaa

SEQ ID NO: 375761 - DNA, 19 bp, Homo sapiens
  siRNA target sequence for FEM1C (NM_020177.2,887-905).
gtcaacaacacgactttaa

SEQ ID NO: 375762 - DNA, 19 bp, Homo sapiens
  siRNA target sequence for FEM1C (NM_020177.2,892-910).
caacacgactttaaccaat

SEQ ID NO: 375763 - DNA, 19 bp, Homo sapiens
  siRNA target sequence for FEM1C (NM_020177.2,895-913).
cacgactttaaccaattca

SEQ ID NO: 375764 - DNA, 19 bp, Homo sapiens
  siRNA target sequence for FEM1C (NM_020177.2,933-951).
gtttcgatggccatttgga

SEQ ID NO: 375765 - DNA, 19 bp, Homo sapiens
  siRNA target sequence for FEM1C (NM_020177.2,961-979).
gtaccttgtagaacacaaa

SEQ ID NO: 375766 - DNA, 19 bp, Homo sapiens
  siRNA target sequence for FEM1C (NM_020177.2,1007-1025).
gggcatacgtgcttgatga

SEQ ID NO: 375767 - DNA, 19 bp, Homo sapiens
  siRNA target sequence for FEM1C (NM_020177.2,1008-1026).
ggcatacgtgcttgatgat

SEQ ID NO: 375768 - DNA, 19 bp, Homo sapiens
  siRNA target sequence for FEM1C (NM_020177.2,1009-1027).
gcatacgtgcttgatgatt

SEQ ID NO: 375769 - DNA, 19 bp, Homo sapiens
  siRNA target sequence for FEM1C (NM_020177.2,1015-1033).
gtgcttgatgatttcatgt

SEQ ID NO: 375770 - DNA, 19 bp, Homo sapiens
  siRNA target sequence for FEM1C (NM_020177.2,1120-1138).
gcatgattgtgcagaatct

SEQ ID NO: 375771 - DNA, 19 bp, Homo sapiens
  siRNA target sequence for FEM1C (NM_020177.2,1137-1155).
ctggaagtttggacatcat

SEQ ID NO: 375772 - DNA, 19 bp, Homo sapiens
  siRNA target sequence for FEM1C (NM_020177.2,1139-1157).
ggaagtttggacatcatga

SEQ ID NO: 375773 - DNA, 19 bp, Homo sapiens
  siRNA target sequence for FEM1C (NM_020177.2,1140-1158).
gaagtttggacatcatgaa

SEQ ID NO: 375774 - DNA, 19 bp, Homo sapiens
  siRNA target sequence for FEM1C (NM_020177.2,1192-1210).
ggatggttatggaatgact

SEQ ID NO: 375775 - DNA, 19 bp, Homo sapiens
  siRNA target sequence for FEM1C (NM_020177.2,1229-1247).
gtgactggtcacacaaata

SEQ ID NO: 375776 - DNA, 19 bp, Homo sapiens
  siRNA target sequence for FEM1C (NM_020177.2,1231-1249).
gactggtcacacaaatatt

SEQ ID NO: 375777 - DNA, 19 bp, Homo sapiens
  siRNA target sequence for FEM1C (NM_020177.2,1278-1296).
ccagcaagacagaacgtat

SEQ ID NO: 375778 - DNA, 19 bp, Homo sapiens
  siRNA target sequence for FEM1C (NM_020177.2,1282-1300).
caagacagaacgtattaat

SEQ ID NO: 375779 - DNA, 19 bp, Homo sapiens
  siRNA target sequence for FEM1C (NM_020177.2,1309-1327).
gcttctgggagctacattt

SEQ ID NO: 375780 - DNA, 19 bp, Homo sapiens
  siRNA target sequence for FEM1C (NM_020177.2,1346-1364).
ctgcttggggctttgaaat

SEQ ID NO: 375781 - DNA, 19 bp, Homo sapiens
  siRNA target sequence for FEM1C (NM_020177.2,1390-1408).
gtacagtgataggactaat

SEQ ID NO: 375782 - DNA, 19 bp, Homo sapiens
  siRNA target sequence for FEM1C (NM_020177.2,1422-1440).
cagtgccacagacactaat

SEQ ID NO: 375783 - DNA, 19 bp, Homo sapiens
  siRNA target sequence for FEM1C (NM_020177.2,1434-1452).
cactaataatggcttatga

SEQ ID NO: 375784 - DNA, 19 bp, Homo sapiens
  siRNA target sequence for FEM1C (NM_020177.2,1436-1454).
ctaataatggcttatgatt

SEQ ID NO: 375785 - DNA, 19 bp, Homo sapiens
  siRNA target sequence for FEM1C (NM_020177.2,1483-1501).
gctagaaggtcttattgct

SEQ ID NO: 375786 - DNA, 19 bp, Homo sapiens
  siRNA target sequence for FEM1C (NM_020177.2,1502-1520).
gatcctgatgagatgagaa

SEQ ID NO: 375787 - DNA, 19 bp, Homo sapiens
  siRNA target sequence for FEM1C (NM_020177.2,1518-1536).
gaatgcaggcactattaat

SEQ ID NO: 375788 - DNA, 19 bp, Homo sapiens
  siRNA target sequence for FEM1C (NM_020177.2,1568-1586).
gatacctcttactatatta

SEQ ID NO: 375789 - DNA, 19 bp, Homo sapiens
  siRNA target sequence for FEM1C (NM_020177.2,1572-1590).
cctcttactatattagata

SEQ ID NO: 375790 - DNA, 19 bp, Homo sapiens
  siRNA target sequence for FEM1C (NM_020177.2,1573-1591).
ctcttactatattagatat

SEQ ID NO: 375791 - DNA, 19 bp, Homo sapiens
  siRNA target sequence for FEM1C (NM_020177.2,1633-1651).
catcaacctatggaagtat

SEQ ID NO: 375792 - DNA, 19 bp, Homo sapiens
  siRNA target sequence for FEM1C (NM_020177.2,1663-1681).
gcagcagagcaatttggat

SEQ ID NO: 375793 - DNA, 19 bp, Homo sapiens
  siRNA target sequence for FEM1C (NM_020177.2,1696-1714).
gaccgccagcagcttatta

SEQ ID NO: 375794 - DNA, 19 bp, Homo sapiens
  siRNA target sequence for FEM1C (NM_020177.2,1699-1717).
cgccagcagcttattatct

SEQ ID NO: 375795 - DNA, 19 bp, Homo sapiens
  siRNA target sequence for FEM1C (NM_020177.2,1701-1719).
ccagcagcttattatcttt

SEQ ID NO: 375796 - DNA, 19 bp, Homo sapiens
  siRNA target sequence for FEM1C (NM_020177.2,1702-1720).
cagcagcttattatctttt

SEQ ID NO: 375797 - DNA, 19 bp, Homo sapiens
  siRNA target sequence for FEM1C (NM_020177.2,1722-1740).
cagaactattctcctttat

SEQ ID NO: 375798 - DNA, 19 bp, Homo sapiens
  siRNA target sequence for FEM1C (NM_020177.2,1768-1786).
gggtactactgttacattt

SEQ ID NO: 375799 - DNA, 19 bp, Homo sapiens
  siRNA target sequence for FEM1C (NM_020177.2,1770-1788).
gtactactgttacatttga

SEQ ID NO: 375800 - DNA, 19 bp, Homo sapiens
  siRNA target sequence for FEM1C (NM_020177.2,1809-1827).
gcaaaagcgtccttgaaat

SEQ ID NO: 375801 - DNA, 19 bp, Homo sapiens
  siRNA target sequence for FEM1C (NM_020177.2,1810-1828).
caaaagcgtccttgaaata

SEQ ID NO: 375802 - DNA, 19 bp, Homo sapiens
  siRNA target sequence for FEM1C (NM_020177.2,1829-1847).
gagcgagctatcaaacaaa

SEQ ID NO: 375803 - DNA, 19 bp, Homo sapiens
  siRNA target sequence for FEM1C (NM_020177.2,1831-1849).
gcgagctatcaaacaaact

SEQ ID NO: 375804 - DNA, 19 bp, Homo sapiens
  siRNA target sequence for FEM1C (NM_020177.2,1854-1872).
gtccagctgacccattaca

SEQ ID NO: 375805 - DNA, 19 bp, Homo sapiens
  siRNA target sequence for FEM1C (NM_020177.2,1856-1874).
ccagctgacccattacagt

SEQ ID NO: 375806 - DNA, 19 bp, Homo sapiens
  siRNA target sequence for FEM1C (NM_020177.2,1857-1875).
cagctgacccattacagtt

SEQ ID NO: 375807 - DNA, 19 bp, Homo sapiens
  siRNA target sequence for FEM1C (NM_020177.2,1859-1877).
gctgacccattacagttaa

SEQ ID NO: 375808 - DNA, 19 bp, Homo sapiens
  siRNA target sequence for FEM1C (NM_020177.2,1862-1880).
gacccattacagttaaata

SEQ ID NO: 375809 - DNA, 19 bp, Homo sapiens
  siRNA target sequence for FEM1C (NM_020177.2,1921-1939).
gaaagttccttgtactcta

SEQ ID NO: 375810 - DNA, 19 bp, Homo sapiens
  siRNA target sequence for FEM1C (NM_020177.2,1935-1953).
ctctagaacaagaccattt

SEQ ID NO: 375811 - DNA, 19 bp, Homo sapiens
  siRNA target sequence for FEM1C (NM_020177.2,1963-1981).
gactatatacaggtttctt

SEQ ID NO: 375812 - DNA, 19 bp, Homo sapiens
  siRNA target sequence for FEM1C (NM_020177.2,1965-1983).
ctatatacaggtttcttaa

SEQ ID NO: 375813 - DNA, 19 bp, Homo sapiens
  siRNA target sequence for FEM1C (NM_020177.2,2030-2048).
gtggacaagaatactacat

SEQ ID NO: 375814 - DNA, 19 bp, Homo sapiens
  siRNA target sequence for FEM1C (NM_020177.2,2032-2050).
ggacaagaatactacatgt

SEQ ID NO: 375815 - DNA, 19 bp, Homo sapiens
  siRNA target sequence for FEM1C (NM_020177.2,2054-2072).
gggcggtaccctgtttgta

SEQ ID NO: 375816 - DNA, 19 bp, Homo sapiens
  siRNA target sequence for FEM1C (NM_020177.2,2055-2073).
ggcggtaccctgtttgtaa

SEQ ID NO: 375817 - DNA, 19 bp, Homo sapiens
  siRNA target sequence for FEM1C (NM_020177.2,2056-2074).
gcggtaccctgtttgtaaa

SEQ ID NO: 375818 - DNA, 19 bp, Homo sapiens
  siRNA target sequence for FEM1C (NM_020177.2,2057-2075).
cggtaccctgtttgtaaat

SEQ ID NO: 375819 - DNA, 19 bp, Homo sapiens
  siRNA target sequence for FEM1C (NM_020177.2,2059-2077).
gtaccctgtttgtaaattt

SEQ ID NO: 375820 - DNA, 19 bp, Homo sapiens
  siRNA target sequence for FEM1C (NM_020177.2,2087-2105).
caagttactgcaatactga

SEQ ID NO: 375821 - DNA, 19 bp, Homo sapiens
  siRNA target sequence for FEM1C (NM_020177.2,2159-2177).
catatcgctgctcttaaca

SEQ ID NO: 375822 - DNA, 19 bp, Homo sapiens
  siRNA target sequence for FEM1C (NM_020177.2,2334-2352).
ctcgtgtcatagtgaatca

SEQ ID NO: 375823 - DNA, 19 bp, Homo sapiens
  siRNA target sequence for FEM1C (NM_020177.2,2336-2354).
cgtgtcatagtgaatcata

SEQ ID NO: 375824 - DNA, 19 bp, Homo sapiens
  siRNA target sequence for FEM1C (NM_020177.2,2339-2357).
gtcatagtgaatcatagaa

SEQ ID NO: 375825 - DNA, 19 bp, Homo sapiens
  siRNA target sequence for FEM1C (NM_020177.2,2371-2389).
gcatatcccagaaaagcta

SEQ ID NO: 375826 - DNA, 19 bp, Homo sapiens
  siRNA target sequence for C14orf162 (NM_020181.1,190-208).
cggaggcctcccagagaaa

SEQ ID NO: 375827 - DNA, 19 bp, Homo sapiens
  siRNA target sequence for C14orf162 (NM_020181.1,192-210).
gaggcctcccagagaaaca

SEQ ID NO: 375828 - DNA, 19 bp, Homo sapiens
  siRNA target sequence for C14orf162 (NM_020181.1,228-246).
caagccacgcccaaatgat

SEQ ID NO: 375829 - DNA, 19 bp, Homo sapiens
  siRNA target sequence for C14orf162 (NM_020181.1,233-251).
cacgcccaaatgatccaaa

SEQ ID NO: 375830 - DNA, 19 bp, Homo sapiens
  siRNA target sequence for C14orf162 (NM_020181.1,235-253).
cgcccaaatgatccaaaaa

SEQ ID NO: 375831 - DNA, 19 bp, Homo sapiens
  siRNA target sequence for C14orf162 (NM_020181.1,244-262).
gatccaaaaagcagttgat

SEQ ID NO: 375832 - DNA, 19 bp, Homo sapiens
  siRNA target sequence for C14orf162 (NM_020181.1,310-328).
gatagttttccagtttagt

SEQ ID NO: 375833 - DNA, 19 bp, Homo sapiens
  siRNA target sequence for C14orf162 (NM_020181.1,329-347).
cccttgggttttctagtta

SEQ ID NO: 375834 - DNA, 19 bp, Homo sapiens
  siRNA target sequence for C14orf162 (NM_020181.1,348-366).
gacagtcatctgcagataa

SEQ ID NO: 375835 - DNA, 19 bp, Homo sapiens
  siRNA target sequence for C14orf162 (NM_020181.1,357-375).
ctgcagataatgttcaatt

SEQ ID NO: 375836 - DNA, 19 bp, Homo sapiens
  siRNA target sequence for CNNM4 (NM_020184.1,438-456).
ggtgctgtcgggcatattt

SEQ ID NO: 375837 - DNA, 19 bp, Homo sapiens
  siRNA target sequence for CNNM4 (NM_020184.1,439-457).
gtgctgtcgggcatatttt

SEQ ID NO: 375838 - DNA, 19 bp, Homo sapiens
  siRNA target sequence for CNNM4 (NM_020184.1,441-459).
gctgtcgggcatattttct

SEQ ID NO: 375839 - DNA, 19 bp, Homo sapiens
  siRNA target sequence for CNNM4 (NM_020184.1,537-555).
gcgctatgcccgcaagatt

SEQ ID NO: 375840 - DNA, 19 bp, Homo sapiens
  siRNA target sequence for CNNM4 (NM_020184.1,539-557).
gctatgcccgcaagattga

SEQ ID NO: 375841 - DNA, 19 bp, Homo sapiens
  siRNA target sequence for CNNM4 (NM_020184.1,687-705).
cattggcattgtcatcttt

SEQ ID NO: 375842 - DNA, 19 bp, Homo sapiens
  siRNA target sequence for CNNM4 (NM_020184.1,769-787).
cttctcaccaaattcttta

SEQ ID NO: 375843 - DNA, 19 bp, Homo sapiens
  siRNA target sequence for CNNM4 (NM_020184.1,821-839).
gcaagctcctggacttttt

SEQ ID NO: 375844 - DNA, 19 bp, Homo sapiens
  siRNA target sequence for CNNM4 (NM_020184.1,847-865).
caggagattcgcactgttt

SEQ ID NO: 375845 - DNA, 19 bp, Homo sapiens
  siRNA target sequence for CNNM4 (NM_020184.1,850-868).
gagattcgcactgtttaca

SEQ ID NO: 375846 - DNA, 19 bp, Homo sapiens
  siRNA target sequence for CNNM4 (NM_020184.1,897-915).
ggtgacggagccctataat

SEQ ID NO: 375847 - DNA, 19 bp, Homo sapiens
  siRNA target sequence for CNNM4 (NM_020184.1,1093-1111).
gaagacgagcagtccaata

SEQ ID NO: 375848 - DNA, 19 bp, Homo sapiens
  siRNA target sequence for CNNM4 (NM_020184.1,1098-1116).
cgagcagtccaatattgta

SEQ ID NO: 375849 - DNA, 19 bp, Homo sapiens
  siRNA target sequence for CNNM4 (NM_020184.1,1101-1119).
gcagtccaatattgtagat

SEQ ID NO: 375850 - DNA, 19 bp, Homo sapiens
  siRNA target sequence for CNNM4 (NM_020184.1,1104-1122).
gtccaatattgtagatatt

SEQ ID NO: 375851 - DNA, 19 bp, Homo sapiens
  siRNA target sequence for CNNM4 (NM_020184.1,1163-1181).
gcacccccctcaagactat

SEQ ID NO: 375852 - DNA, 19 bp, Homo sapiens
  siRNA target sequence for CNNM4 (NM_020184.1,1167-1185).
ccccctcaagactatcact

SEQ ID NO: 375853 - DNA, 19 bp, Homo sapiens
  siRNA target sequence for CNNM4 (NM_020184.1,1176-1194).
gactatcactcgcttctat

SEQ ID NO: 375854 - DNA, 19 bp, Homo sapiens
  siRNA target sequence for CNNM4 (NM_020184.1,1178-1196).
ctatcactcgcttctataa

SEQ ID NO: 375855 - DNA, 19 bp, Homo sapiens
  siRNA target sequence for CNNM4 (NM_020184.1,1472-1490).
cggacaatgagctcaaagt

SEQ ID NO: 375856 - DNA, 19 bp, Homo sapiens
  siRNA target sequence for CNNM4 (NM_020184.1,1536-1554).
cacagaggtctctcagttt

SEQ ID NO: 375857 - DNA, 19 bp, Homo sapiens
  siRNA target sequence for CNNM4 (NM_020184.1,1969-1987).
gtggacttgcagtacatca

SEQ ID NO: 375858 - DNA, 19 bp, Homo sapiens
  siRNA target sequence for CNNM4 (NM_020184.1,2115-2133).
ggacgagaccacaactctt

SEQ ID NO: 375859 - DNA, 19 bp, Homo sapiens
  siRNA target sequence for ACN9 (NM_020186.1,40-58).
ctcgagtccgggcattgta

SEQ ID NO: 375860 - DNA, 19 bp, Homo sapiens
  siRNA target sequence for ACN9 (NM_020186.1,42-60).
cgagtccgggcattgtaca

SEQ ID NO: 375861 - DNA, 19 bp, Homo sapiens
  siRNA target sequence for ACN9 (NM_020186.1,43-61).
gagtccgggcattgtacaa

SEQ ID NO: 375862 - DNA, 19 bp, Homo sapiens
  siRNA target sequence for ACN9 (NM_020186.1,112-130).
gcgaccagtacgtgaaaga

SEQ ID NO: 375863 - DNA, 19 bp, Homo sapiens
  siRNA target sequence for ACN9 (NM_020186.1,119-137).
gtacgtgaaagacgaattt

SEQ ID NO: 375864 - DNA, 19 bp, Homo sapiens
  siRNA target sequence for ACN9 (NM_020186.1,123-141).
gtgaaagacgaatttagga

SEQ ID NO: 375865 - DNA, 19 bp, Homo sapiens
  siRNA target sequence for ACN9 (NM_020186.1,129-147).
gacgaatttaggagacata

SEQ ID NO: 375866 - DNA, 19 bp, Homo sapiens
  siRNA target sequence for ACN9 (NM_020186.1,171-189).
cagcgtttcttgcaagaat

SEQ ID NO: 375867 - DNA, 19 bp, Homo sapiens
  siRNA target sequence for ACN9 (NM_020186.1,186-204).
gaatgggaggtgtatgcaa

SEQ ID NO: 375868 - DNA, 19 bp, Homo sapiens
  siRNA target sequence for ACN9 (NM_020186.1,216-234).
caacaggctaacgaaaaca

SEQ ID NO: 375869 - DNA, 19 bp, Homo sapiens
  siRNA target sequence for ACN9 (NM_020186.1,275-293).
cccagaagaaaaacttaat

SEQ ID NO: 375870 - DNA, 19 bp, Homo sapiens
  siRNA target sequence for ACN9 (NM_020186.1,351-369).
cccaataggcaatttagta

SEQ ID NO: 375871 - DNA, 19 bp, Homo sapiens
  siRNA target sequence for ACN9 (NM_020186.1,353-371).
caataggcaatttagtatt

SEQ ID NO: 375872 - DNA, 19 bp, Homo sapiens
  siRNA target sequence for DC12 (NM_020187.1,110-128).
gcgaacatcctgtcactta

SEQ ID NO: 375873 - DNA, 19 bp, Homo sapiens
  siRNA target sequence for DC12 (NM_020187.1,119-137).
ctgtcacttacctagagat

SEQ ID NO: 375874 - DNA, 19 bp, Homo sapiens
  siRNA target sequence for DC12 (NM_020187.1,293-311).
ctcatctgagcgtatcatt

SEQ ID NO: 375875 - DNA, 19 bp, Homo sapiens
  siRNA target sequence for DC12 (NM_020187.1,336-354).
ccttcttggttcaaagaaa

SEQ ID NO: 375876 - DNA, 19 bp, Homo sapiens
  siRNA target sequence for DC12 (NM_020187.1,394-412).
gtagtgataccgtaatgga

SEQ ID NO: 375877 - DNA, 19 bp, Homo sapiens
  siRNA target sequence for DC12 (NM_020187.1,445-463).
gaagacgctgtgtcgtttt

SEQ ID NO: 375878 - DNA, 19 bp, Homo sapiens
  siRNA target sequence for DC12 (NM_020187.1,465-483).
gcagatggattctatgagt

SEQ ID NO: 375879 - DNA, 19 bp, Homo sapiens
  siRNA target sequence for DC12 (NM_020187.1,736-754).
ggatgcctgccatattaga

SEQ ID NO: 375880 - DNA, 19 bp, Homo sapiens
  siRNA target sequence for DC12 (NM_020187.1,737-755).
gatgcctgccatattagat

SEQ ID NO: 375881 - DNA, 19 bp, Homo sapiens
  siRNA target sequence for DC12 (NM_020187.1,756-774).
ggagaggaggcagtttcta

SEQ ID NO: 375882 - DNA, 19 bp, Homo sapiens
  siRNA target sequence for DC13 (NM_020188.1,197-215).
cacttgcacactgaagaat

SEQ ID NO: 375883 - DNA, 19 bp, Homo sapiens
  siRNA target sequence for DC13 (NM_020188.1,212-230).
gaatgcaacgtcttgatta

SEQ ID NO: 375884 - DNA, 19 bp, Homo sapiens
  siRNA target sequence for DC13 (NM_020188.1,216-234).
gcaacgtcttgattaactt

SEQ ID NO: 375885 - DNA, 19 bp, Homo sapiens
  siRNA target sequence for DC13 (NM_020188.1,235-253).
gcttaaggaatgtcacaaa

SEQ ID NO: 375886 - DNA, 19 bp, Homo sapiens
  siRNA target sequence for DC13 (NM_020188.1,236-254).
cttaaggaatgtcacaaaa

SEQ ID NO: 375887 - DNA, 19 bp, Homo sapiens
  siRNA target sequence for DC13 (NM_020188.1,293-311).
gttgatcgggagttgagaa

SEQ ID NO: 375888 - DNA, 19 bp, Homo sapiens
  siRNA target sequence for DC13 (NM_020188.1,296-314).
gatcgggagttgagaaaat

SEQ ID NO: 375889 - DNA, 19 bp, Homo sapiens
  siRNA target sequence for DC13 (NM_020188.1,364-382).
cattgcaatgcgaaagaaa

SEQ ID NO: 375890 - DNA, 19 bp, Homo sapiens
  siRNA target sequence for DC13 (NM_020188.1,369-387).
caatgcgaaagaaactttt

SEQ ID NO: 375891 - DNA, 19 bp, Homo sapiens
  siRNA target sequence for DC13 (NM_020188.1,395-413).
ccagaggaatccgaaaaat

SEQ ID NO: 375892 - DNA, 19 bp, Homo sapiens
  siRNA target sequence for DC6 (NM_020189.4,66-84).
gtggttagcaagatgaaca

SEQ ID NO: 375893 - DNA, 19 bp, Homo sapiens
  siRNA target sequence for DC6 (NM_020189.4,100-118).
gagcagcgattaaccaaaa

SEQ ID NO: 375894 - DNA, 19 bp, Homo sapiens
  siRNA target sequence for DC6 (NM_020189.4,102-120).
gcagcgattaaccaaaagt

SEQ ID NO: 375895 - DNA, 19 bp, Homo sapiens
  siRNA target sequence for DC6 (NM_020189.4,105-123).
gcgattaaccaaaagttga

SEQ ID NO: 375896 - DNA, 19 bp, Homo sapiens
  siRNA target sequence for DC6 (NM_020189.4,106-124).
cgattaaccaaaagttgat

SEQ ID NO: 375897 - DNA, 19 bp, Homo sapiens
  siRNA target sequence for DC6 (NM_020189.4,107-125).
gattaaccaaaagttgata

SEQ ID NO: 375898 - DNA, 19 bp, Homo sapiens
  siRNA target sequence for DC6 (NM_020189.4,139-157).
gagaacgcctcaaagagtt

SEQ ID NO: 375899 - DNA, 19 bp, Homo sapiens
  siRNA target sequence for DC6 (NM_020189.4,153-171).
gagttgctgagagctaaat

SEQ ID NO: 375900 - DNA, 19 bp, Homo sapiens
  siRNA target sequence for DC6 (NM_020189.4,161-179).
gagagctaaattaattgaa

SEQ ID NO: 375901 - DNA, 19 bp, Homo sapiens
  siRNA target sequence for DC6 (NM_020189.4,294-312).
ctggtacctgacagtgtaa

SEQ ID NO: 375902 - DNA, 19 bp, Homo sapiens
  siRNA target sequence for DC6 (NM_020189.4,318-336).
gagctcctacaaagaataa

SEQ ID NO: 375903 - DNA, 19 bp, Homo sapiens
  siRNA target sequence for HNOEL-iso (NM_020190.1,155-173).
gccgactagctgctttaga

SEQ ID NO: 375904 - DNA, 19 bp, Homo sapiens
  siRNA target sequence for HNOEL-iso (NM_020190.1,458-476).
cagactgtggctacacaat

SEQ ID NO: 375905 - DNA, 19 bp, Homo sapiens
  siRNA target sequence for HNOEL-iso (NM_020190.1,462-480).
ctgtggctacacaatctct

SEQ ID NO: 375906 - DNA, 19 bp, Homo sapiens
  siRNA target sequence for HNOEL-iso (NM_020190.1,479-497).
ctcaagtgagatcaatgaa

SEQ ID NO: 375907 - DNA, 19 bp, Homo sapiens
  siRNA target sequence for HNOEL-iso (NM_020190.1,550-568).
gggcaaacagagaagatct

SEQ ID NO: 375908 - DNA, 19 bp, Homo sapiens
  siRNA target sequence for HNOEL-iso (NM_020190.1,551-569).
ggcaaacagagaagatcta

SEQ ID NO: 375909 - DNA, 19 bp, Homo sapiens
  siRNA target sequence for HNOEL-iso (NM_020190.1,561-579).
gaagatctacgtgttagat

SEQ ID NO: 375910 - DNA, 19 bp, Homo sapiens
  siRNA target sequence for HNOEL-iso (NM_020190.1,686-704).
gcacagggcagctggtata

SEQ ID NO: 375911 - DNA, 19 bp, Homo sapiens
  siRNA target sequence for HNOEL-iso (NM_020190.1,687-705).
cacagggcagctggtatat

SEQ ID NO: 375912 - DNA, 19 bp, Homo sapiens
  siRNA target sequence for HNOEL-iso (NM_020190.1,771-789).
cactttgcagctaatcaaa

SEQ ID NO: 375913 - DNA, 19 bp, Homo sapiens
  siRNA target sequence for HNOEL-iso (NM_020190.1,811-829).
gtggtggacagctcagtat

SEQ ID NO: 375914 - DNA, 19 bp, Homo sapiens
  siRNA target sequence for HNOEL-iso (NM_020190.1,945-963).
cttgtgtctggccaagtta

SEQ ID NO: 375915 - DNA, 19 bp, Homo sapiens
  siRNA target sequence for HNOEL-iso (NM_020190.1,948-966).
gtgtctggccaagttagat

SEQ ID NO: 375916 - DNA, 19 bp, Homo sapiens
  siRNA target sequence for HNOEL-iso (NM_020190.1,1049-1067).
ccctctatgtcgtctataa

SEQ ID NO: 375917 - DNA, 19 bp, Homo sapiens
  siRNA target sequence for HNOEL-iso (NM_020190.1,1135-1153).
cgggcagcactcccttatt

SEQ ID NO: 375918 - DNA, 19 bp, Homo sapiens
  siRNA target sequence for HNOEL-iso (NM_020190.1,1229-1247).
gctaccagattgtctataa

SEQ ID NO: 375919 - DNA, 19 bp, Homo sapiens
  siRNA target sequence for GK003 (NM_020192.1,123-141).
gcaaagacgagtcaaagaa

SEQ ID NO: 375920 - DNA, 19 bp, Homo sapiens
  siRNA target sequence for GK003 (NM_020192.1,128-146).
gacgagtcaaagaaggtta

SEQ ID NO: 375921 - DNA, 19 bp, Homo sapiens
  siRNA target sequence for GK003 (NM_020192.1,130-148).
cgagtcaaagaaggttata

SEQ ID NO: 375922 - DNA, 19 bp, Homo sapiens
  siRNA target sequence for GK003 (NM_020192.1,143-161).
gttatagagatggaataga

SEQ ID NO: 375923 - DNA, 19 bp, Homo sapiens
  siRNA target sequence for GK003 (NM_020192.1,189-207).
gggcttcaatcaaggttat

SEQ ID NO: 375924 - DNA, 19 bp, Homo sapiens
  siRNA target sequence for GK003 (NM_020192.1,190-208).
ggcttcaatcaaggttata

SEQ ID NO: 375925 - DNA, 19 bp, Homo sapiens
  siRNA target sequence for GK003 (NM_020192.1,191-209).
gcttcaatcaaggttataa

SEQ ID NO: 375926 - DNA, 19 bp, Homo sapiens
  siRNA target sequence for GK003 (NM_020192.1,241-259).
cgactccgaggaacattga

SEQ ID NO: 375927 - DNA, 19 bp, Homo sapiens
  siRNA target sequence for GK003 (NM_020192.1,272-290).
cctggtgtcaccttcataa

SEQ ID NO: 375928 - DNA, 19 bp, Homo sapiens
  siRNA target sequence for GK003 (NM_020192.1,273-291).
ctggtgtcaccttcataat

SEQ ID NO: 375929 - DNA, 19 bp, Homo sapiens
  siRNA target sequence for GK003 (NM_020192.1,341-359).
gccagtgtgaagagtatgt

SEQ ID NO: 375930 - DNA, 19 bp, Homo sapiens
  siRNA target sequence for GK003 (NM_020192.1,386-404).
caccgtcccatgttgtaga

SEQ ID NO: 375931 - DNA, 19 bp, Homo sapiens
  siRNA target sequence for GK003 (NM_020192.1,388-406).
ccgtcccatgttgtagatt

SEQ ID NO: 375932 - DNA, 19 bp, Homo sapiens
  siRNA target sequence for GK003 (NM_020192.1,389-407).
cgtcccatgttgtagattt

SEQ ID NO: 375933 - DNA, 19 bp, Homo sapiens
  siRNA target sequence for GK003 (NM_020192.1,390-408).
gtcccatgttgtagattta

SEQ ID NO: 375934 - DNA, 19 bp, Homo sapiens
  siRNA target sequence for GK003 (NM_020192.1,392-410).
cccatgttgtagatttatt

SEQ ID NO: 375935 - DNA, 19 bp, Homo sapiens
  siRNA target sequence for GK003 (NM_020192.1,423-441).
ggatatggacctttgtcat

SEQ ID NO: 375936 - DNA, 19 bp, Homo sapiens
  siRNA target sequence for GK003 (NM_020192.1,429-447).
ggacctttgtcatgtagtt

SEQ ID NO: 375937 - DNA, 19 bp, Homo sapiens
  siRNA target sequence for GK003 (NM_020192.1,505-523).
gagtttaacaaaaactgta

SEQ ID NO: 375938 - DNA, 19 bp, Homo sapiens
  siRNA target sequence for GK003 (NM_020192.1,528-546).
gagccatagtgggatagat

SEQ ID NO: 375939 - DNA, 19 bp, Homo sapiens
  siRNA target sequence for GK003 (NM_020192.1,577-595).
gagcatgcacattcagaaa

SEQ ID NO: 375940 - DNA, 19 bp, Homo sapiens
  siRNA target sequence for GK003 (NM_020192.1,602-620).
gccccacatggattttgga

SEQ ID NO: 375941 - DNA, 19 bp, Homo sapiens
  siRNA target sequence for GK003 (NM_020192.1,618-636).
ggaacagacagccagttta

SEQ ID NO: 375942 - DNA, 19 bp, Homo sapiens
  siRNA target sequence for GK003 (NM_020192.1,624-642).
gacagccagtttagttaaa

SEQ ID NO: 375943 - DNA, 19 bp, Homo sapiens
  siRNA target sequence for GK003 (NM_020192.1,626-644).
cagccagtttagttaaaca

SEQ ID NO: 375944 - DNA, 19 bp, Homo sapiens
  siRNA target sequence for GK003 (NM_020192.1,648-666).
gggcctatcagtagatgta

SEQ ID NO: 375945 - DNA, 19 bp, Homo sapiens
  siRNA target sequence for GK003 (NM_020192.1,649-667).
ggcctatcagtagatgtat

SEQ ID NO: 375946 - DNA, 19 bp, Homo sapiens
  siRNA target sequence for GK003 (NM_020192.1,650-668).
gcctatcagtagatgtatt

SEQ ID NO: 375947 - DNA, 19 bp, Homo sapiens
  siRNA target sequence for GK003 (NM_020192.1,670-688).
caacacctcaaacaactat

SEQ ID NO: 375948 - DNA, 19 bp, Homo sapiens
  siRNA target sequence for C11orf30 (NM_020193.2,149-167).
gagaactatcaaaagttct

SEQ ID NO: 375949 - DNA, 19 bp, Homo sapiens
  siRNA target sequence for C11orf30 (NM_020193.2,216-234).
cgatgaacggttaacaaca

SEQ ID NO: 375950 - DNA, 19 bp, Homo sapiens
  siRNA target sequence for C11orf30 (NM_020193.2,217-235).
gatgaacggttaacaacaa

SEQ ID NO: 375951 - DNA, 19 bp, Homo sapiens
  siRNA target sequence for C11orf30 (NM_020193.2,324-342).
ccaaaccgcctttactgta

SEQ ID NO: 375952 - DNA, 19 bp, Homo sapiens
  siRNA target sequence for C11orf30 (NM_020193.2,325-343).
caaaccgcctttactgtaa

SEQ ID NO: 375953 - DNA, 19 bp, Homo sapiens
  siRNA target sequence for C11orf30 (NM_020193.2,413-431).
gcaaggaagtggtttgcta

SEQ ID NO: 375954 - DNA, 19 bp, Homo sapiens
  siRNA target sequence for C11orf30 (NM_020193.2,418-436).
gaagtggtttgctattcct

SEQ ID NO: 375955 - DNA, 19 bp, Homo sapiens
  siRNA target sequence for C11orf30 (NM_020193.2,475-493).
ccaagtggcagcatagcaa

SEQ ID NO: 375956 - DNA, 19 bp, Homo sapiens
  siRNA target sequence for C11orf30 (NM_020193.2,486-504).
catagcaacggttaagtct

SEQ ID NO: 375957 - DNA, 19 bp, Homo sapiens
  siRNA target sequence for C11orf30 (NM_020193.2,521-539).
ctgcctccaatgtagttgt

SEQ ID NO: 375958 - DNA, 19 bp, Homo sapiens
  siRNA target sequence for C11orf30 (NM_020193.2,610-628).
cgaaggcgaacaaactctt

SEQ ID NO: 375959 - DNA, 19 bp, Homo sapiens
  siRNA target sequence for C11orf30 (NM_020193.2,632-650).
gctcctctcctgttgttct

SEQ ID NO: 375960 - DNA, 19 bp, Homo sapiens
  siRNA target sequence for C11orf30 (NM_020193.2,633-651).
ctcctctcctgttgttcta

SEQ ID NO: 375961 - DNA, 19 bp, Homo sapiens
  siRNA target sequence for C11orf30 (NM_020193.2,670-688).
gttgttccagtctcaaaga

SEQ ID NO: 375962 - DNA, 19 bp, Homo sapiens
  siRNA target sequence for C11orf30 (NM_020193.2,786-804).
cttcactaaaccatcaaca

SEQ ID NO: 375963 - DNA, 19 bp, Homo sapiens
  siRNA target sequence for C11orf30 (NM_020193.2,821-839).
caacacagaaggttattat

SEQ ID NO: 375964 - DNA, 19 bp, Homo sapiens
  siRNA target sequence for C11orf30 (NM_020193.2,826-844).
cagaaggttattatagtca

SEQ ID NO: 375965 - DNA, 19 bp, Homo sapiens
  siRNA target sequence for C11orf30 (NM_020193.2,863-881).
ccttcgtgcccaacattct

SEQ ID NO: 375966 - DNA, 19 bp, Homo sapiens
  siRNA target sequence for C11orf30 (NM_020193.2,871-889).
cccaacattctctccaaat

SEQ ID NO: 375967 - DNA, 19 bp, Homo sapiens
  siRNA target sequence for C11orf30 (NM_020193.2,922-940).
ccaacgtcagtcattgctt

SEQ ID NO: 375968 - DNA, 19 bp, Homo sapiens
  siRNA target sequence for C11orf30 (NM_020193.2,951-969).
gaagccaccagttgttata

SEQ ID NO: 375969 - DNA, 19 bp, Homo sapiens
  siRNA target sequence for C11orf30 (NM_020193.2,954-972).
gccaccagttgttataact

SEQ ID NO: 375970 - DNA, 19 bp, Homo sapiens
  siRNA target sequence for C11orf30 (NM_020193.2,1025-1043).
caccatcacctattcctaa

SEQ ID NO: 375971 - DNA, 19 bp, Homo sapiens
  siRNA target sequence for C11orf30 (NM_020193.2,1027-1045).
ccatcacctattcctaata

SEQ ID NO: 375972 - DNA, 19 bp, Homo sapiens
  siRNA target sequence for C11orf30 (NM_020193.2,1031-1049).
cacctattcctaatacagt

SEQ ID NO: 375973 - DNA, 19 bp, Homo sapiens
  siRNA target sequence for C11orf30 (NM_020193.2,1102-1120).
gcacaaggtgtatctacat

SEQ ID NO: 375974 - DNA, 19 bp, Homo sapiens
  siRNA target sequence for C11orf30 (NM_020193.2,1220-1238).
ctcctaagcagcagttata

SEQ ID NO: 375975 - DNA, 19 bp, Homo sapiens
  siRNA target sequence for C11orf30 (NM_020193.2,1315-1333).
cctttgccacctggtatta

SEQ ID NO: 375976 - DNA, 19 bp, Homo sapiens
  siRNA target sequence for C11orf30 (NM_020193.2,1316-1334).
ctttgccacctggtattaa

SEQ ID NO: 375977 - DNA, 19 bp, Homo sapiens
  siRNA target sequence for C11orf30 (NM_020193.2,1321-1339).
ccacctggtattaaaccta

SEQ ID NO: 375978 - DNA, 19 bp, Homo sapiens
  siRNA target sequence for C11orf30 (NM_020193.2,1354-1372).
caggagtcaggtgttaaaa

SEQ ID NO: 375979 - DNA, 19 bp, Homo sapiens
  siRNA target sequence for C11orf30 (NM_020193.2,1384-1402).
caggttcaaccaagtaaaa

SEQ ID NO: 375980 - DNA, 19 bp, Homo sapiens
  siRNA target sequence for C11orf30 (NM_020193.2,1429-1447).
ctacccaccagtagcaatt

SEQ ID NO: 375981 - DNA, 19 bp, Homo sapiens
  siRNA target sequence for C11orf30 (NM_020193.2,1439-1457).
gtagcaattcccctattat

SEQ ID NO: 375982 - DNA, 19 bp, Homo sapiens
  siRNA target sequence for C11orf30 (NM_020193.2,1442-1460).
gcaattcccctattatggt

SEQ ID NO: 375983 - DNA, 19 bp, Homo sapiens
  siRNA target sequence for C11orf30 (NM_020193.2,1458-1476).
ggtggttagcagtaatggt

SEQ ID NO: 375984 - DNA, 19 bp, Homo sapiens
  siRNA target sequence for C11orf30 (NM_020193.2,1474-1492).
ggtgcaattatgacaacta

SEQ ID NO: 375985 - DNA, 19 bp, Homo sapiens
  siRNA target sequence for C11orf30 (NM_020193.2,1607-1625).
gtggtagcatcattacagt

SEQ ID NO: 375986 - DNA, 19 bp, Homo sapiens
  siRNA target sequence for C11orf30 (NM_020193.2,1659-1677).
gataattagcagtaatata

SEQ ID NO: 375987 - DNA, 19 bp, Homo sapiens
  siRNA target sequence for C11orf30 (NM_020193.2,1682-1700).
ctggaacgactaccaaaat

SEQ ID NO: 375988 - DNA, 19 bp, Homo sapiens
  siRNA target sequence for C11orf30 (NM_020193.2,1684-1702).
ggaacgactaccaaaatca

SEQ ID NO: 375989 - DNA, 19 bp, Homo sapiens
  siRNA target sequence for C11orf30 (NM_020193.2,1701-1719).
cactacaatcccaatgact

SEQ ID NO: 375990 - DNA, 19 bp, Homo sapiens
  siRNA target sequence for C11orf30 (NM_020193.2,1725-1743).
gcccaacgtgattgttgta

SEQ ID NO: 375991 - DNA, 19 bp, Homo sapiens
  siRNA target sequence for C11orf30 (NM_020193.2,1728-1746).
caacgtgattgttgtacaa

SEQ ID NO: 375992 - DNA, 19 bp, Homo sapiens
  siRNA target sequence for C11orf30 (NM_020193.2,1795-1813).
gttgtcacaacgttgctaa

SEQ ID NO: 375993 - DNA, 19 bp, Homo sapiens
  siRNA target sequence for C11orf30 (NM_020193.2,1820-1838).
gaggagaaaagactattca

SEQ ID NO: 375994 - DNA, 19 bp, Homo sapiens
  siRNA target sequence for C11orf30 (NM_020193.2,1883-1901).
gacccatcaccaaaatgat

SEQ ID NO: 375995 - DNA, 19 bp, Homo sapiens
  siRNA target sequence for C11orf30 (NM_020193.2,1908-1926).
gcagccaaaaggaataggt

SEQ ID NO: 375996 - DNA, 19 bp, Homo sapiens
  siRNA target sequence for C11orf30 (NM_020193.2,1936-1954).
caaccagcagctaaaatca

SEQ ID NO: 375997 - DNA, 19 bp, Homo sapiens
  siRNA target sequence for C11orf30 (NM_020193.2,1946-1964).
ctaaaatcatcccaacaaa

SEQ ID NO: 375998 - DNA, 19 bp, Homo sapiens
  siRNA target sequence for C11orf30 (NM_020193.2,1984-2002).
gggaaaacgcaggttctta

SEQ ID NO: 375999 - DNA, 19 bp, Homo sapiens
  siRNA target sequence for C11orf30 (NM_020193.2,2047-2065).
caaacaagacagctagtaa

SEQ ID NO: 376000 - DNA, 19 bp, Homo sapiens
  siRNA target sequence for C11orf30 (NM_020193.2,2051-2069).
caagacagctagtaacaga

SEQ ID NO: 376001 - DNA, 19 bp, Homo sapiens
  siRNA target sequence for C11orf30 (NM_020193.2,2092-2110).
gtagcagaggctggtaatt

SEQ ID NO: 376002 - DNA, 19 bp, Homo sapiens
  siRNA target sequence for C11orf30 (NM_020193.2,2095-2113).
gcagaggctggtaattcat

SEQ ID NO: 376003 - DNA, 19 bp, Homo sapiens
  siRNA target sequence for C11orf30 (NM_020193.2,2098-2116).
gaggctggtaattcatcta

SEQ ID NO: 376004 - DNA, 19 bp, Homo sapiens
  siRNA target sequence for C11orf30 (NM_020193.2,2100-2118).
ggctggtaattcatctatt

SEQ ID NO: 376005 - DNA, 19 bp, Homo sapiens
  siRNA target sequence for C11orf30 (NM_020193.2,2202-2220).
gcctgtagttcatgtaatt

SEQ ID NO: 376006 - DNA, 19 bp, Homo sapiens
  siRNA target sequence for C11orf30 (NM_020193.2,2265-2283).
gactagccctaccataatt

SEQ ID NO: 376007 - DNA, 19 bp, Homo sapiens
  siRNA target sequence for C11orf30 (NM_020193.2,2289-2307).
ggatgtatccagtgaatca

SEQ ID NO: 376008 - DNA, 19 bp, Homo sapiens
  siRNA target sequence for C11orf30 (NM_020193.2,2384-2402).
caagacaacccactattga

SEQ ID NO: 376009 - DNA, 19 bp, Homo sapiens
  siRNA target sequence for C11orf30 (NM_020193.2,2396-2414).
ctattgacctgagtcaaat

SEQ ID NO: 376010 - DNA, 19 bp, Homo sapiens
  siRNA target sequence for C11orf30 (NM_020193.2,2436-2454).
ccaggaaaagagacattct

SEQ ID NO: 376011 - DNA, 19 bp, Homo sapiens
  siRNA target sequence for C11orf30 (NM_020193.2,2486-2504).
cagaactagtagctgaata

SEQ ID NO: 376012 - DNA, 19 bp, Homo sapiens
  siRNA target sequence for C11orf30 (NM_020193.2,2488-2506).
gaactagtagctgaataca

SEQ ID NO: 376013 - DNA, 19 bp, Homo sapiens
  siRNA target sequence for C11orf30 (NM_020193.2,2494-2512).
gtagctgaatacatcacta

SEQ ID NO: 376014 - DNA, 19 bp, Homo sapiens
  siRNA target sequence for C11orf30 (NM_020193.2,2684-2702).
gagcaatcacccacattat

SEQ ID NO: 376015 - DNA, 19 bp, Homo sapiens
  siRNA target sequence for C11orf30 (NM_020193.2,2907-2925).
gcagtgcttccagactaaa

SEQ ID NO: 376016 - DNA, 19 bp, Homo sapiens
  siRNA target sequence for C11orf30 (NM_020193.2,2989-3007).
ctttccatcaggcatcaaa

SEQ ID NO: 376017 - DNA, 19 bp, Homo sapiens
  siRNA target sequence for C11orf30 (NM_020193.2,2993-3011).
ccatcaggcatcaaaaact

SEQ ID NO: 376018 - DNA, 19 bp, Homo sapiens
  siRNA target sequence for C11orf30 (NM_020193.2,3155-3173).
cgcagcagctccctaaact

SEQ ID NO: 376019 - DNA, 19 bp, Homo sapiens
  siRNA target sequence for C11orf30 (NM_020193.2,3185-3203).
cgaaccaaccaaaaatcta

SEQ ID NO: 376020 - DNA, 19 bp, Homo sapiens
  siRNA target sequence for C11orf30 (NM_020193.2,3271-3289).
caggtggagcagccaatta

SEQ ID NO: 376021 - DNA, 19 bp, Homo sapiens
  siRNA target sequence for C11orf30 (NM_020193.2,3273-3291).
ggtggagcagccaattata

SEQ ID NO: 376022 - DNA, 19 bp, Homo sapiens
  siRNA target sequence for C11orf30 (NM_020193.2,3274-3292).
gtggagcagccaattataa

SEQ ID NO: 376023 - DNA, 19 bp, Homo sapiens
  siRNA target sequence for C11orf30 (NM_020193.2,3305-3323).
ctgttacaaagataacttt

SEQ ID NO: 376024 - DNA, 19 bp, Homo sapiens
  siRNA target sequence for C11orf30 (NM_020193.2,3331-3349).
cgccagcctcccacagtta

SEQ ID NO: 376025 - DNA, 19 bp, Homo sapiens
  siRNA target sequence for C11orf30 (NM_020193.2,3340-3358).
cccacagttacaaagataa

SEQ ID NO: 376026 - DNA, 19 bp, Homo sapiens
  siRNA target sequence for C11orf30 (NM_020193.2,3429-3447).
gacagcagtgtctgacatt

SEQ ID NO: 376027 - DNA, 19 bp, Homo sapiens
  siRNA target sequence for C11orf30 (NM_020193.2,3470-3488).
ctcagattgatacaaatgt

SEQ ID NO: 376028 - DNA, 19 bp, Homo sapiens
  siRNA target sequence for C11orf30 (NM_020193.2,3659-3677).
ccctaacgacaaggaaaat

SEQ ID NO: 376029 - DNA, 19 bp, Homo sapiens
  siRNA target sequence for C11orf30 (NM_020193.2,3660-3678).
cctaacgacaaggaaaatt

SEQ ID NO: 376030 - DNA, 19 bp, Homo sapiens
  siRNA target sequence for C11orf30 (NM_020193.2,3695-3713).
ctgcgacaggccagttcat

SEQ ID NO: 376031 - DNA, 19 bp, Homo sapiens
  siRNA target sequence for C11orf30 (NM_020193.2,3704-3722).
gccagttcatgcgtattca

SEQ ID NO: 376032 - DNA, 19 bp, Homo sapiens
  siRNA target sequence for C11orf30 (NM_020193.2,3706-3724).
cagttcatgcgtattcaga

SEQ ID NO: 376033 - DNA, 19 bp, Homo sapiens
  siRNA target sequence for C11orf30 (NM_020193.2,3708-3726).
gttcatgcgtattcagaat

SEQ ID NO: 376034 - DNA, 19 bp, Homo sapiens
  siRNA target sequence for C11orf30 (NM_020193.2,3748-3766).
gagagtccagcagaaatta

SEQ ID NO: 376035 - DNA, 19 bp, Homo sapiens
  siRNA target sequence for C11orf30 (NM_020193.2,3752-3770).
gtccagcagaaattatcat

SEQ ID NO: 376036 - DNA, 19 bp, Homo sapiens
  siRNA target sequence for C11orf30 (NM_020193.2,3835-3853).
gggcttcttgagctaaaca

SEQ ID NO: 376037 - DNA, 19 bp, Homo sapiens
  siRNA target sequence for C11orf30 (NM_020193.2,3915-3933).
cacggaggatggaactgaa

SEQ ID NO: 376038 - DNA, 19 bp, Homo sapiens
  siRNA target sequence for GL004 (NM_020194.4,347-365).
ggcagaaattagtcgaatt

SEQ ID NO: 376039 - DNA, 19 bp, Homo sapiens
  siRNA target sequence for GL004 (NM_020194.4,351-369).
gaaattagtcgaattcagt

SEQ ID NO: 376040 - DNA, 19 bp, Homo sapiens
  siRNA target sequence for GL004 (NM_020194.4,358-376).
gtcgaattcagtacgaaat

SEQ ID NO: 376041 - DNA, 19 bp, Homo sapiens
  siRNA target sequence for GL004 (NM_020194.4,366-384).
cagtacgaaatggaatata

SEQ ID NO: 376042 - DNA, 19 bp, Homo sapiens
  siRNA target sequence for GL004 (NM_020194.4,371-389).
cgaaatggaatatactgaa

SEQ ID NO: 376043 - DNA, 19 bp, Homo sapiens
  siRNA target sequence for GL004 (NM_020194.4,449-467).
cctggaacaaggattccaa

SEQ ID NO: 376044 - DNA, 19 bp, Homo sapiens
  siRNA target sequence for GL004 (NM_020194.4,477-495).
ccaaatgctagtgtgataa

SEQ ID NO: 376045 - DNA, 19 bp, Homo sapiens
  siRNA target sequence for GL004 (NM_020194.4,621-639).
gtacttacgctgagtgaaa

SEQ ID NO: 376046 - DNA, 19 bp, Homo sapiens
  siRNA target sequence for GL004 (NM_020194.4,699-717).
cgagcagttggcagactaa

SEQ ID NO: 376047 - DNA, 19 bp, Homo sapiens
  siRNA target sequence for GL004 (NM_020194.4,700-718).
gagcagttggcagactaaa

SEQ ID NO: 376048 - DNA, 19 bp, Homo sapiens
  siRNA target sequence for GL004 (NM_020194.4,702-720).
gcagttggcagactaaaaa

SEQ ID NO: 376049 - DNA, 19 bp, Homo sapiens
  siRNA target sequence for GL004 (NM_020194.4,723-741).
gagcggtctatgagtgaaa

SEQ ID NO: 376050 - DNA, 19 bp, Homo sapiens
  siRNA target sequence for GL004 (NM_020194.4,725-743).
gcggtctatgagtgaaaat

SEQ ID NO: 376051 - DNA, 19 bp, Homo sapiens
  siRNA target sequence for GL004 (NM_020194.4,728-746).
gtctatgagtgaaaatgct

SEQ ID NO: 376052 - DNA, 19 bp, Homo sapiens
  siRNA target sequence for GL004 (NM_020194.4,760-778).
gacagctggtcagaaatga

SEQ ID NO: 376053 - DNA, 19 bp, Homo sapiens
  siRNA target sequence for GL004 (NM_020194.4,783-801).
ctgtggcacagatcagatt

SEQ ID NO: 376054 - DNA, 19 bp, Homo sapiens
  siRNA target sequence for GL004 (NM_020194.4,888-906).
gtctgtcctccccatatgt

SEQ ID NO: 376055 - DNA, 19 bp, Homo sapiens
  siRNA target sequence for GL004 (NM_020194.4,943-961).
gcattttgtcgcttatcca

SEQ ID NO: 376056 - DNA, 19 bp, Homo sapiens
  siRNA target sequence for GL004 (NM_020194.4,1137-1155).
gtagatgcagcttcactaa

SEQ ID NO: 376057 - DNA, 19 bp, Homo sapiens
  siRNA target sequence for GL004 (NM_020194.4,1205-1223).
gaacaaagaacgtgctaaa

SEQ ID NO: 376058 - DNA, 19 bp, Homo sapiens
  siRNA target sequence for GL004 (NM_020194.4,1208-1226).
caaagaacgtgctaaaaga

SEQ ID NO: 376059 - DNA, 19 bp, Homo sapiens
  siRNA target sequence for GL004 (NM_020194.4,1254-1272).
gctttctggctgcttaata

SEQ ID NO: 376060 - DNA, 19 bp, Homo sapiens
  siRNA target sequence for HCDI (NM_020195.1,282-300).
ccaactccacgggaatata

SEQ ID NO: 376061 - DNA, 19 bp, Homo sapiens
  siRNA target sequence for HCDI (NM_020195.1,283-301).
caactccacgggaatataa

SEQ ID NO: 376062 - DNA, 19 bp, Homo sapiens
  siRNA target sequence for HCDI (NM_020195.1,286-304).
ctccacgggaatataaaca

SEQ ID NO: 376063 - DNA, 19 bp, Homo sapiens
  siRNA target sequence for HCDI (NM_020195.1,289-307).
cacgggaatataaacaatt

SEQ ID NO: 376064 - DNA, 19 bp, Homo sapiens
  siRNA target sequence for HCDI (NM_020195.1,501-519).
ccctctccgaagatggaat

SEQ ID NO: 376065 - DNA, 19 bp, Homo sapiens
  siRNA target sequence for HCDI (NM_020195.1,702-720).
ctccaacctcgtaaccaaa

SEQ ID NO: 376066 - DNA, 19 bp, Homo sapiens
  siRNA target sequence for HCDI (NM_020195.1,738-756).
gcttcctggagattctaca

SEQ ID NO: 376067 - DNA, 19 bp, Homo sapiens
  siRNA target sequence for HCDI (NM_020195.1,856-874).
ggctcaggccaccaattct

SEQ ID NO: 376068 - DNA, 19 bp, Homo sapiens
  siRNA target sequence for HCDI (NM_020195.1,857-875).
gctcaggccaccaattctt

SEQ ID NO: 376069 - DNA, 19 bp, Homo sapiens
  siRNA target sequence for HCDI (NM_020195.1,972-990).
cgccactaatgctgagttt

SEQ ID NO: 376070 - DNA, 19 bp, Homo sapiens
  siRNA target sequence for HCDI (NM_020195.1,1160-1178).
gggctgccttaaaggaaat

SEQ ID NO: 376071 - DNA, 19 bp, Homo sapiens
  siRNA target sequence for SMYD2 (NM_020197.1,355-373).
gattctggccaaacagaaa

SEQ ID NO: 376072 - DNA, 19 bp, Homo sapiens
  siRNA target sequence for SMYD2 (NM_020197.1,429-447).
cacatctggataagttaga

SEQ ID NO: 376073 - DNA, 19 bp, Homo sapiens
  siRNA target sequence for SMYD2 (NM_020197.1,437-455).
gataagttagacaatgaga

SEQ ID NO: 376074 - DNA, 19 bp, Homo sapiens
  siRNA target sequence for SMYD2 (NM_020197.1,545-563).
ctctttgcacaggttaact

SEQ ID NO: 376075 - DNA, 19 bp, Homo sapiens
  siRNA target sequence for SMYD2 (NM_020197.1,604-622).
gggatcagcgatatttcct

SEQ ID NO: 376076 - DNA, 19 bp, Homo sapiens
  siRNA target sequence for SMYD2 (NM_020197.1,620-638).
cctgatgttgcattgatga

SEQ ID NO: 376077 - DNA, 19 bp, Homo sapiens
  siRNA target sequence for SMYD2 (NM_020197.1,621-639).
ctgatgttgcattgatgaa

SEQ ID NO: 376078 - DNA, 19 bp, Homo sapiens
  siRNA target sequence for SMYD2 (NM_020197.1,626-644).
gttgcattgatgaatcata

SEQ ID NO: 376079 - DNA, 19 bp, Homo sapiens
  siRNA target sequence for SMYD2 (NM_020197.1,696-714).
gagctgtacaggaaatcaa

SEQ ID NO: 376080 - DNA, 19 bp, Homo sapiens
  siRNA target sequence for SMYD2 (NM_020197.1,716-734).
ccgggagaggaggttttta

SEQ ID NO: 376081 - DNA, 19 bp, Homo sapiens
  siRNA target sequence for SMYD2 (NM_020197.1,752-770).
ctgtacccaacggaagata

SEQ ID NO: 376082 - DNA, 19 bp, Homo sapiens
  siRNA target sequence for SMYD2 (NM_020197.1,754-772).
gtacccaacggaagataga

SEQ ID NO: 376083 - DNA, 19 bp, Homo sapiens
  siRNA target sequence for SMYD2 (NM_020197.1,757-775).
cccaacggaagatagaaat

SEQ ID NO: 376084 - DNA, 19 bp, Homo sapiens
  siRNA target sequence for SMYD2 (NM_020197.1,771-789).
gaaatgaccggttaagaga

SEQ ID NO: 376085 - DNA, 19 bp, Homo sapiens
  siRNA target sequence for SMYD2 (NM_020197.1,776-794).
gaccggttaagagattctt

SEQ ID NO: 376086 - DNA, 19 bp, Homo sapiens
  siRNA target sequence for SMYD2 (NM_020197.1,778-796).
ccggttaagagattcttat

SEQ ID NO: 376087 - DNA, 19 bp, Homo sapiens
  siRNA target sequence for SMYD2 (NM_020197.1,779-797).
cggttaagagattcttatt

SEQ ID NO: 376088 - DNA, 19 bp, Homo sapiens
  siRNA target sequence for SMYD2 (NM_020197.1,915-933).
cacgcaacgtcattgaaga

SEQ ID NO: 376089 - DNA, 19 bp, Homo sapiens
  siRNA target sequence for SMYD2 (NM_020197.1,918-936).
gcaacgtcattgaagagtt

SEQ ID NO: 376090 - DNA, 19 bp, Homo sapiens
  siRNA target sequence for SMYD2 (NM_020197.1,938-956).
cggagggccaagcactata

SEQ ID NO: 376091 - DNA, 19 bp, Homo sapiens
  siRNA target sequence for SMYD2 (NM_020197.1,1022-1040).
gacagtaacgtgtacatgt

SEQ ID NO: 376092 - DNA, 19 bp, Homo sapiens
  siRNA target sequence for SMYD2 (NM_020197.1,1235-1253).
ctgaagaaggccattgcaa

SEQ ID NO: 376093 - DNA, 19 bp, Homo sapiens
  siRNA target sequence for SMYD2 (NM_020197.1,1293-1311).
ctgagatcaaacaggaaat

SEQ ID NO: 376094 - DNA, 19 bp, Homo sapiens
  siRNA target sequence for GK001 (NM_020198.1,319-337).
catggaagactctgttact

SEQ ID NO: 376095 - DNA, 19 bp, Homo sapiens
  siRNA target sequence for GK001 (NM_020198.1,342-360).
ctcctcaacgggtcataat

SEQ ID NO: 376096 - DNA, 19 bp, Homo sapiens
  siRNA target sequence for GK001 (NM_020198.1,344-362).
cctcaacgggtcataatca

SEQ ID NO: 376097 - DNA, 19 bp, Homo sapiens
  siRNA target sequence for GK001 (NM_020198.1,503-521).
gacaaaccagatacttctt

SEQ ID NO: 376098 - DNA, 19 bp, Homo sapiens
  siRNA target sequence for GK001 (NM_020198.1,538-556).
cccaataacgattgttgat

SEQ ID NO: 376099 - DNA, 19 bp, Homo sapiens
  siRNA target sequence for GK001 (NM_020198.1,540-558).
caataacgattgttgatgt

SEQ ID NO: 376100 - DNA, 19 bp, Homo sapiens
  siRNA target sequence for GK001 (NM_020198.1,574-592).
gaacagctgggagagttat

SEQ ID NO: 376101 - DNA, 19 bp, Homo sapiens
  siRNA target sequence for GK001 (NM_020198.1,586-604).
gagttattatctagaaatt

SEQ ID NO: 376102 - DNA, 19 bp, Homo sapiens
  siRNA target sequence for GK001 (NM_020198.1,613-631).
gactggtctgcttgcttat

SEQ ID NO: 376103 - DNA, 19 bp, Homo sapiens
  siRNA target sequence for GK001 (NM_020198.1,615-633).
ctggtctgcttgcttatat

SEQ ID NO: 376104 - DNA, 19 bp, Homo sapiens
  siRNA target sequence for GK001 (NM_020198.1,617-635).
ggtctgcttgcttatatca

SEQ ID NO: 376105 - DNA, 19 bp, Homo sapiens
  siRNA target sequence for GK001 (NM_020198.1,618-636).
gtctgcttgcttatatcat

SEQ ID NO: 376106 - DNA, 19 bp, Homo sapiens
  siRNA target sequence for GK001 (NM_020198.1,620-638).
ctgcttgcttatatcatga

SEQ ID NO: 376107 - DNA, 19 bp, Homo sapiens
  siRNA target sequence for GK001 (NM_020198.1,680-698).
gcctggtttaacactcata

SEQ ID NO: 376108 - DNA, 19 bp, Homo sapiens
  siRNA target sequence for GK001 (NM_020198.1,703-721).
gcttttggagagcaacttt

SEQ ID NO: 376109 - DNA, 19 bp, Homo sapiens
  siRNA target sequence for GK001 (NM_020198.1,709-727).
ggagagcaactttacttta

SEQ ID NO: 376110 - DNA, 19 bp, Homo sapiens
  siRNA target sequence for GK001 (NM_020198.1,731-749).
ggggatgatggaactaaca

SEQ ID NO: 376111 - DNA, 19 bp, Homo sapiens
  siRNA target sequence for GK001 (NM_020198.1,732-750).
gggatgatggaactaacaa

SEQ ID NO: 376112 - DNA, 19 bp, Homo sapiens
  siRNA target sequence for GK001 (NM_020198.1,733-751).
ggatgatggaactaacaaa

SEQ ID NO: 376113 - DNA, 19 bp, Homo sapiens
  siRNA target sequence for GK001 (NM_020198.1,756-774).
ccacaagcacaggaaagtt

SEQ ID NO: 376114 - DNA, 19 bp, Homo sapiens
  siRNA target sequence for GK001 (NM_020198.1,759-777).
caagcacaggaaagttgaa

SEQ ID NO: 376115 - DNA, 19 bp, Homo sapiens
  siRNA target sequence for GK001 (NM_020198.1,898-916).
gaggccagtgagtgatcaa

SEQ ID NO: 376116 - DNA, 19 bp, Homo sapiens
  siRNA target sequence for GK001 (NM_020198.1,900-918).
ggccagtgagtgatcaagt

SEQ ID NO: 376117 - DNA, 19 bp, Homo sapiens
  siRNA target sequence for GK001 (NM_020198.1,907-925).
gagtgatcaagtgcaaata

SEQ ID NO: 376118 - DNA, 19 bp, Homo sapiens
  siRNA target sequence for GK001 (NM_020198.1,947-965).
gacatggatacctacgtat

SEQ ID NO: 376119 - DNA, 19 bp, Homo sapiens
  siRNA target sequence for GK001 (NM_020198.1,949-967).
catggatacctacgtattt

SEQ ID NO: 376120 - DNA, 19 bp, Homo sapiens
  siRNA target sequence for GK001 (NM_020198.1,952-970).
ggatacctacgtatttgct

SEQ ID NO: 376121 - DNA, 19 bp, Homo sapiens
  siRNA target sequence for GK001 (NM_020198.1,987-1005).
ccttggtgcgactacagaa

SEQ ID NO: 376122 - DNA, 19 bp, Homo sapiens
  siRNA target sequence for GK001 (NM_020198.1,988-1006).
cttggtgcgactacagaaa

SEQ ID NO: 376123 - DNA, 19 bp, Homo sapiens
  siRNA target sequence for GK001 (NM_020198.1,1015-1033).
ggatttgagtgagttttgt

SEQ ID NO: 376124 - DNA, 19 bp, Homo sapiens
  siRNA target sequence for GK001 (NM_020198.1,1044-1062).
ctaagtctggagcaaagta

SEQ ID NO: 376125 - DNA, 19 bp, Homo sapiens
  siRNA target sequence for GK001 (NM_020198.1,1128-1146).
caaagatggttcactttct

SEQ ID NO: 376126 - DNA, 19 bp, Homo sapiens
  siRNA target sequence for GK001 (NM_020198.1,1132-1150).
gatggttcactttcttaca

SEQ ID NO: 376127 - DNA, 19 bp, Homo sapiens
  siRNA target sequence for GK001 (NM_020198.1,1192-1210).
gttctctggtccaaaaatt

SEQ ID NO: 376128 - DNA, 19 bp, Homo sapiens
  siRNA target sequence for GK001 (NM_020198.1,1217-1235).
gaggaaggtcagcctttaa

SEQ ID NO: 376129 - DNA, 19 bp, Homo sapiens
  siRNA target sequence for GK001 (NM_020198.1,1248-1266).
ctaagaggacactgttgtt

SEQ ID NO: 376130 - DNA, 19 bp, Homo sapiens
  siRNA target sequence for GK001 (NM_020198.1,1252-1270).
gaggacactgttgtttaca

SEQ ID NO: 376131 - DNA, 19 bp, Homo sapiens
  siRNA target sequence for GK001 (NM_020198.1,1280-1298).
cctggctcaggtaacactt

SEQ ID NO: 376132 - DNA, 19 bp, Homo sapiens
  siRNA target sequence for GK001 (NM_020198.1,1281-1299).
ctggctcaggtaacactta

SEQ ID NO: 376133 - DNA, 19 bp, Homo sapiens
  siRNA target sequence for GK001 (NM_020198.1,1339-1357).
ggtgatttattctattgat

SEQ ID NO: 376134 - DNA, 19 bp, Homo sapiens
  siRNA target sequence for GK001 (NM_020198.1,1413-1431).
gtgcccgagtagaagagaa

SEQ ID NO: 376135 - DNA, 19 bp, Homo sapiens
  siRNA target sequence for GK001 (NM_020198.1,1416-1434).
cccgagtagaagagaactt

SEQ ID NO: 376136 - DNA, 19 bp, Homo sapiens
  siRNA target sequence for GK001 (NM_020198.1,1418-1436).
cgagtagaagagaacttct

SEQ ID NO: 376137 - DNA, 19 bp, Homo sapiens
  siRNA target sequence for GK001 (NM_020198.1,1504-1522).
gaaggagcgaatcatgaat

SEQ ID NO: 376138 - DNA, 19 bp, Homo sapiens
  siRNA target sequence for ZA20D1 (NM_020205.1,172-190).
cagctggctgaaagtactt

SEQ ID NO: 376139 - DNA, 19 bp, Homo sapiens
  siRNA target sequence for ZA20D1 (NM_020205.1,174-192).
gctggctgaaagtacttga

SEQ ID NO: 376140 - DNA, 19 bp, Homo sapiens
  siRNA target sequence for ZA20D1 (NM_020205.1,502-520).
cgccagctccagcattgtt

SEQ ID NO: 376141 - DNA, 19 bp, Homo sapiens
  siRNA target sequence for ZA20D1 (NM_020205.1,612-630).
cagatctcactgtatacaa

SEQ ID NO: 376142 - DNA, 19 bp, Homo sapiens
  siRNA target sequence for ZA20D1 (NM_020205.1,695-713).
caggcagggcgtttgaact

SEQ ID NO: 376143 - DNA, 19 bp, Homo sapiens
  siRNA target sequence for ZA20D1 (NM_020205.1,937-955).
gctggtatacacagaagat

SEQ ID NO: 376144 - DNA, 19 bp, Homo sapiens
  siRNA target sequence for ZA20D1 (NM_020205.1,941-959).
gtatacacagaagatgaat

SEQ ID NO: 376145 - DNA, 19 bp, Homo sapiens
  siRNA target sequence for ZA20D1 (NM_020205.1,1058-1076).
gaggagcctgtatatgaga

SEQ ID NO: 376146 - DNA, 19 bp, Homo sapiens
  siRNA target sequence for ZA20D1 (NM_020205.1,1325-1343).
gtgatcccacttacagatt

SEQ ID NO: 376147 - DNA, 19 bp, Homo sapiens
  siRNA target sequence for ZA20D1 (NM_020205.1,1428-1446).
gattggccagtgtaattct

SEQ ID NO: 376148 - DNA, 19 bp, Homo sapiens
  siRNA target sequence for ZA20D1 (NM_020205.1,1449-1467).
ccctagaggtcaaattgca

SEQ ID NO: 376149 - DNA, 19 bp, Homo sapiens
  siRNA target sequence for ZA20D1 (NM_020205.1,1471-1489).
gctgcatagctacatgaat

SEQ ID NO: 376150 - DNA, 19 bp, Homo sapiens
  siRNA target sequence for ZA20D1 (NM_020205.1,1718-1736).
ggcagctttggcaaaacct

SEQ ID NO: 376151 - DNA, 19 bp, Homo sapiens
  siRNA target sequence for ZA20D1 (NM_020205.1,1719-1737).
gcagctttggcaaaacctt

SEQ ID NO: 376152 - DNA, 19 bp, Homo sapiens
  siRNA target sequence for ZA20D1 (NM_020205.1,2052-2070).
gtcaccgtcaccagtatca

SEQ ID NO: 376153 - DNA, 19 bp, Homo sapiens
  siRNA target sequence for ZA20D1 (NM_020205.1,2507-2525).
cgagtggctgattcctata

SEQ ID NO: 376154 - DNA, 19 bp, Homo sapiens
  siRNA target sequence for ZA20D1 (NM_020205.1,2510-2528).
gtggctgattcctatagca

SEQ ID NO: 376155 - DNA, 19 bp, Homo sapiens
  siRNA target sequence for RGMA (NM_020211.1,697-715).
ccgagatctgccattacga

SEQ ID NO: 376156 - DNA, 19 bp, Homo sapiens
  siRNA target sequence for RGMA (NM_020211.1,832-850).
ggccgctcatcgacaataa

SEQ ID NO: 376157 - DNA, 19 bp, Homo sapiens
  siRNA target sequence for RGMA (NM_020211.1,833-851).
gccgctcatcgacaataat

SEQ ID NO: 376158 - DNA, 19 bp, Homo sapiens
  siRNA target sequence for RGMA (NM_020211.1,834-852).
ccgctcatcgacaataatt

SEQ ID NO: 376159 - DNA, 19 bp, Homo sapiens
  siRNA target sequence for RGMA (NM_020211.1,835-853).
cgctcatcgacaataatta

SEQ ID NO: 376160 - DNA, 19 bp, Homo sapiens
  siRNA target sequence for RGMA (NM_020211.1,1462-1480).
cgttggaggatgtcaagat

SEQ ID NO: 376161 - DNA, 19 bp, Homo sapiens
  siRNA target sequence for RGMA (NM_020211.1,1478-1496).
gatgctccactccaacaaa

SEQ ID NO: 376162 - DNA, 19 bp, Homo sapiens
  siRNA target sequence for LOC56964 (NM_020212.1,199-217).
ggcctaaagacgatgaaca

SEQ ID NO: 376163 - DNA, 19 bp, Homo sapiens
  siRNA target sequence for LOC56964 (NM_020212.1,257-275).
cttgcctcagccttatcga

SEQ ID NO: 376164 - DNA, 19 bp, Homo sapiens
  siRNA target sequence for LOC56964 (NM_020212.1,262-280).
ctcagccttatcgaatgat

SEQ ID NO: 376165 - DNA, 19 bp, Homo sapiens
  siRNA target sequence for LOC56964 (NM_020212.1,264-282).
cagccttatcgaatgatca

SEQ ID NO: 376166 - DNA, 19 bp, Homo sapiens
  siRNA target sequence for LOC56964 (NM_020212.1,267-285).
ccttatcgaatgatcaaca

SEQ ID NO: 376167 - DNA, 19 bp, Homo sapiens
  siRNA target sequence for LOC56964 (NM_020212.1,268-286).
cttatcgaatgatcaacaa

SEQ ID NO: 376168 - DNA, 19 bp, Homo sapiens
  siRNA target sequence for LOC56964 (NM_020212.1,311-329).
gtcttgggaaattattgaa

SEQ ID NO: 376169 - DNA, 19 bp, Homo sapiens
  siRNA target sequence for LOC56964 (NM_020212.1,313-331).
cttgggaaattattgaaga

SEQ ID NO: 376170 - DNA, 19 bp, Homo sapiens
  siRNA target sequence for LOC56964 (NM_020212.1,396-414).
gaaatccagctcaacaaaa

SEQ ID NO: 376171 - DNA, 19 bp, Homo sapiens
  siRNA target sequence for LOC56964 (NM_020212.1,428-446).
ggctgtttcccaagactat

SEQ ID NO: 376172 - DNA, 19 bp, Homo sapiens
  siRNA target sequence for LOC56964 (NM_020212.1,432-450).
gtttcccaagactatgtgt

SEQ ID NO: 376173 - DNA, 19 bp, Homo sapiens
  siRNA target sequence for LOC56964 (NM_020212.1,436-454).
cccaagactatgtgtttat

SEQ ID NO: 376174 - DNA, 19 bp, Homo sapiens
  siRNA target sequence for LOC56964 (NM_020212.1,459-477).
ggagccaaaggattctcaa

SEQ ID NO: 376175 - DNA, 19 bp, Homo sapiens
  siRNA target sequence for LOC56964 (NM_020212.1,491-509).
cagtgctaaacaaatatat

SEQ ID NO: 376176 - DNA, 19 bp, Homo sapiens
  siRNA target sequence for LOC56964 (NM_020212.1,511-529).
cgtgggagaagcttaaggt

SEQ ID NO: 376177 - DNA, 19 bp, Homo sapiens
  siRNA target sequence for LOC56964 (NM_020212.1,541-559).
ccatctgggccacagattt

SEQ ID NO: 376178 - DNA, 19 bp, Homo sapiens
  siRNA target sequence for LOC56964 (NM_020212.1,542-560).
catctgggccacagattta

SEQ ID NO: 376179 - DNA, 19 bp, Homo sapiens
  siRNA target sequence for LOC56964 (NM_020212.1,596-614).
gggtatcattagactcttt

SEQ ID NO: 376180 - DNA, 19 bp, Homo sapiens
  siRNA target sequence for LOC56964 (NM_020212.1,597-615).
ggtatcattagactctttt

SEQ ID NO: 376181 - DNA, 19 bp, Homo sapiens
  siRNA target sequence for LOC56964 (NM_020212.1,598-616).
gtatcattagactctttta

SEQ ID NO: 376182 - DNA, 19 bp, Homo sapiens
  siRNA target sequence for LOC56964 (NM_020212.1,638-656).
cctagtcaaagccatcaat

SEQ ID NO: 376183 - DNA, 19 bp, Homo sapiens
  siRNA target sequence for LOC56964 (NM_020212.1,663-681).
gatgataccagcaagcaaa

SEQ ID NO: 376184 - DNA, 19 bp, Homo sapiens
  siRNA target sequence for LOC56964 (NM_020212.1,666-684).
gataccagcaagcaaacta

SEQ ID NO: 376185 - DNA, 19 bp, Homo sapiens
  siRNA target sequence for LOC56964 (NM_020212.1,738-756).
caaggagccggagatattt

SEQ ID NO: 376186 - DNA, 19 bp, Homo sapiens
  siRNA target sequence for LOC56964 (NM_020212.1,877-895).
ctgcagatcctttagaaat

SEQ ID NO: 376187 - DNA, 19 bp, Homo sapiens
  siRNA target sequence for LOC56964 (NM_020212.1,897-915).
gatgcaaatgttagtttta

SEQ ID NO: 376188 - DNA, 19 bp, Homo sapiens
  siRNA target sequence for LOC56964 (NM_020212.1,1040-1058).
gggctccgggcagaatcat

SEQ ID NO: 376189 - DNA, 19 bp, Homo sapiens
  siRNA target sequence for LOC56964 (NM_020212.1,1041-1059).
ggctccgggcagaatcatt

SEQ ID NO: 376190 - DNA, 19 bp, Homo sapiens
  siRNA target sequence for LOC56964 (NM_020212.1,1045-1063).
ccgggcagaatcatttcat

SEQ ID NO: 376191 - DNA, 19 bp, Homo sapiens
  siRNA target sequence for LOC56964 (NM_020212.1,1048-1066).
ggcagaatcatttcatcaa

SEQ ID NO: 376192 - DNA, 19 bp, Homo sapiens
  siRNA target sequence for LOC56964 (NM_020212.1,1151-1169).
cagtacggccaccttctat

SEQ ID NO: 376193 - DNA, 19 bp, Homo sapiens
  siRNA target sequence for LOC56964 (NM_020212.1,1153-1171).
gtacggccaccttctattt

SEQ ID NO: 376194 - DNA, 19 bp, Homo sapiens
  siRNA target sequence for LOC56964 (NM_020212.1,1179-1197).
cctagctgcctatttgcaa

SEQ ID NO: 376195 - DNA, 19 bp, Homo sapiens
  siRNA target sequence for LOC56964 (NM_020212.1,1195-1213).
caatgccaccggaagtcaa

SEQ ID NO: 376196 - DNA, 19 bp, Homo sapiens
  siRNA target sequence for LOC56964 (NM_020212.1,1229-1247).
ggcctgtgtccttggtata

SEQ ID NO: 376197 - DNA, 19 bp, Homo sapiens
  siRNA target sequence for LOC56964 (NM_020212.1,1265-1283).
caatttcttcctgtattca

SEQ ID NO: 376198 - DNA, 19 bp, Homo sapiens
  siRNA target sequence for LOC56964 (NM_020212.1,1282-1300).
cactaaaccgaactctaaa

SEQ ID NO: 376199 - DNA, 19 bp, Homo sapiens
  siRNA target sequence for LOC56964 (NM_020212.1,1480-1498).
gcattcacttcctaaaata

SEQ ID NO: 376200 - DNA, 19 bp, Homo sapiens
  siRNA target sequence for LOC56964 (NM_020212.1,1530-1548).
cctgaaggtcaagtgaaat

SEQ ID NO: 376201 - DNA, 19 bp, Homo sapiens
  siRNA target sequence for LOC56964 (NM_020212.1,1650-1668).
gtaaagcacctggataaaa

SEQ ID NO: 376202 - DNA, 19 bp, Homo sapiens
  siRNA target sequence for LOC56964 (NM_020212.1,1732-1750).
gctctgtgtgccttatgga

SEQ ID NO: 376203 - DNA, 19 bp, Homo sapiens
  siRNA target sequence for LOC56964 (NM_020212.1,1733-1751).
ctctgtgtgccttatggat

SEQ ID NO: 376204 - DNA, 19 bp, Homo sapiens
  siRNA target sequence for LOC56964 (NM_020212.1,1755-1773).
gccaagcgtgaaatcatct

SEQ ID NO: 376205 - DNA, 19 bp, Homo sapiens
  siRNA target sequence for LOC56964 (NM_020212.1,1857-1875).
ctgctccgaggagactatt

SEQ ID NO: 376206 - DNA, 19 bp, Homo sapiens
  siRNA target sequence for LOC56964 (NM_020212.1,1859-1877).
gctccgaggagactattca

SEQ ID NO: 376207 - DNA, 19 bp, Homo sapiens
  siRNA target sequence for LOC56964 (NM_020212.1,1862-1880).
ccgaggagactattcacat

SEQ ID NO: 376208 - DNA, 19 bp, Homo sapiens
  siRNA target sequence for LOC56964 (NM_020212.1,1905-1923).
ggaatccaatattctgttt

SEQ ID NO: 376209 - DNA, 19 bp, Homo sapiens
  siRNA target sequence for LOC56964 (NM_020212.1,1943-1961).
ctgcccactcctggaaaat

SEQ ID NO: 376210 - DNA, 19 bp, Homo sapiens
  siRNA target sequence for LOC56964 (NM_020212.1,1945-1963).
gcccactcctggaaaatat

SEQ ID NO: 376211 - DNA, 19 bp, Homo sapiens
  siRNA target sequence for LOC56964 (NM_020212.1,2022-2040).
ctgccactggagaagagat

SEQ ID NO: 376212 - DNA, 19 bp, Homo sapiens
  siRNA target sequence for LOC56964 (NM_020212.1,2134-2152).
cgctccagagagagaactt

SEQ ID NO: 376213 - DNA, 19 bp, Homo sapiens
  siRNA target sequence for LOC56964 (NM_020212.1,2136-2154).
ctccagagagagaacttca

SEQ ID NO: 376214 - DNA, 19 bp, Homo sapiens
  siRNA target sequence for LOC56965 (NM_020213.1,636-654).
ctgagcaatgatttcttga

SEQ ID NO: 376215 - DNA, 19 bp, Homo sapiens
  siRNA target sequence for LOC56965 (NM_020213.1,690-708).
gcaagtggtaccatcaaga

SEQ ID NO: 376216 - DNA, 19 bp, Homo sapiens
  siRNA target sequence for LOC56965 (NM_020213.1,691-709).
caagtggtaccatcaagaa

SEQ ID NO: 376217 - DNA, 19 bp, Homo sapiens
  siRNA target sequence for LOC56965 (NM_020213.1,694-712).
gtggtaccatcaagaagtt

SEQ ID NO: 376218 - DNA, 19 bp, Homo sapiens
  siRNA target sequence for LOC56965 (NM_020213.1,751-769).
ctcccagtttccctatcat

SEQ ID NO: 376219 - DNA, 19 bp, Homo sapiens
  siRNA target sequence for LOC56965 (NM_020213.1,940-958).
gattcctcgttcagatcat

SEQ ID NO: 376220 - DNA, 19 bp, Homo sapiens
  siRNA target sequence for LOC56965 (NM_020213.1,1014-1032).
gagcagcatgtcttccaaa

SEQ ID NO: 376221 - DNA, 19 bp, Homo sapiens
  siRNA target sequence for LOC56965 (NM_020213.1,1056-1074).
gtctgtactcgtgaactat

SEQ ID NO: 376222 - DNA, 19 bp, Homo sapiens
  siRNA target sequence for LOC56965 (NM_020213.1,1065-1083).
cgtgaactatgcgttttct

SEQ ID NO: 376223 - DNA, 19 bp, Homo sapiens
  siRNA target sequence for LOC56965 (NM_020213.1,1163-1181).
catgtgtagggcagcttta

SEQ ID NO: 376224 - DNA, 19 bp, Homo sapiens
  siRNA target sequence for LOC56965 (NM_020213.1,1254-1272).
gcctttaaccctaagaaga

SEQ ID NO: 376225 - DNA, 19 bp, Homo sapiens
  siRNA target sequence for LOC56965 (NM_020213.1,1262-1280).
ccctaagaagaagaattat

SEQ ID NO: 376226 - DNA, 19 bp, Homo sapiens
  siRNA target sequence for LOC56965 (NM_020213.1,1299-1317).
ctggatagtgtgatgtcta

SEQ ID NO: 376227 - DNA, 19 bp, Homo sapiens
  siRNA target sequence for LOC56965 (NM_020213.1,1334-1352).
gggctgtaggaattgcata

SEQ ID NO: 376228 - DNA, 19 bp, Homo sapiens
  siRNA target sequence for LOC56965 (NM_020213.1,1335-1353).
ggctgtaggaattgcataa

SEQ ID NO: 376229 - DNA, 19 bp, Homo sapiens
  siRNA target sequence for LOC56965 (NM_020213.1,1336-1354).
gctgtaggaattgcataaa

SEQ ID NO: 376230 - DNA, 19 bp, Homo sapiens
  siRNA target sequence for LOC56965 (NM_020214.1,256-274).
cgactcggagggagataat

SEQ ID NO: 376231 - DNA, 19 bp, Homo sapiens
  siRNA target sequence for LOC56965 (NM_020214.1,340-358).
gcttgatgcagacattgaa

SEQ ID NO: 376232 - DNA, 19 bp, Homo sapiens
  siRNA target sequence for LOC56965 (NM_020214.1,378-396).
gtgagaactctgtatccat

SEQ ID NO: 376233 - DNA, 19 bp, Homo sapiens
  siRNA target sequence for LOC56965 (NM_020214.1,491-509).
cggacagaacctattgtgt

SEQ ID NO: 376234 - DNA, 19 bp, Homo sapiens
  siRNA target sequence for LOC56965 (NM_020214.1,598-616).
gctgggtcttcagttgaaa

SEQ ID NO: 376235 - DNA, 19 bp, Homo sapiens
  siRNA target sequence for LOC56965 (NM_020214.1,619-637).
gatcctgggtatgtttaca

SEQ ID NO: 376236 - DNA, 19 bp, Homo sapiens
  siRNA target sequence for LOC56965 (NM_020214.1,1405-1423).
gatgacccagggctcatat

SEQ ID NO: 376237 - DNA, 19 bp, Homo sapiens
  siRNA target sequence for LOC56965 (NM_020214.1,1411-1429).
ccagggctcatatttggaa

SEQ ID NO: 376238 - DNA, 19 bp, Homo sapiens
  siRNA target sequence for LOC56965 (NM_020214.1,1498-1516).
caggtcacacattgtcaaa

SEQ ID NO: 376239 - DNA, 19 bp, Homo sapiens
  siRNA target sequence for LOC56965 (NM_020214.1,1500-1518).
ggtcacacattgtcaaact

SEQ ID NO: 376240 - DNA, 19 bp, Homo sapiens
  siRNA target sequence for C14orf132 (NM_020215.1,159-177).
cccctttcccatgaaatca

SEQ ID NO: 376241 - DNA, 19 bp, Homo sapiens
  siRNA target sequence for C14orf132 (NM_020215.1,442-460).
ctgatccctgcaagacaaa

SEQ ID NO: 376242 - DNA, 19 bp, Homo sapiens
  siRNA target sequence for C14orf132 (NM_020215.1,482-500).
gcatcatctgccttcatta

SEQ ID NO: 376243 - DNA, 19 bp, Homo sapiens
  siRNA target sequence for CEAL1 (NM_020219.1,276-294).
cggaggcacgaggctattt

SEQ ID NO: 376244 - DNA, 19 bp, Homo sapiens
  siRNA target sequence for CEAL1 (NM_020219.1,277-295).
ggaggcacgaggctattta

SEQ ID NO: 376245 - DNA, 19 bp, Homo sapiens
  siRNA target sequence for CEAL1 (NM_020219.1,280-298).
ggcacgaggctatttacct

SEQ ID NO: 376246 - DNA, 19 bp, Homo sapiens
  siRNA target sequence for CEAL1 (NM_020219.1,281-299).
gcacgaggctatttaccta

SEQ ID NO: 376247 - DNA, 19 bp, Homo sapiens
  siRNA target sequence for CEAL1 (NM_020219.1,358-376).
gtgggcttccccaatggtt

SEQ ID NO: 376248 - DNA, 19 bp, Homo sapiens
  siRNA target sequence for CEAL1 (NM_020219.1,472-490).
gtccaggtagctgaaaaga

SEQ ID NO: 376249 - DNA, 19 bp, Homo sapiens
  siRNA target sequence for CEAL1 (NM_020219.1,543-561).
caccatcattggatctctt

SEQ ID NO: 376250 - DNA, 19 bp, Homo sapiens
  siRNA target sequence for FAM20C (NM_020223.1,924-942).
cgggcaagcgctgttcaaa

SEQ ID NO: 376251 - DNA, 19 bp, Homo sapiens
  siRNA target sequence for FAM20C (NM_020223.1,1180-1198).
ggcgagtgttcctactact

SEQ ID NO: 376252 - DNA, 19 bp, Homo sapiens
  siRNA target sequence for FAM20C (NM_020223.1,1463-1481).
gtcaccactacgagacttt

SEQ ID NO: 376253 - DNA, 19 bp, Homo sapiens
  siRNA target sequence for FAM20C (NM_020223.1,1493-1511).
ggaatgaaacgttcatcat

SEQ ID NO: 376254 - DNA, 19 bp, Homo sapiens
  siRNA target sequence for FAM20C (NM_020223.1,1506-1524).
catcatccacttagacaat

SEQ ID NO: 376255 - DNA, 19 bp, Homo sapiens
  siRNA target sequence for FAM20C (NM_020223.1,1733-1751).
ggctccgcgtcgtgctaaa

SEQ ID NO: 376256 - DNA, 19 bp, Homo sapiens
  siRNA target sequence for PRDM8 (NM_020226.1,1278-1296).
caaggctgtccaacaatgt

SEQ ID NO: 376257 - DNA, 19 bp, Homo sapiens
  siRNA target sequence for PRDM8 (NM_020226.1,1329-1347).
ctgcgacatccctgagaat

SEQ ID NO: 376258 - DNA, 19 bp, Homo sapiens
  siRNA target sequence for PRDM8 (NM_020226.1,1430-1448).
gaacagtaccgtatatctt

SEQ ID NO: 376259 - DNA, 19 bp, Homo sapiens
  siRNA target sequence for PRDM8 (NM_020226.1,1458-1476).
cacctcagcagcaaatggt

SEQ ID NO: 376260 - DNA, 19 bp, Homo sapiens
  siRNA target sequence for PRDM8 (NM_020226.1,1507-1525).
gtccaatcggccagagata

SEQ ID NO: 376261 - DNA, 19 bp, Homo sapiens
  siRNA target sequence for PRDM8 (NM_020226.1,1536-1554).
gaaccttgaagcctacata

SEQ ID NO: 376262 - DNA, 19 bp, Homo sapiens
  siRNA target sequence for PRDM8 (NM_020226.1,1600-1618).
gacgaggagttactagttt

SEQ ID NO: 376263 - DNA, 19 bp, Homo sapiens
  siRNA target sequence for PRDM8 (NM_020226.1,1630-1648).
gaactgactgagttactct

SEQ ID NO: 376264 - DNA, 19 bp, Homo sapiens
  siRNA target sequence for PRDM8 (NM_020226.1,1658-1676).
cctctagatcccacaacaa

SEQ ID NO: 376265 - DNA, 19 bp, Homo sapiens
  siRNA target sequence for PRDM8 (NM_020226.1,1659-1677).
ctctagatcccacaacaaa

SEQ ID NO: 376266 - DNA, 19 bp, Homo sapiens
  siRNA target sequence for PRDM8 (NM_020226.1,1715-1733).
gccaacgtttccagtttga

SEQ ID NO: 376267 - DNA, 19 bp, Homo sapiens
  siRNA target sequence for PRDM8 (NM_020226.1,1717-1735).
caacgtttccagtttgagt

SEQ ID NO: 376268 - DNA, 19 bp, Homo sapiens
  siRNA target sequence for PRDM8 (NM_020226.1,1777-1795).
cttcacagcgctgatataa

SEQ ID NO: 376269 - DNA, 19 bp, Homo sapiens
  siRNA target sequence for PRDM11 (NM_020229.1,258-276).
gatggcagagccaattgca

SEQ ID NO: 376270 - DNA, 19 bp, Homo sapiens
  siRNA target sequence for PRDM11 (NM_020229.1,269-287).
caattgcatccctgatgat

SEQ ID NO: 376271 - DNA, 19 bp, Homo sapiens
  siRNA target sequence for PRDM11 (NM_020229.1,350-368).
gaatgaccgagaacatgaa

SEQ ID NO: 376272 - DNA, 19 bp, Homo sapiens
  siRNA target sequence for PRDM11 (NM_020229.1,392-410).
cagccgtgggggatatggt

SEQ ID NO: 376273 - DNA, 19 bp, Homo sapiens
  siRNA target sequence for PRDM11 (NM_020229.1,467-485).
cctcggccatggaagttga

SEQ ID NO: 376274 - DNA, 19 bp, Homo sapiens
  siRNA target sequence for PRDM11 (NM_020229.1,582-600).
ggatgaatgcccaaaccat

SEQ ID NO: 376275 - DNA, 19 bp, Homo sapiens
  siRNA target sequence for PRDM11 (NM_020229.1,708-726).
gagtgacgtgcgatgtgta

SEQ ID NO: 376276 - DNA, 19 bp, Homo sapiens
  siRNA target sequence for PRDM11 (NM_020229.1,710-728).
gtgacgtgcgatgtgtaaa

SEQ ID NO: 376277 - DNA, 19 bp, Homo sapiens
  siRNA target sequence for PRDM11 (NM_020229.1,834-852).
ccgctataagtccatagat

SEQ ID NO: 376278 - DNA, 19 bp, Homo sapiens
  siRNA target sequence for PRDM11 (NM_020229.1,937-955).
cacagtgagcgcatctact

SEQ ID NO: 376279 - DNA, 19 bp, Homo sapiens
  siRNA target sequence for PRDM11 (NM_020229.1,1001-1019).
ggtacagcgaggactacat

SEQ ID NO: 376280 - DNA, 19 bp, Homo sapiens
  siRNA target sequence for PRDM11 (NM_020229.1,1100-1118).
ctgagcaggttctggataa

SEQ ID NO: 376281 - DNA, 19 bp, Homo sapiens
  siRNA target sequence for PRDM11 (NM_020229.1,1358-1376).
gtcagtgtgcaacaacaat

SEQ ID NO: 376282 - DNA, 19 bp, Homo sapiens
  siRNA target sequence for PRDM11 (NM_020229.1,1526-1544).
catctgaccctcatgaact

SEQ ID NO: 376283 - DNA, 19 bp, Homo sapiens
  siRNA target sequence for PRDM11 (NM_020229.1,1595-1613).
gggagctccaggcagaatt

SEQ ID NO: 376284 - DNA, 19 bp, Homo sapiens
  siRNA target sequence for PRDM11 (NM_020229.1,1600-1618).
ctccaggcagaattagaca

SEQ ID NO: 376285 - DNA, 19 bp, Homo sapiens
  siRNA target sequence for PRDM11 (NM_020229.1,1606-1624).
gcagaattagacatgctta

SEQ ID NO: 376286 - DNA, 19 bp, Homo sapiens
  siRNA target sequence for PRDM11 (NM_020229.1,1607-1625).
cagaattagacatgcttaa

SEQ ID NO: 376287 - DNA, 19 bp, Homo sapiens
  siRNA target sequence for PRDM11 (NM_020229.1,1693-1711).
cctgcaggtaagttggttt

SEQ ID NO: 376288 - DNA, 19 bp, Homo sapiens
  siRNA target sequence for PRDM11 (NM_020229.1,1697-1715).
caggtaagttggtttggat

SEQ ID NO: 376289 - DNA, 19 bp, Homo sapiens
  siRNA target sequence for PRDM11 (NM_020229.1,1704-1722).
gttggtttggatgagatta

SEQ ID NO: 376290 - DNA, 19 bp, Homo sapiens
  siRNA target sequence for PPAN (NM_020230.2,288-306).
gtctgcaggttcgtaagaa

SEQ ID NO: 376291 - DNA, 19 bp, Homo sapiens
  siRNA target sequence for PPAN (NM_020230.2,290-308).
ctgcaggttcgtaagaaga

SEQ ID NO: 376292 - DNA, 19 bp, Homo sapiens
  siRNA target sequence for PPAN (NM_020230.2,293-311).
caggttcgtaagaagaact

SEQ ID NO: 376293 - DNA, 19 bp, Homo sapiens
  siRNA target sequence for PPAN (NM_020230.2,343-361).
cctcggggtcacacacttt

SEQ ID NO: 376294 - DNA, 19 bp, Homo sapiens
  siRNA target sequence for PPAN (NM_020230.2,348-366).
gggtcacacactttctgat

SEQ ID NO: 376295 - DNA, 19 bp, Homo sapiens
  siRNA target sequence for PPAN (NM_020230.2,384-402).
ccaatgtctactttaagct

SEQ ID NO: 376296 - DNA, 19 bp, Homo sapiens
  siRNA target sequence for PPAN (NM_020230.2,645-663).
gcctcctcatcgactacaa

SEQ ID NO: 376297 - DNA, 19 bp, Homo sapiens
  siRNA target sequence for PPAN (NM_020230.2,680-698).
ctggacttccgccactata

SEQ ID NO: 376298 - DNA, 19 bp, Homo sapiens
  siRNA target sequence for PPAN (NM_020230.2,688-706).
ccgccactatagcatcaaa

SEQ ID NO: 376299 - DNA, 19 bp, Homo sapiens
  siRNA target sequence for PPAN (NM_020230.2,690-708).
gccactatagcatcaaagt

SEQ ID NO: 376300 - DNA, 19 bp, Homo sapiens
  siRNA target sequence for PPAN (NM_020230.2,691-709).
ccactatagcatcaaagtt

SEQ ID NO: 376301 - DNA, 19 bp, Homo sapiens
  siRNA target sequence for PPAN (NM_020230.2,723-741).
cgagtcgcgggatgaagaa

SEQ ID NO: 376302 - DNA, 19 bp, Homo sapiens
  siRNA target sequence for PPAN (NM_020230.2,1124-1142).
cgggaggcccacagaaaga

SEQ ID NO: 376303 - DNA, 19 bp, Homo sapiens
  siRNA target sequence for PPAN (NM_020230.2,1171-1189).
ggtcgggggtagtgatgaa

SEQ ID NO: 376304 - DNA, 19 bp, Homo sapiens
  siRNA target sequence for PPAN (NM_020230.2,1256-1274).
gatgatgacatcgagtatt

SEQ ID NO: 376305 - DNA, 19 bp, Homo sapiens
  siRNA target sequence for PPAN (NM_020230.2,1259-1277).
gatgacatcgagtatttct

SEQ ID NO: 376306 - DNA, 19 bp, Homo sapiens
  siRNA target sequence for PPAN (NM_020230.2,1386-1404).
gcaggggtcgcctttgtga

SEQ ID NO: 376307 - DNA, 19 bp, Homo sapiens
  siRNA target sequence for MDS010 (NM_020231.3,155-173).
ggttcaaaatggaaagtat

SEQ ID NO: 376308 - DNA, 19 bp, Homo sapiens
  siRNA target sequence for MDS010 (NM_020231.3,202-220).
gaattacgaaccatgttca

SEQ ID NO: 376309 - DNA, 19 bp, Homo sapiens
  siRNA target sequence for MDS010 (NM_020231.3,208-226).
cgaaccatgttcaagtcaa

SEQ ID NO: 376310 - DNA, 19 bp, Homo sapiens
  siRNA target sequence for MDS010 (NM_020231.3,212-230).
ccatgttcaagtcaaaact

SEQ ID NO: 376311 - DNA, 19 bp, Homo sapiens
  siRNA target sequence for MDS010 (NM_020231.3,235-253).
ctgctaccatggtgtcata

SEQ ID NO: 376312 - DNA, 19 bp, Homo sapiens
  siRNA target sequence for MDS010 (NM_020231.3,238-256).
ctaccatggtgtcatagaa

SEQ ID NO: 376313 - DNA, 19 bp, Homo sapiens
  siRNA target sequence for MDS010 (NM_020231.3,323-341).
ctagggacccactatcaga

SEQ ID NO: 376314 - DNA, 19 bp, Homo sapiens
  siRNA target sequence for MDS010 (NM_020231.3,330-348).
cccactatcagatcactaa

SEQ ID NO: 376315 - DNA, 19 bp, Homo sapiens
  siRNA target sequence for MDS010 (NM_020231.3,354-372).
gactgtaccgggaaaatga

SEQ ID NO: 376316 - DNA, 19 bp, Homo sapiens
  siRNA target sequence for MDS010 (NM_020231.3,356-374).
ctgtaccgggaaaatgact

SEQ ID NO: 376317 - DNA, 19 bp, Homo sapiens
  siRNA target sequence for MDS010 (NM_020231.3,398-416).
ggtgttgagcactttattt

SEQ ID NO: 376318 - DNA, 19 bp, Homo sapiens
  siRNA target sequence for MDS010 (NM_020231.3,445-463).
ggagatggtgatcaatgta

SEQ ID NO: 376319 - DNA, 19 bp, Homo sapiens
  siRNA target sequence for MDS010 (NM_020231.3,454-472).
gatcaatgtacgagattat

SEQ ID NO: 376320 - DNA, 19 bp, Homo sapiens
  siRNA target sequence for MDS010 (NM_020231.3,457-475).
caatgtacgagattatcct

SEQ ID NO: 376321 - DNA, 19 bp, Homo sapiens
  siRNA target sequence for MDS010 (NM_020231.3,511-529).
cttctccttcagtaagaca

SEQ ID NO: 376322 - DNA, 19 bp, Homo sapiens
  siRNA target sequence for MDS010 (NM_020231.3,528-546).
catcagagtaccatgatat

SEQ ID NO: 376323 - DNA, 19 bp, Homo sapiens
  siRNA target sequence for MDS010 (NM_020231.3,550-568).
gtatcctgcttggacattt

SEQ ID NO: 376324 - DNA, 19 bp, Homo sapiens
  siRNA target sequence for MDS010 (NM_020231.3,581-599).
cctgctgtttggccaattt

SEQ ID NO: 376325 - DNA, 19 bp, Homo sapiens
  siRNA target sequence for MDS010 (NM_020231.3,582-600).
ctgctgtttggccaattta

SEQ ID NO: 376326 - DNA, 19 bp, Homo sapiens
  siRNA target sequence for MDS010 (NM_020231.3,788-806).
caggcctggaaatctatga

SEQ ID NO: 376327 - DNA, 19 bp, Homo sapiens
  siRNA target sequence for MDS010 (NM_020231.3,848-866).
gtggatcactgcaaataca

SEQ ID NO: 376328 - DNA, 19 bp, Homo sapiens
  siRNA target sequence for MDS010 (NM_020231.3,858-876).
gcaaatacaagtatctgtt

SEQ ID NO: 376329 - DNA, 19 bp, Homo sapiens
  siRNA target sequence for MDS010 (NM_020231.3,859-877).
caaatacaagtatctgttt

SEQ ID NO: 376330 - DNA, 19 bp, Homo sapiens
  siRNA target sequence for MDS010 (NM_020231.3,885-903).
gaggcgtagctgcaagttt

SEQ ID NO: 376331 - DNA, 19 bp, Homo sapiens
  siRNA target sequence for MDS010 (NM_020231.3,950-968).
ggtgatgagtggctagaat

SEQ ID NO: 376332 - DNA, 19 bp, Homo sapiens
  siRNA target sequence for MDS010 (NM_020231.3,953-971).
gatgagtggctagaattct

SEQ ID NO: 376333 - DNA, 19 bp, Homo sapiens
  siRNA target sequence for MDS010 (NM_020231.3,956-974).
gagtggctagaattcttct

SEQ ID NO: 376334 - DNA, 19 bp, Homo sapiens
  siRNA target sequence for MDS010 (NM_020231.3,958-976).
gtggctagaattcttctat

SEQ ID NO: 376335 - DNA, 19 bp, Homo sapiens
  siRNA target sequence for MDS010 (NM_020231.3,985-1003).
gaagccatgggttcactat

SEQ ID NO: 376336 - DNA, 19 bp, Homo sapiens
  siRNA target sequence for MDS010 (NM_020231.3,1000-1018).
ctatatcccagtcaaaaca

SEQ ID NO: 376337 - DNA, 19 bp, Homo sapiens
  siRNA target sequence for MDS010 (NM_020231.3,1033-1051).
ccaagagctgttacaattt

SEQ ID NO: 376338 - DNA, 19 bp, Homo sapiens
  siRNA target sequence for MDS010 (NM_020231.3,1042-1060).
gttacaatttgtaaaagca

SEQ ID NO: 376339 - DNA, 19 bp, Homo sapiens
  siRNA target sequence for MDS010 (NM_020231.3,1154-1172).
ctcttgagtgaatactcta

SEQ ID NO: 376340 - DNA, 19 bp, Homo sapiens
  siRNA target sequence for MDS010 (NM_020231.3,1156-1174).
cttgagtgaatactctaaa

SEQ ID NO: 376341 - DNA, 19 bp, Homo sapiens
  siRNA target sequence for MDS010 (NM_020231.3,1170-1188).
ctaaattcctgtcttataa

SEQ ID NO: 376342 - DNA, 19 bp, Homo sapiens
  siRNA target sequence for MDS010 (NM_020231.3,1197-1215).
gaaggaaaggttatgatca

SEQ ID NO: 376343 - DNA, 19 bp, Homo sapiens
  siRNA target sequence for MDS006 (NM_020233.3,92-110).
gcgtcatcgcagatgttca

SEQ ID NO: 376344 - DNA, 19 bp, Homo sapiens
  siRNA target sequence for MDS006 (NM_020233.3,93-111).
cgtcatcgcagatgttcaa

SEQ ID NO: 376345 - DNA, 19 bp, Homo sapiens
  siRNA target sequence for MDS006 (NM_020233.3,94-112).
gtcatcgcagatgttcaat

SEQ ID NO: 376346 - DNA, 19 bp, Homo sapiens
  siRNA target sequence for MDS006 (NM_020233.3,96-114).
catcgcagatgttcaattt

SEQ ID NO: 376347 - DNA, 19 bp, Homo sapiens
  siRNA target sequence for MDS006 (NM_020233.3,156-174).
gcgatactacagacatagt

SEQ ID NO: 376348 - DNA, 19 bp, Homo sapiens
  siRNA target sequence for MDS006 (NM_020233.3,167-185).
gacatagtcttcttcactt

SEQ ID NO: 376349 - DNA, 19 bp, Homo sapiens
  siRNA target sequence for MDS006 (NM_020233.3,183-201).
cttacagggtgccattgaa

SEQ ID NO: 376350 - DNA, 19 bp, Homo sapiens
  siRNA target sequence for MDS006 (NM_020233.3,238-256).
cttcagcttggagatatca

SEQ ID NO: 376351 - DNA, 19 bp, Homo sapiens
  siRNA target sequence for MDS006 (NM_020233.3,248-266).
gagatatcatcgatggata

SEQ ID NO: 376352 - DNA, 19 bp, Homo sapiens
  siRNA target sequence for MDS006 (NM_020233.3,307-325).
gttatggacatgttcaaga

SEQ ID NO: 376353 - DNA, 19 bp, Homo sapiens
  siRNA target sequence for MDS006 (NM_020233.3,315-333).
catgttcaagaggcttaaa

SEQ ID NO: 376354 - DNA, 19 bp, Homo sapiens
  siRNA target sequence for MDS006 (NM_020233.3,318-336).
gttcaagaggcttaaagtt

SEQ ID NO: 376355 - DNA, 19 bp, Homo sapiens
  siRNA target sequence for MDS006 (NM_020233.3,327-345).
gcttaaagttccagttcat

SEQ ID NO: 376356 - DNA, 19 bp, Homo sapiens
  siRNA target sequence for MDS006 (NM_020233.3,334-352).
gttccagttcatcatacat

SEQ ID NO: 376357 - DNA, 19 bp, Homo sapiens
  siRNA target sequence for MDS006 (NM_020233.3,353-371).
ggggaaaccatgaattcta

SEQ ID NO: 376358 - DNA, 19 bp, Homo sapiens
  siRNA target sequence for MDS006 (NM_020233.3,380-398).
gtagagagtatttaacaca

SEQ ID NO: 376359 - DNA, 19 bp, Homo sapiens
  siRNA target sequence for MDS006 (NM_020233.3,456-474).
gccttcagaagattattat

SEQ ID NO: 376360 - DNA, 19 bp, Homo sapiens
  siRNA target sequence for MDS006 (NM_020233.3,461-479).
cagaagattattatgctta

SEQ ID NO: 376361 - DNA, 19 bp, Homo sapiens
  siRNA target sequence for MDS006 (NM_020233.3,476-494).
cttatcattttgtaccatt

SEQ ID NO: 376362 - DNA, 19 bp, Homo sapiens
  siRNA target sequence for MDS006 (NM_020233.3,495-513).
ccctaaattccggttcatt

SEQ ID NO: 376363 - DNA, 19 bp, Homo sapiens
  siRNA target sequence for MDS006 (NM_020233.3,496-514).
cctaaattccggttcattt

SEQ ID NO: 376364 - DNA, 19 bp, Homo sapiens
  siRNA target sequence for MDS006 (NM_020233.3,504-522).
ccggttcattttacttgat

SEQ ID NO: 376365 - DNA, 19 bp, Homo sapiens
  siRNA target sequence for MDS006 (NM_020233.3,563-581).
caaaatacgagcagtgtat

SEQ ID NO: 376366 - DNA, 19 bp, Homo sapiens
  siRNA target sequence for MDS006 (NM_020233.3,591-609).
gagggagcacaatccaaat

SEQ ID NO: 376367 - DNA, 19 bp, Homo sapiens
  siRNA target sequence for MDS009 (NM_020234.3,222-240).
ctctcaatccacctatatt

SEQ ID NO: 376368 - DNA, 19 bp, Homo sapiens
  siRNA target sequence for MDS009 (NM_020234.3,233-251).
cctatatttctcaaacgaa

SEQ ID NO: 376369 - DNA, 19 bp, Homo sapiens
  siRNA target sequence for MDS009 (NM_020234.3,289-307).
gtcacaaactacttccata

SEQ ID NO: 376370 - DNA, 19 bp, Homo sapiens
  siRNA target sequence for MDS009 (NM_020234.3,312-330).
cagaagatccccttcaaaa

SEQ ID NO: 376371 - DNA, 19 bp, Homo sapiens
  siRNA target sequence for MDS009 (NM_020234.3,314-332).
gaagatccccttcaaaact

SEQ ID NO: 376372 - DNA, 19 bp, Homo sapiens
  siRNA target sequence for MDS009 (NM_020234.3,317-335).
gatccccttcaaaacttat

SEQ ID NO: 376373 - DNA, 19 bp, Homo sapiens
  siRNA target sequence for MDS009 (NM_020234.3,331-349).
cttatgtttagcatctcaa

SEQ ID NO: 376374 - DNA, 19 bp, Homo sapiens
  siRNA target sequence for MDS009 (NM_020234.3,370-388).
gcaaagtgggagatcaaaa

SEQ ID NO: 376375 - DNA, 19 bp, Homo sapiens
  siRNA target sequence for MDS009 (NM_020234.3,402-420).
gtggttccagaatgttcta

SEQ ID NO: 376376 - DNA, 19 bp, Homo sapiens
  siRNA target sequence for MDS009 (NM_020234.3,404-422).
ggttccagaatgttctact

SEQ ID NO: 376377 - DNA, 19 bp, Homo sapiens
  siRNA target sequence for MDS009 (NM_020234.3,471-489).
cacttgtgaagcttccatt

SEQ ID NO: 376378 - DNA, 19 bp, Homo sapiens
  siRNA target sequence for MDS009 (NM_020234.3,486-504).
cattgaagattgacatcat

SEQ ID NO: 376379 - DNA, 19 bp, Homo sapiens
  siRNA target sequence for MDS009 (NM_020234.3,534-552).
gtactgctatacatgcaaa

SEQ ID NO: 376380 - DNA, 19 bp, Homo sapiens
  siRNA target sequence for MDS009 (NM_020234.3,556-574).
cttagcacctgaatttgta

SEQ ID NO: 376381 - DNA, 19 bp, Homo sapiens
  siRNA target sequence for MDS009 (NM_020234.3,583-601).
cacgtatccgtgtattcca

SEQ ID NO: 376382 - DNA, 19 bp, Homo sapiens
  siRNA target sequence for MDS009 (NM_020234.3,591-609).
cgtgtattccagaatatga

SEQ ID NO: 376383 - DNA, 19 bp, Homo sapiens
  siRNA target sequence for MDS009 (NM_020234.3,592-610).
gtgtattccagaatatgaa

SEQ ID NO: 376384 - DNA, 19 bp, Homo sapiens
  siRNA target sequence for MDS009 (NM_020234.3,641-659).
cctggacctcagtctatct

SEQ ID NO: 376385 - DNA, 19 bp, Homo sapiens
  siRNA target sequence for MDS009 (NM_020234.3,644-662).
ggacctcagtctatctcaa

SEQ ID NO: 376386 - DNA, 19 bp, Homo sapiens
  siRNA target sequence for MDS009 (NM_020234.3,645-663).
gacctcagtctatctcaat

SEQ ID NO: 376387 - DNA, 19 bp, Homo sapiens
  siRNA target sequence for MDS009 (NM_020234.3,647-665).
cctcagtctatctcaataa

SEQ ID NO: 376388 - DNA, 19 bp, Homo sapiens
  siRNA target sequence for MDS009 (NM_020234.3,652-670).
gtctatctcaataaaagat

SEQ ID NO: 376389 - DNA, 19 bp, Homo sapiens
  siRNA target sequence for MDS009 (NM_020234.3,865-883).
cactgatgagcgacttcaa

SEQ ID NO: 376390 - DNA, 19 bp, Homo sapiens
  siRNA target sequence for MDS009 (NM_020234.3,874-892).
gcgacttcaagggttgtta

SEQ ID NO: 376391 - DNA, 19 bp, Homo sapiens
  siRNA target sequence for MDS009 (NM_020234.3,876-894).
gacttcaagggttgttaca

SEQ ID NO: 376392 - DNA, 19 bp, Homo sapiens
  siRNA target sequence for MDS009 (NM_020234.3,921-939).
gcttttggcgccatcaaaa

SEQ ID NO: 376393 - DNA, 19 bp, Homo sapiens
  siRNA target sequence for MDS009 (NM_020234.3,966-984).
caattgaagccatttacta

SEQ ID NO: 376394 - DNA, 19 bp, Homo sapiens
  siRNA target sequence for MDS009 (NM_020234.3,991-1009).
ggtagactaccatactgat

SEQ ID NO: 376395 - DNA, 19 bp, Homo sapiens
  siRNA target sequence for MDS009 (NM_020234.3,992-1010).
gtagactaccatactgata

SEQ ID NO: 376396 - DNA, 19 bp, Homo sapiens
  siRNA target sequence for MDS009 (NM_020234.3,995-1013).
gactaccatactgatatat

SEQ ID NO: 376397 - DNA, 19 bp, Homo sapiens
  siRNA target sequence for MDS009 (NM_020234.3,997-1015).
ctaccatactgatatatta

SEQ ID NO: 376398 - DNA, 19 bp, Homo sapiens
  siRNA target sequence for MDS009 (NM_020234.3,1021-1039).
gaaatacagagggcaatat

SEQ ID NO: 376399 - DNA, 19 bp, Homo sapiens
  siRNA target sequence for MDS009 (NM_020234.3,1031-1049).
gggcaatatgacaatcttt

SEQ ID NO: 376400 - DNA, 19 bp, Homo sapiens
  siRNA target sequence for MDS009 (NM_020234.3,1032-1050).
ggcaatatgacaatctttt

SEQ ID NO: 376401 - DNA, 19 bp, Homo sapiens
  siRNA target sequence for MDS009 (NM_020234.3,1034-1052).
caatatgacaatcttttat

SEQ ID NO: 376402 - DNA, 19 bp, Homo sapiens
  siRNA target sequence for MDS009 (NM_020234.3,1069-1087).
gtaccagttgataaagaat

SEQ ID NO: 376403 - DNA, 19 bp, Homo sapiens
  siRNA target sequence for C8orf17 (NM_020237.1,1245-1263).
ctttctcccgtcataagta

SEQ ID NO: 376404 - DNA, 19 bp, Homo sapiens
  siRNA target sequence for C8orf17 (NM_020237.1,1251-1269).
cccgtcataagtacaagat

SEQ ID NO: 376405 - DNA, 19 bp, Homo sapiens
  siRNA target sequence for C8orf17 (NM_020237.1,1253-1271).
cgtcataagtacaagatgt

SEQ ID NO: 376406 - DNA, 19 bp, Homo sapiens
  siRNA target sequence for C8orf17 (NM_020237.1,1254-1272).
gtcataagtacaagatgtt

SEQ ID NO: 376407 - DNA, 19 bp, Homo sapiens
  siRNA target sequence for MOST2 (NM_020250.1,3533-3551).
gcaaatggacccccatttt

SEQ ID NO: 376408 - DNA, 19 bp, Homo sapiens
  siRNA target sequence for MOST2 (NM_020250.1,3794-3812).
cgcactctgagccttatta

SEQ ID NO: 376409 - DNA, 19 bp, Homo sapiens
  siRNA target sequence for MOST2 (NM_020250.1,3918-3936).
ggacgacaggtgtctgtat

SEQ ID NO: 376410 - DNA, 19 bp, Homo sapiens
  siRNA target sequence for MOST2 (NM_020250.1,3919-3937).
gacgacaggtgtctgtatt

SEQ ID NO: 376411 - DNA, 19 bp, Homo sapiens
  siRNA target sequence for MOST2 (NM_020250.1,3922-3940).
gacaggtgtctgtattgct

SEQ ID NO: 376412 - DNA, 19 bp, Homo sapiens
  siRNA target sequence for DKFZP434K046 (NM_020312.1,142-160).
ggggctaaggtcttcagat

SEQ ID NO: 376413 - DNA, 19 bp, Homo sapiens
  siRNA target sequence for DKFZP434K046 (NM_020312.1,230-248).
gatccagagtcttctcatt

SEQ ID NO: 376414 - DNA, 19 bp, Homo sapiens
  siRNA target sequence for DKFZP434K046 (NM_020312.1,245-263).
cattcaccccccaggtata

SEQ ID NO: 376415 - DNA, 19 bp, Homo sapiens
  siRNA target sequence for DKFZP434K046 (NM_020312.1,444-462).
gtgagctaatactgcattt

SEQ ID NO: 376416 - DNA, 19 bp, Homo sapiens
  siRNA target sequence for DKFZP434K046 (NM_020312.1,711-729).
gggaccagtccactgattt

SEQ ID NO: 376417 - DNA, 19 bp, Homo sapiens
  siRNA target sequence for DKFZP434K046 (NM_020312.1,712-730).
ggaccagtccactgatttt

SEQ ID NO: 376418 - DNA, 19 bp, Homo sapiens
  siRNA target sequence for DKFZP434K046 (NM_020312.1,713-731).
gaccagtccactgatttta

SEQ ID NO: 376419 - DNA, 19 bp, Homo sapiens
  siRNA target sequence for DKFZP434K046 (NM_020312.1,796-814).
ggactcctctccagacttt

SEQ ID NO: 376420 - DNA, 19 bp, Homo sapiens
  siRNA target sequence for DKFZP434K046 (NM_020312.1,832-850).
cctggaaaaccgggttaat

SEQ ID NO: 376421 - DNA, 19 bp, Homo sapiens
  siRNA target sequence for DKFZP434K046 (NM_020312.1,843-861).
gggttaatgatgcaatgaa

SEQ ID NO: 376422 - DNA, 19 bp, Homo sapiens
  siRNA target sequence for DKFZP434K046 (NM_020312.1,929-947).
gcagtgacgctcaagaact

SEQ ID NO: 376423 - DNA, 19 bp, Homo sapiens
  siRNA target sequence for DKFZP434K046 (NM_020312.1,930-948).
cagtgacgctcaagaactt

SEQ ID NO: 376424 - DNA, 19 bp, Homo sapiens
  siRNA target sequence for MGC16824 (NM_020314.3,88-106).
gaactacaaagctgaattt

SEQ ID NO: 376425 - DNA, 19 bp, Homo sapiens
  siRNA target sequence for MGC16824 (NM_020314.3,91-109).
ctacaaagctgaatttgca

SEQ ID NO: 376426 - DNA, 19 bp, Homo sapiens
  siRNA target sequence for MGC16824 (NM_020314.3,117-135).
gactggaggctgtaccatt

SEQ ID NO: 376427 - DNA, 19 bp, Homo sapiens
  siRNA target sequence for MGC16824 (NM_020314.3,359-377).
cgtgatagagatgataact

SEQ ID NO: 376428 - DNA, 19 bp, Homo sapiens
  siRNA target sequence for MGC16824 (NM_020314.3,379-397).
cgttgtaggatcggatttt

SEQ ID NO: 376429 - DNA, 19 bp, Homo sapiens
  siRNA target sequence for MGC16824 (NM_020314.3,444-462).
ctaccgaaaagctgtctat

SEQ ID NO: 376430 - DNA, 19 bp, Homo sapiens
  siRNA target sequence for MGC16824 (NM_020314.3,447-465).
ccgaaaagctgtctattaa

SEQ ID NO: 376431 - DNA, 19 bp, Homo sapiens
  siRNA target sequence for MGC16824 (NM_020314.3,448-466).
cgaaaagctgtctattaat

SEQ ID NO: 376432 - DNA, 19 bp, Homo sapiens
  siRNA target sequence for MGC16824 (NM_020314.3,467-485).
ctgtttatgggatctgaaa

SEQ ID NO: 376433 - DNA, 19 bp, Homo sapiens
  siRNA target sequence for MGC16824 (NM_020314.3,651-669).
gggcctcagaccagaaagt

SEQ ID NO: 376434 - DNA, 19 bp, Homo sapiens
  siRNA target sequence for MGC16824 (NM_020314.3,696-714).
gttcaaagcttctttcaga

SEQ ID NO: 376435 - DNA, 19 bp, Homo sapiens
  siRNA target sequence for MGC16824 (NM_020314.3,713-731).
gacaccagtgttattcagt

SEQ ID NO: 376436 - DNA, 19 bp, Homo sapiens
  siRNA target sequence for MGC16824 (NM_020314.3,730-748).
gttctacccaagcaaattt

SEQ ID NO: 376437 - DNA, 19 bp, Homo sapiens
  siRNA target sequence for MGC16824 (NM_020314.3,751-769).
ccttatcaccgacatactt

SEQ ID NO: 376438 - DNA, 19 bp, Homo sapiens
  siRNA target sequence for MGC16824 (NM_020314.3,757-775).
caccgacatacttgataca

SEQ ID NO: 376439 - DNA, 19 bp, Homo sapiens
  siRNA target sequence for MGC16824 (NM_020314.3,759-777).
ccgacatacttgatacatt

SEQ ID NO: 376440 - DNA, 19 bp, Homo sapiens
  siRNA target sequence for MGC16824 (NM_020314.3,760-778).
cgacatacttgatacattt

SEQ ID NO: 376441 - DNA, 19 bp, Homo sapiens
  siRNA target sequence for MGC16824 (NM_020314.3,787-805).
cgtgtacgagcgcatcttt

SEQ ID NO: 376442 - DNA, 19 bp, Homo sapiens
  siRNA target sequence for MGC16824 (NM_020314.3,828-846).
gcgtcttaccagatcactt

SEQ ID NO: 376443 - DNA, 19 bp, Homo sapiens
  siRNA target sequence for MGC16824 (NM_020314.3,829-847).
cgtcttaccagatcacttt

SEQ ID NO: 376444 - DNA, 19 bp, Homo sapiens
  siRNA target sequence for MGC16824 (NM_020314.3,885-903).
gcctaaattggtttttcaa

SEQ ID NO: 376445 - DNA, 19 bp, Homo sapiens
  siRNA target sequence for MGC16824 (NM_020314.3,952-970).
catcctgaaatgtaacaaa

SEQ ID NO: 376446 - DNA, 19 bp, Homo sapiens
  siRNA target sequence for MGC16824 (NM_020314.3,974-992).
ctctccaaaacgggaattt

SEQ ID NO: 376447 - DNA, 19 bp, Homo sapiens
  siRNA target sequence for MGC16824 (NM_020314.3,978-996).
ccaaaacgggaatttcaga

SEQ ID NO: 376448 - DNA, 19 bp, Homo sapiens
  siRNA target sequence for MGC16824 (NM_020314.3,1072-1090).
gtgccgggtgggaatggaa

SEQ ID NO: 376449 - DNA, 19 bp, Homo sapiens
  siRNA target sequence for MGC16824 (NM_020314.3,1139-1157).
ctccttacgttcaaacaga

SEQ ID NO: 376450 - DNA, 19 bp, Homo sapiens
  siRNA target sequence for MGC16824 (NM_020314.3,1141-1159).
ccttacgttcaaacagatt

SEQ ID NO: 376451 - DNA, 19 bp, Homo sapiens
  siRNA target sequence for MGC16824 (NM_020314.3,1300-1318).
ggaaaggtgtaagaaacta

SEQ ID NO: 376452 - DNA, 19 bp, Homo sapiens
  siRNA target sequence for MGC16824 (NM_020314.3,1375-1393).
cgccacaaggtctatggat

SEQ ID NO: 376453 - DNA, 19 bp, Homo sapiens
  siRNA target sequence for MGC16824 (NM_020314.3,1376-1394).
gccacaaggtctatggatt

SEQ ID NO: 376454 - DNA, 19 bp, Homo sapiens
  siRNA target sequence for MGC16824 (NM_020314.3,1377-1395).
ccacaaggtctatggattt

SEQ ID NO: 376455 - DNA, 19 bp, Homo sapiens
  siRNA target sequence for MGC16824 (NM_020314.3,1435-1453).
caagcatcttctttttcga

SEQ ID NO: 376456 - DNA, 19 bp, Homo sapiens
  siRNA target sequence for MGC16824 (NM_020314.3,1492-1510).
gagtgaccgacttcagatt

SEQ ID NO: 376457 - DNA, 19 bp, Homo sapiens
  siRNA target sequence for MGC16824 (NM_020314.3,1494-1512).
gtgaccgacttcagattct

SEQ ID NO: 376458 - DNA, 19 bp, Homo sapiens
  siRNA target sequence for MGC16824 (NM_020314.3,1520-1538).
gcttggaaagtcatcacta

SEQ ID NO: 376459 - DNA, 19 bp, Homo sapiens
  siRNA target sequence for MGC16824 (NM_020314.3,1572-1590).
ccgaagtgtgggtggaata

SEQ ID NO: 376460 - DNA, 19 bp, Homo sapiens
  siRNA target sequence for MGC16824 (NM_020314.3,1574-1592).
gaagtgtgggtggaataca

SEQ ID NO: 376461 - DNA, 19 bp, Homo sapiens
  siRNA target sequence for MGC16824 (NM_020314.3,1686-1704).
cccagcttcagttaataat

SEQ ID NO: 376462 - DNA, 19 bp, Homo sapiens
  siRNA target sequence for MGC16824 (NM_020314.3,1726-1744).
ccatgacttctcagttctt

SEQ ID NO: 376463 - DNA, 19 bp, Homo sapiens
  siRNA target sequence for MGC16824 (NM_020314.3,1799-1817).
cgggtggaggtttgcaaat

SEQ ID NO: 376464 - DNA, 19 bp, Homo sapiens
  siRNA target sequence for MGC16824 (NM_020314.3,1861-1879).
ggacccggtcatcttgaat

SEQ ID NO: 376465 - DNA, 19 bp, Homo sapiens
  siRNA target sequence for MGC16824 (NM_020314.3,1947-1965).
gaatgctgtcatatttgat

SEQ ID NO: 376466 - DNA, 19 bp, Homo sapiens
  siRNA target sequence for MGC16824 (NM_020314.3,1951-1969).
gctgtcatatttgattaat

SEQ ID NO: 376467 - DNA, 19 bp, Homo sapiens
  siRNA target sequence for MGC16824 (NM_020314.3,1995-2013).
gccgtgattttgaacaaca

SEQ ID NO: 376468 - DNA, 19 bp, Homo sapiens
  siRNA target sequence for MGC16824 (NM_020314.3,2034-2052).
ccaggtcgatgttttgcaa

SEQ ID NO: 376469 - DNA, 19 bp, Homo sapiens
  siRNA target sequence for MGC16824 (NM_020314.3,2035-2053).
caggtcgatgttttgcaat

SEQ ID NO: 376470 - DNA, 19 bp, Homo sapiens
  siRNA target sequence for MGC16824 (NM_020314.3,2168-2186).
gttgcctactgcttcatca

SEQ ID NO: 376471 - DNA, 19 bp, Homo sapiens
  siRNA target sequence for MGC16824 (NM_020314.3,2313-2331).
cggaagttccaaagatgat

SEQ ID NO: 376472 - DNA, 19 bp, Homo sapiens
  siRNA target sequence for MGC16824 (NM_020314.3,2322-2340).
caaagatgattaatattga

SEQ ID NO: 376473 - DNA, 19 bp, Homo sapiens
  siRNA target sequence for MGC16824 (NM_020314.3,2372-2390).
ctggaattcctctgcaatt

SEQ ID NO: 376474 - DNA, 19 bp, Homo sapiens
  siRNA target sequence for MGC16824 (NM_020314.3,2501-2519).
gagaaaatccgcatctaca

SEQ ID NO: 376475 - DNA, 19 bp, Homo sapiens
  siRNA target sequence for MGC16824 (NM_020314.3,2550-2568).
gccaggagacgtaccttta

SEQ ID NO: 376476 - DNA, 19 bp, Homo sapiens
  siRNA target sequence for MGC16824 (NM_020314.3,2559-2577).
cgtacctttaccacataga

SEQ ID NO: 376477 - DNA, 19 bp, Homo sapiens
  siRNA target sequence for MGC16824 (NM_020314.3,2849-2867).
gtgaaaacgctagaataca

SEQ ID NO: 376478 - DNA, 19 bp, Homo sapiens
  siRNA target sequence for MGC16824 (NM_020314.3,2856-2874).
cgctagaatacatcaagaa

SEQ ID NO: 376479 - DNA, 19 bp, Homo sapiens
  siRNA target sequence for DJ465N24.2.1 (NM_020317.2,300-318).
gtctaggagccgctctttt

SEQ ID NO: 376480 - DNA, 19 bp, Homo sapiens
  siRNA target sequence for DJ465N24.2.1 (NM_020317.2,346-364).
gtctcgagccggttttcgt

SEQ ID NO: 376481 - DNA, 19 bp, Homo sapiens
  siRNA target sequence for DJ465N24.2.1 (NM_020317.2,406-424).
cgccaccagcggaagtaca

SEQ ID NO: 376482 - DNA, 19 bp, Homo sapiens
  siRNA target sequence for DJ465N24.2.1 (NM_020317.2,427-445).
cgctactcgcggtcatact

SEQ ID NO: 376483 - DNA, 19 bp, Homo sapiens
  siRNA target sequence for DJ465N24.2.1 (NM_020317.2,496-514).
gggttcaccaggagatact

SEQ ID NO: 376484 - DNA, 19 bp, Homo sapiens
  siRNA target sequence for DJ465N24.2.1 (NM_020317.2,497-515).
ggttcaccaggagatacta

SEQ ID NO: 376485 - DNA, 19 bp, Homo sapiens
  siRNA target sequence for DJ465N24.2.1 (NM_020317.2,698-716).
ccccctttcgcttaagtga

SEQ ID NO: 376486 - DNA, 19 bp, Homo sapiens
  siRNA target sequence for DJ465N24.2.1 (NM_020317.2,699-717).
cccctttcgcttaagtgaa

SEQ ID NO: 376487 - DNA, 19 bp, Homo sapiens
  siRNA target sequence for DJ465N24.2.1 (NM_020317.2,700-718).
ccctttcgcttaagtgaaa

SEQ ID NO: 376488 - DNA, 19 bp, Homo sapiens
  siRNA target sequence for DJ465N24.2.1 (NM_020317.2,701-719).
cctttcgcttaagtgaaaa

SEQ ID NO: 376489 - DNA, 19 bp, Homo sapiens
  siRNA target sequence for DJ465N24.2.1 (NM_020317.2,724-742).
cgaatggagctgttagaaa

SEQ ID NO: 376490 - DNA, 19 bp, Homo sapiens
  siRNA target sequence for DJ465N24.2.1 (NM_020317.2,772-790).
ggaacaaccaacattgact

SEQ ID NO: 376491 - DNA, 19 bp, Homo sapiens
  siRNA target sequence for DJ465N24.2.1 (NM_020317.2,834-852).
ccgtggaataggtgtatca

SEQ ID NO: 376492 - DNA, 19 bp, Homo sapiens
  siRNA target sequence for DJ465N24.2.1 (NM_020317.2,835-853).
cgtggaataggtgtatcaa

SEQ ID NO: 376493 - DNA, 19 bp, Homo sapiens
  siRNA target sequence for DJ465N24.2.1 (NM_020317.2,838-856).
ggaataggtgtatcaagta

SEQ ID NO: 376494 - DNA, 19 bp, Homo sapiens
  siRNA target sequence for DJ465N24.2.1 (NM_020317.2,839-857).
gaataggtgtatcaagtaa

SEQ ID NO: 376495 - DNA, 19 bp, Homo sapiens
  siRNA target sequence for DJ465N24.2.1 (NM_020317.2,869-887).
ctgaactgtcggaaaaggt

SEQ ID NO: 376496 - DNA, 19 bp, Homo sapiens
  siRNA target sequence for DJ465N24.2.1 (NM_020317.2,871-889).
gaactgtcggaaaaggtaa

SEQ ID NO: 376497 - DNA, 19 bp, Homo sapiens
  siRNA target sequence for DJ465N24.2.1 (NM_020317.2,876-894).
gtcggaaaaggtaacagaa

SEQ ID NO: 376498 - DNA, 19 bp, Homo sapiens
  siRNA target sequence for DJ465N24.2.1 (NM_020317.2,939-957).
catagcttttagctctaat

SEQ ID NO: 376499 - DNA, 19 bp, Homo sapiens
  siRNA target sequence for DJ465N24.2.1 (NM_020317.2,962-980).
ctgtagcaaagccaataca

SEQ ID NO: 376500 - DNA, 19 bp, Homo sapiens
  siRNA target sequence for DJ465N24.2.1 (NM_020317.2,964-982).
gtagcaaagccaatacaaa

SEQ ID NO: 376501 - DNA, 19 bp, Homo sapiens
  siRNA target sequence for DJ465N24.2.1 (NM_020317.2,1019-1037).
gatcaccaaaaatagatca

SEQ ID NO: 376502 - DNA, 19 bp, Homo sapiens
  siRNA target sequence for DKFZP564O043 (NM_020319.1,282-300).
gctggaacattattatcca

SEQ ID NO: 376503 - DNA, 19 bp, Homo sapiens
  siRNA target sequence for DKFZP564O043 (NM_020319.1,326-344).
ggacgagaatggaatgact

SEQ ID NO: 376504 - DNA, 19 bp, Homo sapiens
  siRNA target sequence for DKFZP564O043 (NM_020319.1,377-395).
cgatatgtgcaaattacta

SEQ ID NO: 376505 - DNA, 19 bp, Homo sapiens
  siRNA target sequence for DKFZP564O043 (NM_020319.1,399-417).
cgacatggagccgatgtaa

SEQ ID NO: 376506 - DNA, 19 bp, Homo sapiens
  siRNA target sequence for DKFZP564O043 (NM_020319.1,400-418).
gacatggagccgatgtaaa

SEQ ID NO: 376507 - DNA, 19 bp, Homo sapiens
  siRNA target sequence for DKFZP564O043 (NM_020319.1,406-424).
gagccgatgtaaattgtca

SEQ ID NO: 376508 - DNA, 19 bp, Homo sapiens
  siRNA target sequence for DKFZP564O043 (NM_020319.1,428-446).
gcatgaacatggatacaca

SEQ ID NO: 376509 - DNA, 19 bp, Homo sapiens
  siRNA target sequence for DKFZP564O043 (NM_020319.1,452-470).
catgtttgctgcactttct

SEQ ID NO: 376510 - DNA, 19 bp, Homo sapiens
  siRNA target sequence for DKFZP564O043 (NM_020319.1,459-477).
gctgcactttctggtaata

SEQ ID NO: 376511 - DNA, 19 bp, Homo sapiens
  siRNA target sequence for DKFZP564O043 (NM_020319.1,482-500).
catcacatgggtaatgtta

SEQ ID NO: 376512 - DNA, 19 bp, Homo sapiens
  siRNA target sequence for DKFZP564O043 (NM_020319.1,485-503).
cacatgggtaatgttagaa

SEQ ID NO: 376513 - DNA, 19 bp, Homo sapiens
  siRNA target sequence for DKFZP564O043 (NM_020319.1,508-526).
gtgctgagacagatgttgt

SEQ ID NO: 376514 - DNA, 19 bp, Homo sapiens
  siRNA target sequence for DKFZP564O043 (NM_020319.1,576-594).
catgattgtgtgaccataa

SEQ ID NO: 376515 - DNA, 19 bp, Homo sapiens
  siRNA target sequence for DKFZP564O043 (NM_020319.1,579-597).
gattgtgtgaccataatca

SEQ ID NO: 376516 - DNA, 19 bp, Homo sapiens
  siRNA target sequence for DKFZP564O043 (NM_020319.1,610-628).
ctcgagagagactggatta

SEQ ID NO: 376517 - DNA, 19 bp, Homo sapiens
  siRNA target sequence for DKFZP564O043 (NM_020319.1,619-637).
gactggattattacactaa

SEQ ID NO: 376518 - DNA, 19 bp, Homo sapiens
  siRNA target sequence for DKFZP564O043 (NM_020319.1,687-705).
ccgctgcacaaaattatca

SEQ ID NO: 376519 - DNA, 19 bp, Homo sapiens
  siRNA target sequence for DKFZP564O043 (NM_020319.1,731-749).
gatcgtgatgcttgtaaat

SEQ ID NO: 376520 - DNA, 19 bp, Homo sapiens
  siRNA target sequence for DKFZP564O043 (NM_020319.1,856-874).
ctatgaagatgcattacat

SEQ ID NO: 376521 - DNA, 19 bp, Homo sapiens
  siRNA target sequence for DKFZP564O043 (NM_020319.1,890-908).
gaaatgcattaacttctta

SEQ ID NO: 376522 - DNA, 19 bp, Homo sapiens
  siRNA target sequence for DKFZP564O043 (NM_020319.1,935-953).
cttgatcaaaagcttgtta

SEQ ID NO: 376523 - DNA, 19 bp, Homo sapiens
  siRNA target sequence for DKFZP564O043 (NM_020319.1,974-992).
ctttccagtgtatcaagaa

SEQ ID NO: 376524 - DNA, 19 bp, Homo sapiens
  siRNA target sequence for DKFZP564O043 (NM_020319.1,1126-1144).
ctggccaggtgggttttgt

SEQ ID NO: 376525 - DNA, 19 bp, Homo sapiens
  siRNA target sequence for DKFZP564O043 (NM_020319.1,1200-1218).
gtttgcaaaatggtaatat

SEQ ID NO: 376526 - DNA, 19 bp, Homo sapiens
  siRNA target sequence for DKFZP564O043 (NM_020319.1,1211-1229).
ggtaatatattgtgatcaa

SEQ ID NO: 376527 - DNA, 19 bp, Homo sapiens
  siRNA target sequence for DKFZP564O043 (NM_020319.1,1243-1261).
cacactggtttactcataa

SEQ ID NO: 376528 - DNA, 19 bp, Homo sapiens
  siRNA target sequence for DKFZP564O043 (NM_020319.1,1249-1267).
ggtttactcataagaaaat

SEQ ID NO: 376529 - DNA, 19 bp, Homo sapiens
  siRNA target sequence for DKFZP564O043 (NM_020319.1,1278-1296).
ctgaaggacatttacgaaa

SEQ ID NO: 376530 - DNA, 19 bp, Homo sapiens
  siRNA target sequence for DKFZP564O043 (NM_020319.1,1283-1301).
ggacatttacgaaaagcaa

SEQ ID NO: 376531 - DNA, 19 bp, Homo sapiens
  siRNA target sequence for DKFZP564O043 (NM_020319.1,1334-1352).
ggaaaaccacggcaaactt

SEQ ID NO: 376532 - DNA, 19 bp, Homo sapiens
  siRNA target sequence for DKFZP564O043 (NM_020319.1,1343-1361).
cggcaaacttgatgtcaat

SEQ ID NO: 376533 - DNA, 19 bp, Homo sapiens
  siRNA target sequence for DKFZP564O043 (NM_020319.1,1344-1362).
ggcaaacttgatgtcaatt

SEQ ID NO: 376534 - DNA, 19 bp, Homo sapiens
  siRNA target sequence for DKFZP564O043 (NM_020319.1,1356-1374).
gtcaattctaactgtgtta

SEQ ID NO: 376535 - DNA, 19 bp, Homo sapiens
  siRNA target sequence for DKFZP564O043 (NM_020319.1,1395-1413).
gaagtaggtatctctcaaa

SEQ ID NO: 376536 - DNA, 19 bp, Homo sapiens
  siRNA target sequence for DKFZP564O043 (NM_020319.1,1401-1419).
ggtatctctcaaaaggatt

SEQ ID NO: 376537 - DNA, 19 bp, Homo sapiens
  siRNA target sequence for KIAA1219 (NM_020336.1,287-305).
ggtgattcagaatgatcaa

SEQ ID NO: 376538 - DNA, 19 bp, Homo sapiens
  siRNA target sequence for KIAA1219 (NM_020336.1,378-396).
cttgggcaggtgttaggta

SEQ ID NO: 376539 - DNA, 19 bp, Homo sapiens
  siRNA target sequence for KIAA1219 (NM_020336.1,408-426).
gctggtagtgagaatttgt

SEQ ID NO: 376540 - DNA, 19 bp, Homo sapiens
  siRNA target sequence for KIAA1219 (NM_020336.1,435-453).
gacaaagaagtaaaatgga

SEQ ID NO: 376541 - DNA, 19 bp, Homo sapiens
  siRNA target sequence for KIAA1219 (NM_020336.1,455-473).
catggaagtaatttgctat

SEQ ID NO: 376542 - DNA, 19 bp, Homo sapiens
  siRNA target sequence for KIAA1219 (NM_020336.1,514-532).
gcgttgatgtatatacaga

SEQ ID NO: 376543 - DNA, 19 bp, Homo sapiens
  siRNA target sequence for KIAA1219 (NM_020336.1,544-562).
ctttagtgttgccaaaaga

SEQ ID NO: 376544 - DNA, 19 bp, Homo sapiens
  siRNA target sequence for KIAA1219 (NM_020336.1,549-567).
gtgttgccaaaagattcta

SEQ ID NO: 376545 - DNA, 19 bp, Homo sapiens
  siRNA target sequence for KIAA1219 (NM_020336.1,555-573).
ccaaaagattctattccat

SEQ ID NO: 376546 - DNA, 19 bp, Homo sapiens
  siRNA target sequence for KIAA1219 (NM_020336.1,664-682).
gtcagattcgactatgctt

SEQ ID NO: 376547 - DNA, 19 bp, Homo sapiens
  siRNA target sequence for KIAA1219 (NM_020336.1,687-705).
gtcctgagagccattcaga

SEQ ID NO: 376548 - DNA, 19 bp, Homo sapiens
  siRNA target sequence for KIAA1219 (NM_020336.1,791-809).
ggccccaccaactgttcaa

SEQ ID NO: 376549 - DNA, 19 bp, Homo sapiens
  siRNA target sequence for KIAA1219 (NM_020336.1,854-872).
ctttgaggtgtggttacta

SEQ ID NO: 376550 - DNA, 19 bp, Homo sapiens
  siRNA target sequence for KIAA1219 (NM_020336.1,863-881).
gtggttactagcttgtact

SEQ ID NO: 376551 - DNA, 19 bp, Homo sapiens
  siRNA target sequence for KIAA1219 (NM_020336.1,995-1013).
cagattgctacgctttaca

SEQ ID NO: 376552 - DNA, 19 bp, Homo sapiens
  siRNA target sequence for KIAA1219 (NM_020336.1,997-1015).
gattgctacgctttacata

SEQ ID NO: 376553 - DNA, 19 bp, Homo sapiens
  siRNA target sequence for KIAA1219 (NM_020336.1,1001-1019).
gctacgctttacatatggt

SEQ ID NO: 376554 - DNA, 19 bp, Homo sapiens
  siRNA target sequence for KIAA1219 (NM_020336.1,1071-1089).
ccagaaatggataatgagt

SEQ ID NO: 376555 - DNA, 19 bp, Homo sapiens
  siRNA target sequence for KIAA1219 (NM_020336.1,1105-1123).
ggtttcgctttttacacat

SEQ ID NO: 376556 - DNA, 19 bp, Homo sapiens
  siRNA target sequence for KIAA1219 (NM_020336.1,1165-1183).
gctctactcccaaatttca

SEQ ID NO: 376557 - DNA, 19 bp, Homo sapiens
  siRNA target sequence for KIAA1219 (NM_020336.1,1185-1203).
gaacagttcttgaatgtga

SEQ ID NO: 376558 - DNA, 19 bp, Homo sapiens
  siRNA target sequence for KIAA1219 (NM_020336.1,1204-1222).
gcggaatgccgcaagaatt

SEQ ID NO: 376559 - DNA, 19 bp, Homo sapiens
  siRNA target sequence for KIAA1219 (NM_020336.1,1206-1224).
ggaatgccgcaagaattga

SEQ ID NO: 376560 - DNA, 19 bp, Homo sapiens
  siRNA target sequence for KIAA1219 (NM_020336.1,1207-1225).
gaatgccgcaagaattgaa

SEQ ID NO: 376561 - DNA, 19 bp, Homo sapiens
  siRNA target sequence for KIAA1219 (NM_020336.1,1214-1232).
gcaagaattgaatcagtat

SEQ ID NO: 376562 - DNA, 19 bp, Homo sapiens
  siRNA target sequence for KIAA1219 (NM_020336.1,1229-1247).
gtatccctgccttaaacat

SEQ ID NO: 376563 - DNA, 19 bp, Homo sapiens
  siRNA target sequence for KIAA1219 (NM_020336.1,1293-1311).
gtggatgcattcttaggta

SEQ ID NO: 376564 - DNA, 19 bp, Homo sapiens
  siRNA target sequence for KIAA1219 (NM_020336.1,1295-1313).
ggatgcattcttaggtatt

SEQ ID NO: 376565 - DNA, 19 bp, Homo sapiens
  siRNA target sequence for KIAA1219 (NM_020336.1,1296-1314).
gatgcattcttaggtattt

SEQ ID NO: 376566 - DNA, 19 bp, Homo sapiens
  siRNA target sequence for KIAA1219 (NM_020336.1,1347-1365).
cccgtgaatagattaagta

SEQ ID NO: 376567 - DNA, 19 bp, Homo sapiens
  siRNA target sequence for KIAA1219 (NM_020336.1,1348-1366).
ccgtgaatagattaagtat

SEQ ID NO: 376568 - DNA, 19 bp, Homo sapiens
  siRNA target sequence for KIAA1219 (NM_020336.1,1409-1427).
gaggcaccgggctgttact

SEQ ID NO: 376569 - DNA, 19 bp, Homo sapiens
  siRNA target sequence for KIAA1219 (NM_020336.1,1411-1429).
ggcaccgggctgttactgt

SEQ ID NO: 376570 - DNA, 19 bp, Homo sapiens
  siRNA target sequence for KIAA1219 (NM_020336.1,1416-1434).
cgggctgttactgtgaata

SEQ ID NO: 376571 - DNA, 19 bp, Homo sapiens
  siRNA target sequence for KIAA1219 (NM_020336.1,1445-1463).
gaagacaagcacagttagt

SEQ ID NO: 376572 - DNA, 19 bp, Homo sapiens
  siRNA target sequence for KIAA1219 (NM_020336.1,1448-1466).
gacaagcacagttagtact

SEQ ID NO: 376573 - DNA, 19 bp, Homo sapiens
  siRNA target sequence for KIAA1219 (NM_020336.1,1559-1577).
ccctcggagaccaaaggtt

SEQ ID NO: 376574 - DNA, 19 bp, Homo sapiens
  siRNA target sequence for KIAA1219 (NM_020336.1,1560-1578).
cctcggagaccaaaggtta

SEQ ID NO: 376575 - DNA, 19 bp, Homo sapiens
  siRNA target sequence for KIAA1219 (NM_020336.1,1561-1579).
ctcggagaccaaaggttaa

SEQ ID NO: 376576 - DNA, 19 bp, Homo sapiens
  siRNA target sequence for KIAA1219 (NM_020336.1,1618-1636).
cagcatttgttcactgtaa

SEQ ID NO: 376577 - DNA, 19 bp, Homo sapiens
  siRNA target sequence for KIAA1219 (NM_020336.1,1664-1682).
cagcatgactgccattaca

SEQ ID NO: 376578 - DNA, 19 bp, Homo sapiens
  siRNA target sequence for KIAA1219 (NM_020336.1,1667-1685).
catgactgccattacaaca

SEQ ID NO: 376579 - DNA, 19 bp, Homo sapiens
  siRNA target sequence for KIAA1219 (NM_020336.1,1670-1688).
gactgccattacaacacaa

SEQ ID NO: 376580 - DNA, 19 bp, Homo sapiens
  siRNA target sequence for KIAA1219 (NM_020336.1,1704-1722).
cgacggaaagggtcacaaa

SEQ ID NO: 376581 - DNA, 19 bp, Homo sapiens
  siRNA target sequence for KIAA1219 (NM_020336.1,1705-1723).
gacggaaagggtcacaaat

SEQ ID NO: 376582 - DNA, 19 bp, Homo sapiens
  siRNA target sequence for KIAA1219 (NM_020336.1,1739-1757).
ggtttccaatcctatgttt

SEQ ID NO: 376583 - DNA, 19 bp, Homo sapiens
  siRNA target sequence for KIAA1219 (NM_020336.1,1762-1780).
caagtgaatttcctgataa

SEQ ID NO: 376584 - DNA, 19 bp, Homo sapiens
  siRNA target sequence for KIAA1219 (NM_020336.1,1934-1952).
cttggccagcgttattcta

SEQ ID NO: 376585 - DNA, 19 bp, Homo sapiens
  siRNA target sequence for KIAA1219 (NM_020336.1,1938-1956).
gccagcgttattctaaact

SEQ ID NO: 376586 - DNA, 19 bp, Homo sapiens
  siRNA target sequence for KIAA1219 (NM_020336.1,1940-1958).
cagcgttattctaaactct

SEQ ID NO: 376587 - DNA, 19 bp, Homo sapiens
  siRNA target sequence for KIAA1219 (NM_020336.1,1995-2013).
gttgtggttccttacttta

SEQ ID NO: 376588 - DNA, 19 bp, Homo sapiens
  siRNA target sequence for KIAA1219 (NM_020336.1,2000-2018).
ggttccttactttatttca

SEQ ID NO: 376589 - DNA, 19 bp, Homo sapiens
  siRNA target sequence for KIAA1219 (NM_020336.1,2087-2105).
gcgaagatcctccattaat

SEQ ID NO: 376590 - DNA, 19 bp, Homo sapiens
  siRNA target sequence for KIAA1219 (NM_020336.1,2092-2110).
gatcctccattaatatcct

SEQ ID NO: 376591 - DNA, 19 bp, Homo sapiens
  siRNA target sequence for KIAA1219 (NM_020336.1,2120-2138).
gttgcccctccctcatcat

SEQ ID NO: 376592 - DNA, 19 bp, Homo sapiens
  siRNA target sequence for KIAA1219 (NM_020336.1,2163-2181).
gtcctggaaggaaagttta

SEQ ID NO: 376593 - DNA, 19 bp, Homo sapiens
  siRNA target sequence for KIAA1219 (NM_020336.1,2165-2183).
cctggaaggaaagtttagt

SEQ ID NO: 376594 - DNA, 19 bp, Homo sapiens
  siRNA target sequence for KIAA1219 (NM_020336.1,2166-2184).
ctggaaggaaagtttagta

SEQ ID NO: 376595 - DNA, 19 bp, Homo sapiens
  siRNA target sequence for KIAA1219 (NM_020336.1,2195-2213).
ctcttcttatgataaacca

SEQ ID NO: 376596 - DNA, 19 bp, Homo sapiens
  siRNA target sequence for KIAA1219 (NM_020336.1,2234-2252).
gttgagacttgtgaatata

SEQ ID NO: 376597 - DNA, 19 bp, Homo sapiens
  siRNA target sequence for KIAA1219 (NM_020336.1,2300-2318).
gatattaggggcaatgtta

SEQ ID NO: 376598 - DNA, 19 bp, Homo sapiens
  siRNA target sequence for KIAA1219 (NM_020336.1,2308-2326).
gggcaatgttaaatattgt

SEQ ID NO: 376599 - DNA, 19 bp, Homo sapiens
  siRNA target sequence for KIAA1219 (NM_020336.1,2369-2387).
gatgggtggtggagaaaat

SEQ ID NO: 376600 - DNA, 19 bp, Homo sapiens
  siRNA target sequence for KIAA1219 (NM_020336.1,2406-2424).
cgcaccaatagtggtatta

SEQ ID NO: 376601 - DNA, 19 bp, Homo sapiens
  siRNA target sequence for KIAA1219 (NM_020336.1,2452-2470).
ccacgactcccgatagtga

SEQ ID NO: 376602 - DNA, 19 bp, Homo sapiens
  siRNA target sequence for KIAA1219 (NM_020336.1,2531-2549).
cctgattcgcagcattcat

SEQ ID NO: 376603 - DNA, 19 bp, Homo sapiens
  siRNA target sequence for KIAA1219 (NM_020336.1,2572-2590).
cccagtggcgccaagacat

SEQ ID NO: 376604 - DNA, 19 bp, Homo sapiens
  siRNA target sequence for KIAA1219 (NM_020336.1,2580-2598).
cgccaagacatgagcatat

SEQ ID NO: 376605 - DNA, 19 bp, Homo sapiens
  siRNA target sequence for KIAA1219 (NM_020336.1,2621-2639).
ctctggccttgcaaaggta

SEQ ID NO: 376606 - DNA, 19 bp, Homo sapiens
  siRNA target sequence for KIAA1219 (NM_020336.1,2664-2682).
cggaagcgagccatcagtt

SEQ ID NO: 376607 - DNA, 19 bp, Homo sapiens
  siRNA target sequence for KIAA1219 (NM_020336.1,2713-2731).
gtcggccagctcctttaca

SEQ ID NO: 376608 - DNA, 19 bp, Homo sapiens
  siRNA target sequence for KIAA1219 (NM_020336.1,2715-2733).
cggccagctcctttacact

SEQ ID NO: 376609 - DNA, 19 bp, Homo sapiens
  siRNA target sequence for KIAA1219 (NM_020336.1,2750-2768).
catgatagtggcagctttt

SEQ ID NO: 376610 - DNA, 19 bp, Homo sapiens
  siRNA target sequence for KIAA1219 (NM_020336.1,2791-2809).
cagagcaccctgatatgct

SEQ ID NO: 376611 - DNA, 19 bp, Homo sapiens
  siRNA target sequence for KIAA1219 (NM_020336.1,2856-2874).
ggtatctcaggaagtaagt

SEQ ID NO: 376612 - DNA, 19 bp, Homo sapiens
  siRNA target sequence for KIAA1219 (NM_020336.1,2888-2906).
gcaagaggtcaagtacaaa

SEQ ID NO: 376613 - DNA, 19 bp, Homo sapiens
  siRNA target sequence for KIAA1219 (NM_020336.1,2919-2937).
ccaaaccctgcatctatga

SEQ ID NO: 376614 - DNA, 19 bp, Homo sapiens
  siRNA target sequence for KIAA1219 (NM_020336.1,2929-2947).
catctatgagggtaaagga

SEQ ID NO: 376615 - DNA, 19 bp, Homo sapiens
  siRNA target sequence for KIAA1219 (NM_020336.1,2958-2976).
gccaccctaacatgcatta

SEQ ID NO: 376616 - DNA, 19 bp, Homo sapiens
  siRNA target sequence for KIAA1219 (NM_020336.1,2981-2999).
gttgctcggcgcatttcct

SEQ ID NO: 376617 - DNA, 19 bp, Homo sapiens
  siRNA target sequence for KIAA1219 (NM_020336.1,3035-3053).
gaatgagaccactttgatt

SEQ ID NO: 376618 - DNA, 19 bp, Homo sapiens
  siRNA target sequence for KIAA1219 (NM_020336.1,3039-3057).
gagaccactttgattaaat

SEQ ID NO: 376619 - DNA, 19 bp, Homo sapiens
  siRNA target sequence for KIAA1219 (NM_020336.1,3061-3079).
ccaggctgccaaccataaa

SEQ ID NO: 376620 - DNA, 19 bp, Homo sapiens
  siRNA target sequence for KIAA1219 (NM_020336.1,3064-3082).
ggctgccaaccataaacaa

SEQ ID NO: 376621 - DNA, 19 bp, Homo sapiens
  siRNA target sequence for KIAA1219 (NM_020336.1,3073-3091).
ccataaacaagcatagttt

SEQ ID NO: 376622 - DNA, 19 bp, Homo sapiens
  siRNA target sequence for KIAA1219 (NM_020336.1,3185-3203).
gctggtccggggaatgtct

SEQ ID NO: 376623 - DNA, 19 bp, Homo sapiens
  siRNA target sequence for KIAA1219 (NM_020336.1,3246-3264).
ggagcaaaagcaaatcaga

SEQ ID NO: 376624 - DNA, 19 bp, Homo sapiens
  siRNA target sequence for KIAA1219 (NM_020336.1,3283-3301).
ctcgcccagttcctaaaaa

SEQ ID NO: 376625 - DNA, 19 bp, Homo sapiens
  siRNA target sequence for KIAA1219 (NM_020336.1,3286-3304).
gcccagttcctaaaaatga

SEQ ID NO: 376626 - DNA, 19 bp, Homo sapiens
  siRNA target sequence for KIAA1219 (NM_020336.1,3295-3313).
ctaaaaatgacgttggatt

SEQ ID NO: 376627 - DNA, 19 bp, Homo sapiens
  siRNA target sequence for KIAA1219 (NM_020336.1,3303-3321).
gacgttggatttaaatatt

SEQ ID NO: 376628 - DNA, 19 bp, Homo sapiens
  siRNA target sequence for KIAA1219 (NM_020336.1,3305-3323).
cgttggatttaaatattct

SEQ ID NO: 376629 - DNA, 19 bp, Homo sapiens
  siRNA target sequence for KIAA1219 (NM_020336.1,3455-3473).
ggcccagcagattgcttat

SEQ ID NO: 376630 - DNA, 19 bp, Homo sapiens
  siRNA target sequence for KIAA1219 (NM_020336.1,3457-3475).
cccagcagattgcttatga

SEQ ID NO: 376631 - DNA, 19 bp, Homo sapiens
  siRNA target sequence for KIAA1219 (NM_020336.1,3458-3476).
ccagcagattgcttatgaa

SEQ ID NO: 376632 - DNA, 19 bp, Homo sapiens
  siRNA target sequence for KIAA1219 (NM_020336.1,3591-3609).
ctctcacactttggatttt

SEQ ID NO: 376633 - DNA, 19 bp, Homo sapiens
  siRNA target sequence for KIAA1219 (NM_020336.1,3626-3644).
gaaggaacctgcaaatagt

SEQ ID NO: 376634 - DNA, 19 bp, Homo sapiens
  siRNA target sequence for KIAA1219 (NM_020336.1,3679-3697).
cgatacctggattttttga

SEQ ID NO: 376635 - DNA, 19 bp, Homo sapiens
  siRNA target sequence for KIAA1219 (NM_020336.1,3719-3737).
cttgccatgtcgtcctttt

SEQ ID NO: 376636 - DNA, 19 bp, Homo sapiens
  siRNA target sequence for KIAA1219 (NM_020336.1,3723-3741).
ccatgtcgtccttttgaca

SEQ ID NO: 376637 - DNA, 19 bp, Homo sapiens
  siRNA target sequence for KIAA1219 (NM_020336.1,3729-3747).
cgtccttttgacacagttt

SEQ ID NO: 376638 - DNA, 19 bp, Homo sapiens
  siRNA target sequence for KIAA1219 (NM_020336.1,3778-3796).
cgaaccaagagattttaaa

SEQ ID NO: 376639 - DNA, 19 bp, Homo sapiens
  siRNA target sequence for KIAA1219 (NM_020336.1,3904-3922).
ctaccagttggtctattaa

SEQ ID NO: 376640 - DNA, 19 bp, Homo sapiens
  siRNA target sequence for KIAA1219 (NM_020336.1,3908-3926).
cagttggtctattaattgt

SEQ ID NO: 376641 - DNA, 19 bp, Homo sapiens
  siRNA target sequence for KIAA1219 (NM_020336.1,3943-3961).
gatctcaacaagaagtgat

SEQ ID NO: 376642 - DNA, 19 bp, Homo sapiens
  siRNA target sequence for KIAA1219 (NM_020336.1,4004-4022).
gaaggtgctgtattatgct

SEQ ID NO: 376643 - DNA, 19 bp, Homo sapiens
  siRNA target sequence for KIAA1219 (NM_020336.1,4028-4046).
ccttacagaaattgctttt

SEQ ID NO: 376644 - DNA, 19 bp, Homo sapiens
  siRNA target sequence for KIAA1219 (NM_020336.1,4062-4080).
gtggagtccttaactgatt

SEQ ID NO: 376645 - DNA, 19 bp, Homo sapiens
  siRNA target sequence for KIAA1219 (NM_020336.1,4065-4083).
gagtccttaactgattcat

SEQ ID NO: 376646 - DNA, 19 bp, Homo sapiens
  siRNA target sequence for KIAA1219 (NM_020336.1,4094-4112).
catctcggaccaagatagt

SEQ ID NO: 376647 - DNA, 19 bp, Homo sapiens
  siRNA target sequence for KIAA1219 (NM_020336.1,4097-4115).
ctcggaccaagatagtgat

SEQ ID NO: 376648 - DNA, 19 bp, Homo sapiens
  siRNA target sequence for KIAA1219 (NM_020336.1,4100-4118).
ggaccaagatagtgattca

SEQ ID NO: 376649 - DNA, 19 bp, Homo sapiens
  siRNA target sequence for KIAA1219 (NM_020336.1,4101-4119).
gaccaagatagtgattcaa

SEQ ID NO: 376650 - DNA, 19 bp, Homo sapiens
  siRNA target sequence for KIAA1219 (NM_020336.1,4103-4121).
ccaagatagtgattcaaat

SEQ ID NO: 376651 - DNA, 19 bp, Homo sapiens
  siRNA target sequence for KIAA1219 (NM_020336.1,4175-4193).
ccccaatcatacagacaat

SEQ ID NO: 376652 - DNA, 19 bp, Homo sapiens
  siRNA target sequence for KIAA1219 (NM_020336.1,4178-4196).
caatcatacagacaatctt

SEQ ID NO: 376653 - DNA, 19 bp, Homo sapiens
  siRNA target sequence for KIAA1219 (NM_020336.1,4182-4200).
catacagacaatcttaatt

SEQ ID NO: 376654 - DNA, 19 bp, Homo sapiens
  siRNA target sequence for KIAA1219 (NM_020336.1,4269-4287).
ggacctgagacaagagttt

SEQ ID NO: 376655 - DNA, 19 bp, Homo sapiens
  siRNA target sequence for KIAA1219 (NM_020336.1,4299-4317).
gtggaacgctatgatgata

SEQ ID NO: 376656 - DNA, 19 bp, Homo sapiens
  siRNA target sequence for KIAA1219 (NM_020336.1,4368-4386).
gaaactactgcaaatagta

SEQ ID NO: 376657 - DNA, 19 bp, Homo sapiens
  siRNA target sequence for KIAA1219 (NM_020336.1,4397-4415).
gagatctacaactcttgaa

SEQ ID NO: 376658 - DNA, 19 bp, Homo sapiens
  siRNA target sequence for KIAA1219 (NM_020336.1,4442-4460).
ccctttaaacactggatta

SEQ ID NO: 376659 - DNA, 19 bp, Homo sapiens
  siRNA target sequence for KIAA1219 (NM_020336.1,4443-4461).
cctttaaacactggattat

SEQ ID NO: 376660 - DNA, 19 bp, Homo sapiens
  siRNA target sequence for KIAA1219 (NM_020336.1,4453-4471).
ctggattattccggataaa

SEQ ID NO: 376661 - DNA, 19 bp, Homo sapiens
  siRNA target sequence for KIAA1219 (NM_020336.1,4455-4473).
ggattattccggataaaaa

SEQ ID NO: 376662 - DNA, 19 bp, Homo sapiens
  siRNA target sequence for KIAA1219 (NM_020336.1,4456-4474).
gattattccggataaaaat

SEQ ID NO: 376663 - DNA, 19 bp, Homo sapiens
  siRNA target sequence for KIAA1219 (NM_020336.1,4554-4572).
ctggtgaggcagactgtaa

SEQ ID NO: 376664 - DNA, 19 bp, Homo sapiens
  siRNA target sequence for KIAA1219 (NM_020336.1,4556-4574).
ggtgaggcagactgtaatt

SEQ ID NO: 376665 - DNA, 19 bp, Homo sapiens
  siRNA target sequence for KIAA1219 (NM_020336.1,4561-4579).
ggcagactgtaattaacat

SEQ ID NO: 376666 - DNA, 19 bp, Homo sapiens
  siRNA target sequence for KIAA1219 (NM_020336.1,4648-4666).
ccgacattgtcaacaagta

SEQ ID NO: 376667 - DNA, 19 bp, Homo sapiens
  siRNA target sequence for KIAA1219 (NM_020336.1,4677-4695).
cagctggagccagagtttt

SEQ ID NO: 376668 - DNA, 19 bp, Homo sapiens
  siRNA target sequence for KIAA1219 (NM_020336.1,4679-4697).
gctggagccagagttttat

SEQ ID NO: 376669 - DNA, 19 bp, Homo sapiens
  siRNA target sequence for KIAA1219 (NM_020336.1,4680-4698).
ctggagccagagttttata

SEQ ID NO: 376670 - DNA, 19 bp, Homo sapiens
  siRNA target sequence for KIAA1219 (NM_020336.1,4682-4700).
ggagccagagttttatact

SEQ ID NO: 376671 - DNA, 19 bp, Homo sapiens
  siRNA target sequence for KIAA1219 (NM_020336.1,4683-4701).
gagccagagttttatactt

SEQ ID NO: 376672 - DNA, 19 bp, Homo sapiens
  siRNA target sequence for KIAA1219 (NM_020336.1,4713-4731).
gaggttggactcaagaact

SEQ ID NO: 376673 - DNA, 19 bp, Homo sapiens
  siRNA target sequence for KIAA1244 (NM_020340.2,39-57).
gtcggaagagaggtttgta

SEQ ID NO: 376674 - DNA, 19 bp, Homo sapiens
  siRNA target sequence for KIAA1244 (NM_020340.2,55-73).
gtatccatggaaacagatt

SEQ ID NO: 376675 - DNA, 19 bp, Homo sapiens
  siRNA target sequence for KIAA1244 (NM_020340.2,90-108).
gctcaatcagatactgaat

SEQ ID NO: 376676 - DNA, 19 bp, Homo sapiens
  siRNA target sequence for KIAA1244 (NM_020340.2,177-195).
cacctacacgccaacattt

SEQ ID NO: 376677 - DNA, 19 bp, Homo sapiens
  siRNA target sequence for KIAA1244 (NM_020340.2,179-197).
cctacacgccaacatttga

SEQ ID NO: 376678 - DNA, 19 bp, Homo sapiens
  siRNA target sequence for KIAA1244 (NM_020340.2,180-198).
ctacacgccaacatttgat

SEQ ID NO: 376679 - DNA, 19 bp, Homo sapiens
  siRNA target sequence for KIAA1244 (NM_020340.2,234-252).
gtgcattgagacgtacata

SEQ ID NO: 376680 - DNA, 19 bp, Homo sapiens
  siRNA target sequence for KIAA1244 (NM_020340.2,258-276).
ctgtcaccagcgtagcata

SEQ ID NO: 376681 - DNA, 19 bp, Homo sapiens
  siRNA target sequence for KIAA1244 (NM_020340.2,260-278).
gtcaccagcgtagcataaa

SEQ ID NO: 376682 - DNA, 19 bp, Homo sapiens
  siRNA target sequence for KIAA1244 (NM_020340.2,262-280).
caccagcgtagcataaaca

SEQ ID NO: 376683 - DNA, 19 bp, Homo sapiens
  siRNA target sequence for KIAA1244 (NM_020340.2,289-307).
cgggcaactctcagtcaaa

SEQ ID NO: 376684 - DNA, 19 bp, Homo sapiens
  siRNA target sequence for KIAA1244 (NM_020340.2,290-308).
gggcaactctcagtcaaat

SEQ ID NO: 376685 - DNA, 19 bp, Homo sapiens
  siRNA target sequence for KIAA1244 (NM_020340.2,342-360).
gcaggagaatacgataatt

SEQ ID NO: 376686 - DNA, 19 bp, Homo sapiens
  siRNA target sequence for KIAA1244 (NM_020340.2,459-477).
gctgcaagccgccataaat

SEQ ID NO: 376687 - DNA, 19 bp, Homo sapiens
  siRNA target sequence for KIAA1244 (NM_020340.2,569-587).
cggacctgatctggaaaaa

SEQ ID NO: 376688 - DNA, 19 bp, Homo sapiens
  siRNA target sequence for KIAA1244 (NM_020340.2,609-627).
gatcttggggaatccaatt

SEQ ID NO: 376689 - DNA, 19 bp, Homo sapiens
  siRNA target sequence for KIAA1244 (NM_020340.2,622-640).
ccaattcatgacaaaacca

SEQ ID NO: 376690 - DNA, 19 bp, Homo sapiens
  siRNA target sequence for KIAA1244 (NM_020340.2,761-779).
ctgtggctcggactatcta

SEQ ID NO: 376691 - DNA, 19 bp, Homo sapiens
  siRNA target sequence for KIAA1244 (NM_020340.2,763-781).
gtggctcggactatctatt

SEQ ID NO: 376692 - DNA, 19 bp, Homo sapiens
  siRNA target sequence for KIAA1244 (NM_020340.2,766-784).
gctcggactatctattaca

SEQ ID NO: 376693 - DNA, 19 bp, Homo sapiens
  siRNA target sequence for KIAA1244 (NM_020340.2,767-785).
ctcggactatctattacat

SEQ ID NO: 376694 - DNA, 19 bp, Homo sapiens
  siRNA target sequence for KIAA1244 (NM_020340.2,1217-1235).
gagattccatggagatcaa

SEQ ID NO: 376695 - DNA, 19 bp, Homo sapiens
  siRNA target sequence for KIAA1244 (NM_020340.2,1446-1464).
ggagacgctgagcaaagta

SEQ ID NO: 376696 - DNA, 19 bp, Homo sapiens
  siRNA target sequence for KIAA1244 (NM_020340.2,1447-1465).
gagacgctgagcaaagtat

SEQ ID NO: 376697 - DNA, 19 bp, Homo sapiens
  siRNA target sequence for KIAA1244 (NM_020340.2,1451-1469).
cgctgagcaaagtattgga

SEQ ID NO: 376698 - DNA, 19 bp, Homo sapiens
  siRNA target sequence for KIAA1244 (NM_020340.2,1515-1533).
ggtcccttaccctgacata

SEQ ID NO: 376699 - DNA, 19 bp, Homo sapiens
  siRNA target sequence for KIAA1244 (NM_020340.2,1518-1536).
cccttaccctgacataact

SEQ ID NO: 376700 - DNA, 19 bp, Homo sapiens
  siRNA target sequence for KIAA1244 (NM_020340.2,1519-1537).
ccttaccctgacataacta

SEQ ID NO: 376701 - DNA, 19 bp, Homo sapiens
  siRNA target sequence for KIAA1244 (NM_020340.2,1520-1538).
cttaccctgacataactaa

SEQ ID NO: 376702 - DNA, 19 bp, Homo sapiens
  siRNA target sequence for KIAA1244 (NM_020340.2,1566-1584).
gtcctatggatctaggtat

SEQ ID NO: 376703 - DNA, 19 bp, Homo sapiens
  siRNA target sequence for KIAA1244 (NM_020340.2,1569-1587).
ctatggatctaggtatagt

SEQ ID NO: 376704 - DNA, 19 bp, Homo sapiens
  siRNA target sequence for KIAA1244 (NM_020340.2,1580-1598).
ggtatagtgagagcaattt

SEQ ID NO: 376705 - DNA, 19 bp, Homo sapiens
  siRNA target sequence for KIAA1244 (NM_020340.2,1683-1701).
gtccgacgtgtcagacatt

SEQ ID NO: 376706 - DNA, 19 bp, Homo sapiens
  siRNA target sequence for KIAA1244 (NM_020340.2,1704-1722).
gtcggacaactgttcacta

SEQ ID NO: 376707 - DNA, 19 bp, Homo sapiens
  siRNA target sequence for KIAA1244 (NM_020340.2,1824-1842).
cagcgccaggctgttcata

SEQ ID NO: 376708 - DNA, 19 bp, Homo sapiens
  siRNA target sequence for KIAA1244 (NM_020340.2,1826-1844).
gcgccaggctgttcataca

SEQ ID NO: 376709 - DNA, 19 bp, Homo sapiens
  siRNA target sequence for KIAA1244 (NM_020340.2,1912-1930).
cagaactttgcctctactt

SEQ ID NO: 376710 - DNA, 19 bp, Homo sapiens
  siRNA target sequence for KIAA1244 (NM_020340.2,2261-2279).
caatgctgaccgatattga

SEQ ID NO: 376711 - DNA, 19 bp, Homo sapiens
  siRNA target sequence for KIAA1244 (NM_020340.2,2272-2290).
gatattgacggcttagaga

SEQ ID NO: 376712 - DNA, 19 bp, Homo sapiens
  siRNA target sequence for KIAA1244 (NM_020340.2,2343-2361).
cgcccagagcaggagaatt

SEQ ID NO: 376713 - DNA, 19 bp, Homo sapiens
  siRNA target sequence for KIAA1244 (NM_020340.2,2385-2403).
ggcatttgctcgctatatt

SEQ ID NO: 376714 - DNA, 19 bp, Homo sapiens
  siRNA target sequence for KIAA1244 (NM_020340.2,2387-2405).
catttgctcgctatattct

SEQ ID NO: 376715 - DNA, 19 bp, Homo sapiens
  siRNA target sequence for KIAA1244 (NM_020340.2,2642-2660).
cctcctgtgtccaagaaga

SEQ ID NO: 376716 - DNA, 19 bp, Homo sapiens
  siRNA target sequence for KIAA1244 (NM_020340.2,2700-2718).
cacacaagtgaaactaaaa

SEQ ID NO: 376717 - DNA, 19 bp, Homo sapiens
  siRNA target sequence for KIAA1244 (NM_020340.2,2702-2720).
cacaagtgaaactaaaagt

SEQ ID NO: 376718 - DNA, 19 bp, Homo sapiens
  siRNA target sequence for KIAA1244 (NM_020340.2,2851-2869).
gtgttcagggtgtgtgaat

SEQ ID NO: 376719 - DNA, 19 bp, Homo sapiens
  siRNA target sequence for KIAA1244 (NM_020340.2,3174-3192).
cgacaggctctttgaagat

SEQ ID NO: 376720 - DNA, 19 bp, Homo sapiens
  siRNA target sequence for KIAA1244 (NM_020340.2,3190-3208).
gatgctacggataagttga

SEQ ID NO: 376721 - DNA, 19 bp, Homo sapiens
  siRNA target sequence for KIAA1244 (NM_020340.2,3251-3269).
catcgcagtctcagctttt

SEQ ID NO: 376722 - DNA, 19 bp, Homo sapiens
  siRNA target sequence for KIAA1244 (NM_020340.2,3277-3295).
gttacagatacagttgatt

SEQ ID NO: 376723 - DNA, 19 bp, Homo sapiens
  siRNA target sequence for KIAA1244 (NM_020340.2,3460-3478).
gctgcttgccataaggaaa

SEQ ID NO: 376724 - DNA, 19 bp, Homo sapiens
  siRNA target sequence for KIAA1244 (NM_020340.2,3503-3521).
ccttcatccatgacatact

SEQ ID NO: 376725 - DNA, 19 bp, Homo sapiens
  siRNA target sequence for KIAA1244 (NM_020340.2,3542-3560).
ggaatgagccacctcattt

SEQ ID NO: 376726 - DNA, 19 bp, Homo sapiens
  siRNA target sequence for KIAA1244 (NM_020340.2,3584-3602).
gacctttcgagcgcattat

SEQ ID NO: 376727 - DNA, 19 bp, Homo sapiens
  siRNA target sequence for KIAA1244 (NM_020340.2,3587-3605).
ctttcgagcgcattatgca

SEQ ID NO: 376728 - DNA, 19 bp, Homo sapiens
  siRNA target sequence for KIAA1244 (NM_020340.2,3596-3614).
gcattatgcagctggaatt

SEQ ID NO: 376729 - DNA, 19 bp, Homo sapiens
  siRNA target sequence for KIAA1244 (NM_020340.2,3791-3809).
gccaagctccagtgtttga

SEQ ID NO: 376730 - DNA, 19 bp, Homo sapiens
  siRNA target sequence for KIAA1244 (NM_020340.2,3796-3814).
gctccagtgtttgatgtat

SEQ ID NO: 376731 - DNA, 19 bp, Homo sapiens
  siRNA target sequence for KIAA1244 (NM_020340.2,3797-3815).
ctccagtgtttgatgtatt

SEQ ID NO: 376732 - DNA, 19 bp, Homo sapiens
  siRNA target sequence for KIAA1244 (NM_020340.2,3860-3878).
cagccactagctacatcat

SEQ ID NO: 376733 - DNA, 19 bp, Homo sapiens
  siRNA target sequence for KIAA1244 (NM_020340.2,3998-4016).
ggcgctgctctcagttatt

SEQ ID NO: 376734 - DNA, 19 bp, Homo sapiens
  siRNA target sequence for KIAA1244 (NM_020340.2,4007-4025).
ctcagttattggccaaaat

SEQ ID NO: 376735 - DNA, 19 bp, Homo sapiens
  siRNA target sequence for KIAA1244 (NM_020340.2,4106-4124).
gcagtgaggatggaattga

SEQ ID NO: 376736 - DNA, 19 bp, Homo sapiens
  siRNA target sequence for KIAA1244 (NM_020340.2,4232-4250).
caccaactctggatttact

SEQ ID NO: 376737 - DNA, 19 bp, Homo sapiens
  siRNA target sequence for KIAA1244 (NM_020340.2,4235-4253).
caactctggatttactctt

SEQ ID NO: 376738 - DNA, 19 bp, Homo sapiens
  siRNA target sequence for KIAA1244 (NM_020340.2,4282-4300).
ccaggaccagggtttggta

SEQ ID NO: 376739 - DNA, 19 bp, Homo sapiens
  siRNA target sequence for KIAA1244 (NM_020340.2,4283-4301).
caggaccagggtttggtat

SEQ ID NO: 376740 - DNA, 19 bp, Homo sapiens
  siRNA target sequence for KIAA1244 (NM_020340.2,4355-4373).
gccataaagaccattccta

SEQ ID NO: 376741 - DNA, 19 bp, Homo sapiens
  siRNA target sequence for KIAA1244 (NM_020340.2,4428-4446).
ggtggtggagcacattcaa

SEQ ID NO: 376742 - DNA, 19 bp, Homo sapiens
  siRNA target sequence for KIAA1244 (NM_020340.2,4429-4447).
gtggtggagcacattcaaa

SEQ ID NO: 376743 - DNA, 19 bp, Homo sapiens
  siRNA target sequence for KIAA1244 (NM_020340.2,4437-4455).
gcacattcaaagctttcta

SEQ ID NO: 376744 - DNA, 19 bp, Homo sapiens
  siRNA target sequence for KIAA1244 (NM_020340.2,4448-4466).
gctttctacattcagatat

SEQ ID NO: 376745 - DNA, 19 bp, Homo sapiens
  siRNA target sequence for KIAA1244 (NM_020340.2,4558-4576).
gtgggctgctcctgtatta

SEQ ID NO: 376746 - DNA, 19 bp, Homo sapiens
  siRNA target sequence for KIAA1244 (NM_020340.2,4560-4578).
gggctgctcctgtattaga

SEQ ID NO: 376747 - DNA, 19 bp, Homo sapiens
  siRNA target sequence for KIAA1244 (NM_020340.2,4935-4953).
cgtgtctttcagggaaatt

SEQ ID NO: 376748 - DNA, 19 bp, Homo sapiens
  siRNA target sequence for KIAA1244 (NM_020340.2,4980-4998).
gttactccagaacttatat

SEQ ID NO: 376749 - DNA, 19 bp, Homo sapiens
  siRNA target sequence for KIAA1244 (NM_020340.2,4992-5010).
cttatatgacatcttgtta

SEQ ID NO: 376750 - DNA, 19 bp, Homo sapiens
  siRNA target sequence for KIAA1244 (NM_020340.2,5127-5145).
cctgctgctggactcttat

SEQ ID NO: 376751 - DNA, 19 bp, Homo sapiens
  siRNA target sequence for KIAA1244 (NM_020340.2,5128-5146).
ctgctgctggactcttata

SEQ ID NO: 376752 - DNA, 19 bp, Homo sapiens
  siRNA target sequence for KIAA1244 (NM_020340.2,5131-5149).
ctgctggactcttatagga

SEQ ID NO: 376753 - DNA, 19 bp, Homo sapiens
  siRNA target sequence for KIAA1244 (NM_020340.2,5236-5254).
cagtctgcgatgagcttta

SEQ ID NO: 376754 - DNA, 19 bp, Homo sapiens
  siRNA target sequence for KIAA1244 (NM_020340.2,5240-5258).
ctgcgatgagctttaacat

SEQ ID NO: 376755 - DNA, 19 bp, Homo sapiens
  siRNA target sequence for KIAA1244 (NM_020340.2,5242-5260).
gcgatgagctttaacattt

SEQ ID NO: 376756 - DNA, 19 bp, Homo sapiens
  siRNA target sequence for KIAA1244 (NM_020340.2,5309-5327).
cggccgagcaagtgaagaa

SEQ ID NO: 376757 - DNA, 19 bp, Homo sapiens
  siRNA target sequence for KIAA1244 (NM_020340.2,5347-5365).
gagagaagcacggattctt

SEQ ID NO: 376758 - DNA, 19 bp, Homo sapiens
  siRNA target sequence for KIAA1244 (NM_020340.2,5375-5393).
gttcatctgaggatgaaga

SEQ ID NO: 376759 - DNA, 19 bp, Homo sapiens
  siRNA target sequence for KIAA1244 (NM_020340.2,5836-5854).
gcggggaacaaaatctaca

SEQ ID NO: 376760 - DNA, 19 bp, Homo sapiens
  siRNA target sequence for KIAA1244 (NM_020340.2,5863-5881).
gccgacaagaccatttcaa

SEQ ID NO: 376761 - DNA, 19 bp, Homo sapiens
  siRNA target sequence for KIAA1244 (NM_020340.2,5883-5901).
gttgatgaccgaatacaaa

SEQ ID NO: 376762 - DNA, 19 bp, Homo sapiens
  siRNA target sequence for KIAA1244 (NM_020340.2,6161-6179).
ccaacatggtgctaacagt

SEQ ID NO: 376763 - DNA, 19 bp, Homo sapiens
  siRNA target sequence for KIAA1244 (NM_020340.2,6162-6180).
caacatggtgctaacagtt

SEQ ID NO: 376764 - DNA, 19 bp, Homo sapiens
  siRNA target sequence for KIAA1244 (NM_020340.2,6168-6186).
ggtgctaacagttctcaat

SEQ ID NO: 376765 - DNA, 19 bp, Homo sapiens
  siRNA target sequence for KIAA1244 (NM_020340.2,6314-6332).
gggtgggccgtgtctatga

SEQ ID NO: 376766 - DNA, 19 bp, Homo sapiens
  siRNA target sequence for KIAA1244 (NM_020340.2,6316-6334).
gtgggccgtgtctatgaca

SEQ ID NO: 376767 - DNA, 19 bp, Homo sapiens
  siRNA target sequence for KIAA1244 (NM_020340.2,6320-6338).
gccgtgtctatgacatcat

SEQ ID NO: 376768 - DNA, 19 bp, Homo sapiens
  siRNA target sequence for KBRAS1 (NM_020345.2,332-350).
ggaaaactgcaattttgga

SEQ ID NO: 376769 - DNA, 19 bp, Homo sapiens
  siRNA target sequence for KBRAS1 (NM_020345.2,364-382).
ggaaatcatactattggaa

SEQ ID NO: 376770 - DNA, 19 bp, Homo sapiens
  siRNA target sequence for KBRAS1 (NM_020345.2,365-383).
gaaatcatactattggaat

SEQ ID NO: 376771 - DNA, 19 bp, Homo sapiens
  siRNA target sequence for KBRAS1 (NM_020345.2,392-410).
gcgaaacaatggaagatgt

SEQ ID NO: 376772 - DNA, 19 bp, Homo sapiens
  siRNA target sequence for KBRAS1 (NM_020345.2,451-469).
cagttacatctttatgaca

SEQ ID NO: 376773 - DNA, 19 bp, Homo sapiens
  siRNA target sequence for KBRAS1 (NM_020345.2,540-558).
gtacagtgtgaataacctt

SEQ ID NO: 376774 - DNA, 19 bp, Homo sapiens
  siRNA target sequence for KBRAS1 (NM_020345.2,770-788).
ctttattagccagtaaact

SEQ ID NO: 376775 - DNA, 19 bp, Homo sapiens
  siRNA target sequence for KBRAS1 (NM_020345.2,837-855).
caaagggaactctaattct

SEQ ID NO: 376776 - DNA, 19 bp, Homo sapiens
  siRNA target sequence for LZTFL1 (NM_020347.1,127-145).
ggcagagttgggcctaaat

SEQ ID NO: 376777 - DNA, 19 bp, Homo sapiens
  siRNA target sequence for LZTFL1 (NM_020347.1,179-197).
cgttttgctcgttcaaaga

SEQ ID NO: 376778 - DNA, 19 bp, Homo sapiens
  siRNA target sequence for LZTFL1 (NM_020347.1,201-219).
gcttgagactcaaaactgt

SEQ ID NO: 376779 - DNA, 19 bp, Homo sapiens
  siRNA target sequence for LZTFL1 (NM_020347.1,202-220).
cttgagactcaaaactgta

SEQ ID NO: 376780 - DNA, 19 bp, Homo sapiens
  siRNA target sequence for LZTFL1 (NM_020347.1,265-283).
caccttcaccatagatgaa

SEQ ID NO: 376781 - DNA, 19 bp, Homo sapiens
  siRNA target sequence for LZTFL1 (NM_020347.1,332-350).
gaatctgagctcatcaaca

SEQ ID NO: 376782 - DNA, 19 bp, Homo sapiens
  siRNA target sequence for LZTFL1 (NM_020347.1,346-364).
caacactgcctataccaat

SEQ ID NO: 376783 - DNA, 19 bp, Homo sapiens
  siRNA target sequence for LZTFL1 (NM_020347.1,355-373).
ctataccaatgtgttactt

SEQ ID NO: 376784 - DNA, 19 bp, Homo sapiens
  siRNA target sequence for LZTFL1 (NM_020347.1,395-413).
gctgagaagtggtatctta

SEQ ID NO: 376785 - DNA, 19 bp, Homo sapiens
  siRNA target sequence for LZTFL1 (NM_020347.1,396-414).
ctgagaagtggtatcttaa

SEQ ID NO: 376786 - DNA, 19 bp, Homo sapiens
  siRNA target sequence for LZTFL1 (NM_020347.1,400-418).
gaagtggtatcttaagcta

SEQ ID NO: 376787 - DNA, 19 bp, Homo sapiens
  siRNA target sequence for LZTFL1 (NM_020347.1,502-520).
caaaaagcccatcttagat

SEQ ID NO: 376788 - DNA, 19 bp, Homo sapiens
  siRNA target sequence for LZTFL1 (NM_020347.1,531-549).
caaaacttgctccacttaa

SEQ ID NO: 376789 - DNA, 19 bp, Homo sapiens
  siRNA target sequence for LZTFL1 (NM_020347.1,566-584).
gaactcctaaacaaggaaa

SEQ ID NO: 376790 - DNA, 19 bp, Homo sapiens
  siRNA target sequence for LZTFL1 (NM_020347.1,624-642).
ggttgaagaccattgaaat

SEQ ID NO: 376791 - DNA, 19 bp, Homo sapiens
  siRNA target sequence for LZTFL1 (NM_020347.1,704-722).
cttgatcaaggaaatcaaa

SEQ ID NO: 376792 - DNA, 19 bp, Homo sapiens
  siRNA target sequence for LZTFL1 (NM_020347.1,737-755).
gcccaagacttaagtaact

SEQ ID NO: 376793 - DNA, 19 bp, Homo sapiens
  siRNA target sequence for LZTFL1 (NM_020347.1,849-867).
cagccaagcacgatctact

SEQ ID NO: 376794 - DNA, 19 bp, Homo sapiens
  siRNA target sequence for LZTFL1 (NM_020347.1,922-940).
gcaaacagcagcttatcga

SEQ ID NO: 376795 - DNA, 19 bp, Homo sapiens
  siRNA target sequence for LZTFL1 (NM_020347.1,923-941).
caaacagcagcttatcgaa

SEQ ID NO: 376796 - DNA, 19 bp, Homo sapiens
  siRNA target sequence for LZTFL1 (NM_020347.1,929-947).
gcagcttatcgaaacatga

SEQ ID NO: 376797 - DNA, 19 bp, Homo sapiens
  siRNA target sequence for LZTFL1 (NM_020347.1,930-948).
cagcttatcgaaacatgaa

SEQ ID NO: 376798 - DNA, 19 bp, Homo sapiens
  siRNA target sequence for LZTFL1 (NM_020347.1,933-951).
cttatcgaaacatgaaaga

SEQ ID NO: 376799 - DNA, 19 bp, Homo sapiens
  siRNA target sequence for LZTFL1 (NM_020347.1,964-982).
gaagaatgaccaaatcaaa

SEQ ID NO: 376800 - DNA, 19 bp, Homo sapiens
  siRNA target sequence for CNNM1 (NM_020348.1,259-277).
gcgctgcgccaggagataa

SEQ ID NO: 376801 - DNA, 19 bp, Homo sapiens
  siRNA target sequence for CNNM1 (NM_020348.1,518-536).
gtgaccagcggcacaacat

SEQ ID NO: 376802 - DNA, 19 bp, Homo sapiens
  siRNA target sequence for CNNM1 (NM_020348.1,602-620).
ctgtcacccgcttctacaa

SEQ ID NO: 376803 - DNA, 19 bp, Homo sapiens
  siRNA target sequence for CNNM1 (NM_020348.1,662-680).
cggttctggaggagtttaa

SEQ ID NO: 376804 - DNA, 19 bp, Homo sapiens
  siRNA target sequence for CNNM1 (NM_020348.1,664-682).
gttctggaggagtttaaga

SEQ ID NO: 376805 - DNA, 19 bp, Homo sapiens
  siRNA target sequence for CNNM1 (NM_020348.1,765-783).
cacgctggaggatatcata

SEQ ID NO: 376806 - DNA, 19 bp, Homo sapiens
  siRNA target sequence for CNNM1 (NM_020348.1,767-785).
cgctggaggatatcataga

SEQ ID NO: 376807 - DNA, 19 bp, Homo sapiens
  siRNA target sequence for CNNM1 (NM_020348.1,1107-1125).
ccgccctgtggactacttt

SEQ ID NO: 376808 - DNA, 19 bp, Homo sapiens
  siRNA target sequence for CNNM1 (NM_020348.1,1168-1186).
gaaggccttcgctttgaaa

SEQ ID NO: 376809 - DNA, 19 bp, Homo sapiens
  siRNA target sequence for CNNM1 (NM_020348.1,1341-1359).
ccgagagcgcagtgacttt

SEQ ID NO: 376810 - DNA, 19 bp, Homo sapiens
  siRNA target sequence for CNNM1 (NM_020348.1,1452-1470).
gatcacacggcagcaatat

SEQ ID NO: 376811 - DNA, 19 bp, Homo sapiens
  siRNA target sequence for CNNM1 (NM_020348.1,1457-1475).
cacggcagcaatatcagaa

SEQ ID NO: 376812 - DNA, 19 bp, Homo sapiens
  siRNA target sequence for CNNM1 (NM_020348.1,1661-1679).
gccccagcgaggtagtgta

SEQ ID NO: 376813 - DNA, 19 bp, Homo sapiens
  siRNA target sequence for CNNM1 (NM_020348.1,1783-1801).
gcagcatcagatagtgaat

SEQ ID NO: 376814 - DNA, 19 bp, Homo sapiens
  siRNA target sequence for CNNM1 (NM_020348.1,1833-1851).
cccctgcagtagcgatttt

SEQ ID NO: 376815 - DNA, 19 bp, Homo sapiens
  siRNA target sequence for CNNM1 (NM_020348.1,1835-1853).
cctgcagtagcgattttga

SEQ ID NO: 376816 - DNA, 19 bp, Homo sapiens
  siRNA target sequence for CNNM1 (NM_020348.1,1844-1862).
gcgattttgaggaaaacgt

SEQ ID NO: 376817 - DNA, 19 bp, Homo sapiens
  siRNA target sequence for CNNM1 (NM_020348.1,1935-1953).
ggacaactccaatttaaca

SEQ ID NO: 376818 - DNA, 19 bp, Homo sapiens
  siRNA target sequence for AGTRAP (NM_020350.3,114-132).
cctggggctgcattgtatt

SEQ ID NO: 376819 - DNA, 19 bp, Homo sapiens
  siRNA target sequence for AGTRAP (NM_020350.3,204-222).
ccatcgacgccataagcat

SEQ ID NO: 376820 - DNA, 19 bp, Homo sapiens
  siRNA target sequence for AGTRAP (NM_020350.3,208-226).
cgacgccataagcatgttt

SEQ ID NO: 376821 - DNA, 19 bp, Homo sapiens
  siRNA target sequence for AGTRAP (NM_020350.3,409-427).
ggtccacactggtttcctt

SEQ ID NO: 376822 - DNA, 19 bp, Homo sapiens
  siRNA target sequence for AGTRAP (NM_020350.3,449-467).
gcctaccagacgattgact

SEQ ID NO: 376823 - DNA, 19 bp, Homo sapiens
  siRNA target sequence for LALP1 (NM_020354.1,251-269).
catatcctgtctcctttta

SEQ ID NO: 376824 - DNA, 19 bp, Homo sapiens
  siRNA target sequence for LALP1 (NM_020354.1,264-282).
cttttacttatgttaatca

SEQ ID NO: 376825 - DNA, 19 bp, Homo sapiens
  siRNA target sequence for LALP1 (NM_020354.1,313-331).
cacgagataggcaatacga

SEQ ID NO: 376826 - DNA, 19 bp, Homo sapiens
  siRNA target sequence for LALP1 (NM_020354.1,322-340).
ggcaatacgaaaggtattt

SEQ ID NO: 376827 - DNA, 19 bp, Homo sapiens
  siRNA target sequence for LALP1 (NM_020354.1,380-398).
cccaaatctgaattatgga

SEQ ID NO: 376828 - DNA, 19 bp, Homo sapiens
  siRNA target sequence for LALP1 (NM_020354.1,424-442).
gttcccggatttttgttta

SEQ ID NO: 376829 - DNA, 19 bp, Homo sapiens
  siRNA target sequence for LALP1 (NM_020354.1,511-529).
gccaaccagtggttaaaaa

SEQ ID NO: 376830 - DNA, 19 bp, Homo sapiens
  siRNA target sequence for LALP1 (NM_020354.1,554-572).
ggcagacactccagaacat

SEQ ID NO: 376831 - DNA, 19 bp, Homo sapiens
  siRNA target sequence for LALP1 (NM_020354.1,565-583).
cagaacatgccagtgatta

SEQ ID NO: 376832 - DNA, 19 bp, Homo sapiens
  siRNA target sequence for LALP1 (NM_020354.1,712-730).
ctgacctagtgaaagattt

SEQ ID NO: 376833 - DNA, 19 bp, Homo sapiens
  siRNA target sequence for LALP1 (NM_020354.1,789-807).
caggaaggggtttatgcat

SEQ ID NO: 376834 - DNA, 19 bp, Homo sapiens
  siRNA target sequence for LALP1 (NM_020354.1,804-822).
gcatggattggaatcaact

SEQ ID NO: 376835 - DNA, 19 bp, Homo sapiens
  siRNA target sequence for LALP1 (NM_020354.1,805-823).
catggattggaatcaactt

SEQ ID NO: 376836 - DNA, 19 bp, Homo sapiens
  siRNA target sequence for LALP1 (NM_020354.1,839-857).
cgaccacgaggatgaatca

SEQ ID NO: 376837 - DNA, 19 bp, Homo sapiens
  siRNA target sequence for LALP1 (NM_020354.1,862-880).
ctgaggctacccaggaatt

SEQ ID NO: 376838 - DNA, 19 bp, Homo sapiens
  siRNA target sequence for LALP1 (NM_020354.1,901-919).
cagtagggatactggatat

SEQ ID NO: 376839 - DNA, 19 bp, Homo sapiens
  siRNA target sequence for LALP1 (NM_020354.1,922-940).
gaggagcctctctccaaat

SEQ ID NO: 376840 - DNA, 19 bp, Homo sapiens
  siRNA target sequence for LALP1 (NM_020354.1,929-947).
ctctctccaaattgcttat

SEQ ID NO: 376841 - DNA, 19 bp, Homo sapiens
  siRNA target sequence for LALP1 (NM_020354.1,1053-1071).
gtgtacagggtttatgtca

SEQ ID NO: 376842 - DNA, 19 bp, Homo sapiens
  siRNA target sequence for LALP1 (NM_020354.1,1061-1079).
ggtttatgtcacaactttt

SEQ ID NO: 376843 - DNA, 19 bp, Homo sapiens
  siRNA target sequence for LALP1 (NM_020354.1,1082-1100).
gggtttcggaggcaacttt

SEQ ID NO: 376844 - DNA, 19 bp, Homo sapiens
  siRNA target sequence for LALP1 (NM_020354.1,1111-1129).
gctacgaagaccttgttct

SEQ ID NO: 376845 - DNA, 19 bp, Homo sapiens
  siRNA target sequence for LALP1 (NM_020354.1,1119-1137).
gaccttgttctgaatgaaa

SEQ ID NO: 376846 - DNA, 19 bp, Homo sapiens
  siRNA target sequence for LALP1 (NM_020354.1,1176-1194).
ctgagtcccgacaatccat

SEQ ID NO: 376847 - DNA, 19 bp, Homo sapiens
  siRNA target sequence for LALP1 (NM_020354.1,1178-1196).
gagtcccgacaatccattt

SEQ ID NO: 376848 - DNA, 19 bp, Homo sapiens
  siRNA target sequence for LALP1 (NM_020354.1,1180-1198).
gtcccgacaatccatttct

SEQ ID NO: 376849 - DNA, 19 bp, Homo sapiens
  siRNA target sequence for LALP1 (NM_020354.1,1360-1378).
cgcctattgacttcaacaa

SEQ ID NO: 376850 - DNA, 19 bp, Homo sapiens
  siRNA target sequence for LALP1 (NM_020354.1,1362-1380).
cctattgacttcaacaaca

SEQ ID NO: 376851 - DNA, 19 bp, Homo sapiens
  siRNA target sequence for LALP1 (NM_020354.1,1388-1406).
ctacggcttctctgagttt

SEQ ID NO: 376852 - DNA, 19 bp, Homo sapiens
  siRNA target sequence for LALP1 (NM_020354.1,1465-1483).
ccaaggctgctcaggatta

SEQ ID NO: 376853 - DNA, 19 bp, Homo sapiens
  siRNA target sequence for LALP1 (NM_020354.1,1493-1511).
ggcttggtcggtactaact

SEQ ID NO: 376854 - DNA, 19 bp, Homo sapiens
  siRNA target sequence for LALP1 (NM_020354.1,1495-1513).
cttggtcggtactaactca

SEQ ID NO: 376855 - DNA, 19 bp, Homo sapiens
  siRNA target sequence for LALP1 (NM_020354.1,1501-1519).
cggtactaactcagagatt

SEQ ID NO: 376856 - DNA, 19 bp, Homo sapiens
  siRNA target sequence for LALP1 (NM_020354.1,1503-1521).
gtactaactcagagattca

SEQ ID NO: 376857 - DNA, 19 bp, Homo sapiens
  siRNA target sequence for LALP1 (NM_020354.1,1548-1566).
gatgagcatcgactcaaat

SEQ ID NO: 376858 - DNA, 19 bp, Homo sapiens
  siRNA target sequence for LALP1 (NM_020354.1,1554-1572).
catcgactcaaatatcagt

SEQ ID NO: 376859 - DNA, 19 bp, Homo sapiens
  siRNA target sequence for LALP1 (NM_020354.1,1588-1606).
ggatgtaccaagtcttaca

SEQ ID NO: 376860 - DNA, 19 bp, Homo sapiens
  siRNA target sequence for LALP1 (NM_020354.1,1682-1700).
gacgctgggagccattcta

SEQ ID NO: 376861 - DNA, 19 bp, Homo sapiens
  siRNA target sequence for LALP1 (NM_020354.1,1684-1702).
cgctgggagccattctata

SEQ ID NO: 376862 - DNA, 19 bp, Homo sapiens
  siRNA target sequence for LALP1 (NM_020354.1,1686-1704).
ctgggagccattctatata

SEQ ID NO: 376863 - DNA, 19 bp, Homo sapiens
  siRNA target sequence for LALP1 (NM_020354.1,1773-1791).
cgtctctcctttgtataca

SEQ ID NO: 376864 - DNA, 19 bp, Homo sapiens
  siRNA target sequence for LALP1 (NM_020354.1,1774-1792).
gtctctcctttgtatacaa

SEQ ID NO: 376865 - DNA, 19 bp, Homo sapiens
  siRNA target sequence for LALP1 (NM_020354.1,1785-1803).
gtatacaaccactatctct

SEQ ID NO: 376866 - DNA, 19 bp, Homo sapiens
  siRNA target sequence for LALP1 (NM_020354.1,1832-1850).
ggccatcttcctatacctt

SEQ ID NO: 376867 - DNA, 19 bp, Homo sapiens
  siRNA target sequence for C20orf32 (NM_020356.1,416-434).
ctgccaaccgcctccaaat

SEQ ID NO: 376868 - DNA, 19 bp, Homo sapiens
  siRNA target sequence for C20orf32 (NM_020356.1,599-617).
cccctactgcccaagtcta

SEQ ID NO: 376869 - DNA, 19 bp, Homo sapiens
  siRNA target sequence for C20orf32 (NM_020356.1,600-618).
ccctactgcccaagtctat

SEQ ID NO: 376870 - DNA, 19 bp, Homo sapiens
  siRNA target sequence for C20orf32 (NM_020356.1,643-661).
gccagaatcatctgtgaaa

SEQ ID NO: 376871 - DNA, 19 bp, Homo sapiens
  siRNA target sequence for C20orf32 (NM_020356.1,644-662).
ccagaatcatctgtgaaaa

SEQ ID NO: 376872 - DNA, 19 bp, Homo sapiens
  siRNA target sequence for C20orf32 (NM_020356.1,875-893).
gtgttcccctgatatcagt

SEQ ID NO: 376873 - DNA, 19 bp, Homo sapiens
  siRNA target sequence for C20orf32 (NM_020356.1,885-903).
gatatcagtgactacctta

SEQ ID NO: 376874 - DNA, 19 bp, Homo sapiens
  siRNA target sequence for C20orf32 (NM_020356.1,912-930).
cggttacagcacattacca

SEQ ID NO: 376875 - DNA, 19 bp, Homo sapiens
  siRNA target sequence for C20orf32 (NM_020356.1,913-931).
ggttacagcacattaccaa

SEQ ID NO: 376876 - DNA, 19 bp, Homo sapiens
  siRNA target sequence for C20orf32 (NM_020356.1,914-932).
gttacagcacattaccaaa

SEQ ID NO: 376877 - DNA, 19 bp, Homo sapiens
  siRNA target sequence for C20orf32 (NM_020356.1,937-955).
cagaaatcggaatggattt

SEQ ID NO: 376878 - DNA, 19 bp, Homo sapiens
  siRNA target sequence for C20orf32 (NM_020356.1,1008-1026).
cagctttgcggaagaatca

SEQ ID NO: 376879 - DNA, 19 bp, Homo sapiens
  siRNA target sequence for C20orf32 (NM_020356.1,1091-1109).
ccctcactccacaactgaa

SEQ ID NO: 376880 - DNA, 19 bp, Homo sapiens
  siRNA target sequence for C20orf32 (NM_020356.1,1092-1110).
cctcactccacaactgaat

SEQ ID NO: 376881 - DNA, 19 bp, Homo sapiens
  siRNA target sequence for C20orf32 (NM_020356.1,1097-1115).
ctccacaactgaataacaa

SEQ ID NO: 376882 - DNA, 19 bp, Homo sapiens
  siRNA target sequence for C20orf32 (NM_020356.1,1100-1118).
cacaactgaataacaatgt

SEQ ID NO: 376883 - DNA, 19 bp, Homo sapiens
  siRNA target sequence for C20orf32 (NM_020356.1,1286-1304).
caacgtcgagtgtttctca

SEQ ID NO: 376884 - DNA, 19 bp, Homo sapiens
  siRNA target sequence for C20orf32 (NM_020356.1,1399-1417).
cctgaaccggacagattat

SEQ ID NO: 376885 - DNA, 19 bp, Homo sapiens
  siRNA target sequence for C20orf32 (NM_020356.1,1740-1758).
cctcactgacagtaacctt

SEQ ID NO: 376886 - DNA, 19 bp, Homo sapiens
  siRNA target sequence for C20orf32 (NM_020356.1,1803-1821).
ccgcatcctgcttgaaaca

SEQ ID NO: 376887 - DNA, 19 bp, Homo sapiens
  siRNA target sequence for C20orf32 (NM_020356.1,1804-1822).
cgcatcctgcttgaaacaa

SEQ ID NO: 376888 - DNA, 19 bp, Homo sapiens
  siRNA target sequence for C20orf32 (NM_020356.1,1968-1986).
caatggaaggctccttttt

SEQ ID NO: 376889 - DNA, 19 bp, Homo sapiens
  siRNA target sequence for C20orf32 (NM_020356.1,2080-2098).
gaatcacaccaaaagagta

SEQ ID NO: 376890 - DNA, 19 bp, Homo sapiens
  siRNA target sequence for C20orf32 (NM_020356.1,2128-2146).
cactcttctgaactattaa

SEQ ID NO: 376891 - DNA, 19 bp, Homo sapiens
  siRNA target sequence for C20orf32 (NM_020356.1,2223-2241).
gaggaaaccccgcttatct

SEQ ID NO: 376892 - DNA, 19 bp, Homo sapiens
  siRNA target sequence for C20orf32 (NM_020356.1,2461-2479).
gtagcgctggccactaaga

SEQ ID NO: 376893 - DNA, 19 bp, Homo sapiens
  siRNA target sequence for HT014 (NM_020362.2,309-327).
gaccgaccgctccaagttt

SEQ ID NO: 376894 - DNA, 19 bp, Homo sapiens
  siRNA target sequence for HT014 (NM_020362.2,312-330).
cgaccgctccaagtttgtt

SEQ ID NO: 376895 - DNA, 19 bp, Homo sapiens
  siRNA target sequence for HT014 (NM_020362.2,367-385).
ccatttacgggcaatgtca

SEQ ID NO: 376896 - DNA, 19 bp, Homo sapiens
  siRNA target sequence for HT014 (NM_020362.2,368-386).
catttacgggcaatgtcaa

SEQ ID NO: 376897 - DNA, 19 bp, Homo sapiens
  siRNA target sequence for HT014 (NM_020362.2,461-479).
cacagatgtcctttgatga

SEQ ID NO: 376898 - DNA, 19 bp, Homo sapiens
  siRNA target sequence for HT014 (NM_020362.2,468-486).
gtcctttgatgatacagaa

SEQ ID NO: 376899 - DNA, 19 bp, Homo sapiens
  siRNA target sequence for HT014 (NM_020362.2,519-537).
ggatcttacaggagaatta

SEQ ID NO: 376900 - DNA, 19 bp, Homo sapiens
  siRNA target sequence for HT014 (NM_020362.2,529-547).
ggagaattagagtatgcta

SEQ ID NO: 376901 - DNA, 19 bp, Homo sapiens
  siRNA target sequence for HT014 (NM_020362.2,557-575).
ctcgtttttcaaatgtcta

SEQ ID NO: 376902 - DNA, 19 bp, Homo sapiens
  siRNA target sequence for HT014 (NM_020362.2,613-631).
gatacgacaaaggtctttt

SEQ ID NO: 376903 - DNA, 19 bp, Homo sapiens
  siRNA target sequence for HT014 (NM_020362.2,673-691).
gaggtgaccatctgcaatt

SEQ ID NO: 376904 - DNA, 19 bp, Homo sapiens
  siRNA target sequence for HT014 (NM_020362.2,678-696).
gaccatctgcaattacgaa

SEQ ID NO: 376905 - DNA, 19 bp, Homo sapiens
  siRNA target sequence for RPGRIP1 (NM_020366.2,36-54).
gccagttagagacatagat

SEQ ID NO: 376906 - DNA, 19 bp, Homo sapiens
  siRNA target sequence for RPGRIP1 (NM_020366.2,66-84).
ggtgctaccagcctcaaaa

SEQ ID NO: 376907 - DNA, 19 bp, Homo sapiens
  siRNA target sequence for RPGRIP1 (NM_020366.2,69-87).
gctaccagcctcaaaaggt

SEQ ID NO: 376908 - DNA, 19 bp, Homo sapiens
  siRNA target sequence for RPGRIP1 (NM_020366.2,70-88).
ctaccagcctcaaaaggta

SEQ ID NO: 376909 - DNA, 19 bp, Homo sapiens
  siRNA target sequence for RPGRIP1 (NM_020366.2,155-173).
gacttcgcgaagatcacat

SEQ ID NO: 376910 - DNA, 19 bp, Homo sapiens
  siRNA target sequence for RPGRIP1 (NM_020366.2,518-536).
cccctccatcgtttaagga

SEQ ID NO: 376911 - DNA, 19 bp, Homo sapiens
  siRNA target sequence for RPGRIP1 (NM_020366.2,538-556).
catgcgacaaatgaaaaca

SEQ ID NO: 376912 - DNA, 19 bp, Homo sapiens
  siRNA target sequence for RPGRIP1 (NM_020366.2,595-613).
ggttctaacagcataattt

SEQ ID NO: 376913 - DNA, 19 bp, Homo sapiens
  siRNA target sequence for RPGRIP1 (NM_020366.2,793-811).
gagcttcgagcttccatta

SEQ ID NO: 376914 - DNA, 19 bp, Homo sapiens
  siRNA target sequence for RPGRIP1 (NM_020366.2,795-813).
gcttcgagcttccattaaa

SEQ ID NO: 376915 - DNA, 19 bp, Homo sapiens
  siRNA target sequence for RPGRIP1 (NM_020366.2,799-817).
cgagcttccattaaagaga

SEQ ID NO: 376916 - DNA, 19 bp, Homo sapiens
  siRNA target sequence for RPGRIP1 (NM_020366.2,823-841).
gagctgattcgacttaaga

SEQ ID NO: 376917 - DNA, 19 bp, Homo sapiens
  siRNA target sequence for RPGRIP1 (NM_020366.2,863-881).
cttcattggttatgacaaa

SEQ ID NO: 376918 - DNA, 19 bp, Homo sapiens
  siRNA target sequence for RPGRIP1 (NM_020366.2,884-902).
cacaattaacagaagttca

SEQ ID NO: 376919 - DNA, 19 bp, Homo sapiens
  siRNA target sequence for RPGRIP1 (NM_020366.2,963-981).
cctcctcaagcaagtgaat

SEQ ID NO: 376920 - DNA, 19 bp, Homo sapiens
  siRNA target sequence for RPGRIP1 (NM_020366.2,1039-1057).
ctggaagatgtgtctatct

SEQ ID NO: 376921 - DNA, 19 bp, Homo sapiens
  siRNA target sequence for RPGRIP1 (NM_020366.2,1111-1129).
cgaaaattgctgaatgaca

SEQ ID NO: 376922 - DNA, 19 bp, Homo sapiens
  siRNA target sequence for RPGRIP1 (NM_020366.2,1326-1344).
gcttgaagtcaccaacata

SEQ ID NO: 376923 - DNA, 19 bp, Homo sapiens
  siRNA target sequence for RPGRIP1 (NM_020366.2,1377-1395).
ccaaaatgcagccacaatt

SEQ ID NO: 376924 - DNA, 19 bp, Homo sapiens
  siRNA target sequence for RPGRIP1 (NM_020366.2,1403-1421).
ctcctgacaggcaatctga

SEQ ID NO: 376925 - DNA, 19 bp, Homo sapiens
  siRNA target sequence for RPGRIP1 (NM_020366.2,1430-1448).
ctcacccagctgtattgca

SEQ ID NO: 376926 - DNA, 19 bp, Homo sapiens
  siRNA target sequence for RPGRIP1 (NM_020366.2,1505-1523).
cccaggtgctaaatgagtt

SEQ ID NO: 376927 - DNA, 19 bp, Homo sapiens
  siRNA target sequence for RPGRIP1 (NM_020366.2,1563-1581).
gaccagggacatgcttatt

SEQ ID NO: 376928 - DNA, 19 bp, Homo sapiens
  siRNA target sequence for RPGRIP1 (NM_020366.2,1589-1607).
gcaaaatcaacgtgtgtta

SEQ ID NO: 376929 - DNA, 19 bp, Homo sapiens
  siRNA target sequence for RPGRIP1 (NM_020366.2,1590-1608).
caaaatcaacgtgtgttat

SEQ ID NO: 376930 - DNA, 19 bp, Homo sapiens
  siRNA target sequence for RPGRIP1 (NM_020366.2,1632-1650).
gacaaaagctgacaatgat

SEQ ID NO: 376931 - DNA, 19 bp, Homo sapiens
  siRNA target sequence for RPGRIP1 (NM_020366.2,1640-1658).
ctgacaatgataatagaga

SEQ ID NO: 376932 - DNA, 19 bp, Homo sapiens
  siRNA target sequence for RPGRIP1 (NM_020366.2,1677-1695).
gaggttgactcgactacta

SEQ ID NO: 376933 - DNA, 19 bp, Homo sapiens
  siRNA target sequence for RPGRIP1 (NM_020366.2,1679-1697).
ggttgactcgactactaga

SEQ ID NO: 376934 - DNA, 19 bp, Homo sapiens
  siRNA target sequence for RPGRIP1 (NM_020366.2,1688-1706).
gactactagacctcaagaa

SEQ ID NO: 376935 - DNA, 19 bp, Homo sapiens
  siRNA target sequence for RPGRIP1 (NM_020366.2,1690-1708).
ctactagacctcaagaata

SEQ ID NO: 376936 - DNA, 19 bp, Homo sapiens
  siRNA target sequence for RPGRIP1 (NM_020366.2,1791-1809).
ccgaccgttgtcgttatgt

SEQ ID NO: 376937 - DNA, 19 bp, Homo sapiens
  siRNA target sequence for RPGRIP1 (NM_020366.2,1792-1810).
cgaccgttgtcgttatgtt

SEQ ID NO: 376938 - DNA, 19 bp, Homo sapiens
  siRNA target sequence for RPGRIP1 (NM_020366.2,1793-1811).
gaccgttgtcgttatgttt

SEQ ID NO: 376939 - DNA, 19 bp, Homo sapiens
  siRNA target sequence for RPGRIP1 (NM_020366.2,1802-1820).
cgttatgtttggaaacact

SEQ ID NO: 376940 - DNA, 19 bp, Homo sapiens
  siRNA target sequence for RPGRIP1 (NM_020366.2,1860-1878).
gctgcatcagggtgagaat

SEQ ID NO: 376941 - DNA, 19 bp, Homo sapiens
  siRNA target sequence for RPGRIP1 (NM_020366.2,1863-1881).
gcatcagggtgagaatctt

SEQ ID NO: 376942 - DNA, 19 bp, Homo sapiens
  siRNA target sequence for RPGRIP1 (NM_020366.2,1864-1882).
catcagggtgagaatcttt

SEQ ID NO: 376943 - DNA, 19 bp, Homo sapiens
  siRNA target sequence for RPGRIP1 (NM_020366.2,2012-2030).
ggccacagcccctctatga

SEQ ID NO: 376944 - DNA, 19 bp, Homo sapiens
  siRNA target sequence for RPGRIP1 (NM_020366.2,2055-2073).
gacagattcgcttttctta

SEQ ID NO: 376945 - DNA, 19 bp, Homo sapiens
  siRNA target sequence for RPGRIP1 (NM_020366.2,2258-2276).
ggctgcgtttccccataaa

SEQ ID NO: 376946 - DNA, 19 bp, Homo sapiens
  siRNA target sequence for RPGRIP1 (NM_020366.2,2259-2277).
gctgcgtttccccataaaa

SEQ ID NO: 376947 - DNA, 19 bp, Homo sapiens
  siRNA target sequence for RPGRIP1 (NM_020366.2,2282-2300).
gcctacaggcgtgcaataa

SEQ ID NO: 376948 - DNA, 19 bp, Homo sapiens
  siRNA target sequence for RPGRIP1 (NM_020366.2,2283-2301).
cctacaggcgtgcaataaa

SEQ ID NO: 376949 - DNA, 19 bp, Homo sapiens
  siRNA target sequence for RPGRIP1 (NM_020366.2,2470-2488).
gctgtgtaccgcttcttca

SEQ ID NO: 376950 - DNA, 19 bp, Homo sapiens
  siRNA target sequence for RPGRIP1 (NM_020366.2,2523-2541).
cagtaacaacccctacttt

SEQ ID NO: 376951 - DNA, 19 bp, Homo sapiens
  siRNA target sequence for RPGRIP1 (NM_020366.2,2604-2622).
ggccttgtctatacatgtt

SEQ ID NO: 376952 - DNA, 19 bp, Homo sapiens
  siRNA target sequence for RPGRIP1 (NM_020366.2,2663-2681).
gagcccgagtgcctttact

SEQ ID NO: 376953 - DNA, 19 bp, Homo sapiens
  siRNA target sequence for RPGRIP1 (NM_020366.2,2739-2757).
gaaacccaacggatctatt

SEQ ID NO: 376954 - DNA, 19 bp, Homo sapiens
  siRNA target sequence for RPGRIP1 (NM_020366.2,2744-2762).
ccaacggatctattcaagt

SEQ ID NO: 376955 - DNA, 19 bp, Homo sapiens
  siRNA target sequence for RPGRIP1 (NM_020366.2,2825-2843).
ctaaggggaaggataccaa

SEQ ID NO: 376956 - DNA, 19 bp, Homo sapiens
  siRNA target sequence for RPGRIP1 (NM_020366.2,2836-2854).
gataccaaggacagttcaa

SEQ ID NO: 376957 - DNA, 19 bp, Homo sapiens
  siRNA target sequence for RPGRIP1 (NM_020366.2,2845-2863).
gacagttcaaagatctcat

SEQ ID NO: 376958 - DNA, 19 bp, Homo sapiens
  siRNA target sequence for RPGRIP1 (NM_020366.2,2930-2948).
ctggccagtatcgatctaa

SEQ ID NO: 376959 - DNA, 19 bp, Homo sapiens
  siRNA target sequence for RPGRIP1 (NM_020366.2,2932-2950).
ggccagtatcgatctaaga

SEQ ID NO: 376960 - DNA, 19 bp, Homo sapiens
  siRNA target sequence for RPGRIP1 (NM_020366.2,2934-2952).
ccagtatcgatctaagaga

SEQ ID NO: 376961 - DNA, 19 bp, Homo sapiens
  siRNA target sequence for RPGRIP1 (NM_020366.2,2937-2955).
gtatcgatctaagagaaaa

SEQ ID NO: 376962 - DNA, 19 bp, Homo sapiens
  siRNA target sequence for RPGRIP1 (NM_020366.2,3029-3047).
gaataggtgttcaaggaaa

SEQ ID NO: 376963 - DNA, 19 bp, Homo sapiens
  siRNA target sequence for RPGRIP1 (NM_020366.2,3048-3066).
gaatagaatggagtatctt

SEQ ID NO: 376964 - DNA, 19 bp, Homo sapiens
  siRNA target sequence for RPGRIP1 (NM_020366.2,3058-3076).
gagtatcttagccttaaca

SEQ ID NO: 376965 - DNA, 19 bp, Homo sapiens
  siRNA target sequence for RPGRIP1 (NM_020366.2,3064-3082).
cttagccttaacatcttaa

SEQ ID NO: 376966 - DNA, 19 bp, Homo sapiens
  siRNA target sequence for RPGRIP1 (NM_020366.2,3144-3162).
cataggtgatggctttaaa

SEQ ID NO: 376967 - DNA, 19 bp, Homo sapiens
  siRNA target sequence for RPGRIP1 (NM_020366.2,3223-3241).
ctacatcctgtaaatgaca

SEQ ID NO: 376968 - DNA, 19 bp, Homo sapiens
  siRNA target sequence for RPGRIP1 (NM_020366.2,3229-3247).
cctgtaaatgacaaagaat

SEQ ID NO: 376969 - DNA, 19 bp, Homo sapiens
  siRNA target sequence for RPGRIP1 (NM_020366.2,3268-3286).
gtcagtgaagcacaaacta

SEQ ID NO: 376970 - DNA, 19 bp, Homo sapiens
  siRNA target sequence for RPGRIP1 (NM_020366.2,3284-3302).
ctaccgacagtgatgatgt

SEQ ID NO: 376971 - DNA, 19 bp, Homo sapiens
  siRNA target sequence for RPGRIP1 (NM_020366.2,3399-3417).
gatgtctgatgagaacata

SEQ ID NO: 376972 - DNA, 19 bp, Homo sapiens
  siRNA target sequence for RPGRIP1 (NM_020366.2,3423-3441).
ggtgtatgtggagtacaaa

SEQ ID NO: 376973 - DNA, 19 bp, Homo sapiens
  siRNA target sequence for RPGRIP1 (NM_020366.2,3424-3442).
gtgtatgtggagtacaaat

SEQ ID NO: 376974 - DNA, 19 bp, Homo sapiens
  siRNA target sequence for RPGRIP1 (NM_020366.2,3497-3515).
gggcaggagaagaaatcca

SEQ ID NO: 376975 - DNA, 19 bp, Homo sapiens
  siRNA target sequence for RPGRIP1 (NM_020366.2,3562-3580).
ggccgaaggcggtttctgt

SEQ ID NO: 376976 - DNA, 19 bp, Homo sapiens
  siRNA target sequence for RPGRIP1 (NM_020366.2,3563-3581).
gccgaaggcggtttctgtt

SEQ ID NO: 376977 - DNA, 19 bp, Homo sapiens
  siRNA target sequence for RPGRIP1 (NM_020366.2,3624-3642).
gtttacagtggtaagtgat

SEQ ID NO: 376978 - DNA, 19 bp, Homo sapiens
  siRNA target sequence for RPGRIP1 (NM_020366.2,3716-3734).
caggaagagatattctaga

SEQ ID NO: 376979 - DNA, 19 bp, Homo sapiens
  siRNA target sequence for RPGRIP1 (NM_020366.2,3812-3830).
ctgtcctccatgctattta

SEQ ID NO: 376980 - DNA, 19 bp, Homo sapiens
  siRNA target sequence for RPGRIP1 (NM_020366.2,3814-3832).
gtcctccatgctatttaca

SEQ ID NO: 376981 - DNA, 19 bp, Homo sapiens
  siRNA target sequence for C12orf6 (NM_020367.2,221-239).
gacatggacacgtcagata

SEQ ID NO: 376982 - DNA, 19 bp, Homo sapiens
  siRNA target sequence for C12orf6 (NM_020367.2,321-339).
gcagtgaagatatcgaaaa

SEQ ID NO: 376983 - DNA, 19 bp, Homo sapiens
  siRNA target sequence for C12orf6 (NM_020367.2,326-344).
gaagatatcgaaaaaagct

SEQ ID NO: 376984 - DNA, 19 bp, Homo sapiens
  siRNA target sequence for C12orf6 (NM_020367.2,384-402).
ccaaattcagctacaagat

SEQ ID NO: 376985 - DNA, 19 bp, Homo sapiens
  siRNA target sequence for C12orf6 (NM_020367.2,391-409).
cagctacaagatagacttt

SEQ ID NO: 376986 - DNA, 19 bp, Homo sapiens
  siRNA target sequence for C12orf6 (NM_020367.2,440-458).
ggaaagcagcgcttaataa

SEQ ID NO: 376987 - DNA, 19 bp, Homo sapiens
  siRNA target sequence for C12orf6 (NM_020367.2,441-459).
gaaagcagcgcttaataaa

SEQ ID NO: 376988 - DNA, 19 bp, Homo sapiens
  siRNA target sequence for C12orf6 (NM_020367.2,489-507).
gttacatctgtgaaaacga

SEQ ID NO: 376989 - DNA, 19 bp, Homo sapiens
  siRNA target sequence for C12orf6 (NM_020367.2,522-540).
caccacactgggagaatgt

SEQ ID NO: 376990 - DNA, 19 bp, Homo sapiens
  siRNA target sequence for C12orf6 (NM_020367.2,527-545).
cactgggagaatgtgaata

SEQ ID NO: 376991 - DNA, 19 bp, Homo sapiens
  siRNA target sequence for C12orf6 (NM_020367.2,531-549).
gggagaatgtgaatactca

SEQ ID NO: 376992 - DNA, 19 bp, Homo sapiens
  siRNA target sequence for C12orf6 (NM_020367.2,570-588).
ctctgcacaatcaaacaca

SEQ ID NO: 376993 - DNA, 19 bp, Homo sapiens
  siRNA target sequence for C12orf6 (NM_020367.2,574-592).
gcacaatcaaacacatgaa

SEQ ID NO: 376994 - DNA, 19 bp, Homo sapiens
  siRNA target sequence for C12orf6 (NM_020367.2,628-646).
ggatcgcaaccgaattaaa

SEQ ID NO: 376995 - DNA, 19 bp, Homo sapiens
  siRNA target sequence for C12orf6 (NM_020367.2,629-647).
gatcgcaaccgaattaaaa

SEQ ID NO: 376996 - DNA, 19 bp, Homo sapiens
  siRNA target sequence for C12orf6 (NM_020367.2,632-650).
cgcaaccgaattaaaagaa

SEQ ID NO: 376997 - DNA, 19 bp, Homo sapiens
  siRNA target sequence for C12orf6 (NM_020367.2,727-745).
gcctcagattaatgaacaa

SEQ ID NO: 376998 - DNA, 19 bp, Homo sapiens
  siRNA target sequence for C12orf6 (NM_020367.2,755-773).
catggtaccagcagtgaat

SEQ ID NO: 376999 - DNA, 19 bp, Homo sapiens
  siRNA target sequence for C12orf6 (NM_020367.2,779-797).
gaagcaatctgcattcata

SEQ ID NO: 377000 - DNA, 19 bp, Homo sapiens
  siRNA target sequence for C12orf6 (NM_020367.2,803-821).
gattggagaataaatggta

SEQ ID NO: 377001 - DNA, 19 bp, Homo sapiens
  siRNA target sequence for C12orf6 (NM_020367.2,807-825).
ggagaataaatggtataca

SEQ ID NO: 377002 - DNA, 19 bp, Homo sapiens
  siRNA target sequence for C12orf6 (NM_020367.2,904-922).
gcatgggaacacattccaa

SEQ ID NO: 377003 - DNA, 19 bp, Homo sapiens
  siRNA target sequence for C12orf6 (NM_020367.2,940-958).
gcaacagcggcatctgttt

SEQ ID NO: 377004 - DNA, 19 bp, Homo sapiens
  siRNA target sequence for C12orf6 (NM_020367.2,941-959).
caacagcggcatctgttta

SEQ ID NO: 377005 - DNA, 19 bp, Homo sapiens
  siRNA target sequence for C12orf6 (NM_020367.2,946-964).
gcggcatctgtttagaaca

SEQ ID NO: 377006 - DNA, 19 bp, Homo sapiens
  siRNA target sequence for C12orf6 (NM_020367.2,948-966).
ggcatctgtttagaacata

SEQ ID NO: 377007 - DNA, 19 bp, Homo sapiens
  siRNA target sequence for C12orf6 (NM_020367.2,991-1009).
gctaattggagattacata

SEQ ID NO: 377008 - DNA, 19 bp, Homo sapiens
  siRNA target sequence for C12orf6 (NM_020367.2,992-1010).
ctaattggagattacataa

SEQ ID NO: 377009 - DNA, 19 bp, Homo sapiens
  siRNA target sequence for C12orf6 (NM_020367.2,1046-1064).
gacgggagctatgtgaatt

SEQ ID NO: 377010 - DNA, 19 bp, Homo sapiens
  siRNA target sequence for C12orf6 (NM_020367.2,1049-1067).
gggagctatgtgaatttat

SEQ ID NO: 377011 - DNA, 19 bp, Homo sapiens
  siRNA target sequence for C12orf6 (NM_020367.2,1132-1150).
ctatcctgagtacttgata

SEQ ID NO: 377012 - DNA, 19 bp, Homo sapiens
  siRNA target sequence for C12orf6 (NM_020367.2,1136-1154).
cctgagtacttgatagact

SEQ ID NO: 377013 - DNA, 19 bp, Homo sapiens
  siRNA target sequence for SAS10 (NM_020368.1,227-245).
cacgctcaccgacgaaaat

SEQ ID NO: 377014 - DNA, 19 bp, Homo sapiens
  siRNA target sequence for SAS10 (NM_020368.1,230-248).
gctcaccgacgaaaatgga

SEQ ID NO: 377015 - DNA, 19 bp, Homo sapiens
  siRNA target sequence for SAS10 (NM_020368.1,715-733).
gggttgaggcctttgcaaa

SEQ ID NO: 377016 - DNA, 19 bp, Homo sapiens
  siRNA target sequence for SAS10 (NM_020368.1,763-781).
cacgggtcgtgaaggattt

SEQ ID NO: 377017 - DNA, 19 bp, Homo sapiens
  siRNA target sequence for SAS10 (NM_020368.1,776-794).
ggatttggctaaagtttca

SEQ ID NO: 377018 - DNA, 19 bp, Homo sapiens
  siRNA target sequence for SAS10 (NM_020368.1,782-800).
ggctaaagtttcagtgaaa

SEQ ID NO: 377019 - DNA, 19 bp, Homo sapiens
  siRNA target sequence for SAS10 (NM_020368.1,869-887).
gttgacagaggttaaggat

SEQ ID NO: 377020 - DNA, 19 bp, Homo sapiens
  siRNA target sequence for SAS10 (NM_020368.1,926-944).
cattccacccggaaaagga

SEQ ID NO: 377021 - DNA, 19 bp, Homo sapiens
  siRNA target sequence for SAS10 (NM_020368.1,965-983).
gtacaacctctacttgaat

SEQ ID NO: 377022 - DNA, 19 bp, Homo sapiens
  siRNA target sequence for SAS10 (NM_020368.1,989-1007).
ctcgaacatcagtttttat

SEQ ID NO: 377023 - DNA, 19 bp, Homo sapiens
  siRNA target sequence for SAS10 (NM_020368.1,1041-1059).
ggacatcctgtcatagaaa

SEQ ID NO: 377024 - DNA, 19 bp, Homo sapiens
  siRNA target sequence for SAS10 (NM_020368.1,1062-1080).
cttgttacctaccgaaatt

SEQ ID NO: 377025 - DNA, 19 bp, Homo sapiens
  siRNA target sequence for SAS10 (NM_020368.1,1069-1087).
cctaccgaaatttgatcaa

SEQ ID NO: 377026 - DNA, 19 bp, Homo sapiens
  siRNA target sequence for SAS10 (NM_020368.1,1112-1130).
gctgtcctcagaaattcgt

SEQ ID NO: 377027 - DNA, 19 bp, Homo sapiens
  siRNA target sequence for SAS10 (NM_020368.1,1128-1146).
cgtcatctgttgacactta

SEQ ID NO: 377028 - DNA, 19 bp, Homo sapiens
  siRNA target sequence for SAS10 (NM_020368.1,1129-1147).
gtcatctgttgacacttaa

SEQ ID NO: 377029 - DNA, 19 bp, Homo sapiens
  siRNA target sequence for SAS10 (NM_020368.1,1240-1258).
ctgttacagatctttctga

SEQ ID NO: 377030 - DNA, 19 bp, Homo sapiens
  siRNA target sequence for SAS10 (NM_020368.1,1311-1329).
gacaggcaaaagctaaaga

SEQ ID NO: 377031 - DNA, 19 bp, Homo sapiens
  siRNA target sequence for SAS10 (NM_020368.1,1385-1403).
gagagctattacctatcaa

SEQ ID NO: 377032 - DNA, 19 bp, Homo sapiens
  siRNA target sequence for SAS10 (NM_020368.1,1387-1405).
gagctattacctatcaaat

SEQ ID NO: 377033 - DNA, 19 bp, Homo sapiens
  siRNA target sequence for SAS10 (NM_020368.1,1450-1468).
gcaatcccagagtgaaaca

SEQ ID NO: 377034 - DNA, 19 bp, Homo sapiens
  siRNA target sequence for SAS10 (NM_020368.1,1511-1529).
ggttcgtgaagttcgtaaa

SEQ ID NO: 377035 - DNA, 19 bp, Homo sapiens
  siRNA target sequence for SAS10 (NM_020368.1,1539-1557).
cgttatagtggtgaattat

SEQ ID NO: 377036 - DNA, 19 bp, Homo sapiens
  siRNA target sequence for SAS10 (NM_020368.1,1561-1579).
gcattcgtgcaggagttaa

SEQ ID NO: 377037 - DNA, 19 bp, Homo sapiens
  siRNA target sequence for SAS10 (NM_020368.1,1562-1580).
cattcgtgcaggagttaaa

SEQ ID NO: 377038 - DNA, 19 bp, Homo sapiens
  siRNA target sequence for TMEM16B (NM_020373.1,257-275).
gcagcagctctgtcatcaa

SEQ ID NO: 377039 - DNA, 19 bp, Homo sapiens
  siRNA target sequence for TMEM16B (NM_020373.1,266-284).
ctgtcatcaacaactatct

SEQ ID NO: 377040 - DNA, 19 bp, Homo sapiens
  siRNA target sequence for TMEM16B (NM_020373.1,348-366).
gaggaaggtcgactatgta

SEQ ID NO: 377041 - DNA, 19 bp, Homo sapiens
  siRNA target sequence for TMEM16B (NM_020373.1,350-368).
ggaaggtcgactatgtact

SEQ ID NO: 377042 - DNA, 19 bp, Homo sapiens
  siRNA target sequence for TMEM16B (NM_020373.1,351-369).
gaaggtcgactatgtactt

SEQ ID NO: 377043 - DNA, 19 bp, Homo sapiens
  siRNA target sequence for TMEM16B (NM_020373.1,528-546).
ggagcagcgggaggaattt

SEQ ID NO: 377044 - DNA, 19 bp, Homo sapiens
  siRNA target sequence for TMEM16B (NM_020373.1,649-667).
gccagagaggcagaattct

SEQ ID NO: 377045 - DNA, 19 bp, Homo sapiens
  siRNA target sequence for TMEM16B (NM_020373.1,653-671).
gagaggcagaattcttgaa

SEQ ID NO: 377046 - DNA, 19 bp, Homo sapiens
  siRNA target sequence for TMEM16B (NM_020373.1,716-734).
gaggcagcattgcaaagaa

SEQ ID NO: 377047 - DNA, 19 bp, Homo sapiens
  siRNA target sequence for TMEM16B (NM_020373.1,867-885).
ggacaccttctttgataat

SEQ ID NO: 377048 - DNA, 19 bp, Homo sapiens
  siRNA target sequence for TMEM16B (NM_020373.1,948-966).
cacgatgggtattaactct

SEQ ID NO: 377049 - DNA, 19 bp, Homo sapiens
  siRNA target sequence for TMEM16B (NM_020373.1,965-983).
ctctgatcgcaaacaatat

SEQ ID NO: 377050 - DNA, 19 bp, Homo sapiens
  siRNA target sequence for TMEM16B (NM_020373.1,1001-1019).
ctcttcatgacggtgaata

SEQ ID NO: 377051 - DNA, 19 bp, Homo sapiens
  siRNA target sequence for TMEM16B (NM_020373.1,1006-1024).
catgacggtgaatacgata

SEQ ID NO: 377052 - DNA, 19 bp, Homo sapiens
  siRNA target sequence for TMEM16B (NM_020373.1,1030-1048).
gaggacgatatgaatgaca

SEQ ID NO: 377053 - DNA, 19 bp, Homo sapiens
  siRNA target sequence for TMEM16B (NM_020373.1,1102-1120).
cctattgacctcatcagaa

SEQ ID NO: 377054 - DNA, 19 bp, Homo sapiens
  siRNA target sequence for TMEM16B (NM_020373.1,1153-1171).
gcctggctgggattatata

SEQ ID NO: 377055 - DNA, 19 bp, Homo sapiens
  siRNA target sequence for TMEM16B (NM_020373.1,1223-1241).
gatgtgcaacaattgaaga

SEQ ID NO: 377056 - DNA, 19 bp, Homo sapiens
  siRNA target sequence for TMEM16B (NM_020373.1,1229-1247).
caacaattgaagaagatat

SEQ ID NO: 377057 - DNA, 19 bp, Homo sapiens
  siRNA target sequence for TMEM16B (NM_020373.1,1301-1319).
gtgacaagtcctgtgatta

SEQ ID NO: 377058 - DNA, 19 bp, Homo sapiens
  siRNA target sequence for TMEM16B (NM_020373.1,1303-1321).
gacaagtcctgtgattact

SEQ ID NO: 377059 - DNA, 19 bp, Homo sapiens
  siRNA target sequence for TMEM16B (NM_020373.1,1540-1558).
gttcgagagaaaatgctaa

SEQ ID NO: 377060 - DNA, 19 bp, Homo sapiens
  siRNA target sequence for TMEM16B (NM_020373.1,1657-1675).
ccaggttacctgatgaact

SEQ ID NO: 377061 - DNA, 19 bp, Homo sapiens
  siRNA target sequence for TMEM16B (NM_020373.1,1658-1676).
caggttacctgatgaactt

SEQ ID NO: 377062 - DNA, 19 bp, Homo sapiens
  siRNA target sequence for TMEM16B (NM_020373.1,1719-1737).
ctttggggtgatagtgtat

SEQ ID NO: 377063 - DNA, 19 bp, Homo sapiens
  siRNA target sequence for TMEM16B (NM_020373.1,1723-1741).
ggggtgatagtgtatcgaa

SEQ ID NO: 377064 - DNA, 19 bp, Homo sapiens
  siRNA target sequence for TMEM16B (NM_020373.1,1724-1742).
gggtgatagtgtatcgaat

SEQ ID NO: 377065 - DNA, 19 bp, Homo sapiens
  siRNA target sequence for TMEM16B (NM_020373.1,1725-1743).
ggtgatagtgtatcgaata

SEQ ID NO: 377066 - DNA, 19 bp, Homo sapiens
  siRNA target sequence for TMEM16B (NM_020373.1,1726-1744).
gtgatagtgtatcgaataa

SEQ ID NO: 377067 - DNA, 19 bp, Homo sapiens
  siRNA target sequence for TMEM16B (NM_020373.1,1728-1746).
gatagtgtatcgaataaca

SEQ ID NO: 377068 - DNA, 19 bp, Homo sapiens
  siRNA target sequence for TMEM16B (NM_020373.1,1924-1942).
cgcctgatcctcaaagctt

SEQ ID NO: 377069 - DNA, 19 bp, Homo sapiens
  siRNA target sequence for TMEM16B (NM_020373.1,1944-1962).
cttgctcaagtttgtcaat

SEQ ID NO: 377070 - DNA, 19 bp, Homo sapiens
  siRNA target sequence for TMEM16B (NM_020373.1,2024-2042).
gctacgtctatgtattcga

SEQ ID NO: 377071 - DNA, 19 bp, Homo sapiens
  siRNA target sequence for TMEM16B (NM_020373.1,2025-2043).
ctacgtctatgtattcgat

SEQ ID NO: 377072 - DNA, 19 bp, Homo sapiens
  siRNA target sequence for TMEM16B (NM_020373.1,2155-2173).
ggagtcccgaagctaaaga

SEQ ID NO: 377073 - DNA, 19 bp, Homo sapiens
  siRNA target sequence for TMEM16B (NM_020373.1,2160-2178).
cccgaagctaaagaaacta

SEQ ID NO: 377074 - DNA, 19 bp, Homo sapiens
  siRNA target sequence for TMEM16B (NM_020373.1,2161-2179).
ccgaagctaaagaaactat

SEQ ID NO: 377075 - DNA, 19 bp, Homo sapiens
  siRNA target sequence for TMEM16B (NM_020373.1,2166-2184).
gctaaagaaactatttcga

SEQ ID NO: 377076 - DNA, 19 bp, Homo sapiens
  siRNA target sequence for TMEM16B (NM_020373.1,2220-2238).
ctctgcccattcgaaacat

SEQ ID NO: 377077 - DNA, 19 bp, Homo sapiens
  siRNA target sequence for TMEM16B (NM_020373.1,2262-2280).
cagcttggaaccatacaca

SEQ ID NO: 377078 - DNA, 19 bp, Homo sapiens
  siRNA target sequence for TMEM16B (NM_020373.1,2282-2300).
gactgactccggagtacat

SEQ ID NO: 377079 - DNA, 19 bp, Homo sapiens
  siRNA target sequence for TMEM16B (NM_020373.1,2373-2391).
cctcaacaacgtcattgaa

SEQ ID NO: 377080 - DNA, 19 bp, Homo sapiens
  siRNA target sequence for TMEM16B (NM_020373.1,2395-2413).
cggctcgatgcaaagaagt

SEQ ID NO: 377081 - DNA, 19 bp, Homo sapiens
  siRNA target sequence for TMEM16B (NM_020373.1,2396-2414).
ggctcgatgcaaagaagtt

SEQ ID NO: 377082 - DNA, 19 bp, Homo sapiens
  siRNA target sequence for TMEM16B (NM_020373.1,2400-2418).
cgatgcaaagaagtttgtt

SEQ ID NO: 377083 - DNA, 19 bp, Homo sapiens
  siRNA target sequence for TMEM16B (NM_020373.1,2441-2459).
ctgtaagaaccaaagatat

SEQ ID NO: 377084 - DNA, 19 bp, Homo sapiens
  siRNA target sequence for TMEM16B (NM_020373.1,2527-2545).
gcgatcacctccgacttta

SEQ ID NO: 377085 - DNA, 19 bp, Homo sapiens
  siRNA target sequence for TMEM16B (NM_020373.1,2528-2546).
cgatcacctccgactttat

SEQ ID NO: 377086 - DNA, 19 bp, Homo sapiens
  siRNA target sequence for TMEM16B (NM_020373.1,2655-2673).
gccagaaaactcacagttt

SEQ ID NO: 377087 - DNA, 19 bp, Homo sapiens
  siRNA target sequence for TMEM16B (NM_020373.1,2683-2701).
gttcagttctgcaggttta

SEQ ID NO: 377088 - DNA, 19 bp, Homo sapiens
  siRNA target sequence for TMEM16B (NM_020373.1,2727-2745).
cccgaacccttatgagttt

SEQ ID NO: 377089 - DNA, 19 bp, Homo sapiens
  siRNA target sequence for TMEM16B (NM_020373.1,2728-2746).
ccgaacccttatgagtttt

SEQ ID NO: 377090 - DNA, 19 bp, Homo sapiens
  siRNA target sequence for TMEM16B (NM_020373.1,2747-2765).
cgaaacagtactggtttat

SEQ ID NO: 377091 - DNA, 19 bp, Homo sapiens
  siRNA target sequence for TMEM16B (NM_020373.1,2775-2793).
ccgtctggcttttgtcata

SEQ ID NO: 377092 - DNA, 19 bp, Homo sapiens
  siRNA target sequence for TMEM16B (NM_020373.1,2776-2794).
cgtctggcttttgtcataa

SEQ ID NO: 377093 - DNA, 19 bp, Homo sapiens
  siRNA target sequence for C12orf4 (NM_020374.2,170-188).
ctgagagtgccactcaaat

SEQ ID NO: 377094 - DNA, 19 bp, Homo sapiens
  siRNA target sequence for C12orf4 (NM_020374.2,197-215).
caagagaatgccagtcatt

SEQ ID NO: 377095 - DNA, 19 bp, Homo sapiens
  siRNA target sequence for C12orf4 (NM_020374.2,239-257).
cacagtttaccgtgcttta

SEQ ID NO: 377096 - DNA, 19 bp, Homo sapiens
  siRNA target sequence for C12orf4 (NM_020374.2,241-259).
cagtttaccgtgctttata

SEQ ID NO: 377097 - DNA, 19 bp, Homo sapiens
  siRNA target sequence for C12orf4 (NM_020374.2,243-261).
gtttaccgtgctttataga

SEQ ID NO: 377098 - DNA, 19 bp, Homo sapiens
  siRNA target sequence for C12orf4 (NM_020374.2,275-293).
gaagctctgactcagttta

SEQ ID NO: 377099 - DNA, 19 bp, Homo sapiens
  siRNA target sequence for C12orf4 (NM_020374.2,360-378).
gtgaagtagatttacatca

SEQ ID NO: 377100 - DNA, 19 bp, Homo sapiens
  siRNA target sequence for C12orf4 (NM_020374.2,374-392).
catcagctggcgagtacat

SEQ ID NO: 377101 - DNA, 19 bp, Homo sapiens
  siRNA target sequence for C12orf4 (NM_020374.2,387-405).
gtacatgggccaaagctta

SEQ ID NO: 377102 - DNA, 19 bp, Homo sapiens
  siRNA target sequence for C12orf4 (NM_020374.2,467-485).
gatgtgtaccatgacttaa

SEQ ID NO: 377103 - DNA, 19 bp, Homo sapiens
  siRNA target sequence for C12orf4 (NM_020374.2,472-490).
gtaccatgacttaattcat

SEQ ID NO: 377104 - DNA, 19 bp, Homo sapiens
  siRNA target sequence for C12orf4 (NM_020374.2,520-538).
ggaacataattactttgtt

SEQ ID NO: 377105 - DNA, 19 bp, Homo sapiens
  siRNA target sequence for C12orf4 (NM_020374.2,566-584).
gatgtggagctgaaaaaat

SEQ ID NO: 377106 - DNA, 19 bp, Homo sapiens
  siRNA target sequence for C12orf4 (NM_020374.2,738-756).
ccatccaaaaacaagagta

SEQ ID NO: 377107 - DNA, 19 bp, Homo sapiens
  siRNA target sequence for C12orf4 (NM_020374.2,810-828).
cccttagtgaggaaattaa

SEQ ID NO: 377108 - DNA, 19 bp, Homo sapiens
  siRNA target sequence for C12orf4 (NM_020374.2,840-858).
gtcagttcagagaatctgt

SEQ ID NO: 377109 - DNA, 19 bp, Homo sapiens
  siRNA target sequence for C12orf4 (NM_020374.2,864-882).
caattggaaggatttatga

SEQ ID NO: 377110 - DNA, 19 bp, Homo sapiens
  siRNA target sequence for C12orf4 (NM_020374.2,883-901).
ggaacagagaaagttagaa

SEQ ID NO: 377111 - DNA, 19 bp, Homo sapiens
  siRNA target sequence for C12orf4 (NM_020374.2,902-920).
gaaagttttaccattcact

SEQ ID NO: 377112 - DNA, 19 bp, Homo sapiens
  siRNA target sequence for C12orf4 (NM_020374.2,929-947).
cagttgaagaccatgcata

SEQ ID NO: 377113 - DNA, 19 bp, Homo sapiens
  siRNA target sequence for C12orf4 (NM_020374.2,931-949).
gttgaagaccatgcataat

SEQ ID NO: 377114 - DNA, 19 bp, Homo sapiens
  siRNA target sequence for C12orf4 (NM_020374.2,954-972).
gattgctgagagcagatat

SEQ ID NO: 377115 - DNA, 19 bp, Homo sapiens
  siRNA target sequence for C12orf4 (NM_020374.2,976-994).
ggacttctgtaagcataaa

SEQ ID NO: 377116 - DNA, 19 bp, Homo sapiens
  siRNA target sequence for C12orf4 (NM_020374.2,977-995).
gacttctgtaagcataaaa

SEQ ID NO: 377117 - DNA, 19 bp, Homo sapiens
  siRNA target sequence for C12orf4 (NM_020374.2,1065-1083).
gtggcctggttttactagt

SEQ ID NO: 377118 - DNA, 19 bp, Homo sapiens
  siRNA target sequence for C12orf4 (NM_020374.2,1068-1086).
gcctggttttactagtaga

SEQ ID NO: 377119 - DNA, 19 bp, Homo sapiens
  siRNA target sequence for C12orf4 (NM_020374.2,1070-1088).
ctggttttactagtagata

SEQ ID NO: 377120 - DNA, 19 bp, Homo sapiens
  siRNA target sequence for C12orf4 (NM_020374.2,1072-1090).
ggttttactagtagataat

SEQ ID NO: 377121 - DNA, 19 bp, Homo sapiens
  siRNA target sequence for C12orf4 (NM_020374.2,1079-1097).
ctagtagataatcgaatta

SEQ ID NO: 377122 - DNA, 19 bp, Homo sapiens
  siRNA target sequence for C12orf4 (NM_020374.2,1082-1100).
gtagataatcgaattaatt

SEQ ID NO: 377123 - DNA, 19 bp, Homo sapiens
  siRNA target sequence for C12orf4 (NM_020374.2,1165-1183).
ccgaattgaagagcaatta

SEQ ID NO: 377124 - DNA, 19 bp, Homo sapiens
  siRNA target sequence for C12orf4 (NM_020374.2,1196-1214).
caggtggtactttatgcta

SEQ ID NO: 377125 - DNA, 19 bp, Homo sapiens
  siRNA target sequence for C12orf4 (NM_020374.2,1218-1236).
cccagcgcaggagtaaatt

SEQ ID NO: 377126 - DNA, 19 bp, Homo sapiens
  siRNA target sequence for C12orf4 (NM_020374.2,1220-1238).
cagcgcaggagtaaattga

SEQ ID NO: 377127 - DNA, 19 bp, Homo sapiens
  siRNA target sequence for C12orf4 (NM_020374.2,1222-1240).
gcgcaggagtaaattgaaa

SEQ ID NO: 377128 - DNA, 19 bp, Homo sapiens
  siRNA target sequence for C12orf4 (NM_020374.2,1400-1418).
gtgaaatcgggaaacatca

SEQ ID NO: 377129 - DNA, 19 bp, Homo sapiens
  siRNA target sequence for C12orf4 (NM_020374.2,1442-1460).
ggactccgaaatatactca

SEQ ID NO: 377130 - DNA, 19 bp, Homo sapiens
  siRNA target sequence for C12orf4 (NM_020374.2,1443-1461).
gactccgaaatatactcaa

SEQ ID NO: 377131 - DNA, 19 bp, Homo sapiens
  siRNA target sequence for C12orf4 (NM_020374.2,1447-1465).
ccgaaatatactcaaagtt

SEQ ID NO: 377132 - DNA, 19 bp, Homo sapiens
  siRNA target sequence for C12orf4 (NM_020374.2,1473-1491).
cccatgacatcacaacaat

SEQ ID NO: 377133 - DNA, 19 bp, Homo sapiens
  siRNA target sequence for C12orf4 (NM_020374.2,1475-1493).
catgacatcacaacaataa

SEQ ID NO: 377134 - DNA, 19 bp, Homo sapiens
  siRNA target sequence for C12orf4 (NM_020374.2,1478-1496).
gacatcacaacaataagca

SEQ ID NO: 377135 - DNA, 19 bp, Homo sapiens
  siRNA target sequence for C12orf4 (NM_020374.2,1480-1498).
catcacaacaataagcatt

SEQ ID NO: 377136 - DNA, 19 bp, Homo sapiens
  siRNA target sequence for C12orf4 (NM_020374.2,1500-1518).
ctctcttgctggtacatga

SEQ ID NO: 377137 - DNA, 19 bp, Homo sapiens
  siRNA target sequence for C12orf4 (NM_020374.2,1507-1525).
gctggtacatgatatgtca

SEQ ID NO: 377138 - DNA, 19 bp, Homo sapiens
  siRNA target sequence for C12orf4 (NM_020374.2,1554-1572).
ggagagcggaacttgtgtt

SEQ ID NO: 377139 - DNA, 19 bp, Homo sapiens
  siRNA target sequence for C12orf4 (NM_020374.2,1557-1575).
gagcggaacttgtgttcaa

SEQ ID NO: 377140 - DNA, 19 bp, Homo sapiens
  siRNA target sequence for C12orf4 (NM_020374.2,1559-1577).
gcggaacttgtgttcaagt

SEQ ID NO: 377141 - DNA, 19 bp, Homo sapiens
  siRNA target sequence for C12orf4 (NM_020374.2,1629-1647).
ggacagtgcaatttctagt

SEQ ID NO: 377142 - DNA, 19 bp, Homo sapiens
  siRNA target sequence for C12orf4 (NM_020374.2,1699-1717).
ccagatcttccgagtatca

SEQ ID NO: 377143 - DNA, 19 bp, Homo sapiens
  siRNA target sequence for C12orf4 (NM_020374.2,1700-1718).
cagatcttccgagtatcat

SEQ ID NO: 377144 - DNA, 19 bp, Homo sapiens
  siRNA target sequence for C12orf4 (NM_020374.2,1702-1720).
gatcttccgagtatcatca

SEQ ID NO: 377145 - DNA, 19 bp, Homo sapiens
  siRNA target sequence for C12orf4 (NM_020374.2,1705-1723).
cttccgagtatcatcaaca

SEQ ID NO: 377146 - DNA, 19 bp, Homo sapiens
  siRNA target sequence for AF15Q14 (NM_020380.2,217-235).
gttagaagacggcattctt

SEQ ID NO: 377147 - DNA, 19 bp, Homo sapiens
  siRNA target sequence for AF15Q14 (NM_020380.2,221-239).
gaagacggcattcttcaat

SEQ ID NO: 377148 - DNA, 19 bp, Homo sapiens
  siRNA target sequence for AF15Q14 (NM_020380.2,226-244).
cggcattcttcaatattga

SEQ ID NO: 377149 - DNA, 19 bp, Homo sapiens
  siRNA target sequence for AF15Q14 (NM_020380.2,228-246).
gcattcttcaatattgaaa

SEQ ID NO: 377150 - DNA, 19 bp, Homo sapiens
  siRNA target sequence for AF15Q14 (NM_020380.2,292-310).
gttcaggaatccaatgctt

SEQ ID NO: 377151 - DNA, 19 bp, Homo sapiens
  siRNA target sequence for AF15Q14 (NM_020380.2,297-315).
ggaatccaatgctttgaga

SEQ ID NO: 377152 - DNA, 19 bp, Homo sapiens
  siRNA target sequence for AF15Q14 (NM_020380.2,347-365).
cagatactataaaggtatt

SEQ ID NO: 377153 - DNA, 19 bp, Homo sapiens
  siRNA target sequence for AF15Q14 (NM_020380.2,425-443).
gagaaaatcttcttttgat

SEQ ID NO: 377154 - DNA, 19 bp, Homo sapiens
  siRNA target sequence for AF15Q14 (NM_020380.2,475-493).
gaaattactgggatgaaca

SEQ ID NO: 377155 - DNA, 19 bp, Homo sapiens
  siRNA target sequence for AF15Q14 (NM_020380.2,580-598).
gaccagacagtcatttttt

SEQ ID NO: 377156 - DNA, 19 bp, Homo sapiens
  siRNA target sequence for AF15Q14 (NM_020380.2,648-666).
caaaggccttttagataat

SEQ ID NO: 377157 - DNA, 19 bp, Homo sapiens
  siRNA target sequence for AF15Q14 (NM_020380.2,698-716).
ccacatcatttctagctaa

SEQ ID NO: 377158 - DNA, 19 bp, Homo sapiens
  siRNA target sequence for AF15Q14 (NM_020380.2,727-745).
cacaccgaggactcaagaa

SEQ ID NO: 377159 - DNA, 19 bp, Homo sapiens
  siRNA target sequence for AF15Q14 (NM_020380.2,732-750).
cgaggactcaagaatgaaa

SEQ ID NO: 377160 - DNA, 19 bp, Homo sapiens
  siRNA target sequence for AF15Q14 (NM_020380.2,733-751).
gaggactcaagaatgaaaa

SEQ ID NO: 377161 - DNA, 19 bp, Homo sapiens
  siRNA target sequence for AF15Q14 (NM_020380.2,807-825).
caatgacttcataaaaaga

SEQ ID NO: 377162 - DNA, 19 bp, Homo sapiens
  siRNA target sequence for AF15Q14 (NM_020380.2,880-898).
gagatacctatttattcca

SEQ ID NO: 377163 - DNA, 19 bp, Homo sapiens
  siRNA target sequence for AF15Q14 (NM_020380.2,909-927).
cagtgcctcttctacacat

SEQ ID NO: 377164 - DNA, 19 bp, Homo sapiens
  siRNA target sequence for AF15Q14 (NM_020380.2,914-932).
cctcttctacacatcaaat

SEQ ID NO: 377165 - DNA, 19 bp, Homo sapiens
  siRNA target sequence for AF15Q14 (NM_020380.2,917-935).
cttctacacatcaaatgca

SEQ ID NO: 377166 - DNA, 19 bp, Homo sapiens
  siRNA target sequence for AF15Q14 (NM_020380.2,1017-1035).
gtgtcatacagccaatatt

SEQ ID NO: 377167 - DNA, 19 bp, Homo sapiens
  siRNA target sequence for AF15Q14 (NM_020380.2,1019-1037).
gtcatacagccaatattca

SEQ ID NO: 377168 - DNA, 19 bp, Homo sapiens
  siRNA target sequence for AF15Q14 (NM_020380.2,1021-1039).
catacagccaatattcaga

SEQ ID NO: 377169 - DNA, 19 bp, Homo sapiens
  siRNA target sequence for AF15Q14 (NM_020380.2,1029-1047).
caatattcagacattgatt

SEQ ID NO: 377170 - DNA, 19 bp, Homo sapiens
  siRNA target sequence for AF15Q14 (NM_020380.2,1064-1082).
ccaactcacgggaatctaa

SEQ ID NO: 377171 - DNA, 19 bp, Homo sapiens
  siRNA target sequence for AF15Q14 (NM_020380.2,1073-1091).
gggaatctaaaggtaatga

SEQ ID NO: 377172 - DNA, 19 bp, Homo sapiens
  siRNA target sequence for AF15Q14 (NM_020380.2,1074-1092).
ggaatctaaaggtaatgat

SEQ ID NO: 377173 - DNA, 19 bp, Homo sapiens
  siRNA target sequence for AF15Q14 (NM_020380.2,1111-1129).
gactttatggacttgacat

SEQ ID NO: 377174 - DNA, 19 bp, Homo sapiens
  siRNA target sequence for AF15Q14 (NM_020380.2,1134-1152).
ccacactttgcagatctta

SEQ ID NO: 377175 - DNA, 19 bp, Homo sapiens
  siRNA target sequence for AF15Q14 (NM_020380.2,1153-1171).
cctgcaacaggtaattttt

SEQ ID NO: 377176 - DNA, 19 bp, Homo sapiens
  siRNA target sequence for AF15Q14 (NM_020380.2,1194-1212).
gaatgccatggatgtaaca

SEQ ID NO: 377177 - DNA, 19 bp, Homo sapiens
  siRNA target sequence for AF15Q14 (NM_020380.2,1203-1221).
ggatgtaacaacaggttat

SEQ ID NO: 377178 - DNA, 19 bp, Homo sapiens
  siRNA target sequence for AF15Q14 (NM_020380.2,1207-1225).
gtaacaacaggttatggaa

SEQ ID NO: 377179 - DNA, 19 bp, Homo sapiens
  siRNA target sequence for AF15Q14 (NM_020380.2,1226-1244).
ctaaagcttcaggaaataa

SEQ ID NO: 377180 - DNA, 19 bp, Homo sapiens
  siRNA target sequence for AF15Q14 (NM_020380.2,1290-1308).
cataaactctgcagacaaa

SEQ ID NO: 377181 - DNA, 19 bp, Homo sapiens
  siRNA target sequence for AF15Q14 (NM_020380.2,1298-1316).
ctgcagacaaaatacatat

SEQ ID NO: 377182 - DNA, 19 bp, Homo sapiens
  siRNA target sequence for AF15Q14 (NM_020380.2,1312-1330).
catattaccagaagtcata

SEQ ID NO: 377183 - DNA, 19 bp, Homo sapiens
  siRNA target sequence for AF15Q14 (NM_020380.2,1391-1409).
ccatgaccccagaatctat

SEQ ID NO: 377184 - DNA, 19 bp, Homo sapiens
  siRNA target sequence for AF15Q14 (NM_020380.2,1421-1439).
catctattcaaggttgtaa

SEQ ID NO: 377185 - DNA, 19 bp, Homo sapiens
  siRNA target sequence for AF15Q14 (NM_020380.2,1429-1447).
caaggttgtaagactgttt

SEQ ID NO: 377186 - DNA, 19 bp, Homo sapiens
  siRNA target sequence for AF15Q14 (NM_020380.2,1433-1451).
gttgtaagactgttttcta

SEQ ID NO: 377187 - DNA, 19 bp, Homo sapiens
  siRNA target sequence for AF15Q14 (NM_020380.2,1440-1458).
gactgttttctattctagt

SEQ ID NO: 377188 - DNA, 19 bp, Homo sapiens
  siRNA target sequence for AF15Q14 (NM_020380.2,1518-1536).
gctaaagcatgacagtaat

SEQ ID NO: 377189 - DNA, 19 bp, Homo sapiens
  siRNA target sequence for AF15Q14 (NM_020380.2,1519-1537).
ctaaagcatgacagtaatt

SEQ ID NO: 377190 - DNA, 19 bp, Homo sapiens
  siRNA target sequence for AF15Q14 (NM_020380.2,1626-1644).
gagtcatacagttgcaata

SEQ ID NO: 377191 - DNA, 19 bp, Homo sapiens
  siRNA target sequence for AF15Q14 (NM_020380.2,1630-1648).
catacagttgcaatagata

SEQ ID NO: 377192 - DNA, 19 bp, Homo sapiens
  siRNA target sequence for AF15Q14 (NM_020380.2,1634-1652).
cagttgcaatagataatca

SEQ ID NO: 377193 - DNA, 19 bp, Homo sapiens
  siRNA target sequence for AF15Q14 (NM_020380.2,1775-1793).
cagttcctcatgtatctaa

SEQ ID NO: 377194 - DNA, 19 bp, Homo sapiens
  siRNA target sequence for AF15Q14 (NM_020380.2,1806-1824).
gcagagcctgtcaaatcct

SEQ ID NO: 377195 - DNA, 19 bp, Homo sapiens
  siRNA target sequence for AF15Q14 (NM_020380.2,1858-1876).
ctcttatcaggtgaaaata

SEQ ID NO: 377196 - DNA, 19 bp, Homo sapiens
  siRNA target sequence for AF15Q14 (NM_020380.2,1918-1936).
gttcctcttgcagcttata

SEQ ID NO: 377197 - DNA, 19 bp, Homo sapiens
  siRNA target sequence for AF15Q14 (NM_020380.2,1945-1963).
ccggagagtaccagtgaat

SEQ ID NO: 377198 - DNA, 19 bp, Homo sapiens
  siRNA target sequence for AF15Q14 (NM_020380.2,1947-1965).
ggagagtaccagtgaatct

SEQ ID NO: 377199 - DNA, 19 bp, Homo sapiens
  siRNA target sequence for AF15Q14 (NM_020380.2,2066-2084).
ccgacacctggaacaaaga

SEQ ID NO: 377200 - DNA, 19 bp, Homo sapiens
  siRNA target sequence for AF15Q14 (NM_020380.2,2109-2127).
gccctaccttgataaagat

SEQ ID NO: 377201 - DNA, 19 bp, Homo sapiens
  siRNA target sequence for AF15Q14 (NM_020380.2,2110-2128).
ccctaccttgataaagatt

SEQ ID NO: 377202 - DNA, 19 bp, Homo sapiens
  siRNA target sequence for AF15Q14 (NM_020380.2,2112-2130).
ctaccttgataaagattct

SEQ ID NO: 377203 - DNA, 19 bp, Homo sapiens
  siRNA target sequence for AF15Q14 (NM_020380.2,2131-2149).
cctcagtcagctgattgta

SEQ ID NO: 377204 - DNA, 19 bp, Homo sapiens
  siRNA target sequence for AF15Q14 (NM_020380.2,2165-2183).
caagccataatatagtcta

SEQ ID NO: 377205 - DNA, 19 bp, Homo sapiens
  siRNA target sequence for AF15Q14 (NM_020380.2,2191-2209).
ggagttcttgataaacaaa

SEQ ID NO: 377206 - DNA, 19 bp, Homo sapiens
  siRNA target sequence for AF15Q14 (NM_020380.2,2197-2215).
cttgataaacaaataacta

SEQ ID NO: 377207 - DNA, 19 bp, Homo sapiens
  siRNA target sequence for AF15Q14 (NM_020380.2,2227-2245).
gtatcatgggaacaatctt

SEQ ID NO: 377208 - DNA, 19 bp, Homo sapiens
  siRNA target sequence for AF15Q14 (NM_020380.2,2256-2274).
cacaaagccattattttca

SEQ ID NO: 377209 - DNA, 19 bp, Homo sapiens
  siRNA target sequence for AF15Q14 (NM_020380.2,2273-2291).
catcaggacagttctctat

SEQ ID NO: 377210 - DNA, 19 bp, Homo sapiens
  siRNA target sequence for AF15Q14 (NM_020380.2,2283-2301).
gttctctatgaaaaatcat

SEQ ID NO: 377211 - DNA, 19 bp, Homo sapiens
  siRNA target sequence for AF15Q14 (NM_020380.2,2309-2327).
ctataagtagtcatacagt

SEQ ID NO: 377212 - DNA, 19 bp, Homo sapiens
  siRNA target sequence for AF15Q14 (NM_020380.2,2335-2353).
gtactaggccagaattcta

SEQ ID NO: 377213 - DNA, 19 bp, Homo sapiens
  siRNA target sequence for AF15Q14 (NM_020380.2,2370-2388).
gaggaaaagtttaagcaat

SEQ ID NO: 377214 - DNA, 19 bp, Homo sapiens
  siRNA target sequence for AF15Q14 (NM_020380.2,2396-2414).
ctgactattgccatgacaa

SEQ ID NO: 377215 - DNA, 19 bp, Homo sapiens
  siRNA target sequence for AF15Q14 (NM_020380.2,2439-2457).
gcaaaatatggatctaaca

SEQ ID NO: 377216 - DNA, 19 bp, Homo sapiens
  siRNA target sequence for AF15Q14 (NM_020380.2,2534-2552).
ctggccagctaacaacaat

SEQ ID NO: 377217 - DNA, 19 bp, Homo sapiens
  siRNA target sequence for AF15Q14 (NM_020380.2,2536-2554).
ggccagctaacaacaatga

SEQ ID NO: 377218 - DNA, 19 bp, Homo sapiens
  siRNA target sequence for AF15Q14 (NM_020380.2,2537-2555).
gccagctaacaacaatgaa

SEQ ID NO: 377219 - DNA, 19 bp, Homo sapiens
  siRNA target sequence for AF15Q14 (NM_020380.2,2609-2627).
gtggagtgcttaaatctaa

SEQ ID NO: 377220 - DNA, 19 bp, Homo sapiens
  siRNA target sequence for AF15Q14 (NM_020380.2,2611-2629).
ggagtgcttaaatctaact

SEQ ID NO: 377221 - DNA, 19 bp, Homo sapiens
  siRNA target sequence for AF15Q14 (NM_020380.2,2616-2634).
gcttaaatctaactgtatt

SEQ ID NO: 377222 - DNA, 19 bp, Homo sapiens
  siRNA target sequence for AF15Q14 (NM_020380.2,2617-2635).
cttaaatctaactgtatta

SEQ ID NO: 377223 - DNA, 19 bp, Homo sapiens
  siRNA target sequence for AF15Q14 (NM_020380.2,2717-2735).
gtgttggtggaccaaaaat

SEQ ID NO: 377224 - DNA, 19 bp, Homo sapiens
  siRNA target sequence for AF15Q14 (NM_020380.2,2722-2740).
ggtggaccaaaaattgata

SEQ ID NO: 377225 - DNA, 19 bp, Homo sapiens
  siRNA target sequence for AF15Q14 (NM_020380.2,2723-2741).
gtggaccaaaaattgataa

SEQ ID NO: 377226 - DNA, 19 bp, Homo sapiens
  siRNA target sequence for AF15Q14 (NM_020380.2,2725-2743).
ggaccaaaaattgataaga

SEQ ID NO: 377227 - DNA, 19 bp, Homo sapiens
  siRNA target sequence for AF15Q14 (NM_020380.2,2773-2791).
gatatggatatcactaaga

SEQ ID NO: 377228 - DNA, 19 bp, Homo sapiens
  siRNA target sequence for AF15Q14 (NM_020380.2,2786-2804).
ctaagagttatacaataga

SEQ ID NO: 377229 - DNA, 19 bp, Homo sapiens
  siRNA target sequence for AF15Q14 (NM_020380.2,2861-2879).
gaacttctgaaactatttt

SEQ ID NO: 377230 - DNA, 19 bp, Homo sapiens
  siRNA target sequence for AF15Q14 (NM_020380.2,2979-2997).
ggacaaaactgtagtgttt

SEQ ID NO: 377231 - DNA, 19 bp, Homo sapiens
  siRNA target sequence for AF15Q14 (NM_020380.2,3176-3194).
gtgaccgtctagtagcaaa

SEQ ID NO: 377232 - DNA, 19 bp, Homo sapiens
  siRNA target sequence for AF15Q14 (NM_020380.2,3181-3199).
cgtctagtagcaaatgaca

SEQ ID NO: 377233 - DNA, 19 bp, Homo sapiens
  siRNA target sequence for AF15Q14 (NM_020380.2,3214-3232).
ctggaggaatggtctaata

SEQ ID NO: 377234 - DNA, 19 bp, Homo sapiens
  siRNA target sequence for AF15Q14 (NM_020380.2,3216-3234).
ggaggaatggtctaataat

SEQ ID NO: 377235 - DNA, 19 bp, Homo sapiens
  siRNA target sequence for AF15Q14 (NM_020380.2,3217-3235).
gaggaatggtctaataata

SEQ ID NO: 377236 - DNA, 19 bp, Homo sapiens
  siRNA target sequence for AF15Q14 (NM_020380.2,3244-3262).
gtagaggtagctgataaca

SEQ ID NO: 377237 - DNA, 19 bp, Homo sapiens
  siRNA target sequence for AF15Q14 (NM_020380.2,3250-3268).
gtagctgataacatggaat

SEQ ID NO: 377238 - DNA, 19 bp, Homo sapiens
  siRNA target sequence for AF15Q14 (NM_020380.2,3261-3279).
catggaattgtctaaatca

SEQ ID NO: 377239 - DNA, 19 bp, Homo sapiens
  siRNA target sequence for AF15Q14 (NM_020380.2,3332-3350).
ctctatcaagcaaaagtca

SEQ ID NO: 377240 - DNA, 19 bp, Homo sapiens
  siRNA target sequence for AF15Q14 (NM_020380.2,3391-3409).
gtattttcagagaatcata

SEQ ID NO: 377241 - DNA, 19 bp, Homo sapiens
  siRNA target sequence for AF15Q14 (NM_020380.2,3421-3439).
gatattacccagagttgta

SEQ ID NO: 377242 - DNA, 19 bp, Homo sapiens
  siRNA target sequence for AF15Q14 (NM_020380.2,3432-3450).
gagttgtatggtggaaata

SEQ ID NO: 377243 - DNA, 19 bp, Homo sapiens
  siRNA target sequence for AF15Q14 (NM_020380.2,3441-3459).
ggtggaaatagataacgaa

SEQ ID NO: 377244 - DNA, 19 bp, Homo sapiens
  siRNA target sequence for AF15Q14 (NM_020380.2,3472-3490).
gataaagaggacttccatt

SEQ ID NO: 377245 - DNA, 19 bp, Homo sapiens
  siRNA target sequence for AF15Q14 (NM_020380.2,3492-3510).
ggcaggggcttctaaaact

SEQ ID NO: 377246 - DNA, 19 bp, Homo sapiens
  siRNA target sequence for AF15Q14 (NM_020380.2,3493-3511).
gcaggggcttctaaaacta

SEQ ID NO: 377247 - DNA, 19 bp, Homo sapiens
  siRNA target sequence for AF15Q14 (NM_020380.2,3497-3515).
gggcttctaaaactatttt

SEQ ID NO: 377248 - DNA, 19 bp, Homo sapiens
  siRNA target sequence for AF15Q14 (NM_020380.2,3499-3517).
gcttctaaaactattttgt

SEQ ID NO: 377249 - DNA, 19 bp, Homo sapiens
  siRNA target sequence for AF15Q14 (NM_020380.2,3616-3634).
gacaaaaccgtattgttca

SEQ ID NO: 377250 - DNA, 19 bp, Homo sapiens
  siRNA target sequence for AF15Q14 (NM_020380.2,3623-3641).
ccgtattgttcacagataa

SEQ ID NO: 377251 - DNA, 19 bp, Homo sapiens
  siRNA target sequence for AF15Q14 (NM_020380.2,3624-3642).
cgtattgttcacagataat

SEQ ID NO: 377252 - DNA, 19 bp, Homo sapiens
  siRNA target sequence for AF15Q14 (NM_020380.2,3660-3678).
caccgattcccatactgtt

SEQ ID NO: 377253 - DNA, 19 bp, Homo sapiens
  siRNA target sequence for AF15Q14 (NM_020380.2,3859-3877).
ctctttgctgctactaata

SEQ ID NO: 377254 - DNA, 19 bp, Homo sapiens
  siRNA target sequence for AF15Q14 (NM_020380.2,3865-3883).
gctgctactaatagaacta

SEQ ID NO: 377255 - DNA, 19 bp, Homo sapiens
  siRNA target sequence for AF15Q14 (NM_020380.2,3869-3887).
ctactaatagaactactaa

SEQ ID NO: 377256 - DNA, 19 bp, Homo sapiens
  siRNA target sequence for AF15Q14 (NM_020380.2,3878-3896).
gaactactaatgaaatcat

SEQ ID NO: 377257 - DNA, 19 bp, Homo sapiens
  siRNA target sequence for AF15Q14 (NM_020380.2,3927-3945).
ggtcatagggaaagttgta

SEQ ID NO: 377258 - DNA, 19 bp, Homo sapiens
  siRNA target sequence for AF15Q14 (NM_020380.2,3943-3961).
gtagaccaggcctgtacat

SEQ ID NO: 377259 - DNA, 19 bp, Homo sapiens
  siRNA target sequence for AF15Q14 (NM_020380.2,3948-3966).
ccaggcctgtacattggaa

SEQ ID NO: 377260 - DNA, 19 bp, Homo sapiens
  siRNA target sequence for AF15Q14 (NM_020380.2,3949-3967).
caggcctgtacattggaaa

SEQ ID NO: 377261 - DNA, 19 bp, Homo sapiens
  siRNA target sequence for AF15Q14 (NM_020380.2,3951-3969).
ggcctgtacattggaaaaa

SEQ ID NO: 377262 - DNA, 19 bp, Homo sapiens
  siRNA target sequence for AF15Q14 (NM_020380.2,3976-3994).
gttgaaagctgtcagttaa

SEQ ID NO: 377263 - DNA, 19 bp, Homo sapiens
  siRNA target sequence for AF15Q14 (NM_020380.2,3986-4004).
gtcagttaaataatagaga

SEQ ID NO: 377264 - DNA, 19 bp, Homo sapiens
  siRNA target sequence for AF15Q14 (NM_020380.2,4017-4035).
ggactttacaagtagtcat

SEQ ID NO: 377265 - DNA, 19 bp, Homo sapiens
  siRNA target sequence for AF15Q14 (NM_020380.2,4051-4069).
ggatccagtgataattatt

SEQ ID NO: 377266 - DNA, 19 bp, Homo sapiens
  siRNA target sequence for AF15Q14 (NM_020380.2,4091-4109).
cctgtactgataatttgga

SEQ ID NO: 377267 - DNA, 19 bp, Homo sapiens
  siRNA target sequence for AF15Q14 (NM_020380.2,4111-4129).
ggtagtgccatgctcttat

SEQ ID NO: 377268 - DNA, 19 bp, Homo sapiens
  siRNA target sequence for AF15Q14 (NM_020380.2,4115-4133).
gtgccatgctcttatgtga

SEQ ID NO: 377269 - DNA, 19 bp, Homo sapiens
  siRNA target sequence for AF15Q14 (NM_020380.2,4117-4135).
gccatgctcttatgtgata

SEQ ID NO: 377270 - DNA, 19 bp, Homo sapiens
  siRNA target sequence for AF15Q14 (NM_020380.2,4118-4136).
ccatgctcttatgtgataa

SEQ ID NO: 377271 - DNA, 19 bp, Homo sapiens
  siRNA target sequence for AF15Q14 (NM_020380.2,4119-4137).
catgctcttatgtgataaa

SEQ ID NO: 377272 - DNA, 19 bp, Homo sapiens
  siRNA target sequence for AF15Q14 (NM_020380.2,4160-4178).
gcccagtgcaaaatgatct

SEQ ID NO: 377273 - DNA, 19 bp, Homo sapiens
  siRNA target sequence for AF15Q14 (NM_020380.2,4243-4261).
ccttgtcctttgttagaga

SEQ ID NO: 377274 - DNA, 19 bp, Homo sapiens
  siRNA target sequence for AF15Q14 (NM_020380.2,4244-4262).
cttgtcctttgttagagaa

SEQ ID NO: 377275 - DNA, 19 bp, Homo sapiens
  siRNA target sequence for AF15Q14 (NM_020380.2,4296-4314).
gttagactgtgttataaca

SEQ ID NO: 377276 - DNA, 19 bp, Homo sapiens
  siRNA target sequence for AF15Q14 (NM_020380.2,4354-4372).
ctattggctaatcaaactt

SEQ ID NO: 377277 - DNA, 19 bp, Homo sapiens
  siRNA target sequence for AF15Q14 (NM_020380.2,4359-4377).
ggctaatcaaactttagta

SEQ ID NO: 377278 - DNA, 19 bp, Homo sapiens
  siRNA target sequence for AF15Q14 (NM_020380.2,4398-4416).
gatgactaaacttaattca

SEQ ID NO: 377279 - DNA, 19 bp, Homo sapiens
  siRNA target sequence for AF15Q14 (NM_020380.2,4415-4433).
caaagcgagtatcttttaa

SEQ ID NO: 377280 - DNA, 19 bp, Homo sapiens
  siRNA target sequence for AF15Q14 (NM_020380.2,4439-4457).
caaaggatcaaatgaaagt

SEQ ID NO: 377281 - DNA, 19 bp, Homo sapiens
  siRNA target sequence for AF15Q14 (NM_020380.2,4533-4551).
gagtagtatcaataaagaa

SEQ ID NO: 377282 - DNA, 19 bp, Homo sapiens
  siRNA target sequence for AF15Q14 (NM_020380.2,4535-4553).
gtagtatcaataaagaaga

SEQ ID NO: 377283 - DNA, 19 bp, Homo sapiens
  siRNA target sequence for AF15Q14 (NM_020380.2,4538-4556).
gtatcaataaagaagaagt

SEQ ID NO: 377284 - DNA, 19 bp, Homo sapiens
  siRNA target sequence for AF15Q14 (NM_020380.2,4604-4622).
cctctgcacccatatgtga

SEQ ID NO: 377285 - DNA, 19 bp, Homo sapiens
  siRNA target sequence for AF15Q14 (NM_020380.2,4605-4623).
ctctgcacccatatgtgaa

SEQ ID NO: 377286 - DNA, 19 bp, Homo sapiens
  siRNA target sequence for AF15Q14 (NM_020380.2,4607-4625).
ctgcacccatatgtgaaaa

SEQ ID NO: 377287 - DNA, 19 bp, Homo sapiens
  siRNA target sequence for AF15Q14 (NM_020380.2,4609-4627).
gcacccatatgtgaaaaca

SEQ ID NO: 377288 - DNA, 19 bp, Homo sapiens
  siRNA target sequence for AF15Q14 (NM_020380.2,4619-4637).
gtgaaaacaagcccaaaat

SEQ ID NO: 377289 - DNA, 19 bp, Homo sapiens
  siRNA target sequence for AF15Q14 (NM_020380.2,4626-4644).
caagcccaaaatactcaat

SEQ ID NO: 377290 - DNA, 19 bp, Homo sapiens
  siRNA target sequence for AF15Q14 (NM_020380.2,4629-4647).
gcccaaaatactcaatagt

SEQ ID NO: 377291 - DNA, 19 bp, Homo sapiens
  siRNA target sequence for AF15Q14 (NM_020380.2,4631-4649).
ccaaaatactcaatagtga

SEQ ID NO: 377292 - DNA, 19 bp, Homo sapiens
  siRNA target sequence for AF15Q14 (NM_020380.2,4656-4674).
gtttgctgcagcctgtaaa

SEQ ID NO: 377293 - DNA, 19 bp, Homo sapiens
  siRNA target sequence for AF15Q14 (NM_020380.2,4696-4714).
caaacaactaactataata

SEQ ID NO: 377294 - DNA, 19 bp, Homo sapiens
  siRNA target sequence for AF15Q14 (NM_020380.2,4733-4751).
gtaactcagacgtaactaa

SEQ ID NO: 377295 - DNA, 19 bp, Homo sapiens
  siRNA target sequence for AF15Q14 (NM_020380.2,4737-4755).
ctcagacgtaactaagcaa

SEQ ID NO: 377296 - DNA, 19 bp, Homo sapiens
  siRNA target sequence for AF15Q14 (NM_020380.2,4743-4761).
cgtaactaagcaagtcatt

SEQ ID NO: 377297 - DNA, 19 bp, Homo sapiens
  siRNA target sequence for AF15Q14 (NM_020380.2,4758-4776).
cattcaaactcatgtcaat

SEQ ID NO: 377298 - DNA, 19 bp, Homo sapiens
  siRNA target sequence for AF15Q14 (NM_020380.2,4817-4835).
catgttttcatagtatcaa

SEQ ID NO: 377299 - DNA, 19 bp, Homo sapiens
  siRNA target sequence for AF15Q14 (NM_020380.2,4880-4898).
cctttcaaactgttcatct

SEQ ID NO: 377300 - DNA, 19 bp, Homo sapiens
  siRNA target sequence for AF15Q14 (NM_020380.2,4881-4899).
ctttcaaactgttcatcta

SEQ ID NO: 377301 - DNA, 19 bp, Homo sapiens
  siRNA target sequence for AF15Q14 (NM_020380.2,4914-4932).
gcaattacttgaattagga

SEQ ID NO: 377302 - DNA, 19 bp, Homo sapiens
  siRNA target sequence for AF15Q14 (NM_020380.2,4931-4949).
gaaataaggcacacaatga

SEQ ID NO: 377303 - DNA, 19 bp, Homo sapiens
  siRNA target sequence for AF15Q14 (NM_020380.2,4940-4958).
cacacaatgatatgcatat

SEQ ID NO: 377304 - DNA, 19 bp, Homo sapiens
  siRNA target sequence for AF15Q14 (NM_020380.2,5061-5079).
ctctctaccgccaaagaca

SEQ ID NO: 377305 - DNA, 19 bp, Homo sapiens
  siRNA target sequence for AF15Q14 (NM_020380.2,5068-5086).
ccgccaaagacagttttta

SEQ ID NO: 377306 - DNA, 19 bp, Homo sapiens
  siRNA target sequence for AF15Q14 (NM_020380.2,5069-5087).
cgccaaagacagtttttaa

SEQ ID NO: 377307 - DNA, 19 bp, Homo sapiens
  siRNA target sequence for AF15Q14 (NM_020380.2,5089-5107).
gataaagtaaggagatgtt

SEQ ID NO: 377308 - DNA, 19 bp, Homo sapiens
  siRNA target sequence for AF15Q14 (NM_020380.2,5129-5147).
gattgcccaacaagagaaa

SEQ ID NO: 377309 - DNA, 19 bp, Homo sapiens
  siRNA target sequence for AF15Q14 (NM_020380.2,5150-5168).
gtagtgtcactggtattga

SEQ ID NO: 377310 - DNA, 19 bp, Homo sapiens
  siRNA target sequence for AF15Q14 (NM_020380.2,5153-5171).
gtgtcactggtattgatga

SEQ ID NO: 377311 - DNA, 19 bp, Homo sapiens
  siRNA target sequence for AF15Q14 (NM_020380.2,5185-5203).
ccagcagacacaactgata

SEQ ID NO: 377312 - DNA, 19 bp, Homo sapiens
  siRNA target sequence for AF15Q14 (NM_020380.2,5188-5206).
gcagacacaactgatataa

SEQ ID NO: 377313 - DNA, 19 bp, Homo sapiens
  siRNA target sequence for AF15Q14 (NM_020380.2,5224-5242).
ccggtctctagcaaagatt

SEQ ID NO: 377314 - DNA, 19 bp, Homo sapiens
  siRNA target sequence for AF15Q14 (NM_020380.2,5226-5244).
ggtctctagcaaagattca

SEQ ID NO: 377315 - DNA, 19 bp, Homo sapiens
  siRNA target sequence for AF15Q14 (NM_020380.2,5260-5278).
gcaggtaaactgaacctaa

SEQ ID NO: 377316 - DNA, 19 bp, Homo sapiens
  siRNA target sequence for AF15Q14 (NM_020380.2,5312-5330).
ctgtatatcctgatgagat

SEQ ID NO: 377317 - DNA, 19 bp, Homo sapiens
  siRNA target sequence for AF15Q14 (NM_020380.2,5320-5338).
cctgatgagatcaattctt

SEQ ID NO: 377318 - DNA, 19 bp, Homo sapiens
  siRNA target sequence for C6orf210 (NM_020381.2,297-315).
gttgcacttgccacgttat

SEQ ID NO: 377319 - DNA, 19 bp, Homo sapiens
  siRNA target sequence for C6orf210 (NM_020381.2,300-318).
gcacttgccacgttatctt

SEQ ID NO: 377320 - DNA, 19 bp, Homo sapiens
  siRNA target sequence for C6orf210 (NM_020381.2,566-584).
cagccagggggcttgtaca

SEQ ID NO: 377321 - DNA, 19 bp, Homo sapiens
  siRNA target sequence for C6orf210 (NM_020381.2,569-587).
ccagggggcttgtacatga

SEQ ID NO: 377322 - DNA, 19 bp, Homo sapiens
  siRNA target sequence for C6orf210 (NM_020381.2,580-598).
gtacatgacagctggaata

SEQ ID NO: 377323 - DNA, 19 bp, Homo sapiens
  siRNA target sequence for C6orf210 (NM_020381.2,621-639).
ggtgctccttatctctaaa

SEQ ID NO: 377324 - DNA, 19 bp, Homo sapiens
  siRNA target sequence for C6orf210 (NM_020381.2,649-667).
cccagcagcgtgaacactt

SEQ ID NO: 377325 - DNA, 19 bp, Homo sapiens
  siRNA target sequence for C6orf210 (NM_020381.2,654-672).
cagcgtgaacacttcatgt

SEQ ID NO: 377326 - DNA, 19 bp, Homo sapiens
  siRNA target sequence for C6orf210 (NM_020381.2,757-775).
gtacatcgtgggatagtaa

SEQ ID NO: 377327 - DNA, 19 bp, Homo sapiens
  siRNA target sequence for C6orf210 (NM_020381.2,763-781).
cgtgggatagtaaatttaa

SEQ ID NO: 377328 - DNA, 19 bp, Homo sapiens
  siRNA target sequence for C6orf210 (NM_020381.2,902-920).
ccaaggttgtggaactttt

SEQ ID NO: 377329 - DNA, 19 bp, Homo sapiens
  siRNA target sequence for C6orf210 (NM_020381.2,903-921).
caaggttgtggaactttta

SEQ ID NO: 377330 - DNA, 19 bp, Homo sapiens
  siRNA target sequence for C6orf210 (NM_020381.2,906-924).
ggttgtggaacttttagca

SEQ ID NO: 377331 - DNA, 19 bp, Homo sapiens
  siRNA target sequence for C6orf210 (NM_020381.2,907-925).
gttgtggaacttttagcaa

SEQ ID NO: 377332 - DNA, 19 bp, Homo sapiens
  siRNA target sequence for C6orf210 (NM_020381.2,946-964).
caaggagtatatcatgaaa

SEQ ID NO: 377333 - DNA, 19 bp, Homo sapiens
  siRNA target sequence for C6orf210 (NM_020381.2,990-1008).
cacagatgatattggaata

SEQ ID NO: 377334 - DNA, 19 bp, Homo sapiens
  siRNA target sequence for C6orf210 (NM_020381.2,994-1012).
gatgatattggaatatcga

SEQ ID NO: 377335 - DNA, 19 bp, Homo sapiens
  siRNA target sequence for C6orf210 (NM_020381.2,1035-1053).
ctcccatggtgccttacta

SEQ ID NO: 377336 - DNA, 19 bp, Homo sapiens
  siRNA target sequence for C6orf210 (NM_020381.2,1070-1088).
ctgcaatggaattagcaaa

SEQ ID NO: 377337 - DNA, 19 bp, Homo sapiens
  siRNA target sequence for C6orf210 (NM_020381.2,1132-1150).
cacatggccatgagtcata

SEQ ID NO: 377338 - DNA, 19 bp, Homo sapiens
  siRNA target sequence for C6orf210 (NM_020381.2,1138-1156).
gccatgagtcataagataa

SEQ ID NO: 377339 - DNA, 19 bp, Homo sapiens
  siRNA target sequence for C6orf210 (NM_020381.2,1139-1157).
ccatgagtcataagataaa

SEQ ID NO: 377340 - DNA, 19 bp, Homo sapiens
  siRNA target sequence for C6orf210 (NM_020381.2,1140-1158).
catgagtcataagataaat

SEQ ID NO: 377341 - DNA, 19 bp, Homo sapiens
  siRNA target sequence for C6orf210 (NM_020381.2,1197-1215).
ctccatgacttttaatcta

SEQ ID NO: 377342 - DNA, 19 bp, Homo sapiens
  siRNA target sequence for C6orf210 (NM_020381.2,1223-1241).
ctcctgtagtcttacatca

SEQ ID NO: 377343 - DNA, 19 bp, Homo sapiens
  siRNA target sequence for C6orf210 (NM_020381.2,1258-1276).
gatttgtggattaaacaga

SEQ ID NO: 377344 - DNA, 19 bp, Homo sapiens
  siRNA target sequence for C6orf210 (NM_020381.2,1297-1315).
ggaagattggactatgcta

SEQ ID NO: 377345 - DNA, 19 bp, Homo sapiens
  siRNA target sequence for C6orf210 (NM_020381.2,1298-1316).
gaagattggactatgctaa

SEQ ID NO: 377346 - DNA, 19 bp, Homo sapiens
  siRNA target sequence for C6orf210 (NM_020381.2,1301-1319).
gattggactatgctaagtt

SEQ ID NO: 377347 - DNA, 19 bp, Homo sapiens
  siRNA target sequence for C6orf210 (NM_020381.2,1312-1330).
gctaagttgcgagaaagaa

SEQ ID NO: 377348 - DNA, 19 bp, Homo sapiens
  siRNA target sequence for C6orf210 (NM_020381.2,1317-1335).
gttgcgagaaagaatcaaa

SEQ ID NO: 377349 - DNA, 19 bp, Homo sapiens
  siRNA target sequence for HRASLS (NM_020386.2,418-436).
gattgcttcagtttgaact

SEQ ID NO: 377350 - DNA, 19 bp, Homo sapiens
  siRNA target sequence for HRASLS (NM_020386.2,458-476).
gggacttgatcgaagtgtt

SEQ ID NO: 377351 - DNA, 19 bp, Homo sapiens
  siRNA target sequence for HRASLS (NM_020386.2,507-525).
cttgggtgatggttacgtt

SEQ ID NO: 377352 - DNA, 19 bp, Homo sapiens
  siRNA target sequence for HRASLS (NM_020386.2,512-530).
gtgatggttacgttatcaa

SEQ ID NO: 377353 - DNA, 19 bp, Homo sapiens
  siRNA target sequence for HRASLS (NM_020386.2,514-532).
gatggttacgttatcaaca

SEQ ID NO: 377354 - DNA, 19 bp, Homo sapiens
  siRNA target sequence for HRASLS (NM_020386.2,528-546).
caacatagcacctgtagat

SEQ ID NO: 377355 - DNA, 19 bp, Homo sapiens
  siRNA target sequence for HRASLS (NM_020386.2,549-567).
cattcctgcgtcctttaca

SEQ ID NO: 377356 - DNA, 19 bp, Homo sapiens
  siRNA target sequence for HRASLS (NM_020386.2,566-584).
caagcgccaagtctgtatt

SEQ ID NO: 377357 - DNA, 19 bp, Homo sapiens
  siRNA target sequence for HRASLS (NM_020386.2,628-646).
gtgggaaatgacacataca

SEQ ID NO: 377358 - DNA, 19 bp, Homo sapiens
  siRNA target sequence for HRASLS (NM_020386.2,699-717).
cataaagcggtcagagttt

SEQ ID NO: 377359 - DNA, 19 bp, Homo sapiens
  siRNA target sequence for HRASLS (NM_020386.2,705-723).
gcggtcagagtttgtaatt

SEQ ID NO: 377360 - DNA, 19 bp, Homo sapiens
  siRNA target sequence for HRASLS (NM_020386.2,708-726).
gtcagagtttgtaattgga

SEQ ID NO: 377361 - DNA, 19 bp, Homo sapiens
  siRNA target sequence for HRASLS (NM_020386.2,729-747).
ggaggtggcctataactta

SEQ ID NO: 377362 - DNA, 19 bp, Homo sapiens
  siRNA target sequence for HRASLS (NM_020386.2,737-755).
cctataacttacttgtcaa

SEQ ID NO: 377363 - DNA, 19 bp, Homo sapiens
  siRNA target sequence for HRASLS (NM_020386.2,751-769).
gtcaacaactgtgaacatt

SEQ ID NO: 377364 - DNA, 19 bp, Homo sapiens
  siRNA target sequence for HRASLS (NM_020386.2,810-828).
ggccaaccgagcgataagt

SEQ ID NO: 377365 - DNA, 19 bp, Homo sapiens
  siRNA target sequence for HRASLS (NM_020386.2,811-829).
gccaaccgagcgataagta

SEQ ID NO: 377366 - DNA, 19 bp, Homo sapiens
  siRNA target sequence for HRASLS (NM_020386.2,821-839).
cgataagtaccgttgagtt

SEQ ID NO: 377367 - DNA, 19 bp, Homo sapiens
  siRNA target sequence for HRASLS (NM_020386.2,850-868).
gctgttggtgtcttctcat

SEQ ID NO: 377368 - DNA, 19 bp, Homo sapiens
  siRNA target sequence for HRASLS (NM_020386.2,873-891).
gggcttgtttccaaaagga

SEQ ID NO: 377369 - DNA, 19 bp, Homo sapiens
  siRNA target sequence for HRASLS (NM_020386.2,889-907).
ggacaaagagcaaaatact

SEQ ID NO: 377370 - DNA, 19 bp, Homo sapiens
  siRNA target sequence for HRASLS (NM_020386.2,890-908).
gacaaagagcaaaatacta

SEQ ID NO: 377371 - DNA, 19 bp, Homo sapiens
  siRNA target sequence for HRASLS (NM_020386.2,892-910).
caaagagcaaaatactatt

SEQ ID NO: 377372 - DNA, 19 bp, Homo sapiens
  siRNA target sequence for GAGED2 (NM_020411.1,193-211).
ccctgaggtctggattctt

SEQ ID NO: 377373 - DNA, 19 bp, Homo sapiens
  siRNA target sequence for GAGED2 (NM_020411.1,227-245).
cacggcggacacacacaaa

SEQ ID NO: 377374 - DNA, 19 bp, Homo sapiens
  siRNA target sequence for GAGED2 (NM_020411.1,414-432).
gtcaaacaccggggataaa

SEQ ID NO: 377375 - DNA, 19 bp, Homo sapiens
  siRNA target sequence for GAGED2 (NM_020411.1,423-441).
cggggataaatctggattt

SEQ ID NO: 377376 - DNA, 19 bp, Homo sapiens
  siRNA target sequence for GAGED2 (NM_020411.1,448-466).
cggcgtcaaggtgaagata

SEQ ID NO: 377377 - DNA, 19 bp, Homo sapiens
  siRNA target sequence for ADCK1 (NM_020421.2,104-122).
cctctggcatctacttcta

SEQ ID NO: 377378 - DNA, 19 bp, Homo sapiens
  siRNA target sequence for ADCK1 (NM_020421.2,109-127).
ggcatctacttctacagta

SEQ ID NO: 377379 - DNA, 19 bp, Homo sapiens
  siRNA target sequence for ADCK1 (NM_020421.2,185-203).
cgacggctgtcatcagtta

SEQ ID NO: 377380 - DNA, 19 bp, Homo sapiens
  siRNA target sequence for ADCK1 (NM_020421.2,444-462).
ccaggtcatccgagaagat

SEQ ID NO: 377381 - DNA, 19 bp, Homo sapiens
  siRNA target sequence for ADCK1 (NM_020421.2,664-682).
ccagagtttgagtttatgt

SEQ ID NO: 377382 - DNA, 19 bp, Homo sapiens
  siRNA target sequence for ADCK1 (NM_020421.2,762-780).
ccagatgctcaggcatttt

SEQ ID NO: 377383 - DNA, 19 bp, Homo sapiens
  siRNA target sequence for ADCK1 (NM_020421.2,919-937).
cacctgggcaagatgtata

SEQ ID NO: 377384 - DNA, 19 bp, Homo sapiens
  siRNA target sequence for ADCK1 (NM_020421.2,921-939).
cctgggcaagatgtatagt

SEQ ID NO: 377385 - DNA, 19 bp, Homo sapiens
  siRNA target sequence for ADCK1 (NM_020421.2,1016-1034).
cgggaaaggcggagattgt

SEQ ID NO: 377386 - DNA, 19 bp, Homo sapiens
  siRNA target sequence for ADCK1 (NM_020421.2,1057-1075).
cagatgctcacggaagaat

SEQ ID NO: 377387 - DNA, 19 bp, Homo sapiens
  siRNA target sequence for ADCK1 (NM_020421.2,1069-1087).
gaagaattccgcctgaatt

SEQ ID NO: 377388 - DNA, 19 bp, Homo sapiens
  siRNA target sequence for ADCK1 (NM_020421.2,1164-1182).
ggatctctaccccttgttt

SEQ ID NO: 377389 - DNA, 19 bp, Homo sapiens
  siRNA target sequence for ADCK1 (NM_020421.2,1330-1348).
cagatgctgctcatcttga

SEQ ID NO: 377390 - DNA, 19 bp, Homo sapiens
  siRNA target sequence for ADCK1 (NM_020421.2,1442-1460).
cgctagctgagcacaagaa

SEQ ID NO: 377391 - DNA, 19 bp, Homo sapiens
  siRNA target sequence for ADCK1 (NM_020421.2,1453-1471).
cacaagaagaagaatacct

SEQ ID NO: 377392 - DNA, 19 bp, Homo sapiens
  siRNA target sequence for ADCK1 (NM_020421.2,1579-1597).
cgggtcttggccctaatat

SEQ ID NO: 377393 - DNA, 19 bp, Homo sapiens
  siRNA target sequence for ADCK1 (NM_020421.2,1582-1600).
gtcttggccctaatatgct

SEQ ID NO: 377394 - DNA, 19 bp, Homo sapiens
  siRNA target sequence for LOC57146 (NM_020422.3,283-301).
gaggagccccagagtatct

SEQ ID NO: 377395 - DNA, 19 bp, Homo sapiens
  siRNA target sequence for LOC57146 (NM_020422.3,346-364).
gactccttccagaataact

SEQ ID NO: 377396 - DNA, 19 bp, Homo sapiens
  siRNA target sequence for LOC57146 (NM_020422.3,350-368).
ccttccagaataactcaaa

SEQ ID NO: 377397 - DNA, 19 bp, Homo sapiens
  siRNA target sequence for LOC57146 (NM_020422.3,370-388).
gtggtggcctttatgaagt

SEQ ID NO: 377398 - DNA, 19 bp, Homo sapiens
  siRNA target sequence for LOC57146 (NM_020422.3,389-407).
ctccagtgggtcagtactt

SEQ ID NO: 377399 - DNA, 19 bp, Homo sapiens
  siRNA target sequence for LOC57146 (NM_020422.3,458-476).
cggccgttcctgttggatt

SEQ ID NO: 377400 - DNA, 19 bp, Homo sapiens
  siRNA target sequence for LOC57146 (NM_020422.3,514-532).
ctgctgggggtcataatat

SEQ ID NO: 377401 - DNA, 19 bp, Homo sapiens
  siRNA target sequence for LOC57146 (NM_020422.3,519-537).
gggggtcataatattggaa

SEQ ID NO: 377402 - DNA, 19 bp, Homo sapiens
  siRNA target sequence for LOC57146 (NM_020422.3,587-605).
gtttgggcttcgtatcact

SEQ ID NO: 377403 - DNA, 19 bp, Homo sapiens
  siRNA target sequence for LOC57146 (NM_020422.3,608-626).
ccatgtcggggatgatgat

SEQ ID NO: 377404 - DNA, 19 bp, Homo sapiens
  siRNA target sequence for LOC57146 (NM_020422.3,617-635).
ggatgatgatagcatctta

SEQ ID NO: 377405 - DNA, 19 bp, Homo sapiens
  siRNA target sequence for LOC57146 (NM_020422.3,618-636).
gatgatgatagcatcttat

SEQ ID NO: 377406 - DNA, 19 bp, Homo sapiens
  siRNA target sequence for LOC57146 (NM_020422.3,652-670).
ctcatcagctgctggtttt

SEQ ID NO: 377407 - DNA, 19 bp, Homo sapiens
  siRNA target sequence for LOC57149 (NM_020424.2,408-426).
cggcaacacgacaagaagt

SEQ ID NO: 377408 - DNA, 19 bp, Homo sapiens
  siRNA target sequence for LOC57149 (NM_020424.2,537-555).
cgctgttccggaaaaacaa

SEQ ID NO: 377409 - DNA, 19 bp, Homo sapiens
  siRNA target sequence for LOC57149 (NM_020424.2,562-580).
cacggacacagacctaatt

SEQ ID NO: 377410 - DNA, 19 bp, Homo sapiens
  siRNA target sequence for LOC57149 (NM_020424.2,564-582).
cggacacagacctaattaa

SEQ ID NO: 377411 - DNA, 19 bp, Homo sapiens
  siRNA target sequence for LOC57149 (NM_020424.2,565-583).
ggacacagacctaattaaa

SEQ ID NO: 377412 - DNA, 19 bp, Homo sapiens
  siRNA target sequence for LOC57149 (NM_020424.2,600-618).
gcacagccaggattgaaat

SEQ ID NO: 377413 - DNA, 19 bp, Homo sapiens
  siRNA target sequence for LOC57149 (NM_020424.2,639-657).
cttacccaaggccaattca

SEQ ID NO: 377414 - DNA, 19 bp, Homo sapiens
  siRNA target sequence for LOC57149 (NM_020424.2,696-714).
gacttcgaagccaagagaa

SEQ ID NO: 377415 - DNA, 19 bp, Homo sapiens
  siRNA target sequence for C6orf162 (NM_020425.3,116-134).
ggtgcgcacaacaacctta

SEQ ID NO: 377416 - DNA, 19 bp, Homo sapiens
  siRNA target sequence for C6orf162 (NM_020425.3,117-135).
gtgcgcacaacaaccttat

SEQ ID NO: 377417 - DNA, 19 bp, Homo sapiens
  siRNA target sequence for C6orf162 (NM_020425.3,153-171).
gagctcttcattaaaccta

SEQ ID NO: 377418 - DNA, 19 bp, Homo sapiens
  siRNA target sequence for C6orf162 (NM_020425.3,187-205).
ctttcggattggtaactct

SEQ ID NO: 377419 - DNA, 19 bp, Homo sapiens
  siRNA target sequence for C6orf162 (NM_020425.3,191-209).
cggattggtaactctttca

SEQ ID NO: 377420 - DNA, 19 bp, Homo sapiens
  siRNA target sequence for C6orf162 (NM_020425.3,215-233).
cgtggcatatattggttat

SEQ ID NO: 377421 - DNA, 19 bp, Homo sapiens
  siRNA target sequence for C6orf162 (NM_020425.3,237-255).
catgcaatacaagagaata

SEQ ID NO: 377422 - DNA, 19 bp, Homo sapiens
  siRNA target sequence for C6orf162 (NM_020425.3,260-278).
ggacctctatgaagctatt

SEQ ID NO: 377423 - DNA, 19 bp, Homo sapiens
  siRNA target sequence for C6orf162 (NM_020425.3,285-303).
gaggggcacagttatatga

SEQ ID NO: 377424 - DNA, 19 bp, Homo sapiens
  siRNA target sequence for C6orf162 (NM_020425.3,302-320).
gaggcggaaaacatccaaa

SEQ ID NO: 377425 - DNA, 19 bp, Homo sapiens
  siRNA target sequence for CTL2 (NM_020428.2,117-135).
cggaacgccacagaagtat

SEQ ID NO: 377426 - DNA, 19 bp, Homo sapiens
  siRNA target sequence for CTL2 (NM_020428.2,119-137).
gaacgccacagaagtatga

SEQ ID NO: 377427 - DNA, 19 bp, Homo sapiens
  siRNA target sequence for CTL2 (NM_020428.2,147-165).
caaaggacccatttacaat

SEQ ID NO: 377428 - DNA, 19 bp, Homo sapiens
  siRNA target sequence for CTL2 (NM_020428.2,167-185).
ggggctgcacggatatcat

SEQ ID NO: 377429 - DNA, 19 bp, Homo sapiens
  siRNA target sequence for CTL2 (NM_020428.2,168-186).
gggctgcacggatatcata

SEQ ID NO: 377430 - DNA, 19 bp, Homo sapiens
  siRNA target sequence for CTL2 (NM_020428.2,169-187).
ggctgcacggatatcatat

SEQ ID NO: 377431 - DNA, 19 bp, Homo sapiens
  siRNA target sequence for CTL2 (NM_020428.2,222-240).
cgtggctgtaggcatcata

SEQ ID NO: 377432 - DNA, 19 bp, Homo sapiens
  siRNA target sequence for CTL2 (NM_020428.2,330-348).
caaaccctatctgttttat

SEQ ID NO: 377433 - DNA, 19 bp, Homo sapiens
  siRNA target sequence for CTL2 (NM_020428.2,409-427).
cagatctgcgtggaaaaat

SEQ ID NO: 377434 - DNA, 19 bp, Homo sapiens
  siRNA target sequence for CTL2 (NM_020428.2,464-482).
gctcccgggactttgagta

SEQ ID NO: 377435 - DNA, 19 bp, Homo sapiens
  siRNA target sequence for CTL2 (NM_020428.2,467-485).
cccgggactttgagtacta

SEQ ID NO: 377436 - DNA, 19 bp, Homo sapiens
  siRNA target sequence for CTL2 (NM_020428.2,468-486).
ccgggactttgagtactat

SEQ ID NO: 377437 - DNA, 19 bp, Homo sapiens
  siRNA target sequence for CTL2 (NM_020428.2,469-487).
cgggactttgagtactata

SEQ ID NO: 377438 - DNA, 19 bp, Homo sapiens
  siRNA target sequence for CTL2 (NM_020428.2,470-488).
gggactttgagtactataa

SEQ ID NO: 377439 - DNA, 19 bp, Homo sapiens
  siRNA target sequence for CTL2 (NM_020428.2,497-515).
gtgttcctggcttcaagaa

SEQ ID NO: 377440 - DNA, 19 bp, Homo sapiens
  siRNA target sequence for CTL2 (NM_020428.2,499-517).
gttcctggcttcaagaaca

SEQ ID NO: 377441 - DNA, 19 bp, Homo sapiens
  siRNA target sequence for CTL2 (NM_020428.2,628-646).
ctgatggtgggcaatgaga

SEQ ID NO: 377442 - DNA, 19 bp, Homo sapiens
  siRNA target sequence for CTL2 (NM_020428.2,744-762).
catgcgcatatttgaagat

SEQ ID NO: 377443 - DNA, 19 bp, Homo sapiens
  siRNA target sequence for CTL2 (NM_020428.2,812-830).
cgatgagcctcctgttcat

SEQ ID NO: 377444 - DNA, 19 bp, Homo sapiens
  siRNA target sequence for CTL2 (NM_020428.2,841-859).
cgcttcctggctggtatta

SEQ ID NO: 377445 - DNA, 19 bp, Homo sapiens
  siRNA target sequence for CTL2 (NM_020428.2,862-880).
gtctgggtgatgatcatca

SEQ ID NO: 377446 - DNA, 19 bp, Homo sapiens
  siRNA target sequence for CTL2 (NM_020428.2,892-910).
gtgctgggctacggaatat

SEQ ID NO: 377447 - DNA, 19 bp, Homo sapiens
  siRNA target sequence for CTL2 (NM_020428.2,898-916).
ggctacggaatatttcact

SEQ ID NO: 377448 - DNA, 19 bp, Homo sapiens
  siRNA target sequence for CTL2 (NM_020428.2,970-988).
gtggacctcggctttcaga

SEQ ID NO: 377449 - DNA, 19 bp, Homo sapiens
  siRNA target sequence for CTL2 (NM_020428.2,1038-1056).
gatcattctgagtatcctt

SEQ ID NO: 377450 - DNA, 19 bp, Homo sapiens
  siRNA target sequence for CTL2 (NM_020428.2,1087-1105).
ctccggaagagaattctca

SEQ ID NO: 377451 - DNA, 19 bp, Homo sapiens
  siRNA target sequence for CTL2 (NM_020428.2,1107-1125).
cgcgattgcactcatcaaa

SEQ ID NO: 377452 - DNA, 19 bp, Homo sapiens
  siRNA target sequence for CTL2 (NM_020428.2,1109-1127).
cgattgcactcatcaaaga

SEQ ID NO: 377453 - DNA, 19 bp, Homo sapiens
  siRNA target sequence for CTL2 (NM_020428.2,1110-1128).
gattgcactcatcaaagaa

SEQ ID NO: 377454 - DNA, 19 bp, Homo sapiens
  siRNA target sequence for CTL2 (NM_020428.2,1244-1262).
ccaacgaagcggtctataa

SEQ ID NO: 377455 - DNA, 19 bp, Homo sapiens
  siRNA target sequence for CTL2 (NM_020428.2,1285-1303).
ccatttactgcgaaaacct

SEQ ID NO: 377456 - DNA, 19 bp, Homo sapiens
  siRNA target sequence for CTL2 (NM_020428.2,1626-1644).
gcagatcatccgtgtgata

SEQ ID NO: 377457 - DNA, 19 bp, Homo sapiens
  siRNA target sequence for CTL2 (NM_020428.2,1699-1717).
ctcatgacctgtctcaaat

SEQ ID NO: 377458 - DNA, 19 bp, Homo sapiens
  siRNA target sequence for CTL2 (NM_020428.2,1740-1758).
gttcatcaaattccttaat

SEQ ID NO: 377459 - DNA, 19 bp, Homo sapiens
  siRNA target sequence for CTL2 (NM_020428.2,1761-1779).
gaatgcctacatcatgatt

SEQ ID NO: 377460 - DNA, 19 bp, Homo sapiens
  siRNA target sequence for CTL2 (NM_020428.2,1780-1798).
gccatctacggcaccaatt

SEQ ID NO: 377461 - DNA, 19 bp, Homo sapiens
  siRNA target sequence for CTL2 (NM_020428.2,1781-1799).
ccatctacggcaccaattt

SEQ ID NO: 377462 - DNA, 19 bp, Homo sapiens
  siRNA target sequence for CTL2 (NM_020428.2,2123-2141).
cggccgagaggccttactt

SEQ ID NO: 377463 - DNA, 19 bp, Homo sapiens
  siRNA target sequence for DOLPP1 (NM_020438.2,81-99).
ccctcacccacgtcgaata

SEQ ID NO: 377464 - DNA, 19 bp, Homo sapiens
  siRNA target sequence for DOLPP1 (NM_020438.2,82-100).
cctcacccacgtcgaatat

SEQ ID NO: 377465 - DNA, 19 bp, Homo sapiens
  siRNA target sequence for DOLPP1 (NM_020438.2,85-103).
cacccacgtcgaatatcct

SEQ ID NO: 377466 - DNA, 19 bp, Homo sapiens
  siRNA target sequence for DOLPP1 (NM_020438.2,139-157).
gagcctcagccctgtattt

SEQ ID NO: 377467 - DNA, 19 bp, Homo sapiens
  siRNA target sequence for DOLPP1 (NM_020438.2,143-161).
ctcagccctgtatttgtca

SEQ ID NO: 377468 - DNA, 19 bp, Homo sapiens
  siRNA target sequence for DOLPP1 (NM_020438.2,168-186).
gtttcgtgaccctcatcat

SEQ ID NO: 377469 - DNA, 19 bp, Homo sapiens
  siRNA target sequence for DOLPP1 (NM_020438.2,172-190).
cgtgaccctcatcatattt

SEQ ID NO: 377470 - DNA, 19 bp, Homo sapiens
  siRNA target sequence for DOLPP1 (NM_020438.2,243-261).
gggtcaactggctgatcaa

SEQ ID NO: 377471 - DNA, 19 bp, Homo sapiens
  siRNA target sequence for DOLPP1 (NM_020438.2,333-351).
ccagccattcccagtttat

SEQ ID NO: 377472 - DNA, 19 bp, Homo sapiens
  siRNA target sequence for DOLPP1 (NM_020438.2,344-362).
cagtttatgtggttcttct

SEQ ID NO: 377473 - DNA, 19 bp, Homo sapiens
  siRNA target sequence for DOLPP1 (NM_020438.2,626-644).
gtctccgagttcttcctaa

SEQ ID NO: 377474 - DNA, 19 bp, Homo sapiens
  siRNA target sequence for KIAA1191 (NM_020444.2,392-410).
ccctgcccatcgggatata

SEQ ID NO: 377475 - DNA, 19 bp, Homo sapiens
  siRNA target sequence for KIAA1191 (NM_020444.2,504-522).
gattccagagcgcaagtat

SEQ ID NO: 377476 - DNA, 19 bp, Homo sapiens
  siRNA target sequence for KIAA1191 (NM_020444.2,626-644).
ctaaagctacccatgtcat

SEQ ID NO: 377477 - DNA, 19 bp, Homo sapiens
  siRNA target sequence for KIAA1191 (NM_020444.2,1013-1031).
cgagatcccttcagaagta

SEQ ID NO: 377478 - DNA, 19 bp, Homo sapiens
  siRNA target sequence for KIAA1191 (NM_020444.2,1080-1098).
ctctccattggaactgata

SEQ ID NO: 377479 - DNA, 19 bp, Homo sapiens
  siRNA target sequence for FLJ00005 (NM_020447.2,143-161).
cgggcagatcggtaataga

SEQ ID NO: 377480 - DNA, 19 bp, Homo sapiens
  siRNA target sequence for FLJ00005 (NM_020447.2,275-293).
ggccgttctgcggagaaaa

SEQ ID NO: 377481 - DNA, 19 bp, Homo sapiens
  siRNA target sequence for FLJ00005 (NM_020447.2,324-342).
gactcttcagggaaaaggt

SEQ ID NO: 377482 - DNA, 19 bp, Homo sapiens
  siRNA target sequence for FLJ00005 (NM_020447.2,350-368).
gtttaacaagggctatact

SEQ ID NO: 377483 - DNA, 19 bp, Homo sapiens
  siRNA target sequence for FLJ00005 (NM_020447.2,443-461).
ctcctccgggtattcatct

SEQ ID NO: 377484 - DNA, 19 bp, Homo sapiens
  siRNA target sequence for DJ462O23.2 (NM_020448.2,486-504).
cacttaacctccagaagta

SEQ ID NO: 377485 - DNA, 19 bp, Homo sapiens
  siRNA target sequence for DJ462O23.2 (NM_020448.2,488-506).
cttaacctccagaagtact

SEQ ID NO: 377486 - DNA, 19 bp, Homo sapiens
  siRNA target sequence for DJ462O23.2 (NM_020448.2,652-670).
cagcgcagtttctgtgata

SEQ ID NO: 377487 - DNA, 19 bp, Homo sapiens
  siRNA target sequence for DJ462O23.2 (NM_020448.2,667-685).
gatagctagtgccatcata

SEQ ID NO: 377488 - DNA, 19 bp, Homo sapiens
  siRNA target sequence for DJ462O23.2 (NM_020448.2,671-689).
gctagtgccatcataggaa

SEQ ID NO: 377489 - DNA, 19 bp, Homo sapiens
  siRNA target sequence for DJ462O23.2 (NM_020448.2,672-690).
ctagtgccatcataggaat

SEQ ID NO: 377490 - DNA, 19 bp, Homo sapiens
  siRNA target sequence for DJ462O23.2 (NM_020448.2,675-693).
gtgccatcataggaatcat

SEQ ID NO: 377491 - DNA, 19 bp, Homo sapiens
  siRNA target sequence for DJ462O23.2 (NM_020448.2,677-695).
gccatcataggaatcatat

SEQ ID NO: 377492 - DNA, 19 bp, Homo sapiens
  siRNA target sequence for DJ462O23.2 (NM_020448.2,678-696).
ccatcataggaatcatatt

SEQ ID NO: 377493 - DNA, 19 bp, Homo sapiens
  siRNA target sequence for DJ462O23.2 (NM_020448.2,709-727).
gtggaaaccgaaagacttt

SEQ ID NO: 377494 - DNA, 19 bp, Homo sapiens
  siRNA target sequence for DJ462O23.2 (NM_020448.2,736-754).
ctacgtcttgtcctttgtt

SEQ ID NO: 377495 - DNA, 19 bp, Homo sapiens
  siRNA target sequence for DJ462O23.2 (NM_020448.2,1056-1074).
ccatcttctacgtgatgtt

SEQ ID NO: 377496 - DNA, 19 bp, Homo sapiens
  siRNA target sequence for DJ462O23.2 (NM_020448.2,1135-1153).
gtacgactcctctttgatt

SEQ ID NO: 377497 - DNA, 19 bp, Homo sapiens
  siRNA target sequence for DJ462O23.2 (NM_020448.2,1192-1210).
cacagcaggtgcaatattt

SEQ ID NO: 377498 - DNA, 19 bp, Homo sapiens
  siRNA target sequence for DJ462O23.2 (NM_020448.2,1237-1255).
gctgcacatctgcatgttt

SEQ ID NO: 377499 - DNA, 19 bp, Homo sapiens
  siRNA target sequence for DJ462O23.2 (NM_020448.2,1259-1277).
ctggggtgcctcattgcat

SEQ ID NO: 377500 - DNA, 19 bp, Homo sapiens
  siRNA target sequence for DJ462O23.2 (NM_020448.2,1308-1326).
ggaagaagcccattccatt

SEQ ID NO: 377501 - DNA, 19 bp, Homo sapiens
  siRNA target sequence for DJ462O23.2 (NM_020448.2,1389-1407).
ctgtccagcctgaacttaa

SEQ ID NO: 377502 - DNA, 19 bp, Homo sapiens
  siRNA target sequence for ATP8B2 (NM_020452.1,19-37).
gttccccttttttcaatat

SEQ ID NO: 377503 - DNA, 19 bp, Homo sapiens
  siRNA target sequence for ATP8B2 (NM_020452.1,149-167).
gggctaatgaccgagaata

SEQ ID NO: 377504 - DNA, 19 bp, Homo sapiens
  siRNA target sequence for ATP8B2 (NM_020452.1,151-169).
gctaatgaccgagaataca

SEQ ID NO: 377505 - DNA, 19 bp, Homo sapiens
  siRNA target sequence for ATP8B2 (NM_020452.1,152-170).
ctaatgaccgagaatacaa

SEQ ID NO: 377506 - DNA, 19 bp, Homo sapiens
  siRNA target sequence for ATP8B2 (NM_020452.1,157-175).
gaccgagaatacaatgaga

SEQ ID NO: 377507 - DNA, 19 bp, Homo sapiens
  siRNA target sequence for ATP8B2 (NM_020452.1,187-205).
gcgagtaactgcatcaaga

SEQ ID NO: 377508 - DNA, 19 bp, Homo sapiens
  siRNA target sequence for ATP8B2 (NM_020452.1,204-222).
gacctccaagtacaatatt

SEQ ID NO: 377509 - DNA, 19 bp, Homo sapiens
  siRNA target sequence for ATP8B2 (NM_020452.1,206-224).
cctccaagtacaatattct

SEQ ID NO: 377510 - DNA, 19 bp, Homo sapiens
  siRNA target sequence for ATP8B2 (NM_020452.1,262-280).
gaagttgccaacacttact

SEQ ID NO: 377511 - DNA, 19 bp, Homo sapiens
  siRNA target sequence for ATP8B2 (NM_020452.1,416-434).
gcgataaccaggtgaataa

SEQ ID NO: 377512 - DNA, 19 bp, Homo sapiens
  siRNA target sequence for ATP8B2 (NM_020452.1,490-508).
gtctgtgttggtgatatta

SEQ ID NO: 377513 - DNA, 19 bp, Homo sapiens
  siRNA target sequence for ATP8B2 (NM_020452.1,570-588).
ccatgggctgtgttacata

SEQ ID NO: 377514 - DNA, 19 bp, Homo sapiens
  siRNA target sequence for ATP8B2 (NM_020452.1,574-592).
gggctgtgttacatagaga

SEQ ID NO: 377515 - DNA, 19 bp, Homo sapiens
  siRNA target sequence for ATP8B2 (NM_020452.1,608-626).
gcgagaccaacatgaaagt

SEQ ID NO: 377516 - DNA, 19 bp, Homo sapiens
  siRNA target sequence for ATP8B2 (NM_020452.1,666-684).
cagtaagcttgccaagttt

SEQ ID NO: 377517 - DNA, 19 bp, Homo sapiens
  siRNA target sequence for ATP8B2 (NM_020452.1,701-719).
gtgaacctcccaacaacaa

SEQ ID NO: 377518 - DNA, 19 bp, Homo sapiens
  siRNA target sequence for ATP8B2 (NM_020452.1,824-842).
gcttcgggctggtcatctt

SEQ ID NO: 377519 - DNA, 19 bp, Homo sapiens
  siRNA target sequence for ATP8B2 (NM_020452.1,825-843).
cttcgggctggtcatcttt

SEQ ID NO: 377520 - DNA, 19 bp, Homo sapiens
  siRNA target sequence for ATP8B2 (NM_020452.1,875-893).
gcggcagaacaaagttcaa

SEQ ID NO: 377521 - DNA, 19 bp, Homo sapiens
  siRNA target sequence for ATP8B2 (NM_020452.1,891-909).
caaaagaacgagtatcgat

SEQ ID NO: 377522 - DNA, 19 bp, Homo sapiens
  siRNA target sequence for ATP8B2 (NM_020452.1,902-920).
gtatcgatcgcctaatgaa

SEQ ID NO: 377523 - DNA, 19 bp, Homo sapiens
  siRNA target sequence for ATP8B2 (NM_020452.1,1104-1122).
caccgttgtgcccatttca

SEQ ID NO: 377524 - DNA, 19 bp, Homo sapiens
  siRNA target sequence for ATP8B2 (NM_020452.1,1106-1124).
ccgttgtgcccatttcact

SEQ ID NO: 377525 - DNA, 19 bp, Homo sapiens
  siRNA target sequence for ATP8B2 (NM_020452.1,1150-1168).
ctgggccacagctacttca

SEQ ID NO: 377526 - DNA, 19 bp, Homo sapiens
  siRNA target sequence for ATP8B2 (NM_020452.1,1156-1174).
cacagctacttcatcaact

SEQ ID NO: 377527 - DNA, 19 bp, Homo sapiens
  siRNA target sequence for ATP8B2 (NM_020452.1,1223-1241).
gcaccaccaccctaaacga

SEQ ID NO: 377528 - DNA, 19 bp, Homo sapiens
  siRNA target sequence for ATP8B2 (NM_020452.1,1292-1310).
cccagaacatcatggtttt

SEQ ID NO: 377529 - DNA, 19 bp, Homo sapiens
  siRNA target sequence for ATP8B2 (NM_020452.1,1337-1355).
gctatggtgatgtgtttga

SEQ ID NO: 377530 - DNA, 19 bp, Homo sapiens
  siRNA target sequence for ATP8B2 (NM_020452.1,1423-1441).
gctgacaagaagttcttat

SEQ ID NO: 377531 - DNA, 19 bp, Homo sapiens
  siRNA target sequence for ATP8B2 (NM_020452.1,1424-1442).
ctgacaagaagttcttatt

SEQ ID NO: 377532 - DNA, 19 bp, Homo sapiens
  siRNA target sequence for ATP8B2 (NM_020452.1,1484-1502).
cccacacgcatgagttctt

SEQ ID NO: 377533 - DNA, 19 bp, Homo sapiens
  siRNA target sequence for ATP8B2 (NM_020452.1,1649-1667).
caatcaccgtccatgagat

SEQ ID NO: 377534 - DNA, 19 bp, Homo sapiens
  siRNA target sequence for ATP8B2 (NM_020452.1,1838-1856).
ccaccatggaccaccttaa

SEQ ID NO: 377535 - DNA, 19 bp, Homo sapiens
  siRNA target sequence for ATP8B2 (NM_020452.1,1980-1998).
caggctggctagcatctat

SEQ ID NO: 377536 - DNA, 19 bp, Homo sapiens
  siRNA target sequence for ATP8B2 (NM_020452.1,1982-2000).
ggctggctagcatctatga

SEQ ID NO: 377537 - DNA, 19 bp, Homo sapiens
  siRNA target sequence for ATP8B2 (NM_020452.1,2036-2054).
cggccattgaggacaaact

SEQ ID NO: 377538 - DNA, 19 bp, Homo sapiens
  siRNA target sequence for ATP8B2 (NM_020452.1,2299-2317).
caggacaagctttcttctt

SEQ ID NO: 377539 - DNA, 19 bp, Homo sapiens
  siRNA target sequence for ATP8B2 (NM_020452.1,2353-2371).
gagtacgccctggtcataa

SEQ ID NO: 377540 - DNA, 19 bp, Homo sapiens
  siRNA target sequence for ATP8B2 (NM_020452.1,2355-2373).
gtacgccctggtcataaat

SEQ ID NO: 377541 - DNA, 19 bp, Homo sapiens
  siRNA target sequence for ATP8B2 (NM_020452.1,2358-2376).
cgccctggtcataaatggt

SEQ ID NO: 377542 - DNA, 19 bp, Homo sapiens
  siRNA target sequence for ATP8B2 (NM_020452.1,2617-2635).
gtcttggcctccgattact

SEQ ID NO: 377543 - DNA, 19 bp, Homo sapiens
  siRNA target sequence for ATP8B2 (NM_020452.1,2694-2712).
cctgcgaatgtgcaagttt

SEQ ID NO: 377544 - DNA, 19 bp, Homo sapiens
  siRNA target sequence for ATP8B2 (NM_020452.1,2697-2715).
gcgaatgtgcaagtttctt

SEQ ID NO: 377545 - DNA, 19 bp, Homo sapiens
  siRNA target sequence for ATP8B2 (NM_020452.1,2797-2815).
gtctatgaccagtatttca

SEQ ID NO: 377546 - DNA, 19 bp, Homo sapiens
  siRNA target sequence for ATP8B2 (NM_020452.1,2856-2874).
ggctatgggggtctttgat

SEQ ID NO: 377547 - DNA, 19 bp, Homo sapiens
  siRNA target sequence for ATP8B2 (NM_020452.1,2927-2945).
gccagctgaaccttctctt

SEQ ID NO: 377548 - DNA, 19 bp, Homo sapiens
  siRNA target sequence for ATP8B2 (NM_020452.1,3173-3191).
ggggaagccttgctgttta

SEQ ID NO: 377549 - DNA, 19 bp, Homo sapiens
  siRNA target sequence for GPR126 (NM_020455.3,390-408).
gtcctctcctgttcttatt

SEQ ID NO: 377550 - DNA, 19 bp, Homo sapiens
  siRNA target sequence for GPR126 (NM_020455.3,453-471).
ccaactgccgagtggtttt

SEQ ID NO: 377551 - DNA, 19 bp, Homo sapiens
  siRNA target sequence for GPR126 (NM_020455.3,551-569).
cgagcccccaccggttata

SEQ ID NO: 377552 - DNA, 19 bp, Homo sapiens
  siRNA target sequence for GPR126 (NM_020455.3,552-570).
gagcccccaccggttatat

SEQ ID NO: 377553 - DNA, 19 bp, Homo sapiens
  siRNA target sequence for GPR126 (NM_020455.3,554-572).
gcccccaccggttatatca

SEQ ID NO: 377554 - DNA, 19 bp, Homo sapiens
  siRNA target sequence for GPR126 (NM_020455.3,555-573).
cccccaccggttatatcat

SEQ ID NO: 377555 - DNA, 19 bp, Homo sapiens
  siRNA target sequence for GPR126 (NM_020455.3,558-576).
ccaccggttatatcattca

SEQ ID NO: 377556 - DNA, 19 bp, Homo sapiens
  siRNA target sequence for GPR126 (NM_020455.3,561-579).
ccggttatatcattcagat

SEQ ID NO: 377557 - DNA, 19 bp, Homo sapiens
  siRNA target sequence for GPR126 (NM_020455.3,582-600).
catttaacgactttgacat

SEQ ID NO: 377558 - DNA, 19 bp, Homo sapiens
  siRNA target sequence for GPR126 (NM_020455.3,605-623).
gaagctcccaattgcattt

SEQ ID NO: 377559 - DNA, 19 bp, Homo sapiens
  siRNA target sequence for GPR126 (NM_020455.3,611-629).
cccaattgcatttatgact

SEQ ID NO: 377560 - DNA, 19 bp, Homo sapiens
  siRNA target sequence for GPR126 (NM_020455.3,650-668).
gagagccagactaaatttt

SEQ ID NO: 377561 - DNA, 19 bp, Homo sapiens
  siRNA target sequence for GPR126 (NM_020455.3,652-670).
gagccagactaaattttgt

SEQ ID NO: 377562 - DNA, 19 bp, Homo sapiens
  siRNA target sequence for GPR126 (NM_020455.3,678-696).
ctgccaaaggcctatcatt

SEQ ID NO: 377563 - DNA, 19 bp, Homo sapiens
  siRNA target sequence for GPR126 (NM_020455.3,713-731).
gagatgcatgtgtcctttt

SEQ ID NO: 377564 - DNA, 19 bp, Homo sapiens
  siRNA target sequence for GPR126 (NM_020455.3,718-736).
gcatgtgtccttttcaagt

SEQ ID NO: 377565 - DNA, 19 bp, Homo sapiens
  siRNA target sequence for GPR126 (NM_020455.3,748-766).
ccagaagaaaggtttcaat

SEQ ID NO: 377566 - DNA, 19 bp, Homo sapiens
  siRNA target sequence for GPR126 (NM_020455.3,782-800).
gttgccgtgtccttaagga

SEQ ID NO: 377567 - DNA, 19 bp, Homo sapiens
  siRNA target sequence for GPR126 (NM_020455.3,787-805).
cgtgtccttaaggaatcaa

SEQ ID NO: 377568 - DNA, 19 bp, Homo sapiens
  siRNA target sequence for GPR126 (NM_020455.3,839-857).
caggtatctgttgcaaaaa

SEQ ID NO: 377569 - DNA, 19 bp, Homo sapiens
  siRNA target sequence for GPR126 (NM_020455.3,895-913).
ctttgaagcaaccaaagtt

SEQ ID NO: 377570 - DNA, 19 bp, Homo sapiens
  siRNA target sequence for GPR126 (NM_020455.3,914-932).
ggccatgaagacagtgatt

SEQ ID NO: 377571 - DNA, 19 bp, Homo sapiens
  siRNA target sequence for GPR126 (NM_020455.3,957-975).
catccttcacacaattgct

SEQ ID NO: 377572 - DNA, 19 bp, Homo sapiens
  siRNA target sequence for GPR126 (NM_020455.3,998-1016).
ggctactttctatccattt

SEQ ID NO: 377573 - DNA, 19 bp, Homo sapiens
  siRNA target sequence for GPR126 (NM_020455.3,1033-1051).
gttgaataatgcattacct

SEQ ID NO: 377574 - DNA, 19 bp, Homo sapiens
  siRNA target sequence for GPR126 (NM_020455.3,1093-1111).
gctctgccttgtttggaat

SEQ ID NO: 377575 - DNA, 19 bp, Homo sapiens
  siRNA target sequence for GPR126 (NM_020455.3,1096-1114).
ctgccttgtttggaataat

SEQ ID NO: 377576 - DNA, 19 bp, Homo sapiens
  siRNA target sequence for GPR126 (NM_020455.3,1173-1191).
ctaccattagtaaagttat

SEQ ID NO: 377577 - DNA, 19 bp, Homo sapiens
  siRNA target sequence for GPR126 (NM_020455.3,1213-1231).
gttgggctccaatcaaaat

SEQ ID NO: 377578 - DNA, 19 bp, Homo sapiens
  siRNA target sequence for GPR126 (NM_020455.3,1216-1234).
gggctccaatcaaaatgaa

SEQ ID NO: 377579 - DNA, 19 bp, Homo sapiens
  siRNA target sequence for GPR126 (NM_020455.3,1268-1286).
cgactttggaattttacca

SEQ ID NO: 377580 - DNA, 19 bp, Homo sapiens
  siRNA target sequence for GPR126 (NM_020455.3,1303-1321).
ctccaacctcagctgtaat

SEQ ID NO: 377581 - DNA, 19 bp, Homo sapiens
  siRNA target sequence for GPR126 (NM_020455.3,1305-1323).
ccaacctcagctgtaatgt

SEQ ID NO: 377582 - DNA, 19 bp, Homo sapiens
  siRNA target sequence for GPR126 (NM_020455.3,1337-1355).
gtcgactggcaaaatgact

SEQ ID NO: 377583 - DNA, 19 bp, Homo sapiens
  siRNA target sequence for GPR126 (NM_020455.3,1481-1499).
gtaaactctcctagtacta

SEQ ID NO: 377584 - DNA, 19 bp, Homo sapiens
  siRNA target sequence for GPR126 (NM_020455.3,1529-1547).
gttactaacagaatcgata

SEQ ID NO: 377585 - DNA, 19 bp, Homo sapiens
  siRNA target sequence for GPR126 (NM_020455.3,1533-1551).
ctaacagaatcgataaaca

SEQ ID NO: 377586 - DNA, 19 bp, Homo sapiens
  siRNA target sequence for GPR126 (NM_020455.3,1575-1593).
gaatatccgtagtgattca

SEQ ID NO: 377587 - DNA, 19 bp, Homo sapiens
  siRNA target sequence for GPR126 (NM_020455.3,1636-1654).
ggcagaatggctcaattca

SEQ ID NO: 377588 - DNA, 19 bp, Homo sapiens
  siRNA target sequence for GPR126 (NM_020455.3,1646-1664).
ctcaattcaaccttccaaa

SEQ ID NO: 377589 - DNA, 19 bp, Homo sapiens
  siRNA target sequence for GPR126 (NM_020455.3,1648-1666).
caattcaaccttccaaaat

SEQ ID NO: 377590 - DNA, 19 bp, Homo sapiens
  siRNA target sequence for GPR126 (NM_020455.3,1653-1671).
caaccttccaaaattggaa

SEQ ID NO: 377591 - DNA, 19 bp, Homo sapiens
  siRNA target sequence for GPR126 (NM_020455.3,1668-1686).
ggaactacacggtttatgt

SEQ ID NO: 377592 - DNA, 19 bp, Homo sapiens
  siRNA target sequence for GPR126 (NM_020455.3,1677-1695).
cggtttatgtcgttaatat

SEQ ID NO: 377593 - DNA, 19 bp, Homo sapiens
  siRNA target sequence for GPR126 (NM_020455.3,1679-1697).
gtttatgtcgttaatatca

SEQ ID NO: 377594 - DNA, 19 bp, Homo sapiens
  siRNA target sequence for GPR126 (NM_020455.3,1774-1792).
ggcccttctagtttacaat

SEQ ID NO: 377595 - DNA, 19 bp, Homo sapiens
  siRNA target sequence for GPR126 (NM_020455.3,1869-1887).
gcttgaggctacatacagt

SEQ ID NO: 377596 - DNA, 19 bp, Homo sapiens
  siRNA target sequence for GPR126 (NM_020455.3,1873-1891).
gaggctacatacagtgaat

SEQ ID NO: 377597 - DNA, 19 bp, Homo sapiens
  siRNA target sequence for GPR126 (NM_020455.3,1894-1912).
gagacaactgggtcattgt

SEQ ID NO: 377598 - DNA, 19 bp, Homo sapiens
  siRNA target sequence for GPR126 (NM_020455.3,1896-1914).
gacaactgggtcattgtct

SEQ ID NO: 377599 - DNA, 19 bp, Homo sapiens
  siRNA target sequence for GPR126 (NM_020455.3,1935-1953).
gctactactggccatctat

SEQ ID NO: 377600 - DNA, 19 bp, Homo sapiens
  siRNA target sequence for GPR126 (NM_020455.3,1954-1972).
ccaaccttctgaatacgtt

SEQ ID NO: 377601 - DNA, 19 bp, Homo sapiens
  siRNA target sequence for GPR126 (NM_020455.3,2007-2025).
ctcggatatgtttttacaa

SEQ ID NO: 377602 - DNA, 19 bp, Homo sapiens
  siRNA target sequence for GPR126 (NM_020455.3,2027-2045).
gctaccaacccattggtaa

SEQ ID NO: 377603 - DNA, 19 bp, Homo sapiens
  siRNA target sequence for GPR126 (NM_020455.3,2031-2049).
ccaacccattggtaaccta

SEQ ID NO: 377604 - DNA, 19 bp, Homo sapiens
  siRNA target sequence for GPR126 (NM_020455.3,2047-2065).
ctactggggacctgttgat

SEQ ID NO: 377605 - DNA, 19 bp, Homo sapiens
  siRNA target sequence for GPR126 (NM_020455.3,2093-2111).
gaagttgctaaccagattt

SEQ ID NO: 377606 - DNA, 19 bp, Homo sapiens
  siRNA target sequence for GPR126 (NM_020455.3,2142-2160).
cctcagccaatattaccaa

SEQ ID NO: 377607 - DNA, 19 bp, Homo sapiens
  siRNA target sequence for GPR126 (NM_020455.3,2219-2237).
ggctcaactctaatgaata

SEQ ID NO: 377608 - DNA, 19 bp, Homo sapiens
  siRNA target sequence for GPR126 (NM_020455.3,2270-2288).
gacttgcttgagtcatctt

SEQ ID NO: 377609 - DNA, 19 bp, Homo sapiens
  siRNA target sequence for GPR126 (NM_020455.3,2309-2327).
gatgaattggccttcaaga

SEQ ID NO: 377610 - DNA, 19 bp, Homo sapiens
  siRNA target sequence for GPR126 (NM_020455.3,2319-2337).
ccttcaagatagacctaaa

SEQ ID NO: 377611 - DNA, 19 bp, Homo sapiens
  siRNA target sequence for GPR126 (NM_020455.3,2332-2350).
cctaaatagcacatcacat

SEQ ID NO: 377612 - DNA, 19 bp, Homo sapiens
  siRNA target sequence for GPR126 (NM_020455.3,2340-2358).
gcacatcacatgtgaatat

SEQ ID NO: 377613 - DNA, 19 bp, Homo sapiens
  siRNA target sequence for GPR126 (NM_020455.3,2392-2410).
cctgttaccagggacaaat

SEQ ID NO: 377614 - DNA, 19 bp, Homo sapiens
  siRNA target sequence for GPR126 (NM_020455.3,2402-2420).
gggacaaatgcaatttcaa

SEQ ID NO: 377615 - DNA, 19 bp, Homo sapiens
  siRNA target sequence for GPR126 (NM_020455.3,2439-2457).
caagcaataatgaatcgta

SEQ ID NO: 377616 - DNA, 19 bp, Homo sapiens
  siRNA target sequence for GPR126 (NM_020455.3,2488-2506).
ggatccactggcatctgta

SEQ ID NO: 377617 - DNA, 19 bp, Homo sapiens
  siRNA target sequence for GPR126 (NM_020455.3,2489-2507).
gatccactggcatctgtaa

SEQ ID NO: 377618 - DNA, 19 bp, Homo sapiens
  siRNA target sequence for GPR126 (NM_020455.3,2514-2532).
ctccaaacttacttgagaa

SEQ ID NO: 377619 - DNA, 19 bp, Homo sapiens
  siRNA target sequence for GPR126 (NM_020455.3,2565-2583).
gagcacagtttactttctt

SEQ ID NO: 377620 - DNA, 19 bp, Homo sapiens
  siRNA target sequence for GPR126 (NM_020455.3,2754-2772).
gggatctgaacaaaaacaa

SEQ ID NO: 377621 - DNA, 19 bp, Homo sapiens
  siRNA target sequence for GPR126 (NM_020455.3,2788-2806).
gaacacgtcaggatgtgtt

SEQ ID NO: 377622 - DNA, 19 bp, Homo sapiens
  siRNA target sequence for GPR126 (NM_020455.3,2889-2907).
gaagtgcctcacagttaga

SEQ ID NO: 377623 - DNA, 19 bp, Homo sapiens
  siRNA target sequence for GPR126 (NM_020455.3,2941-2959).
ctatattgggtgtggaata

SEQ ID NO: 377624 - DNA, 19 bp, Homo sapiens
  siRNA target sequence for GPR126 (NM_020455.3,2950-2968).
gtgtggaatatctgctatt

SEQ ID NO: 377625 - DNA, 19 bp, Homo sapiens
  siRNA target sequence for GPR126 (NM_020455.3,2979-2997).
caactctcctgacatatgt

SEQ ID NO: 377626 - DNA, 19 bp, Homo sapiens
  siRNA target sequence for GPR126 (NM_020455.3,3007-3025).
gaaattgcgaagggattat

SEQ ID NO: 377627 - DNA, 19 bp, Homo sapiens
  siRNA target sequence for GPR126 (NM_020455.3,3020-3038).
gattatccctccaaaatct

SEQ ID NO: 377628 - DNA, 19 bp, Homo sapiens
  siRNA target sequence for GPR126 (NM_020455.3,3027-3045).
cctccaaaatcttgatgaa

SEQ ID NO: 377629 - DNA, 19 bp, Homo sapiens
  siRNA target sequence for GPR126 (NM_020455.3,3094-3112).
ctggatcacctccttcaat

SEQ ID NO: 377630 - DNA, 19 bp, Homo sapiens
  siRNA target sequence for GPR126 (NM_020455.3,3096-3114).
ggatcacctccttcaatgt

SEQ ID NO: 377631 - DNA, 19 bp, Homo sapiens
  siRNA target sequence for GPR126 (NM_020455.3,3137-3155).
gcagtcctgttgcatttct

SEQ ID NO: 377632 - DNA, 19 bp, Homo sapiens
  siRNA target sequence for GPR126 (NM_020455.3,3182-3200).
gggctagaagcaattcaca

SEQ ID NO: 377633 - DNA, 19 bp, Homo sapiens
  siRNA target sequence for GPR126 (NM_020455.3,3183-3201).
ggctagaagcaattcacat

SEQ ID NO: 377634 - DNA, 19 bp, Homo sapiens
  siRNA target sequence for GPR126 (NM_020455.3,3188-3206).
gaagcaattcacatgtaca

SEQ ID NO: 377635 - DNA, 19 bp, Homo sapiens
  siRNA target sequence for GPR126 (NM_020455.3,3202-3220).
gtacattgctctagttaaa

SEQ ID NO: 377636 - DNA, 19 bp, Homo sapiens
  siRNA target sequence for GPR126 (NM_020455.3,3205-3223).
cattgctctagttaaagta

SEQ ID NO: 377637 - DNA, 19 bp, Homo sapiens
  siRNA target sequence for GPR126 (NM_020455.3,3212-3230).
ctagttaaagtatttaaca

SEQ ID NO: 377638 - DNA, 19 bp, Homo sapiens
  siRNA target sequence for GPR126 (NM_020455.3,3231-3249).
cttacattcgccgatacat

SEQ ID NO: 377639 - DNA, 19 bp, Homo sapiens
  siRNA target sequence for GPR126 (NM_020455.3,3235-3253).
cattcgccgatacattcta

SEQ ID NO: 377640 - DNA, 19 bp, Homo sapiens
  siRNA target sequence for GPR126 (NM_020455.3,3239-3257).
cgccgatacattctaaaat

SEQ ID NO: 377641 - DNA, 19 bp, Homo sapiens
  siRNA target sequence for GPR126 (NM_020455.3,3240-3258).
gccgatacattctaaaatt

SEQ ID NO: 377642 - DNA, 19 bp, Homo sapiens
  siRNA target sequence for GPR126 (NM_020455.3,3242-3260).
cgatacattctaaaattct

SEQ ID NO: 377643 - DNA, 19 bp, Homo sapiens
  siRNA target sequence for GPR126 (NM_020455.3,3309-3327).
cgagcagaaacaacaatga

SEQ ID NO: 377644 - DNA, 19 bp, Homo sapiens
  siRNA target sequence for GPR126 (NM_020455.3,3315-3333).
gaaacaacaatgaagtcta

SEQ ID NO: 377645 - DNA, 19 bp, Homo sapiens
  siRNA target sequence for GPR126 (NM_020455.3,3406-3424).
gacctgtgctgggtatttt

SEQ ID NO: 377646 - DNA, 19 bp, Homo sapiens
  siRNA target sequence for GPR126 (NM_020455.3,3425-3443).
ggagtcatgttttttctga

SEQ ID NO: 377647 - DNA, 19 bp, Homo sapiens
  siRNA target sequence for GPR126 (NM_020455.3,3507-3525).
ggaccctgagagaagaagt

SEQ ID NO: 377648 - DNA, 19 bp, Homo sapiens
  siRNA target sequence for GPR126 (NM_020455.3,3548-3566).
gttagcttgacctttctgt

SEQ ID NO: 377649 - DNA, 19 bp, Homo sapiens
  siRNA target sequence for GPR126 (NM_020455.3,3596-3614).
gcctggggacccttaaata

SEQ ID NO: 377650 - DNA, 19 bp, Homo sapiens
  siRNA target sequence for GPR126 (NM_020455.3,3597-3615).
cctggggacccttaaatat

SEQ ID NO: 377651 - DNA, 19 bp, Homo sapiens
  siRNA target sequence for GPR126 (NM_020455.3,3735-3753).
gatttcggttagcagataa

SEQ ID NO: 377652 - DNA, 19 bp, Homo sapiens
  siRNA target sequence for GPR126 (NM_020455.3,3754-3772).
ctcagattggagtaagaca

SEQ ID NO: 377653 - DNA, 19 bp, Homo sapiens
  siRNA target sequence for GPR126 (NM_020455.3,3763-3781).
gagtaagacagctaccaat

SEQ ID NO: 377654 - DNA, 19 bp, Homo sapiens
  siRNA target sequence for GPR126 (NM_020455.3,3765-3783).
gtaagacagctaccaatat

SEQ ID NO: 377655 - DNA, 19 bp, Homo sapiens
  siRNA target sequence for GPR126 (NM_020455.3,3806-3824).
ctaggaaaatctttgtctt

SEQ ID NO: 377656 - DNA, 19 bp, Homo sapiens
  siRNA target sequence for GPR126 (NM_020455.3,3841-3859).
caactcaacctatcttaca

SEQ ID NO: 377657 - DNA, 19 bp, Homo sapiens
  siRNA target sequence for GPR126 (NM_020455.3,3850-3868).
ctatcttacatccaaatct

SEQ ID NO: 377658 - DNA, 19 bp, Homo sapiens
  siRNA target sequence for GPR126 (NM_020455.3,3873-3891).
ccagctctaccacctattt

SEQ ID NO: 377659 - DNA, 19 bp, Homo sapiens
  siRNA target sequence for GPR126 (NM_020455.3,3877-3895).
ctctaccacctatttcaaa

SEQ ID NO: 377660 - DNA, 19 bp, Homo sapiens
  siRNA target sequence for GPR126 (NM_020455.3,3897-3915).
ggaatagccacacagataa

SEQ ID NO: 377661 - DNA, 19 bp, Homo sapiens
  siRNA target sequence for C13orf1 (NM_020456.1,201-219).
gcagcacatgggaacagat

SEQ ID NO: 377662 - DNA, 19 bp, Homo sapiens
  siRNA target sequence for C13orf1 (NM_020456.1,215-233).
cagatgttgttattgtaaa

SEQ ID NO: 377663 - DNA, 19 bp, Homo sapiens
  siRNA target sequence for C13orf1 (NM_020456.1,273-291).
cagcgcacctttacatcaa

SEQ ID NO: 377664 - DNA, 19 bp, Homo sapiens
  siRNA target sequence for C13orf1 (NM_020456.1,275-293).
gcgcacctttacatcaaaa

SEQ ID NO: 377665 - DNA, 19 bp, Homo sapiens
  siRNA target sequence for C13orf1 (NM_020456.1,346-364).
gttgcaactcagaaggtta

SEQ ID NO: 377666 - DNA, 19 bp, Homo sapiens
  siRNA target sequence for C13orf1 (NM_020456.1,380-398).
ctcttggccgagatatgca

SEQ ID NO: 377667 - DNA, 19 bp, Homo sapiens
  siRNA target sequence for C13orf1 (NM_020456.1,484-502).
ggagatgtggtgggtatta

SEQ ID NO: 377668 - DNA, 19 bp, Homo sapiens
  siRNA target sequence for C13orf1 (NM_020456.1,503-521).
cttatgaccatgtcgaatt

SEQ ID NO: 377669 - DNA, 19 bp, Homo sapiens
  siRNA target sequence for C13orf1 (NM_020456.1,514-532).
gtcgaattaaatgtatact

SEQ ID NO: 377670 - DNA, 19 bp, Homo sapiens
  siRNA target sequence for C13orf1 (NM_020456.1,578-596).
cagtgtatccagttgttta

SEQ ID NO: 377671 - DNA, 19 bp, Homo sapiens
  siRNA target sequence for C13orf1 (NM_020456.1,598-616).
gttgatgacagtgcaattt

SEQ ID NO: 377672 - DNA, 19 bp, Homo sapiens
  siRNA target sequence for C13orf1 (NM_020456.1,604-622).
gacagtgcaattttggatt

SEQ ID NO: 377673 - DNA, 19 bp, Homo sapiens
  siRNA target sequence for C13orf1 (NM_020456.1,623-641).
gccagttcagtgagtttta

SEQ ID NO: 377674 - DNA, 19 bp, Homo sapiens
  siRNA target sequence for KIAA1181 (NM_020462.1,235-253).
gtgtgaacgagctctatgt

SEQ ID NO: 377675 - DNA, 19 bp, Homo sapiens
  siRNA target sequence for KIAA1181 (NM_020462.1,329-347).
gttggttgggcttgacatt

SEQ ID NO: 377676 - DNA, 19 bp, Homo sapiens
  siRNA target sequence for KIAA1181 (NM_020462.1,435-453).
gggcagttcagcatcaaca

SEQ ID NO: 377677 - DNA, 19 bp, Homo sapiens
  siRNA target sequence for KIAA1181 (NM_020462.1,445-463).
gcatcaacaaggtatggaa

SEQ ID NO: 377678 - DNA, 19 bp, Homo sapiens
  siRNA target sequence for KIAA1181 (NM_020462.1,598-616).
ggccgttcctgctgagaat

SEQ ID NO: 377679 - DNA, 19 bp, Homo sapiens
  siRNA target sequence for KIAA1387 (NM_020463.1,466-484).
ccgacggatcactactctt

SEQ ID NO: 377680 - DNA, 19 bp, Homo sapiens
  siRNA target sequence for KIAA1387 (NM_020463.1,471-489).
ggatcactactcttggaat

SEQ ID NO: 377681 - DNA, 19 bp, Homo sapiens
  siRNA target sequence for KIAA1387 (NM_020463.1,480-498).
ctcttggaatcaaagataa

SEQ ID NO: 377682 - DNA, 19 bp, Homo sapiens
  siRNA target sequence for KIAA1387 (NM_020463.1,525-543).
caggatacattaattgttt

SEQ ID NO: 377683 - DNA, 19 bp, Homo sapiens
  siRNA target sequence for KIAA1387 (NM_020463.1,545-563).
gtcagaagcagagaactat

SEQ ID NO: 377684 - DNA, 19 bp, Homo sapiens
  siRNA target sequence for KIAA1387 (NM_020463.1,549-567).
gaagcagagaactatgatt

SEQ ID NO: 377685 - DNA, 19 bp, Homo sapiens
  siRNA target sequence for KIAA1387 (NM_020463.1,605-623).
gatctgggaaaaaatttgt

SEQ ID NO: 377686 - DNA, 19 bp, Homo sapiens
  siRNA target sequence for KIAA1387 (NM_020463.1,656-674).
cacacaggacctcattgat

SEQ ID NO: 377687 - DNA, 19 bp, Homo sapiens
  siRNA target sequence for KIAA1387 (NM_020463.1,732-750).
cccacatgtgaactcaata

SEQ ID NO: 377688 - DNA, 19 bp, Homo sapiens
  siRNA target sequence for KIAA1387 (NM_020463.1,733-751).
ccacatgtgaactcaataa

SEQ ID NO: 377689 - DNA, 19 bp, Homo sapiens
  siRNA target sequence for KIAA1387 (NM_020463.1,759-777).
gagattgctgacttagtta

SEQ ID NO: 377690 - DNA, 19 bp, Homo sapiens
  siRNA target sequence for KIAA1387 (NM_020463.1,796-814).
ctatccgtagggaaaagct

SEQ ID NO: 377691 - DNA, 19 bp, Homo sapiens
  siRNA target sequence for KIAA1387 (NM_020463.1,815-833).
ggctctcgccttggaaaat

SEQ ID NO: 377692 - DNA, 19 bp, Homo sapiens
  siRNA target sequence for KIAA1387 (NM_020463.1,870-888).
gcttgcgagaacctagaaa

SEQ ID NO: 377693 - DNA, 19 bp, Homo sapiens
  siRNA target sequence for KIAA1387 (NM_020463.1,871-889).
cttgcgagaacctagaaaa

SEQ ID NO: 377694 - DNA, 19 bp, Homo sapiens
  siRNA target sequence for KIAA1387 (NM_020463.1,949-967).
caactctttttgaggtaat

SEQ ID NO: 377695 - DNA, 19 bp, Homo sapiens
  siRNA target sequence for KIAA1387 (NM_020463.1,1139-1157).
gtacattcaggacatcatt

SEQ ID NO: 377696 - DNA, 19 bp, Homo sapiens
  siRNA target sequence for KIAA1387 (NM_020463.1,1165-1183).
caccatctgtttttgaaga

SEQ ID NO: 377697 - DNA, 19 bp, Homo sapiens
  siRNA target sequence for KIAA1387 (NM_020463.1,1195-1213).
ctactcttacgtcttttat

SEQ ID NO: 377698 - DNA, 19 bp, Homo sapiens
  siRNA target sequence for KIAA1387 (NM_020463.1,1317-1335).
cggcgtgaattggttaatt

SEQ ID NO: 377699 - DNA, 19 bp, Homo sapiens
  siRNA target sequence for KIAA1387 (NM_020463.1,1406-1424).
ggcaaaattgggaattctt

SEQ ID NO: 377700 - DNA, 19 bp, Homo sapiens
  siRNA target sequence for KIAA1387 (NM_020463.1,1440-1458).
gtaatgggcatggatgatt

SEQ ID NO: 377701 - DNA, 19 bp, Homo sapiens
  siRNA target sequence for KIAA1387 (NM_020463.1,1445-1463).
gggcatggatgatttgcaa

SEQ ID NO: 377702 - DNA, 19 bp, Homo sapiens
  siRNA target sequence for KIAA1387 (NM_020463.1,1468-1486).
gatcagctgctacagatat

SEQ ID NO: 377703 - DNA, 19 bp, Homo sapiens
  siRNA target sequence for KIAA1387 (NM_020463.1,1553-1571).
gagtgatgacgatattctt

SEQ ID NO: 377704 - DNA, 19 bp, Homo sapiens
  siRNA target sequence for KIAA1387 (NM_020463.1,1555-1573).
gtgatgacgatattcttct

SEQ ID NO: 377705 - DNA, 19 bp, Homo sapiens
  siRNA target sequence for KIAA1387 (NM_020463.1,1560-1578).
gacgatattcttcttatta

SEQ ID NO: 377706 - DNA, 19 bp, Homo sapiens
  siRNA target sequence for KIAA1387 (NM_020463.1,1624-1642).
gaggcgctgttcagttaat

SEQ ID NO: 377707 - DNA, 19 bp, Homo sapiens
  siRNA target sequence for KIAA1387 (NM_020463.1,1644-1662).
ggacttcttcgtactctaa

SEQ ID NO: 377708 - DNA, 19 bp, Homo sapiens
  siRNA target sequence for KIAA1387 (NM_020463.1,1645-1663).
gacttcttcgtactctaat

SEQ ID NO: 377709 - DNA, 19 bp, Homo sapiens
  siRNA target sequence for KIAA1387 (NM_020463.1,1676-1694).
catgctggctacaactaat

SEQ ID NO: 377710 - DNA, 19 bp, Homo sapiens
  siRNA target sequence for KIAA1387 (NM_020463.1,1679-1697).
gctggctacaactaataaa

SEQ ID NO: 377711 - DNA, 19 bp, Homo sapiens
  siRNA target sequence for KIAA1387 (NM_020463.1,1755-1773).
gcaccacttttgaccaata

SEQ ID NO: 377712 - DNA, 19 bp, Homo sapiens
  siRNA target sequence for KIAA1387 (NM_020463.1,1849-1867).
gctttatgaggcggataat

SEQ ID NO: 377713 - DNA, 19 bp, Homo sapiens
  siRNA target sequence for KIAA1387 (NM_020463.1,1859-1877).
gcggataattggacttaaa

SEQ ID NO: 377714 - DNA, 19 bp, Homo sapiens
  siRNA target sequence for KIAA1387 (NM_020463.1,1862-1880).
gataattggacttaaagat

SEQ ID NO: 377715 - DNA, 19 bp, Homo sapiens
  siRNA target sequence for KIAA1387 (NM_020463.1,1975-1993).
cagctgttattgagttgtt

SEQ ID NO: 377716 - DNA, 19 bp, Homo sapiens
  siRNA target sequence for KIAA1387 (NM_020463.1,2010-2028).
gaagatatcaagtctctta

SEQ ID NO: 377717 - DNA, 19 bp, Homo sapiens
  siRNA target sequence for KIAA1387 (NM_020463.1,2021-2039).
gtctcttactgcccatata

SEQ ID NO: 377718 - DNA, 19 bp, Homo sapiens
  siRNA target sequence for KIAA1387 (NM_020463.1,2023-2041).
ctcttactgcccatatagt

SEQ ID NO: 377719 - DNA, 19 bp, Homo sapiens
  siRNA target sequence for KIAA1387 (NM_020463.1,2144-2162).
gaacagtgtaccatctata

SEQ ID NO: 377720 - DNA, 19 bp, Homo sapiens
  siRNA target sequence for KIAA1387 (NM_020463.1,2155-2173).
catctatattgcgtagtaa

SEQ ID NO: 377721 - DNA, 19 bp, Homo sapiens
  siRNA target sequence for KIAA1387 (NM_020463.1,2385-2403).
ggcttcaaatttactttct

SEQ ID NO: 377722 - DNA, 19 bp, Homo sapiens
  siRNA target sequence for KIAA1387 (NM_020463.1,2408-2426).
ctctgccagtgctgctaat

SEQ ID NO: 377723 - DNA, 19 bp, Homo sapiens
  siRNA target sequence for KIAA1387 (NM_020463.1,2456-2474).
gataccaccagcaacttct

SEQ ID NO: 377724 - DNA, 19 bp, Homo sapiens
  siRNA target sequence for KIAA1387 (NM_020463.1,2501-2519).
cttgcctacgtcagtaaca

SEQ ID NO: 377725 - DNA, 19 bp, Homo sapiens
  siRNA target sequence for KIAA1387 (NM_020463.1,2518-2536).
cagccaccaagggaagttt

SEQ ID NO: 377726 - DNA, 19 bp, Homo sapiens
  siRNA target sequence for KIAA1387 (NM_020463.1,2537-2555).
ggttggcttagtggattat

SEQ ID NO: 377727 - DNA, 19 bp, Homo sapiens
  siRNA target sequence for KIAA1387 (NM_020463.1,2586-2604).
gaatcgtcccccaggaaaa

SEQ ID NO: 377728 - DNA, 19 bp, Homo sapiens
  siRNA target sequence for DJ122O8.2 (NM_020466.3,208-226).
gccaccgaagaggatacaa

SEQ ID NO: 377729 - DNA, 19 bp, Homo sapiens
  siRNA target sequence for DJ122O8.2 (NM_020466.3,209-227).
ccaccgaagaggatacaat

SEQ ID NO: 377730 - DNA, 19 bp, Homo sapiens
  siRNA target sequence for DJ122O8.2 (NM_020466.3,264-282).
ggagttagaaaaaacactt

SEQ ID NO: 377731 - DNA, 19 bp, Homo sapiens
  siRNA target sequence for LOC57228 (NM_020467.2,444-462).
gcagcgagaaagaggaata

SEQ ID NO: 377732 - DNA, 19 bp, Homo sapiens
  siRNA target sequence for LOC57228 (NM_020467.2,445-463).
cagcgagaaagaggaatat

SEQ ID NO: 377733 - DNA, 19 bp, Homo sapiens
  siRNA target sequence for LOC57228 (NM_020467.2,455-473).
gaggaatatttcatctaat

SEQ ID NO: 377734 - DNA, 19 bp, Homo sapiens
  siRNA target sequence for LOC57228 (NM_020467.2,480-498).
caggccccaaggagcttat

SEQ ID NO: 377735 - DNA, 19 bp, Homo sapiens
  siRNA target sequence for SNX14 (NM_020468.2,320-338).
ctgcttcttaacaggtata

SEQ ID NO: 377736 - DNA, 19 bp, Homo sapiens
  siRNA target sequence for SNX14 (NM_020468.2,371-389).
gctggagttgtcacattct

SEQ ID NO: 377737 - DNA, 19 bp, Homo sapiens
  siRNA target sequence for SNX14 (NM_020468.2,372-390).
ctggagttgtcacattcta

SEQ ID NO: 377738 - DNA, 19 bp, Homo sapiens
  siRNA target sequence for SNX14 (NM_020468.2,374-392).
ggagttgtcacattctact

SEQ ID NO: 377739 - DNA, 19 bp, Homo sapiens
  siRNA target sequence for SNX14 (NM_020468.2,396-414).
cactaggacctgattctct

SEQ ID NO: 377740 - DNA, 19 bp, Homo sapiens
  siRNA target sequence for SNX14 (NM_020468.2,405-423).
ctgattctctcttaccaaa

SEQ ID NO: 377741 - DNA, 19 bp, Homo sapiens
  siRNA target sequence for SNX14 (NM_020468.2,457-475).
gttaggacttcaggaatta

SEQ ID NO: 377742 - DNA, 19 bp, Homo sapiens
  siRNA target sequence for SNX14 (NM_020468.2,561-579).
catggctagacctgaaaat

SEQ ID NO: 377743 - DNA, 19 bp, Homo sapiens
  siRNA target sequence for SNX14 (NM_020468.2,600-618).
ctctctcagaggtggatat

SEQ ID NO: 377744 - DNA, 19 bp, Homo sapiens
  siRNA target sequence for SNX14 (NM_020468.2,611-629).
gtggatattccatctatta

SEQ ID NO: 377745 - DNA, 19 bp, Homo sapiens
  siRNA target sequence for SNX14 (NM_020468.2,613-631).
ggatattccatctattata

SEQ ID NO: 377746 - DNA, 19 bp, Homo sapiens
  siRNA target sequence for SNX14 (NM_020468.2,654-672).
caatgaagcatatagaagt

SEQ ID NO: 377747 - DNA, 19 bp, Homo sapiens
  siRNA target sequence for SNX14 (NM_020468.2,749-767).
cttcatgttgctttgagaa

SEQ ID NO: 377748 - DNA, 19 bp, Homo sapiens
  siRNA target sequence for SNX14 (NM_020468.2,768-786).
gtcgaagagatgaattgca

SEQ ID NO: 377749 - DNA, 19 bp, Homo sapiens
  siRNA target sequence for SNX14 (NM_020468.2,779-797).
gaattgcactatttaagga

SEQ ID NO: 377750 - DNA, 19 bp, Homo sapiens
  siRNA target sequence for SNX14 (NM_020468.2,784-802).
gcactatttaaggaaactt

SEQ ID NO: 377751 - DNA, 19 bp, Homo sapiens
  siRNA target sequence for SNX14 (NM_020468.2,785-803).
cactatttaaggaaactta

SEQ ID NO: 377752 - DNA, 19 bp, Homo sapiens
  siRNA target sequence for SNX14 (NM_020468.2,852-870).
gatctctgaccttacttat

SEQ ID NO: 377753 - DNA, 19 bp, Homo sapiens
  siRNA target sequence for SNX14 (NM_020468.2,862-880).
cttacttataagagagatt

SEQ ID NO: 377754 - DNA, 19 bp, Homo sapiens
  siRNA target sequence for SNX14 (NM_020468.2,916-934).
cctagctgatccagatact

SEQ ID NO: 377755 - DNA, 19 bp, Homo sapiens
  siRNA target sequence for SNX14 (NM_020468.2,941-959).
catttgcttatcatcttca

SEQ ID NO: 377756 - DNA, 19 bp, Homo sapiens
  siRNA target sequence for SNX14 (NM_020468.2,946-964).
gcttatcatcttcatagat

SEQ ID NO: 377757 - DNA, 19 bp, Homo sapiens
  siRNA target sequence for SNX14 (NM_020468.2,1081-1099).
cagagagcaacaagatctt

SEQ ID NO: 377758 - DNA, 19 bp, Homo sapiens
  siRNA target sequence for SNX14 (NM_020468.2,1083-1101).
gagagcaacaagatctttt

SEQ ID NO: 377759 - DNA, 19 bp, Homo sapiens
  siRNA target sequence for SNX14 (NM_020468.2,1139-1157).
gtgcacgtgttgcagtttt

SEQ ID NO: 377760 - DNA, 19 bp, Homo sapiens
  siRNA target sequence for SNX14 (NM_020468.2,1142-1160).
cacgtgttgcagttttgtt

SEQ ID NO: 377761 - DNA, 19 bp, Homo sapiens
  siRNA target sequence for SNX14 (NM_020468.2,1158-1176).
gtttgactgtggaggaatt

SEQ ID NO: 377762 - DNA, 19 bp, Homo sapiens
  siRNA target sequence for SNX14 (NM_020468.2,1290-1308).
gatttgatcccttcattgt

SEQ ID NO: 377763 - DNA, 19 bp, Homo sapiens
  siRNA target sequence for SNX14 (NM_020468.2,1329-1347).
ctgaaggcccatacataga

SEQ ID NO: 377764 - DNA, 19 bp, Homo sapiens
  siRNA target sequence for SNX14 (NM_020468.2,1335-1353).
gcccatacatagatgttgt

SEQ ID NO: 377765 - DNA, 19 bp, Homo sapiens
  siRNA target sequence for SNX14 (NM_020468.2,1374-1392).
gtctttttgaagcatatga

SEQ ID NO: 377766 - DNA, 19 bp, Homo sapiens
  siRNA target sequence for SNX14 (NM_020468.2,1404-1422).
cccttttggagaatgtatt

SEQ ID NO: 377767 - DNA, 19 bp, Homo sapiens
  siRNA target sequence for SNX14 (NM_020468.2,1418-1436).
gtatttactcctatgttct

SEQ ID NO: 377768 - DNA, 19 bp, Homo sapiens
  siRNA target sequence for SNX14 (NM_020468.2,1428-1446).
ctatgttctgccatagtga

SEQ ID NO: 377769 - DNA, 19 bp, Homo sapiens
  siRNA target sequence for SNX14 (NM_020468.2,1448-1466).
gagtatttcagacaacttt

SEQ ID NO: 377770 - DNA, 19 bp, Homo sapiens
  siRNA target sequence for SNX14 (NM_020468.2,1450-1468).
gtatttcagacaactttta

SEQ ID NO: 377771 - DNA, 19 bp, Homo sapiens
  siRNA target sequence for SNX14 (NM_020468.2,1484-1502).
ccaacacgcaattcaaaat

SEQ ID NO: 377772 - DNA, 19 bp, Homo sapiens
  siRNA target sequence for SNX14 (NM_020468.2,1488-1506).
cacgcaattcaaaattgaa

SEQ ID NO: 377773 - DNA, 19 bp, Homo sapiens
  siRNA target sequence for SNX14 (NM_020468.2,1490-1508).
cgcaattcaaaattgaaca

SEQ ID NO: 377774 - DNA, 19 bp, Homo sapiens
  siRNA target sequence for SNX14 (NM_020468.2,1524-1542).
ggggagaatcatttggaat

SEQ ID NO: 377775 - DNA, 19 bp, Homo sapiens
  siRNA target sequence for SNX14 (NM_020468.2,1538-1556).
ggaatcagcagaataggta

SEQ ID NO: 377776 - DNA, 19 bp, Homo sapiens
  siRNA target sequence for SNX14 (NM_020468.2,1543-1561).
cagcagaataggtagcaaa

SEQ ID NO: 377777 - DNA, 19 bp, Homo sapiens
  siRNA target sequence for SNX14 (NM_020468.2,1587-1605).
caatggagggagctatgtt

SEQ ID NO: 377778 - DNA, 19 bp, Homo sapiens
  siRNA target sequence for SNX14 (NM_020468.2,1722-1740).
ctgcatggaaaattagcat

SEQ ID NO: 377779 - DNA, 19 bp, Homo sapiens
  siRNA target sequence for SNX14 (NM_020468.2,1737-1755).
gcattccatatgtagactt

SEQ ID NO: 377780 - DNA, 19 bp, Homo sapiens
  siRNA target sequence for SNX14 (NM_020468.2,1847-1865).
ggacacgagcctgaacatt

SEQ ID NO: 377781 - DNA, 19 bp, Homo sapiens
  siRNA target sequence for SNX14 (NM_020468.2,1862-1880).
cattggtctgtctatagaa

SEQ ID NO: 377782 - DNA, 19 bp, Homo sapiens
  siRNA target sequence for SNX14 (NM_020468.2,1866-1884).
ggtctgtctatagaagata

SEQ ID NO: 377783 - DNA, 19 bp, Homo sapiens
  siRNA target sequence for SNX14 (NM_020468.2,1869-1887).
ctgtctatagaagatatct

SEQ ID NO: 377784 - DNA, 19 bp, Homo sapiens
  siRNA target sequence for SNX14 (NM_020468.2,1878-1896).
gaagatatcttgaattcta

SEQ ID NO: 377785 - DNA, 19 bp, Homo sapiens
  siRNA target sequence for SNX14 (NM_020468.2,1966-1984).
cattggccccaaaaattat

SEQ ID NO: 377786 - DNA, 19 bp, Homo sapiens
  siRNA target sequence for SNX14 (NM_020468.2,1971-1989).
gccccaaaaattatgaatt

SEQ ID NO: 377787 - DNA, 19 bp, Homo sapiens
  siRNA target sequence for SNX14 (NM_020468.2,1985-2003).
gaattcttaaagtcaaaga

SEQ ID NO: 377788 - DNA, 19 bp, Homo sapiens
  siRNA target sequence for SNX14 (NM_020468.2,2004-2022).
gggaagagttccaagaata

SEQ ID NO: 377789 - DNA, 19 bp, Homo sapiens
  siRNA target sequence for SNX14 (NM_020468.2,2046-2064).
cagaactgagtaatagtca

SEQ ID NO: 377790 - DNA, 19 bp, Homo sapiens
  siRNA target sequence for SNX14 (NM_020468.2,2103-2121).
cacaatttcttgataagat

SEQ ID NO: 377791 - DNA, 19 bp, Homo sapiens
  siRNA target sequence for SNX14 (NM_020468.2,2132-2150).
gtaaatcttgggaaaatta

SEQ ID NO: 377792 - DNA, 19 bp, Homo sapiens
  siRNA target sequence for SNX14 (NM_020468.2,2165-2183).
ggaaaactaatgaaagaga

SEQ ID NO: 377793 - DNA, 19 bp, Homo sapiens
  siRNA target sequence for SNX14 (NM_020468.2,2189-2207).
cagcatttggaacctttta

SEQ ID NO: 377794 - DNA, 19 bp, Homo sapiens
  siRNA target sequence for SNX14 (NM_020468.2,2201-2219).
ccttttatcatgaatttca

SEQ ID NO: 377795 - DNA, 19 bp, Homo sapiens
  siRNA target sequence for SNX14 (NM_020468.2,2212-2230).
gaatttcattaattcttgt

SEQ ID NO: 377796 - DNA, 19 bp, Homo sapiens
  siRNA target sequence for SNX14 (NM_020468.2,2273-2291).
ctcagccctacttcagaaa

SEQ ID NO: 377797 - DNA, 19 bp, Homo sapiens
  siRNA target sequence for SNX14 (NM_020468.2,2277-2295).
gccctacttcagaaaacaa

SEQ ID NO: 377798 - DNA, 19 bp, Homo sapiens
  siRNA target sequence for SNX14 (NM_020468.2,2452-2470).
ctggcttcatcatctctta

SEQ ID NO: 377799 - DNA, 19 bp, Homo sapiens
  siRNA target sequence for SNX14 (NM_020468.2,2454-2472).
ggcttcatcatctcttaat

SEQ ID NO: 377800 - DNA, 19 bp, Homo sapiens
  siRNA target sequence for SNX14 (NM_020468.2,2474-2492).
ggaactcgaatcctcttta

SEQ ID NO: 377801 - DNA, 19 bp, Homo sapiens
  siRNA target sequence for SNX14 (NM_020468.2,2475-2493).
gaactcgaatcctctttaa

SEQ ID NO: 377802 - DNA, 19 bp, Homo sapiens
  siRNA target sequence for SNX14 (NM_020468.2,2478-2496).
ctcgaatcctctttaaaaa

SEQ ID NO: 377803 - DNA, 19 bp, Homo sapiens
  siRNA target sequence for SNX14 (NM_020468.2,2480-2498).
cgaatcctctttaaaaaca

SEQ ID NO: 377804 - DNA, 19 bp, Homo sapiens
  siRNA target sequence for SNX14 (NM_020468.2,2501-2519).
ctggaaatgtatactgatt

SEQ ID NO: 377805 - DNA, 19 bp, Homo sapiens
  siRNA target sequence for SNX14 (NM_020468.2,2509-2527).
gtatactgattactatctt

SEQ ID NO: 377806 - DNA, 19 bp, Homo sapiens
  siRNA target sequence for SNX14 (NM_020468.2,2521-2539).
ctatcttcagtgtaaacta

SEQ ID NO: 377807 - DNA, 19 bp, Homo sapiens
  siRNA target sequence for SNX14 (NM_020468.2,2561-2579).
cgtttggtctcactcataa

SEQ ID NO: 377808 - DNA, 19 bp, Homo sapiens
  siRNA target sequence for SNX14 (NM_020468.2,2566-2584).
ggtctcactcataacactt

SEQ ID NO: 377809 - DNA, 19 bp, Homo sapiens
  siRNA target sequence for SNX14 (NM_020468.2,2587-2605).
cagagatgctatattctgt

SEQ ID NO: 377810 - DNA, 19 bp, Homo sapiens
  siRNA target sequence for SNX14 (NM_020468.2,2618-2636).
cctcgctctctccaagata

SEQ ID NO: 377811 - DNA, 19 bp, Homo sapiens
  siRNA target sequence for SNX14 (NM_020468.2,2692-2710).
gttagtcaagtgtattggt

SEQ ID NO: 377812 - DNA, 19 bp, Homo sapiens
  siRNA target sequence for SNX14 (NM_020468.2,2776-2794).
gcagctgacttatgtttta

SEQ ID NO: 377813 - DNA, 19 bp, Homo sapiens
  siRNA target sequence for SNX14 (NM_020468.2,2830-2848).
caataaggtacaaaaggaa

SEQ ID NO: 377814 - DNA, 19 bp, Homo sapiens
  siRNA target sequence for SNX14 (NM_020468.2,2849-2867).
gttacctctgtgacatctt

SEQ ID NO: 377815 - DNA, 19 bp, Homo sapiens
  siRNA target sequence for KIAA0720 (NM_020631.2,894-912).
gtcgcttcagcggcttttt

SEQ ID NO: 377816 - DNA, 19 bp, Homo sapiens
  siRNA target sequence for KIAA0720 (NM_020631.2,1108-1126).
ctggcgggagctcattgat

SEQ ID NO: 377817 - DNA, 19 bp, Homo sapiens
  siRNA target sequence for KIAA0720 (NM_020631.2,1209-1227).
ggaaactgcgggtgatcat

SEQ ID NO: 377818 - DNA, 19 bp, Homo sapiens
  siRNA target sequence for KIAA0720 (NM_020631.2,1415-1433).
ctcaaaggcttcaagatgt

SEQ ID NO: 377819 - DNA, 19 bp, Homo sapiens
  siRNA target sequence for KIAA0720 (NM_020631.2,2045-2063).
ctcgtggacaagattgtgt

SEQ ID NO: 377820 - DNA, 19 bp, Homo sapiens
  siRNA target sequence for KIAA0720 (NM_020631.2,2175-2193).
gggtggacaccatttacaa

SEQ ID NO: 377821 - DNA, 19 bp, Homo sapiens
  siRNA target sequence for KIAA0720 (NM_020631.2,2617-2635).
ctccccaacctccttacaa

SEQ ID NO: 377822 - DNA, 19 bp, Homo sapiens
  siRNA target sequence for KIAA0720 (NM_020631.2,2762-2780).
ccccacctgctcaagtcta

SEQ ID NO: 377823 - DNA, 19 bp, Homo sapiens
  siRNA target sequence for KIAA0720 (NM_020631.2,2763-2781).
cccacctgctcaagtctaa

SEQ ID NO: 377824 - DNA, 19 bp, Homo sapiens
  siRNA target sequence for KIAA0720 (NM_020631.2,2876-2894).
gttccagccccaggtatta

SEQ ID NO: 377825 - DNA, 19 bp, Homo sapiens
  siRNA target sequence for KIAA0720 (NM_020631.2,3126-3144).
ggaccaccctgctgcttaa

SEQ ID NO: 377826 - DNA, 19 bp, Homo sapiens
  siRNA target sequence for C11orf16 (NM_020643.1,256-274).
gcaaggcatgcctcttctt

SEQ ID NO: 377827 - DNA, 19 bp, Homo sapiens
  siRNA target sequence for C11orf16 (NM_020643.1,365-383).
gaagggaagcagatggttt

SEQ ID NO: 377828 - DNA, 19 bp, Homo sapiens
  siRNA target sequence for C11orf16 (NM_020643.1,760-778).
gagaggctgcacaagtctt

SEQ ID NO: 377829 - DNA, 19 bp, Homo sapiens
  siRNA target sequence for C11orf16 (NM_020643.1,840-858).
cactgggcgcatcactaat

SEQ ID NO: 377830 - DNA, 19 bp, Homo sapiens
  siRNA target sequence for C11orf16 (NM_020643.1,842-860).
ctgggcgcatcactaatga

SEQ ID NO: 377831 - DNA, 19 bp, Homo sapiens
  siRNA target sequence for C11orf16 (NM_020643.1,1041-1059).
gcccctggaaggtcctaaa

SEQ ID NO: 377832 - DNA, 19 bp, Homo sapiens
  siRNA target sequence for C11orf16 (NM_020643.1,1043-1061).
ccctggaaggtcctaaaga

SEQ ID NO: 377833 - DNA, 19 bp, Homo sapiens
  siRNA target sequence for C11orf16 (NM_020643.1,1080-1098).
cgctcccctggctgtttct

SEQ ID NO: 377834 - DNA, 19 bp, Homo sapiens
  siRNA target sequence for C11orf16 (NM_020643.1,1081-1099).
gctcccctggctgtttctt

SEQ ID NO: 377835 - DNA, 19 bp, Homo sapiens
  siRNA target sequence for C11orf16 (NM_020643.1,1188-1206).
caacacagatcccatcttt

SEQ ID NO: 377836 - DNA, 19 bp, Homo sapiens
  siRNA target sequence for C11orf16 (NM_020643.1,1240-1258).
cagcctgagtggaggtatt

SEQ ID NO: 377837 - DNA, 19 bp, Homo sapiens
  siRNA target sequence for C11orf16 (NM_020643.1,1243-1261).
cctgagtggaggtattgga

SEQ ID NO: 377838 - DNA, 19 bp, Homo sapiens
  siRNA target sequence for C11orf16 (NM_020643.1,1244-1262).
ctgagtggaggtattggaa

SEQ ID NO: 377839 - DNA, 19 bp, Homo sapiens
  siRNA target sequence for C11orf16 (NM_020643.1,1310-1328).
ccaacatctgcaaagaaga

SEQ ID NO: 377840 - DNA, 19 bp, Homo sapiens
  siRNA target sequence for C11orf16 (NM_020643.1,1381-1399).
gagctggtctcgaaagcaa

SEQ ID NO: 377841 - DNA, 19 bp, Homo sapiens
  siRNA target sequence for C11orf16 (NM_020643.1,1391-1409).
cgaaagcaacccacatgaa

SEQ ID NO: 377842 - DNA, 19 bp, Homo sapiens
  siRNA target sequence for ASCL3 (NM_020646.1,81-99).
ctctagtctacctgacaaa

SEQ ID NO: 377843 - DNA, 19 bp, Homo sapiens
  siRNA target sequence for ASCL3 (NM_020646.1,92-110).
ctgacaaacttcctatctt

SEQ ID NO: 377844 - DNA, 19 bp, Homo sapiens
  siRNA target sequence for ASCL3 (NM_020646.1,247-265).
cttatcctgggaaattaca

SEQ ID NO: 377845 - DNA, 19 bp, Homo sapiens
  siRNA target sequence for ASCL3 (NM_020646.1,288-306).
cccgatgccttatccaaat

SEQ ID NO: 377846 - DNA, 19 bp, Homo sapiens
  siRNA target sequence for ASCL3 (NM_020646.1,289-307).
ccgatgccttatccaaatt

SEQ ID NO: 377847 - DNA, 19 bp, Homo sapiens
  siRNA target sequence for ASCL3 (NM_020646.1,467-485).
gagctgcgatcaagtacat

SEQ ID NO: 377848 - DNA, 19 bp, Homo sapiens
  siRNA target sequence for ASCL3 (NM_020646.1,469-487).
gctgcgatcaagtacatta

SEQ ID NO: 377849 - DNA, 19 bp, Homo sapiens
  siRNA target sequence for ASCL3 (NM_020646.1,470-488).
ctgcgatcaagtacattaa

SEQ ID NO: 377850 - DNA, 19 bp, Homo sapiens
  siRNA target sequence for ASCL3 (NM_020646.1,472-490).
gcgatcaagtacattaact

SEQ ID NO: 377851 - DNA, 19 bp, Homo sapiens
  siRNA target sequence for ASCL3 (NM_020646.1,473-491).
cgatcaagtacattaacta

SEQ ID NO: 377852 - DNA, 19 bp, Homo sapiens
  siRNA target sequence for ASCL3 (NM_020646.1,577-595).
catgctgaccctatgttca

SEQ ID NO: 377853 - DNA, 19 bp, Homo sapiens
  siRNA target sequence for PELI1 (NM_020651.2,4041-4059).
gttttctcctgatcaagaa

SEQ ID NO: 377854 - DNA, 19 bp, Homo sapiens
  siRNA target sequence for PELI1 (NM_020651.2,4070-4088).
ctaaagcaccagtaaaata

SEQ ID NO: 377855 - DNA, 19 bp, Homo sapiens
  siRNA target sequence for PELI1 (NM_020651.2,4200-4218).
cagcactgtgcatattgct

SEQ ID NO: 377856 - DNA, 19 bp, Homo sapiens
  siRNA target sequence for PELI1 (NM_020651.2,4255-4273).
gaccagcatagcatatcat

SEQ ID NO: 377857 - DNA, 19 bp, Homo sapiens
  siRNA target sequence for PELI1 (NM_020651.2,4257-4275).
ccagcatagcatatcatat

SEQ ID NO: 377858 - DNA, 19 bp, Homo sapiens
  siRNA target sequence for PELI1 (NM_020651.2,4260-4278).
gcatagcatatcatatact

SEQ ID NO: 377859 - DNA, 19 bp, Homo sapiens
  siRNA target sequence for PELI1 (NM_020651.2,4293-4311).
gactgtggtggttgaatat

SEQ ID NO: 377860 - DNA, 19 bp, Homo sapiens
  siRNA target sequence for PELI1 (NM_020651.2,4355-4373).
ctgaaagccccattgattt

SEQ ID NO: 377861 - DNA, 19 bp, Homo sapiens
  siRNA target sequence for PELI1 (NM_020651.2,4362-4380).
ccccattgattttgtagta

SEQ ID NO: 377862 - DNA, 19 bp, Homo sapiens
  siRNA target sequence for PELI1 (NM_020651.2,4386-4404).
cacggttcctggaagtcaa

SEQ ID NO: 377863 - DNA, 19 bp, Homo sapiens
  siRNA target sequence for PELI1 (NM_020651.2,4414-4432).
gatacacagtcagtacaaa

SEQ ID NO: 377864 - DNA, 19 bp, Homo sapiens
  siRNA target sequence for PELI1 (NM_020651.2,4422-4440).
gtcagtacaaagcactata

SEQ ID NO: 377865 - DNA, 19 bp, Homo sapiens
  siRNA target sequence for PELI1 (NM_020651.2,4426-4444).
gtacaaagcactatatcaa

SEQ ID NO: 377866 - DNA, 19 bp, Homo sapiens
  siRNA target sequence for PELI1 (NM_020651.2,4481-4499).
cctttacagcacggattta

SEQ ID NO: 377867 - DNA, 19 bp, Homo sapiens
  siRNA target sequence for PELI1 (NM_020651.2,4578-4596).
ggatggcttgaccactaat

SEQ ID NO: 377868 - DNA, 19 bp, Homo sapiens
  siRNA target sequence for PELI1 (NM_020651.2,4587-4605).
gaccactaatggtgttctt

SEQ ID NO: 377869 - DNA, 19 bp, Homo sapiens
  siRNA target sequence for PELI1 (NM_020651.2,4589-4607).
ccactaatggtgttcttgt

SEQ ID NO: 377870 - DNA, 19 bp, Homo sapiens
  siRNA target sequence for PELI1 (NM_020651.2,4732-4750).
gaaattgaaaccaatcagt

SEQ ID NO: 377871 - DNA, 19 bp, Homo sapiens
  siRNA target sequence for PELI1 (NM_020651.2,4893-4911).
gttcaacacactagcattt

SEQ ID NO: 377872 - DNA, 19 bp, Homo sapiens
  siRNA target sequence for PELI1 (NM_020651.2,4901-4919).
cactagcatttcctagtat

SEQ ID NO: 377873 - DNA, 19 bp, Homo sapiens
  siRNA target sequence for PELI1 (NM_020651.2,4903-4921).
ctagcatttcctagtatga

SEQ ID NO: 377874 - DNA, 19 bp, Homo sapiens
  siRNA target sequence for PELI1 (NM_020651.2,4906-4924).
gcatttcctagtatgaaga

SEQ ID NO: 377875 - DNA, 19 bp, Homo sapiens
  siRNA target sequence for PELI1 (NM_020651.2,4926-4944).
gaaagacgttgtagatgaa

SEQ ID NO: 377876 - DNA, 19 bp, Homo sapiens
  siRNA target sequence for PELI1 (NM_020651.2,4951-4969).
ccatgggtatatctaaact

SEQ ID NO: 377877 - DNA, 19 bp, Homo sapiens
  siRNA target sequence for PELI1 (NM_020651.2,4975-4993).
catgtacatggctatcata

SEQ ID NO: 377878 - DNA, 19 bp, Homo sapiens
  siRNA target sequence for PELI1 (NM_020651.2,5029-5047).
cgtgaatgtcctatgtgta

SEQ ID NO: 377879 - DNA, 19 bp, Homo sapiens
  siRNA target sequence for PELI1 (NM_020651.2,5188-5206).
cttcctcatggtactcata

SEQ ID NO: 377880 - DNA, 19 bp, Homo sapiens
  siRNA target sequence for PELI1 (NM_020651.2,5248-5266).
ggtgaacaaggctacatca

SEQ ID NO: 377881 - DNA, 19 bp, Homo sapiens
  siRNA target sequence for PELI1 (NM_020651.2,5254-5272).
caaggctacatcagactta

SEQ ID NO: 377882 - DNA, 19 bp, Homo sapiens
  siRNA target sequence for PELI1 (NM_020651.2,5257-5275).
ggctacatcagacttattt

SEQ ID NO: 377883 - DNA, 19 bp, Homo sapiens
  siRNA target sequence for NX17 (NM_020665.2,330-348).
gcttttaaagtgagactta

SEQ ID NO: 377884 - DNA, 19 bp, Homo sapiens
  siRNA target sequence for NX17 (NM_020665.2,382-400).
cctgggataccaatgaaga

SEQ ID NO: 377885 - DNA, 19 bp, Homo sapiens
  siRNA target sequence for NX17 (NM_020665.2,489-507).
gtaacccagagggtatcat

SEQ ID NO: 377886 - DNA, 19 bp, Homo sapiens
  siRNA target sequence for NX17 (NM_020665.2,518-536).
ggttacagacccttcaaaa

SEQ ID NO: 377887 - DNA, 19 bp, Homo sapiens
  siRNA target sequence for NX17 (NM_020665.2,519-537).
gttacagacccttcaaaaa

SEQ ID NO: 377888 - DNA, 19 bp, Homo sapiens
  siRNA target sequence for NX17 (NM_020665.2,560-578).
ggtgcaatcagccataaga

SEQ ID NO: 377889 - DNA, 19 bp, Homo sapiens
  siRNA target sequence for NX17 (NM_020665.2,584-602).
caagaaccggatcaacaat

SEQ ID NO: 377890 - DNA, 19 bp, Homo sapiens
  siRNA target sequence for NX17 (NM_020665.2,618-636).
gaccaaactctggaatttt

SEQ ID NO: 377891 - DNA, 19 bp, Homo sapiens
  siRNA target sequence for NX17 (NM_020665.2,676-694).
ctgtgcccatctggattat

SEQ ID NO: 377892 - DNA, 19 bp, Homo sapiens
  siRNA target sequence for NX17 (NM_020665.2,678-696).
gtgcccatctggattatta

SEQ ID NO: 377893 - DNA, 19 bp, Homo sapiens
  siRNA target sequence for NX17 (NM_020665.2,707-725).
gatattttgcatcatcata

SEQ ID NO: 377894 - DNA, 19 bp, Homo sapiens
  siRNA target sequence for NX17 (NM_020665.2,715-733).
gcatcatcatagttgcaat

SEQ ID NO: 377895 - DNA, 19 bp, Homo sapiens
  siRNA target sequence for NX17 (NM_020665.2,716-734).
catcatcatagttgcaatt

SEQ ID NO: 377896 - DNA, 19 bp, Homo sapiens
  siRNA target sequence for NX17 (NM_020665.2,853-871).
ctgatcccctggacatgaa

SEQ ID NO: 377897 - DNA, 19 bp, Homo sapiens
  siRNA target sequence for NX17 (NM_020665.2,866-884).
catgaagggagggcatatt

SEQ ID NO: 377898 - DNA, 19 bp, Homo sapiens
  siRNA target sequence for NX17 (NM_020665.2,869-887).
gaagggagggcatattaat

SEQ ID NO: 377899 - DNA, 19 bp, Homo sapiens
  siRNA target sequence for NX17 (NM_020665.2,872-890).
gggagggcatattaatgat

SEQ ID NO: 377900 - DNA, 19 bp, Homo sapiens
  siRNA target sequence for LOC57399 (NM_020669.1,143-161).
ccccaacactatagcaaaa

SEQ ID NO: 377901 - DNA, 19 bp, Homo sapiens
  siRNA target sequence for LOC57399 (NM_020669.1,156-174).
gcaaaagggctgatagtaa

SEQ ID NO: 377902 - DNA, 19 bp, Homo sapiens
  siRNA target sequence for LOC57399 (NM_020669.1,157-175).
caaaagggctgatagtaaa

SEQ ID NO: 377903 - DNA, 19 bp, Homo sapiens
  siRNA target sequence for LOC57399 (NM_020669.1,271-289).
caagctacggtattatgtt

SEQ ID NO: 377904 - DNA, 19 bp, Homo sapiens
  siRNA target sequence for LOC57399 (NM_020669.1,275-293).
ctacggtattatgttaaca

SEQ ID NO: 377905 - DNA, 19 bp, Homo sapiens
  siRNA target sequence for AD024 (NM_020675.3,143-161).
cgaactggcacttttcgat

SEQ ID NO: 377906 - DNA, 19 bp, Homo sapiens
  siRNA target sequence for AD024 (NM_020675.3,144-162).
gaactggcacttttcgata

SEQ ID NO: 377907 - DNA, 19 bp, Homo sapiens
  siRNA target sequence for AD024 (NM_020675.3,147-165).
ctggcacttttcgataaaa

SEQ ID NO: 377908 - DNA, 19 bp, Homo sapiens
  siRNA target sequence for AD024 (NM_020675.3,150-168).
gcacttttcgataaaagca

SEQ ID NO: 377909 - DNA, 19 bp, Homo sapiens
  siRNA target sequence for AD024 (NM_020675.3,151-169).
cacttttcgataaaagcat

SEQ ID NO: 377910 - DNA, 19 bp, Homo sapiens
  siRNA target sequence for AD024 (NM_020675.3,220-238).
cgggactaagagataccta

SEQ ID NO: 377911 - DNA, 19 bp, Homo sapiens
  siRNA target sequence for AD024 (NM_020675.3,330-348).
cagatcagcaggcaaaata

SEQ ID NO: 377912 - DNA, 19 bp, Homo sapiens
  siRNA target sequence for AD024 (NM_020675.3,478-496).
ctatttctactgctaataa

SEQ ID NO: 377913 - DNA, 19 bp, Homo sapiens
  siRNA target sequence for AD024 (NM_020675.3,527-545).
gaaatctgcagacttgtat

SEQ ID NO: 377914 - DNA, 19 bp, Homo sapiens
  siRNA target sequence for AD024 (NM_020675.3,555-573).
cttggactagaaattcgaa

SEQ ID NO: 377915 - DNA, 19 bp, Homo sapiens
  siRNA target sequence for AD024 (NM_020675.3,559-577).
gactagaaattcgaaaaat

SEQ ID NO: 377916 - DNA, 19 bp, Homo sapiens
  siRNA target sequence for AD024 (NM_020675.3,607-625).
ctaatattgaccctaagaa

SEQ ID NO: 377917 - DNA, 19 bp, Homo sapiens
  siRNA target sequence for AD024 (NM_020675.3,627-645).
cctgagagcccatttatgt

SEQ ID NO: 377918 - DNA, 19 bp, Homo sapiens
  siRNA target sequence for AD024 (NM_020675.3,628-646).
ctgagagcccatttatgtt

SEQ ID NO: 377919 - DNA, 19 bp, Homo sapiens
  siRNA target sequence for AD024 (NM_020675.3,732-750).
gtaaggaagaccaacaatt

SEQ ID NO: 377920 - DNA, 19 bp, Homo sapiens
  siRNA target sequence for AD024 (NM_020675.3,765-783).
gccaatgttcggaaagctt

SEQ ID NO: 377921 - DNA, 19 bp, Homo sapiens
  siRNA target sequence for AD024 (NM_020675.3,766-784).
ccaatgttcggaaagcttt

SEQ ID NO: 377922 - DNA, 19 bp, Homo sapiens
  siRNA target sequence for HSCARG (NM_020677.2,525-543).
gctgcaaggtgcagaagta

SEQ ID NO: 377923 - DNA, 19 bp, Homo sapiens
  siRNA target sequence for HSCARG (NM_020677.2,605-623).
ccttcatcgtgaccaatta

SEQ ID NO: 377924 - DNA, 19 bp, Homo sapiens
  siRNA target sequence for HSCARG (NM_020677.2,831-849).
gcggctgccctgctatttt

SEQ ID NO: 377925 - DNA, 19 bp, Homo sapiens
  siRNA target sequence for HSCARG (NM_020677.2,967-985).
gtggtgctcagccttttga

SEQ ID NO: 377926 - DNA, 19 bp, Homo sapiens
  siRNA target sequence for HT017 (NM_020678.2,197-215).
cccggacaagtgttactgt

SEQ ID NO: 377927 - DNA, 19 bp, Homo sapiens
  siRNA target sequence for HT017 (NM_020678.2,212-230).
ctgtcagtcatctacaaat

SEQ ID NO: 377928 - DNA, 19 bp, Homo sapiens
  siRNA target sequence for HT017 (NM_020678.2,260-278).
cgaaatcccttcccattta

SEQ ID NO: 377929 - DNA, 19 bp, Homo sapiens
  siRNA target sequence for HT017 (NM_020678.2,287-305).
gactcgaacgctgcattta

SEQ ID NO: 377930 - DNA, 19 bp, Homo sapiens
  siRNA target sequence for HT017 (NM_020678.2,289-307).
ctcgaacgctgcatttaca

SEQ ID NO: 377931 - DNA, 19 bp, Homo sapiens
  siRNA target sequence for HT017 (NM_020678.2,292-310).
gaacgctgcatttacaaga

SEQ ID NO: 377932 - DNA, 19 bp, Homo sapiens
  siRNA target sequence for HT017 (NM_020678.2,295-313).
cgctgcatttacaagataa

SEQ ID NO: 377933 - DNA, 19 bp, Homo sapiens
  siRNA target sequence for HT017 (NM_020678.2,358-376).
ggctcatgaccttaaactt

SEQ ID NO: 377934 - DNA, 19 bp, Homo sapiens
  siRNA target sequence for HT017 (NM_020678.2,426-444).
cagcacttgcaggttttaa

SEQ ID NO: 377935 - DNA, 19 bp, Homo sapiens
  siRNA target sequence for HT017 (NM_020678.2,431-449).
cttgcaggttttaaatcta

SEQ ID NO: 377936 - DNA, 19 bp, Homo sapiens
  siRNA target sequence for HT017 (NM_020678.2,504-522).
ctgagggagcttgatttgt

SEQ ID NO: 377937 - DNA, 19 bp, Homo sapiens
  siRNA target sequence for HT017 (NM_020678.2,510-528).
gagcttgatttgtcatcaa

SEQ ID NO: 377938 - DNA, 19 bp, Homo sapiens
  siRNA target sequence for HT017 (NM_020678.2,568-586).
gggagaacctaactatact

SEQ ID NO: 377939 - DNA, 19 bp, Homo sapiens
  siRNA target sequence for HT017 (NM_020678.2,569-587).
ggagaacctaactatactt

SEQ ID NO: 377940 - DNA, 19 bp, Homo sapiens
  siRNA target sequence for HT017 (NM_020678.2,580-598).
ctatacttgcggttcaaca

SEQ ID NO: 377941 - DNA, 19 bp, Homo sapiens
  siRNA target sequence for HT017 (NM_020678.2,669-687).
gacaacctctggaaatgca

SEQ ID NO: 377942 - DNA, 19 bp, Homo sapiens
  siRNA target sequence for HT017 (NM_020678.2,691-709).
gccacttgctcggtcttaa

SEQ ID NO: 377943 - DNA, 19 bp, Homo sapiens
  siRNA target sequence for HT017 (NM_020678.2,692-710).
ccacttgctcggtcttaaa

SEQ ID NO: 377944 - DNA, 19 bp, Homo sapiens
  siRNA target sequence for HT017 (NM_020678.2,717-735).
ctggagaaatttgtctata

SEQ ID NO: 377945 - DNA, 19 bp, Homo sapiens
  siRNA target sequence for HT017 (NM_020678.2,731-749).
ctataaagggggactaaca

SEQ ID NO: 377946 - DNA, 19 bp, Homo sapiens
  siRNA target sequence for HT017 (NM_020678.2,744-762).
ctaacagacggcatcatct

SEQ ID NO: 377947 - DNA, 19 bp, Homo sapiens
  siRNA target sequence for HT017 (NM_020678.2,750-768).
gacggcatcatctgtgaat

SEQ ID NO: 377948 - DNA, 19 bp, Homo sapiens
  siRNA target sequence for HT017 (NM_020678.2,752-770).
cggcatcatctgtgaatca

SEQ ID NO: 377949 - DNA, 19 bp, Homo sapiens
  siRNA target sequence for HT017 (NM_020678.2,1024-1042).
ggattgtgtgtctcatgat

SEQ ID NO: 377950 - DNA, 19 bp, Homo sapiens
  siRNA target sequence for HT017 (NM_020678.2,1067-1085).
cacctatgcggcaatcaca

SEQ ID NO: 377951 - DNA, 19 bp, Homo sapiens
  siRNA target sequence for AD026 (NM_020683.3,473-491).
gcttaccgtcagattcaga

SEQ ID NO: 377952 - DNA, 19 bp, Homo sapiens
  siRNA target sequence for AD026 (NM_020683.3,474-492).
cttaccgtcagattcagaa

SEQ ID NO: 377953 - DNA, 19 bp, Homo sapiens
  siRNA target sequence for AD026 (NM_020683.3,479-497).
cgtcagattcagaattcct

SEQ ID NO: 377954 - DNA, 19 bp, Homo sapiens
  siRNA target sequence for AD026 (NM_020683.3,500-518).
gctccctgggtgcattcta

SEQ ID NO: 377955 - DNA, 19 bp, Homo sapiens
  siRNA target sequence for AD026 (NM_020683.3,547-565).
cagtcatgtggctcttcat

SEQ ID NO: 377956 - DNA, 19 bp, Homo sapiens
  siRNA target sequence for AD026 (NM_020683.3,572-590).
ctccttggctctcatttca

SEQ ID NO: 377957 - DNA, 19 bp, Homo sapiens
  siRNA target sequence for AD026 (NM_020683.3,574-592).
ccttggctctcatttcaga

SEQ ID NO: 377958 - DNA, 19 bp, Homo sapiens
  siRNA target sequence for AD026 (NM_020683.3,662-680).
caatgcccactacaagaat

SEQ ID NO: 377959 - DNA, 19 bp, Homo sapiens
  siRNA target sequence for AD026 (NM_020683.3,742-760).
ctaacagcaccaatcatgt

SEQ ID NO: 377960 - DNA, 19 bp, Homo sapiens
  siRNA target sequence for AD026 (NM_020683.3,939-957).
gacctatcaggcaacaaaa

SEQ ID NO: 377961 - DNA, 19 bp, Homo sapiens
  siRNA target sequence for AD026 (NM_020683.3,965-983).
ctgcaaggctcccaaagtt

SEQ ID NO: 377962 - DNA, 19 bp, Homo sapiens
  siRNA target sequence for AD026 (NM_020683.3,1003-1021).
ccaggacgtccattctcat

SEQ ID NO: 377963 - DNA, 19 bp, Homo sapiens
  siRNA target sequence for AD026 (NM_020683.3,1007-1025).
gacgtccattctcatcatt

SEQ ID NO: 377964 - DNA, 19 bp, Homo sapiens
  siRNA target sequence for AD026 (NM_020683.3,1105-1123).
gggtaggcaacactttgaa

SEQ ID NO: 377965 - DNA, 19 bp, Homo sapiens
  siRNA target sequence for NPD007 (NM_020684.2,320-338).
ggctggtaacctacatctt

SEQ ID NO: 377966 - DNA, 19 bp, Homo sapiens
  siRNA target sequence for NPD007 (NM_020684.2,325-343).
gtaacctacatctttgtct

SEQ ID NO: 377967 - DNA, 19 bp, Homo sapiens
  siRNA target sequence for NPD007 (NM_020684.2,386-404).
ggcgctttgctggcaattt

SEQ ID NO: 377968 - DNA, 19 bp, Homo sapiens
  siRNA target sequence for NPD007 (NM_020684.2,389-407).
gctttgctggcaatttcga

SEQ ID NO: 377969 - DNA, 19 bp, Homo sapiens
  siRNA target sequence for NPD007 (NM_020684.2,424-442).
gtccgccactgcttcttca

SEQ ID NO: 377970 - DNA, 19 bp, Homo sapiens
  siRNA target sequence for NPD007 (NM_020684.2,434-452).
gcttcttcaccgtgatctt

SEQ ID NO: 377971 - DNA, 19 bp, Homo sapiens
  siRNA target sequence for NPD007 (NM_020684.2,455-473).
ccatcttctccgctatcat

SEQ ID NO: 377972 - DNA, 19 bp, Homo sapiens
  siRNA target sequence for NPD007 (NM_020684.2,725-743).
ctcacctactgctattcca

SEQ ID NO: 377973 - DNA, 19 bp, Homo sapiens
  siRNA target sequence for NPD007 (NM_020684.2,804-822).
ggaggatatccgtgttcaa

SEQ ID NO: 377974 - DNA, 19 bp, Homo sapiens
  siRNA target sequence for NPD007 (NM_020684.2,807-825).
ggatatccgtgttcaagta

SEQ ID NO: 377975 - DNA, 19 bp, Homo sapiens
  siRNA target sequence for NPD007 (NM_020684.2,1216-1234).
ccatgccctgagagaattt

SEQ ID NO: 377976 - DNA, 19 bp, Homo sapiens
  siRNA target sequence for NPD007 (NM_020684.2,1263-1281).
gaaggtcctccctaagagt

SEQ ID NO: 377977 - DNA, 19 bp, Homo sapiens
  siRNA target sequence for HT021 (NM_020685.3,143-161).
caagaaattcgcctttcta

SEQ ID NO: 377978 - DNA, 19 bp, Homo sapiens
  siRNA target sequence for HT021 (NM_020685.3,170-188).
gaagaaatagtatcacaaa

SEQ ID NO: 377979 - DNA, 19 bp, Homo sapiens
  siRNA target sequence for HT021 (NM_020685.3,214-232).
gaataaattgggtgatcaa

SEQ ID NO: 377980 - DNA, 19 bp, Homo sapiens
  siRNA target sequence for HT021 (NM_020685.3,387-405).
gggcatcagtagaagaata

SEQ ID NO: 377981 - DNA, 19 bp, Homo sapiens
  siRNA target sequence for HT021 (NM_020685.3,389-407).
gcatcagtagaagaatata

SEQ ID NO: 377982 - DNA, 19 bp, Homo sapiens
  siRNA target sequence for HT021 (NM_020685.3,434-452).
ggaagagcaccatatcctt

SEQ ID NO: 377983 - DNA, 19 bp, Homo sapiens
  siRNA target sequence for HT021 (NM_020685.3,435-453).
gaagagcaccatatccttt

SEQ ID NO: 377984 - DNA, 19 bp, Homo sapiens
  siRNA target sequence for FLJ20288 (NM_020690.3,355-373).
gaagtgtccgaggttgaat

SEQ ID NO: 377985 - DNA, 19 bp, Homo sapiens
  siRNA target sequence for FLJ20288 (NM_020690.3,358-376).
gtgtccgaggttgaatcat

SEQ ID NO: 377986 - DNA, 19 bp, Homo sapiens
  siRNA target sequence for FLJ20288 (NM_020690.3,360-378).
gtccgaggttgaatcattt

SEQ ID NO: 377987 - DNA, 19 bp, Homo sapiens
  siRNA target sequence for FLJ20288 (NM_020690.3,363-381).
cgaggttgaatcatttatt

SEQ ID NO: 377988 - DNA, 19 bp, Homo sapiens
  siRNA target sequence for FLJ20288 (NM_020690.3,364-382).
gaggttgaatcatttattt

SEQ ID NO: 377989 - DNA, 19 bp, Homo sapiens
  siRNA target sequence for FLJ20288 (NM_020690.3,427-445).
gagatattcttatcaagta

SEQ ID NO: 377990 - DNA, 19 bp, Homo sapiens
  siRNA target sequence for FLJ20288 (NM_020690.3,429-447).
gatattcttatcaagtact

SEQ ID NO: 377991 - DNA, 19 bp, Homo sapiens
  siRNA target sequence for FLJ20288 (NM_020690.3,483-501).
gacacaggcacgactagaa

SEQ ID NO: 377992 - DNA, 19 bp, Homo sapiens
  siRNA target sequence for FLJ20288 (NM_020690.3,698-716).
gttcagatggggatgttaa

SEQ ID NO: 377993 - DNA, 19 bp, Homo sapiens
  siRNA target sequence for FLJ20288 (NM_020690.3,712-730).
gttaatgctgttcgtaaat

SEQ ID NO: 377994 - DNA, 19 bp, Homo sapiens
  siRNA target sequence for FLJ20288 (NM_020690.3,783-801).
gctgtgtttggcttgttca

SEQ ID NO: 377995 - DNA, 19 bp, Homo sapiens
  siRNA target sequence for FLJ20288 (NM_020690.3,794-812).
cttgttcagcagggtatta

SEQ ID NO: 377996 - DNA, 19 bp, Homo sapiens
  siRNA target sequence for FLJ20288 (NM_020690.3,800-818).
cagcagggtattatgaatt

SEQ ID NO: 377997 - DNA, 19 bp, Homo sapiens
  siRNA target sequence for FLJ20288 (NM_020690.3,821-839).
cacaagtattgcttgctat

SEQ ID NO: 377998 - DNA, 19 bp, Homo sapiens
  siRNA target sequence for FLJ20288 (NM_020690.3,836-854).
ctatgcatgctaatgttga

SEQ ID NO: 377999 - DNA, 19 bp, Homo sapiens
  siRNA target sequence for FLJ20288 (NM_020690.3,896-914).
cttccagtggaggttactt

SEQ ID NO: 378000 - DNA, 19 bp, Homo sapiens
  siRNA target sequence for FLJ20288 (NM_020690.3,899-917).
ccagtggaggttacttaga

SEQ ID NO: 378001 - DNA, 19 bp, Homo sapiens
  siRNA target sequence for FLJ20288 (NM_020690.3,902-920).
gtggaggttacttagatat

SEQ ID NO: 378002 - DNA, 19 bp, Homo sapiens
  siRNA target sequence for FLJ20288 (NM_020690.3,978-996).
cactgcgctaacttatgca

SEQ ID NO: 378003 - DNA, 19 bp, Homo sapiens
  siRNA target sequence for FLJ20288 (NM_020690.3,1032-1050).
ccttaatgaaggtgcaaat

SEQ ID NO: 378004 - DNA, 19 bp, Homo sapiens
  siRNA target sequence for FLJ20288 (NM_020690.3,1033-1051).
cttaatgaaggtgcaaata

SEQ ID NO: 378005 - DNA, 19 bp, Homo sapiens
  siRNA target sequence for FLJ20288 (NM_020690.3,1043-1061).
gtgcaaatatagaagatca

SEQ ID NO: 378006 - DNA, 19 bp, Homo sapiens
  siRNA target sequence for FLJ20288 (NM_020690.3,1045-1063).
gcaaatatagaagatcata

SEQ ID NO: 378007 - DNA, 19 bp, Homo sapiens
  siRNA target sequence for FLJ20288 (NM_020690.3,1046-1064).
caaatatagaagatcataa

SEQ ID NO: 378008 - DNA, 19 bp, Homo sapiens
  siRNA target sequence for FLJ20288 (NM_020690.3,1073-1091).
gacatactcccttaatgga

SEQ ID NO: 378009 - DNA, 19 bp, Homo sapiens
  siRNA target sequence for FLJ20288 (NM_020690.3,1114-1132).
gaagttgcaagagttcttt

SEQ ID NO: 378010 - DNA, 19 bp, Homo sapiens
  siRNA target sequence for FLJ20288 (NM_020690.3,1152-1170).
caacactcattctaatgaa

SEQ ID NO: 378011 - DNA, 19 bp, Homo sapiens
  siRNA target sequence for FLJ20288 (NM_020690.3,1173-1191).
caaagaaagtgctctaaca

SEQ ID NO: 378012 - DNA, 19 bp, Homo sapiens
  siRNA target sequence for FLJ20288 (NM_020690.3,1215-1233).
ggatatggttcgctttcta

SEQ ID NO: 378013 - DNA, 19 bp, Homo sapiens
  siRNA target sequence for FLJ20288 (NM_020690.3,1221-1239).
ggttcgctttctacttgaa

SEQ ID NO: 378014 - DNA, 19 bp, Homo sapiens
  siRNA target sequence for FLJ20288 (NM_020690.3,1315-1333).
gaggtggcacgtttgcttt

SEQ ID NO: 378015 - DNA, 19 bp, Homo sapiens
  siRNA target sequence for FLJ20288 (NM_020690.3,1419-1437).
ggcagctctacttattgaa

SEQ ID NO: 378016 - DNA, 19 bp, Homo sapiens
  siRNA target sequence for FLJ20288 (NM_020690.3,1697-1715).
gacacctggaattggttaa

SEQ ID NO: 378017 - DNA, 19 bp, Homo sapiens
  siRNA target sequence for FLJ20288 (NM_020690.3,1802-1820).
cggatgttgcagatgtttt

SEQ ID NO: 378018 - DNA, 19 bp, Homo sapiens
  siRNA target sequence for FLJ20288 (NM_020690.3,1832-1850).
gggctgatttagaacatga

SEQ ID NO: 378019 - DNA, 19 bp, Homo sapiens
  siRNA target sequence for FLJ20288 (NM_020690.3,1902-1920).
gtgcactgtgcagtttctt

SEQ ID NO: 378020 - DNA, 19 bp, Homo sapiens
  siRNA target sequence for FLJ20288 (NM_020690.3,1925-1943).
gcaaaggtgccaatgttaa

SEQ ID NO: 378021 - DNA, 19 bp, Homo sapiens
  siRNA target sequence for FLJ20288 (NM_020690.3,1944-1962).
cagggctacagccaataat

SEQ ID NO: 378022 - DNA, 19 bp, Homo sapiens
  siRNA target sequence for FLJ20288 (NM_020690.3,2063-2081).
gttcaacaatgctcattga

SEQ ID NO: 378023 - DNA, 19 bp, Homo sapiens
  siRNA target sequence for FLJ20288 (NM_020690.3,2087-2105).
caaagggtggccatactaa

SEQ ID NO: 378024 - DNA, 19 bp, Homo sapiens
  siRNA target sequence for FLJ20288 (NM_020690.3,2098-2116).
catactaatgtagtttctt

SEQ ID NO: 378025 - DNA, 19 bp, Homo sapiens
  siRNA target sequence for FLJ20288 (NM_020690.3,2121-2139).
gttggattatccaaataat

SEQ ID NO: 378026 - DNA, 19 bp, Homo sapiens
  siRNA target sequence for FLJ20288 (NM_020690.3,2210-2228).
gtgtgccaacgcatacact

SEQ ID NO: 378027 - DNA, 19 bp, Homo sapiens
  siRNA target sequence for FLJ20288 (NM_020690.3,2286-2304).
ccttttaggagtgcaaaaa

SEQ ID NO: 378028 - DNA, 19 bp, Homo sapiens
  siRNA target sequence for FLJ20288 (NM_020690.3,2405-2423).
ctgaaggcaagctgaatga

SEQ ID NO: 378029 - DNA, 19 bp, Homo sapiens
  siRNA target sequence for FLJ20288 (NM_020690.3,2461-2479).
cttaagtcactggagttaa

SEQ ID NO: 378030 - DNA, 19 bp, Homo sapiens
  siRNA target sequence for FLJ20288 (NM_020690.3,2589-2607).
gcagttgcagatgaaaaca

SEQ ID NO: 378031 - DNA, 19 bp, Homo sapiens
  siRNA target sequence for FLJ20288 (NM_020690.3,2606-2624).
cacagcagcaatttaccaa

SEQ ID NO: 378032 - DNA, 19 bp, Homo sapiens
  siRNA target sequence for FLJ20288 (NM_020690.3,2749-2767).
cctcaggttgacacaatct

SEQ ID NO: 378033 - DNA, 19 bp, Homo sapiens
  siRNA target sequence for FLJ20288 (NM_020690.3,2750-2768).
ctcaggttgacacaatctt

SEQ ID NO: 378034 - DNA, 19 bp, Homo sapiens
  siRNA target sequence for FLJ20288 (NM_020690.3,2754-2772).
ggttgacacaatcttattt

SEQ ID NO: 378035 - DNA, 19 bp, Homo sapiens
  siRNA target sequence for FLJ20288 (NM_020690.3,2755-2773).
gttgacacaatcttattta

SEQ ID NO: 378036 - DNA, 19 bp, Homo sapiens
  siRNA target sequence for FLJ20288 (NM_020690.3,2760-2778).
cacaatcttatttaaagat

SEQ ID NO: 378037 - DNA, 19 bp, Homo sapiens
  siRNA target sequence for FLJ20288 (NM_020690.3,2766-2784).
cttatttaaagataatgat

SEQ ID NO: 378038 - DNA, 19 bp, Homo sapiens
  siRNA target sequence for FLJ20288 (NM_020690.3,2807-2825).
caccatcggcagaacagat

SEQ ID NO: 378039 - DNA, 19 bp, Homo sapiens
  siRNA target sequence for FLJ20288 (NM_020690.3,2857-2875).
ccacagtgtaacttttcca

SEQ ID NO: 378040 - DNA, 19 bp, Homo sapiens
  siRNA target sequence for FLJ20288 (NM_020690.3,2884-2902).
ggttctaatgggacaaatt

SEQ ID NO: 378041 - DNA, 19 bp, Homo sapiens
  siRNA target sequence for FLJ20288 (NM_020690.3,2947-2965).
cagcctcagattgctatta

SEQ ID NO: 378042 - DNA, 19 bp, Homo sapiens
  siRNA target sequence for FLJ20288 (NM_020690.3,2949-2967).
gcctcagattgctattact

SEQ ID NO: 378043 - DNA, 19 bp, Homo sapiens
  siRNA target sequence for FLJ20288 (NM_020690.3,3033-3051).
gcttaccgacactcttgat

SEQ ID NO: 378044 - DNA, 19 bp, Homo sapiens
  siRNA target sequence for FLJ20288 (NM_020690.3,3108-3126).
gaccacagagtgtcttaca

SEQ ID NO: 378045 - DNA, 19 bp, Homo sapiens
  siRNA target sequence for FLJ20288 (NM_020690.3,3183-3201).
gtatccttcagttgacatt

SEQ ID NO: 378046 - DNA, 19 bp, Homo sapiens
  siRNA target sequence for FLJ20288 (NM_020690.3,3219-3237).
caatcatgacacagcatta

SEQ ID NO: 378047 - DNA, 19 bp, Homo sapiens
  siRNA target sequence for FLJ20288 (NM_020690.3,3248-3266).
gtgcaggtggtcatgaaga

SEQ ID NO: 378048 - DNA, 19 bp, Homo sapiens
  siRNA target sequence for FLJ20288 (NM_020690.3,3287-3305).
cacgggatgccaaaattga

SEQ ID NO: 378049 - DNA, 19 bp, Homo sapiens
  siRNA target sequence for FLJ20288 (NM_020690.3,3357-3375).
gcatgttggagttgttgaa

SEQ ID NO: 378050 - DNA, 19 bp, Homo sapiens
  siRNA target sequence for FLJ20288 (NM_020690.3,3407-3425).
cacagtctgaacgaactaa

SEQ ID NO: 378051 - DNA, 19 bp, Homo sapiens
  siRNA target sequence for FLJ20288 (NM_020690.3,3411-3429).
gtctgaacgaactaaggat

SEQ ID NO: 378052 - DNA, 19 bp, Homo sapiens
  siRNA target sequence for FLJ20288 (NM_020690.3,3484-3502).
ctggctcgaggtgcaaata

SEQ ID NO: 378053 - DNA, 19 bp, Homo sapiens
  siRNA target sequence for FLJ20288 (NM_020690.3,3508-3526).
cataggaacgtatctgatt

SEQ ID NO: 378054 - DNA, 19 bp, Homo sapiens
  siRNA target sequence for FLJ20288 (NM_020690.3,3513-3531).
gaacgtatctgattataca

SEQ ID NO: 378055 - DNA, 19 bp, Homo sapiens
  siRNA target sequence for FLJ20288 (NM_020690.3,3549-3567).
gtctggaggatatgttaat

SEQ ID NO: 378056 - DNA, 19 bp, Homo sapiens
  siRNA target sequence for FLJ20288 (NM_020690.3,3570-3588).
cattaagattctgcttaat

SEQ ID NO: 378057 - DNA, 19 bp, Homo sapiens
  siRNA target sequence for FLJ20288 (NM_020690.3,3614-3632).
ctgggagtaaactaggtat

SEQ ID NO: 378058 - DNA, 19 bp, Homo sapiens
  siRNA target sequence for FLJ20288 (NM_020690.3,3691-3709).
gatatgggttcagacatta

SEQ ID NO: 378059 - DNA, 19 bp, Homo sapiens
  siRNA target sequence for FLJ20288 (NM_020690.3,3759-3777).
ccagggccgagcagaagta

SEQ ID NO: 378060 - DNA, 19 bp, Homo sapiens
  siRNA target sequence for FLJ20288 (NM_020690.3,3792-3810).
ggaccgaaaagccaatgtt

SEQ ID NO: 378061 - DNA, 19 bp, Homo sapiens
  siRNA target sequence for FLJ20288 (NM_020690.3,3795-3813).
ccgaaaagccaatgttgaa

SEQ ID NO: 378062 - DNA, 19 bp, Homo sapiens
  siRNA target sequence for FLJ20288 (NM_020690.3,3873-3891).
ggttggaagagttcttctt

SEQ ID NO: 378063 - DNA, 19 bp, Homo sapiens
  siRNA target sequence for FLJ20288 (NM_020690.3,3877-3895).
ggaagagttcttcttgata

SEQ ID NO: 378064 - DNA, 19 bp, Homo sapiens
  siRNA target sequence for FLJ20288 (NM_020690.3,4002-4020).
gggagcccacattgatgtt

SEQ ID NO: 378065 - DNA, 19 bp, Homo sapiens
  siRNA target sequence for FLJ20288 (NM_020690.3,4007-4025).
cccacattgatgttcgtaa

SEQ ID NO: 378066 - DNA, 19 bp, Homo sapiens
  siRNA target sequence for FLJ20288 (NM_020690.3,4011-4029).
cattgatgttcgtaacaaa

SEQ ID NO: 378067 - DNA, 19 bp, Homo sapiens
  siRNA target sequence for FLJ20288 (NM_020690.3,4055-4073).
catccaatggaggtcattt

SEQ ID NO: 378068 - DNA, 19 bp, Homo sapiens
  siRNA target sequence for FLJ20288 (NM_020690.3,4130-4148).
ggaaaatcacacctcttat

SEQ ID NO: 378069 - DNA, 19 bp, Homo sapiens
  siRNA target sequence for FLJ20288 (NM_020690.3,4177-4195).
gttgttcaatatttggtaa

SEQ ID NO: 378070 - DNA, 19 bp, Homo sapiens
  siRNA target sequence for FLJ20288 (NM_020690.3,4244-4262).
caacaattacagataagga

SEQ ID NO: 378071 - DNA, 19 bp, Homo sapiens
  siRNA target sequence for FLJ20288 (NM_020690.3,4286-4304).
gtgtcgaaaccattgtgaa

SEQ ID NO: 378072 - DNA, 19 bp, Homo sapiens
  siRNA target sequence for FLJ20288 (NM_020690.3,4338-4356).
gaatgcgagtattctttta

SEQ ID NO: 378073 - DNA, 19 bp, Homo sapiens
  siRNA target sequence for FLJ20288 (NM_020690.3,4343-4361).
cgagtattcttttaaagga

SEQ ID NO: 378074 - DNA, 19 bp, Homo sapiens
  siRNA target sequence for FLJ20288 (NM_020690.3,4592-4610).
ccaccactacgattggaat

SEQ ID NO: 378075 - DNA, 19 bp, Homo sapiens
  siRNA target sequence for FLJ20288 (NM_020690.3,4596-4614).
cactacgattggaatctct

SEQ ID NO: 378076 - DNA, 19 bp, Homo sapiens
  siRNA target sequence for FLJ20288 (NM_020690.3,4676-4694).
ccagcaccaatcggaaaaa

SEQ ID NO: 378077 - DNA, 19 bp, Homo sapiens
  siRNA target sequence for FLJ20288 (NM_020690.3,4682-4700).
ccaatcggaaaaataagaa

SEQ ID NO: 378078 - DNA, 19 bp, Homo sapiens
  siRNA target sequence for FLJ20288 (NM_020690.3,4766-4784).
cccaacaaaaggcagataa

SEQ ID NO: 378079 - DNA, 19 bp, Homo sapiens
  siRNA target sequence for FLJ20288 (NM_020690.3,4817-4835).
gtgcaggtgggaatagtga

SEQ ID NO: 378080 - DNA, 19 bp, Homo sapiens
  siRNA target sequence for FLJ20288 (NM_020690.3,4885-4903).
ggtaaaagccaagagttaa

SEQ ID NO: 378081 - DNA, 19 bp, Homo sapiens
  siRNA target sequence for FLJ20288 (NM_020690.3,4886-4904).
gtaaaagccaagagttaaa

SEQ ID NO: 378082 - DNA, 19 bp, Homo sapiens
  siRNA target sequence for FLJ20288 (NM_020690.3,5008-5026).
ggtgaagtgactcctaatt

SEQ ID NO: 378083 - DNA, 19 bp, Homo sapiens
  siRNA target sequence for FLJ20288 (NM_020690.3,5060-5078).
cattaagctctccaaacat

SEQ ID NO: 378084 - DNA, 19 bp, Homo sapiens
  siRNA target sequence for FLJ20288 (NM_020690.3,5066-5084).
gctctccaaacataaagct

SEQ ID NO: 378085 - DNA, 19 bp, Homo sapiens
  siRNA target sequence for FLJ20288 (NM_020690.3,5174-5192).
cagtggtgtcgaggataat

SEQ ID NO: 378086 - DNA, 19 bp, Homo sapiens
  siRNA target sequence for FLJ20288 (NM_020690.3,5207-5225).
gcaacatcactgcaataca

SEQ ID NO: 378087 - DNA, 19 bp, Homo sapiens
  siRNA target sequence for FLJ20288 (NM_020690.3,5240-5258).
cccatattgatgtggataa

SEQ ID NO: 378088 - DNA, 19 bp, Homo sapiens
  siRNA target sequence for FLJ20288 (NM_020690.3,5241-5259).
ccatattgatgtggataaa

SEQ ID NO: 378089 - DNA, 19 bp, Homo sapiens
  siRNA target sequence for FLJ20288 (NM_020690.3,5275-5293).
ggcgagagaatgatcacaa

SEQ ID NO: 378090 - DNA, 19 bp, Homo sapiens
  siRNA target sequence for FLJ20288 (NM_020690.3,5276-5294).
gcgagagaatgatcacaat

SEQ ID NO: 378091 - DNA, 19 bp, Homo sapiens
  siRNA target sequence for FLJ20288 (NM_020690.3,5277-5295).
cgagagaatgatcacaata

SEQ ID NO: 378092 - DNA, 19 bp, Homo sapiens
  siRNA target sequence for FLJ20288 (NM_020690.3,5278-5296).
gagagaatgatcacaataa

SEQ ID NO: 378093 - DNA, 19 bp, Homo sapiens
  siRNA target sequence for FLJ20288 (NM_020690.3,5318-5336).
gatatgcagttcaactaat

SEQ ID NO: 378094 - DNA, 19 bp, Homo sapiens
  siRNA target sequence for FLJ20288 (NM_020690.3,5337-5355).
caatgcactcattcaagat

SEQ ID NO: 378095 - DNA, 19 bp, Homo sapiens
  siRNA target sequence for FLJ20288 (NM_020690.3,5371-5389).
gaagacttgattcctaaaa

SEQ ID NO: 378096 - DNA, 19 bp, Homo sapiens
  siRNA target sequence for FLJ20288 (NM_020690.3,5487-5505).
gggtgctccaactcttgta

SEQ ID NO: 378097 - DNA, 19 bp, Homo sapiens
  siRNA target sequence for FLJ20288 (NM_020690.3,5512-5530).
caggcaacaacgttatcta

SEQ ID NO: 378098 - DNA, 19 bp, Homo sapiens
  siRNA target sequence for FLJ20288 (NM_020690.3,5531-5549).
cgttccagcccgctaataa

SEQ ID NO: 378099 - DNA, 19 bp, Homo sapiens
  siRNA target sequence for FLJ20288 (NM_020690.3,5532-5550).
gttccagcccgctaataaa

SEQ ID NO: 378100 - DNA, 19 bp, Homo sapiens
  siRNA target sequence for FLJ20288 (NM_020690.3,5535-5553).
ccagcccgctaataaactt

SEQ ID NO: 378101 - DNA, 19 bp, Homo sapiens
  siRNA target sequence for FLJ20288 (NM_020690.3,5538-5556).
gcccgctaataaacttaat

SEQ ID NO: 378102 - DNA, 19 bp, Homo sapiens
  siRNA target sequence for FLJ20288 (NM_020690.3,5539-5557).
cccgctaataaacttaata

SEQ ID NO: 378103 - DNA, 19 bp, Homo sapiens
  siRNA target sequence for FLJ20288 (NM_020690.3,5543-5561).
ctaataaacttaataagaa

SEQ ID NO: 378104 - DNA, 19 bp, Homo sapiens
  siRNA target sequence for FLJ20288 (NM_020690.3,5570-5588).
caaatgtacgttcttcttt

SEQ ID NO: 378105 - DNA, 19 bp, Homo sapiens
  siRNA target sequence for FLJ20288 (NM_020690.3,5631-5649).
cctgctggctgctcaaact

SEQ ID NO: 378106 - DNA, 19 bp, Homo sapiens
  siRNA target sequence for FLJ20288 (NM_020690.3,5637-5655).
ggctgctcaaactatgcaa

SEQ ID NO: 378107 - DNA, 19 bp, Homo sapiens
  siRNA target sequence for FLJ20288 (NM_020690.3,5752-5770).
cctggcaacacaaatagct

SEQ ID NO: 378108 - DNA, 19 bp, Homo sapiens
  siRNA target sequence for FLJ20288 (NM_020690.3,5768-5786).
gctctccaaagcataataa

SEQ ID NO: 378109 - DNA, 19 bp, Homo sapiens
  siRNA target sequence for FLJ20288 (NM_020690.3,5773-5791).
ccaaagcataataacacaa

SEQ ID NO: 378110 - DNA, 19 bp, Homo sapiens
  siRNA target sequence for FLJ20288 (NM_020690.3,5805-5823).
ccagaacgggactgtttta

SEQ ID NO: 378111 - DNA, 19 bp, Homo sapiens
  siRNA target sequence for FLJ20288 (NM_020690.3,5895-5913).
gcaactgtgtgtcactaat

SEQ ID NO: 378112 - DNA, 19 bp, Homo sapiens
  siRNA target sequence for FLJ20288 (NM_020690.3,5896-5914).
caactgtgtgtcactaata

SEQ ID NO: 378113 - DNA, 19 bp, Homo sapiens
  siRNA target sequence for FLJ20288 (NM_020690.3,6166-6184).
cagcccatggcaaacctat

SEQ ID NO: 378114 - DNA, 19 bp, Homo sapiens
  siRNA target sequence for FLJ20288 (NM_020690.3,6169-6187).
cccatggcaaacctatgta

SEQ ID NO: 378115 - DNA, 19 bp, Homo sapiens
  siRNA target sequence for FLJ20288 (NM_020690.3,6322-6340).
gatttaagtcctatgtcaa

SEQ ID NO: 378116 - DNA, 19 bp, Homo sapiens
  siRNA target sequence for FLJ20288 (NM_020690.3,6338-6356).
caatgccttttgcatctaa

SEQ ID NO: 378117 - DNA, 19 bp, Homo sapiens
  siRNA target sequence for FLJ20288 (NM_020690.3,6367-6385).
gctccattgactttgacat

SEQ ID NO: 378118 - DNA, 19 bp, Homo sapiens
  siRNA target sequence for FLJ20288 (NM_020690.3,6420-6438).
cagtaatttacctcagtta

SEQ ID NO: 378119 - DNA, 19 bp, Homo sapiens
  siRNA target sequence for FLJ20288 (NM_020690.3,6452-6470).
ctcgagtttctcatcgaat

SEQ ID NO: 378120 - DNA, 19 bp, Homo sapiens
  siRNA target sequence for FLJ20288 (NM_020690.3,6472-6490).
cagcccagaggttcttttt

SEQ ID NO: 378121 - DNA, 19 bp, Homo sapiens
  siRNA target sequence for FLJ20288 (NM_020690.3,6475-6493).
cccagaggttctttttact

SEQ ID NO: 378122 - DNA, 19 bp, Homo sapiens
  siRNA target sequence for FLJ20288 (NM_020690.3,6519-6537).
ccaggatccccagtctatt

SEQ ID NO: 378123 - DNA, 19 bp, Homo sapiens
  siRNA target sequence for FLJ20288 (NM_020690.3,6520-6538).
caggatccccagtctattt

SEQ ID NO: 378124 - DNA, 19 bp, Homo sapiens
  siRNA target sequence for FLJ20288 (NM_020690.3,6541-6559).
gttacgaatccagttactt

SEQ ID NO: 378125 - DNA, 19 bp, Homo sapiens
  siRNA target sequence for FLJ20288 (NM_020690.3,6599-6617).
cttcagctgtgaacattat

SEQ ID NO: 378126 - DNA, 19 bp, Homo sapiens
  siRNA target sequence for FLJ20288 (NM_020690.3,6607-6625).
gtgaacattatgaatggtt

SEQ ID NO: 378127 - DNA, 19 bp, Homo sapiens
  siRNA target sequence for FLJ20288 (NM_020690.3,6622-6640).
ggttctcagatgcacataa

SEQ ID NO: 378128 - DNA, 19 bp, Homo sapiens
  siRNA target sequence for FLJ20288 (NM_020690.3,6623-6641).
gttctcagatgcacataaa

SEQ ID NO: 378129 - DNA, 19 bp, Homo sapiens
  siRNA target sequence for FLJ20288 (NM_020690.3,6633-6651).
gcacataaacccagcaaat

SEQ ID NO: 378130 - DNA, 19 bp, Homo sapiens
  siRNA target sequence for FLJ20288 (NM_020690.3,6673-6691).
ggcccagccacacttttca

SEQ ID NO: 378131 - DNA, 19 bp, Homo sapiens
  siRNA target sequence for FLJ20288 (NM_020690.3,6677-6695).
cagccacacttttcaatca

SEQ ID NO: 378132 - DNA, 19 bp, Homo sapiens
  siRNA target sequence for FLJ20288 (NM_020690.3,6679-6697).
gccacacttttcaatcact

SEQ ID NO: 378133 - DNA, 19 bp, Homo sapiens
  siRNA target sequence for FLJ20288 (NM_020690.3,6699-6717).
cagcagtctttttgatagt

SEQ ID NO: 378134 - DNA, 19 bp, Homo sapiens
  siRNA target sequence for FLJ20288 (NM_020690.3,6702-6720).
cagtctttttgatagtagt

SEQ ID NO: 378135 - DNA, 19 bp, Homo sapiens
  siRNA target sequence for FLJ20288 (NM_020690.3,6762-6780).
ctcacgagttgctacagat

SEQ ID NO: 378136 - DNA, 19 bp, Homo sapiens
  siRNA target sequence for FLJ20288 (NM_020690.3,6840-6858).
catgcaccctgataactca

SEQ ID NO: 378137 - DNA, 19 bp, Homo sapiens
  siRNA target sequence for FLJ20288 (NM_020690.3,6880-6898).
ccttcccagcgagtttcta

SEQ ID NO: 378138 - DNA, 19 bp, Homo sapiens
  siRNA target sequence for FLJ20288 (NM_020690.3,6885-6903).
ccagcgagtttctactagt

SEQ ID NO: 378139 - DNA, 19 bp, Homo sapiens
  siRNA target sequence for FLJ20288 (NM_020690.3,6956-6974).
ctgctcctctggcaagttt

SEQ ID NO: 378140 - DNA, 19 bp, Homo sapiens
  siRNA target sequence for FLJ20288 (NM_020690.3,7019-7037).
ctgttgggactcctagttt

SEQ ID NO: 378141 - DNA, 19 bp, Homo sapiens
  siRNA target sequence for FLJ20288 (NM_020690.3,7021-7039).
gttgggactcctagtttca

SEQ ID NO: 378142 - DNA, 19 bp, Homo sapiens
  siRNA target sequence for FLJ20288 (NM_020690.3,7024-7042).
gggactcctagtttcaaca

SEQ ID NO: 378143 - DNA, 19 bp, Homo sapiens
  siRNA target sequence for FLJ20288 (NM_020690.3,7103-7121).
caacgttgggccaaccaaa

SEQ ID NO: 378144 - DNA, 19 bp, Homo sapiens
  siRNA target sequence for FLJ20288 (NM_020690.3,7130-7148).
gtgccagtcaagatcgaaa

SEQ ID NO: 378145 - DNA, 19 bp, Homo sapiens
  siRNA target sequence for FLJ20288 (NM_020690.3,7134-7152).
cagtcaagatcgaaagata

SEQ ID NO: 378146 - DNA, 19 bp, Homo sapiens
  siRNA target sequence for FLJ20288 (NM_020690.3,7149-7167).
gatacctcccccaattgga

SEQ ID NO: 378147 - DNA, 19 bp, Homo sapiens
  siRNA target sequence for FLJ20288 (NM_020690.3,7298-7316).
caggttggtcgcaatctgt

SEQ ID NO: 378148 - DNA, 19 bp, Homo sapiens
  siRNA target sequence for FLJ20288 (NM_020690.3,7358-7376).
gcacattctcccaacatca

SEQ ID NO: 378149 - DNA, 19 bp, Homo sapiens
  siRNA target sequence for FLJ20288 (NM_020690.3,7409-7427).
ccccctctaacatttttca

SEQ ID NO: 378150 - DNA, 19 bp, Homo sapiens
  siRNA target sequence for FLJ20288 (NM_020690.3,7570-7588).
gcttggaaccctatgataa

SEQ ID NO: 378151 - DNA, 19 bp, Homo sapiens
  siRNA target sequence for FLJ20288 (NM_020690.3,7571-7589).
cttggaaccctatgataaa

SEQ ID NO: 378152 - DNA, 19 bp, Homo sapiens
  siRNA target sequence for FLJ20288 (NM_020690.3,7574-7592).
ggaaccctatgataaaagt

SEQ ID NO: 378153 - DNA, 19 bp, Homo sapiens
  siRNA target sequence for FLJ20288 (NM_020690.3,7575-7593).
gaaccctatgataaaagtt

SEQ ID NO: 378154 - DNA, 19 bp, Homo sapiens
  siRNA target sequence for KIAA1143 (NM_020696.1,143-161).
gacccaccgtagagactaa

SEQ ID NO: 378155 - DNA, 19 bp, Homo sapiens
  siRNA target sequence for KIAA1143 (NM_020696.1,145-163).
cccaccgtagagactaaga

SEQ ID NO: 378156 - DNA, 19 bp, Homo sapiens
  siRNA target sequence for KIAA1143 (NM_020696.1,147-165).
caccgtagagactaagaga

SEQ ID NO: 378157 - DNA, 19 bp, Homo sapiens
  siRNA target sequence for KIAA1143 (NM_020696.1,149-167).
ccgtagagactaagagaat

SEQ ID NO: 378158 - DNA, 19 bp, Homo sapiens
  siRNA target sequence for KIAA1143 (NM_020696.1,150-168).
cgtagagactaagagaatt

SEQ ID NO: 378159 - DNA, 19 bp, Homo sapiens
  siRNA target sequence for KIAA1143 (NM_020696.1,222-240).
gcctcaagtggtggtttta

SEQ ID NO: 378160 - DNA, 19 bp, Homo sapiens
  siRNA target sequence for KIAA1143 (NM_020696.1,246-264).
gggagacctgtcagttgaa

SEQ ID NO: 378161 - DNA, 19 bp, Homo sapiens
  siRNA target sequence for KIAA1143 (NM_020696.1,331-349).
ggaagaatcatatatcgaa

SEQ ID NO: 378162 - DNA, 19 bp, Homo sapiens
  siRNA target sequence for KIAA1143 (NM_020696.1,373-391).
gaaaaatattcaggtttaa

SEQ ID NO: 378163 - DNA, 19 bp, Homo sapiens
  siRNA target sequence for KIAA1143 (NM_020696.1,439-457).
gactcggtcaaaaagaact

SEQ ID NO: 378164 - DNA, 19 bp, Homo sapiens
  siRNA target sequence for KIAA1143 (NM_020696.1,479-497).
gtagcctcctttcttttga

SEQ ID NO: 378165 - DNA, 19 bp, Homo sapiens
  siRNA target sequence for KIAA1160 (NM_020701.1,233-251).
gccatgacggccttagcaa

SEQ ID NO: 378166 - DNA, 19 bp, Homo sapiens
  siRNA target sequence for KIAA1160 (NM_020701.1,238-256).
gacggccttagcaagattt

SEQ ID NO: 378167 - DNA, 19 bp, Homo sapiens
  siRNA target sequence for KIAA1160 (NM_020701.1,343-361).
gtggagacgacagatcatt

SEQ ID NO: 378168 - DNA, 19 bp, Homo sapiens
  siRNA target sequence for KIAA1160 (NM_020701.1,402-420).
gtttaggtgaatttcgaat

SEQ ID NO: 378169 - DNA, 19 bp, Homo sapiens
  siRNA target sequence for KIAA1160 (NM_020701.1,471-489).
gggaggtccggataaagga

SEQ ID NO: 378170 - DNA, 19 bp, Homo sapiens
  siRNA target sequence for KIAA1160 (NM_020701.1,490-508).
gctgggaggtcctgattat

SEQ ID NO: 378171 - DNA, 19 bp, Homo sapiens
  siRNA target sequence for KIAA1160 (NM_020701.1,493-511).
gggaggtcctgattatgga

SEQ ID NO: 378172 - DNA, 19 bp, Homo sapiens
  siRNA target sequence for KIAA1160 (NM_020701.1,494-512).
ggaggtcctgattatggaa

SEQ ID NO: 378173 - DNA, 19 bp, Homo sapiens
  siRNA target sequence for KIAA1160 (NM_020701.1,562-580).
ccgaggttacaagtacttt

SEQ ID NO: 378174 - DNA, 19 bp, Homo sapiens
  siRNA target sequence for KIAA1160 (NM_020701.1,577-595).
ctttggagcagcaaaagat

SEQ ID NO: 378175 - DNA, 19 bp, Homo sapiens
  siRNA target sequence for KIAA1160 (NM_020701.1,603-621).
gtgttagagagctgtttga

SEQ ID NO: 378176 - DNA, 19 bp, Homo sapiens
  siRNA target sequence for KIAA1160 (NM_020701.1,662-680).
ctcatgaaggcaatcgatt

SEQ ID NO: 378177 - DNA, 19 bp, Homo sapiens
  siRNA target sequence for KIAA1160 (NM_020701.1,672-690).
caatcgattttgagtacta

SEQ ID NO: 378178 - DNA, 19 bp, Homo sapiens
  siRNA target sequence for KIAA1160 (NM_020701.1,688-706).
ctatggttacctagatgaa

SEQ ID NO: 378179 - DNA, 19 bp, Homo sapiens
  siRNA target sequence for KIAA1160 (NM_020701.1,756-774).
gagccgagttagtggaaaa

SEQ ID NO: 378180 - DNA, 19 bp, Homo sapiens
  siRNA target sequence for KIAA1160 (NM_020701.1,758-776).
gccgagttagtggaaaagt

SEQ ID NO: 378181 - DNA, 19 bp, Homo sapiens
  siRNA target sequence for SFRS15 (NM_020706.1,287-305).
gctcttttcgcttatggat

SEQ ID NO: 378182 - DNA, 19 bp, Homo sapiens
  siRNA target sequence for SFRS15 (NM_020706.1,288-306).
ctcttttcgcttatggata

SEQ ID NO: 378183 - DNA, 19 bp, Homo sapiens
  siRNA target sequence for SFRS15 (NM_020706.1,320-338).
ctctagagccaagatgatt

SEQ ID NO: 378184 - DNA, 19 bp, Homo sapiens
  siRNA target sequence for SFRS15 (NM_020706.1,322-340).
ctagagccaagatgattct

SEQ ID NO: 378185 - DNA, 19 bp, Homo sapiens
  siRNA target sequence for SFRS15 (NM_020706.1,325-343).
gagccaagatgattctcat

SEQ ID NO: 378186 - DNA, 19 bp, Homo sapiens
  siRNA target sequence for SFRS15 (NM_020706.1,341-359).
catcactaaagctgctatt

SEQ ID NO: 378187 - DNA, 19 bp, Homo sapiens
  siRNA target sequence for SFRS15 (NM_020706.1,351-369).
gctgctattaaagctatta

SEQ ID NO: 378188 - DNA, 19 bp, Homo sapiens
  siRNA target sequence for SFRS15 (NM_020706.1,352-370).
ctgctattaaagctattaa

SEQ ID NO: 378189 - DNA, 19 bp, Homo sapiens
  siRNA target sequence for SFRS15 (NM_020706.1,355-373).
ctattaaagctattaagct

SEQ ID NO: 378190 - DNA, 19 bp, Homo sapiens
  siRNA target sequence for SFRS15 (NM_020706.1,364-382).
ctattaagctttataagca

SEQ ID NO: 378191 - DNA, 19 bp, Homo sapiens
  siRNA target sequence for SFRS15 (NM_020706.1,431-449).
caaggttccgggattatat

SEQ ID NO: 378192 - DNA, 19 bp, Homo sapiens
  siRNA target sequence for SFRS15 (NM_020706.1,434-452).
ggttccgggattatatgta

SEQ ID NO: 378193 - DNA, 19 bp, Homo sapiens
  siRNA target sequence for SFRS15 (NM_020706.1,435-453).
gttccgggattatatgtaa

SEQ ID NO: 378194 - DNA, 19 bp, Homo sapiens
  siRNA target sequence for SFRS15 (NM_020706.1,439-457).
cgggattatatgtaattga

SEQ ID NO: 378195 - DNA, 19 bp, Homo sapiens
  siRNA target sequence for SFRS15 (NM_020706.1,469-487).
gacagtctcgtcatcagtt

SEQ ID NO: 378196 - DNA, 19 bp, Homo sapiens
  siRNA target sequence for SFRS15 (NM_020706.1,510-528).
gggccaagattctctaaaa

SEQ ID NO: 378197 - DNA, 19 bp, Homo sapiens
  siRNA target sequence for SFRS15 (NM_020706.1,530-548).
cataactgccacattccaa

SEQ ID NO: 378198 - DNA, 19 bp, Homo sapiens
  siRNA target sequence for SFRS15 (NM_020706.1,537-555).
gccacattccaatatttat

SEQ ID NO: 378199 - DNA, 19 bp, Homo sapiens
  siRNA target sequence for SFRS15 (NM_020706.1,564-582).
ccatctgaagataagagta

SEQ ID NO: 378200 - DNA, 19 bp, Homo sapiens
  siRNA target sequence for SFRS15 (NM_020706.1,588-606).
gttcgtgtgctgaaccttt

SEQ ID NO: 378201 - DNA, 19 bp, Homo sapiens
  siRNA target sequence for SFRS15 (NM_020706.1,659-677).
ggcagcgggaaccagtaat

SEQ ID NO: 378202 - DNA, 19 bp, Homo sapiens
  siRNA target sequence for SFRS15 (NM_020706.1,1029-1047).
gacaagaagttgcttgata

SEQ ID NO: 378203 - DNA, 19 bp, Homo sapiens
  siRNA target sequence for SFRS15 (NM_020706.1,1248-1266).
gcatacacacagcatcaaa

SEQ ID NO: 378204 - DNA, 19 bp, Homo sapiens
  siRNA target sequence for SFRS15 (NM_020706.1,1285-1303).
cacgaatgatgggaataca

SEQ ID NO: 378205 - DNA, 19 bp, Homo sapiens
  siRNA target sequence for SFRS15 (NM_020706.1,1513-1531).
cttgtattcaagaggttaa

SEQ ID NO: 378206 - DNA, 19 bp, Homo sapiens
  siRNA target sequence for SFRS15 (NM_020706.1,1524-1542).
gaggttaagcgacatatgt

SEQ ID NO: 378207 - DNA, 19 bp, Homo sapiens
  siRNA target sequence for SFRS15 (NM_020706.1,1526-1544).
ggttaagcgacatatgtct

SEQ ID NO: 378208 - DNA, 19 bp, Homo sapiens
  siRNA target sequence for SFRS15 (NM_020706.1,1541-1559).
gtctgataacagaaagtca

SEQ ID NO: 378209 - DNA, 19 bp, Homo sapiens
  siRNA target sequence for SFRS15 (NM_020706.1,1658-1676).
ggatagacgccgacattct

SEQ ID NO: 378210 - DNA, 19 bp, Homo sapiens
  siRNA target sequence for SFRS15 (NM_020706.1,1679-1697).
ccgatctcgatctcaagaa

SEQ ID NO: 378211 - DNA, 19 bp, Homo sapiens
  siRNA target sequence for SFRS15 (NM_020706.1,1699-1717).
gacgggatcgagaaaaaga

SEQ ID NO: 378212 - DNA, 19 bp, Homo sapiens
  siRNA target sequence for SFRS15 (NM_020706.1,1718-1736).
gagagaacgtcgacaaaaa

SEQ ID NO: 378213 - DNA, 19 bp, Homo sapiens
  siRNA target sequence for SFRS15 (NM_020706.1,1764-1782).
gcaagtgtttgcagtacta

SEQ ID NO: 378214 - DNA, 19 bp, Homo sapiens
  siRNA target sequence for SFRS15 (NM_020706.1,1796-1814).
gcagctggacaaaagaact

SEQ ID NO: 378215 - DNA, 19 bp, Homo sapiens
  siRNA target sequence for SFRS15 (NM_020706.1,1831-1849).
ccagtctcttggaagagtt

SEQ ID NO: 378216 - DNA, 19 bp, Homo sapiens
  siRNA target sequence for SFRS15 (NM_020706.1,1832-1850).
cagtctcttggaagagttt

SEQ ID NO: 378217 - DNA, 19 bp, Homo sapiens
  siRNA target sequence for SFRS15 (NM_020706.1,1841-1859).
ggaagagtttggtccaatt

SEQ ID NO: 378218 - DNA, 19 bp, Homo sapiens
  siRNA target sequence for SFRS15 (NM_020706.1,1845-1863).
gagtttggtccaattgaat

SEQ ID NO: 378219 - DNA, 19 bp, Homo sapiens
  siRNA target sequence for SFRS15 (NM_020706.1,1854-1872).
ccaattgaatcaattaata

SEQ ID NO: 378220 - DNA, 19 bp, Homo sapiens
  siRNA target sequence for SFRS15 (NM_020706.1,1882-1900).
ccaggggttgtgcctatat

SEQ ID NO: 378221 - DNA, 19 bp, Homo sapiens
  siRNA target sequence for SFRS15 (NM_020706.1,1883-1901).
caggggttgtgcctatatt

SEQ ID NO: 378222 - DNA, 19 bp, Homo sapiens
  siRNA target sequence for SFRS15 (NM_020706.1,1885-1903).
ggggttgtgcctatattgt

SEQ ID NO: 378223 - DNA, 19 bp, Homo sapiens
  siRNA target sequence for SFRS15 (NM_020706.1,1886-1904).
gggttgtgcctatattgtt

SEQ ID NO: 378224 - DNA, 19 bp, Homo sapiens
  siRNA target sequence for SFRS15 (NM_020706.1,1887-1905).
ggttgtgcctatattgtta

SEQ ID NO: 378225 - DNA, 19 bp, Homo sapiens
  siRNA target sequence for SFRS15 (NM_020706.1,1888-1906).
gttgtgcctatattgttat

SEQ ID NO: 378226 - DNA, 19 bp, Homo sapiens
  siRNA target sequence for SFRS15 (NM_020706.1,1944-1962).
ctgagccgaggaaactata

SEQ ID NO: 378227 - DNA, 19 bp, Homo sapiens
  siRNA target sequence for SFRS15 (NM_020706.1,1946-1964).
gagccgaggaaactataaa

SEQ ID NO: 378228 - DNA, 19 bp, Homo sapiens
  siRNA target sequence for SFRS15 (NM_020706.1,1948-1966).
gccgaggaaactataaagt

SEQ ID NO: 378229 - DNA, 19 bp, Homo sapiens
  siRNA target sequence for SFRS15 (NM_020706.1,1995-2013).
gccttaaacaaaggaataa

SEQ ID NO: 378230 - DNA, 19 bp, Homo sapiens
  siRNA target sequence for SFRS15 (NM_020706.1,2007-2025).
ggaataaaggcagattata

SEQ ID NO: 378231 - DNA, 19 bp, Homo sapiens
  siRNA target sequence for SFRS15 (NM_020706.1,2030-2048).
gtattgggatgtagaactt

SEQ ID NO: 378232 - DNA, 19 bp, Homo sapiens
  siRNA target sequence for SFRS15 (NM_020706.1,2049-2067).
ggtgttacttatattccat

SEQ ID NO: 378233 - DNA, 19 bp, Homo sapiens
  siRNA target sequence for SFRS15 (NM_020706.1,2087-2105).
ggaactggagagtttttgt

SEQ ID NO: 378234 - DNA, 19 bp, Homo sapiens
  siRNA target sequence for SFRS15 (NM_020706.1,2131-2149).
cacttaacccagattggaa

SEQ ID NO: 378235 - DNA, 19 bp, Homo sapiens
  siRNA target sequence for SFRS15 (NM_020706.1,2142-2160).
gattggaaaggaattccta

SEQ ID NO: 378236 - DNA, 19 bp, Homo sapiens
  siRNA target sequence for SFRS15 (NM_020706.1,2217-2235).
ccagtatcacccataccta

SEQ ID NO: 378237 - DNA, 19 bp, Homo sapiens
  siRNA target sequence for SFRS15 (NM_020706.1,2218-2236).
cagtatcacccatacctaa

SEQ ID NO: 378238 - DNA, 19 bp, Homo sapiens
  siRNA target sequence for SFRS15 (NM_020706.1,2224-2242).
cacccatacctaaaccatt

SEQ ID NO: 378239 - DNA, 19 bp, Homo sapiens
  siRNA target sequence for SFRS15 (NM_020706.1,2265-2283).
cctgttcctgcacctataa

SEQ ID NO: 378240 - DNA, 19 bp, Homo sapiens
  siRNA target sequence for SFRS15 (NM_020706.1,2439-2457).
ggattcaacccaatgcatt

SEQ ID NO: 378241 - DNA, 19 bp, Homo sapiens
  siRNA target sequence for SFRS15 (NM_020706.1,2523-2541).
cctcacactccaccaataa

SEQ ID NO: 378242 - DNA, 19 bp, Homo sapiens
  siRNA target sequence for SFRS15 (NM_020706.1,2526-2544).
cacactccaccaataagca

SEQ ID NO: 378243 - DNA, 19 bp, Homo sapiens
  siRNA target sequence for SFRS15 (NM_020706.1,2542-2560).
gcatcccaaactctactat

SEQ ID NO: 378244 - DNA, 19 bp, Homo sapiens
  siRNA target sequence for SFRS15 (NM_020706.1,2552-2570).
ctctactatcgctggtata

SEQ ID NO: 378245 - DNA, 19 bp, Homo sapiens
  siRNA target sequence for SFRS15 (NM_020706.1,2554-2572).
ctactatcgctggtataaa

SEQ ID NO: 378246 - DNA, 19 bp, Homo sapiens
  siRNA target sequence for SFRS15 (NM_020706.1,2557-2575).
ctatcgctggtataaatga

SEQ ID NO: 378247 - DNA, 19 bp, Homo sapiens
  siRNA target sequence for SFRS15 (NM_020706.1,2577-2595).
gacactacaaaagacttat

SEQ ID NO: 378248 - DNA, 19 bp, Homo sapiens
  siRNA target sequence for SFRS15 (NM_020706.1,2579-2597).
cactacaaaagacttatct

SEQ ID NO: 378249 - DNA, 19 bp, Homo sapiens
  siRNA target sequence for SFRS15 (NM_020706.1,2581-2599).
ctacaaaagacttatctat

SEQ ID NO: 378250 - DNA, 19 bp, Homo sapiens
  siRNA target sequence for SFRS15 (NM_020706.1,2653-2671).
gtgacagcgtgaaaatgta

SEQ ID NO: 378251 - DNA, 19 bp, Homo sapiens
  siRNA target sequence for SFRS15 (NM_020706.1,2896-2914).
ccatgccaccgcacatgat

SEQ ID NO: 378252 - DNA, 19 bp, Homo sapiens
  siRNA target sequence for SFRS15 (NM_020706.1,3192-3210).
cagccacagcagtttagaa

SEQ ID NO: 378253 - DNA, 19 bp, Homo sapiens
  siRNA target sequence for SFRS15 (NM_020706.1,3198-3216).
cagcagtttagaaatgata

SEQ ID NO: 378254 - DNA, 19 bp, Homo sapiens
  siRNA target sequence for SFRS15 (NM_020706.1,3302-3320).
gtatgggaaccgtaatgat

SEQ ID NO: 378255 - DNA, 19 bp, Homo sapiens
  siRNA target sequence for SFRS15 (NM_020706.1,3306-3324).
gggaaccgtaatgatgata

SEQ ID NO: 378256 - DNA, 19 bp, Homo sapiens
  siRNA target sequence for SFRS15 (NM_020706.1,3308-3326).
gaaccgtaatgatgataga

SEQ ID NO: 378257 - DNA, 19 bp, Homo sapiens
  siRNA target sequence for SFRS15 (NM_020706.1,3318-3336).
gatgatagagataatagta

SEQ ID NO: 378258 - DNA, 19 bp, Homo sapiens
  siRNA target sequence for SFRS15 (NM_020706.1,3512-3530).
cagggcaggtggtaacaaa

SEQ ID NO: 378259 - DNA, 19 bp, Homo sapiens
  siRNA target sequence for SFRS15 (NM_020706.1,3652-3670).
ccgttgaacccgaaaagga

SEQ ID NO: 378260 - DNA, 19 bp, Homo sapiens
  siRNA target sequence for SFRS15 (NM_020706.1,3653-3671).
cgttgaacccgaaaaggat

SEQ ID NO: 378261 - DNA, 19 bp, Homo sapiens
  siRNA target sequence for SFRS15 (NM_020706.1,3654-3672).
gttgaacccgaaaaggatt

SEQ ID NO: 378262 - DNA, 19 bp, Homo sapiens
  siRNA target sequence for KIAA1185 (NM_020710.1,1206-1224).
ccccacaggacctcaagat

SEQ ID NO: 378263 - DNA, 19 bp, Homo sapiens
  siRNA target sequence for KIAA1185 (NM_020710.1,1391-1409).
gacggtgatgtgatttcct

SEQ ID NO: 378264 - DNA, 19 bp, Homo sapiens
  siRNA target sequence for KIAA1185 (NM_020710.1,1465-1483).
gtttttggaagtaacaagt

SEQ ID NO: 378265 - DNA, 19 bp, Homo sapiens
  siRNA target sequence for ZNF295 (NM_020727.2,416-434).
gcaagaacttggctatagt

SEQ ID NO: 378266 - DNA, 19 bp, Homo sapiens
  siRNA target sequence for ZNF295 (NM_020727.2,450-468).
ctgactaacatcgtttcta

SEQ ID NO: 378267 - DNA, 19 bp, Homo sapiens
  siRNA target sequence for ZNF295 (NM_020727.2,452-470).
gactaacatcgtttctaaa

SEQ ID NO: 378268 - DNA, 19 bp, Homo sapiens
  siRNA target sequence for ZNF295 (NM_020727.2,489-507).
ccaacgtgtcctaatagaa

SEQ ID NO: 378269 - DNA, 19 bp, Homo sapiens
  siRNA target sequence for ZNF295 (NM_020727.2,490-508).
caacgtgtcctaatagaaa

SEQ ID NO: 378270 - DNA, 19 bp, Homo sapiens
  siRNA target sequence for ZNF295 (NM_020727.2,493-511).
cgtgtcctaatagaaaaaa

SEQ ID NO: 378271 - DNA, 19 bp, Homo sapiens
  siRNA target sequence for ZNF295 (NM_020727.2,498-516).
cctaatagaaaaaaagtgt

SEQ ID NO: 378272 - DNA, 19 bp, Homo sapiens
  siRNA target sequence for ZNF295 (NM_020727.2,574-592).
gaaacgaagcgcaaggaaa

SEQ ID NO: 378273 - DNA, 19 bp, Homo sapiens
  siRNA target sequence for ZNF295 (NM_020727.2,582-600).
gcgcaaggaaaaactgtta

SEQ ID NO: 378274 - DNA, 19 bp, Homo sapiens
  siRNA target sequence for ZNF295 (NM_020727.2,603-621).
caaaatcaacccgatgtaa

SEQ ID NO: 378275 - DNA, 19 bp, Homo sapiens
  siRNA target sequence for ZNF295 (NM_020727.2,612-630).
cccgatgtaagccatactt

SEQ ID NO: 378276 - DNA, 19 bp, Homo sapiens
  siRNA target sequence for ZNF295 (NM_020727.2,651-669).
gcagtcaaggccaatacca

SEQ ID NO: 378277 - DNA, 19 bp, Homo sapiens
  siRNA target sequence for ZNF295 (NM_020727.2,654-672).
gtcaaggccaataccaata

SEQ ID NO: 378278 - DNA, 19 bp, Homo sapiens
  siRNA target sequence for ZNF295 (NM_020727.2,690-708).
ccaatagaaccacttcata

SEQ ID NO: 378279 - DNA, 19 bp, Homo sapiens
  siRNA target sequence for ZNF295 (NM_020727.2,728-746).
gagttggccgaaagatagt

SEQ ID NO: 378280 - DNA, 19 bp, Homo sapiens
  siRNA target sequence for ZNF295 (NM_020727.2,781-799).
gatctttggatgatcctaa

SEQ ID NO: 378281 - DNA, 19 bp, Homo sapiens
  siRNA target sequence for ZNF295 (NM_020727.2,884-902).
gagtggtcagcttccaaaa

SEQ ID NO: 378282 - DNA, 19 bp, Homo sapiens
  siRNA target sequence for ZNF295 (NM_020727.2,910-928).
ctctagagctggctttgaa

SEQ ID NO: 378283 - DNA, 19 bp, Homo sapiens
  siRNA target sequence for ZNF295 (NM_020727.2,933-951).
ccacggccacctgttttgt

SEQ ID NO: 378284 - DNA, 19 bp, Homo sapiens
  siRNA target sequence for ZNF295 (NM_020727.2,1014-1032).
ggtgaagatagaaacttgt

SEQ ID NO: 378285 - DNA, 19 bp, Homo sapiens
  siRNA target sequence for ZNF295 (NM_020727.2,1020-1038).
gatagaaacttgttgtact

SEQ ID NO: 378286 - DNA, 19 bp, Homo sapiens
  siRNA target sequence for ZNF295 (NM_020727.2,1078-1096).
gttctggaaaccaaagcat

SEQ ID NO: 378287 - DNA, 19 bp, Homo sapiens
  siRNA target sequence for ZNF295 (NM_020727.2,1100-1118).
caggagtggcccacttgtt

SEQ ID NO: 378288 - DNA, 19 bp, Homo sapiens
  siRNA target sequence for ZNF295 (NM_020727.2,1134-1152).
cggtcattgtcgatggata

SEQ ID NO: 378289 - DNA, 19 bp, Homo sapiens
  siRNA target sequence for ZNF295 (NM_020727.2,1154-1172).
ccaggttcctgtctattca

SEQ ID NO: 378290 - DNA, 19 bp, Homo sapiens
  siRNA target sequence for ZNF295 (NM_020727.2,1166-1184).
ctattcaccttccatagat

SEQ ID NO: 378291 - DNA, 19 bp, Homo sapiens
  siRNA target sequence for ZNF295 (NM_020727.2,1171-1189).
caccttccatagatttgaa

SEQ ID NO: 378292 - DNA, 19 bp, Homo sapiens
  siRNA target sequence for ZNF295 (NM_020727.2,1221-1239).
gatgcaccagggaatgtgt

SEQ ID NO: 378293 - DNA, 19 bp, Homo sapiens
  siRNA target sequence for ZNF295 (NM_020727.2,1423-1441).
cggacccctcggacatcat

SEQ ID NO: 378294 - DNA, 19 bp, Homo sapiens
  siRNA target sequence for ZNF295 (NM_020727.2,1454-1472).
gggagatgcggcaacaaca

SEQ ID NO: 378295 - DNA, 19 bp, Homo sapiens
  siRNA target sequence for ZNF295 (NM_020727.2,1541-1559).
gagcagactcccagcaaaa

SEQ ID NO: 378296 - DNA, 19 bp, Homo sapiens
  siRNA target sequence for ZNF295 (NM_020727.2,1578-1596).
cgaagattgccgtttaaga

SEQ ID NO: 378297 - DNA, 19 bp, Homo sapiens
  siRNA target sequence for ZNF295 (NM_020727.2,1579-1597).
gaagattgccgtttaagaa

SEQ ID NO: 378298 - DNA, 19 bp, Homo sapiens
  siRNA target sequence for ZNF295 (NM_020727.2,1588-1606).
cgtttaagaagttaaaggt

SEQ ID NO: 378299 - DNA, 19 bp, Homo sapiens
  siRNA target sequence for ZNF295 (NM_020727.2,1697-1715).
gaataaagacgaatttggt

SEQ ID NO: 378300 - DNA, 19 bp, Homo sapiens
  siRNA target sequence for ZNF295 (NM_020727.2,1753-1771).
gcaaacattgccttaagat

SEQ ID NO: 378301 - DNA, 19 bp, Homo sapiens
  siRNA target sequence for ZNF295 (NM_020727.2,1764-1782).
cttaagatctttagatcaa

SEQ ID NO: 378302 - DNA, 19 bp, Homo sapiens
  siRNA target sequence for ZNF295 (NM_020727.2,1788-1806).
ggtcttcaccgtcatgtta

SEQ ID NO: 378303 - DNA, 19 bp, Homo sapiens
  siRNA target sequence for ZNF295 (NM_020727.2,1791-1809).
cttcaccgtcatgttaaca

SEQ ID NO: 378304 - DNA, 19 bp, Homo sapiens
  siRNA target sequence for ZNF295 (NM_020727.2,1858-1876).
ggtttcacaccaacttcaa

SEQ ID NO: 378305 - DNA, 19 bp, Homo sapiens
  siRNA target sequence for ZNF295 (NM_020727.2,1863-1881).
cacaccaacttcaaagtgt

SEQ ID NO: 378306 - DNA, 19 bp, Homo sapiens
  siRNA target sequence for ZNF295 (NM_020727.2,1897-1915).
cccaacacggcatagtgaa

SEQ ID NO: 378307 - DNA, 19 bp, Homo sapiens
  siRNA target sequence for ZNF295 (NM_020727.2,1965-1983).
caaagaaagctgattgaca

SEQ ID NO: 378308 - DNA, 19 bp, Homo sapiens
  siRNA target sequence for ZNF295 (NM_020727.2,2010-2028).
gccctgatcattaagttaa

SEQ ID NO: 378309 - DNA, 19 bp, Homo sapiens
  siRNA target sequence for ZNF295 (NM_020727.2,2104-2122).
gagccaaaggagcttacat

SEQ ID NO: 378310 - DNA, 19 bp, Homo sapiens
  siRNA target sequence for ZNF295 (NM_020727.2,2112-2130).
ggagcttacatttgtactt

SEQ ID NO: 378311 - DNA, 19 bp, Homo sapiens
  siRNA target sequence for ZNF295 (NM_020727.2,2147-2165).
ccgctttctctctcaattt

SEQ ID NO: 378312 - DNA, 19 bp, Homo sapiens
  siRNA target sequence for ZNF295 (NM_020727.2,2148-2166).
cgctttctctctcaattta

SEQ ID NO: 378313 - DNA, 19 bp, Homo sapiens
  siRNA target sequence for ZNF295 (NM_020727.2,2244-2262).
cttgcaagtccagtagaaa

SEQ ID NO: 378314 - DNA, 19 bp, Homo sapiens
  siRNA target sequence for ZNF295 (NM_020727.2,2279-2297).
gtgccgcctctgtaatgct

SEQ ID NO: 378315 - DNA, 19 bp, Homo sapiens
  siRNA target sequence for ZNF295 (NM_020727.2,2281-2299).
gccgcctctgtaatgctaa

SEQ ID NO: 378316 - DNA, 19 bp, Homo sapiens
  siRNA target sequence for ZNF295 (NM_020727.2,2408-2426).
cgagagcaagtgtgagtat

SEQ ID NO: 378317 - DNA, 19 bp, Homo sapiens
  siRNA target sequence for ZNF295 (NM_020727.2,2482-2500).
ggcggcaccaggttgaagt

SEQ ID NO: 378318 - DNA, 19 bp, Homo sapiens
  siRNA target sequence for ZNF295 (NM_020727.2,2493-2511).
gttgaagtccataatcaga

SEQ ID NO: 378319 - DNA, 19 bp, Homo sapiens
  siRNA target sequence for ZNF295 (NM_020727.2,2499-2517).
gtccataatcagaacaaca

SEQ ID NO: 378320 - DNA, 19 bp, Homo sapiens
  siRNA target sequence for ZNF295 (NM_020727.2,2520-2538).
gcacccaccgaaaactttt

SEQ ID NO: 378321 - DNA, 19 bp, Homo sapiens
  siRNA target sequence for ZNF295 (NM_020727.2,2524-2542).
ccaccgaaaacttttcttt

SEQ ID NO: 378322 - DNA, 19 bp, Homo sapiens
  siRNA target sequence for ZNF295 (NM_020727.2,2599-2617).
ctgagcccaacaaagtaaa

SEQ ID NO: 378323 - DNA, 19 bp, Homo sapiens
  siRNA target sequence for ZNF295 (NM_020727.2,2659-2677).
cttcagaacaagttaactt

SEQ ID NO: 378324 - DNA, 19 bp, Homo sapiens
  siRNA target sequence for ZNF295 (NM_020727.2,2684-2702).
ggaagattcctcttgtctt

SEQ ID NO: 378325 - DNA, 19 bp, Homo sapiens
  siRNA target sequence for ZNF295 (NM_020727.2,2703-2721).
cccgaagaccttagtcttt

SEQ ID NO: 378326 - DNA, 19 bp, Homo sapiens
  siRNA target sequence for ZNF295 (NM_020727.2,2716-2734).
gtctttccaagcaactgaa

SEQ ID NO: 378327 - DNA, 19 bp, Homo sapiens
  siRNA target sequence for ZNF295 (NM_020727.2,2930-2948).
cgtgtgcaacaaagctttt

SEQ ID NO: 378328 - DNA, 19 bp, Homo sapiens
  siRNA target sequence for ZNF295 (NM_020727.2,2939-2957).
caaagcttttcgcactaat

SEQ ID NO: 378329 - DNA, 19 bp, Homo sapiens
  siRNA target sequence for ZNF295 (NM_020727.2,3005-3023).
ggaatcggcacataaggaa

SEQ ID NO: 378330 - DNA, 19 bp, Homo sapiens
  siRNA target sequence for ZNF295 (NM_020727.2,3006-3024).
gaatcggcacataaggaat

SEQ ID NO: 378331 - DNA, 19 bp, Homo sapiens
  siRNA target sequence for ZNF295 (NM_020727.2,3162-3180).
ctgtttgtgccccaagaat

SEQ ID NO: 378332 - DNA, 19 bp, Homo sapiens
  siRNA target sequence for ZNF295 (NM_020727.2,3164-3182).
gtttgtgccccaagaatca

SEQ ID NO: 378333 - DNA, 19 bp, Homo sapiens
  siRNA target sequence for ZNF295 (NM_020727.2,3181-3199).
cagacacccttttttacca

SEQ ID NO: 378334 - DNA, 19 bp, Homo sapiens
  siRNA target sequence for ZNF295 (NM_020727.2,3234-3252).
cagtttatgtgtaaacttt

SEQ ID NO: 378335 - DNA, 19 bp, Homo sapiens
  siRNA target sequence for ZNF295 (NM_020727.2,3249-3267).
ctttgccacaggacattca

SEQ ID NO: 378336 - DNA, 19 bp, Homo sapiens
  siRNA target sequence for ZNF295 (NM_020727.2,3282-3300).
ctttggagtcacgaacaaa

SEQ ID NO: 378337 - DNA, 19 bp, Homo sapiens
  siRNA target sequence for ZNF295 (NM_020727.2,3286-3304).
ggagtcacgaacaaacaca

SEQ ID NO: 378338 - DNA, 19 bp, Homo sapiens
  siRNA target sequence for AHRR (NM_020731.2,396-414).
ctgctgttggagtctctta

SEQ ID NO: 378339 - DNA, 19 bp, Homo sapiens
  siRNA target sequence for AHRR (NM_020731.2,398-416).
gctgttggagtctcttaat

SEQ ID NO: 378340 - DNA, 19 bp, Homo sapiens
  siRNA target sequence for AHRR (NM_020731.2,436-454).
gtgcagaagggacgatatt

SEQ ID NO: 378341 - DNA, 19 bp, Homo sapiens
  siRNA target sequence for AHRR (NM_020731.2,438-456).
gcagaagggacgatatttt

SEQ ID NO: 378342 - DNA, 19 bp, Homo sapiens
  siRNA target sequence for AHRR (NM_020731.2,439-457).
cagaagggacgatatttta

SEQ ID NO: 378343 - DNA, 19 bp, Homo sapiens
  siRNA target sequence for AHRR (NM_020731.2,444-462).
gggacgatattttatgcat

SEQ ID NO: 378344 - DNA, 19 bp, Homo sapiens
  siRNA target sequence for AHRR (NM_020731.2,466-484).
caacgatcgtggactatct

SEQ ID NO: 378345 - DNA, 19 bp, Homo sapiens
  siRNA target sequence for AHRR (NM_020731.2,510-528).
caccagaacatttatgact

SEQ ID NO: 378346 - DNA, 19 bp, Homo sapiens
  siRNA target sequence for AHRR (NM_020731.2,705-723).
ctgacccgctgcttcatct

SEQ ID NO: 378347 - DNA, 19 bp, Homo sapiens
  siRNA target sequence for AHRR (NM_020731.2,824-842).
gcagtttcaaggaaaacta

SEQ ID NO: 378348 - DNA, 19 bp, Homo sapiens
  siRNA target sequence for AHRR (NM_020731.2,937-955).
cctccgcagcggagatgaa

SEQ ID NO: 378349 - DNA, 19 bp, Homo sapiens
  siRNA target sequence for AHRR (NM_020731.2,1003-1021).
ccaccgcggatgcaaaagt

SEQ ID NO: 378350 - DNA, 19 bp, Homo sapiens
  siRNA target sequence for AHRR (NM_020731.2,1004-1022).
caccgcggatgcaaaagta

SEQ ID NO: 378351 - DNA, 19 bp, Homo sapiens
  siRNA target sequence for AHRR (NM_020731.2,1006-1024).
ccgcggatgcaaaagtaaa

SEQ ID NO: 378352 - DNA, 19 bp, Homo sapiens
  siRNA target sequence for AHRR (NM_020731.2,1007-1025).
cgcggatgcaaaagtaaaa

SEQ ID NO: 378353 - DNA, 19 bp, Homo sapiens
  siRNA target sequence for AHRR (NM_020731.2,1093-1111).
gagagagcggcgttttggt

SEQ ID NO: 378354 - DNA, 19 bp, Homo sapiens
  siRNA target sequence for AHRR (NM_020731.2,1684-1702).
cgacgctgctgctagatgt

SEQ ID NO: 378355 - DNA, 19 bp, Homo sapiens
  siRNA target sequence for AHRR (NM_020731.2,1816-1834).
ggatgcacctgaaaacaga

SEQ ID NO: 378356 - DNA, 19 bp, Homo sapiens
  siRNA target sequence for AHRR (NM_020731.2,1843-1861).
ctcggcaacaggtgtacat

SEQ ID NO: 378357 - DNA, 19 bp, Homo sapiens
  siRNA target sequence for CPR8 (NM_020739.1,1835-1853).
gaggccctactatgcaaaa

SEQ ID NO: 378358 - DNA, 19 bp, Homo sapiens
  siRNA target sequence for CPR8 (NM_020739.1,1838-1856).
gccctactatgcaaaatga

SEQ ID NO: 378359 - DNA, 19 bp, Homo sapiens
  siRNA target sequence for CPR8 (NM_020739.1,1839-1857).
ccctactatgcaaaatgat

SEQ ID NO: 378360 - DNA, 19 bp, Homo sapiens
  siRNA target sequence for CPR8 (NM_020739.1,2200-2218).
gattatcttagaaacatga

SEQ ID NO: 378361 - DNA, 19 bp, Homo sapiens
  siRNA target sequence for KIAA1287 (NM_020748.1,79-97).
gaaggatcaacaaacagta

SEQ ID NO: 378362 - DNA, 19 bp, Homo sapiens
  siRNA target sequence for KIAA1287 (NM_020748.1,175-193).
cctggcatctttaagtgat

SEQ ID NO: 378363 - DNA, 19 bp, Homo sapiens
  siRNA target sequence for KIAA1287 (NM_020748.1,189-207).
gtgatccagaattaagact

SEQ ID NO: 378364 - DNA, 19 bp, Homo sapiens
  siRNA target sequence for KIAA1287 (NM_020748.1,267-285).
gggctcaggataagaaact

SEQ ID NO: 378365 - DNA, 19 bp, Homo sapiens
  siRNA target sequence for KIAA1287 (NM_020748.1,269-287).
gctcaggataagaaactca

SEQ ID NO: 378366 - DNA, 19 bp, Homo sapiens
  siRNA target sequence for KIAA1287 (NM_020748.1,337-355).
gttgtccgtggactttcat

SEQ ID NO: 378367 - DNA, 19 bp, Homo sapiens
  siRNA target sequence for KIAA1287 (NM_020748.1,385-403).
gcagcttaggcataaactt

SEQ ID NO: 378368 - DNA, 19 bp, Homo sapiens
  siRNA target sequence for KIAA1287 (NM_020748.1,446-464).
catggactgacgttagagt

SEQ ID NO: 378369 - DNA, 19 bp, Homo sapiens
  siRNA target sequence for KIAA1287 (NM_020748.1,463-481).
gtttgaacacagtgattca

SEQ ID NO: 378370 - DNA, 19 bp, Homo sapiens
  siRNA target sequence for KIAA1287 (NM_020748.1,493-511).
gcgtcttgtgcttagtgaa

SEQ ID NO: 378371 - DNA, 19 bp, Homo sapiens
  siRNA target sequence for KIAA1287 (NM_020748.1,507-525).
gtgaactgttggcaattat

SEQ ID NO: 378372 - DNA, 19 bp, Homo sapiens
  siRNA target sequence for KIAA1287 (NM_020748.1,537-555).
ctgagtccaacggagaatt

SEQ ID NO: 378373 - DNA, 19 bp, Homo sapiens
  siRNA target sequence for KIAA1287 (NM_020748.1,642-660).
cttccttgctccctatagt

SEQ ID NO: 378374 - DNA, 19 bp, Homo sapiens
  siRNA target sequence for KIAA1287 (NM_020748.1,721-739).
ggccaatgttcctgatagt

SEQ ID NO: 378375 - DNA, 19 bp, Homo sapiens
  siRNA target sequence for KIAA1287 (NM_020748.1,722-740).
gccaatgttcctgatagtt

SEQ ID NO: 378376 - DNA, 19 bp, Homo sapiens
  siRNA target sequence for KIAA1287 (NM_020748.1,723-741).
ccaatgttcctgatagttt

SEQ ID NO: 378377 - DNA, 19 bp, Homo sapiens
  siRNA target sequence for KIAA1287 (NM_020748.1,724-742).
caatgttcctgatagtttt

SEQ ID NO: 378378 - DNA, 19 bp, Homo sapiens
  siRNA target sequence for KIAA1287 (NM_020748.1,749-767).
gtttgtaggggcctgataa

SEQ ID NO: 378379 - DNA, 19 bp, Homo sapiens
  siRNA target sequence for KIAA1287 (NM_020748.1,818-836).
gatgccttacgcttcttgt

SEQ ID NO: 378380 - DNA, 19 bp, Homo sapiens
  siRNA target sequence for KIAA1287 (NM_020748.1,821-839).
gccttacgcttcttgtgta

SEQ ID NO: 378381 - DNA, 19 bp, Homo sapiens
  siRNA target sequence for KIAA1287 (NM_020748.1,822-840).
ccttacgcttcttgtgtaa

SEQ ID NO: 378382 - DNA, 19 bp, Homo sapiens
  siRNA target sequence for KIAA1287 (NM_020748.1,823-841).
cttacgcttcttgtgtaaa

SEQ ID NO: 378383 - DNA, 19 bp, Homo sapiens
  siRNA target sequence for KIAA1287 (NM_020748.1,914-932).
gctttgacattggatcata

SEQ ID NO: 378384 - DNA, 19 bp, Homo sapiens
  siRNA target sequence for KIAA1287 (NM_020748.1,919-937).
gacattggatcatactaaa

SEQ ID NO: 378385 - DNA, 19 bp, Homo sapiens
  siRNA target sequence for KIAA1287 (NM_020748.1,921-939).
cattggatcatactaaaaa

SEQ ID NO: 378386 - DNA, 19 bp, Homo sapiens
  siRNA target sequence for KIAA1287 (NM_020748.1,1013-1031).
gtccggacttggtttggaa

SEQ ID NO: 378387 - DNA, 19 bp, Homo sapiens
  siRNA target sequence for KIAA1287 (NM_020748.1,1111-1129).
ggagttgatgggcattctt

SEQ ID NO: 378388 - DNA, 19 bp, Homo sapiens
  siRNA target sequence for KIAA1287 (NM_020748.1,1172-1190).
gatatggagcccaatgtgt

SEQ ID NO: 378389 - DNA, 19 bp, Homo sapiens
  siRNA target sequence for KIAA1287 (NM_020748.1,1195-1213).
gtattcggggctgaaagaa

SEQ ID NO: 378390 - DNA, 19 bp, Homo sapiens
  siRNA target sequence for KIAA1287 (NM_020748.1,1264-1282).
ggggatcgctggactcaaa

SEQ ID NO: 378391 - DNA, 19 bp, Homo sapiens
  siRNA target sequence for KIAA1287 (NM_020748.1,1304-1322).
caattactgcagttgatga

SEQ ID NO: 378392 - DNA, 19 bp, Homo sapiens
  siRNA target sequence for KIAA1287 (NM_020748.1,1346-1364).
gctggggttcgctttgttt

SEQ ID NO: 378393 - DNA, 19 bp, Homo sapiens
  siRNA target sequence for KIAA1287 (NM_020748.1,1351-1369).
ggttcgctttgtttcactt

SEQ ID NO: 378394 - DNA, 19 bp, Homo sapiens
  siRNA target sequence for KIAA1287 (NM_020748.1,1352-1370).
gttcgctttgtttcacttt

SEQ ID NO: 378395 - DNA, 19 bp, Homo sapiens
  siRNA target sequence for KIAA1287 (NM_020748.1,1438-1456).
gtggctaagttggatgata

SEQ ID NO: 378396 - DNA, 19 bp, Homo sapiens
  siRNA target sequence for KIAA1287 (NM_020748.1,1466-1484).
gcgtattttgagagtactt

SEQ ID NO: 378397 - DNA, 19 bp, Homo sapiens
  siRNA target sequence for KIAA1287 (NM_020748.1,1500-1518).
cttttggggagatgttatt

SEQ ID NO: 378398 - DNA, 19 bp, Homo sapiens
  siRNA target sequence for KIAA1287 (NM_020748.1,1523-1541).
gtggctatgtactttcaca

SEQ ID NO: 378399 - DNA, 19 bp, Homo sapiens
  siRNA target sequence for KIAA1287 (NM_020748.1,1546-1564).
ccagcttagtgctatcatt

SEQ ID NO: 378400 - DNA, 19 bp, Homo sapiens
  siRNA target sequence for KIAA1287 (NM_020748.1,1550-1568).
cttagtgctatcattgact

SEQ ID NO: 378401 - DNA, 19 bp, Homo sapiens
  siRNA target sequence for KIAA1287 (NM_020748.1,1702-1720).
caacctgagtgccaacatt

SEQ ID NO: 378402 - DNA, 19 bp, Homo sapiens
  siRNA target sequence for KIAA1287 (NM_020748.1,1712-1730).
gccaacattactggatttt

SEQ ID NO: 378403 - DNA, 19 bp, Homo sapiens
  siRNA target sequence for KIAA1287 (NM_020748.1,1722-1740).
ctggatttttgcctattca

SEQ ID NO: 378404 - DNA, 19 bp, Homo sapiens
  siRNA target sequence for KIAA1287 (NM_020748.1,1757-1775).
ctcaggagccgttccttta

SEQ ID NO: 378405 - DNA, 19 bp, Homo sapiens
  siRNA target sequence for KIAA1287 (NM_020748.1,1783-1801).
caaagtgtcaataaaagat

SEQ ID NO: 378406 - DNA, 19 bp, Homo sapiens
  siRNA target sequence for KIAA1287 (NM_020748.1,1845-1863).
ctcaattacttcctttgat

SEQ ID NO: 378407 - DNA, 19 bp, Homo sapiens
  siRNA target sequence for KIAA1287 (NM_020748.1,1857-1875).
ctttgattgatgtgtacat

SEQ ID NO: 378408 - DNA, 19 bp, Homo sapiens
  siRNA target sequence for KIAA1287 (NM_020748.1,1861-1879).
gattgatgtgtacataaat

SEQ ID NO: 378409 - DNA, 19 bp, Homo sapiens
  siRNA target sequence for KIAA1287 (NM_020748.1,1865-1883).
gatgtgtacataaattcta

SEQ ID NO: 378410 - DNA, 19 bp, Homo sapiens
  siRNA target sequence for KIAA1287 (NM_020748.1,1886-1904).
cttactcctgcgtcgaaat

SEQ ID NO: 378411 - DNA, 19 bp, Homo sapiens
  siRNA target sequence for KIAA1287 (NM_020748.1,1890-1908).
ctcctgcgtcgaaatctaa

SEQ ID NO: 378412 - DNA, 19 bp, Homo sapiens
  siRNA target sequence for KIAA1287 (NM_020748.1,1990-2008).
ccttaatcagcgtttcagt

SEQ ID NO: 378413 - DNA, 19 bp, Homo sapiens
  siRNA target sequence for KIAA1287 (NM_020748.1,1991-2009).
cttaatcagcgtttcagta

SEQ ID NO: 378414 - DNA, 19 bp, Homo sapiens
  siRNA target sequence for KIAA1287 (NM_020748.1,2020-2038).
gcttttggtgctctactat

SEQ ID NO: 378415 - DNA, 19 bp, Homo sapiens
  siRNA target sequence for KIAA1287 (NM_020748.1,2021-2039).
cttttggtgctctactata

SEQ ID NO: 378416 - DNA, 19 bp, Homo sapiens
  siRNA target sequence for KIAA1287 (NM_020748.1,2032-2050).
ctactatatactgtcttat

SEQ ID NO: 378417 - DNA, 19 bp, Homo sapiens
  siRNA target sequence for KIAA1287 (NM_020748.1,2063-2081).
ctagcaaacacgaagactt

SEQ ID NO: 378418 - DNA, 19 bp, Homo sapiens
  siRNA target sequence for KIAA1287 (NM_020748.1,2118-2136).
cttctttaatggatcagat

SEQ ID NO: 378419 - DNA, 19 bp, Homo sapiens
  siRNA target sequence for KIAA1287 (NM_020748.1,2134-2152).
gattcctatcaaattcctt

SEQ ID NO: 378420 - DNA, 19 bp, Homo sapiens
  siRNA target sequence for KIAA1287 (NM_020748.1,2191-2209).
gttgcattcagctttacta

SEQ ID NO: 378421 - DNA, 19 bp, Homo sapiens
  siRNA target sequence for KIAA1287 (NM_020748.1,2210-2228).
cgtctccttgctactaact

SEQ ID NO: 378422 - DNA, 19 bp, Homo sapiens
  siRNA target sequence for KIAA1287 (NM_020748.1,2211-2229).
gtctccttgctactaacta

SEQ ID NO: 378423 - DNA, 19 bp, Homo sapiens
  siRNA target sequence for KIAA1287 (NM_020748.1,2298-2316).
ggcgaatgctcctgactaa

SEQ ID NO: 378424 - DNA, 19 bp, Homo sapiens
  siRNA target sequence for KIAA1287 (NM_020748.1,2299-2317).
gcgaatgctcctgactaat

SEQ ID NO: 378425 - DNA, 19 bp, Homo sapiens
  siRNA target sequence for KIAA1287 (NM_020748.1,2300-2318).
cgaatgctcctgactaata

SEQ ID NO: 378426 - DNA, 19 bp, Homo sapiens
  siRNA target sequence for KIAA1287 (NM_020748.1,2301-2319).
gaatgctcctgactaataa

SEQ ID NO: 378427 - DNA, 19 bp, Homo sapiens
  siRNA target sequence for KIAA1287 (NM_020748.1,2306-2324).
ctcctgactaataatgcta

SEQ ID NO: 378428 - DNA, 19 bp, Homo sapiens
  siRNA target sequence for KIAA1287 (NM_020748.1,2417-2435).
ctctctgccagtgaactta

SEQ ID NO: 378429 - DNA, 19 bp, Homo sapiens
  siRNA target sequence for KIAA1287 (NM_020748.1,2447-2465).
gaagtgttaacatccaata

SEQ ID NO: 378430 - DNA, 19 bp, Homo sapiens
  siRNA target sequence for KIAA1287 (NM_020748.1,2450-2468).
gtgttaacatccaatatga

SEQ ID NO: 378431 - DNA, 19 bp, Homo sapiens
  siRNA target sequence for KIAA1287 (NM_020748.1,2460-2478).
ccaatatgagccagctatt

SEQ ID NO: 378432 - DNA, 19 bp, Homo sapiens
  siRNA target sequence for KIAA1287 (NM_020748.1,2487-2505).
gggttccacggagaattct

SEQ ID NO: 378433 - DNA, 19 bp, Homo sapiens
  siRNA target sequence for KIAA1287 (NM_020748.1,2506-2524).
gcaaacagtcaataaacta

SEQ ID NO: 378434 - DNA, 19 bp, Homo sapiens
  siRNA target sequence for KIAA1287 (NM_020748.1,2522-2540).
ctatggatggttcttaata

SEQ ID NO: 378435 - DNA, 19 bp, Homo sapiens
  siRNA target sequence for KIAA1287 (NM_020748.1,2563-2581).
ggtaatgacggttaatgca

SEQ ID NO: 378436 - DNA, 19 bp, Homo sapiens
  siRNA target sequence for KIAA1287 (NM_020748.1,2587-2605).
gccttcaataaagtttgta

SEQ ID NO: 378437 - DNA, 19 bp, Homo sapiens
  siRNA target sequence for KIAA1287 (NM_020748.1,2716-2734).
gttgaatggatatcttctt

SEQ ID NO: 378438 - DNA, 19 bp, Homo sapiens
  siRNA target sequence for KIAA1287 (NM_020748.1,2724-2742).
gatatcttcttgcatctaa

SEQ ID NO: 378439 - DNA, 19 bp, Homo sapiens
  siRNA target sequence for KIAA1287 (NM_020748.1,2780-2798).
gataggccttcccagaata

SEQ ID NO: 378440 - DNA, 19 bp, Homo sapiens
  siRNA target sequence for KIAA1287 (NM_020748.1,2785-2803).
gccttcccagaataataca

SEQ ID NO: 378441 - DNA, 19 bp, Homo sapiens
  siRNA target sequence for KIAA1287 (NM_020748.1,2786-2804).
ccttcccagaataatacaa

SEQ ID NO: 378442 - DNA, 19 bp, Homo sapiens
  siRNA target sequence for KIAA1287 (NM_020748.1,2883-2901).
gtgcagctgtccagattct

SEQ ID NO: 378443 - DNA, 19 bp, Homo sapiens
  siRNA target sequence for KIAA1287 (NM_020748.1,2885-2903).
gcagctgtccagattctct

SEQ ID NO: 378444 - DNA, 19 bp, Homo sapiens
  siRNA target sequence for KIAA1287 (NM_020748.1,2891-2909).
gtccagattctcttagaga

SEQ ID NO: 378445 - DNA, 19 bp, Homo sapiens
  siRNA target sequence for KIAA1287 (NM_020748.1,2908-2926).
gatttgcctacctactgaa

SEQ ID NO: 378446 - DNA, 19 bp, Homo sapiens
  siRNA target sequence for KIAA1287 (NM_020748.1,2943-2961).
gtgtcaatccagatagctt

SEQ ID NO: 378447 - DNA, 19 bp, Homo sapiens
  siRNA target sequence for KIAA1287 (NM_020748.1,2952-2970).
cagatagcttgttaagaaa

SEQ ID NO: 378448 - DNA, 19 bp, Homo sapiens
  siRNA target sequence for KIAA1287 (NM_020748.1,3039-3057).
gtaaccttcgagaagttca

SEQ ID NO: 378449 - DNA, 19 bp, Homo sapiens
  siRNA target sequence for KIAA1287 (NM_020748.1,3053-3071).
gttcagtgccttatctgtt

SEQ ID NO: 378450 - DNA, 19 bp, Homo sapiens
  siRNA target sequence for KIAA1287 (NM_020748.1,3091-3109).
cattgcagatcccaacatt

SEQ ID NO: 378451 - DNA, 19 bp, Homo sapiens
  siRNA target sequence for KIAA1287 (NM_020748.1,3096-3114).
cagatcccaacattgctaa

SEQ ID NO: 378452 - DNA, 19 bp, Homo sapiens
  siRNA target sequence for KIAA1287 (NM_020748.1,3111-3129).
ctaagcttgttcactttca

SEQ ID NO: 378453 - DNA, 19 bp, Homo sapiens
  siRNA target sequence for KIAA1287 (NM_020748.1,3122-3140).
cactttcagggttatccat

SEQ ID NO: 378454 - DNA, 19 bp, Homo sapiens
  siRNA target sequence for KIAA1287 (NM_020748.1,3157-3175).
gacggtcgcaggtattcca

SEQ ID NO: 378455 - DNA, 19 bp, Homo sapiens
  siRNA target sequence for KIAA1287 (NM_020748.1,3261-3279).
ctcacttgtgtatacaata

SEQ ID NO: 378456 - DNA, 19 bp, Homo sapiens
  siRNA target sequence for KIAA1287 (NM_020748.1,3268-3286).
gtgtatacaatatgcatta

SEQ ID NO: 378457 - DNA, 19 bp, Homo sapiens
  siRNA target sequence for KIAA1287 (NM_020748.1,3281-3299).
gcattaccaaagtcactta

SEQ ID NO: 378458 - DNA, 19 bp, Homo sapiens
  siRNA target sequence for KIAA1287 (NM_020748.1,3304-3322).
ggctcgtttagctgtcaat

SEQ ID NO: 378459 - DNA, 19 bp, Homo sapiens
  siRNA target sequence for KIAA1287 (NM_020748.1,3306-3324).
ctcgtttagctgtcaatgt

SEQ ID NO: 378460 - DNA, 19 bp, Homo sapiens
  siRNA target sequence for KIAA1287 (NM_020748.1,3308-3326).
cgtttagctgtcaatgtca

SEQ ID NO: 378461 - DNA, 19 bp, Homo sapiens
  siRNA target sequence for KIAA1287 (NM_020748.1,3325-3343).
catgggaactttgttaaca

SEQ ID NO: 378462 - DNA, 19 bp, Homo sapiens
  siRNA target sequence for KIAA1287 (NM_020748.1,3328-3346).
gggaactttgttaacagtt

SEQ ID NO: 378463 - DNA, 19 bp, Homo sapiens
  siRNA target sequence for KIAA1287 (NM_020748.1,3355-3373).
ggctaagcggtatgctttt

SEQ ID NO: 378464 - DNA, 19 bp, Homo sapiens
  siRNA target sequence for KIAA1287 (NM_020748.1,3427-3445).
gtatgaggatattatgtct

SEQ ID NO: 378465 - DNA, 19 bp, Homo sapiens
  siRNA target sequence for KIAA1287 (NM_020748.1,3487-3505).
cactcagacaagagacatt

SEQ ID NO: 378466 - DNA, 19 bp, Homo sapiens
  siRNA target sequence for KIAA1287 (NM_020748.1,3555-3573).
ggtctcaaatctgtaaaga

SEQ ID NO: 378467 - DNA, 19 bp, Homo sapiens
  siRNA target sequence for KIAA1287 (NM_020748.1,3556-3574).
gtctcaaatctgtaaagat

SEQ ID NO: 378468 - DNA, 19 bp, Homo sapiens
  siRNA target sequence for KIAA1287 (NM_020748.1,3609-3627).
gcatggatcctgatgtaca

SEQ ID NO: 378469 - DNA, 19 bp, Homo sapiens
  siRNA target sequence for XPO5 (NM_020750.1,156-174).
ggaagccctcaagttttgt

SEQ ID NO: 378470 - DNA, 19 bp, Homo sapiens
  siRNA target sequence for XPO5 (NM_020750.1,241-259).
gttgccatcgtcagacatt

SEQ ID NO: 378471 - DNA, 19 bp, Homo sapiens
  siRNA target sequence for XPO5 (NM_020750.1,345-363).
catggagctgattgcaaat

SEQ ID NO: 378472 - DNA, 19 bp, Homo sapiens
  siRNA target sequence for XPO5 (NM_020750.1,349-367).
gagctgattgcaaatggaa

SEQ ID NO: 378473 - DNA, 19 bp, Homo sapiens
  siRNA target sequence for XPO5 (NM_020750.1,407-425).
ctctgtctcgaattgtagt

SEQ ID NO: 378474 - DNA, 19 bp, Homo sapiens
  siRNA target sequence for XPO5 (NM_020750.1,458-476).
ggcctgacatgctaataga

SEQ ID NO: 378475 - DNA, 19 bp, Homo sapiens
  siRNA target sequence for XPO5 (NM_020750.1,459-477).
gcctgacatgctaatagaa

SEQ ID NO: 378476 - DNA, 19 bp, Homo sapiens
  siRNA target sequence for XPO5 (NM_020750.1,752-770).
ctctagcaggctatattga

SEQ ID NO: 378477 - DNA, 19 bp, Homo sapiens
  siRNA target sequence for XPO5 (NM_020750.1,754-772).
ctagcaggctatattgact

SEQ ID NO: 378478 - DNA, 19 bp, Homo sapiens
  siRNA target sequence for XPO5 (NM_020750.1,794-812).
ctgctgaaaactgtaaact

SEQ ID NO: 378479 - DNA, 19 bp, Homo sapiens
  siRNA target sequence for XPO5 (NM_020750.1,918-936).
gcccttgatggtcttattt

SEQ ID NO: 378480 - DNA, 19 bp, Homo sapiens
  siRNA target sequence for XPO5 (NM_020750.1,921-939).
cttgatggtcttatttgga

SEQ ID NO: 378481 - DNA, 19 bp, Homo sapiens
  siRNA target sequence for XPO5 (NM_020750.1,938-956).
gagatgttgccatgcatta

SEQ ID NO: 378482 - DNA, 19 bp, Homo sapiens
  siRNA target sequence for XPO5 (NM_020750.1,985-1003).
ggaggaggtttggtagaaa

SEQ ID NO: 378483 - DNA, 19 bp, Homo sapiens
  siRNA target sequence for XPO5 (NM_020750.1,986-1004).
gaggaggtttggtagaaaa

SEQ ID NO: 378484 - DNA, 19 bp, Homo sapiens
  siRNA target sequence for XPO5 (NM_020750.1,1090-1108).
gtagaaacaccatcaaact

SEQ ID NO: 378485 - DNA, 19 bp, Homo sapiens
  siRNA target sequence for XPO5 (NM_020750.1,1215-1233).
gtcccgtgatcctttgcta

SEQ ID NO: 378486 - DNA, 19 bp, Homo sapiens
  siRNA target sequence for XPO5 (NM_020750.1,1217-1235).
cccgtgatcctttgctatt

SEQ ID NO: 378487 - DNA, 19 bp, Homo sapiens
  siRNA target sequence for XPO5 (NM_020750.1,1218-1236).
ccgtgatcctttgctatta

SEQ ID NO: 378488 - DNA, 19 bp, Homo sapiens
  siRNA target sequence for XPO5 (NM_020750.1,1222-1240).
gatcctttgctattagcaa

SEQ ID NO: 378489 - DNA, 19 bp, Homo sapiens
  siRNA target sequence for XPO5 (NM_020750.1,1231-1249).
ctattagcaataataccaa

SEQ ID NO: 378490 - DNA, 19 bp, Homo sapiens
  siRNA target sequence for XPO5 (NM_020750.1,1255-1273).
cttcgtgcttccatgacta

SEQ ID NO: 378491 - DNA, 19 bp, Homo sapiens
  siRNA target sequence for XPO5 (NM_020750.1,1258-1276).
cgtgcttccatgactaact

SEQ ID NO: 378492 - DNA, 19 bp, Homo sapiens
  siRNA target sequence for XPO5 (NM_020750.1,1306-1324).
gacagccctagctgtgaat

SEQ ID NO: 378493 - DNA, 19 bp, Homo sapiens
  siRNA target sequence for XPO5 (NM_020750.1,1311-1329).
ccctagctgtgaatattct

SEQ ID NO: 378494 - DNA, 19 bp, Homo sapiens
  siRNA target sequence for XPO5 (NM_020750.1,1321-1339).
gaatattctcggtttgatt

SEQ ID NO: 378495 - DNA, 19 bp, Homo sapiens
  siRNA target sequence for XPO5 (NM_020750.1,1407-1425).
gttggcatgtcgtttggat

SEQ ID NO: 378496 - DNA, 19 bp, Homo sapiens
  siRNA target sequence for XPO5 (NM_020750.1,1417-1435).
cgtttggatcccaaaacta

SEQ ID NO: 378497 - DNA, 19 bp, Homo sapiens
  siRNA target sequence for XPO5 (NM_020750.1,1455-1473).
gtggctaaagtatcaacta

SEQ ID NO: 378498 - DNA, 19 bp, Homo sapiens
  siRNA target sequence for XPO5 (NM_020750.1,1464-1482).
gtatcaactatcaactttt

SEQ ID NO: 378499 - DNA, 19 bp, Homo sapiens
  siRNA target sequence for XPO5 (NM_020750.1,1598-1616).
gtgttatcacccagatgtt

SEQ ID NO: 378500 - DNA, 19 bp, Homo sapiens
  siRNA target sequence for XPO5 (NM_020750.1,1608-1626).
ccagatgtttcgaacacta

SEQ ID NO: 378501 - DNA, 19 bp, Homo sapiens
  siRNA target sequence for XPO5 (NM_020750.1,1609-1627).
cagatgtttcgaacactaa

SEQ ID NO: 378502 - DNA, 19 bp, Homo sapiens
  siRNA target sequence for XPO5 (NM_020750.1,1614-1632).
gtttcgaacactaaataga

SEQ ID NO: 378503 - DNA, 19 bp, Homo sapiens
  siRNA target sequence for XPO5 (NM_020750.1,1710-1728).
gtcctgcgtccttactaat

SEQ ID NO: 378504 - DNA, 19 bp, Homo sapiens
  siRNA target sequence for XPO5 (NM_020750.1,1712-1730).
cctgcgtccttactaatgt

SEQ ID NO: 378505 - DNA, 19 bp, Homo sapiens
  siRNA target sequence for XPO5 (NM_020750.1,1729-1747).
gtctctgcactctttccat

SEQ ID NO: 378506 - DNA, 19 bp, Homo sapiens
  siRNA target sequence for XPO5 (NM_020750.1,1777-1795).
caggtcttctctaagctat

SEQ ID NO: 378507 - DNA, 19 bp, Homo sapiens
  siRNA target sequence for XPO5 (NM_020750.1,1873-1891).
gcttgttcctccatcatca

SEQ ID NO: 378508 - DNA, 19 bp, Homo sapiens
  siRNA target sequence for XPO5 (NM_020750.1,1874-1892).
cttgttcctccatcatcaa

SEQ ID NO: 378509 - DNA, 19 bp, Homo sapiens
  siRNA target sequence for XPO5 (NM_020750.1,1918-1936).
gtgctgcccaattttgaca

SEQ ID NO: 378510 - DNA, 19 bp, Homo sapiens
  siRNA target sequence for XPO5 (NM_020750.1,1972-1990).
gagctactcctgacacaaa

SEQ ID NO: 378511 - DNA, 19 bp, Homo sapiens
  siRNA target sequence for XPO5 (NM_020750.1,2020-2038).
gttctcattagcaaccaat

SEQ ID NO: 378512 - DNA, 19 bp, Homo sapiens
  siRNA target sequence for XPO5 (NM_020750.1,2023-2041).
ctcattagcaaccaattta

SEQ ID NO: 378513 - DNA, 19 bp, Homo sapiens
  siRNA target sequence for XPO5 (NM_020750.1,2215-2233).
cgtgcacgaatgagctttt

SEQ ID NO: 378514 - DNA, 19 bp, Homo sapiens
  siRNA target sequence for XPO5 (NM_020750.1,2294-2312).
ccaaagctgggggatttgt

SEQ ID NO: 378515 - DNA, 19 bp, Homo sapiens
  siRNA target sequence for XPO5 (NM_020750.1,2324-2342).
catccagtggaaatccaat

SEQ ID NO: 378516 - DNA, 19 bp, Homo sapiens
  siRNA target sequence for XPO5 (NM_020750.1,2398-2416).
cttataagaacccacaata

SEQ ID NO: 378517 - DNA, 19 bp, Homo sapiens
  siRNA target sequence for XPO5 (NM_020750.1,2405-2423).
gaacccacaatacattata

SEQ ID NO: 378518 - DNA, 19 bp, Homo sapiens
  siRNA target sequence for XPO5 (NM_020750.1,2409-2427).
ccacaatacattatatgca

SEQ ID NO: 378519 - DNA, 19 bp, Homo sapiens
  siRNA target sequence for XPO5 (NM_020750.1,2484-2502).
cgcggaaaaatctgctata

SEQ ID NO: 378520 - DNA, 19 bp, Homo sapiens
  siRNA target sequence for XPO5 (NM_020750.1,2486-2504).
cggaaaaatctgctatatt

SEQ ID NO: 378521 - DNA, 19 bp, Homo sapiens
  siRNA target sequence for XPO5 (NM_020750.1,2637-2655).
gcagcaagacttctatact

SEQ ID NO: 378522 - DNA, 19 bp, Homo sapiens
  siRNA target sequence for XPO5 (NM_020750.1,2732-2750).
ccatgcttcgtgtctttgt

SEQ ID NO: 378523 - DNA, 19 bp, Homo sapiens
  siRNA target sequence for XPO5 (NM_020750.1,2733-2751).
catgcttcgtgtctttgta

SEQ ID NO: 378524 - DNA, 19 bp, Homo sapiens
  siRNA target sequence for XPO5 (NM_020750.1,2963-2981).
gagaagtcatggacctaat

SEQ ID NO: 378525 - DNA, 19 bp, Homo sapiens
  siRNA target sequence for XPO5 (NM_020750.1,2965-2983).
gaagtcatggacctaatca

SEQ ID NO: 378526 - DNA, 19 bp, Homo sapiens
  siRNA target sequence for XPO5 (NM_020750.1,3098-3116).
cagacctgggcaaatgtct

SEQ ID NO: 378527 - DNA, 19 bp, Homo sapiens
  siRNA target sequence for XPO5 (NM_020750.1,3133-3151).
gtttgtacagcgctattaa

SEQ ID NO: 378528 - DNA, 19 bp, Homo sapiens
  siRNA target sequence for XPO5 (NM_020750.1,3221-3239).
ggcctctcctcaaacaagt

SEQ ID NO: 378529 - DNA, 19 bp, Homo sapiens
  siRNA target sequence for XPO5 (NM_020750.1,3265-3283).
gcagttacgtggcttttca

SEQ ID NO: 378530 - DNA, 19 bp, Homo sapiens
  siRNA target sequence for XPO5 (NM_020750.1,3381-3399).
caggtacctggagataaga

SEQ ID NO: 378531 - DNA, 19 bp, Homo sapiens
  siRNA target sequence for XPO5 (NM_020750.1,3408-3426).
ggagcaaatccctgaaata

SEQ ID NO: 378532 - DNA, 19 bp, Homo sapiens
  siRNA target sequence for XPO5 (NM_020750.1,3445-3463).
cagtttgactgcaagcttt

SEQ ID NO: 378533 - DNA, 19 bp, Homo sapiens
  siRNA target sequence for XPO5 (NM_020750.1,3497-3515).
gccgaaaggaccaattcaa

SEQ ID NO: 378534 - DNA, 19 bp, Homo sapiens
  siRNA target sequence for XPO5 (NM_020750.1,3498-3516).
ccgaaaggaccaattcaaa

SEQ ID NO: 378535 - DNA, 19 bp, Homo sapiens
  siRNA target sequence for XPO5 (NM_020750.1,3519-3537).
cctcattgctggttgcatt

SEQ ID NO: 378536 - DNA, 19 bp, Homo sapiens
  siRNA target sequence for XPO5 (NM_020750.1,3555-3573).
gcagttccgaaaagaagtt

SEQ ID NO: 378537 - DNA, 19 bp, Homo sapiens
  siRNA target sequence for XPO5 (NM_020750.1,3562-3580).
cgaaaagaagttcacatta

SEQ ID NO: 378538 - DNA, 19 bp, Homo sapiens
  siRNA target sequence for CASKIN2 (NM_020753.1,461-479).
gatcctcgccgtcaagaat

SEQ ID NO: 378539 - DNA, 19 bp, Homo sapiens
  siRNA target sequence for CASKIN2 (NM_020753.1,749-767).
cgcctctgcggctgtcaat

SEQ ID NO: 378540 - DNA, 19 bp, Homo sapiens
  siRNA target sequence for CASKIN2 (NM_020753.1,1069-1087).
gagctgggatcgagatcaa

SEQ ID NO: 378541 - DNA, 19 bp, Homo sapiens
  siRNA target sequence for CASKIN2 (NM_020753.1,1181-1199).
gaacatccggaatacgtat

SEQ ID NO: 378542 - DNA, 19 bp, Homo sapiens
  siRNA target sequence for CASKIN2 (NM_020753.1,1207-1225).
cggcgctggacatagtgaa

SEQ ID NO: 378543 - DNA, 19 bp, Homo sapiens
  siRNA target sequence for CASKIN2 (NM_020753.1,1210-1228).
cgctggacatagtgaatca

SEQ ID NO: 378544 - DNA, 19 bp, Homo sapiens
  siRNA target sequence for CASKIN2 (NM_020753.1,1212-1230).
ctggacatagtgaatcagt

SEQ ID NO: 378545 - DNA, 19 bp, Homo sapiens
  siRNA target sequence for CASKIN2 (NM_020753.1,1296-1314).
gtccgagcgctcaaggatt

SEQ ID NO: 378546 - DNA, 19 bp, Homo sapiens
  siRNA target sequence for CASKIN2 (NM_020753.1,1633-1651).
caggtgacaggaatagtgt

SEQ ID NO: 378547 - DNA, 19 bp, Homo sapiens
  siRNA target sequence for CASKIN2 (NM_020753.1,1907-1925).
ggacgcgcaggccattcat

SEQ ID NO: 378548 - DNA, 19 bp, Homo sapiens
  siRNA target sequence for CASKIN2 (NM_020753.1,1908-1926).
gacgcgcaggccattcata

SEQ ID NO: 378549 - DNA, 19 bp, Homo sapiens
  siRNA target sequence for CASKIN2 (NM_020753.1,1911-1929).
gcgcaggccattcataact

SEQ ID NO: 378550 - DNA, 19 bp, Homo sapiens
  siRNA target sequence for CASKIN2 (NM_020753.1,2691-2709).
cccccaccctatgttttta

SEQ ID NO: 378551 - DNA, 19 bp, Homo sapiens
  siRNA target sequence for CASKIN2 (NM_020753.1,2694-2712).
ccaccctatgtttttatgt

SEQ ID NO: 378552 - DNA, 19 bp, Homo sapiens
  siRNA target sequence for CASKIN2 (NM_020753.1,2695-2713).
caccctatgtttttatgta

SEQ ID NO: 378553 - DNA, 19 bp, Homo sapiens
  siRNA target sequence for CASKIN2 (NM_020753.1,2903-2921).
caccctaggcagttatgct

SEQ ID NO: 378554 - DNA, 19 bp, Homo sapiens
  siRNA target sequence for CASKIN2 (NM_020753.1,3092-3110).
ggagccacctccactagat

SEQ ID NO: 378555 - DNA, 19 bp, Homo sapiens
  siRNA target sequence for CASKIN2 (NM_020753.1,3970-3988).
cctccaccaagcacattct

SEQ ID NO: 378556 - DNA, 19 bp, Homo sapiens
  siRNA target sequence for raptor (NM_020761.1,635-653).
gtcgatgggtcctcagaaa

SEQ ID NO: 378557 - DNA, 19 bp, Homo sapiens
  siRNA target sequence for raptor (NM_020761.1,660-678).
gaaaccatcggtgcaaatt

SEQ ID NO: 378558 - DNA, 19 bp, Homo sapiens
  siRNA target sequence for raptor (NM_020761.1,664-682).
ccatcggtgcaaatttaca

SEQ ID NO: 378559 - DNA, 19 bp, Homo sapiens
  siRNA target sequence for raptor (NM_020761.1,792-810).
gagcgagtcctctttcact

SEQ ID NO: 378560 - DNA, 19 bp, Homo sapiens
  siRNA target sequence for raptor (NM_020761.1,796-814).
gagtcctctttcactacaa

SEQ ID NO: 378561 - DNA, 19 bp, Homo sapiens
  siRNA target sequence for raptor (NM_020761.1,1062-1080).
cctccgtcgatgaaaaact

SEQ ID NO: 378562 - DNA, 19 bp, Homo sapiens
  siRNA target sequence for raptor (NM_020761.1,1134-1152).
ctcccggctgacctattca

SEQ ID NO: 378563 - DNA, 19 bp, Homo sapiens
  siRNA target sequence for raptor (NM_020761.1,1225-1243).
ctggcgtcacactggattt

SEQ ID NO: 378564 - DNA, 19 bp, Homo sapiens
  siRNA target sequence for raptor (NM_020761.1,1227-1245).
ggcgtcacactggatttga

SEQ ID NO: 378565 - DNA, 19 bp, Homo sapiens
  siRNA target sequence for raptor (NM_020761.1,1232-1250).
cacactggatttgatagaa

SEQ ID NO: 378566 - DNA, 19 bp, Homo sapiens
  siRNA target sequence for raptor (NM_020761.1,1293-1311).
gaactgaactggatcttca

SEQ ID NO: 378567 - DNA, 19 bp, Homo sapiens
  siRNA target sequence for raptor (NM_020761.1,1385-1403).
gctggtggctagtctgttt

SEQ ID NO: 378568 - DNA, 19 bp, Homo sapiens
  siRNA target sequence for raptor (NM_020761.1,1389-1407).
gtggctagtctgtttcgaa

SEQ ID NO: 378569 - DNA, 19 bp, Homo sapiens
  siRNA target sequence for raptor (NM_020761.1,1391-1409).
ggctagtctgtttcgaaat

SEQ ID NO: 378570 - DNA, 19 bp, Homo sapiens
  siRNA target sequence for raptor (NM_020761.1,1668-1686).
gtcctgcaggtgctgttaa

SEQ ID NO: 378571 - DNA, 19 bp, Homo sapiens
  siRNA target sequence for raptor (NM_020761.1,1824-1842).
cggccacttctcgttttca

SEQ ID NO: 378572 - DNA, 19 bp, Homo sapiens
  siRNA target sequence for raptor (NM_020761.1,1827-1845).
ccacttctcgttttcatct

SEQ ID NO: 378573 - DNA, 19 bp, Homo sapiens
  siRNA target sequence for raptor (NM_020761.1,1896-1914).
gacaacggccacaagtact

SEQ ID NO: 378574 - DNA, 19 bp, Homo sapiens
  siRNA target sequence for raptor (NM_020761.1,1957-1975).
ggaccatgacggctttcat

SEQ ID NO: 378575 - DNA, 19 bp, Homo sapiens
  siRNA target sequence for raptor (NM_020761.1,1958-1976).
gaccatgacggctttcatt

SEQ ID NO: 378576 - DNA, 19 bp, Homo sapiens
  siRNA target sequence for raptor (NM_020761.1,1960-1978).
ccatgacggctttcattct

SEQ ID NO: 378577 - DNA, 19 bp, Homo sapiens
  siRNA target sequence for raptor (NM_020761.1,2405-2423).
ggccctgcagttcatagaa

SEQ ID NO: 378578 - DNA, 19 bp, Homo sapiens
  siRNA target sequence for raptor (NM_020761.1,2560-2578).
ggagcctcaacaaatcttt

SEQ ID NO: 378579 - DNA, 19 bp, Homo sapiens
  siRNA target sequence for raptor (NM_020761.1,2677-2695).
ccgagaatgaggagcatat

SEQ ID NO: 378580 - DNA, 19 bp, Homo sapiens
  siRNA target sequence for raptor (NM_020761.1,2756-2774).
cctcatcggagtttccttt

SEQ ID NO: 378581 - DNA, 19 bp, Homo sapiens
  siRNA target sequence for raptor (NM_020761.1,2757-2775).
ctcatcggagtttccttta

SEQ ID NO: 378582 - DNA, 19 bp, Homo sapiens
  siRNA target sequence for raptor (NM_020761.1,2762-2780).
cggagtttcctttaacagt

SEQ ID NO: 378583 - DNA, 19 bp, Homo sapiens
  siRNA target sequence for raptor (NM_020761.1,2842-2860).
cggacgtggccatgaaagt

SEQ ID NO: 378584 - DNA, 19 bp, Homo sapiens
  siRNA target sequence for raptor (NM_020761.1,3189-3207).
gatgctgctggacacaaaa

SEQ ID NO: 378585 - DNA, 19 bp, Homo sapiens
  siRNA target sequence for raptor (NM_020761.1,3192-3210).
gctgctggacacaaaagtt

SEQ ID NO: 378586 - DNA, 19 bp, Homo sapiens
  siRNA target sequence for raptor (NM_020761.1,3196-3214).
ctggacacaaaagtttcat

SEQ ID NO: 378587 - DNA, 19 bp, Homo sapiens
  siRNA target sequence for raptor (NM_020761.1,3198-3216).
ggacacaaaagtttcatct

SEQ ID NO: 378588 - DNA, 19 bp, Homo sapiens
  siRNA target sequence for raptor (NM_020761.1,3394-3412).
cgagattggacgaccaaat

SEQ ID NO: 378589 - DNA, 19 bp, Homo sapiens
  siRNA target sequence for raptor (NM_020761.1,3395-3413).
gagattggacgaccaaata

SEQ ID NO: 378590 - DNA, 19 bp, Homo sapiens
  siRNA target sequence for raptor (NM_020761.1,3397-3415).
gattggacgaccaaatatt

SEQ ID NO: 378591 - DNA, 19 bp, Homo sapiens
  siRNA target sequence for raptor (NM_020761.1,3522-3540).
ggggagaagctggattatt

SEQ ID NO: 378592 - DNA, 19 bp, Homo sapiens
  siRNA target sequence for raptor (NM_020761.1,4088-4106).
gatgcctgagtcggtaaat

SEQ ID NO: 378593 - DNA, 19 bp, Homo sapiens
  siRNA target sequence for raptor (NM_020761.1,4168-4186).
catgtggctccgtcaatca

SEQ ID NO: 378594 - DNA, 19 bp, Homo sapiens
  siRNA target sequence for raptor (NM_020761.1,4171-4189).
gtggctccgtcaatcagtt

SEQ ID NO: 378595 - DNA, 19 bp, Homo sapiens
  siRNA target sequence for raptor (NM_020761.1,4210-4228).
gcggagagctcatcaacaa

SEQ ID NO: 378596 - DNA, 19 bp, Homo sapiens
  siRNA target sequence for raptor (NM_020761.1,4317-4335).
ggaagcaacgactactaca

SEQ ID NO: 378597 - DNA, 19 bp, Homo sapiens
  siRNA target sequence for raptor (NM_020761.1,4318-4336).
gaagcaacgactactacat

SEQ ID NO: 378598 - DNA, 19 bp, Homo sapiens
  siRNA target sequence for CASKIN1 (NM_020764.1,201-219).
ggttccaccaagaagatca

SEQ ID NO: 378599 - DNA, 19 bp, Homo sapiens
  siRNA target sequence for CASKIN1 (NM_020764.1,202-220).
gttccaccaagaagatcaa

SEQ ID NO: 378600 - DNA, 19 bp, Homo sapiens
  siRNA target sequence for CASKIN1 (NM_020764.1,594-612).
ctgctcctcagcagcaata

SEQ ID NO: 378601 - DNA, 19 bp, Homo sapiens
  siRNA target sequence for CASKIN1 (NM_020764.1,599-617).
cctcagcagcaatatgtgt

SEQ ID NO: 378602 - DNA, 19 bp, Homo sapiens
  siRNA target sequence for CASKIN1 (NM_020764.1,818-836).
gctggatagcgggatcaat

SEQ ID NO: 378603 - DNA, 19 bp, Homo sapiens
  siRNA target sequence for CASKIN1 (NM_020764.1,960-978).
gcgaccaaggattattgca

SEQ ID NO: 378604 - DNA, 19 bp, Homo sapiens
  siRNA target sequence for CASKIN1 (NM_020764.1,1254-1272).
gaccgaagcggcagcatta

SEQ ID NO: 378605 - DNA, 19 bp, Homo sapiens
  siRNA target sequence for CASKIN1 (NM_020764.1,1795-1813).
gctacgagaacattgattt

SEQ ID NO: 378606 - DNA, 19 bp, Homo sapiens
  siRNA target sequence for CASKIN1 (NM_020764.1,1919-1937).
ggctgaatacgccaagtat

SEQ ID NO: 378607 - DNA, 19 bp, Homo sapiens
  siRNA target sequence for CASKIN1 (NM_020764.1,1966-1984).
cccagtctcttgaagtgat

SEQ ID NO: 378608 - DNA, 19 bp, Homo sapiens
  siRNA target sequence for CASKIN1 (NM_020764.1,2337-2355).
cacggccacagcatcaaga

SEQ ID NO: 378609 - DNA, 19 bp, Homo sapiens
  siRNA target sequence for CASKIN1 (NM_020764.1,3594-3612).
ccactgtccgtgtaccata

SEQ ID NO: 378610 - DNA, 19 bp, Homo sapiens
  siRNA target sequence for CASKIN1 (NM_020764.1,3595-3613).
cactgtccgtgtaccataa

SEQ ID NO: 378611 - DNA, 19 bp, Homo sapiens
  siRNA target sequence for KIAA1318 (NM_020769.1,249-267).
gtcaatacccttacattca

SEQ ID NO: 378612 - DNA, 19 bp, Homo sapiens
  siRNA target sequence for KIAA1318 (NM_020769.1,262-280).
cattcactgcgattcaaca

SEQ ID NO: 378613 - DNA, 19 bp, Homo sapiens
  siRNA target sequence for KIAA1318 (NM_020769.1,268-286).
ctgcgattcaacaatacaa

SEQ ID NO: 378614 - DNA, 19 bp, Homo sapiens
  siRNA target sequence for KIAA1318 (NM_020769.1,382-400).
gtacagttgcctatagtct

SEQ ID NO: 378615 - DNA, 19 bp, Homo sapiens
  siRNA target sequence for KIAA1318 (NM_020769.1,425-443).
ggacatccacacagttgat

SEQ ID NO: 378616 - DNA, 19 bp, Homo sapiens
  siRNA target sequence for KIAA1318 (NM_020769.1,476-494).
ctctaatgggagtaccaaa

SEQ ID NO: 378617 - DNA, 19 bp, Homo sapiens
  siRNA target sequence for KIAA1318 (NM_020769.1,605-623).
ccttagattctggaacatt

SEQ ID NO: 378618 - DNA, 19 bp, Homo sapiens
  siRNA target sequence for KIAA1318 (NM_020769.1,672-690).
gatgacaattcctgatttt

SEQ ID NO: 378619 - DNA, 19 bp, Homo sapiens
  siRNA target sequence for KIAA1318 (NM_020769.1,699-717).
gtccgcaacgctaatggta

SEQ ID NO: 378620 - DNA, 19 bp, Homo sapiens
  siRNA target sequence for KIAA1318 (NM_020769.1,784-802).
cctataatgagcacttcat

SEQ ID NO: 378621 - DNA, 19 bp, Homo sapiens
  siRNA target sequence for KIAA1318 (NM_020769.1,810-828).
ggcaatgtccacaccatta

SEQ ID NO: 378622 - DNA, 19 bp, Homo sapiens
  siRNA target sequence for KIAA1318 (NM_020769.1,816-834).
gtccacaccattaatgcta

SEQ ID NO: 378623 - DNA, 19 bp, Homo sapiens
  siRNA target sequence for KIAA1318 (NM_020769.1,859-877).
ccaattctaatgcaagata

SEQ ID NO: 378624 - DNA, 19 bp, Homo sapiens
  siRNA target sequence for KIAA1318 (NM_020769.1,933-951).
gtccccattgcaaattaca

SEQ ID NO: 378625 - DNA, 19 bp, Homo sapiens
  siRNA target sequence for KIAA1318 (NM_020769.1,972-990).
gtccaaagtgctaatgact

SEQ ID NO: 378626 - DNA, 19 bp, Homo sapiens
  siRNA target sequence for KIAA1318 (NM_020769.1,994-1012).
ctagcctctggagagatat

SEQ ID NO: 378627 - DNA, 19 bp, Homo sapiens
  siRNA target sequence for KIAA1318 (NM_020769.1,1036-1054).
gactctgaagcaatatcct

SEQ ID NO: 378628 - DNA, 19 bp, Homo sapiens
  siRNA target sequence for KIAA1318 (NM_020769.1,1046-1064).
caatatcctcactgataat

SEQ ID NO: 378629 - DNA, 19 bp, Homo sapiens
  siRNA target sequence for KIAA1318 (NM_020769.1,1134-1152).
cccgctcatgtcagatcta

SEQ ID NO: 378630 - DNA, 19 bp, Homo sapiens
  siRNA target sequence for KIAA1318 (NM_020769.1,1136-1154).
cgctcatgtcagatctaga

SEQ ID NO: 378631 - DNA, 19 bp, Homo sapiens
  siRNA target sequence for KIAA1318 (NM_020769.1,1150-1168).
ctagactctggaataatgt

SEQ ID NO: 378632 - DNA, 19 bp, Homo sapiens
  siRNA target sequence for KIAA1318 (NM_020769.1,1167-1185).
gtcatcgcttttaatgtca

SEQ ID NO: 378633 - DNA, 19 bp, Homo sapiens
  siRNA target sequence for KIAA1318 (NM_020769.1,1187-1205).
ctccaggctctgaagtaat

SEQ ID NO: 378634 - DNA, 19 bp, Homo sapiens
  siRNA target sequence for KIAA1318 (NM_020769.1,1365-1383).
cccatggtcaacacaaaat

SEQ ID NO: 378635 - DNA, 19 bp, Homo sapiens
  siRNA target sequence for KIAA1318 (NM_020769.1,1367-1385).
catggtcaacacaaaatgt

SEQ ID NO: 378636 - DNA, 19 bp, Homo sapiens
  siRNA target sequence for KIAA1318 (NM_020769.1,1448-1466).
caccagtaagagctttaga

SEQ ID NO: 378637 - DNA, 19 bp, Homo sapiens
  siRNA target sequence for KIAA1318 (NM_020769.1,1450-1468).
ccagtaagagctttagatt

SEQ ID NO: 378638 - DNA, 19 bp, Homo sapiens
  siRNA target sequence for KIAA1318 (NM_020769.1,1674-1692).
gcccacaggctctatgaaa

SEQ ID NO: 378639 - DNA, 19 bp, Homo sapiens
  siRNA target sequence for KIAA1318 (NM_020769.1,1874-1892).
cccctgtctctgaagcaat

SEQ ID NO: 378640 - DNA, 19 bp, Homo sapiens
  siRNA target sequence for KIAA1318 (NM_020769.1,1914-1932).
catggcctcaggattgaca

SEQ ID NO: 378641 - DNA, 19 bp, Homo sapiens
  siRNA target sequence for KIAA1318 (NM_020769.1,2113-2131).
gcctcaggaacgatgttca

SEQ ID NO: 378642 - DNA, 19 bp, Homo sapiens
  siRNA target sequence for KIAA1318 (NM_020769.1,2123-2141).
cgatgttcacggagaaaat

SEQ ID NO: 378643 - DNA, 19 bp, Homo sapiens
  siRNA target sequence for KIAA1318 (NM_020769.1,2244-2262).
gtctgcatcgctaatgaga

SEQ ID NO: 378644 - DNA, 19 bp, Homo sapiens
  siRNA target sequence for KIAA1318 (NM_020769.1,2356-2374).
gtaatgcctgcctcactaa

SEQ ID NO: 378645 - DNA, 19 bp, Homo sapiens
  siRNA target sequence for KIAA1318 (NM_020769.1,2361-2379).
gcctgcctcactaatgaga

SEQ ID NO: 378646 - DNA, 19 bp, Homo sapiens
  siRNA target sequence for KIAA1318 (NM_020769.1,2676-2694).
gagatccccagcttatgga

SEQ ID NO: 378647 - DNA, 19 bp, Homo sapiens
  siRNA target sequence for KIAA1318 (NM_020769.1,2696-2714).
ccatgtctgctccacaaat
